United States Patent Application Publication US 2025/0222082 A1 - sequence listing, part 6

SEQ ID NO: 36216 - DNA, 33 bp, synthetic construct
  source 1..33: mol_type = other DNA
ctgcagaccatcttcaagacctgcgcaatcggc

SEQ ID NO: 36217 - DNA, 294 bp, synthetic construct
  source 1..294: mol_type = other DNA
caggccgctgatattggcggcgtgccaaacgagctcaaagctaattatatggacgctaatggcctgccctactttagcgagatggactcctatttcaacctgcggatgacacaggactacatggaccacggctatttcggcgataccctggtcaacggctccggatgggacatgcactcatactacccaagcgggcgggacgtcggatcttaccaaccaatgatcgcctacgtgacttctttcatgtatggcctcatcaacatgttccaagatatgtccctgaccgaagttgcc

SEQ ID NO: 36218 - DNA, 168 bp, synthetic construct
  source 1..168: mol_type = other DNA
ggcattggcggaatcttcgatgcgattagcggactgacaggggggttctccctgctgaccgcctctcacgatgtttggccgaacgtctttgttagtgttgctgagatgcagaagcccaacctgctgttcggcggcctacctggttcttttctcgcaaatactaacggt

SEQ ID NO: 36219 - DNA, 252 bp, synthetic construct
  source 1..252: mol_type = other DNA
acaaacataacaagcgaggacttcaccattgttggtcatattaaaaaggacactccgatatccgctagggccgacgtgtccggcaaccgggtcacactgaccgtgaacattgacgagaacgcaacaggattcgttaggctagccgttggcggaactgtggccaacatcgaggttgttgacggcgtggccaaactcacaactaacctgctgcctaactcttacttcgtcgaggtcacttacctgggagacgac

SEQ ID NO: 36220 - DNA, 102 bp, synthetic construct
  source 1..102: mol_type = other DNA
aaatttggcgacaatgtctttaacattgcacttaccgacggggttgggacacttaccactagcctcccctacgggaattatagcctcgatatcacgtacctg

SEQ ID NO: 36221 - DNA, 294 bp, synthetic construct
  source 1..294: mol_type = other DNA
cagagcgctgacattggcggcgtcccaaatgatctgaaggcctattactccgacgccaacggactgccctactttagcgagatggacagttactttaactatcgaatgaccgaggattacatggaccacggctacttcggcgacacactagttaacggttctggctgggatatgcatagctattatccttccggtcgggacgtcggctcttaccaaccgatgatcgcctacgtgacctccgcactttacggtcttttcaacatgtttcaatcaatgtccctgcttgaagttgcc

SEQ ID NO: 36222 - DNA, 30 bp, synthetic construct
  source 1..30: mol_type = other DNA
agccacaccttcgccggctttttcgacact

SEQ ID NO: 36223 - DNA, 168 bp, synthetic construct
  source 1..168: mol_type = other DNA
gggttcaacggcgtattgaccggaatcggtggactgacgggcggattctccctgcaatccgccgccaacaacgtttggccaaatgtcctgatctctgtggctgagatgcagattcctagccttgtgaccggcggactggtcggctcctttctcgccaacactggagga

SEQ ID NO: 36224 - DNA, 48 bp, synthetic construct
  source 1..48: mol_type = other DNA
agccagtacacaaatacccagaacaccaacactcagaccacagtggag

SEQ ID NO: 36225 - DNA, 159 bp, synthetic construct
  source 1..159: mol_type = other DNA
gggaacaccgctatctatctaagctcggagaataagaccagcacaatcaagactggcatcttccttaagaataccggaatcaatggcggcgccatttataatgttggcaagctgaacctgaacaagacctacttcaactccaactctgtcactaaggat

SEQ ID NO: 36226 - DNA, 30 bp, synthetic construct
  source 1..30: mol_type = other DNA
aacgccgatagcaagggaggcgctatctac

SEQ ID NO: 36227 - DNA, 63 bp, synthetic construct
  source 1..63: mol_type = other DNA
aagggcaccctgtacttgtcccaaaactccttcaagactaataaggccataggaacaggcaac

SEQ ID NO: 36228 - DNA, 54 bp, synthetic construct
  source 1..54: mol_type = other DNA
accttgacggtcaagtatagccagttcacaaacaataacgtgaatacctacggc

SEQ ID NO: 36229 - DNA, 33 bp, synthetic construct
  source 1..33: mol_type = other DNA
actcggaccaattacgtgtataacagcacattc

SEQ ID NO: 36230 - DNA, 72 bp, synthetic construct
  source 1..72: mol_type = other DNA
aattatgctagcaccggcggtgcaatatatgtgaacggggccggagccgtgatcaacaaggtcttttttaaa

SEQ ID NO: 36231 - DNA, 33 bp, synthetic construct
  source 1..33: mol_type = other DNA
ttccagaacattctggacatccccgtttgttgg

SEQ ID NO: 36232 - DNA, 30 bp, synthetic construct
  source 1..30: mol_type = other DNA
tttgcctccacaaccagcgtgttctacctg

SEQ ID NO: 36233 - DNA, 36 bp, synthetic construct
  source 1..36: mol_type = other DNA
ccacacccacggaagcttcgcgatcctaggccttgc

SEQ ID NO: 36234 - DNA, 60 bp, synthetic construct
  source 1..60: mol_type = other DNA
cctcacctgcggggaatcccaggcgaccccttgcctgctggaagtgttgatccggctcac

SEQ ID NO: 36235 - DNA, 108 bp, synthetic construct
  source 1..108: mol_type = other DNA
cggagccggctgcgcgacctgcacaaccaccagggccaaggagaacctcggcctcggaacgtgcagcgcagatgccaccggtgccgcgaccataagtgtcagagatac

SEQ ID NO: 36236 - DNA, 51 bp, synthetic construct
  source 1..51: mol_type = other DNA
caccctgctggacgaaaactgctcgacgatccagggatcaggttcagaccg

SEQ ID NO: 36237 - DNA, 36 bp, synthetic construct
  source 1..36: mol_type = other DNA
ggccatctatgccggccgcgacctcatgcaccgccc

SEQ ID NO: 36238 - DNA, 54 bp, synthetic construct
  source 1..54: mol_type = other DNA
tctccgcctggtggaacagcaccaccttcctctggcacccccaccgcatgtggg

SEQ ID NO: 36239 - DNA, 249 bp, synthetic construct
  source 1..249: mol_type = other DNA
agtatagtctcaaagctcatcaacatcaaccccgtcaagaccgctctctctctgtctctgtccaaggacgtcctgttcgtcggcgatagcctgtctgtgaaggcaagcgtcaatgcgacccagggcaaggttatgttctacctgaacgacgtgcttaagggcacagtgaatgtggatagcaagggaatggcctccattgtgctcaaagacctgtcctacgggacttataatctgaacgccaagttctcc

SEQ ID NO: 36240 - DNA, 42 bp, synthetic construct
  source 1..42: mol_type = other DNA
agcaaggaaaacgagggattggcggtccccgacgaacagaat

SEQ ID NO: 36241 - DNA, 225 bp, synthetic construct
  source 1..225: mol_type = other DNA
atcgctgggttgctccaagagctcgataagcagggatacacagtcgagaacgtgcctgagaatggcaggcagatgattgaggagatcctcgatggagtcaccaacgacctggactccatgtccgtggccaccatgcgcgagaaggccgtggacctggtcccttctgggacttaccgcaaacagttcgagtccataccatcatgggaccaggagcagatgatcaag

SEQ ID NO: 36242 - DNA, 51 bp, synthetic construct
  source 1..51: mol_type = other DNA
atgccaccgtcgatggcccgagccggagaatacgaggaactgtccgagatg

SEQ ID NO: 36243 - DNA, 141 bp, synthetic construct
  source 1..141: mol_type = other DNA
gtcccactacaagactattttactctcaaagggaacgcaagcccggagaggaaaaaggagctgattaatcagatctacctgtccgcgaaggaacacgacatgtttaatgatttgaacattgcaaaggacccaggcgctgag

SEQ ID NO: 36244 - DNA, 42 bp, synthetic construct
  source 1..42: mol_type = other DNA
ggcgtggatatgcaggacgccctggatgatccaaccggaaag

SEQ ID NO: 36245 - DNA, 63 bp, synthetic construct
  source 1..63: mol_type = other DNA
aacacacagaccgggatcgacgagctggaaaagagatacgggaaggtgtccagcgatctgaaa

SEQ ID NO: 36246 - DNA, 42 bp, synthetic construct
  source 1..42: mol_type = other DNA
gaccagatgatcgaaaaatacgtgtccgagaagggcgagttc

SEQ ID NO: 36247 - DNA, 36 bp, synthetic construct
  source 1..36: mol_type = other DNA
aacttagtcatcggtctggacgagagcgatgaagac

SEQ ID NO: 36248 - DNA, 45 bp, synthetic construct
  source 1..45: mol_type = other DNA
aaggacatcgtggacggcattgctgaaggcctcactcctgatgaa

SEQ ID NO: 36249 - DNA, 48 bp, synthetic construct
  source 1..48: mol_type = other DNA
gcctggaagaccgtcgaggacctggctgacgtgtacatcgattggtgc

SEQ ID NO: 36250 - DNA, 90 bp, synthetic construct
  source 1..90: mol_type = other DNA
ctgttcaagggctggggaaacaacccttccgtgtttttcacaactaccctgctgcactctacaagcaatccctatggccttacctacctg

SEQ ID NO: 36251 - DNA, 69 bp, synthetic construct
  source 1..69: mol_type = other DNA
cagcttccgggaagtcggaccgggctgatggccctctttaatcccaactgggagtacctgctcgacttc

SEQ ID NO: 36252 - DNA, 111 bp, synthetic construct
  source 1..111: mol_type = other DNA
ggtcacatggcattaggcaagaatattcccataaccagcctcgtgtctgacgggttttcccttatcttcgtggtctttcccaacgtgttcaatgtcatagggtcctggagt

SEQ ID NO: 36253 - DNA, 42 bp, synthetic construct
  source 1..42: mol_type = other DNA
ggcatcaaccctctgttcgcgacgattgggtcgttccaattg

SEQ ID NO: 36254 - DNA, 36 bp, synthetic construct
  source 1..36: mol_type = other DNA
ctggccagtggaaccgcgaacgcaggtgcaaaggct

SEQ ID NO: 36255 - DNA, 33 bp, synthetic construct
  source 1..33: mol_type = other DNA
ctgcaggacattttcaagacatgccctatcgga

SEQ ID NO: 36256 - DNA, 33 bp, synthetic construct
  source 1..33: mol_type = other DNA
tacttcaacactgagacagagctgaccgacgat

SEQ ID NO: 36257 - DNA, 108 bp, synthetic construct
  source 1..108: mol_type = other DNA
cctgcagttggaattagtcccgatggctacgattttaccaacgcctctgaggctgtgctgtccggcaagccacttgactcgatcgactctctcttaccggtcgccgtg

SEQ ID NO: 36258 - DNA, 54 bp, synthetic construct
  source 1..54: mol_type = other DNA
atcacccctctctgggaggccatctccggttgcacggaccttctgagcattcct

SEQ ID NO: 36259 - DNA, 36 bp, synthetic construct
  source 1..36: mol_type = other DNA
aacattagcatcatcttcgacctgtccaagttgccc

SEQ ID NO: 36260 - DNA, 228 bp, synthetic construct
  source 1..228: mol_type = other DNA
atgattgtggataacctgaagcggcctatgactaacatcagcgtgtcctacaagatcgacggcaatgtgaccgagacgacaacggacgaaaaggggcagatcttcattcccgtcgacaacatgaagccagacacatacaaaatcgacgtccagtacaagggcgagggcaattatcacgccatggacaaggatatcaccctgctcattaacaagggcatcaccaagctc

SEQ ID NO: 36261 - DNA, 99 bp, synthetic construct
  source 1..99: mol_type = other DNA
ctggtcattacgcttaccgataacattggccgcgcactcaagggcttcaacgtatcagccgagctgaacggaaccgagaattacacgactgataagcac

SEQ ID NO: 36262 - DNA, 72 bp, synthetic construct
  source 1..72: mol_type = other DNA
actgctaagatcgttgtaaataaaattaaaaccaagttgacagcaaattccgtggccaccttctacaacatc

SEQ ID NO: 36263 - DNA, 51 bp, synthetic construct
  source 1..51: mol_type = other DNA
ctcattgatgcattcgggaatccaatgagcaacgccacggttagcgttaac

SEQ ID NO: 36264 - DNA, 168 bp, synthetic construct
  source 1..168: mol_type = other DNA
actgccgaggtggtcgtcaacgctagtaattccaagctgattgtgacctctctgacaaccgactacaattccggggaggaatttgtggtcaagctgatcgacaacctcgggaatcccgtagtcggagaaacactctacttcacactgcacgccaccaacaacatcaca

SEQ ID NO: 36265 - DNA, 42 bp, synthetic construct
  source 1..42: mol_type = other DNA
gacaatgaggagaaccccctgtccggcatctctgtttctgtg

SEQ ID NO: 36266 - DNA, 54 bp, synthetic construct
  source 1..54: mol_type = other DNA
gccacctccaagatcattgtcaataagcagagcgctacactgactgcaaacacc

SEQ ID NO: 36267 - DNA, 54 bp, synthetic construct
  source 1..54: mol_type = other DNA
atcaccctgaagaacgaccagggctcacctattagcggcgttcgagtattcgtg

SEQ ID NO: 36268 - DNA, 51 bp, synthetic construct
  source 1..51: mol_type = other DNA
accaagctgacggttgactccatgaccaactccacgaaccttatcgtgtct

SEQ ID NO: 36269 - DNA, 48 bp, synthetic construct
  source 1..48: mol_type = other DNA
accctgaaagacggcgaaggaaagcccatcaagtccgctgcaaacgtt

SEQ ID NO: 36270 - DNA, 108 bp, synthetic construct
  source 1..108: mol_type = other DNA
gttgggtccgactcttacggcgtggtggtcgtcaagaagatcaccagcaagctgacagccaatgccaaggctttcaaggtcaagacgaagactaagaagtacaacgtc

SEQ ID NO: 36271 - DNA, 168 bp, synthetic construct
  source 1..168: mol_type = other DNA
actatggagcattggatggacggcgccttcgaactggcacccagttaccaggagatctgcgagcggctgaacatgacaatggagcaagtatactcaaagctgtccatcgaaggtagccctgaccacctagtaccagttgatctgcaacatacggccgagattaacgcc

SEQ ID NO: 36272 - DNA, 42 bp, synthetic construct
  source 1..42: mol_type = other DNA
cctgaagtatacgtgacagtcgccgaaacactgcccgtcggc

SEQ ID NO: 36273 - DNA, 96 bp, synthetic construct
  source 1..96: mol_type = other DNA
atcatcaacgggaccagttctattgacggagctctgttcgaggagaactttgcaaactacggcggcgatagcattcactccatctcgaccgcccta

SEQ ID NO: 36274 - DNA, 195 bp, synthetic construct
  source 1..195: mol_type = other DNA
acattcaacgtgaccgtcctggacggccagggcaagcctctggccaatgtggctgtccggtttaacatcaatggagtcttctatactaagcataccgactcgaaagggattgccaagctgaacatcaacctgatgtccggcaaatacatcatcacatctgaatacgatggcctcaaaatctccaacaccattacc

SEQ ID NO: 36275 - DNA, 138 bp, synthetic construct
  source 1..138: mol_type = other DNA
tggtgcggcttcgttgggagttctggcttcgagaacgcggtgacaggaatgatggattccgtcgacctcacccgggacgctctgctggacaagctggagatcaagcaggacgacagtagctgggagcacgctgttagc

SEQ ID NO: 36276 - DNA, 33 bp, synthetic construct
  source 1..33: mol_type = other DNA
tgcatccgggtgaccagcctgtttatgttcccc

SEQ ID NO: 36277 - DNA, 39 bp, synthetic construct
  source 1..39: mol_type = other DNA
aacagcttctttaacaataataagggctccgctgtttac

SEQ ID NO: 36278 - DNA, 150 bp, synthetic construct
  source 1..150: mol_type = other DNA
gcccagaacaatctgatttattcaagccgctttactaagaactccgggacctacggtggcgcggtccgtaattactactctacactcatcatgaaccgcaactacataagtgccaactccgccacctacggaggcgccattttctcaagc

SEQ ID NO: 36279 - DNA, 126 bp, synthetic construct
  source 1..126: mol_type = other DNA
gagatcttcgacattgagggcatgatggacatgtacgaggatttggctgaacgtctcggatattctaactactccgatatggctgccagcctggatcttggtaccgagtaccgcgaggttgttgcc

SEQ ID NO: 36280 - DNA, 48 bp, synthetic construct
  source 1..48: mol_type = other DNA
cccgaagtgtctgtcaaaatcggactcaccctgcctctgaccgtaact

SEQ ID NO: 36281 - DNA, 45 bp, synthetic construct
  source 1..45: mol_type = other DNA
ggaatcaacccgctgttcgccaccattggttcctcgcaatttctt

SEQ ID NO: 36282 - DNA, 132 bp, synthetic construct
  source 1..132: mol_type = other DNA
tacaaccccggcttgatgacctttgactctttcaaccaagtgcaccaaatcgcctccggtcgatatacaaattggcacccattcttccacactttcatcgaaatgctgctctataaaatctactcctcacct

SEQ ID NO: 36283 - DNA, 33 bp, synthetic construct
  source 1..33: mol_type = other DNA
tttaccaccggcttcaacttcgtgatcttgcct

SEQ ID NO: 36284 - DNA, 243 bp, synthetic construct
  source 1..243: mol_type = other DNA
gacagctctggactgccatatttctccgagatggattcttattataatttgcgcctaaccgaggactacatcgatcacggattcgttggggatgaacagatcaacgggtctaattgggacatgcatcggttggcgccggacggcaacgcaatcaactacgaactgggcattgtgcatgtgacctctttccttcacgacctcgcaaacaagtactttgggaaccacagtgtcaaggaagtcgct

SEQ ID NO: 36285 - DNA, 171 bp, synthetic construct
  source 1..171: mol_type = other DNA
atcgagggggtcaccgggctgtttggttccttgttctcgcttctctccttgcaatccgcctcccgcgttgtcggagggttccccaacgtgctggtcagcgtcgctgagatgcagattccatctatgctcggtggcggcatgaacagcatgtttctcgctaatactaacggt

SEQ ID NO: 36286 - DNA, 126 bp, synthetic construct
  source 1..126: mol_type = other DNA
tgcattggtagtcacacaactctcggcgttggggaagctctctctgctaccgcatccgccattggcaagggaggccacgggctgacctatgaggaaatgctgatctacaaccagagacttcctaga

SEQ ID NO: 36287 - DNA, 45 bp, synthetic construct
  source 1..45: mol_type = other DNA
gccgacttcaccttctttggcctgtttcctagtcaatccatctac

SEQ ID NO: 36288 - DNA, 66 bp, synthetic construct
  source 1..66: mol_type = other DNA
ctctataaccgctaccacaccgtgaagctgcccgagtacctgggcttctttggaggaaggagattc

SEQ ID NO: 36289 - DNA, 42 bp, synthetic construct
  source 1..42: mol_type = other DNA
ggcattaaccctctgttcgctactattgggagctttcaactg

SEQ ID NO: 36290 - DNA, 93 bp, synthetic construct
  source 1..93: mol_type = other DNA
actttcgaaaacaacgtgaagaacgccatctattcctacgattcaaacctgagtgtcgagaacactaacttttccgagaacacacaggcaatc

SEQ ID NO: 36291 - DNA, 237 bp, synthetic construct
  source 1..237: mol_type = other DNA
cagttctacatttacctgatcgatggcgaaggcaactccgttgtcggagtcaatatcactatgaatatcaacggcgtgttctacaaccggaccacaaacgagaatggcagcgccaggctgaacatcaacctcatacccggggagtacatcttgactgcgactgacccactgacctgcctgaagatgtcttataacattaccgtgctgcctgttttgacggcagacgacatccacatg

SEQ ID NO: 36292 - DNA, 135 bp, synthetic construct
  source 1..135: mol_type = other DNA
accgccttcaaagctaagctggtcgacgggatgggaaacgcactggccaatattgggatcatcttcaacattaacggcgtgttctacacaaagtatacgaactcgagcggcgtggcttgcctcaacatcaacctc

SEQ ID NO: 36293 - DNA, 63 bp, synthetic construct
  source 1..63: mol_type = other DNA
gaatatatcatcacaagccaatacgagtcggcccaaattagtaacaagatcaccatctcctct

SEQ ID NO: 36294 - DNA, 36 bp, synthetic construct
  source 1..36: mol_type = other DNA
tacaccgacctcctgaacgagggcgtattgtggctg

SEQ ID NO: 36295 - DNA, 162 bp, synthetic construct
  source 1..162: mol_type = other DNA
cccgagtttgataccatcgattttgtgctgatcaataagaacaacctgaccatcaacgggaatggacacacaatcaacggcctaaatcagtctcggatattcgagatagatgccgagaacgtgacactggatagcctgaattttatcaacggtaccagcaaa

SEQ ID NO: 36296 - DNA, 30 bp, synthetic construct
  source 1..30: mol_type = other DNA
atcatggaccctgccctggttgctgaaggg

SEQ ID NO: 36297 - DNA, 30 bp, synthetic construct
  source 1..30: mol_type = other DNA
ctgagcatcgggaccgagcagagacttgcg

SEQ ID NO: 36298 - DNA, 36 bp, synthetic construct
  source 1..36: mol_type = other DNA
gtcctgcaagaaatcttccggaccacaagcattccc

SEQ ID NO: 36299 - DNA, 48 bp, synthetic construct
  source 1..48: mol_type = other DNA
gacgacctgatacacagtggcgttaaggagatcatcctcgattccgac

SEQ ID NO: 36300 - DNA, 51 bp, synthetic construct
  source 1..51: mol_type = other DNA
atcaccattaaaaatatcacattcaagaacggttatactaccgacgaagga

SEQ ID NO: 36301 - DNA, 30 bp, synthetic construct
  source 1..30: mol_type = other DNA
ctgagcaagggcagctctcaattattagcc

SEQ ID NO: 36302 - DNA, 33 bp, synthetic construct
  source 1..33: mol_type = other DNA
ctgcagaacatcttccacacaaccgccattccc

SEQ ID NO: 36303 - DNA, 45 bp, synthetic construct
  source 1..45: mol_type = other DNA
ggaatcaaccccctgttcgccacgattggctcttttcaattgtcc

SEQ ID NO: 36304 - DNA, 48 bp, synthetic construct
  source 1..48: mol_type = other DNA
atgggcctgacacatcagatacaccagtccgttggcatcgacattagc

SEQ ID NO: 36305 - DNA, 57 bp, synthetic construct
  source 1..57: mol_type = other DNA
ctcaacgagaacgtcgtattaaccgtgaacaacaagaagtacaccttcaaggctaac

SEQ ID NO: 36306 - DNA, 33 bp, synthetic construct
  source 1..33: mol_type = other DNA
gacgccgactcctactccgctgtcgtgaccttc

SEQ ID NO: 36307 - DNA, 189 bp, synthetic construct
  source 1..189: mol_type = other DNA
aacagcgcctccaagaacacagacttcatcgtgtctaagaacgacgtcaacattgacctctctgtgtccaatgccacttacggcgagaagattatcgtcaaaaccttcctgagcgatctcaagggcaatctgatcaacgagaagcttaagctcgagatcgctgggaacttatacgaaatcacctctaat

SEQ ID NO: 36308 - DNA, 45 bp, synthetic construct
  source 1..45: mol_type = other DNA
gtcatcctgaacgcctccaaatatgacgtcaaggtatcattcgag

SEQ ID NO: 36309 - DNA, 33 bp, synthetic construct
  source 1..33: mol_type = other DNA
gacgccagcacctaccccgtcaacatcctgttc

SEQ ID NO: 36310 - DNA, 183 bp, synthetic construct
  source 1..183: mol_type = other DNA
agccaatacgtgaacgtgaatgttggcaaaactgacccgaaattagtgatcaatgttagtgacatcgaatatggttctgacgtggttatcaagaacgccttaaccggtatcaataacgccgatatatatgccgtactgagtctcgtcgtgaacgacaagaaatatgcaatcaccagtaatggg

SEQ ID NO: 36311 - DNA, 36 bp, synthetic construct
  source 1..36: mol_type = other DNA
gacgtcggaaagtacagcgccgatatcaccttcgac

SEQ ID NO: 36312 - DNA, 129 bp, synthetic construct
  source 1..129: mol_type = other DNA
gcctcccggtactctgtgaaggtcctggacgagaagggctcaccattagccggcgtttctgtctcttttaacatcaacggcgtcttctatgagcgcaagaccaacagtgatggggttgcttccctgaat

SEQ ID NO: 36313 - DNA, 225 bp, synthetic construct
  source 1..225: mol_type = other DNA
gactacatcattactgccgaatatgacgggtcccgagtctccaataacatcaaggtgctgaacgtcatcaaaaccggcgacgtcgtcatgaagtaccgggatgggacaaggttcggagctaccatcctggacaaccacgggtacccctaccctaatcaatgcgttagattcaatattaacggcgtgttctacacaagaatcaccgacctcaacggagtggcaaac

SEQ ID NO: 36314 - DNA, 66 bp, synthetic construct
  source 1..66: mol_type = other DNA
aagtatatcattacctccatgtacaacggcttgtcggtatctaacacaatcctgatcaacaacctg

SEQ ID NO: 36315 - DNA, 48 bp, synthetic construct
  source 1..48: mol_type = other DNA
atggggctaacagactctatcaagcagtccaccgggatcaacatctcc

SEQ ID NO: 36316 - DNA, 48 bp, synthetic construct
  source 1..48: mol_type = other DNA
atggggctgacacacagcatacaccaagcaacaggcatcaacatcagc

SEQ ID NO: 36317 - DNA, 51 bp, synthetic construct
  source 1..51: mol_type = other DNA
ctcatgggagtcacccattctatcaaagatgctaccggcatcgacatttct

SEQ ID NO: 36318 - DNA, 51 bp, synthetic construct
  source 1..51: mol_type = other DNA
ctcatgggagttacacactccatccacgaggccaccggcctgcatatcagt

SEQ ID NO: 36319 - DNA, 51 bp, synthetic construct
  source 1..51: mol_type = other DNA
ctcgcgggtatcgtcaatagcttaaatcaagccacaggcctggatgtgtcc

SEQ ID NO: 36320 - DNA, 48 bp, synthetic construct
  source 1..48: mol_type = other DNA
atgggcctgacacacagcattcatgaggctaccgggctcaacatctct

SEQ ID NO: 36321 - DNA, 45 bp, synthetic construct
  source 1..45: mol_type = other DNA
gggattgtgcatagcctgaatcacgccaccggccttaacatctca

SEQ ID NO: 36322 - DNA, 51 bp, synthetic construct
  source 1..51: mol_type = other DNA
atgggccttagccatgctatccacgaggccaccggactgtcccatagcgta

SEQ ID NO: 36323 - DNA, 45 bp, synthetic construct
  source 1..45: mol_type = other DNA
gggatcgtgcactctattaatcatagtaccggcctgaacatctcc

SEQ ID NO: 36324 - DNA, 48 bp, synthetic construct
  source 1..48: mol_type = other DNA
atggggcttacgcactcaatacatcaagcgacaggcctgcatatctct

SEQ ID NO: 36325 - DNA, 48 bp, synthetic construct
  source 1..48: mol_type = other DNA
atgggcctgacccacggcattcacaaggccacagggctgcatatctcg

SEQ ID NO: 36326 - DNA, 45 bp, synthetic construct
  source 1..45: mol_type = other DNA
ggcattgttcattcaatcaaccacgccaccggactgcatatctcc

SEQ ID NO: 36327 - DNA, 48 bp, synthetic construct
  source 1..48: mol_type = other DNA
atggggctgacacacggcctacatcaaagcactggactgcacatctcc

SEQ ID NO: 36328 - DNA, 54 bp, synthetic construct
  source 1..54: mol_type = other DNA
cctctcagcggcatcgctcacccattgcaccaagcgactggtctgcatatctca

SEQ ID NO: 36329 - DNA, 51 bp, synthetic construct
  source 1..51: mol_type = other DNA
cttgttggaatagcgcaccagctgcaccaagctacgggcctgcacatctca

SEQ ID NO: 36330 - DNA, 231 bp, synthetic construct
  source 1..231: mol_type = other DNA
accataaattccactatcatcaccgtgaccgtgaccctgaacaaggcaaatataaccgctaaagacatgacccttaacgtcggagaaaactctacaatcgagtacacgaccaccccggcggatctgaacgtttcttttgtgcccgacgattccgggatagtgaaggtgtctgataacggcactgttaccgccctcaaggagggaacagccaatattactattactgttggg

SEQ ID NO: 36331 - DNA, 48 bp, synthetic construct
  source 1..48: mol_type = other DNA
atggggctgacacaccagattcacgagagcaccggcatcgacatctct

SEQ ID NO: 36332 - DNA, 48 bp, synthetic construct
  source 1..48: mol_type = other DNA
atgggcctgacacaccagattcacgagtccaccgggatcgacatcagc

SEQ ID NO: 36333 - DNA, 48 bp, synthetic construct
  source 1..48: mol_type = other DNA
atgggcctgacacatcagttgcatcaaagcactgggatcgacatttcc

SEQ ID NO: 36334 - DNA, 51 bp, synthetic construct
  source 1..51: mol_type = other DNA
ctcatgggcctgactcatcacttgaaccaaactacagcgattgatatctcc

SEQ ID NO: 36335 - DNA, 45 bp, synthetic construct
  source 1..45: mol_type = other DNA
gaccccctgaagaccttcacaagcggcatcaacgcccacattagt

SEQ ID NO: 36336 - DNA, 36 bp, synthetic construct
  source 1..36: mol_type = other DNA
gtggagaataacttcatcgaggacgtcattctgatg

SEQ ID NO: 36337 - DNA, 132 bp, synthetic construct
  source 1..132: mol_type = other DNA
atcaagcccggcgtcgggatcaacatagccgcaatcagtcagaccagtaatgtgaccctgaaccagacaatgaccgacctcgtgctgaacatcatccccgagaatccactgaatgcactggcgtcaagcgaa

SEQ ID NO: 36338 - DNA, 39 bp, synthetic construct
  source 1..39: mol_type = other DNA
gcagctcagtgttgcggcatggacctggggacatcagcc

SEQ ID NO: 36339 - DNA, 84 bp, synthetic construct
  source 1..84: mol_type = other DNA
tctaccagcacaccatctgtccctttttccgggctggccactctgacacttgttttcactagcgttgggttgccagtcgagatt

SEQ ID NO: 36340 - DNA, 42 bp, synthetic construct
  source 1..42: mol_type = other DNA
gtggacgaccctttcatcgagaactttatcctcatggataac

SEQ ID NO: 36341 - DNA, 132 bp, synthetic construct
  source 1..132: mol_type = other DNA
atcaagcctggggtcggacttaacatcccggcaagcgataccctgagcaattcgacaagtagcatggcactcacggacacaatcctgaatatcttcccggagaatcccgtgcacgctctcacgaacggagaa

SEQ ID NO: 36342 - DNA, 33 bp, synthetic construct
  source 1..33: mol_type = other DNA
acctttggcacaattgggttcgagtctatcctt

SEQ ID NO: 36343 - DNA, 33 bp, synthetic construct
  source 1..33: mol_type = other DNA
caggcctacggcatcgacttcggtacaacagcg

SEQ ID NO: 36344 - DNA, 51 bp, synthetic construct
  source 1..51: mol_type = other DNA
ctgaatagcatagttggtggactaaaccaggctacaggactcgacatttcc

SEQ ID NO: 36345 - DNA, 39 bp, synthetic construct
  source 1..39: mol_type = other DNA
gacccccttatggccgtgaccatgggtacacctgtttcc

SEQ ID NO: 36346 - DNA, 30 bp, synthetic construct
  source 1..30: mol_type = other DNA
ttcagcatcaacgctaccgagcagaaggcc

SEQ ID NO: 36347 - DNA, 33 bp, synthetic construct
  source 1..33: mol_type = other DNA
ctgcaggtcatcttccggacaaccagcctcaac

SEQ ID NO: 36348 - DNA, 93 bp, synthetic construct
  source 1..93: mol_type = other DNA
cggatttatgactccaaaggcaatatcgtctacgataaaaacttcgacgagatctccgagctgcccgacgatatgtctaacaatttgacggaa

SEQ ID NO: 36349 - DNA, 72 bp, synthetic construct
  source 1..72: mol_type = other DNA
tatctgggttactattttttcatccaccggaatctgaccgtcggcaagtacacctttgagcttcgaaacctt

SEQ ID NO: 36350 - DNA, 207 bp, synthetic construct
  source 1..207: mol_type = other DNA
gtgatcggctatatggtcaacggttctttcgagatcatcaagactacaagcgagattgaggtctatgtcgaggatatcgtctacggcgaagacctggagatccacatcggagtgatcaataccaccattgtgaacatcattattaaggactacaaaggcagcatcgtgtacaacgacaacgtgacatccagcccaatcattatccgc

SEQ ID NO: 36351 - DNA, 201 bp, synthetic construct
  source 1..201: mol_type = other DNA
aacagcagctctcaagagtttcaagtttttaaaataaacagcacaattaagctgaatgatatttccgacatatattacgaagacaatgtttccatttcattcgaagtggagaacaagacgatcgtgaacatcaagatccaaaaccaggacggcgaagtggtctatgacaacaatatcacttccgacatgatccaagtaccg

SEQ ID NO: 36352 - DNA, 51 bp, synthetic construct
  source 1..51: mol_type = other DNA
attgacggcgagtataccgtaacgatcgcggggaagaaaataatcgtgaac

SEQ ID NO: 36353 - DNA, 102 bp, synthetic construct
  source 1..102: mol_type = other DNA
gagggtaacgtgttcgcgagcgtcgatgggaattacgtgatcgtgattggcgatattactaaaatcgtttccgtgaagaatggaattggcgagtttaacctg

SEQ ID NO: 36354 - DNA, 117 bp, synthetic construct
  source 1..117: mol_type = other DNA
ctgaacgtcggcgactataacatttctgtgaactactacgagaacgagaactacaactccaatagcaacaccaccacttttaaggtgacagggaccggcaccaacttcaacatcatc

SEQ ID NO: 36355 - DNA, 66 bp, synthetic construct
  source 1..66: mol_type = other DNA
atcacctacggcgagaacattaagatcactcaaaagctgcctagcgacgccactgggacaataaca

SEQ ID NO: 36356 - DNA, 132 bp, synthetic construct
  source 1..132: mol_type = other DNA
tacaacccaggcatcatgactttcgatagttttaatcaagtgcaccaaatcgcctccggccgctataccaattggcatcctttcttccatacattcatcgaaatgatcctttacaagatttattcctctccc

SEQ ID NO: 36357 - DNA, 51 bp, synthetic construct
  source 1..51: mol_type = other DNA
acctcccctaaggaggagtctgtcaaaaaggaagacgttaaaaaacaggat

SEQ ID NO: 36358 - DNA, 90 bp, synthetic construct
  source 1..90: mol_type = other DNA
ctctttaagggatggggcaacaatccctctgtgttcttcacaaccaccctactgcatagcacgtccaacccttacggcctcacatacctg

SEQ ID NO: 36359 - DNA, 72 bp, synthetic construct
  source 1..72: mol_type = other DNA
cagctgcccggctcccggaccgggattatggccctcttcaaccctaactggagcgtcctgcttgactttaac

SEQ ID NO: 36360 - DNA, 111 bp, synthetic construct
  source 1..111: mol_type = other DNA
ggtttcatggcccttggacggaacattcctatcacctccctggtctctgattccttttcactcatcttcgtagtattccccaacgtgtttaatattatggatccatgggtc

SEQ ID NO: 36361 - DNA, 90 bp, synthetic construct
  source 1..90: mol_type = other DNA
ctgttcaagggatggggctccaatccttctgtgttctttacgaccaccctgttgcattccacgagcaacccctacggccttacctacctg

SEQ ID NO: 36362 - DNA, 72 bp, synthetic construct
  source 1..72: mol_type = other DNA
cagctgcctggctcccggaccggcatcatggccctcttcaaccccgactggagcgtgctgcttaacgttaac

SEQ ID NO: 36363 - DNA, 111 bp, synthetic construct
  source 1..111: mol_type = other DNA
ggatacatggcccttggccggaacatccctataacttccctcgttagcgacgggttctctattatctttgtggtctttcctaatgtttttaacatcatggacccctgggtc

SEQ ID NO: 36364 - DNA, 240 bp, synthetic construct
  source 1..240: mol_type = other DNA
atcatcgaagccagttgcgacgcacgcctgaaccggcttacaatcgtgctgtccctcacatattcctgcgtcgcggctggcgtgctgggcggcatcgtcggcggctacttctgcaagtctcccactcctttcattcccgataggttcgctgtggacgtcgggaatcccgagattattaactttatcaacgacgagaccataattcagggggcgattagaccagagatccctttcgagttc

SEQ ID NO: 36365 - DNA, 33 bp, synthetic construct
  source 1..33: mol_type = other DNA
ctgcagatcatcttcaagaccaccagcattgga

SEQ ID NO: 36366 - DNA, 30 bp, synthetic construct
  source 1..30: mol_type = other DNA
gagctgaataccagcaacgacacaaaggct

SEQ ID NO: 36367 - DNA, 33 bp, synthetic construct
  source 1..33: mol_type = other DNA
ctgcagattattttcaagaccacatcaatcggc

SEQ ID NO: 36368 - DNA, 33 bp, synthetic construct
  source 1..33: mol_type = other DNA
ctgcagattatatttaagaccaccgcaatcggc

SEQ ID NO: 36369 - DNA, 132 bp, synthetic construct
  source 1..132: mol_type = other DNA
tacaaccccgggattatgacattcgattctttcaaccaagtgcatcagatcgccagcggccggtacaccaattggcatcctttcttccacactttcatcgagatgatcctctataagatctactcttcaccc

SEQ ID NO: 36370 - DNA, 51 bp, synthetic construct
  source 1..51: mol_type = other DNA
acatctcctaaagaagagagcgttaagaaggaggatgtgaagaagcaggac

SEQ ID NO: 36371 - DNA, 30 bp, synthetic construct
  source 1..30: mol_type = other DNA
atcagcaagggcgtgccaacacaaaaggcc

SEQ ID NO: 36372 - DNA, 33 bp, synthetic construct
  source 1..33: mol_type = other DNA
ctgcaagtaatcttccgtactgcggcaatcggc

SEQ ID NO: 36373 - DNA, 33 bp, synthetic construct
  source 1..33: mol_type = other DNA
ctgagcatcaactcctctaaaagtaaagcatcg

SEQ ID NO: 36374 - DNA, 36 bp, synthetic construct
  source 1..36: mol_type = other DNA
ctgcagatcatcttccgcacaagtgccaccgctatt

SEQ ID NO: 36375 - DNA, 30 bp, synthetic construct
  source 1..30: mol_type = other DNA
atcagcactggcgtgtccaccacaaaggcc

SEQ ID NO: 36376 - DNA, 33 bp, synthetic construct
  source 1..33: mol_type = other DNA
ctgcagactattttccggaccacaagcatcgac

SEQ ID NO: 36377 - DNA, 30 bp, synthetic construct
  source 1..30: mol_type = other DNA
atctccacgggagtttcaacgagaaaggcg

SEQ ID NO: 36378 - DNA, 33 bp, synthetic construct
  source 1..33: mol_type = other DNA
ctgcagaccatcttccggaccacaagcattgac

SEQ ID NO: 36379 - DNA, 30 bp, synthetic construct
  source 1..30: mol_type = other DNA
atctcctctggcgtctcaaccaaaaaggcc

SEQ ID NO: 36380 - DNA, 33 bp, synthetic construct
  source 1..33: mol_type = other DNA
ctgcagaccatcttccgaactacaagcctggac

SEQ ID NO: 36381 - DNA, 30 bp, synthetic construct
  source 1..30: mol_type = other DNA
atcagccagggcgccagcaccaggaatgcc

SEQ ID NO: 36382 - DNA, 33 bp, synthetic construct
  source 1..33: mol_type = other DNA
ctgcagatcatcttccgcaccaccgcaatcggg

SEQ ID NO: 36383 - DNA, 33 bp, synthetic construct
  source 1..33: mol_type = other DNA
ctgtctacaaatagcggcgagcggaatgcaatg

SEQ ID NO: 36384 - DNA, 33 bp, synthetic construct
  source 1..33: mol_type = other DNA
ctgcaggttatcttccggacaaccagcatctca

SEQ ID NO: 36385 - DNA, 30 bp, synthetic construct
  source 1..30: mol_type = other DNA
atctacaacggcgtggacactaggaaggcc

SEQ ID NO: 36386 - DNA, 33 bp, synthetic construct
  source 1..33: mol_type = other DNA
ctgcagatcatcttccgcacaaccagcattggc

SEQ ID NO: 36387 - DNA, 30 bp, synthetic construct
  source 1..30: mol_type = other DNA
atcagcattggctccaccactacaaaggcc

SEQ ID NO: 36388 - DNA, 33 bp, synthetic construct
  source 1..33: mol_type = other DNA
ctgcagattattttccggaccacagccatctct

SEQ ID NO: 36389 - DNA, 33 bp, synthetic construct
  source 1..33: mol_type = other DNA
ctgcagattctcttccggacaacagccatcggc

SEQ ID NO: 36390 - DNA, 30 bp, synthetic construct
  source 1..30: mol_type = other DNA
atctactctggcgctgacacaaggaaggcc

SEQ ID NO: 36391 - DNA, 33 bp, synthetic construct
  source 1..33: mol_type = other DNA
ctgcagaccattttccgcaccacaagcatcggc

SEQ ID NO: 36392 - DNA, 30 bp, synthetic construct
  source 1..30: mol_type = other DNA
ctgggcatccacaccaacaagcggaaagcc

SEQ ID NO: 36393 - DNA, 33 bp, synthetic construct
  source 1..33: mol_type = other DNA
ctgcagataattttccgtaccgcacccattggc

SEQ ID NO: 36394 - DNA, 240 bp, synthetic construct
  source 1..240: mol_type = other DNA
acagtctttaaggctaaccctactctcaacgccaacattgaggacatcacatacggcaacgacgcagggctggccatcaatctgtctggggttaatggcgagaaactcaatgagaccctgatgatcacactgaatggggaagactacgggaccgtggatctgaacaacggcatcggcggcctgaccttccaaaacttgagcgtcggtaactatactgtcggcattggattcagcttctat

SEQ ID NO: 36395 - DNA, 30 bp, synthetic construct
  source 1..30: mol_type = other DNA
ctgggcatccacaccaacgagagaaaggct

SEQ ID NO: 36396 - DNA, 33 bp, synthetic construct
  source 1..33: mol_type = other DNA
ctgcagatcatattccggaccacctctattggc

SEQ ID NO: 36397 - DNA, 141 bp, synthetic construct
  source 1..141: mol_type = other DNA
actcaaatgttccacaaaaatgaagcactggaggcattcatcgagaagcattttcacaacggtacatatgataaaacagccgctgaaaagatcaagaatcagacatattacctgatcgataattactccatctggagcggt

SEQ ID NO: 36398 - DNA, 30 bp, synthetic construct
  source 1..30: mol_type = other DNA
ctgtccattaaccagagcatccagaagccc

SEQ ID NO: 36399 - DNA, 33 bp, synthetic construct
  source 1..33: mol_type = other DNA
ctgcagatcattttccggactaccagcatcaca

SEQ ID NO: 36400 - DNA, 30 bp, synthetic construct
  source 1..30: mol_type = other DNA
atgagcatcaaccagcccgagaagaaagcc

SEQ ID NO: 36401 - DNA, 33 bp, synthetic construct
  source 1..33: mol_type = other DNA
ctgcagctcatcttccggaccacagcaatctct

SEQ ID NO: 36402 - DNA, 33 bp, synthetic construct
  source 1..33: mol_type = other DNA
ctggagacagtctttaagacccaggctatcggc

SEQ ID NO: 36403 - DNA, 30 bp, synthetic construct
  source 1..30: mol_type = other DNA
ctgtcgatcaactcaagcgagtctaaggcc

SEQ ID NO: 36404 - DNA, 36 bp, synthetic construct
  source 1..36: mol_type = other DNA
ctgcagatcatcttccgcacaactgcgatcatatcg

SEQ ID NO: 36405 - DNA, 30 bp, synthetic construct
  source 1..30: mol_type = other DNA
atcagcaagggcgtgtccactcggaaagcc

SEQ ID NO: 36406 - DNA, 33 bp, synthetic construct
  source 1..33: mol_type = other DNA
ctgcagactgtgttccgcacaaccagcatcgga

SEQ ID NO: 36407 - DNA, 30 bp, synthetic construct; identical to SEQ ID NO: 36346
  source 1..30: mol_type = other DNA

SEQ ID NO: 36408 - DNA, 33 bp, synthetic construct
  source 1..33: mol_type = other DNA
ctccagctgatcttccggaccacaagcctgaac

SEQ ID NO: 36409 - DNA, 33 bp, synthetic construct
  source 1..33: mol_type = other DNA
aagttctcgttctcggtctacgagaacggcggt

SEQ ID NO: 36410 - DNA, 90 bp, synthetic construct
  source 1..90: mol_type = other DNA
ctgttcaagggatggggctccaacccttctgtgttctttactcggacattacttcactccacaagcaacccctacgggctcacctacctg

SEQ ID NO: 36411 - DNA, 78 bp, synthetic construct
  source 1..78: mol_type = other DNA
gtgagcttacccggaagccgcaccgggatcatggttctcttttcacctaactgggactacctgttcgatagttcactg

SEQ ID NO: 36412 - DNA, 111 bp, synthetic construct
  source 1..111: mol_type = other DNA
ctgggatacgctgctctcggtaacaacattacgatcacctcacttgtttccgatgggtacagtctgatttttgttgtgctgcctaccgccttcaaccttatgggcccatgg

SEQ ID NO: 36413 - DNA, 33 bp, synthetic construct
  source 1..33: mol_type = other DNA
ttcagctttagtgtatatgagaacggtggaggc

SEQ ID NO: 36414 - DNA, 90 bp, synthetic construct
  source 1..90: mol_type = other DNA
ctgtttaagggatggggctccaaccctagcgtgttcttcactcggaccctgctccattcaacgtctaatccctacgggctgacctatctg

SEQ ID NO: 36415 - DNA, 78 bp, synthetic construct
  source 1..78: mol_type = other DNA
gtgagcctgcctgggtcccggaccggcatcatggtcctcttctctcctaactgggattacctgtttgactctagtctg

SEQ ID NO: 36416 - DNA, 108 bp, synthetic construct
  source 1..108: mol_type = other DNA
ggatacgccgccctgggcaaccacatcaccattacaagcctggtgtccgacggctactctctgatcttcgtcgtgatgccaactgcctttaacctcatgggtccttgg

SEQ ID NO: 36417 - DNA, 33 bp, synthetic construct
  source 1..33: mol_type = other DNA
ctgcagacaatcttccgaacgacatccattggc

SEQ ID NO: 36418 - DNA, 30 bp, synthetic construct
  source 1..30: mol_type = other DNA
ctggatcagacaacgatcattcggatggac

SEQ ID NO: 36419 - DNA, 33 bp, synthetic construct
  source 1..33: mol_type = other DNA
ctgcagatcatcttccggaccacaagcatcaac

SEQ ID NO: 36420 - DNA, 33 bp, synthetic construct
  source 1..33: mol_type = other DNA
ctgcaggttattttccggactgcgcctatcaac

SEQ ID NO: 36421 - DNA, 90 bp, synthetic construct
  source 1..90: mol_type = other DNA
ctgtttaagggctggggctccaatcctagcgtgttcttcacaaccactctgcttcattccacgtctaatccctatggactgacatacctg

SEQ ID NO: 36422 - DNA, 72 bp, synthetic construct
  source 1..72: mol_type = other DNA
cagctgcccggctcccggaccgggattatggcactcttcaaccctaactggagcgtccttctggacctgaat

SEQ ID NO: 36423 - DNA, 108 bp, synthetic construct
  source 1..108: mol_type = other DNA
ggttatatggcgctgggccggaacatcccaatcacctccctcgtgtctgacggatttagcctgattttcgtggtcttccccaacgtgttcaatatcatggatccttgg

SEQ ID NO: 36424 - DNA, 132 bp, synthetic construct
  source 1..132: mol_type = other DNA
tacaaccccgggattctcaccttcgactcatttaaccaagtccaccaaatcgcaagcggccactacacaaactggcatcctttcttccatactttcatcgaaatgttgctgtacaagatctactcaagtcca

SEQ ID NO: 36425 - DNA, 48 bp, synthetic construct
  source 1..48: mol_type = other DNA
gaacccgaagacgagaccagccctaaggccgagtccgtgaagaaggag

SEQ ID NO: 36426 - DNA, 33 bp, synthetic construct
  source 1..33: mol_type = other DNA
gagggcaaaagctccaaggccgaaaccgtgaag

SEQ ID NO: 36427 - DNA, 36 bp, synthetic construct
  source 1..36: mol_type = other DNA
taccctctgatcggcatcgccaagcccattgagact

SEQ ID NO: 36428 - DNA, 174 bp, synthetic construct
  source 1..174: mol_type = other DNA
atcagcaaccacatctggggatacgacattttcttcgagtaccagtttgccacttatgtgatcaagaatggcatctgggaccacacttggccccatgcttacaacgccatgctgtccgtcgtgatgtacgcacccatctttaacaagctgtctggcatgaccctcacctggata

SEQ ID NO: 36429 - DNA, 39 bp, synthetic construct
  source 1..39: mol_type = other DNA
ggcttcagctacggctggatggtgcagatggcaagacag

SEQ ID NO: 36430 - DNA, 93 bp, synthetic construct
  source 1..93: mol_type = other DNA
acagccgactctaagccaattgcctcattattcgatgctctgcggatcgtctctaaaaacttgaacaccatcgtgctgggcggctcaatcaac

SEQ ID NO: 36431 - DNA, 33 bp, synthetic construct
  source 1..33: mol_type = other DNA
cccgccttccggggccagctgagcctgcagcgg

SEQ ID NO: 36432 - DNA, 36 bp, synthetic construct
  source 1..36: mol_type = other DNA
tacccctggttcggcatcgcccaccctattgagacc

SEQ ID NO: 36433 - DNA, 180 bp, synthetic construct
  source 1..180: mol_type = other DNA
ctgatctctaaccacatctggggctatgatatctttttcgagtaccagttcgccacctacgtgatcaagaatgggatttgggactacacttggccccatgcttataacgcaatgctgagcgtcgtgatgtacgcccctatttacaataagctctccggaatgaccctgacatggatcctc

SEQ ID NO: 36434 - DNA, 39 bp, synthetic construct
  source 1..39: mol_type = other DNA
ggcttcagctacggctggatggtgcagatggctagacag

SEQ ID NO: 36435 - DNA, 96 bp, synthetic construct
  source 1..96: mol_type = other DNA
ctgacagccgactctaaacccatcgcctccctgttcgacgcactcaagatcgtctcggggaatgttaaaaccctgacggtgtccggggctgttcac

SEQ ID NO: 36436 - DNA, 30 bp, synthetic construct
  source 1..30: mol_type = other DNA
ccctttcggttcatgaacatagtgtctata

SEQ ID NO: 36437 - DNA, 33 bp, synthetic construct
  source 1..33: mol_type = other DNA
ccatctttccgcggacagctgagcttgcaaagg

SEQ ID NO: 36438 - DNA, 48 bp, synthetic construct
  source 1..48: mol_type = other DNA
atgggcctgacgcaccaaatacaccagagcgttggaatagacataagc

SEQ ID NO: 36439 - DNA, 51 bp, synthetic construct
  source 1..51: mol_type = other DNA
agatttgaatacaacgaggcatatgacgacggcggcgcaatctgctgtaaa

SEQ ID NO: 36440 - DNA, 39 bp, synthetic construct
  source 1..39: mol_type = other DNA
ggaggagctataagttgtgacatgctgtacttccatgag

SEQ ID NO: 36441 - DNA, 123 bp, synthetic construct
  source 1..123: mol_type = other DNA
tccgtgaacttcagcggcaacggatgggccgaccgcaaccctatcgtggttcacacctgccactacaagggcattgagttcaacaaggatctggacgtcgacgggaattacaccttcgaattt

SEQ ID NO: 36442 - DNA, 144 bp, synthetic construct
  source 1..144: mol_type = other DNA
gtgggcattgaggactcccgctacccctctaatcacacaatccacgtgaattatagcgattacatcaacgtgctttaccggatttacaagaccgaggacatcgacgagggctccgaggagtacctgctgttcactctctgtgac

SEQ ID NO: 36443 - DNA, 246 bp, synthetic construct
  source 1..246: mol_type = other DNA
gtgattggaaacagttcctctcaggacttccaggtctttaaaatcaattctacaatcaaactgaacgacattagcgatatttactacgaggataacgtgtccattagcttcgacgtggagaacaagaccatcgtgaacatccgtatccaaaatcaagacggcgaggtggtttatgacaacaacgtaacttccgacatgatccaggtccccaatctcgacgccggcaactacactgtgaccgttacg

SEQ ID NO: 36444 - DNA, 81 bp, synthetic construct
  source 1..81: mol_type = other DNA
accatacaagttatagctgacatcgacggcgaatacactgtaactatcgctggcaaaaagattattgtcaatgtgatcaac

SEQ ID NO: 36445 - DNA, 102 bp, synthetic construct
  source 1..102: mol_type = other DNA
gagggcaatgtgttcgcctctgtggatggcgactacattgtggtcatcaaggacaacagtaaactggtttccgttaaaaatggagtcggggaatttaacttc

SEQ ID NO: 36446 - DNA, 120 bp, synthetic construct
  source 1..120: mol_type = other DNA
acagacggcgaatacaccgtggtcattggcgataagaaaatcatcgtgaacgtgatcaacgggattgggaccggcagcatcgccctggacgccggcaagtacactgctaatatcgagtat

SEQ ID NO: 36447 - DNA, 132 bp, synthetic construct
  source 1..132: mol_type = other DNA
tacaatcccggcattctcacatttgactccttcaaccaagtacaccagatcgcctccggacgctataccaactggcatccttttttccatactttcatcgaaatgctgctttataagatttactcgtcgccc

SEQ ID NO: 36448 - DNA, 78 bp, synthetic construct
  source 1..78: mol_type = other DNA
gataccagccccaaggccgagactgtggagaaggaggacgtcaagaagcaggaggagcctaaggaaacccagacacag

SEQ ID NO: 36449 - DNA, 216 bp, synthetic construct
  source 1..216: mol_type = other DNA
atgcggggcggcgctgtgtactctagctggactaggctgaacatcgtggagtccgacttcctgaacaatacagcatcgcaaaacgccggcgcactctacttcgacaagggagacctgacaatcgagaagtccaacttcatcaataacaacgctgtcaagcagctcaagaacaccgctaacgccatctatgcccacgatgttaacgcctacttcaaa

SEQ ID NO: 36450 - DNA, 51 bp, synthetic construct
  source 1..51: mol_type = other DNA
agcactttcgacaatggcgggatcggggtctatgcggattttgcggatgac

SEQ ID NO: 36451 - DNA, 174 bp, synthetic construct
  source 1..174: mol_type = other DNA
ttcatcaacaatagggctgacgacgataacggcggcgccatccgctcttatagcgggaaggtgaccgccgtgaacaccatcttctccgagaactccgctgagcacctgggaggagcaatctactcatatggggacgtgtatactgataattgcctctttcggttcaacaagatt

SEQ ID NO: 36452 - DNA, 126 bp, synthetic construct
  source 1..126: mol_type = other DNA
gatgccgaacagtgctacggcggagccatctacgcatacgagaacgtgcacattaacaacagcaccttcgagaataatcgggccgaggactatggcggagctatctacgctgacaacatctacatc

SEQ ID NO: 36453 - DNA, 69 bp, synthetic construct
  source 1..69: mol_type = other DNA
ccccagatgttctacccctcgatgatgcggagctactccatgccttcttggcacccaggcttcgacatg

SEQ ID NO: 36454 - DNA, 51 bp, synthetic construct
  source 1..51: mol_type = other DNA
ctgatgatgaatgcagccggagactccatctattacgtccccacactcacc

SEQ ID NO: 36455 - DNA, 48 bp, synthetic construct
  source 1..48: mol_type = other DNA
agcatccacgtgtccggccgggtgcttcaacaaaacacccagactcca

SEQ ID NO: 36456 - DNA, 45 bp, synthetic construct
  source 1..45: mol_type = other DNA
tttaagcaagacagcgtgtttctgaagggcacaactaccgatacc

SEQ ID NO: 36457 - DNA, 141 bp, synthetic construct
  source 1..141: mol_type = other DNA
ggcatgcaactcctgaataccatgatgctacccggtttgaacatcaatccaatgttgaacacgattagttcctctgatggtggcaaggttattctccaaatcaacggggttaatactacccccgaggaaatccaaacactc

SEQ ID NO: 36458 - DNA, 114 bp, synthetic construct
  source 1..114: mol_type = other DNA
ttccagagaattaataccaataaccgcaaccggacaggcagctaccagtttgagaactctagtccaatcctgagggaggagatcagcgccggaggggattacagctatcagatg

SEQ ID NO: 36459 - DNA, 99 bp, synthetic construct
  source 1..99: mol_type = other DNA
ctgtctaaccaaccgcataatgatttcaactcgtttctcaaagagaacggaaccgataagggactgatctttgacggtagccagcaaaagatcaacgtg

SEQ ID NO: 36460 - DNA, 96 bp, synthetic construct
  source 1..96: mol_type = other DNA
tacgccaacgccgcaagtagccggaattattgcgaatacaatgatgtggacaccctgtttagcgagcggtccgagctcttttcggacaagtacagc

SEQ ID NO: 36461 - DNA, 69 bp, synthetic construct
  source 1..69: mol_type = other DNA
atccagagctttaccgagcagacaattaaccagggcgaggagttcaagtccgacctgaatcaagcagaa

SEQ ID NO: 36462 - DNA, 45 bp, synthetic construct
  source 1..45: mol_type = other DNA
cggctgcacttctctaacgtctccgtgaccaagagctactaccat

SEQ ID NO: 36463 - DNA, 102 bp, synthetic construct
  source 1..102: mol_type = other DNA
tcccagacaaaccctaccctgatggaactggctgacactgagattagattggactcgtatctggccgagaagggtaacctgttattacaaccttacctgaac

SEQ ID NO: 36464 - DNA, 90 bp, synthetic construct
  source 1..90: mol_type = other DNA
cactacaagcataaccctatcatggagagcaagcgggaacacggcaacgtgttcctgaccatgcccgagaacatgaaggactggaacaag

SEQ ID NO: 36465 - DNA, 48 bp, synthetic construct
  source 1..48: mol_type = other DNA
aaccatttcgactcccggggcaataattattctcatacccactctaac

SEQ ID NO: 36466 - DNA, 48 bp, synthetic construct
  source 1..48: mol_type = other DNA
cccttcgacgagcggctctacggcgaaaccgtgatcaaggatggaaac

SEQ ID NO: 36467 - DNA, 90 bp, synthetic construct
  source 1..90: mol_type = other DNA
aaccccttcaagaatgtcagtcgaaccatcatggagaataagaacgcccaggccccttttcggagagagagtttctccgacgcttctaga

SEQ ID NO: 36468 - DNA, 132 bp, synthetic construct
  source 1..132: mol_type = other DNA
tacaatcctggaatacttacattcgatagcttcaaccaagtacaccaaatagcaagcggtagatacagcaactggcatccattcttccataccttcattgaaatgctgctctacaagatctatagctctccc

SEQ ID NO: 36469 - DNA, 78 bp, synthetic construct
  source 1..78: mol_type = other DNA
gagacaagccccaaggccgagaccgtcgaaaaggaggacgtgaagaagcaggaagagcctaaagagactcagacacag

SEQ ID NO: 36470 - DNA, 81 bp, synthetic construct
  source 1..81: mol_type = other DNA
gaagctcgggtcaagtactggtggcaggatgacgggtccgaactgttcggaggggaaggctttgtgtatccctttgaccct

SEQ ID NO: 36471 - DNA, 147 bp, synthetic construct
  source 1..147: mol_type = other DNA
aagattgcttacttcattagcgacggtgcaaccggtacaatcacctattacctcgacgggacccaggtggcccagctgccagtcggggagctgtacaatatccccaacctctctatcggcctgcacacatacgtcctgaactacagt

SEQ ID NO: 36472 - DNA, 66 bp, synthetic construct
  source 1..66: mol_type = other DNA
gagaacttcgattcggactccttcaacttatacgtaaatatgaagcccaacgatgcccagtttggc

SEQ ID NO: 36473 - DNA, 219 bp, synthetic construct
  source 1..219: mol_type = other DNA
gtccagggcgatgccattgagctctggcgcggctcctctgactaccccacatccaccaaggccaccgtgtacatcgacaacgtgcagttctgtcaactactggccgaaggacacacaaccctgccactgctgagcccaggacggcactacctttatgcttacttccctggggacagcaagaatcctaagtgctacgacgcttgcttcgtggatgttcaa

SEQ ID NO: 36474 - DNA, 204 bp, synthetic construct
  source 1..204: mol_type = other DNA
cacaccgatatggagctggaaattgctaacgccgttatcgattacggcgaaaccactgtgatcactagtatcctgcccgagaatgccaccggcactatcgactattacgtcatggatcagtactaccctgatgaggacagcctcaatgaaagttcccaagtagagtacttcaccgacgaaatcttcataggtcgcgtcaatgtt

SEQ ID NO: 36475 - DNA, 210 bp, synthetic construct
  source 1..210: mol_type = other DNA
acactgcccattctcgacggcggtaaccgcattatcctggccaagtacagtggcgatagattttacatgaacagcgccgcccggacctacctcacaataaatcgaatcgaacctatcttcgaggtggaggcttccgagagcgagttcgactacggcgactctgtctatatttcccacgtgctggatgacgttgctactgggaccattgag

SEQ ID NO: 36476 - DNA, 30 bp, synthetic construct
  source 1..30: mol_type = other DNA
acctacctgggcgaagctccagccaacgag

SEQ ID NO: 36477 - DNA, 30 bp, synthetic construct
  source 1..30: mol_type = other DNA
ggctatcacgagatcgtggcttggtacctg

SEQ ID NO: 36478 - DNA, 30 bp, synthetic construct
  source 1..30: mol_type = other DNA
gcaactcattccatctacgtcaacgtgaag

SEQ ID NO: 36479 - DNA, 72 bp, synthetic construct
  source 1..72: mol_type = other DNA
aatgaaacaaactacggcgagatcgctaccatctgtcctgttttgcccgacgacgctaccgggactattgcc

SEQ ID NO: 36480 - DNA, 42 bp, synthetic construct
  source 1..42: mol_type = other DNA
ctgagtaatggcacgtaccttggagaggcgtccgtgaacgag

SEQ ID NO: 36481 - DNA, 186 bp, synthetic construct
  source 1..186: mol_type = other DNA
gctgccggcacccacgagatcgtggctaactactccggcgacctcaattatttagcggcttcttgtaacgccaacactatcgtgaataagacaaccatcttcgaggtcgacatcgatggagaagtgaactacggggagaccgcgctggtcaggagcgtcctacccgatgacgcaaccggcacaatc

SEQ ID NO: 36482 - DNA, 33 bp, synthetic construct
  source 1..33: mol_type = other DNA
ggcacctacctgggagaggcctccgtgaacaat

SEQ ID NO: 36483 - DNA, 39 bp, synthetic construct
  source 1..39: mol_type = other DNA
gacgtcggcacctatgtgatcgtgtcttactacaatgcg

SEQ ID NO: 36484 - DNA, 69 bp, synthetic construct
  source 1..69: mol_type = other DNA
ccccagctcttctacccatctatgtcctccacctacatcctgccaagctgggagcctgcctggtctatg

SEQ ID NO: 36485 - DNA, 51 bp, synthetic construct
  source 1..51: mol_type = other DNA
attatgtgggagagctctggggacagtttttacattctgccttccatcacc

SEQ ID NO: 36486 - DNA, 69 bp, synthetic construct
  source 1..69: mol_type = other DNA
cccaagctgttttatccctcaatgtcctccacctatatcctcccatcttgggagcctgcttggtccatg

SEQ ID NO: 36487 - DNA, 51 bp, synthetic construct
  source 1..51: mol_type = other DNA
atcatgtgggagtccagtggcgactctttctacattctcccatccatctcc

SEQ ID NO: 36488 - DNA, 249 bp, synthetic construct
  source 1..249: mol_type = other DNA
tttgcctatggcgtatctgccggcgacaactacgccctgagcggaggatctagcgcgagcagccacctgcggatcgtcaccgagatcctcgctgggacctacgacccagctaaccagatcacaatcaattacccttacggctccggctctatttccggacccctgttcgactacattattgccgccttcgcctatatcgttactctctgcggcgtctcacaagcaaccgcaagtgctggaacacttgct

SEQ ID NO: 36489 - DNA, 33 bp, synthetic construct
  source 1..33: mol_type = other DNA
atgacaaccgctttttccaacggcactgagaat

SEQ ID NO: 36490 - DNA, 36 bp, synthetic construct
  source 1..36: mol_type = other DNA
tattacatccctttgggactgtggtcacccgtattc

SEQ ID NO: 36491 - DNA, 114 bp, synthetic construct
  source 1..114: mol_type = other DNA
ttcgctcctagtgtctcctccgcactccttcacggaagctcgccacaagtcggcgctcttgcgacggacctagcacaccaattttcgagaacatcgatctcaagcatggccgcc

SEQ ID NO: 36492 - DNA, 66 bp, synthetic construct
  source 1..66: mol_type = other DNA
ccatacctcttctaccctacaatgtcctctacctatagcttgcctcgatggggaccgagttgggac

SEQ ID NO: 36493 - DNA, 48 bp, synthetic construct
  source 1..48: mol_type = other DNA
atgatggggagcaccggcgacgagtattgcttccccatcaacatctac

SEQ ID NO: 36494 - DNA, 42 bp, synthetic construct
  source 1..42: mol_type = other DNA
ctcagcgtcgagatgaccctggagggcctgaaggtggtcaat

SEQ ID NO: 36495 - DNA, 108 bp, synthetic construct
  source 1..108: mol_type = other DNA
gagggcgagaccgtgcccatggtcttcctgaagtttcctgacggcatcgaaacagaggagggttacccggataagctcttcaagggattcgataagaagctgatcaag

SEQ ID NO: 36496 - DNA, 273 bp, synthetic construct
  source 1..273: mol_type = other DNA
atgaatgtgacatacgacaggctggacttctacaacgtgaccgcaaacgtcagcgacgagaacggcaacgccgctggcaatggcaacgtaactttctatgtcaatggggctaattacacggccgaaatttatagaggaatcgcgagcgttcaagttccacttccgctcggtcttaattccatatcggccgtattcgagagccccaactaccacccttctaactcgtcaacgacatatgaggtcagcccaatcgctctggatgtgaacatcgtt

SEQ ID NO: 36497 - DNA, 240 bp, synthetic construct
  source 1..240: mol_type = other DNA
actctcgaagccgtgttcgagggagaccagtcttacatcgcttctaagaactccagctgggttaatgttacaaagagccagacacggattaatatcacccgcattagctacaattccttcaacctgttcgacatcgaggccgatgtgttcgatcaattgaatcagacagtgtccgagggcaccatcacctttatcgtcaacaacgttgaatacgacaccggccgaatgattagtcttgct

SEQ ID NO: 36498 - DNA, 102 bp, synthetic construct
  source 1..102: mol_type = other DNA
ggcaataatatatctgtatcctttaacgcccttaactattgcctctctacctctcacatttcctacgaagtactgcccgtcgacctgatgctcaacatctcc

SEQ ID NO: 36499 - DNA, 66 bp, synthetic construct
  source 1..66: mol_type = other DNA
ccgcagctcttctatccgtcaatgtctgagtccttcgtgctgccatccttcggacctggatgggac

SEQ ID NO: 36500 - DNA, 51 bp, synthetic construct
  source 1..51: mol_type = other DNA
attatgtgggctagcagtgatacctccttctacattatcccatctctctct

SEQ ID NO: 36501 - DNA, 66 bp, synthetic construct
  source 1..66: mol_type = other DNA
ccctacctcttttacccctcaatgtctgccatgtatagtctgcctcattggggtccagcttgggac

SEQ ID NO: 36502 - DNA, 57 bp, synthetic construct
  source 1..57: mol_type = other DNA
gagctgatgatgggcagcaccggggccgactactacttccccatccacatctatcct

SEQ ID NO: 36503 - DNA, 198 bp, synthetic construct
  source 1..198: mol_type = other DNA
atggttaatggtagcttcgagatcacaaagactacatccgaggtcgaagtctatgttgaggacatcgtctacggcgaggatctggaaatccacatcggcgttatcaacaccaccactgtgaatattatcatcaaggactacaaggggtctattgtgtacaacgacaacgtaactagcagtccagtgatcataaggaac

SEQ ID NO: 36504 - DNA, 249 bp, synthetic construct
  source 1..249: mol_type = other DNA
atcatcggcaactcctcatcccaagactttcaagtgttcaaaattaacagcaccatcaaactgaacgacatctccgacatctattacgaggacaatgtcagtatctcattcgaagttgagaacaagaccattgtgaacattaagatccagaaccaggatggagaggtggtctacgacaacaatataacctcggatatgatccaggtccccaatctcaatgccggcaactatactgtcactgtcacaaac

SEQ ID NO: 36505 - DNA, 69 bp, synthetic construct
  source 1..69: mol_type = other DNA
ccatatatcttcgtggacacgatgcaatcatattacacactgccttgctgggaccccggcttcaacatg

SEQ ID NO: 36506 - DNA, 51 bp, synthetic construct
  source 1..51: mol_type = other DNA
gagtccatacgatcgaatactgacaagttgtactaccccaccaactactct

SEQ ID NO: 36507 - DNA, 66 bp, synthetic construct
  source 1..66: mol_type = other DNA
ccctacatcttcgtggacacaatgaagtcctactataccctgccatgctgggatcctggctttagc

SEQ ID NO: 36508 - DNA, 51 bp, synthetic construct
  source 1..51: mol_type = other DNA
gaggctattcgatcaaatactgacaaattgtactacccgaccaactattcc

SEQ ID NO: 36509 - DNA, 69 bp, synthetic construct
  source 1..69: mol_type = other DNA
ccctatatctttgtggatacaatgaagtccttctacaccctgcctaactgggacccaggcttcaacatg

SEQ ID NO: 36510 - DNA, 54 bp, synthetic construct
  source 1..54: mol_type = other DNA
gagagtatccggtctaactccgataccctgtactaccccgtggactattcacca

SEQ ID NO: 36511 - DNA, 60 bp, synthetic construct
  source 1..60: mol_type = other DNA
tttatgttccctttctttgagaccagctacacaatccctgcctggaagggcggattcagc

SEQ ID NO: 36512 - DNA, 57 bp, synthetic construct
  source 1..57: mol_type = other DNA
caggtcgtgatggccagcattggcgaggactattactaccctcgtgtcattcacccc

SEQ ID NO: 36513 - DNA, 36 bp, synthetic construct
  source 1..36: mol_type = other DNA
ctcggtttaaactctccatacgggaaaaccaaggcc

SEQ ID NO: 36514 - DNA, 33 bp, synthetic construct
  source 1..33: mol_type = other DNA
ctgcagattatcttcaagacgtgccctatcgga

SEQ ID NO: 36515 - DNA, 69 bp, synthetic construct
  source 1..69: mol_type = other DNA
ccccggatgttctacccctctatggccaccaactactccatgccaagctggcaccctggcttcgacatg

SEQ ID NO: 36516 - DNA, 54 bp, synthetic construct
  source 1..54: mol_type = other DNA
acactcatgatggacgctgccggcgatagcctgtactatgtgccttctttgacc

SEQ ID NO: 36517 - DNA, 66 bp, synthetic construct
  source 1..66: mol_type = other DNA
ccccggctcttctacccctctatgtcctccatgttttctctgcctatctgggagccaacatgggat

SEQ ID NO: 36518 - DNA, 51 bp, synthetic construct
  source 1..51: mol_type = other DNA
tttatgatgcagacaagtggcgagagctactactttcccatcaacatttat

SEQ ID NO: 36519 - DNA, 126 bp, synthetic construct
  source 1..126: mol_type = other DNA
ttcgtgaaattaactgttgggggaactgtcaccaatatcgaggtgcaggacggcgtggccaccctgaccaccgtcctggttccaaatagctacttcgtcgatgtgacatacctgggcgacaataat

SEQ ID NO: 36520 - DNA, 252 bp, synthetic construct
  source 1..252: mol_type = other DNA
aacatgaaccggacctccgttacgtttaccattacggatattaccaagaaaaacacaaatatcgatctgaacatcgacgtatatgaggacgctgccctcgtcatggttgatgtgaacgagtccgctacggggcttgtgaagttgtacatggtcggaaaggagagtggcgaggaatatactatgtacatggatgtgatttccatcgaacccggaaattataccgtggtcgctacatacatgggcgattctgtg

SEQ ID NO: 36521 - DNA, 54 bp, synthetic construct
  source 1..54: mol_type = other DNA
ctggacgacatgcaggtatcgagtgtcgcggctgcggatttctacgacgattac

SEQ ID NO: 36522 - DNA, 72 bp, synthetic construct
  source 1..72: mol_type = other DNA
aatgacttcaacggcgatcacatggacatcttcggctacaagtttcccctgttcgccttcgactctgatttc

SEQ ID NO: 36523 - DNA, 48 bp, synthetic construct
  source 1..48: mol_type = other DNA
atggacttgacacatagcattcaccaagcaacgggcatcaacgtatcc

SEQ ID NO: 36524 - DNA, 69 bp, synthetic construct
  source 1..69: mol_type = other DNA
cactacctgtcttatccttcaataacatcactcttctccctgccctacctgcatcaaattgagggaatg

SEQ ID NO: 36525 - DNA, 54 bp, synthetic construct
  source 1..54: mol_type = other DNA
gccatgatctgggagtccagctctgagaagttctttatcatccccgaattgtcc

SEQ ID NO: 36526 - DNA, 66 bp, synthetic construct
  source 1..66: mol_type = other DNA
ccgcatctcttctatcccacaatggaggctacttactcattacctaaatgggctcccggattggac

SEQ ID NO: 36527 - DNA, 51 bp, synthetic construct
  source 1..51: mol_type = other DNA
ataatgatgggatctactggcaacgactattggttccccatctacatttac

SEQ ID NO: 36528 - DNA, 66 bp, synthetic construct
  source 1..66: mol_type = other DNA
ccttacctcttctatccaaccatgagctctacatactccctgcctagatggggtccagcttgggac

SEQ ID NO: 36529 - DNA, 54 bp, synthetic construct
  source 1..54: mol_type = other DNA
ggagtgatgatgggcagcaccggggacgattacttctttcccatcaacatctac

SEQ ID NO: 36530 - DNA, 66 bp, synthetic construct
  source 1..66: mol_type = other DNA
cccaagctcttctaccctagcatgagctctacctatatcctgccaagttgggagcctgcatggtct

SEQ ID NO: 36531 - DNA, 54 bp, synthetic construct
  source 1..54: mol_type = other DNA
aaagtgatgtgggagagttccggcgactctttctacattctcccgtcaattagc

SEQ ID NO: 36532 - DNA, 69 bp, synthetic construct
  source 1..69: mol_type = other DNA
ccccagctgttctacccttctatgagcgccacctacaagctgccatcctggaacccagcttggagtatg

SEQ ID NO: 36533 - DNA, 51 bp, synthetic construct
  source 1..51: mol_type = other DNA
atcatgtgggagtcctccggggatagcttctacatcctgccctcaatctcc

SEQ ID NO: 36534 - DNA, 66 bp, synthetic construct
  source 1..66: mol_type = other DNA
cctccactcttctatccgtcgatgagtgccaactataagctgccctcttgggactctgcttggtcc

SEQ ID NO: 36535 - DNA, 54 bp, synthetic construct
  source 1..54: mol_type = other DNA
gccattatgtgggagtccagcggcgacagcttctacatcctgcctagcatctct

SEQ ID NO: 36536 - DNA, 54 bp, synthetic construct
  source 1..54: mol_type = other DNA
gcctataagcccctgacaaacatcttcaaactgccctacctgatgccttctggc

SEQ ID NO: 36537 - DNA, 54 bp, synthetic construct
  source 1..54: mol_type = other DNA
aacattatctggaaatctagctccgagaagtttttcatcctgcccaacatctcc

SEQ ID NO: 36538 - DNA, 63 bp, synthetic construct
  source 1..63: mol_type = other DNA
aacatctcctacgcatcgctcacaaacgtgtttaagctgccttatctgactcccgtcaatacc

SEQ ID NO: 36539 - DNA, 54 bp, synthetic construct
  source 1..54: mol_type = other DNA
aacatcatttggaagagctcctcaaaaaagtttttcatcatcccaagccttagc

SEQ ID NO: 36540 - DNA, 66 bp, synthetic construct
  source 1..66: mol_type = other DNA
cctcagctcttctatccttccatgtccgccacctacaagctgccctcttggaacccggtttggtct

SEQ ID NO: 36541 - DNA, 54 bp, synthetic construct
  source 1..54: mol_type = other DNA
agcatcatgtgggaaagctccggcgactctttctacatcctcccgtcgattagc

SEQ ID NO: 36542 - DNA, 69 bp, synthetic construct
  source 1..69: mol_type = other DNA
cctcagctgttctacccgtccatgagtgcaacctataagctcccaagctggcagcccgtctggagcatg

SEQ ID NO: 36543 - DNA, 54 bp, synthetic construct
  source 1..54: mol_type = other DNA
aagatcatgtgggagagctctggcgacagcttctacatactaccgagcatatcc

SEQ ID NO: 36544 - DNA, 66 bp, synthetic construct
  source 1..66: mol_type = other DNA
cctcagctgttttatccctctatgagcgccacctacaagctgccatcctggaacccaagttggagc

SEQ ID NO: 36545 - DNA, 54 bp, synthetic construct
  source 1..54: mol_type = other DNA
gatgtgatgtggaagagctccggcgactctttctacatccttccttccattagc

SEQ ID NO: 36546 - DNA, 63 bp, synthetic construct
  source 1..63: mol_type = other DNA
cctctcttctatccctctatgatccggtcctaccaactgcctctgtggaatccagcatggagc

SEQ ID NO: 36547 - DNA, 54 bp, synthetic construct
  source 1..54: mol_type = other DNA
ggcctgatgtggcagtccagcggggacgccttctacattatcccctctttgaca

SEQ ID NO: 36548 - DNA, 69 bp, synthetic construct
  source 1..69: mol_type = other DNA
cccaagctgttctacccgacaatgagctccacctatatcctgcctagttgggagccagcttggtctctg

SEQ ID NO: 36549 - DNA, 51 bp, synthetic construct
  source 1..51: mol_type = other DNA
attatgtgggagtcttctggggattcgttctacgttctgccctccatctcc

SEQ ID NO: 36550 - DNA, 66 bp, synthetic construct
  source 1..66: mol_type = other DNA
ccccagctcttctacccatcaatgtcctcaacatacatcctgccttcttgggaccctaagtggagc

SEQ ID NO: 36551 - DNA, 54 bp, synthetic construct
  source 1..54: mol_type = other DNA
aaagtaatgtgggagagcagcggcgactctttctacatcctgccatcaatcagt

SEQ ID NO: 36552 - DNA, 66 bp, synthetic construct
  source 1..66: mol_type = other DNA
ccccagctgttctatccctcgatgagcgccacctataagctcccatcttgggaccctgcttggagc

SEQ ID NO: 36553 - DNA, 48 bp, synthetic construct
  source 1..48: mol_type = other DNA
atgtgggagagctctggcgactccttctacatccttccttcgattact

SEQ ID NO: 36554 - DNA, 33 bp, synthetic construct
  source 1..33: mol_type = other DNA
ggcgcctctatgcccttccgcgacgatgatcct

SEQ ID NO: 36555 - DNA, 33 bp, synthetic construct
  source 1..33: mol_type = other DNA
tggaccggtgacaccggcgctgtggaagatctg

SEQ ID NO: 36556 - DNA, 69 bp, synthetic construct
  source 1..69: mol_type = other DNA
cctcagctcttctacccctctatgagcgccacctacaagctgccatcctgggagcccgcttggagtatg

SEQ ID NO: 36557 - DNA, 54 bp, synthetic construct
  source 1..54: mol_type = other DNA
atcatgtgggaaagctcaggcgacagcttctacatccttccctcatcaagcatt

SEQ ID NO: 36558 - DNA, 66 bp, synthetic construct
  source 1..66: mol_type = other DNA
ccaaacctgttctacccgtccatgtctagcacatacacattgcctgagtggaagcccgcatattcg

SEQ ID NO: 36559 - DNA, 54 bp, synthetic construct
  source 1..54: mol_type = other DNA
agcgtcatgtggcagtcctctggcgacagcttctacatggtgcccaagatctcc

SEQ ID NO: 36560 - DNA, 69 bp, synthetic construct
  source 1..69: mol_type = other DNA
cccaggctgttttatccgagcatgatgcggaccttcgtgctcccatcctgggctcctgtctgggacatg

SEQ ID NO: 36561 - DNA, 54 bp, synthetic construct
  source 1..54: mol_type = other DNA
accatgatgtggcagagttccggcgacagcctctacatgatcccctctcttaca

SEQ ID NO: 36562 - DNA, 69 bp, synthetic construct
  source 1..69: mol_type = other DNA
cctaacctcttttacccaagcatgtccgctacctacatacttcctgaatggaagccagcctggtctatg

SEQ ID NO: 36563 - DNA, 54 bp, synthetic construct
  source 1..54: mol_type = other DNA
gacattatgtggcagtcctccggcgatagcttctacattcttccatcgataagc

SEQ ID NO: 36564 - DNA, 69 bp, synthetic construct
  source 1..69: mol_type = other DNA
cctaacctgttctatccgtcgatgtccagtacctacatcttaccggaatggaagccagcctggtctatg

SEQ ID NO: 36565 - DNA, 51 bp, synthetic construct
  source 1..51: mol_type = other DNA
atcatgtgggaaagctctggcgactctttctacatcctgccatctatatcc

SEQ ID NO: 36566 - DNA, 66 bp, synthetic construct
  source 1..66: mol_type = other DNA
tacatcttagcatctccatcccggtttagagtctggaaattccccttctggcacactggaggatat

SEQ ID NO: 36567 - DNA, 54 bp, synthetic construct
  source 1..54: mol_type = other DNA
cagatcatgatctactccttcggcgacaccatttatatgcgacctagcatcagc

SEQ ID NO: 36568 - DNA, 33 bp, synthetic construct
  source 1..33: mol_type = other DNA
ggcgcagacatgccctttagaggggacgatccc

SEQ ID NO: 36569 - DNA, 33 bp, synthetic construct
  source 1..33: mol_type = other DNA
tggacgggcgacactggtgctgttgaggacctg

SEQ ID NO: 36570 - DNA, 66 bp, synthetic construct
  source 1..66: mol_type = other DNA
cccgatctcttctacccaagcatgacctcccggtactctttaccgcaatggaaccctggctttgac

SEQ ID NO: 36571 - DNA, 51 bp, synthetic construct
  source 1..51: mol_type = other DNA
ctcatgttgaacgcaagcggcgagtctatgtaccatgtgccagtcctgacc

SEQ ID NO: 36572 - DNA, 69 bp, synthetic construct
  source 1..69: mol_type = other DNA
ccccagatgttctacccttccatgcaaacaaattactcaatgcccagctggaacccaggcttcgacatg

SEQ ID NO: 36573 - DNA, 51 bp, synthetic construct
  source 1..51: mol_type = other DNA
cttatgatgaacgccgctggggattccctctattacatccccacactcacc

SEQ ID NO: 36574 - DNA, 69 bp, synthetic construct
  source 1..69: mol_type = other DNA
ccacagatgttctaccccacaatgaccaatcggttttctctacctgtttggcaacctggctttgacatg

SEQ ID NO: 36575 - DNA, 51 bp, synthetic construct
  source 1..51: mol_type = other DNA
ttgatgcttaatgccgccggggacagcctctactatgttccttctctgacg

SEQ ID NO: 36576 - DNA, 69 bp, synthetic construct
  source 1..69: mol_type = other DNA
cctcggctgttctacccctctatgaccagccggtactcactccctgtttggcatccgggctttgacatg

SEQ ID NO: 36577 - DNA, 51 bp, synthetic construct
  source 1..51: mol_type = other DNA
ctgatgatgaacgccgcgggcgacagcctctactatataccgtcactcacc

SEQ ID NO: 36578 - DNA, 66 bp, synthetic construct
  source 1..66: mol_type = other DNA
cccaacctgttttaccctaccatgtcctaccgatattcgcttcccgcgtggcatcctggattcgat

SEQ ID NO: 36579 - DNA, 51 bp, synthetic construct
  source 1..51: mol_type = other DNA
cttatgatgaacgctgccggagagagtctctattacatccctagcctcacc

SEQ ID NO: 36580 - DNA, 69 bp, synthetic construct
  source 1..69: mol_type = other DNA
ccacggatgttctaccccacaatgaccgccacctactccatgcctagctggaaccccggctttgacatg

SEQ ID NO: 36581 - DNA, 54 bp, synthetic construct
  source 1..54: mol_type = other DNA
accctcatgatgaacgccgctggcgacagcctgtattacatccccaagctgacc

SEQ ID NO: 36582 - DNA, 69 bp, synthetic construct
  source 1..69: mol_type = other DNA
ccacagatgttctacccctccatgcaaacgaactactcaatgccctcgtggaaccctggcttcgacatg

SEQ ID NO: 36583 - DNA, 51 bp, synthetic construct
  source 1..51: mol_type = other DNA
ttgatgatgaacgccgccggggactccctgtactatattcctactctgacc

SEQ ID NO: 36584 - DNA, 69 bp, synthetic construct
  source 1..69: mol_type = other DNA
ccccggatgttctaccccacaatggccgctacgtattcgatgccacggtggtatcctggctttgacatg

SEQ ID NO: 36585 - DNA, 54 bp, synthetic construct
  source 1..54: mol_type = other DNA
accctcatgatggatgccgctggcgacagcctgtattacatccccaagttgacc

SEQ ID NO: 36586 - DNA, 69 bp, synthetic construct
  source 1..69: mol_type = other DNA
cccaagatgttctacccaagcatgtctgtgaactactctatgccctcttggcaccctggcttcgacatg

SEQ ID NO: 36587 - DNA, 51 bp, synthetic construct
  source 1..51: mol_type = other DNA
ctgatgatgaacgcggctggagactccctctattatgtgccaagccttact

SEQ ID NO: 36588 - DNA, 69 bp, synthetic construct
  source 1..69: mol_type = other DNA
cctcagatgttctaccccacaatggctgctacctattccatgccatcctggaaccccggattcgacatg

SEQ ID NO: 36589 - DNA, 54 bp, synthetic construct
  source 1..54: mol_type = other DNA
acactcatgatgaacgccgctggcgacagcctgtactatatccctactctgacc

SEQ ID NO: 36590 - DNA, 69 bp, synthetic construct
  source 1..69: mol_type = other DNA
ccacggatgttctaccccacaatggccgcgacctactcaatgccggtttggaaccctggctttgacatg

SEQ ID NO: 36591 - DNA, 54 bp, synthetic construct
  source 1..54: mol_type = other DNA
accctgatgatgaacgctgccggcgacagcctctattacatccctaagctcgca

SEQ ID NO: 36592 - DNA, 69 bp, synthetic construct
  source 1..69: mol_type = other DNA
ccccagatgttctacccaacaatgaccgtgtcttactcgatgccaagctggaaccctggctttgacatg

SEQ ID NO: 36593 - DNA, 51 bp, synthetic construct
  source 1..51: mol_type = other DNA
ttgatgatgaatgccgctgggaactctctgtactatataccatcactcacc

SEQ ID NO: 36594 - DNA, 69 bp, synthetic construct
  source 1..69: mol_type = other DNA
ccccagatgttctacccaacaatgtccaccatgtatagcatgcctgcctggcacccaggctttgacatg

SEQ ID NO: 36595 - DNA, 54 bp, synthetic construct
  source 1..54: mol_type = other DNA
accctgatgctgaacgctgccggcgagagtctgtattacgtgcctacattgacc

SEQ ID NO: 36596 - DNA, 57 bp, synthetic construct
  source 1..57: mol_type = other DNA
ttttaccctagcatgacctctcggttctccctgcccgtctggaaaccaggatggaat

SEQ ID NO: 36597 - DNA, 51 bp, synthetic construct
  source 1..51: mol_type = other DNA
ctgatgatggacgccacgggcgatagcttttactacgtgcctagcctgacc

SEQ ID NO: 36598 - DNA, 63 bp, synthetic construct
  source 1..63: mol_type = other DNA
aacctcttttaccccacaatgacctataggtactctctacctgagtggaacccaggcttcgac

SEQ ID NO: 36599 - DNA, 54 bp, synthetic construct
  source 1..54: mol_type = other DNA
acactgatggtggacgccgctggcgagagcctctactatatcccatcccttacc

SEQ ID NO: 36600 - DNA, 69 bp, synthetic construct
  source 1..69: mol_type = other DNA
ccttctctgtttttcccaagcatgtccgccttctacaccctgcctagttggaagggaggcttcgacatc

SEQ ID NO: 36601 - DNA, 54 bp, synthetic construct
  source 1..54: mol_type = other DNA
cgcctgctgatggactatagtggtagctctttctactaccccatccactactca

SEQ ID NO: 36602 - DNA, 132 bp, synthetic construct
  source 1..132: mol_type = other DNA
tacaatcccggcatcctcactttcgattcatttaaccaagtacaccagattgccagcgggcactacaccaactggcacccatttttccacacattcatcgagatgctcctctacaagatttattcctcacct

SEQ ID NO: 36603 - DNA, 96 bp, synthetic construct
  source 1..96: mol_type = other DNA
aatctcactcctgaggaagtgaactccatcctgaacgagcccgaggacaagacaagcccaaccgagacagatgagaaggaagatacctacgacgag

SEQ ID NO: 36604 - DNA, 153 bp, synthetic construct
  source 1..153: mol_type = other DNA
ttccccaaaggaaacccaaagaaggccactaatactaccaagaagaacaagccaaccacaaccaataccacgaagaagaataagcccacaacaaccaagaccaccaaaaagaataagcctaccactactaagaccactaagaagaataatccc

SEQ ID NO: 36605 - DNA, 69 bp, synthetic construct
  source 1..69: mol_type = other DNA
cctcggatgttctacccttctatggccaccaactactccatgcccatctggtatccaggcttcgacatg

SEQ ID NO: 36606 - DNA, 51 bp, synthetic construct
  source 1..51: mol_type = other DNA
ctgatgatgaacgccgccggcgactccttgtattacgtccctacactcacc

SEQ ID NO: 36607 - DNA, 69 bp, synthetic construct
  source 1..69: mol_type = other DNA
ccacctatcttctacccatcaatgattaagacatataaactgccactgtggtctcctaccggcaacatg

SEQ ID NO: 36608 - DNA, 54 bp, synthetic construct
  source 1..54: mol_type = other DNA
gacctgatgtgggccagctctggcaactccttctacaccatccccaaactcacc

SEQ ID NO: 36609 - DNA, 69 bp, synthetic construct
  source 1..69: mol_type = other DNA
ccccagatcttctatccacctatggcccggagctacagcctgcccgtctggtcaagttcggtcaatatg

SEQ ID NO: 36610 - DNA, 54 bp, synthetic construct
  source 1..54: mol_type = other DNA
gacctgatttggagcagttccggcaactctctctacgtgatcccctctcttacc

SEQ ID NO: 36611 - DNA, 63 bp, synthetic construct
  source 1..63: mol_type = other DNA
cctatcttctacccaagcatgattaaggcttacgacctgcccttttggggaccagcaggtgat

SEQ ID NO: 36612 - DNA, 54 bp, synthetic construct
  source 1..54: mol_type = other DNA
gacatcatgtggacatctagcggcaccagtttctacattatcccttcccttacc

SEQ ID NO: 36613 - DNA, 69 bp, synthetic construct
  source 1..69: mol_type = other DNA
ccacagatgttctacccttccatgaagactaactactctatgccctcttggaaccctggattcgacgtg

SEQ ID NO: 36614 - DNA, 54 bp, synthetic construct
  source 1..54: mol_type = other DNA
accctgatgatgaacgctgccggcgacagcctgtactatatccctactctcacc

SEQ ID NO: 36615 - DNA, 57 bp, synthetic construct
  source 1..57: mol_type = other DNA
ttctacccatccatgatccggagctatgatctgcccttttggggaccagcaggtgac

SEQ ID NO: 36616 - DNA, 54 bp, synthetic construct
  source 1..54: mol_type = other DNA
ggcgccatgtggacttcttctgaaacctcattctacgtgatcccctctttgaca

SEQ ID NO: 36617 - DNA, 57 bp, synthetic construct
  source 1..57: mol_type = other DNA
ctctaccccgtgatggagcacctgttcatcctgcctagctggaagaccgtcagtggg

SEQ ID NO: 36618 - DNA, 54 bp, synthetic construct
  source 1..54: mol_type = other DNA
atgatcatgtgcgcctccgctggcgacagcttctacattgtgccacggttgtcc

SEQ ID NO: 36619 - DNA, 69 bp, synthetic construct
  source 1..69: mol_type = other DNA
ccacagatgttctatccatcaatgatgcggagttactccatgccctcttggcaccctggcttcgacatg

SEQ ID NO: 36620 - DNA, 54 bp, synthetic construct
  source 1..54: mol_type = other DNA
accctgatgatgaacgccgctggcgacagtctgtactacgtgcccactctcaca

SEQ ID NO: 36621 - DNA, 69 bp, synthetic construct
  source 1..69: mol_type = other DNA
cctgagatgttctacccgtctatgacctcccggtactctctgccggtttggcatccaggctttgacatc

SEQ ID NO: 36622 - DNA, 48 bp, synthetic construct
  source 1..48: mol_type = other DNA
atgatggacgccgctggcgatagcttctattacgtgccctctcttact

SEQ ID NO: 36623 - DNA, 234 bp, synthetic construct
  source 1..234: mol_type = other DNA
atcattgggaacgacgtgtatttcatgatcgtggtgaccaataccggaaattgtgacctgagcgacgtgaaggtctctgagatatttaattccaacaacctcaccctggttgattataataacaagtctctctggtccatgagcggggacgtgttcacctactacgacgtgttggccccgggggagtccgtgaattttaccatctggttcacaaccctggtcaacggaacagtg

SEQ ID NO: 36624 - DNA, 48 bp, synthetic construct
  source 1..48: mol_type = other DNA
accgtgaacgctagctccaacatgaccgacaacaagacagccaataat

SEQ ID NO: 36625 - DNA, 219 bp, synthetic construct
  source 1..219: mol_type = other DNA
aacctcaccgcctttaaagttatcgtgacaaacaccggcgattgcgacctgagcgacgtggtcgtgtccgagatctataaccacaatcagctcaaatttgcgcgtttctctggcgatggatggatcaatagcacagacgtctaccgctatgggggagtgctgaagcccggcgaatccgctaacttcactatttggttcaccacactggtcaacggaacg

SEQ ID NO: 36626 - DNA, 57 bp, synthetic construct
  source 1..57: mol_type = other DNA
accgacaacaagaccgccaacaacgagacacgggtctacaaacccaacatgactgtg

SEQ ID NO: 36627 - DNA, 297 bp, synthetic construct
  source 1..297: mol_type = other DNA
atcggcgaccagatctccttcatcgttaatgtcaccaatactggcaactgcgtgctgcacaacgtgacagtgaccgagatctataagctgaatgagctctcctacgtgaaccacaccaacaaggatctttggatcaaatccggaaatattttcaagtacaagggcaacctggccgctggccagagcgtggtctttaccatcgtgttcgatacactggtcaacgggaccttagttaacactgtcaacgcaacaagcgacgagactgacaacgtcactgccaagaataagacccttgtt

SEQ ID NO: 36628 - DNA, 174 bp, synthetic construct
  source 1..174: mol_type = other DNA
attatcggcgacaatgtgtacttcatgatcgtcgtcaagaacaccggcgactgtaacctcaccgatgtcaaggtcaccgaaatatataattccaatgagctgaccctggtggattttgacaacaagtccctctggtccatgtctggcgacgtgttcgcctacaacggagttctg

SEQ ID NO: 36629 - DNA, 159 bp, synthetic construct
  source 1..159: mol_type = other DNA
ggctccaattttgagttcatcaattgcactctggccaacgggacctcttacactggcgacacctggtacatcggcaacctcaacaacggcactaacgtgaccttcaccgtgtacacacgggctattcacgacgggattgacatcccacataacgtctcc

SEQ ID NO: 36630 - DNA, 204 bp, synthetic construct
  source 1..204: mol_type = other DNA
ggaaccaatgccagcaacatcaagctgagcgagcttatccccaaggagttcgagtttatgtactcaagcgacgatgtcgcttataataacgaaacaggcgtctggactatcggcaacctggccaatggcacaaacgtgaccctgaaaatttacactcacgccaaggtgcctgcatctgacattgagaacaaagtcaacgtaacc

SEQ ID NO: 36631 - DNA, 60 bp, synthetic construct
  source 1..60: mol_type = other DNA
aacaatctgaccgtggtcgggccccggggtgccactgacatggttaactgtacaatcgcc

SEQ ID NO: 36632 - DNA, 81 bp, synthetic construct
  source 1..81: mol_type = other DNA
agcgttaatatcacttccgataaagacgaatactttgtggatgacattgccgtctggaccatcactgtccataacgccgct

SEQ ID NO: 36633 - DNA, 39 bp, synthetic construct
  source 1..39: mol_type = other DNA
cccaacggcatcaataacacagacaactgcaccgtgtac

SEQ ID NO: 36634 - DNA, 81 bp, synthetic construct
  source 1..81: mol_type = other DNA
atctccgtcaatatcacctccgataaggacgagtactttatagatgatattgctgtttggacgattacggttagcaacgca

SEQ ID NO: 36635 - DNA, 66 bp, synthetic construct
  source 1..66: mol_type = other DNA
ccctacatctttgtggatacaatgaaatcctattacaccctgccttgctgggacccaggcttcaat

SEQ ID NO: 36636 - DNA, 51 bp, synthetic construct
  source 1..51: mol_type = other DNA
gaagccatccggtctaatacggataaattctattaccctaccaactacaca

SEQ ID NO: 36637 - DNA, 57 bp, synthetic construct
  source 1..57: mol_type = other DNA
tacgtgaagggcatcccccttctcaaccctaccctgcggtatcagctgaaagcttcc

SEQ ID NO: 36638 - DNA, 261 bp, synthetic construct
  source 1..261: mol_type = other DNA
cgctctctgaatgaaatgatgatcacttccgccatcaacccaatttacacacttcaatctcgcgtggacttcacggtccatgtcttgaacgagctggattttctgtctggcaattttggccttatgcacggaggcttcattctgaaaacattgccgggaagcgactatggcccaagaatgatggtcggcaaactcatttcgtggcgcaacgggattactataaccccaaccctgatcggggggatgattatcgattttggt

SEQ ID NO: 36639 - DNA, 69 bp, synthetic construct
  source 1..69: mol_type = other DNA
attaccgtcatctcccggctgttctctggcgagattagcttcgaacaagcagtaatgggcatcatcact

SEQ ID NO: 36640 - DNA, 69 bp, synthetic construct
  source 1..69: mol_type = other DNA
cctcagatgttctacccaaccatgagcaagtcctactcgatgccatcatggcatcccggctttgacatg

SEQ ID NO: 36641 - DNA, 51 bp, synthetic construct
  source 1..51: mol_type = other DNA
ctcatgttgaacgcggccggcgacagcctgtattatgtgccgtctctgact

SEQ ID NO: 36642 - DNA, 42 bp, synthetic construct
  source 1..42: mol_type = other DNA
gcttcagtccgcgtactgaaggccgtcactaccaactcgccc

SEQ ID NO: 36643 - DNA, 114 bp, synthetic construct
  source 1..114: mol_type = other DNA
aagcggatcatatactctggcggcggcaaggacatcgaggatcggtcccatcacgcctggattattcccctgttcaccatcacaagcgctgtcaagggatgccagatgaacacc

SEQ ID NO: 36644 - DNA, 84 bp, synthetic construct
  source 1..84: mol_type = other DNA
taccggatgcctcaaacactaagccgagggggcatcggactggaatatgtgcttgccattcccggcttgaaccctctcttgcct

SEQ ID NO: 36645 - DNA, 69 bp, synthetic construct
  source 1..69: mol_type = other DNA
cctcagatgttctaccccacaatgtccgccacctactcgatgcccagttggaacccaggattcgacgtg

SEQ ID NO: 36646 - DNA, 54 bp, synthetic construct
  source 1..54: mol_type = other DNA
accctgatgatgaacgccgctggcgacagcctctattacgttccttcacttacc

SEQ ID NO: 36647 - DNA, 120 bp, synthetic construct
  source 1..120: mol_type = other DNA
ctgggccgctaccctgtagcccctatcgacgtgattaagacaattctgagcccaatcttcccctctctggtggtttcttctgagctgaacagtatcgtgttcacaatcaggcttcctcgg

SEQ ID NO: 36648 - DNA, 30 bp, synthetic construct
  source 1..30: mol_type = other DNA
atcttcaagaaccccctcgtatccccggac

SEQ ID NO: 36649 - DNA, 84 bp, synthetic construct
  source 1..84: mol_type = other DNA
aagttcatggccgatccctacgacaagctccctcaaatcacgtattggctgatgggcagcctctccgccgtgaacttcgataag

SEQ ID NO: 36650 - DNA, 30 bp, synthetic construct
  source 1..30: mol_type = other DNA
cggacatttatttcaatagagattccaata

SEQ ID NO: 36651 - DNA, 48 bp, synthetic construct
  source 1..48: mol_type = other DNA
atggggcttacacactctatacatcaggccacaggcatcaacatctct

SEQ ID NO: 36652 - DNA, 30 bp, synthetic construct
  source 1..30: mol_type = other DNA
ctcgacctgcccgtgcctctgaaggatgat

SEQ ID NO: 36653 - DNA, 36 bp, synthetic construct
  source 1..36: mol_type = other DNA
ttatacgatggccggatggagttcatggatcatctg

SEQ ID NO: 36654 - DNA, 36 bp, synthetic construct
  source 1..36: mol_type = other DNA
agcgccaccatggagatcacacccttcgaagctatt

SEQ ID NO: 36655 - DNA, 69 bp, synthetic construct
  source 1..69: mol_type = other DNA
ccccagatgttctacccttcgatgcaaactaattattcgatgccatcttggaatcccggctttgacatg

SEQ ID NO: 36656 - DNA, 54 bp, synthetic construct
  source 1..54: mol_type = other DNA
accctcatgatgaacgctgccggcgacagcctgtattacatccctactcttacc

SEQ ID NO: 36657 - DNA, 66 bp, synthetic construct
  source 1..66: mol_type = other DNA
cccaagctcttttacccatccatgtctgccacctacatcctgccaagttggaagcctgcttggtcc

SEQ ID NO: 36658 - DNA, 51 bp, synthetic construct
  source 1..51: mol_type = other DNA
gtgatgtgggagagctccggggactcattctacattctgccgtccatctcc

SEQ ID NO: 36659 - DNA, 57 bp, synthetic construct
  source 1..57: mol_type = other DNA
gcttatccgccactggccaagctcttcgtgatgccctactttacccctgtcggaggc

SEQ ID NO: 36660 - DNA, 57 bp, synthetic construct
  source 1..57: mol_type = other DNA
gacatggtctggaagtcctctagcgagaagtccttcatacttccgagtatcagttgg

SEQ ID NO: 36661 - DNA, 66 bp, synthetic construct
  source 1..66: mol_type = other DNA
ccctacatctttgtggatacaatgaaatcctactataccctgccatgctgggaccctggcttcaat

SEQ ID NO: 36662 - DNA, 51 bp, synthetic construct
  source 1..51: mol_type = other DNA
gaaagtattcgctcaaatactgataagctctattaccctgctgactactct

SEQ ID NO: 36663 - DNA, 69 bp, synthetic construct
  source 1..69: mol_type = other DNA
ccccagatgttctaccctagcatgcagaccaactactctatgccatcctggaaccccggattcgacatg

SEQ ID NO: 36664 - DNA, 51 bp, synthetic construct
  source 1..51: mol_type = other DNA
ctgatgatgaatgccgccggtgactccctctattacatcccaacactgacc

SEQ ID NO: 36665 - DNA, 129 bp, synthetic construct
  source 1..129: mol_type = other DNA
ggaagcggcggcatctatcctgtcgagatcatgaacacaatcttcggcatcctgtacccatacctgccaatgacccacgggattaatatagtcagggaagcacagctcgggctgctgtggaacaactac

SEQ ID NO: 36666 - DNA, 42 bp, synthetic construct
  source 1..42: mol_type = other DNA
gggatttggaagttcagcttttccgtttatgagaacggcggt

SEQ ID NO: 36667 - DNA, 90 bp, synthetic construct
  source 1..90: mol_type = other DNA
ctgtttaagggctggggctctaaccctagcgtgttcttcactcggaccttgctgcatagtacctccaacccctacggactcacatatctg

SEQ ID NO: 36668 - DNA, 75 bp, synthetic construct
  source 1..75: mol_type = other DNA
agcctgcctggctcccggaccgggatcatggtgctgttctctcccaactgggactacctgttcgactcctcactc

SEQ ID NO: 36669 - DNA, 108 bp, synthetic construct
  source 1..108: mol_type = other DNA
ggctacgctgccctggggaacaacattaccatcacctccctcgtgtctgacggatacagcctcatcttcgtcgtgcttccgaccgctttcaatctgatgggtccttgg

SEQ ID NO: 36670 - DNA, 132 bp, synthetic construct
  source 1..132: mol_type = other DNA
tacaatccgggcatactgaccttcgattcatttaaccaagtgcatcaaatcgcaagcgggagatacactaactggcacccttttttccataccttcatcgaaatgctgctgtacaagatttactcatctccc

SEQ ID NO: 36671 - DNA, 60 bp, synthetic construct
  source 1..60: mol_type = other DNA
ctgacaccggagcaaaaggtatctccttccgagaccgtcaagaaggaagatgaatacgac

SEQ ID NO: 36672 - DNA, 69 bp, synthetic construct
  source 1..69: mol_type = other DNA
ctggagaatagctccgcctttttcaacatcgacgacctgtctgctgtgaacattgtttttcaactattt

SEQ ID NO: 36673 - DNA, 270 bp, synthetic construct
  source 1..270: mol_type = other DNA
atacatgggtcatcgctctccctcctgaacatcagtgccaaccagcatagcgccctctttggcgtccccttcaccgtgcacggggatgagttttccgtggcaacaccattcgcttttagtcaatattttaataacttcgcttatttttcggacatcgtccgtagcgtgccaaccgacatgttcctgctatacggacagcccgtgctggacatcgcttctttatttagacccttcttctggggctaccttttcctgcctaagggaatgggc

SEQ ID NO: 36674 - DNA, 168 bp, synthetic construct
  source 1..168: mol_type = other DNA
tacgacgcactgtttactaccctcaacacatattaccctggcggaaggaagtatttcggcggagtcgatctgtactacggcgccgctaatcccacatacctgctggactacatgcggaccctgttctatgccctcacaccccaacaacttcccgtcaagatctcattg

SEQ ID NO: 36675 - DNA, 57 bp, synthetic construct
  source 1..57: mol_type = other DNA
atcaccttccccgagatagttggaaagattacactgctgtccatgagcatgtctact

SEQ ID NO: 36676 - DNA, 39 bp, synthetic construct
  source 1..39: mol_type = other DNA
gaggaaatcggcaatcggctggtacctgccgtgaacaac

SEQ ID NO: 36677 - DNA, 96 bp, synthetic construct
  source 1..96: mol_type = other DNA
gagggcgcagacgccttcggggatatcggagtgctcgactttctcactggtgacgtctggagaccctacgccgactcttatggctctgctacactg

SEQ ID NO: 36678 - DNA, 45 bp, synthetic construct
  source 1..45: mol_type = other DNA
atccacagcatgttcccggaccaaacaacgtccggactgacatgg

SEQ ID NO: 36679 - DNA, 117 bp, synthetic construct
  source 1..117: mol_type = other DNA
gggaacacagcagtgttccctgaccccgcttgggacgtgtttagcggaatccggacactcaccgccaccctggccattgagatgccagaggtcgttgtcgggtccacctggtactct

SEQ ID NO: 36680 - DNA, 81 bp, synthetic construct
  source 1..81: mol_type = other DNA
caagcactgcctgccctttctctcgattttatcaccgaggacccggttagagcggggcgatctggcggaatttaccccgcc

SEQ ID NO: 36681 - DNA, 42 bp, synthetic construct
  source 1..42: mol_type = other DNA
acgactctgggccccgttatcggagcaaccgggtacaatctg

SEQ ID NO: 36682 - DNA, 114 bp, synthetic construct
  source 1..114: mol_type = other DNA
gccgtggtggtacagtcctccgtttctgattatagcctgactaaccccgtgatggctctgccttaccacctttacttcctcgcaaccgagggccgggcagatccatctatgaca

SEQ ID NO: 36683 - DNA, 39 bp, synthetic construct
  source 1..39: mol_type = other DNA
gtgggcagattccagcaagaggcagtgacactgttgggc

SEQ ID NO: 36684 - DNA, 69 bp, synthetic construct
  source 1..69: mol_type = other DNA
gagaactcccacctgttctatcaaattgatgggatcgaatatctcaagatcctgcttggcgtgatttcc

SEQ ID NO: 36685 - DNA, 270 bp, synthetic construct
  source 1..270: mol_type = other DNA
atccatggtagttcgataggcgtaattaacttcgctggcgaatctcacaaacccctgctgggctccctgaggtggacaaagactgacgaatatgcgattaataccatgttcgccttttctcaatacttcaacggcttcggatatttctcggaaatcatccgcgccttccctaccgatgtctttgccatcggagagctgccaattctcgacctggtggtgctgttcaagccctttcaatggggttatctgctattctcacaaggaagaggc

SEQ ID NO: 36686 - DNA, 177 bp, synthetic construct
  source 1..177: mol_type = other DNA
aaaagtagccaggctatcaacaccctgagcaacaccatctaccctggcctgcggctttctacgggaggtgccaacttctattggctgagcggcgatccatacctctgcttcgactacatgcgcaatctctttgagccccttaagccgactcaaataatttcccgcatttccatgtct

SEQ ID NO: 36687 - DNA, 57 bp, synthetic construct
  source 1..57: mol_type = other DNA
tttacattccccgaggcttacgccaagatcaccctgctgggcaaaactcaaccttcc

SEQ ID NO: 36688 - DNA, 174 bp, synthetic construct
  source 1..174: mol_type = other DNA
gggcagattaatatccactcggatagcgctaccgcctccctgctcgtcaagtctatgatcgacaacattagcctcatcccttcttcctggaattacgcaaacggcgacgtctggatcctgggctcccatctcttcgtgttcttgccccaaatattcatctctgatgtgtcactc

SEQ ID NO: 36689 - DNA, 150 bp, synthetic construct
  source 1..150: mol_type = other DNA
tgccacagtaattactatcacgtccatttcacatccaacgacgatctcatcttaccgaacagcattaccgacctgtacaacaacattcaggtgaccctggccaacttcttctacaatttcgggtacaacggcaacgtgaagatcttctca

SEQ ID NO: 36690 - DNA, 30 bp, synthetic construct
  source 1..30: mol_type = other DNA
ggaaacgcaagccccgaacggctgaaggag

SEQ ID NO: 36691 - DNA, 33 bp, synthetic construct
  source 1..33: mol_type = other DNA
gtggacgtcggcatcaagaataagcagatcaac

SEQ ID NO: 36692 - DNA, 33 bp, synthetic construct
  source 1..33: mol_type = other DNA
acaatggtcatcaacaacagcattaccatcggc

SEQ ID NO: 36693 - DNA, 39 bp, synthetic construct
  source 1..39: mol_type = other DNA
aagtatacccaaagcaaaaggcagcccaagaaccttcct

SEQ ID NO: 36694 - DNA, 93 bp, synthetic construct
  source 1..93: mol_type = other DNA
atgcaatgggtctcgcaaaatattgggatcatgatgctgaatgccggcgtggacccatttctccacgatctagtcatatccgggatactggga

SEQ ID NO: 36695 - DNA, 138 bp, synthetic construct
  source 1..138: mol_type = other DNA
tttggaacagtggacggcaaatggttcgtgtacctgggcgataaccagacctcaggctcgtatctggctgccttcggcaacgcatttacttggatgttcgccccaatgggcttcggcgataaatgggagcttagtgtg

SEQ ID NO: 36696 - DNA, 81 bp, synthetic construct
  source 1..81: mol_type = other DNA
ctggcagtgctccttgactctagcgccgatagcgaaggattcatcaccgccgcgtctctggcgaactatactactgttggt

SEQ ID NO: 36697 - DNA, 117 bp, synthetic construct
  source 1..117: mol_type = other DNA
actgactggattaacgatacactgacggcagatctctccgatgccgtctctacctggtgcgaggacaacgaggtggcagatgccctgagtggcctggtagtggacgggatcatcagc

SEQ ID NO: 36698 - DNA, 129 bp, synthetic construct
  source 1..129: mol_type = other DNA
tcctatgactggggccttagttatctagggagcaataccactgaaggctccgctctgtccgatatcggccacgccctgaaccccattttcgcctggtctggatttggcgatcattgggagatcacagtg

SEQ ID NO: 36699 - DNA, 84 bp, synthetic construct
  source 1..84: mol_type = other DNA
ctggccgtgctgctcggcgatcccggggacgctgagggctttatcaccgccgacgcccttgctgcatactgttcatccaacact

SEQ ID NO: 36700 - DNA, 120 bp, synthetic construct
  source 1..120: mol_type = other DNA
tccgactacattaacgacgagctcgttgtttgggtacaagaccacgccgccgaggctatggacagcgctggagtggatacagtcgtggccgacatgatgctgaccggcgtcattggaggc

SEQ ID NO: 36701 - DNA, 135 bp, synthetic construct
  source 1..135: mol_type = other DNA
agttttaccttcaccggcgaatacttgggagacagtgcaacaactgactccattctctctgccatcggcaaggccctgtgctggatcttcgtgcccctgggctttggtggcagcgagacatgggagctgacagtg

SEQ ID NO: 36702 - DNA, 93 bp, synthetic construct
  source 1..93: mol_type = other DNA
gccgttctcctggatagcgcggttggcatagacggtcttcctacgatggaggttcttaccgaatatttaagtgttaccgcttaccctgaggct

SEQ ID NO: 36703 - DNA, 150 bp, synthetic construct
  source 1..150: mol_type = other DNA
ggcgacatcactggcattggcacctacctgaccgattggctgaatggatacatagaggaccctatcggcacctccgtcgagcagtggtgcgctgacaacaacgtgtctgaaccacttacgggtttaatcatgagcgccttcatcgggggt

SEQ ID NO: 36704 - DNA, 132 bp, synthetic construct
  source 1..132: mol_type = other DNA
tcttatgacccctcgtttaattatctgggtgctgacgcgaccactgattcaattttacaaactatcgggcaagccgtctgtgtcatcttccaacccctcggctgggctgatcattgggagttgaccgttggg

SEQ ID NO: 36705 - DNA, 84 bp, synthetic construct
  source 1..84: mol_type = other DNA
ctcgggaccctcttttctctagacgaagttggagacgccggcgaggaatactgggatatcctggccgcttacctgacacctgcg

SEQ ID NO: 36706 - DNA, 150 bp, synthetic construct
  source 1..150: mol_type = other DNA
ggggactttgtcgggatcgggacctacctgactgactggctgaatggcttcatcgagaaccctatcggcacttctgtcgaggagtggtgcgctgacaacgacgtctcggaccccctgaccggcctcattatgtccgccttcattggcggc

SEQ ID NO: 36707 - DNA, 135 bp, synthetic construct
  source 1..135: mol_type = other DNA
tcttatgatggttcctttaactaccccggagcagacgccactaccgatagcatcctccaaagtatcggagaagtgattagcatcatctttcaaccacttggctgggaggatcactgggaactcaccgtggtcggc

SEQ ID NO: 36708 - DNA, 78 bp, synthetic construct
  source 1..78: mol_type = other DNA
ggcactctcttttccttcgacgaagtatcggaggccggcgaggagtattgggccatcctggctacctacattacacct

SEQ ID NO: 36709 - DNA, 63 bp, synthetic construct
  source 1..63: mol_type = other DNA
gtggccgacaaggagattgacgtgacccggttgctatactcatcgatggtcaatggtggcatc

SEQ ID NO: 36710 - DNA, 45 bp, synthetic construct
  source 1..45: mol_type = other DNA
tttacccacaactacgactatcggttcgatagactgaagccagct

SEQ ID NO: 36711 - DNA, 30 bp, synthetic construct
  source 1..30: mol_type = other DNA
tccagcattaaggcctgcatcaaaccagtg

SEQ ID NO: 36712 - DNA, 30 bp, synthetic construct
  source 1..30: mol_type = other DNA
gcaggatcggtagtggacatcgtgctgaag

SEQ ID NO: 36713 - DNA, 228 bp, synthetic construct
  source 1..228: mol_type = other DNA
gccgagattataagtagcaaatacgatgtcaactatgaccggctgtctacctgcctgtttgtgattggtggcagcgccgctgccggagctctcggtggagtggccggttactgggccgtgaccgctgggacatctgcccagcccgtgcagaacggcgtatcctttcaattcggtatcgaggaggatgaagtgatagaggacgccgtcgtcaagactctgttcggtcgg

SEQ ID NO: 36714 - DNA, 192 bp, synthetic construct
  source 1..192: mol_type = other DNA
agaactaatcaagggggtgccatcacctggatgggctccgatggcgagatttcctactgtagcttcaagaacaaccacgttgactaccccaatgatggcggtgccatctattgggccggagaaaacggcaaaatcacttactgcgagttcctggataataacgcattctgtggttccgctgtgtactggagc

SEQ ID NO: 36715 - DNA, 72 bp, synthetic construct
  source 1..72: mol_type = other DNA
accaacaagggcggagccatcgtttggaatggcgacaacgggctggtgtctaactgcgctttcaagaacaac

SEQ ID NO: 36716 - DNA, 129 bp, synthetic construct
  source 1..129: mol_type = other DNA
ggcgctatcttctggaacggagacgacggccgcatcaccgactgcgagttctatgataatgctgcctggctggggtccgccatctactgggccggcaatgacggcgtcgtggagtacagcaagttcaat

SEQ ID NO: 36717 - DNA, 72 bp, synthetic construct
  source 1..72: mol_type = other DNA
aagaaagggaagtacacaatcaaaaccacatacaatggcctgaccaacagcaacaagatcatcgtgaagaaa

SEQ ID NO: 36718 - DNA, 108 bp, synthetic construct
  source 1..108: mol_type = other DNA
tatacaggattcatcggcgctgggaactactaccccgacgcctacgaggagcacattgactggttcactgtcgggaatttcactctgaccttcgggttctacatcgat

SEQ ID NO: 36719 - DNA, 78 bp, synthetic construct
  source 1..78: mol_type = other DNA
atgaacgggcacctcgagtacacctacgtcttcaacgtggacaatttggcggccgcatatagcgctgctggaaatcct

SEQ ID NO: 36720 - DNA, 78 bp, synthetic construct
  source 1..78: mol_type = other DNA
ttgatggcgtcggccatatccgtggagggtggcggaatcgtgattgaaaacatcgctgagttcacggcggcaggggcg

SEQ ID NO: 36721 - DNA, 30 bp, synthetic construct
  source 1..30: mol_type = other DNA
gagctgttcgaaggcaacatcaacaacacc

SEQ ID NO: 36722 - DNA, 129 bp, synthetic construct
  source 1..129: mol_type = other DNA
tgggaacacgtgtttactttctcccaagttggggccgtcgccaacggagacgctatttcttacttcctagttgggggtgcaggcaaagtgtttgagatttccctggaccccgtcctggagctcttcaaa

SEQ ID NO: 36723 - DNA, 186 bp, synthetic construct
  source 1..186: mol_type = other DNA
gccatcccaaagtggcaactacaacattcgatcaacatttccaactgggacagctacatctatctggacaatggcaggtccttcgctggcatgggctggggcgatttaccgcaaatagcgccttttgtgtctttcatgctgagcattatgttccggctcaacggcaatgtctacgctggagctatt

SEQ ID NO: 36724 - DNA, 186 bp, synthetic construct
  source 1..186: mol_type = other DNA
tacaccggcaaccctatccccttctttggccaattcgcgggcaccgtgtcgaatgtgaaggtgctcgactccggatacatgccggatccctggtactatctcacctacctgcctaactacctgagtagcgtcatgggcggatcaaccactgccgctgacctgctgacaccatctaagaacacccca

SEQ ID NO: 36725 - DNA, 42 bp, synthetic construct
  source 1..42: mol_type = other DNA
cggaactttatcaatacaaattgtagcaacgtgtccatcttc

SEQ ID NO: 36726 - DNA, 36 bp, synthetic construct
  source 1..36: mol_type = other DNA
agctacttctataacaactctgtcgggtacaatggc

SEQ ID NO: 36727 - DNA, 39 bp, synthetic construct
  source 1..39: mol_type = other DNA
gtgtctgagtccctgatggatatcgacaacagcctgttt

SEQ ID NO: 36728 - DNA, 234 bp, synthetic construct
  source 1..234: mol_type = other DNA
aagaccaatatcagtattatacaactgaacgacacagtgtacaccaggaataaccagaaccagatcttttttcaaatacttgacaacggaggtagcaacgtggagcggggcaagctgatcctcaacatcgacaataacaactacaccgcctccgttgtcaatggcatcgctgagttcgacaacgtcctcctgagtcacaccgggttcttcaactgcaacgtgttctacatagac

SEQ ID NO: 36729 - DNA, 117 bp, synthetic construct
  source 1..117: mol_type = other DNA
tttggtcctagtcattcaatgtcccttagcgaggccgctggtaacctcgtctccgcaatcgacaagggcgggaaggggctgaccaatgatgagctatacgtctacgaatctagactc

SEQ ID NO: 36730 - DNA, 42 bp, synthetic construct
  source 1..42: mol_type = other DNA
gcctctggcttcaccctctggggcctgctctcaagctccaac

SEQ ID NO: 36731 - DNA, 81 bp, synthetic construct
  source 1..81: mol_type = other DNA
attctcaccacgagcgactctgaggacctgcaaaacgccgtctcatggctatatggatcatttacttctgtcgactgggat

SEQ ID NO: 36732 - DNA, 66 bp, synthetic construct
  source 1..66: mol_type = other DNA
gagaactccagctacttctacaccattcccaagactatcattctgaccgagttcctgcggtttttc

SEQ ID NO: 36733 - DNA, 270 bp, synthetic construct
  source 1..270: mol_type = other DNA
ctgcacggatctagcatcgccaaacttgacatctctgacatgatgcacaagtccatcttcggcatcgcccggaacatcagaagtgacgagtttaacgtgaatacaatgtttgcattctcgcaatattataacaatttcaactacttttccgcgatacctcgagccgcacctaccgatatgttcatcgtctatgggcagccggtttgggatctcctgattctgtaccggccattcctcattgggtacctgttcctgagccctgctaaggga

SEQ ID NO: 36734 - DNA, 153 bp, synthetic construct
  source 1..153: mol_type = other DNA
atgtcttgggacaccatcgtgaccgtgctgaacacatcctaccccggcggacgagtttttactggaggcggccagatcactaagctcggcgaatacgccgctaacctgatctttcctctcttccctgagaaatcccctgatctcgtcaataat

SEQ ID NO: 36735 - DNA, 57 bp, synthetic construct
  source 1..57: mol_type = other DNA
ggcaattggcccgagctgatcgccaaggtgaccctgctcgggaaaagccttaacgaa

SEQ ID NO: 36736 - DNA, 42 bp, synthetic construct
  source 1..42: mol_type = other DNA
tacttcgggactttcatcctgtttgagctcgacacattgacc

SEQ ID NO: 36737 - DNA, 69 bp, synthetic construct
  source 1..69: mol_type = other DNA
accctccaagttgatggcgtagtgttttctctgacaaaggagtaccactacgagatcctggggaaacca

SEQ ID NO: 36738 - DNA, 30 bp, synthetic construct
  source 1..30: mol_type = other DNA
atttccagcggcttcaccatcggacctctt

SEQ ID NO: 36739 - DNA, 33 bp, synthetic construct
  source 1..33: mol_type = other DNA
atcagcaccgacttcaacattggaccacactac

SEQ ID NO: 36740 - DNA, 33 bp, synthetic construct
  source 1..33: mol_type = other DNA
atcagcaccgacttcaacattggaccagcttac

SEQ ID NO: 36741 - DNA, 30 bp, synthetic construct
  source 1..30: mol_type = other DNA
atccccgacgtctacgtcggtttctatggc

SEQ ID NO: 36742 - DNA, 30 bp, synthetic construct
  source 1..30: mol_type = other DNA
atcagcgatgacttcaacgttggattctgg

SEQ ID NO: 36743 - DNA, 33 bp, synthetic construct
  source 1..33: mol_type = other DNA
agcgccgacttcaccatcggaccagaatacaac

SEQ ID NO: 36744 - DNA, 30 bp, synthetic construct
  source 1..30: mol_type = other DNA
tgcagcgactttacctacacattctggtac

SEQ ID NO: 36745 - DNA, 33 bp, synthetic construct
  source 1..33: mol_type = other DNA
atcagcaccgatttcacggtcggtccctggtac

SEQ ID NO: 36746 - DNA, 30 bp, synthetic construct
  source 1..30: mol_type = other DNA
agcgccgacttctccatcggaccatggtac

SEQ ID NO: 36747 - DNA, 33 bp, synthetic construct
  source 1..33: mol_type = other DNA
atcagcaccgactttaccgtcggaccttggtac

SEQ ID NO: 36748 - DNA, 30 bp, synthetic construct
  source 1..30: mol_type = other DNA
agcacagacttcactgttggcccatggtac

SEQ ID NO: 36749 - DNA, 30 bp, synthetic construct
  source 1..30: mol_type = other DNA
agcgccgacttcaccatcggaccttggtac

SEQ ID NO: 36750 - DNA, 117 bp, synthetic construct
  source 1..117: mol_type = other DNA
gtgaataccgcaaccgtcactggcaacgaatacgattacaaccctaataacaacaaggccagcaagaccatcaacgtccccaaggccgctgacctgtccattaataaggtggtcaac

SEQ ID NO: 36751 - DNA, 252 bp, synthetic construct
  source 1..252: mol_type = other DNA
gacctcgtcaaatggaccctcaccgttcgcaacatcgggcccgactccgcttctaatgtgacagtatcagatattctgcctgccgggctgatttatcaatcctatagcgctagtgttggctcttacattaacggcatctggtacatcggcaatctggccaagggcgacagcgtaaccctgaacatagtttgcaaagtaaacaagaccggcagcattacaaacgttgcatccgtgaccgccaccgaatacgac

SEQ ID NO: 36752 - DNA, 294 bp, synthetic construct
  source 1..294: mol_type = other DNA
aaaaccaacaataatgatgacgagtctattgatgtgcctaaagcagccgaccttgaaatcaagaagttggttaacaattcgtcgcccaactaccaccaatacgtgaagtggagcatcatcgtgaagaacaacggccccgacgacgctcacggagtgttcgtggaagatattctccctgacgggctggttgtgatggcagccaatggcgactatgatgggaagaagtggaacatcggcactctgaacgccttctctagcaagaccctcgagatcaccacacttgtaaataaaacc

SEQ ID NO: 36753 - DNA, 30 bp, synthetic construct
  source 1..30: mol_type = other DNA
agcaccgacttcacaatcggaccttggtac

SEQ ID NO: 36754 - DNA, 54 bp, synthetic construct
  source 1..54: mol_type = other DNA
gataacgccgacctggtgcaaaacttctcgaatagttttttcaagcactttagc

SEQ ID NO: 36755 - DNA, 270 bp, synthetic construct
  source 1..270: mol_type = other DNA
atccacgggtcctccattaatgagctgaacttctttggcgtcaaccacaagacccttctgggcgtgtctcgccccattcgcggtgacgaatacgtggttaacacaatgttcgccttctcgcaatatttgaacgatttcgcttattttagtgacatagttcgggcaagcaccaccgacatgttcatcatttacggccagcctgtgctggacatcgggatgatcttccggccattcttgacgggctacctctttctgaaccaaggacaggga

SEQ ID NO: 36756 - DNA, 162 bp, synthetic construct
  source 1..162: mol_type = other DNA
tccctggaaaccatcaaaatcattctcaacaccagctatccgggctctgaggtcttcaacggcggcggagacgtcaatatcttctcctattatattcctactctcttctatcctcttaagcaagacggaatcctcttcgggtcaaacgtttgtaacttttca

SEQ ID NO: 36757 - DNA, 60 bp, synthetic construct
  source 1..60: mol_type = other DNA
attcacctgcccgatttcatcgtggacctcactcttcgtggacatatcaagaactctaga

SEQ ID NO: 36758 - DNA, 48 bp, synthetic construct
  source 1..48: mol_type = other DNA
ggcaacatgcaagtgtacctaatcgagtccagcaagacacctatgacc

SEQ ID NO: 36759 - DNA, 174 bp, synthetic construct
  source 1..174: mol_type = other DNA
tggcaactgcaacattcgatcaacatcagcaactgggactcctacatctatctcgataacggccgctctttcgccggcatgggctggggcgatttacctcaaatagccccttttgtgtcattcatgctctccatcatgtttagacttaacggcaacacatatgccggggctatt

SEQ ID NO: 36760 - DNA, 189 bp, synthetic construct
  source 1..189: mol_type = other DNA
gtgtacaccggcaatcccatcccattctttggccaattcgctgggactgtgtccaacgtcaaggtgctggattccggctatctacccgacccctggtactacctcacctaccttcctcactacctgagctctgtgatgggcggctccaccaccgccgctgaccttctgacacccagcaagaacactccc

SEQ ID NO: 36761 - DNA, 30 bp, synthetic construct
  source 1..30: mol_type = other DNA
atcagcgccgacttcaccattggatactgg

SEQ ID NO: 36762 - DNA, 30 bp, synthetic construct
  source 1..30: mol_type = other DNA
ttcgcctctggcgctatctactctagcacc

SEQ ID NO: 36763 - DNA, 108 bp, synthetic construct
  source 1..108: mol_type = other DNA
tacgttggtttcattggcgatggcaatctgtatcccaacgccgtcgagaaccacatcgactggttcaagattggcatctaccaattgacatttgggtactacattgac

SEQ ID NO: 36764 - DNA, 78 bp, synthetic construct
  source 1..78: mol_type = other DNA
atgggcggccacctcgagtacaatgtggtcttcaacgcggacaatctggctgccgcctacgagaataacagcgagatg

SEQ ID NO: 36765 - DNA, 66 bp, synthetic construct
  source 1..66: mol_type = other DNA
atggcgtgcagtatcgccgtcaccggcggacagatcgtgattgaggagcccgaactgttcgctgtg

SEQ ID NO: 36766 - DNA, 30 bp, synthetic construct
  source 1..30: mol_type = other DNA
gaagtatttgaagaaagttgcggaacagag

SEQ ID NO: 36767 - DNA, 114 bp, synthetic construct
  source 1..114: mol_type = other DNA
tgggatggcgtcttcacctttatggggagcgaacattccgagggccagattcttcaatggatagttggcggttgggaccggcccaacgtcggcgtgcattggctggaagaactc

SEQ ID NO: 36768 - DNA, 51 bp, synthetic construct
  source 1..51: mol_type = other DNA
atcgaacacaacaagctgttctacgagttcagcaacgtgaaatttatctcc

SEQ ID NO: 36769 - DNA, 270 bp, synthetic construct
  source 1..270: mol_type = other DNA
atccacgggtcctctatcaacgagctcaacatctttaaagtctctcataatcccattctcggaatcagccgcgccattaggaccgacgagtacatcgtgaacacccttttcgctttctctcaatatcacaacgggttccaatatttctctgacatcattcgagccgtacccaccgacgttttcattgtttacgggcagcctgtcctggacatcggcatgattttccggccattcttggttggatatctgtttctgaaccaaggacaggga

SEQ ID NO: 36770 - DNA, 159 bp, synthetic construct
  source 1..159: mol_type = other DNA
agcgtcgatacaatcaagctcgtgttcaacaccgtgtaccccggggccctcgtcttcaacggcgacaattctctgaacaccctggccgactacatccctagtatattcttccccatggctccaaacaacctgatccctaacgtctgcgagtgttccatg

SEQ ID NO: 36771 - DNA, 51 bp, synthetic construct
  source 1..51: mol_type = other DNA
cacctgcccgaggcaatcatcaagatttttcttcgggatcacataaatcat

SEQ ID NO: 36772 - DNA, 87 bp, synthetic construct
  source 1..87: mol_type = other DNA
gaggctttcggcgccctgggcgagatggtggccggatacatcgctaacgaatacttggcctcttttatctgcgacgggattatcggg

SEQ ID NO: 36773 - DNA, 108 bp, synthetic construct
  source 1..108: mol_type = other DNA
ttcccactgggggtcgaatatggtagtgcacaaagcgtcctcggaatgatcggcaccgccatcgctcccatcttcgctcctctgggtttcggtacatggcaagctgcc

SEQ ID NO: 36774 - DNA, 84 bp, synthetic construct
  source 1..84: mol_type = other DNA
accttcggcaccctggccggaatggaagaagacgacgaggagggcatcacctccctggtgcacgatacattcacgcccttgtcc

SEQ ID NO: 36775 - DNA, 60 bp, synthetic construct
  source 1..60: mol_type = other DNA
gagaacaactacctgatctcgaacttttccctgaacgacttcatcaacatattctctttt

SEQ ID NO: 36776 - DNA, 270 bp, synthetic construct
  source 1..270: mol_type = other DNA
atacacgggtctagcattaacgagatgaacctcttccatgtgtcacataagcccctgctcggggtttctcgtcctattcgtagcgacgaatacgtggtcaacacaatgtttgccttctctcaatacctaaatgacttcgcctactttagcgacatcgtccgggcgaccacaaccgacatgttcatcatttatggccagccagtcctggatgtggctaccatcttccggcctttcctgatcgggtaccttttcctgaagccagcacaaggc

SEQ ID NO: 36777 - DNA, 159 bp, synthetic construct
  source 1..159: mol_type = other DNA
tcccttgacacaatcaagatcattctgaacacaagctacccttcatcacaatctttcaacggcggcggaaccctgaatagcctgctgtattacatgccaaccatcttctaccctctagtgcaagacaatctcaccatgaatgtttgtaactactctgtg

SEQ ID NO: 36778 - DNA, 57 bp, synthetic construct
  source 1..57: mol_type = other DNA
aaattccccgacctcattgtggatctgaccctgcggagccacatcaagacatctcga

SEQ ID NO: 36779 - DNA, 99 bp, synthetic construct
  source 1..99: mol_type = other DNA
ttcggaccttcccactctatgtcccttagcgaggccgccgggaatctcgtgtccgctatcgataagggcggaaaggggctgaccaacgacgagctgtac

SEQ ID NO: 36780 - DNA, 54 bp, synthetic construct
  source 1..54: mol_type = other DNA
cacagcgccctggtgtctggcttctcacttagctcctttctgaactacttttcc

SEQ ID NO: 36781 - DNA, 270 bp, synthetic construct
  source 1..270: mol_type = other DNA
atccacgggtccagcatcaacgagctcaatttcttcggcctgaagcacgatattatcctgggcgtcagccgtcaaatacggaccgacgagttcaacgtgaatacaatgctcgcattttcccaatattgcaacgatttcgcttatttctccgatatcgtccgggctaacgccactgacatgtttctgatctacgggcagcctgtttgggacattggcatcgtgctcaagcccttcctatggggatacctgttcctgaaccaaggacagggt

SEQ ID NO: 36782 - DNA, 156 bp, synthetic construct
  source 1..156: mol_type = other DNA
agcatggacacaatcaagatcctcatgaataccgtctatcctgccaacgagatcttcaacggaatgggcgagctgtcttacttcctgaactacgtgccatccatcttcttctccattatgccggacggaatttcttcgaatgtggtggaagttagt

SEQ ID NO: 36783 - DNA, 54 bp, synthetic construct
  source 1..54: mol_type = other DNA
gtgctgcccgacttcctgatcgacattaccctccgcggacacgtcaggaacgca

SEQ ID NO: 36784 - DNA, 57 bp, synthetic construct
  source 1..57: mol_type = other DNA
aaccaggccgtgaagaccgggctcaacttcggcaatttttactcgcatttgagcttt

SEQ ID NO: 36785 - DNA, 270 bp, synthetic construct
  source 1..270: mol_type = other DNA
atccacggatctagtatcaacgagctcaactttttcggggtcaagcacaatgtgctgttcgggatcagccgcaacatgcggtccgacgagtacatcgtcaacacactgttcgccttttcacaatatcacaataacttcggatatttctccgatattattagagccgctcctacggatatgttcattatttatggccaggctgtgttcgacatcgccgtaatttttcgaccgttcaacattggctacctgtttctgaaccaaggaatggga

SEQ ID NO: 36786 - DNA, 159 bp, synthetic construct
  source 1..159: mol_type = other DNA
aactccatggacactgtcaaaatcatcatgaacaccgcctacccttctggcgagcggttcaacggcgacggcgattggtccttcctgttcaattatctggcaagtatcttcttccccatgacaaacgctaacatcccactgaacaccgtcgaaaattcc

SEQ ID NO: 36787 - DNA, 54 bp, synthetic construct
  source 1..54: mol_type = other DNA
ccactgcctgaccccattctgtccatcaccctccgcgaccacatgaagacaagc

SEQ ID NO: 36788 - DNA, 42 bp, synthetic construct
  source 1..42: mol_type = other DNA
gagaactgctttgacattagaaatctcaccggactgttctcc

SEQ ID NO: 36789 - DNA, 270 bp, synthetic construct
  source 1..270: mol_type = other DNA
atccacgggagctctattaacgagctcaacatctttgggatcgatcacaacgtgctcatcgggataagtcgcagtatccgctccgacgagtacaacgtgaacacactgatggcattttcccaatactacaataatttcggctatttttcatcgatcttccgggccactccaaccgacatgttcattgtctacggccaggccgtgctggacattgctgttatttttcggcccttcaacatcggctacctgtttctgaaccagggaatggga

SEQ ID NO: 36790 - DNA, 156 bp, synthetic construct
  source 1..156: mol_type = other DNA
tcttacgagacaatcaagatcgtcatgaacactgcctacccggggtctgagatctttaacggctccggcgagtggcacaatctcctgaactacatcgctagcgtgttcttccctctgaccaacattaacatacccgtaaataccgtggagaacagc

SEQ ID NO: 36791 - DNA, 54 bp, synthetic construct
  source 1..54: mol_type = other DNA
atcttacctgattccatcgtgtccataactctgcggaaacacatcaagacaacc

SEQ ID NO: 36792 - DNA, 72 bp, synthetic construct
  source 1..72: mol_type = other DNA
ctgggcgagtacctggtggccagcgttggaaacgaaatgttgggcagctttttacaaaatgggctgattggc

SEQ ID NO: 36793 - DNA, 111 bp, synthetic construct
  source 1..111: mol_type = other DNA
cttccctttggagtggaatatggcagtcaggaatctattctcgggatgatcgggtccgccattgctccaatattcgctcctctcggattctccacttggcaagcgggcatc

SEQ ID NO: 36794 - DNA, 78 bp, synthetic construct
  source 1..78: mol_type = other DNA
ttcactaccctcggcggactcgaggaggatgatgaggaaggcaccgtcgccctggtgcaagacttatttacaccactg

SEQ ID NO: 36795 - DNA, 48 bp, synthetic construct
  source 1..48: mol_type = other DNA
gtgagctgccggctcaacatcaatgacttctttcccttgtttagctct

SEQ ID NO: 36796 - DNA, 270 bp, synthetic construct
  source 1..270: mol_type = other DNA
atccacggatcttccatcaacgagctgaacctgttcggcatcaagcatgacctgatcgccgggattagccggagcattcgctctgacgagtacctcgtgaacaccatgttggcgttcagtcaataccacaacggattcggatacttttcggacattgtccgggccgccccgaccgatatgttcatcatttacggccaggctgtgttcgatatcgccgtgatattccggcctttcaacatcggctacctcttccttaatcaaggaatggga

SEQ ID NO: 36797 - DNA, 159 bp, synthetic construct
  source 1..159: mol_type = other DNA
tctctggacaccatcaagattatcatgaacacagcatatcctggaggggagcggttcaacggcgccggcgaatgggagtacttcttcaactatctggcctccatctttttccctctgaccgaagttaacttgcctattaacgtggtcgaacattctgtg

SEQ ID NO: 36798 - DNA, 54 bp, synthetic construct
  source 1..54: mol_type = other DNA
cctctgcccgactccatcattagcctgaccctccgggatcacatgaagaccacc

SEQ ID NO: 36799 - DNA, 45 bp, synthetic construct
  source 1..45: mol_type = other DNA
agcgtggagacacagctgaatatcggcaacctcattgaaaccttc

SEQ ID NO: 36800 - DNA, 270 bp, synthetic construct
  source 1..270: mol_type = other DNA
attcacggatctagcatttccgaactgaacatctttggcgtcaaccataagccactcatcggcatctctcgcttcatgcggagcgacgagtacctggtcaacaccctgttcgccttctcgcaatatcccaaccacttctcatatttctccgagattgtccgggccgctcccacggatatgttcatagtctacggccaggccatcctcgatatcgctgtgatcttccgccctttcaatatcggctacctgttcctgaaccctggaatgggt

SEQ ID NO: 36801 - DNA, 159 bp, synthetic construct
  source 1..159: mol_type = other DNA
aactctatggacaccatcaagatcctcctgaacacagcctatccgggaggagaggtctttaacggcgatggcacatggaactacctgttcaactatatcgcctccacctacttcccgttaacatccgttaacattcctgtgaataccgtggaaaattct

SEQ ID NO: 36802 - DNA, 54 bp, synthetic construct
  source 1..54: mol_type = other DNA
cagctgccagactccatcatctctatcaccctccggaaccacattaagaccagc

SEQ ID NO: 36803 - DNA, 66 bp, synthetic construct
  source 1..66: mol_type = other DNA
caggacatcaccgtggcttccctgggcgccagcgccctcattcacgagggtacagtgctgtaccag

SEQ ID NO: 36804 - DNA, 93 bp, synthetic construct
  source 1..93: mol_type = other DNA
gtgatcggcggattcataactgctactggagaagttatccccggagttaacgaagccatgttctaccctgtcctgggcatcactagcctgcaa

SEQ ID NO: 36805 - DNA, 42 bp, synthetic construct
  source 1..42: mol_type = other DNA
ggcgggatttccaatgtggccgtcctaatctccaatgccggg

SEQ ID NO: 36806 - DNA, 132 bp, synthetic construct
  source 1..132: mol_type = other DNA
tggcaaacgtcactgggaggaaccgaagttataaatggcgtcacctacgttggagcacaaaatatatatttcgcacaactgtctgactcaagtattgcgcatatatcccctgccgtgacgcaatatttcggt

SEQ ID NO: 36807 - DNA, 87 bp, synthetic construct
  source 1..87: mol_type = other DNA
ctcaactttgccgtcggctgtacattttcctccggcctgctggacctgatcttcctggggatattaccgggagctgagagaacaagt

SEQ ID NO: 36808 - DNA, 129 bp, synthetic construct
  source 1..129: mol_type = other DNA
aagataacgcaaaagttgcccaataacgccaaagggaccattacatacacctacgctaacggagtgctgattaacatcatcaacgtgaatgagtccttcgtcttgtcaaacctggatgccggaacttac

SEQ ID NO: 36809 - DNA, 42 bp, synthetic construct
  source 1..42: mol_type = other DNA
atcatcgtgaacgtgaagaacggcattggcatcagcaccatt

SEQ ID NO: 36810 - DNA, 33 bp, synthetic construct
  source 1..33: mol_type = other DNA
attaccagcaagcccttctccatcgccaaagcc

SEQ ID NO: 36811 - DNA, 63 bp, synthetic construct
  source 1..63: mol_type = other DNA
caggagatcatcattgggcagctgggcctgattagcctcatccacgagggcaccattctgttc

SEQ ID NO: 36812 - DNA, 93 bp, synthetic construct
  source 1..93: mol_type = other DNA
atcttcggaaaagtgattaacagcaccggcgagctattacctggcgcaaaggaaggaatgatcgccacaatcctcggcattcccacacttcag

SEQ ID NO: 36813 - DNA, 42 bp, synthetic construct
  source 1..42: mol_type = other DNA
tcaggcatcgtattcctggcttcctacattagtaacctcggt

SEQ ID NO: 36814 - DNA, 135 bp, synthetic construct
  source 1..135: mol_type = other DNA
tggcagacaagcctgggaggaactcaggttatcaacggcgtgacctatgtcggggctcagaatatctactttgcccaattggccgactcgtcaatcagacatatcagccctagcgtgacccagtactttggcgga

SEQ ID NO: 36815 - DNA, 87 bp, synthetic construct
  source 1..87: mol_type = other DNA
ctgaacttcgccgtcgggtgcaccttctcctctgggctgctcgacctcatctttcttggtatcttgccgggcaatgatagaacaggt

SEQ ID NO: 36816 - DNA, 147 bp, synthetic construct
  source 1..147: mol_type = other DNA
ttcctgtttacaaacagcaacagcaacaccatccccaacctgataggttactctcgttccgacgtcgaaatcctgctccactatctgaatctcgattatagcatttctggatacggctatgtagtatcccaagctgagatagagaac

SEQ ID NO: 36817 - DNA, 69 bp, synthetic construct
  source 1..69: mol_type = other DNA
acccagattgacgagaacactaagctcgagctggccctggatagcaagatcaagtcctctgctagtgaa

SEQ ID NO: 36818 - DNA, 66 bp, synthetic construct
  source 1..66: mol_type = other DNA
cccaagctgttttacccctctatgagtagcacctatatcctcccttcttgggagccagcttggtcc

SEQ ID NO: 36819 - DNA, 51 bp, synthetic construct
  source 1..51: mol_type = other DNA
gtgatgtgggaatcctctggtgacagtttttacatcctgccttccattagc

SEQ ID NO: 36820 - DNA, 66 bp, synthetic construct
  source 1..66: mol_type = other DNA
ccccagctcttctaccctagcctgtctacaacctataagctgccatcctggaaccctgcttggagc

SEQ ID NO: 36821 - DNA, 93 bp, synthetic construct
  source 1..93: mol_type = other DNA
cactttcataacggcacttacgacaagactgagagcgagaagatcaagaatcagacatattacctgctcgacaattattctgtttggagtgga

SEQ ID NO: 36822 - DNA, 39 bp, synthetic construct
  source 1..39: mol_type = other DNA
agcaacttcatcgaagaggacaatccaacccggttgaac

SEQ ID NO: 36823 - DNA, 87 bp, synthetic construct
  source 1..87: mol_type = other DNA
gggttcttcggctggatgggaccctacatcgccgagaacatcggcaacgaggtgctcgggtcatttatctctaatggactgattggc

SEQ ID NO: 36824 - DNA, 48 bp, synthetic construct
  source 1..48: mol_type = other DNA
ttcaccgccatccctgtgttcgctattggcccctttgtcctgacacag

SEQ ID NO: 36825 - DNA, 111 bp, synthetic construct
  source 1..111: mol_type = other DNA
gtgcccttcggggtcgaatatgcatccgacgatagcgcccttggcatgattggtaccgccgtggctcccatcttcgctcccttgggcttcggcgaatggcaagcggggatt

SEQ ID NO: 36826 - DNA, 84 bp, synthetic construct
  source 1..84: mol_type = other DNA
cttgggactctggccggaatcgaagacgtcgagggtgacaccgacgctatggatgcaatggtggccagcctgttcacacctctg

SEQ ID NO: 36827 - DNA, 78 bp, synthetic construct
  source 1..78: mol_type = other DNA
ggttggctgggcccatacctggccgagcgggctggcaatgaaatcttgggctcattcatcgccgacggactcattggt

SEQ ID NO: 36828 - DNA, 48 bp, synthetic construct
  source 1..48: mol_type = other DNA
ttcaccgccatccccgtgttcaagtttggccctttcgtcctgacacag

SEQ ID NO: 36829 - DNA, 111 bp, synthetic construct
  source 1..111: mol_type = other DNA
gtgccttttggagtcgaatacgcaagtgctgactccgccctcggcatgattggtactgccgttagccctatattcgctccactgggttttggagaatggcaggctggcatc

SEQ ID NO: 36830 - DNA, 87 bp, synthetic construct
  source 1..87: mol_type = other DNA
ctcgggacactgagcggcgtggaggacgtcgaagcagacaccgatgctatggacgccatggtcgcctctctgttcaccccattgtcc

SEQ ID NO: 36831 - DNA, 243 bp, synthetic construct
  source 1..243: mol_type = other DNA
gtgaatatcacgaataccggctctagcccgattaccccaagtcgaagcaatcgggaggccggccagaacattacaatcaaaggagttgtgaacgggaatatcattaatactactaagattaccgacgaaaacggcgaaatcgttctggacgccggcgattatcttattatcgtgtcgcacaaaggcgacagctactataccgaagtggccgaaaccctgttcacaaatatggccttcaacgtc

SEQ ID NO: 36832 - DNA, 87 bp, synthetic construct
  source 1..87: mol_type = other DNA
gtcggcttcgaaggcctggtggagatgatctacggcgccctcggcgagtccatgctgtctagctttatctgcgacggcattatcggc

SEQ ID NO: 36833 - DNA, 48 bp, synthetic construct
  source 1..48: mol_type = other DNA
ttcgctgccatccccgtcttcgctctgggcccttttgtggtgacacag

SEQ ID NO: 36834 - DNA, 114 bp, synthetic construct
  source 1..114: mol_type = other DNA
aacgtgcccgctggagttgagccagcctcggctgattccgctctcggcgtgatcggaaccgccgtctctcccatattcgcacctctgggtttcggcgaatggcaagcaggtatc

SEQ ID NO: 36835 - DNA, 78 bp, synthetic construct
  source 1..78: mol_type = other DNA
tttgctagcctggccggggtcgatgaggagaacgaagcagacatggacggcttggttagggaactgttcacaccattg

SEQ ID NO: 36836 - DNA, 90 bp, synthetic construct
  source 1..90: mol_type = other DNA
gacgagggctttgccatgctcgctggatacatggagaccgtgatctccgaccccacactgctgagcttcgtcaacgatggcatcattggc

SEQ ID NO: 36837 - DNA, 48 bp, synthetic construct
  source 1..48: mol_type = other DNA
ttcggggccatccccgtttttgctctgggccctttcgtggtcacacag

SEQ ID NO: 36838 - DNA, 111 bp, synthetic construct
  source 1..111: mol_type = other DNA
cttcctttcggggtggaatacgggtcagcagattccatcctcggaatgattggcagcgtcatcgcccccattttcacacccatgggatacggtacttggcaagccggaatc

SEQ ID NO: 36839 - DNA, 78 bp, synthetic construct
  source 1..78: mol_type = other DNA
tttggcactctgagcggagtcgaggaggatgatgaggccgggatgaccgctatggtcaaggacctgttcacaccactg

SEQ ID NO: 36840 - DNA, 90 bp, synthetic construct
  source 1..90: mol_type = other DNA
gaagctggattcaccgccctctctgagtacctgagcgaggccattaccaaccccacactggcatccttcatctgtgatgggctgattggc

SEQ ID NO: 36841 - DNA, 45 bp, synthetic construct
  source 1..45: mol_type = other DNA
ttcgcagccgtccccgtgtttgctctgggccctatcgtgatcacc

SEQ ID NO: 36842 - DNA, 108 bp, synthetic construct
  source 1..108: mol_type = other DNA
gtccctttcggcgtggagcccggctctgccgaatcagtgctgggcatgatcggaagcgccattagcccaatctttgccccactcgggtttgctacctggcaagcaggc

SEQ ID NO: 36843 - DNA, 78 bp, synthetic construct
  source 1..78: mol_type = other DNA
ttcgggacactcgccggagtggaagaggacgacgaggaaggcatgagctccatgatccagggcctgtttactcctctc

SEQ ID NO: 36844 - DNA, 78 bp, synthetic construct
  source 1..78: mol_type = other DNA
gacatcctggccaacttcgcccggaccttcctgaacaatcccgtgctcgctagctttgtctgcgacggggtcattggc

SEQ ID NO: 36845 - DNA, 45 bp, synthetic construct
  source 1..45: mol_type = other DNA
ttcgccgccatccccgtgtttgcttggggccctatcgtcatcaca

SEQ ID NO: 36846 - DNA, 108 bp, synthetic construct
  source 1..108: mol_type = other DNA
gtcccattcggcgtggaatacgcgagccagggctccgtgctggggatgatcggcagtgccatttctcccatctttggacctctcgggtttggccaatggcaagcaggc

SEQ ID NO: 36847 - DNA, 78 bp, synthetic construct
  source 1..78: mol_type = other DNA
ggcactttagcgggagtcgacgaggccaatcatgctgccatgggcaacatgctgcacggactgttcacccctttgtct

SEQ ID NO: 36848 - DNA, 96 bp, synthetic construct
  source 1..96: mol_type = other DNA
tactggctaggagattcgtacccacatgccgtggagtccagcatgcactggttctctatcgggtccctggacatcaacctgggctactacatcgac

SEQ ID NO: 36849 - DNA, 66 bp, synthetic construct
  source 1..66: mol_type = other DNA
gccatgggcagcctcgactactccgtcgtgttcaacatggacaatctggaagctgcagatcagagc

SEQ ID NO: 36850 - DNA, 45 bp, synthetic construct
  source 1..45: mol_type = other DNA
ttcgccctgggcattgagtctggtgacaccgctatgatggccgca

SEQ ID NO: 36851 - DNA, 33 bp, synthetic construct
  source 1..33: mol_type = other DNA
ttcgatgcctttaacgacaccgctgacatcacc

SEQ ID NO: 36852 - DNA, 96 bp, synthetic construct
  source 1..96: mol_type = other DNA
ggatgggacggcgtgttcaccatctcattacactcgacgggatggcaggtcggcggtggcgaggccgatatgggctttcactgggtggaagaactg

SEQ ID NO: 36853 - DNA, 87 bp, synthetic construct
  source 1..87: mol_type = other DNA
gtcgcatttgggtcgctagccgaatgggttggcggcttcatcgctaacgagtacctcgcctccttcatctgcgacgggattatcggc

SEQ ID NO: 36854 - DNA, 108 bp, synthetic construct
  source 1..108: mol_type = other DNA
ttccccctgggcgtcgaatacggatcggccgactccgtgctgggcatgatcggcaacgtcattgcccctatcttcgccccactcgggtttggaacctggcaagcagca

SEQ ID NO: 36855 - DNA, 78 bp, synthetic construct
  source 1..78: mol_type = other DNA
tttggaactctggctgggatggaggaggatgacgaggccggcatcaccaagctgattcacgacaccttcacaccactc

SEQ ID NO: 36856 - DNA, 39 bp, synthetic construct
  source 1..39: mol_type = other DNA
gtgaccatccccaacgccccctccttttcgcctgaactg

SEQ ID NO: 36857 - DNA, 45 bp, synthetic construct
  source 1..45: mol_type = other DNA
tacattgatggctttgacctggcctatacattcaccgacctcatc

SEQ ID NO: 36858 - DNA, 54 bp, synthetic construct
  source 1..54: mol_type = other DNA
gacttccgggctatcaccgatcttctgttcaacgatagcccactggagtttcgg

SEQ ID NO: 36859 - DNA, 75 bp, synthetic construct
  source 1..75: mol_type = other DNA
atgctgtccaagtttgtggagggcttcattcccaaccaatatcttgcgtcattcatctgcgacggagtgatcggc

SEQ ID NO: 36860 - DNA, 111 bp, synthetic construct
  source 1..111: mol_type = other DNA
ttccccttgggtgtcaaatatgggtcagctgactcaattctgggcatgatcggaaacgccatagctccggttttcgcgccactcggttttggcacgtggcaagctgccgtt

SEQ ID NO: 36861 - DNA, 81 bp, synthetic construct
  source 1..81: mol_type = other DNA
tttgggacactgggcggagttggagaggacgacgaatccgggatgacccatctagtgcaagaaaccttcactcctttgagc

SEQ ID NO: 36862 - DNA, 111 bp, synthetic construct
  source 1..111: mol_type = other DNA
gagaacacgatatttggccaatatatcaaccccgctgtcaccgcggtcgtagtacaatacattccttgggtgccaattcaaaatttgttcattggagaatacggaatcgtg

SEQ ID NO: 36863 - DNA, 153 bp, synthetic construct
  source 1..153: mol_type = other DNA
ggcatattccaatggataatcgcttgcatttctcctgtcgtgaatgctatcgggctgccaacgtccactagtagctccttcgtcctgggtttcttccggcgggacttcggcgctgccgggctcatgactattcaaaaccagctgactggcgtc

SEQ ID NO: 36864 - DNA, 240 bp, synthetic construct
  source 1..240: mol_type = other DNA
tacaacactgacgtcgtcgacgtggagttcacggttaggaaggtggtcaacgaagtcctagtgtcggcctacgttcaaaaggaggccatcgattccgtcaacattaccattaccgccgacgtggacggaatctacgtgctgaacgtcggcggagtgtcgaaactgatcagcgtggagggcggcaagggttccacatactgcatcctgcctcctcgcacctatgaggctaatgcctcattt

SEQ ID NO: 36865 - DNA, 63 bp, synthetic construct
  source 1..63: mol_type = other DNA
cactccgccaaagtgtttacctctaagacacagaaccaggggttcgactcggcttacacacct

SEQ ID NO: 36866 - DNA, 81 bp, synthetic construct
  source 1..81: mol_type = other DNA
caaaacgaagaggatttgaaagtgtacaagaccgctatccggaataacctttctaaattccctgtcatagacgtgtctggt

SEQ ID NO: 36867 - DNA, 60 bp, synthetic construct
  source 1..60: mol_type = other DNA
gattacctgttcatgtttaatcggaccaacgtgaaggacgagaacgacttcttcatcaag

SEQ ID NO: 36868 - DNA, 33 bp, synthetic construct
  source 1..33: mol_type = other DNA
ggctacagctgcgacatcaacaccgagttcacc

SEQ ID NO: 36869 - DNA, 81 bp, synthetic construct
  source 1..81: mol_type = other DNA
ttcatgcaaaacttcgatggagtgatcgcttatacttttctcgtctttgtggttaccaaaattaaggttatgtatgaacac

SEQ ID NO: 36870 - DNA, 60 bp, synthetic construct
  source 1..60: mol_type = other DNA
ggtcaatacgtcggtgaccatgttggtaacgagatattggcatcgctactgaatagaggc

SEQ ID NO: 36871 - DNA, 111 bp, synthetic construct
  source 1..111: mol_type = other DNA
ctcccaggaggcgaagctacatacgggctggaaagcagttatctgggcatgataggcaccgccatagccccgatctttgcaccccttggcttcggtacctggcaagccgcc

SEQ ID NO: 36872 - DNA, 75 bp, synthetic construct
  source 1..75: mol_type = other DNA
tccaccctcggtggcttcgaggacgatgacgagactgggaccatcagcgtgattaacgacctgtttacaccactg

SEQ ID NO: 36873 - DNA, 78 bp, synthetic construct
  source 1..78: mol_type = other DNA
accatcctggccaacttcgcggccggctttatatcgaatccctacctcgagtcctttatctgcgacgccgtgattggc

SEQ ID NO: 36874 - DNA, 108 bp, synthetic construct
  source 1..108: mol_type = other DNA
ttccccctgggggtcaaatatgcttccgctgaatcatacctcggaatgattgggaactttatcgccccaatcttcgcccctctgggcttcggaacatggcaagcaacg

SEQ ID NO: 36875 - DNA, 81 bp, synthetic construct
  source 1..81: mol_type = other DNA
ttcggcaccatctctgggatggaaggtgacgagaatacagggcggatgaaccatgtcctgcatgatctctttacccctctc

SEQ ID NO: 36876 - DNA, 90 bp, synthetic construct
  source 1..90: mol_type = other DNA
gagggcttcggaatcctgggcgagatggtcgctgccgccctcggcgatgggatgctgacgtcattcatcgtggacgggatcattggcgga

SEQ ID NO: 36877 - DNA, 108 bp, synthetic construct
  source 1..108: mol_type = other DNA
ttcccagctggggtcgaatacgggagccaagagagcgccattggcatgatcggaacagctgtggcccctgtgttcgcaccactggggtttggctcttggcaacctgct

SEQ ID NO: 36878 - DNA, 75 bp, synthetic construct
  source 1..75: mol_type = other DNA
agctccctgttcggcgtcgccgaggaaggcgctggcatagctgcggctatgcacggaatctttacacctcttacg

SEQ ID NO: 36879 - DNA, 75 bp, synthetic construct
  source 1..75: mol_type = other DNA
ctgctgggcgaatggattatctccatcctcggccactctatgttaagtagtttcctggtggacggagtgatcgga

SEQ ID NO: 36880 - DNA, 105 bp, synthetic construct
  source 1..105: mol_type = other DNA
ttcccagccggcgtgacttacggatcccaagagtctttcattgggatgatcgggacagctatcgcccctatctttgcacctctgggattcggatcatggcaagca

SEQ ID NO: 36881 - DNA, 75 bp, synthetic construct
  source 1..75: mol_type = other DNA
agttctctgttcggggtcgccgagggcagcttcgctatgatgaacgccatgcacggcgtgtttactcctcttagc

SEQ ID NO: 36882 - DNA, 81 bp, synthetic construct
  source 1..81: mol_type = other DNA
tttggctccattgctgagtttgtggctggttacatagccaacgaatacctggcctccttcatctgcgacggaattattggg

SEQ ID NO: 36883 - DNA, 108 bp, synthetic construct
  source 1..108: mol_type = other DNA
ttcccactgggcgtggaatacggttctgccgagtccgtcctcggaatgattgggtctgctatcgcacctatctttgctcccctgggtttcggtacctggcaagccgcc

SEQ ID NO: 36884 - DNA, 78 bp, synthetic construct
  source 1..78: mol_type = other DNA
ttcggcactctggccgggctggaggaggacgacgaagagggaatcacaaacctcgtgcacgataccttcacaccactg

SEQ ID NO: 36885 - DNA, 69 bp, synthetic construct
  source 1..69: mol_type = other DNA
acccaatggggagaaatggctgctgccgccatccccaacccttatatcgcctcttttaaagtttttcaa

SEQ ID NO: 36886 - DNA, 108 bp, synthetic construct
  source 1..108: mol_type = other DNA
ttccctttgggggtcgcctacgggtcacaacaaagtatcctgggcatgatcggctccgccgtggccccaatcttcgcacctctgggattcggcacatggcaagccgcc

SEQ ID NO: 36887 - DNA, 75 bp, synthetic construct
  source 1..75: mol_type = other DNA
gggaccctgggcggacttgacgaagacgatgaggaagggattacatcattggtgcacgacactttcacaccactg

SEQ ID NO: 36888 - DNA, 69 bp, synthetic construct
  source 1..69: mol_type = other DNA
ggcgaatacctggctgaagccgtcggcaacgaggtgctgggcagcctccttgagaagggcatcattggc

SEQ ID NO: 36889 - DNA, 111 bp, synthetic construct
  source 1..111: mol_type = other DNA
gtcccctttggcgttgaatatggatctcaggaaagtgtcctagggatgattggcagcgccatcgcccctatcttcgccccactggggttctctacatggcaggctggaatc

SEQ ID NO: 36890 - DNA, 78 bp, synthetic construct
  source 1..78: mol_type = other DNA
ttcaccacacttggcggcctcgaggaagatgacgaggagggtaccatctcactcgtgcacgacctgtttactccactc

SEQ ID NO: 36891 - DNA, 75 bp, synthetic construct
  source 1..75: mol_type = other DNA
tggtttggcgagtacctggccggagctgtcggaaatgagatactaggatcgtttctccaagatggtatcatcggc

SEQ ID NO: 36892 - DNA, 111 bp, synthetic construct
  source 1..111: mol_type = other DNA
gtgccgtttggcgtagaatatgggtctcaggagagtgttctgggcatgatcggtagcgccatagcccccgtatttgctccattaggctttagcacatggcaagcaggcatc

SEQ ID NO: 36893 - DNA, 78 bp, synthetic construct
  source 1..78: mol_type = other DNA
ttcacaactctgggaggactggaagaggacgacgaggagggcaccatcgcccttgtgcacgatctgtttacaccactg

SEQ ID NO: 36894 - DNA, 87 bp, synthetic construct
  source 1..87: mol_type = other DNA
gccggattcgccgcgttaggcgaatacctcgccgaagctgtcggcaacgagatgctgggcagcttccttcaagacggtctgatcggt

SEQ ID NO: 36895 - DNA, 108 bp, synthetic construct
  source 1..108: mol_type = other DNA
ctgcctatgggagtcgaatacggcagccaggaatgcgtgcttggcatgattgggaccgcaatcgccccaatcttcgcccctctgggctttggaacatggcaagcaggc

SEQ ID NO: 36896 - DNA, 75 bp, synthetic construct
  source 1..75: mol_type = other DNA
gccacactgggtggccttgaggaggacgacgaggaaggcgtaactcagttggtgcacgataccttcactcctctg

SEQ ID NO: 36897 - DNA, 78 bp, synthetic construct
  source 1..78: mol_type = other DNA
ttctctatcctgacccatgcgatttcaagctatatgccacatggcatcctgacaagtctcatctgcaacggcattatc

SEQ ID NO: 36898 - DNA, 108 bp, synthetic construct
  source 1..108: mol_type = other DNA
atcttcccctggggcggaacaaaccccaagatgagcctgctcggcataattgggtccttcttcgcaccaatctttgcccctctgggatttgggacttggcaagccgcc

SEQ ID NO: 36899 - DNA, 78 bp, synthetic construct
  source 1..78: mol_type = other DNA
ttcgggaccctggccggcatggatagcaatgaccacgctcggattaccaacctgatccacgacacatttactcctctg

SEQ ID NO: 36900 - DNA, 69 bp, synthetic construct
  source 1..69: mol_type = other DNA
ggcgagtacctcgccggcgctgtcggtaacgaagtgctgggcagcttcctggagaaggggattatcgga

SEQ ID NO: 36901 - DNA, 108 bp, synthetic construct
  source 1..108: mol_type = other DNA
ctgcccttcggagtggaatatggatcgcaggaatcaattctggggatgatcggctccatcatttctcctatcctgatcccactcggcttcggaacctggcaagctggc

SEQ ID NO: 36902 - DNA, 78 bp, synthetic construct
  source 1..78: mol_type = other DNA
ttcgccacactgaacgggctcgaggaggacgacgaggaaggcaccatgagcgtggtccaggagatattcactcctctc

SEQ ID NO: 36903 - DNA, 78 bp, synthetic construct
  source 1..78: mol_type = other DNA
gtgatgctgtccaactttgtcgccgggcacatccccaatgagtacctcgctagcttcatctgcgacgccgtgattggc

SEQ ID NO: 36904 - DNA, 108 bp, synthetic construct
  source 1..108: mol_type = other DNA
tttcccctgggtgtcaaatatggaagcgcggacagcattctgggcatgattggctctttcatcgcccctatcttcgctccactcggattcggaacctggcaagccgcc

SEQ ID NO: 36905 - DNA, 75 bp, synthetic construct
  source 1..75: mol_type = other DNA
ggcaccctcggcggaatggacgccgacgacgagtctggcattactcacctgatccatgataccttcacacctctg

SEQ ID NO: 36906 - DNA, 87 bp, synthetic construct
  source 1..87: mol_type = other DNA
gaggcctttggggccctcggagagtttgtggccgggttcattgctaacgagtacctgagctccttcatctgcgacggcatcatcggc

SEQ ID NO: 36907 - DNA, 108 bp, synthetic construct
  source 1..108: mol_type = other DNA
ttcccactgggcgtggaatacggctcagccgagtccctcctggggatgatcggctctttcattgctcctatcttcgccccacttggctttggaacctggcaagccgcc

SEQ ID NO: 36908 - DNA, 78 bp, synthetic construct
  source 1..78: mol_type = other DNA
ttcggaaccctcgccggcatggaggaggatgacgaggaggggattacctccttggtgcacgacacatttactcctctg

SEQ ID NO: 36909 - DNA, 69 bp, synthetic construct
  source 1..69: mol_type = other DNA
ggctcttggattgcctcattcatttcaaactactacctcaaagccttcatctgcgacgctatcattggc

SEQ ID NO: 36910 - DNA, 108 bp, synthetic construct
  source 1..108: mol_type = other DNA
tttcccatgggcgttaaatacggttcgggcgactcctacctgggcatgatcggaaacgctatcgccccaatcttcattcctctcggcttcgggacatggcaagccgcc

SEQ ID NO: 36911 - DNA, 78 bp, synthetic construct
  source 1..78: mol_type = other DNA
tttgggacaatcgccggcatggaggagattgatgagaatggaatgagccccttcctgcacgacctgttcacacctctg

SEQ ID NO: 36912 - DNA, 90 bp, synthetic construct
  source 1..90: mol_type = other DNA
gacaacgggtttatcatgctggctgatttcgtcgccggatatattagtaacgagtacctccggtccttcgtctgtaacggcattatcggc

SEQ ID NO: 36913 - DNA, 114 bp, synthetic construct
  source 1..114: mol_type = other DNA
tcttacccctggggagttaaatatggctcagaacaaagcgtactcggcatgatcggcaacgtggtcgccccaatcttcgcccctctgggctttggtacttggcaagcaacagtg

SEQ ID NO: 36914 - DNA, 78 bp, synthetic construct
  source 1..78: mol_type = other DNA
ttcggtaccctggccggcatgcagggcgatgacggcgacgggatcacaagcctggtgcacgacacctttactcctctc

SEQ ID NO: 36915 - DNA, 75 bp, synthetic construct
  source 1..75: mol_type = other DNA
gccctgggagcttgggtggcctccttcttaggagagggattgttttctagcctcatttgcgacggcatcatcggc

SEQ ID NO: 36916 - DNA, 105 bp, synthetic construct
  source 1..105: mol_type = other DNA
ttcccctggggcggaacagatccacaaatgtccctcctgggcatgatcggcactgtgattgctcctatcttcgctccactcgggtttggcacatggcaagctgcc

SEQ ID NO: 36917 - DNA, 78 bp, synthetic construct
  source 1..78: mol_type = other DNA
tttgggaccctggctggaatggaggaggatgacgaggaggggatcactgccctcgtgcacgacactttcacacctctg

SEQ ID NO: 36918 - DNA, 87 bp, synthetic construct
  source 1..87: mol_type = other DNA
ggctttttcgacgccctcaaggagatcgttggcggatacatatccaacgagctgctgtctagcttcatttgcgacggcattatcggc

SEQ ID NO: 36919 - DNA, 108 bp, synthetic construct
  source 1..108: mol_type = other DNA
atttacccctggggcggaaccgacccacaaatgtctctgctcgggatcattggctccgtgatcagccccatcttcgcccctctgggctttggaacatggcaagctgcc

SEQ ID NO: 36920 - DNA, 78 bp, synthetic construct
  source 1..78: mol_type = other DNA
ttcggcacactggccggaatggaggaggacgatgaggagggcatcaccaatctgattcacgacacttttaaccctctg

SEQ ID NO: 36921 - DNA, 78 bp, synthetic construct
  source 1..78: mol_type = other DNA
aacatgctgtctgagtttctcgcgtcatttatcacaaacccctacctcacctccttcctttgcgacgccgtgattggc

SEQ ID NO: 36922 - DNA, 108 bp, synthetic construct
  source 1..108: mol_type = other DNA
ttcccactgggcgtcaaatacggttctgctgattctttactgggcatgattgggtccttcatcgcccctattttcgctcccctgggctttggcacttggcaagcagcc

SEQ ID NO: 36923 - DNA, 75 bp, synthetic construct
  source 1..75: mol_type = other DNA
gggaccctgggcggcatgaacgaggacgatgagaatggaatgacccaccttatccaagacactttcacaccactc

SEQ ID NO: 36924 - DNA, 87 bp, synthetic construct
  source 1..87: mol_type = other DNA
gatgcctttgggatgctcagtaatttcctcgccgcacatatccccaacgtctacctggcctccttcatttgcgacgctgtgatcggg

SEQ ID NO: 36925 - DNA, 108 bp, synthetic construct
  source 1..108: mol_type = other DNA
ttcccccttggagttaaatacggcagcccagactctatcctggggatgatcggctcctttctggcacctatcttcgccccactcgggttcggaacatggcaagccgct

SEQ ID NO: 36926 - DNA, 75 bp, synthetic construct
  source 1..75: mol_type = other DNA
ggcactctcgggggaatggatgcagacgacgaatccggaatcacccacctgattcacgacaccttcacaccactg

SEQ ID NO: 36927 - DNA, 69 bp, synthetic construct
  source 1..69: mol_type = other DNA
gctgtggttgtctgtcctgccattcccaacccatttctggctagttttgtggagaagggcatcttcgga

SEQ ID NO: 36928 - DNA, 108 bp, synthetic construct
  source 1..108: mol_type = other DNA
ttccctctcggcgttgcctacggctctcaacaaagcctcctgggcatgatcggctccacaattgctccaatctttaagcccatcgggttcggaacctggcaagcagcc

SEQ ID NO: 36929 - DNA, 75 bp, synthetic construct
  source 1..75: mol_type = other DNA
ggcaccctgggcggactggaggaggacgacgaggaagggataatccgcctggtgcacgatgtcttcacacctctc

SEQ ID NO: 36930 - DNA, 87 bp, synthetic construct
  source 1..87: mol_type = other DNA
cagggcttccggatgctgtctggattcgtggccggttacatccccaatcaatatttgagctcctttatctgcgacgctgtcattggc

SEQ ID NO: 36931 - DNA, 108 bp, synthetic construct
  source 1..108: mol_type = other DNA
ttccctctcggcgttaaatacggatcggctgactcttacctgggcatgatcggcaacttcattagccccgtctttgctccactggggtttggaacatggcaagccgcc

SEQ ID NO: 36932 - DNA, 78 bp, synthetic construct
  source 1..78: mol_type = other DNA
ggcaccctggccggaatggaaggagacgacgagagcggcattacacacctcatccacgatactttcactcctctctcc

SEQ ID NO: 36933 - DNA, 87 bp, synthetic construct
  source 1..87: mol_type = other DNA
cagggatttagcgctctggccgaggccgtggctggctacatctctaacgagtacctcgcctccttcatttgcgacggcatcatcggc

SEQ ID NO: 36934 - DNA, 108 bp, synthetic construct
  source 1..108: mol_type = other DNA
ttccccctgggcgtcgaatatggatcggaacaatcggtgctggggatgatcgggacattcattagcccaatcttcgcccctctcggctttggaacctggcaagctgcc

SEQ ID NO: 36935 - DNA, 78 bp, synthetic construct
  source 1..78: mol_type = other DNA
ttcgggactctggccggaatggaggaggacgatgaggaggggatcacttcactcatccaagagacttttacacctctg

SEQ ID NO: 36936 - DNA, 72 bp, synthetic construct
  source 1..72: mol_type = other DNA
ctggctgaatgggtcgggaccttcatcgctaacgaatacctggcgagttttatatgtgatggaatcattggc

SEQ ID NO: 36937 - DNA, 108 bp, synthetic construct
  source 1..108: mol_type = other DNA
ttccctctgggcgtggagtttgggagcgcagactccgtcctcggcatgattggtggcgcgatcgcccctatcttcgctccactgggattcggaacctggcaagcaggc

SEQ ID NO: 36938 - DNA, 81 bp, synthetic construct
  source 1..81: mol_type = other DNA
ttcggaaccctggcgggcatggaggaagacgacgaggagggaatcacacaactcgtgcacgatacctttactccactctct

SEQ ID NO: 36939 - DNA, 81 bp, synthetic construct
  source 1..81: mol_type = other DNA
tttggcatgctcgcggaattcgtcggttcattcattactaacgagtacctcgcctcctttatctgcgacggcatcatagga

SEQ ID NO: 36940 - DNA, 108 bp, synthetic construct
  source 1..108: mol_type = other DNA
ttccctctgggagtggaatacgggtcggccgactccgtcctcggcatgatcgggaacaccatcgccccaattttcgctcccctgggttttgggacatggcaagccgcc

SEQ ID NO: 36941 - DNA, 78 bp, synthetic construct
  source 1..78: mol_type = other DNA
tttggaaccctggccgggatggaggaggacgatgaggacggcatcactagcctcgtgcaagacaccttcacaccactg

SEQ ID NO: 36942 - DNA, 84 bp, synthetic construct
  source 1..84: mol_type = other DNA
ttcttcaagtttttatctggcgaggtcgctgtgtatatcgcaaacccctacctcaagtccttcatttgcgacgccgtgattggt

SEQ ID NO: 36943 - DNA, 111 bp, synthetic construct
  source 1..111: mol_type = other DNA
ttcccgttgggggtcaaatatgcttctgccgactccctgctcggacaaattggctcggttatagcacccatcttcgccccccttggattcggcacgtggcaggccgcggtg

SEQ ID NO: 36944 - DNA, 81 bp, synthetic construct
  source 1..81: mol_type = other DNA
ttcgggaccctctctggcatttctggtgacgacaacgagggcatcacgcgcattgtccaagacacctttacccccctgagt

SEQ ID NO: 36945 - DNA, 78 bp, synthetic construct
  source 1..78: mol_type = other DNA
gggctgctcgccgagtttgttgcgagctatctgggcgatgggctgcttgcttccttcgtctgtgatggcatcattggc

SEQ ID NO: 36946 - DNA, 105 bp, synthetic construct
  source 1..105: mol_type = other DNA
ttcccatggggaggctctgagccccagatgtccctcctggggattatcggcaccgctatcgctcccatcttcgcccctctgggatttggcacatggcaagccgcc

SEQ ID NO: 36947 - DNA, 81 bp, synthetic construct
  source 1..81: mol_type = other DNA
tttggtactcttgccggcatggaagaggacgacgaggaaggtatcaccaacctggtccatgacaccttcacaccactgtcc

SEQ ID NO: 36948 - DNA, 66 bp, synthetic construct
  source 1..66: mol_type = other DNA
cctaacctgttctatccaagcatgagctccacatacatcctgcctagttgggagccagcatggagc

SEQ ID NO: 36949 - DNA, 51 bp, synthetic construct
  source 1..51: mol_type = other DNA
gtcatgtgggagagttcaggcgacagcttctacatcctcccatctatctcc

SEQ ID NO: 36950 - DNA, 60 bp, synthetic construct
  source 1..60: mol_type = other DNA
ggccagattgccgcatcttctatccctaacccctacctggcctcctttaaacaaaaggtc

SEQ ID NO: 36951 - DNA, 108 bp, synthetic construct
  source 1..108: mol_type = other DNA
tttccactgggggtcgcatatggaagccaacaaagcctgcttggaatgatcggcagcgccgtggcacctatcttcgcccctctcggattcggtacatggcaagccgcc

SEQ ID NO: 36952 - DNA, 75 bp, synthetic construct
  source 1..75: mol_type = other DNA
gggacactcggaggcctggacgaggacgatgaggaaggtatcactagcttggtccgagaaaccttcacaccactg

SEQ ID NO: 36953 - DNA, 87 bp, synthetic construct
  source 1..87: mol_type = other DNA
gaggccttcggggccctgggcgagttcgtttccggtttcatcgctaacgagtacctctcttccttcatctgcgacggaatcatcggc

SEQ ID NO: 36954 - DNA, 108 bp, synthetic construct
  source 1..108: mol_type = other DNA
ttcccactgggcgtggaatacggatcagcggatagcctgctgggcatgatcggctctttcatcgcccctatcttcgctcctctcggattcggaacctggcaagcggcc

SEQ ID NO: 36955 - DNA, 78 bp, synthetic construct
  source 1..78: mol_type = other DNA
tttggaaccctggccgggatggaggaggatgacgaggagggcatcaccaacctcgtgcacgacactttcacacctctc

SEQ ID NO: 36956 - DNA, 87 bp, synthetic construct
  source 1..87: mol_type = other DNA
gagggctttagcctgctcgctgacttcgtctccggattcatcgccgatgagtacctgcggtcttttgtctgtgacggcattatcggc

SEQ ID NO: 36957 - DNA, 108 bp, synthetic construct
  source 1..108: mol_type = other DNA
ttcccactgggcgtcgaatacgggtcgaaggagagcgtgctcggcatcatcggctccgccatcgcccctattttcgctccactggggttcgggttttggcaagcagct

SEQ ID NO: 36958 - DNA, 75 bp, synthetic construct
  source 1..75: mol_type = other DNA
ggcaccctcggggggatgaacgaagacgacgagggcggaatcacagatttaatacaaaacactttcacacctctg

SEQ ID NO: 36959 - DNA, 78 bp, synthetic construct
  source 1..78: mol_type = other DNA
ggcattctctgcggctggctgctggagatcttcggcgaaggcctcgtatctagcttattgatcaacggagtgatcgga

SEQ ID NO: 36960 - DNA, 105 bp, synthetic construct
  source 1..105: mol_type = other DNA
ttacccccgggcgtcgaatatggatcaatcaactccatcattgggatcgtcgggaattgggtggctcccatcttcgaacccctgggattcggattctggcaagct

SEQ ID NO: 36961 - DNA, 75 bp, synthetic construct
  source 1..75: mol_type = other DNA
ggcacactgttcaccattagcgaggacgatcaggaaggcatcaccggcgtcctgggccagatgtttactcctctg

SEQ ID NO: 36962 - DNA, 75 bp, synthetic construct
  source 1..75: mol_type = other DNA
gctctgggcgaatgggtcgccagcctgctcggcgagggaatgttcacctcccttatctgcgacggcatcattggc

SEQ ID NO: 36963 - DNA, 108 bp, synthetic construct
  source 1..108: mol_type = other DNA
atctacccctggggcggatctgagccccagatgtccctcctgggcatgatcggcagcgctatcgccccaattttcgctcctctggggtttggaacctggcaagccgct

SEQ ID NO: 36964 - DNA, 78 bp, synthetic construct
  source 1..78: mol_type = other DNA
tttggcactctggccggaatggaggaggacgacgaggaaggcatcaccaacctggtgcacgataccttcacacctctg

SEQ ID NO: 36965 - DNA, 78 bp, synthetic construct
  source 1..78: mol_type = other DNA
ggcatgctgggcgactggatcctggcctccctcggcgaaaccatgctgtctagcttcctggtggatggtctcattgga

SEQ ID NO: 36966 - DNA, 108 bp, synthetic construct
  source 1..108: mol_type = other DNA
tttccagctggcgtggaatacggatctcaggagtctgctattggaacaatcggaaccgtggtggctcccgtctttgccccactgggctttggcgaatggcagcctgca

SEQ ID NO: 36967 - DNA, 72 bp, synthetic construct
  source 1..72: mol_type = other DNA
agctcccttttcggcgtggccgaggaaggcgccgcaatcaatgccgcgatgcacggaattttcactcctctc

SEQ ID NO: 36968 - DNA, 78 bp, synthetic construct
  source 1..78: mol_type = other DNA
ggcatgctgggcgagttcgtgattgccagccttggcgaaaccatgctgtcctcattcctggtcgacggactcatcgga

SEQ ID NO: 36969 - DNA, 111 bp, synthetic construct
  source 1..111: mol_type = other DNA
tatttccctgccggggtagaatacggtagtcaggaatcagctataggaacaatcggcactgtcatcgcaccggtcttcgcgcctctcgggttcggagaatggcagcctgct

SEQ ID NO: 36970 - DNA, 72 bp, synthetic construct
  source 1..72: mol_type = other DNA
agctccctcttcggcgtggccgaggaaggcgccggaatcgctgctgcaatgcatggcatctttactcccctg

SEQ ID NO: 36971 - DNA, 81 bp, synthetic construct
  source 1..81: mol_type = other DNA
tttggcatgctgatcgacttcaccgtcctgtccttaggtgactccatgctgagcagctttcttgttaacgggcttattgga

SEQ ID NO: 36972 - DNA, 111 bp, synthetic construct
  source 1..111: mol_type = other DNA
tactttcccgctggggtggaatacggctcgcaagagtctgcgatcggcacacttggcaccgctattgcacccgtcttcgccccgctgggtttcggagaatggcaaccatcc

SEQ ID NO: 36973 - DNA, 72 bp, synthetic construct
  source 1..72: mol_type = other DNA
tcctctctgtttggcgtcgctgaggaaggcgctggaattgccgccgcgatgcacgggatcttcacaccgctg

SEQ ID NO: 36974 - DNA, 123 bp, synthetic construct
  source 1..123: mol_type = other DNA
gtggactttctcgagaacaccatattcggtcaatatattaatcctgccgtgactgccgttgtggtgcagtacatcccctgggtcccaattcaaaatctatttgtcggcgaatatgggatcgtt

SEQ ID NO: 36975 - DNA, 153 bp, synthetic construct
  source 1..153: mol_type = other DNA
ggaatatttcaatggatcatcgcgtgtatctctccggtggtgcatgctatcggtctgcccacatctacctcctcctctttcgtcctggggttctttcgccgcgacttcggcgccgctgggctgatgacaatccaaagccaactaacgggagta

SEQ ID NO: 36976 - DNA, 111 bp, synthetic construct
  source 1..111: mol_type = other DNA
gagaacgtattgtttgggcaatatattaatccgcacatcacatcactcgtcgtgcaatatattccatgggtgccgattcaagatctgattgtcgggccctacggcatagtg

SEQ ID NO: 36977 - DNA, 153 bp, synthetic construct
  source 1..153: mol_type = other DNA
ggcattttccaatggatcatagcatgtgtatcgcctctcgtcaatgctatcggcctgcccgattcaacaagtagctcatttgtgctgggattctttcggcgggacttcggagccgccggcctgatgacaattaagaatagccttaccggcgtg

SEQ ID NO: 36978 - DNA, 33 bp, synthetic construct
  source 1..33: mol_type = other DNA
catggaagacgcggcaacagaggatggcggtat

SEQ ID NO: 36979 - DNA, 78 bp, synthetic construct
  source 1..78: mol_type = other DNA
ggcatcctgggcgagggtatccttggcgtgctaggggaaacatggatctcctctttactggtcaccggagtgattgga

SEQ ID NO: 36980 - DNA, 108 bp, synthetic construct
  source 1..108: mol_type = other DNA
ctgcccatgggcgtggaatacgggtcccaggagagcatcaccggacagatcggaacactcatcactcccgtattcgagcctctggggttcggcaactggcagactgcc

SEQ ID NO: 36981 - DNA, 75 bp, synthetic construct
  source 1..75: mol_type = other DNA
ttcggaacccttatgggcgttggggacgaaggcgagggcctggagcccatcctcgccgacatgtttacacctctg

SEQ ID NO: 36982 - DNA, 171 bp, synthetic construct
  source 1..171: mol_type = other DNA
aaaggcgtcgacggcgttattggtatcttcggctcactgacgggcttgctcaatctacaaagcgcctctgtcgtagtcggcggttttcctaatgtgctgatcagcgtggccgagatgcagcaaccttccatgctgggcgctggcatgaatagcatgttcctcgcctctacc

SEQ ID NO: 36983 - DNA, 117 bp, synthetic construct
  source 1..117: mol_type = other DNA
atcggctctaagacaaccctcggagttggcgaggctctgtccgccatggtatcatcgattggcaagggcgggcgcggactgacctacgaagagatgctcatctacaaccagagactg

SEQ ID NO: 36984 - DNA, 42 bp, synthetic construct
  source 1..42: mol_type = other DNA
gctaacttcaccttctttggcctctttagcgcgcaatcgcca

SEQ ID NO: 36985 - DNA, 75 bp, synthetic construct
  source 1..75: mol_type = other DNA
atgatccggtccgggaccaagatgagcaacgccctctcctggctctacggttcattcgcatccgtctcttgggac

SEQ ID NO: 36986 - DNA, 39 bp, synthetic construct
  source 1..39: mol_type = other DNA
ctgcacggacggagaggaaacaggggacgcagatacggc

SEQ ID NO: 36987 - DNA, 66 bp, synthetic construct
  source 1..66: mol_type = other DNA
ccccagctgttctaccctagcatgtctgctacctataagatgcctagctggaacccagcttggagt

SEQ ID NO: 36988 - DNA, 54 bp, synthetic construct
  source 1..54: mol_type = other DNA
gacgtcatgtgggcatcgagtggcgattctttctacattctaccttccataact

SEQ ID NO: 36989 - DNA, 90 bp, synthetic construct
  source 1..90: mol_type = other DNA
gacgccggattctccgctctgattgactacctgacaccaatcctgggcgatgggctcgtgtctagcttcgtgctcaacggcgttatcggc

SEQ ID NO: 36990 - DNA, 105 bp, synthetic construct
  source 1..105: mol_type = other DNA
ctcccccccggcgtcgaggaaggaagcattaactccatcattgggatcatcggcaatgccatcgcacccgtcttcgctcccctgggatttggattctggcaagct

SEQ ID NO: 36991 - DNA, 66 bp, synthetic construct
  source 1..66: mol_type = other DNA
gggacactgtttggagttggagatgatggcatcagcgccgtccttcccactctcttcacacctctc

SEQ ID NO: 36992 - DNA, 60 bp, synthetic construct
  source 1..60: mol_type = other DNA
agcgacggcctcacccttgaggaaggtgtccgactgtccgcctacctggtcaacgataag

SEQ ID NO: 36993 - DNA, 30 bp, synthetic construct
  source 1..30: mol_type = other DNA
aacgtgacagccatcaccgagagatctgtg

SEQ ID NO: 36994 - DNA, 60 bp, synthetic construct
  source 1..60: mol_type = other DNA
cggaatatggacgacgccattgctatcctggatgccgcttacaacgccggcatcgatttc

SEQ ID NO: 36995 - DNA, 57 bp, synthetic construct
  source 1..57: mol_type = other DNA
agcctgtggatccggcggttccctaccgaacccaacatggacgagaagacacaagag

SEQ ID NO: 36996 - DNA, 45 bp, synthetic construct
  source 1..45: mol_type = other DNA
gacatccccgagctgctgaaggagaattacgaggattacatgaac

SEQ ID NO: 36997 - DNA, 63 bp, synthetic construct
  source 1..63: mol_type = other DNA
atggatagccagaccgccatgctgaccgtctcaagtcggcaaagcgaggtcatcgaccttctg

SEQ ID NO: 36998 - DNA, 63 bp, synthetic construct
  source 1..63: mol_type = other DNA
tccatattcatcgccaacatgttcgaggctgacatgacccagttcacattcaatatcagcaag

SEQ ID NO: 36999 - DNA, 39 bp, synthetic construct
  source 1..39: mol_type = other DNA
accggcggagtcaataagctgatggagcacgacgttagc

SEQ ID NO: 37000 - DNA, 42 bp, synthetic construct
  source 1..42: mol_type = other DNA
aaattcattcttagctccatcggagttaacgatatcctgaac

SEQ ID NO: 37001 - DNA, 48 bp, synthetic construct
  source 1..48: mol_type = other DNA
aatagcgccctgaactgtgtcaagcaagagaacatggacctcatcctc

SEQ ID NO: 37002 - DNA, 36 bp, synthetic construct
  source 1..36: mol_type = other DNA
tccatctgcattgacaccgtgaacatcgtcgatagc

SEQ ID NO: 37003 - DNA, 54 bp, synthetic construct
  source 1..54: mol_type = other DNA
aacattgtcaacctgttcacaaacggcaataccgttgtggagcacgaagtcatc

SEQ ID NO: 37004 - DNA, 48 bp, synthetic construct
  source 1..48: mol_type = other DNA
aacagcgccctgaattgtgtcaagcaagagaacatgggccttatcctc

SEQ ID NO: 37005 - DNA, 39 bp, synthetic construct
  source 1..39: mol_type = other DNA
tacagcatctgcattgacaccgtcaacatcgtggattcc

SEQ ID NO: 37006 - DNA, 54 bp, synthetic construct
  source 1..54: mol_type = other DNA
aacattgtgaatctgttcgccggtggcaacaccgtggtggaacctggagtcatc

SEQ ID NO: 37007 - DNA, 81 bp, synthetic construct
  source 1..81: mol_type = other DNA
aatccctttctaacacaaatagttctcgccgtgattccttggaagcccatccaagacctgttcatcggctcttacggaatt

SEQ ID NO: 37008 - DNA, 156 bp, synthetic construct
  source 1..156: mol_type = other DNA
gggatctttcaattaatcatcaagctgttcaaccctattattcaagcaataggactgcccacatccactacgcaaagctttattctcggcttttttcgccgggattttggagccgccggcatcctgaaaatccgggacacccttacgggcgtgcag

SEQ ID NO: 37009 - DNA, 51 bp, synthetic construct
  source 1..51: mol_type = other DNA
tggtttggggagtacttggccggggccctgggcaatgagatcctcgggtcc

SEQ ID NO: 37010 - DNA, 111 bp, synthetic construct
  source 1..111: mol_type = other DNA
gttcccttcggggttgaatacggatcacaggagagtatcctgggaatgattgggtctgcaatcgcaccggttttcgcccctctggggttctctacgtggcaagccgggatc

SEQ ID NO: 37011 - DNA, 78 bp, synthetic construct
  source 1..78: mol_type = other DNA
ttcacaacccttggcggcctcgaggaagacgacgaggaaggcactatcgccctggtgcacgatctgtttactcctctg

SEQ ID NO: 37012 - DNA, 39 bp, synthetic construct
  source 1..39: mol_type = other DNA
gacgccctgaccggggtcaagaaacagaacgtcgatctt

SEQ ID NO: 37013 - DNA, 42 bp, synthetic construct
  source 1..42: mol_type = other DNA
agcggctttaccatcggcttcgagacagactacgtgattgac

SEQ ID NO: 37014 - DNA, 54 bp, synthetic construct
  source 1..54: mol_type = other DNA
actaccattgacctcttgatttcaaacttcgactcctctaatgacacagccatc

SEQ ID NO: 37015 - DNA, 30 bp, synthetic construct
  source 1..30: mol_type = other DNA
ctgttcgccaccaacgagatccagttggga

SEQ ID NO: 37016 - DNA, 39 bp, synthetic construct
  source 1..39: mol_type = other DNA
atcgccctcaccggcgtcaaggagcagaagattggactg

SEQ ID NO: 37017 - DNA, 45 bp, synthetic construct
  source 1..45: mol_type = other DNA
aacagcggctacaccatcgggttcgagacagattccgtgatcgac

SEQ ID NO: 37018 - DNA, 54 bp, synthetic construct
  source 1..54: mol_type = other DNA
aagaccgtggacctgctctctagtaacatgaactccagcaatgacttcgctatc

SEQ ID NO: 37019 - DNA, 30 bp, synthetic construct
  source 1..30: mol_type = other DNA
ctgtcagtgaatgagatccagcttggaaca

SEQ ID NO: 37020 - DNA, 39 bp, synthetic construct
  source 1..39: mol_type = other DNA
gtcgccctcaatggggtcaaggaacagaacatcaacctg

SEQ ID NO: 37021 - DNA, 45 bp, synthetic construct
  source 1..45: mol_type = other DNA
tccgggtacaccatcggcttcgagacagacagcgccttcgattcc

SEQ ID NO: 37022 - DNA, 54 bp, synthetic construct
  source 1..54: mol_type = other DNA
aagaccgtggacctgctggccagcaacatggactcctctaatgatgtcgctatc

SEQ ID NO: 37023 - DNA, 30 bp, synthetic construct
  source 1..30: mol_type = other DNA
ctgagcgtcaacgagatccagcttggaacc

SEQ ID NO: 37024 - DNA, 42 bp, synthetic construct
  source 1..42: mol_type = other DNA
accgcccttaccggcgttaaagagcagaagatcgacctgctg

SEQ ID NO: 37025 - DNA, 42 bp, synthetic construct
  source 1..42: mol_type = other DNA
tctggctactcgatcgggttcgagaccgactccattatcgac

SEQ ID NO: 37026 - DNA, 54 bp, synthetic construct
  source 1..54: mol_type = other DNA
aagaccgtggacctcctgggctctaacgtgaacagctccaatgatgtggcaatc

SEQ ID NO: 37027 - DNA, 30 bp, synthetic construct
  source 1..30: mol_type = other DNA
ctgagcgttaacgagatccagttgggtacc

SEQ ID NO: 37028 - DNA, 42 bp, synthetic construct
  source 1..42: mol_type = other DNA
gccgctctcactggcgtcaaggagcagaaaatcgatttgctg

SEQ ID NO: 37029 - DNA, 45 bp, synthetic construct
  source 1..45: mol_type = other DNA
aactccgggttcacaatcggctttgagaccgatagcgtgatcgac

SEQ ID NO: 37030 - DNA, 54 bp, synthetic construct
  source 1..54: mol_type = other DNA
aagaccgtggacctcctggcctctaatatggacagctccaacgatctggctatc

SEQ ID NO: 37031 - DNA, 30 bp, synthetic construct
  source 1..30: mol_type = other DNA
ctgtcggtcaatgagatccaccttggaaca

SEQ ID NO: 37032 - DNA, 45 bp, synthetic construct
  source 1..45: mol_type = other DNA
ggggctgctctgacgggcgtcaagcagcagaacgtggatcttctg

SEQ ID NO: 37033 - DNA, 45 bp, synthetic construct
  source 1..45: mol_type = other DNA
aacagcggctacacaatcgggttcgagaccgactccgtgttcgat

SEQ ID NO: 37034 - DNA, 54 bp, synthetic construct
  source 1..54: mol_type = other DNA
aagaccgccgatctcctgctgagcaattccaacaccttcaacgacccaactgtt

SEQ ID NO: 37035 - DNA, 30 bp, synthetic construct
  source 1..30: mol_type = other DNA
ctgtcggttaacgagatccagttgggaacg

SEQ ID NO: 37036 - DNA, 39 bp, synthetic construct
  source 1..39: mol_type = other DNA
gctgccctgagcggagtcaaaaagcagaagttcgacatg

SEQ ID NO: 37037 - DNA, 42 bp, synthetic construct
  source 1..42: mol_type = other DNA
agcggctacacaattgggttcgagaccgacaacgttatcgac

SEQ ID NO: 37038 - DNA, 51 bp, synthetic construct
  source 1..51: mol_type = other DNA
accgtggatctcctgatttctaacttcgactcctctaaagataccgctatt

SEQ ID NO: 37039 - DNA, 42 bp, synthetic construct
  source 1..42: mol_type = other DNA
gctgccttgaccggagtcaaggagcagaacgtggacctgctg

SEQ ID NO: 37040 - DNA, 45 bp, synthetic construct
  source 1..45: mol_type = other DNA
aactccgggtacacaatcggcttcgagaccgatagcgtgatcgac

SEQ ID NO: 37041 - DNA, 51 bp, synthetic construct
  source 1..51: mol_type = other DNA
actgtggatctgctggccagcaactggaactctaccaatgaccccgctatt

SEQ ID NO: 37042 - DNA, 30 bp, synthetic construct
  source 1..30: mol_type = other DNA
ggcctggggattaagatcgagcagcatgac

SEQ ID NO: 37043 - DNA, 42 bp, synthetic construct
  source 1..42: mol_type = other DNA
gtggctctggatggggtcaagaatcagaacgcagacctcctc

SEQ ID NO: 37044 - DNA, 45 bp, synthetic construct
  source 1..45: mol_type = other DNA
agcggatacgtcatcggcttcgagaccgactccgtggtcgattcc

SEQ ID NO: 37045 - DNA, 51 bp, synthetic construct
  source 1..51: mol_type = other DNA
aagaccacggacctccttgcggctgacctgtctttcacaaaccccgctata

SEQ ID NO: 37046 - DNA, 30 bp, synthetic construct
  source 1..30: mol_type = other DNA
ctgtcggttaacgagatccctctgggaact

SEQ ID NO: 37047 - DNA, 45 bp, synthetic construct
  source 1..45: mol_type = other DNA
ggagtggcgttatctggagtcaaggaacagaacgctgatctgctg

SEQ ID NO: 37048 - DNA, 48 bp, synthetic construct
  source 1..48: mol_type = other DNA
aacagcgggtacacaatcggcttcgagaccgactccgtgatcgattct

SEQ ID NO: 37049 - DNA, 51 bp, synthetic construct
  source 1..51: mol_type = other DNA
accgtggacctactcgcgtcaaattggaattccaccaacgatccagctata

SEQ ID NO: 37050 - DNA, 30 bp, synthetic construct
  source 1..30: mol_type = other DNA
ctggccggcaacgagattcagatcggaacc

SEQ ID NO: 37051 - DNA, 30 bp, synthetic construct
  source 1..30: mol_type = other DNA
gggctgggcgtgaccatcgactacttcgat

SEQ ID NO: 37052 - DNA, 276 bp, synthetic construct
  source 1..276: mol_type = other DNA
ggaaccattactaacaccgatattacccatccacggtacaactcttatccgggacaaaacatcacaatcgagatctacgacgagtttgataacctgatcgagacaattcacgagaagaccaatgagaacaaccagattatctacaatatgagcaatataccctcggaaacctacaagatcgtgttctaccacgaagacgacggctattacgctaactcgacgacaggagacctgagtttcgagaaggaccagaacatctccgacgagatcttggca

SEQ ID NO: 37053 - DNA, 114 bp, synthetic construct
  source 1..114: mol_type = other DNA
gaggtcctcgccgccttctccacctacttcaacgaaaagacaaattacatcgcatacgtttatgtaaacgacgagctggtcaacgtgcaggaaggcagcgcttacaacggatac

SEQ ID NO: 37054 - DNA, 36 bp, synthetic construct
  source 1..36: mol_type = other DNA
agtgagtccagctctagcaagcgagactacgctctc

SEQ ID NO: 37055 - DNA, 30 bp, synthetic construct
  source 1..30: mol_type = other DNA
gcttgcctgaaggcctttacgatatcaaag

SEQ ID NO: 37056 - DNA, 72 bp, synthetic construct
  source 1..72: mol_type = other DNA
acgcccatcgactttcgggccatcattctcgatgagttcggcgacctggttaactacggcctgttcaatatt

SEQ ID NO: 37057 - DNA, 81 bp, synthetic construct
  source 1..81: mol_type = other DNA
gatcgggagtacctcatcgacgcaagcaccaatctgaccatcgccttcaacgagaagggaacgtacaggatattttatacg

SEQ ID NO: 37058 - DNA, 51 bp, synthetic construct
  source 1..51: mol_type = other DNA
atcgaaattggaaagctcaacgtggtggcctttcctacctcctttagtttt

SEQ ID NO: 37059 - DNA, 42 bp, synthetic construct
  source 1..42: mol_type = other DNA
tgctatggtaaccctgtgcctgatggcgtcgtgtacttcgag

SEQ ID NO: 37060 - DNA, 51 bp, synthetic construct
  source 1..51: mol_type = other DNA
ctcgacgtcggcatttacgacgtccatgtccggttcaacggcaacgaggat

SEQ ID NO: 37061 - DNA, 114 bp, synthetic construct
  source 1..114: mol_type = other DNA
gactccgtcaccggcaacgcactggccaataagcaggtgcagtacaagttcaacaacggaaaggtggcgactgtaaagaccgacgctaacggcgttgtcaaaatcaagatcagc

SEQ ID NO: 37062 - DNA, 42 bp, synthetic construct
  source 1..42: mol_type = other DNA
gatgccctgagcggcgttaaagaacagaacatcgaccttttg

SEQ ID NO: 37063 - DNA, 45 bp, synthetic construct
  source 1..45: mol_type = other DNA
aactccgggttcacaatcggctttgagaccgacagcgtggttgac

SEQ ID NO: 37064 - DNA, 54 bp, synthetic construct
  source 1..54: mol_type = other DNA
aacaccgtgaatctgctgtctagcaattggaactccagtaacgacttcgctatc

SEQ ID NO: 37065 - DNA, 144 bp, synthetic construct
  source 1..144: mol_type = other DNA
aaatatatcaacaacagcgcccctgaccactgcggggctgtgatgtacctgaaggataacgtgacaggcaacatcattgaaggatatttcgagaacaacacctgtactaataccggcggcgtcatgaccgccatgtcaaccgcc

SEQ ID NO: 37066 - DNA, 63 bp, synthetic construct
  source 1..63: mol_type = other DNA
aacacctttaaagggagcttctataagaactccgcccggatcggcggagtgctctacttctac

SEQ ID NO: 37067 - DNA, 30 bp, synthetic construct
  source 1..30: mol_type = other DNA
gggctgggggtcaacggcaacgaactcgac

SEQ ID NO: 37068 - DNA, 45 bp, synthetic construct
  source 1..45: mol_type = other DNA
atcattctcaatattccatccttcgctctggacgaggctttgact

SEQ ID NO: 37069 - DNA, 30 bp, synthetic construct
  source 1..30: mol_type = other DNA
ctcctgcatagccctgctgaccttgccgca

SEQ ID NO: 37070 - DNA, 63 bp, synthetic construct
  source 1..63: mol_type = other DNA
cccatctctcacctcttcgtgatcaacaatgacaccctgcaaatttccgccatgaactctgcc

SEQ ID NO: 37071 - DNA, 66 bp, synthetic construct
  source 1..66: mol_type = other DNA
agggccctgagcgctccttcccggttccgcgtcctcaagttccccttttggcacgttggaggatac

SEQ ID NO: 37072 - DNA, 48 bp, synthetic construct
  source 1..48: mol_type = other DNA
atgatctactccttcggcgacaccatttatatgcggccgtcgatctct

SEQ ID NO: 37073 - DNA, 132 bp, synthetic construct
  source 1..132: mol_type = other DNA
aagaagtataccatcgccctcaaggataacgccgggaaagctatcaaaaaggccaccgtctaccttaaggtcggcgggaagacttacaaagcaaccacaaatagcaaaggcaaagccactttcaagatcaca

SEQ ID NO: 37074 - DNA, 33 bp, synthetic construct
  source 1..33: mol_type = other DNA
gccaaaaccgtcaaggctaagctgacgatcatg

SEQ ID NO: 37075 - DNA, 33 bp, synthetic construct
  source 1..33: mol_type = other DNA
cagtacattagcttcatctatgaagcagctccg

SEQ ID NO: 37076 - DNA, 36 bp, synthetic construct
  source 1..36: mol_type = other DNA
gccattgcaatcgctctgggcgaaacagagatgtct

SEQ ID NO: 37077 - DNA, 60 bp, synthetic construct
  source 1..60: mol_type = other DNA
tccatcggcggaatccctctgctgaagcccagcattcggtaccttctgaagccagcactc

SEQ ID NO: 37078 - DNA, 264 bp, synthetic construct
  source 1..264: mol_type = other DNA
ttccgcagcctcggcgaaatgacaattacaagcagtactagtccgatttactcccttcaatcccgggctgacttcacactgcacgtcctgaatctgcttgattttatcgggggcaacttcggcgtgacacatggacacatgctggcctcttcaatcccgggctccgatctggggccccgaatgatggtcggcaaactgattgcctggcggaccgaggttactgtgacaccaaccttgatcggacagatggtggtcgactttggg

SEQ ID NO: 37079 - DNA, 36 bp, synthetic construct
  source 1..36: mol_type = other DNA
gattacttcgacctggggtttgagggcgttagctca

SEQ ID NO: 37080 - DNA, 72 bp, synthetic construct
  source 1..72: mol_type = other DNA
acaggcgacttccacctcggcaccatcactgacgagatggttccggacgggtggaaatgggacgggaacgac

SEQ ID NO: 37081 - DNA, 84 bp, synthetic construct
  source 1..84: mol_type = other DNA
tatggcgccctgggatactctgagatccacgaaaacggcgccagcaccctcattcccgtggctaaatacggattcggagacaca

SEQ ID NO: 37082 - DNA, 111 bp, synthetic construct
  source 1..111: mol_type = other DNA
gcctcttggatcaccttctccggtagtgatatgctccttcacggatatgcacatcacctctactccggaaccatgctcctgaccgccgacggacccgacggagctcaagcc

SEQ ID NO: 37083 - DNA, 33 bp, synthetic construct
  source 1..33: mol_type = other DNA
tggaaccctgacggagctagcgcggccgatggt

SEQ ID NO: 37084 - DNA, 144 bp, synthetic construct
  source 1..144: mol_type = other DNA
gtgccgctacaagactattttaaccaacggggaaatgccagccctgagcggctgaaggagctgattaaccagatatacctgagcgctaaggaacacgacatgttcaatgatttgaatatcaccgaagaccctggagcagagggt

SEQ ID NO: 37085 - DNA, 39 bp, synthetic construct
  source 1..39: mol_type = other DNA
gtggacatgcaggatgctatcgacgatccaagtggtacg

SEQ ID NO: 37086 - DNA, 39 bp, synthetic construct
  source 1..39: mol_type = other DNA
tggaagacagtgcaagatctagccgacgtgtacatcgat

SEQ ID NO: 37087 - DNA, 33 bp, synthetic construct
  source 1..33: mol_type = other DNA
atcaccggaaactacctgctcggcgatctttgg

SEQ ID NO: 37088 - DNA, 42 bp, synthetic construct
  source 1..42: mol_type = other DNA
acaccttatatgaaggtggtctatcccttgaccggcaacatc

SEQ ID NO: 37089 - DNA, 33 bp, synthetic construct
  source 1..33: mol_type = other DNA
gtgagttatgtgttccccaacctgaactacgac

SEQ ID NO: 37090 - DNA, 132 bp, synthetic construct
  source 1..132: mol_type = other DNA
ttcgatcccggcatccttagtctcgactcctacaaccagctccaccaaattgctacctctaacttcaccaattggcacccattctttcatactttcattgagatgatctgcattagattatatgcgtcgcca

SEQ ID NO: 37091 - DNA, 36 bp, synthetic construct
  source 1..36: mol_type = other DNA
gcctttttcaacaacaatgcttacgaaggtggagca

SEQ ID NO: 37092 - DNA, 30 bp, synthetic construct
  source 1..30: mol_type = other DNA
ggggactacggcgcggtctcaaattcaacc

SEQ ID NO: 37093 - DNA, 30 bp, synthetic construct
  source 1..30: mol_type = other DNA
aacaacaatgcctacgatggtggtgctatc

SEQ ID NO: 37094 - DNA, 45 bp, synthetic construct
  source 1..45: mol_type = other DNA
aacaccgctaaatatggcggtgccatcaactggaacaataagtac

SEQ ID NO: 37095 - DNA, 231 bp, synthetic construct
  source 1..231: mol_type = other DNA
aatgtgtcgagttgcctcttcattaacaacaccgctaccgttttgtcctccgtgtattacaatgactataacgacaccagctattccaacttcaccaacaatattctcctgaacaatgatccagatgagatttattaccgtgtattcgagggcagcaatgctgattataactggtttgggaataatgaaagtaactacgaccagaaaccctatgccaagtcaagtacatgg

SEQ ID NO: 37096 - DNA, 48 bp, synthetic construct
  source 1..48: mol_type = other DNA
ctgaccattgccggctacttcatcgtgcctgacatcggattgggaccc

SEQ ID NO: 37097 - DNA, 48 bp, synthetic construct
  source 1..48: mol_type = other DNA
gcctaccctcccctatcatatctgtaccccctgacaaccgagatcaac

SEQ ID NO: 37098 - DNA, 51 bp, synthetic construct
  source 1..51: mol_type = other DNA
actcttctcatccaacaccttactgagcgctgggttaccgacattaacttt

SEQ ID NO: 37099 - DNA, 51 bp, synthetic construct
  source 1..51: mol_type = other DNA
tacatgtctattgctgggaggttcgtaatacctgatatcgggcttggacca

SEQ ID NO: 37100 - DNA, 45 bp, synthetic construct
  source 1..45: mol_type = other DNA
tacccgccgttttccgcgctgtatccccttaccaccgaaatcaac

SEQ ID NO: 37101 - DNA, 48 bp, synthetic construct
  source 1..48: mol_type = other DNA
ctcctgatcaagaatatcaccgacaaatgggtggacgatatcaacttc

SEQ ID NO: 37102 - DNA, 276 bp, synthetic construct
  source 1..276: mol_type = other DNA
gagtacaacgtcaccgcctatctggacgagtcctacctgttctctagcaatgtgctcaacatcaacatcaacgtgaagagcacatccatcgtggcacaggacatggtgacaagcgacgagaacattacatatgcggtccggttgatcgatgaaggtggcaatcccctgaaggctaagcacatcgagttccggctgaacaacgctacctacactgacattaccgacaacaacggcaccgccaaagttaatctttctctcaagaagggaatcaatgct

SEQ ID NO: 37103 - DNA, 219 bp, synthetic construct
  source 1..219: mol_type = other DNA
agcacacagatcatcttcaagcctatcatcaccgctggcattgacgtggtcaatctcggttcttcgaagtctattgaagtaatgttttccatgcccatcaacgaaagcgccatcattttcgtcaacgacgagaacacaaccgttcgagtgtccaatgggcagacctttctcatgctgagcaacctcgagaacggcttatatgtagtgtctgtggaactt

SEQ ID NO: 37104 - DNA, 159 bp, synthetic construct
  source 1..159: mol_type = other DNA
tccatcaacttcaccgtgctgctcaaggacacccagattatggccgatgatttcataaccggggatttttcaaatcagaattacgtgattacactcctggacgaggaccttaaccccttaagtggccaaagtatcgtcttcctgatcgacaacagaacg

SEQ ID NO: 37105 - DNA, 84 bp, synthetic construct
  source 1..84: mol_type = other DNA
aagttcactaccacggatgaaaacggccacgctgaaatgtccatcaacctggactatggcaactacacgatcgcctcctattac

SEQ ID NO: 37106 - DNA, 228 bp, synthetic construct
  source 1..228: mol_type = other DNA
gagaacagttctaagctcgtcgtgaagattaacgccacgcccgtaattcgggtctctcctaatctgaaggacgtgaagatcgagttcagctttacgagagcaattaatgacactatcaccatctccgtggctgatgtgaagactagcattaacataacggatggccacggcgaactgaatctgaccgacctcgagaacggaaactacaccgtctccatcaaccttaac

SEQ ID NO: 37107 - DNA, 258 bp, synthetic construct
  source 1..258: mol_type = other DNA
agccactttgagcaagacttcgaagtgaacgtgaaggacagccagatcatcgtgaacgacttcgagacatactgtcaaagcggcgagtcttatacaatccagctgaccgaccagaacggcattcctattaagtctgccattgtcgatatcgccatcgagtccatggggaactacactcaccaaacagacgctaacggggtcgtgctgatccccatcaaacttgatgctgggagatacaatgtctccgtgaagttcaag

SEQ ID NO: 37108 - DNA, 192 bp, synthetic construct
  source 1..192: mol_type = other DNA
agctcacaagcaaatgctgggataactgtcaactcctccatcgcattcaccaatgcacaatatgctttaaactccaactatatagtgctgctcaaaggtaacgtctccggcaagcccgtgtccatcactatcgacggcgtcctttatgaggttattgccgaggaaggacgggctgcaatgaaaatcaatctg

SEQ ID NO: 37109 - DNA, 129 bp, synthetic construct
  source 1..129: mol_type = other DNA
gggaccggcggcatctaccctatccaactgatgggccagtttctccaagctgtcagcccttacatgccaatgacccacggaattacactgctgcgcgagactgctctcggactggtctggtcgaactac

SEQ ID NO: 37110 - DNA, 42 bp, synthetic construct
  source 1..42: mol_type = other DNA
gaggttcagcacatcggcggctactacatctatgctgatatt

SEQ ID NO: 37111 - DNA, 42 bp, synthetic construct
  source 1..42: mol_type = other DNA
cacaatttgaactatagctactctatctccgatgtggacttc

SEQ ID NO: 37112 - DNA, 36 bp, synthetic construct
  source 1..36: mol_type = other DNA
attctgagctacgtgcccaagatcaacccttcctac

SEQ ID NO: 37113 - DNA, 42 bp, synthetic construct
  source 1..42: mol_type = other DNA
gaggtccagcacatcggcggctactatatctacgctgatatt

SEQ ID NO: 37114 - DNA, 42 bp, synthetic construct
  source 1..42: mol_type = other DNA
cacaatctgaattacagttattcgatctctgacgtggatttc

SEQ ID NO: 37115 - DNA, 36 bp, synthetic construct
  source 1..36: mol_type = other DNA
attctgtcctacgtgcccaagatcgaccctagctac

SEQ ID NO: 37116 - DNA, 42 bp, synthetic construct
  source 1..42: mol_type = other DNA
gaggtccagcacattggtggctactatatatacgccgacatc

SEQ ID NO: 37117 - DNA, 42 bp, synthetic construct
  source 1..42: mol_type = other DNA
cacaatctgaactactcctattccatatcggatgtcgatttc

SEQ ID NO: 37118 - DNA, 39 bp, synthetic construct
  source 1..39: mol_type = other DNA
ctgattctgtcctacgtgcccaagatcgaccctagctat

SEQ ID NO: 37119 - DNA, 33 bp, synthetic construct
  source 1..33: mol_type = other DNA
aagaaatacacattaacacaacccctattgccc

SEQ ID NO: 37120 - DNA, 42 bp, synthetic construct
  source 1..42: mol_type = other DNA
catatgaacttcggaggcagatttttcatccctgacatgggg

SEQ ID NO: 37121 - DNA, 42 bp, synthetic construct
  source 1..42: mol_type = other DNA
ttcccctctattatcggcgatttgtattccttgacctccttt

SEQ ID NO: 37122 - DNA, 54 bp, synthetic construct
  source 1..54: mol_type = other DNA
ctccacgacgtgatcgtcggctttagcttcgttaacgtgctgaacatcagattc

SEQ ID NO: 37123 - DNA, 51 bp, synthetic construct
  source 1..51: mol_type = other DNA
cacatgaacttcggcggcagatttttcatccccgacatggggcttgctcca

SEQ ID NO: 37124 - DNA, 42 bp, synthetic construct
  source 1..42: mol_type = other DNA
ttccccgagatcattggcgacctatactccctaacctccttt

SEQ ID NO: 37125 - DNA, 36 bp, synthetic construct
  source 1..36: mol_type = other DNA
ctgggctttagcttcgtgaataagttcaacctcaaa

SEQ ID NO: 37126 - DNA, 51 bp, synthetic construct
  source 1..51: mol_type = other DNA
gaacacatgccattcggcggagagtatatcgtcgccgacgttggcatcgcc

SEQ ID NO: 37127 - DNA, 36 bp, synthetic construct
  source 1..36: mol_type = other DNA
tacagcaagatgtacgtgatctatccactgtcctcc

SEQ ID NO: 37128 - DNA, 36 bp, synthetic construct
  source 1..36: mol_type = other DNA
ctgatctttacctataacttcaatgaggactacatc

SEQ ID NO: 37129 - DNA, 48 bp, synthetic construct
  source 1..48: mol_type = other DNA
gagcacatgcccttcggtggcgagtacataatcgctgacgttggcata

SEQ ID NO: 37130 - DNA, 42 bp, synthetic construct
  source 1..42: mol_type = other DNA
gaagcatacccgaagatgtacatcatttatccactgagctcc

SEQ ID NO: 37131 - DNA, 39 bp, synthetic construct
  source 1..39: mol_type = other DNA
agcatgatctttacctataatttcaacgaggactacatc

SEQ ID NO: 37132 - DNA, 51 bp, synthetic construct
  source 1..51: mol_type = other DNA
gaacacatgccttatggcggggagtacatagtggccgacgttgggatagcc

SEQ ID NO: 37133 - DNA, 36 bp, synthetic construct
  source 1..36: mol_type = other DNA
taccaccatatgtatgtgatctaccccctgtcaacg

SEQ ID NO: 37134 - DNA, 36 bp, synthetic construct
  source 1..36: mol_type = other DNA
agcatgatcttcacctaccactttaacgaggactac

SEQ ID NO: 37135 - DNA, 39 bp, synthetic construct
  source 1..39: mol_type = other DNA
cacctcaacatcggcggacggtacctgaatcctgacatg

SEQ ID NO: 37136 - DNA, 48 bp, synthetic construct
  source 1..48: mol_type = other DNA
tttcccgaagtcatgtcggatttatactccatatcgaatttcagaaat

SEQ ID NO: 37137 - DNA, 51 bp, synthetic construct
  source 1..51: mol_type = other DNA
ctggtcatgaattactttaaatataacctgcatgtgcttgacaaaagcttc

SEQ ID NO: 37138 - DNA, 45 bp, synthetic construct
  source 1..45: mol_type = other DNA
ctgaacaatcactacgacgtgaacttcaaccggctcaagcatgcc

SEQ ID NO: 37139 - DNA, 45 bp, synthetic construct
  source 1..45: mol_type = other DNA
cagaattacgatcaggagctgtataacctggccgactctttcgaa

SEQ ID NO: 37140 - DNA, 45 bp, synthetic construct
  source 1..45: mol_type = other DNA
gaggtgcagcacatcggcggctactatatttacgctgacatcgcc

SEQ ID NO: 37141 - DNA, 42 bp, synthetic construct
  source 1..42: mol_type = other DNA
cacaatctgaactatagctactctatctccgatgtgaacttc

SEQ ID NO: 37142 - DNA, 39 bp, synthetic construct
  source 1..39: mol_type = other DNA
ctaatcctatcctatgtgcccaagatcgacccttcctac

SEQ ID NO: 37143 - DNA, 159 bp, synthetic construct
  source 1..159: mol_type = other DNA
aaggcctcgtcaacggctgcgtccgtgtattcaagcttcaacgtctgcgccaccaacaccaagtttgaaggcaacgtcgccgactactcgccgtccggcatctactctgagaaaaaggtatcagtcattcggtgtctgttcgactctaacaaggaacgg

SEQ ID NO: 37144 - DNA, 45 bp, synthetic construct
  source 1..45: mol_type = other DNA
gggagcggcggagctatctgcgccatggatgacgtgaccgtagac

SEQ ID NO: 37145 - DNA, 69 bp, synthetic construct
  source 1..69: mol_type = other DNA
tcgacatttagtaacaactacgctcaatgtgtcggcggcgctatctgttctgagaagggagacgtgtat

SEQ ID NO: 37146 - DNA, 300 bp, synthetic construct
  source 1..300: mol_type = other DNA
gggaactctgtggacaccggccacggaggagccattttcactaaggcctacttcggaaaggtctatgttaagaacactgtatttgatagcaatcaggccaacgtggacggtggcgcgatcttctctggcgccagcatcgaggcaacaaactgcatcttcaagagcaacaaggcagtcggttccacactgcggacctgttatggaggtgctatccgcacatactactccgcttacatcaacaattgctctttcttcgacaactacgctgaaaacgatggcggagctatctgtactagggac

SEQ ID NO: 37147 - DNA, 51 bp, synthetic construct
  source 1..51: mol_type = other DNA
tatacctactttaccggggagtatctactggttgacatcggcttcgcccca

SEQ ID NO: 37148 - DNA, 51 bp, synthetic construct
  source 1..51: mol_type = other DNA
tatgatacttacgcgaacttcgcctccgtttacccatatcactctaatctg

SEQ ID NO: 37149 - DNA, 42 bp, synthetic construct
  source 1..42: mol_type = other DNA
ctggtcccccaaatgatctggggcaacgccgacgctagcttt

SEQ ID NO: 37150 - DNA, 57 bp, synthetic construct
  source 1..57: mol_type = other DNA
gctgccattggcaacatgcaggtctacgcaatcagctccgtgaagcagcctttgaca

SEQ ID NO: 37151 - DNA, 129 bp, synthetic construct
  source 1..129: mol_type = other DNA
gccacaggcggcatctacccgatacaaataatggctcctttctttcgggtcctgtacccctacatgccaatgacctacgggatcactttagtccgtgaagcccagctcggagtggtttggagcaactat

SEQ ID NO: 37152 - DNA, 45 bp, synthetic construct
  source 1..45: mol_type = other DNA
ctcagccccaactccatcaacggcaatggcctgaaccctcacatg

SEQ ID NO: 37153 - DNA, 48 bp, synthetic construct
  source 1..48: mol_type = other DNA
gagcctgaaaccatcctgatctttgagcccaagagcatcgccttcatt

SEQ ID NO: 37154 - DNA, 48 bp, synthetic construct
  source 1..48: mol_type = other DNA
cacgtggatctgatgctcgacaccgacctgagctacgacgagatcgtg

SEQ ID NO: 37155 - DNA, 36 bp, synthetic construct
  source 1..36: mol_type = other DNA
gactacttcgggctgaacctggatggctttactgcc

SEQ ID NO: 37156 - DNA, 72 bp, synthetic construct
  source 1..72: mol_type = other DNA
aacggaaccttccacatggccacaatcagcgacgagctggtgccaactggctgggtctggaacggcaacaac

SEQ ID NO: 37157 - DNA, 84 bp, synthetic construct
  source 1..84: mol_type = other DNA
tacggtgccctgggcatcggacagattgagatcgccggagccgctaccctcattcccgtggccgaagcagatttcggcaaggct

SEQ ID NO: 37158 - DNA, 78 bp, synthetic construct
  source 1..78: mol_type = other DNA
tgcggctgggtggacggaatgccctttgtccggggcttctcattattctctgcatcttgggcttttggtgtcggggac

SEQ ID NO: 37159 - DNA, 39 bp, synthetic construct
  source 1..39: mol_type = other DNA
acctggaacatctttggcggctttgtcgtgttgggactg

SEQ ID NO: 37160 - DNA, 39 bp, synthetic construct
  source 1..39: mol_type = other DNA
gactacttcgggctgaacctgaccggttttactgcattt

SEQ ID NO: 37161 - DNA, 72 bp, synthetic construct
  source 1..72: mol_type = other DNA
aacggaactttccacatgtctaccataagcaacgaactggtacctactggttgggtctggaacgggaataac

SEQ ID NO: 37162 - DNA, 84 bp, synthetic construct
  source 1..84: mol_type = other DNA
tacggcgccctaggtatcggagagatcaccagcgctggcgctgcaacactgatccccgtggcggaagcagacttcggaaaagcc

SEQ ID NO: 37163 - DNA, 78 bp, synthetic construct
  source 1..78: mol_type = other DNA
tgcggctgggttgacgggatgcccttcgtccggggcttctctctgttctccgcgtcctgggctgacggaatcttccag

SEQ ID NO: 37164 - DNA, 39 bp, synthetic construct
  source 1..39: mol_type = other DNA
acctgggacatcttcggcggatttgtcgtgttgggactg

SEQ ID NO: 37165 - DNA, 36 bp, synthetic construct
  source 1..36: mol_type = other DNA
aagtacatcaacaatagcgcaccagaccactgtggc

SEQ ID NO: 37166 - DNA, 72 bp, synthetic construct
  source 1..72: mol_type = other DNA
atcattgaaggctacttcgagaacaatacttgcaccaacactgggggcgttatgaccgctatgagcaccgct

SEQ ID NO: 37167 - DNA, 60 bp, synthetic construct
  source 1..60: mol_type = other DNA
aatacctttaaagggtccttctataagaacagcgccaggatcggcggagtgctgtacttt

SEQ ID NO: 37168 - DNA, 138 bp, synthetic construct
  source 1..138: mol_type = other DNA
aacacaatcattggcgagttcatcaacaatagcgccactcgttacggtagtaccatttatttccggggcacaccttttaataagatcacaaactccagtttcattaataaccagatcccctcaaaaaacttaaacgtc

SEQ ID NO: 37169 - DNA, 33 bp, synthetic construct
  source 1..33: mol_type = other DNA
gactacttcggactggatctcgggggaatgacc

SEQ ID NO: 37170 - DNA, 75 bp, synthetic construct
  source 1..75: mol_type = other DNA
ttcaacggcacatttagcatggactacatttccaacgagatcgttcctgctggctgggaatggaacggaaacacc

SEQ ID NO: 37171 - DNA, 87 bp, synthetic construct
  source 1..87: mol_type = other DNA
tacggcgcactggggcaggcgcaaattgaagcagctggagcagcaaccctcatccctgtggctgaatccgactttgggaaggcgggt

SEQ ID NO: 37172 - DNA, 75 bp, synthetic construct
  source 1..75: mol_type = other DNA
tgcgactgggtggagggcatgccttcggtcctgggagccgtcttctttaccgccgactgggctgatgggatctac

SEQ ID NO: 37173 - DNA, 36 bp, synthetic construct
  source 1..36: mol_type = other DNA
tgggacatcttcaccggcggggtcgggtttgcattc

SEQ ID NO: 37174 - DNA, 45 bp, synthetic construct
  source 1..45: mol_type = other DNA
gagcacctgcctatcggcggcgagtacttcatccccgacattggt

SEQ ID NO: 37175 - DNA, 42 bp, synthetic construct
  source 1..42: mol_type = other DNA
tccagcaagatgtacgtcatctaccccctatacggaaatatc

SEQ ID NO: 37176 - DNA, 42 bp, synthetic construct
  source 1..42: mol_type = other DNA
tttctgagctccctcttcaccaacaacctggacacagcttac

SEQ ID NO: 37177 - DNA, 39 bp, synthetic construct
  source 1..39: mol_type = other DNA
accgatgtgctggacctcggcctgtactgcccacacatc

SEQ ID NO: 37178 - DNA, 42 bp, synthetic construct
  source 1..42: mol_type = other DNA
tatcacataattgacatcgacgtgaatctcactatctacgtg

SEQ ID NO: 37179 - DNA, 42 bp, synthetic construct
  source 1..42: mol_type = other DNA
acagacagcttcctcatccaaccaacgtcaacgataacacgg

SEQ ID NO: 37180 - DNA, 30 bp, synthetic construct
  source 1..30: mol_type = other DNA
gtgctgggcatttacatcgccaacgaacct

SEQ ID NO: 37181 - DNA, 129 bp, synthetic construct
  source 1..129: mol_type = other DNA
gggaccggcggaatctaccctgtcgagattatggctccattctttaatgtggctaacccatacctgcctatgacttacgccattacactgatccgcgaatcccagcttggcctgatctggagcaactat

SEQ ID NO: 37182 - DNA, 39 bp, synthetic construct
  source 1..39: mol_type = other DNA
ttcagcaacaatttcgcacaaggactctcgccccacgaa

SEQ ID NO: 37183 - DNA, 33 bp, synthetic construct
  source 1..33: mol_type = other DNA
tttttctaccccgagacgatttccatcaacctt

SEQ ID NO: 37184 - DNA, 48 bp, synthetic construct
  source 1..48: mol_type = other DNA
ctggttaatgccatgaccagcctccttcccctgaacgacgtcgaagtg

SEQ ID NO: 37185 - DNA, 45 bp, synthetic construct
  source 1..45: mol_type = other DNA
ctgtcccctaatagcatcaatggcaatggcctgaacccacacatg

SEQ ID NO: 37186 - DNA, 45 bp, synthetic construct
  source 1..45: mol_type = other DNA
cccgagaccattctgatctttgaacctaagagcgtggccttcatc

SEQ ID NO: 37187 - DNA, 54 bp, synthetic construct
  source 1..54: mol_type = other DNA
tatgtcgacgtcatgccggatactaacctgtcttatgacgagtccgtttgggtc

SEQ ID NO: 37188 - DNA, 39 bp, synthetic construct
  source 1..39: mol_type = other DNA
ggaggcagccagaacttcggcgccggactgaatgcttac

SEQ ID NO: 37189 - DNA, 57 bp, synthetic construct
  source 1..57: mol_type = other DNA
acaaccttcggctacgtgctcatcgagtatctgcctgtaccaaattctgacgctttt

SEQ ID NO: 37190 - DNA, 42 bp, synthetic construct
  source 1..42: mol_type = other DNA
caccatgggagcaacttcggaggcggtctttctcctcatgtc

SEQ ID NO: 37191 - DNA, 33 bp, synthetic construct
  source 1..33: mol_type = other DNA
ctgtaccccgacacaatttccatcaccactctc

SEQ ID NO: 37192 - DNA, 54 bp, synthetic construct
  source 1..54: mol_type = other DNA
cacaccctcatcactgccatcgacaacgtgctgccaatcaatcggacagaagtg

SEQ ID NO: 37193 - DNA, 45 bp, synthetic construct
  source 1..45: mol_type = other DNA
gtgggcggaagcgagaacttcggggccggactcaatgcttacctg

SEQ ID NO: 37194 - DNA, 30 bp, synthetic construct
  source 1..30: mol_type = other DNA
acctacccccggatcacagccaacgagttc

SEQ ID NO: 37195 - DNA, 60 bp, synthetic construct
  source 1..60: mol_type = other DNA
gagaacagcaacttcggctacctcttgatccaatatatacctgtgcccaataccgatgcc

SEQ ID NO: 37196 - DNA, 42 bp, synthetic construct
  source 1..42: mol_type = other DNA
atgctgtccgatgactttggttatggctttagcccccacgtt

SEQ ID NO: 37197 - DNA, 36 bp, synthetic construct
  source 1..36: mol_type = other DNA
attctgtaccccgaaaccatcgagacaagcttcgag

SEQ ID NO: 37198 - DNA, 57 bp, synthetic construct
  source 1..57: mol_type = other DNA
gatatcctgctcgaagtgatcgacatcttttctccggtcgaaatggacgatttggtg

SEQ ID NO: 37199 - DNA, 42 bp, synthetic construct
  source 1..42: mol_type = other DNA
gccatcggggacaacttcgctgagggctactcccctcacctg

SEQ ID NO: 37200 - DNA, 33 bp, synthetic construct
  source 1..33: mol_type = other DNA
ttgtttcaacccgaaaccatgcacatcacattc

SEQ ID NO: 37201 - DNA, 57 bp, synthetic construct
  source 1..57: mol_type = other DNA
gatgacgtgctcgccttcgcccttgacgcttacctgcccattgatctgggagaagtg

SEQ ID NO: 37202 - DNA, 42 bp, synthetic construct
  source 1..42: mol_type = other DNA
aaaggtggccagaacttcggcggtggtctttccgttcacgtg

SEQ ID NO: 37203 - DNA, 39 bp, synthetic construct
  source 1..39: mol_type = other DNA
tacctgacactgcccgagaccatcagcctcaactcaacc

SEQ ID NO: 37204 - DNA, 54 bp, synthetic construct
  source 1..54: mol_type = other DNA
cacaatatcatcacggccatcagcaatctcctgcccctgaacgtgaacgaagta

SEQ ID NO: 37205 - DNA, 39 bp, synthetic construct
  source 1..39: mol_type = other DNA
atcggcaagaacttcgccgagggctactctccacatctc

SEQ ID NO: 37206 - DNA, 30 bp, synthetic construct
  source 1..30: mol_type = other DNA
ttctacaggcctgagacccggcctatctct

SEQ ID NO: 37207 - DNA, 51 bp, synthetic construct
  source 1..51: mol_type = other DNA
gttctggcttacgtccttaacctctacttgccaattgacatcgacgaagtg

SEQ ID NO: 37208 - DNA, 39 bp, synthetic construct
  source 1..39: mol_type = other DNA
acccctatgtggaagctcggattatattcaccccacatc

SEQ ID NO: 37209 - DNA, 30 bp, synthetic construct
  source 1..30: mol_type = other DNA
atcttattccaatcggaaatggaggagtac

SEQ ID NO: 37210 - DNA, 63 bp, synthetic construct
  source 1..63: mol_type = other DNA
aacttcattatcaccaacaagatctacttcaacgagtacagcatggccttctatctgatggaa

SEQ ID NO: 37211 - DNA, 129 bp, synthetic construct
  source 1..129: mol_type = other DNA
gggactggcggcatttacccaatacaactcatgggacccttactgcaaacggtatccccatatatgcccatgacacacggcatcaacctgctccgcgaatctgccctgggactggtctggtccaactac

SEQ ID NO: 37212 - DNA, 39 bp, synthetic construct
  source 1..39: mol_type = other DNA
atgggggaaaacttcggagaagggttttctccacatgtg

SEQ ID NO: 37213 - DNA, 36 bp, synthetic construct
  source 1..36: mol_type = other DNA
tacctgatgcatcctgagacagtctcaattaacatt

SEQ ID NO: 37214 - DNA, 60 bp, synthetic construct
  source 1..60: mol_type = other DNA
gaccacaccttcataacggctgtcgatgagatcctgcccattgacttttacgaggtcaag

SEQ ID NO: 37215 - DNA, 126 bp, synthetic construct
  source 1..126: mol_type = other DNA
accggaggcatttatcccgtcgaagtaatgccgccactcttcaaatcaatcaaccccttcatgccaatgacctacgccatcacaatgatccgcgaagcttgcctggggctgtacctgcctaactac

SEQ ID NO: 37216 - DNA, 42 bp, synthetic construct
  source 1..42: mol_type = other DNA
acagacagtttcctcatgaatccgacttctgctgttactagg

SEQ ID NO: 37217 - DNA, 42 bp, synthetic construct
  source 1..42: mol_type = other DNA
acggactccttcctgatgaacccaacaagcgcagtgacacgg

SEQ ID NO: 37218 - DNA, 42 bp, synthetic construct
  source 1..42: mol_type = other DNA
tcttcccgcaacgttagtcagggcattaacgctcacattggg

SEQ ID NO: 37219 - DNA, 39 bp, synthetic construct
  source 1..39: mol_type = other DNA
aacctgctttactctagcatgggctacgagaatgcaacc

SEQ ID NO: 37220 - DNA, 51 bp, synthetic construct
  source 1..51: mol_type = other DNA
gtgatcatcatggccgtggacgactttctccctctgtctttcatggagatt

SEQ ID NO: 37221 - DNA, 39 bp, synthetic construct
  source 1..39: mol_type = other DNA
aagatgaacgtgtctgagagcttctccatccaaagtcct

SEQ ID NO: 37222 - DNA, 54 bp, synthetic construct
  source 1..54: mol_type = other DNA
gactcctctctcattgccataatccagaaaatcatccccctgaccaaaagcatc

SEQ ID NO: 37223 - DNA, 39 bp, synthetic construct
  source 1..39: mol_type = other DNA
actgactccttcctgatgaaccccacaagcaaggttacc

SEQ ID NO: 37224 - DNA, 42 bp, synthetic construct
  source 1..42: mol_type = other DNA
acctatgggcacaactacggcgagggcctgagccctcacgtg

SEQ ID NO: 37225 - DNA, 39 bp, synthetic construct
  source 1..39: mol_type = other DNA
tgcctgattaaccccgagacctcccctatcacatctctg

SEQ ID NO: 37226 - DNA, 54 bp, synthetic construct
  source 1..54: mol_type = other DNA
cacctcctgataaccgctattgactcgctactgcccatcaaccggacagagatt

SEQ ID NO: 37227 - DNA, 45 bp, synthetic construct
  source 1..45: mol_type = other DNA
aatcacggccagaacttcggcgagggctttgctccccatgacggg

SEQ ID NO: 37228 - DNA, 33 bp, synthetic construct
  source 1..33: mol_type = other DNA
ctgtaccctcaaatcaaagtggagagctacatc

SEQ ID NO: 37229 - DNA, 45 bp, synthetic construct
  source 1..45: mol_type = other DNA
ctgaccgccgtggactactatctgcccattagcatgaacgagatc

SEQ ID NO: 37230 - DNA, 39 bp, synthetic construct
  source 1..39: mol_type = other DNA
gactccttcctgatgaaccccacttccgcggtgacacga

SEQ ID NO: 37231 - DNA, 48 bp, synthetic construct
  source 1..48: mol_type = other DNA
cacctctatttcatcgagtacaacctgtcctttgaccccttcgtttcc

SEQ ID NO: 37232 - DNA, 33 bp, synthetic construct
  source 1..33: mol_type = other DNA
gtcaaaggccaatatgatgtaaagaaccttcac

SEQ ID NO: 37233 - DNA, 39 bp, synthetic construct
  source 1..39: mol_type = other DNA
atccccggcatcattacacctaccgacgtgctgagcaac

SEQ ID NO: 37234 - DNA, 57 bp, synthetic construct
  source 1..57: mol_type = other DNA
tccagctactatcggttcaaatgcgatgtcgactctatccctctggatacaggagat

SEQ ID NO: 37235 - DNA, 279 bp, synthetic construct
  source 1..279: mol_type = other DNA
gctacaattattagtggacaaggtctagaactgacactgcttaataactccatcaacgtgaccaccctgccatctcgctttgacttgcgggactggggttggatgagccctgtcaaggatcagggctggatgggtgcctgctggacattcggcatgaccgggaccctggagtccgctctcctgaaggccgccgggatcaaaaccgacttctccgagaacaacatgcgggacactatgctcaagtactctatctacgggtccgacgcctttgaagagttg

SEQ ID NO: 37236 - DNA, 153 bp, synthetic construct
  source 1..153: mol_type = other DNA
actaccaacgagaacgggacagcccggctcaacatcaacctgccaccgggcgaatacatactgaccgctatcgaccccttaacgggattgatgatgagctacaatattaccgtgctgtctacccttaacgccaccgacctggaaatgtcctac

SEQ ID NO: 37237 - DNA, 132 bp, synthetic construct
  source 1..132: mol_type = other DNA
tttaacgtgaccgtgctggatggacaaggcaagcccgcttataaagcggctgtgaagttcaacattaacgggatcttctacacaaagcatactgactccaagggtatcgctaaactcaacatcaacctgatg

SEQ ID NO: 37238 - DNA, 63 bp, synthetic construct
  source 1..63: mol_type = other DNA
aagtatatcataacaagcgaatatgacggtctgaagattagtaacacaattaccatcaaggac

SEQ ID NO: 37239 - DNA, 39 bp, synthetic construct
  source 1..39: mol_type = other DNA
aacggagagaatctgggcggtggactgtctccacatgtc

SEQ ID NO: 37240 - DNA, 30 bp, synthetic construct
  source 1..30: mol_type = other DNA
gcctaccctgacaccatccccatcaagaac

SEQ ID NO: 37241 - DNA, 48 bp, synthetic construct
  source 1..48: mol_type = other DNA
atgattagcgccattaataagctgatcccgctgaacatcaacggaatc

SEQ ID NO: 37242 - DNA, 42 bp, synthetic construct
  source 1..42: mol_type = other DNA
acggacagtttccttatgcaaccgaccagcgcgatcacccgg

SEQ ID NO: 37243 - DNA, 39 bp, synthetic construct
  source 1..39: mol_type = other DNA
accgacagcttcctgatggagcccactagtgctgttacc

SEQ ID NO: 37244 - DNA, 39 bp, synthetic construct
  source 1..39: mol_type = other DNA
gactccttcctgatgaaccccacatcggaagtgacacga

SEQ ID NO: 37245 - DNA, 42 bp, synthetic construct
  source 1..42: mol_type = other DNA
actgacagcttcttcatggagccgacaagcgctgtgacacga

SEQ ID NO: 37246 - DNA, 39 bp, synthetic construct
  source 1..39: mol_type = other DNA
actgactccttcctgatgcaccctacaagcgctgtaacc

SEQ ID NO: 37247 - DNA, 42 bp, synthetic construct
  source 1..42: mol_type = other DNA
acagacagcttcttgatgaaccctacgagcgtggtgacccga

SEQ ID NO: 37248 - DNA, 36 bp, synthetic construct
  source 1..36: mol_type = other DNA
gactccttcctgatgaaccccacgtcggacgtgacg

SEQ ID NO: 37249 - DNA, 39 bp, synthetic construct
  source 1..39: mol_type = other DNA
ggccttgagaacggcggtctcctgaagctgcacttgcag

SEQ ID NO: 37250 - DNA, 39 bp, synthetic construct
  source 1..39: mol_type = other DNA
gtgctgttcaactatagctacgagaccctgctctacaat

SEQ ID NO: 37251 - DNA, 39 bp, synthetic construct
  source 1..39: mol_type = other DNA
cagaccaacctacaaatgtttgcctccgcaacggtctcc

SEQ ID NO: 37252 - DNA, 30 bp, synthetic construct
  source 1..30: mol_type = other DNA
atgatgggcggcatcgatctcggactgttc

SEQ ID NO: 37253 - DNA, 54 bp, synthetic construct
  source 1..54: mol_type = other DNA
cgggactatagcgatgtgctgtttaccctcaaaaagttcggcctgtactacctg

SEQ ID NO: 37254 - DNA, 30 bp, synthetic construct
  source 1..30: mol_type = other DNA
atcaagggcaactctgacgccagagatctg

SEQ ID NO: 37255 - DNA, 39 bp, synthetic construct
  source 1..39: mol_type = other DNA
ttcatccccgaggaaatcaccccggattcgattttgggc

SEQ ID NO: 37256 - DNA, 129 bp, synthetic construct
  source 1..129: mol_type = other DNA
gccacaggcggcatctaccctattcaaattatggcccctttctttcgggtcctgtacccctacatgccaatgacctatggaatcactcttgttcgcgaggctcagctcggggtagtttggtctaactat

SEQ ID NO: 37257 - DNA, 42 bp, synthetic construct
  source 1..42: mol_type = other DNA
gaggtgctttgggatttcggcgtctttgccccacaaatcccc

SEQ ID NO: 37258 - DNA, 51 bp, synthetic construct
  source 1..51: mol_type = other DNA
tatagcaatgctttcatcaatattaagaacctcgaagaatacctgcccata

SEQ ID NO: 37259 - DNA, 45 bp, synthetic construct
  source 1..45: mol_type = other DNA
ctgcctctcacccggtactctgagatcataattcagatacccata

SEQ ID NO: 37260 - DNA, 51 bp, synthetic construct
  source 1..51: mol_type = other DNA
aattcctacctgagccggtacttcgggggcaacacataccttattgtgatg

SEQ ID NO: 37261 - DNA, 57 bp, synthetic construct
  source 1..57: mol_type = other DNA
ggcgactacaatgatatcctggccaccgtggacaacttcggcctgtattacctcatc

SEQ ID NO: 37262 - DNA, 87 bp, synthetic construct
  source 1..87: mol_type = other DNA
atcctcaccgcaactgatcctttaactgacctccaaatgagttacgacatcaccgtgctgcctacactgattgctgataaccttgtg

SEQ ID NO: 37263 - DNA, 135 bp, synthetic construct
  source 1..135: mol_type = other DNA
ttccacatctccctcatcgacggcgacggctcccctgtggctgataagcagattgtcatgaacattaatggcgtgttttacaatcggaccactaacgagaacggaacagccaagctgaacatcaacctgaaccca

SEQ ID NO: 37264 - DNA, 45 bp, synthetic construct
  source 1..45: mol_type = other DNA
tacatcctgaccgcgactgaccccctgactgatcttcaaatgtcg

SEQ ID NO: 37265 - DNA, 276 bp, synthetic construct
  source 1..276: mol_type = other DNA
aatatcaccgtgctgcccgtgctcaccgctgaggatgtcaaaatgacctacctggacgggacccagtttaaggctacactggtcgacggagaaggagaggcccagagcgacgcaaacattactttcaatatcaacggcgtgttctacaaccggactaccgatgagaacggcacagcctctctgaacatcaggctcatgcctggagagtatataataacaagccaatatggtcaggcggccatttctaacaagatcacaattgccgcaaaaggagac

SEQ ID NO: 37266 - DNA, 129 bp, synthetic construct
  source 1..129: mol_type = other DNA
ggcaccggaggcatttaccccgtggagatcatggcacctatcttcgacatggccaacccatacctgcccatgacatacgccattaccctcctgcgcgaagctcagctgggatgcatctggagcaactac

SEQ ID NO: 37267 - DNA, 186 bp, synthetic construct
  source 1..186: mol_type = other DNA
tccaattccaactcaaatagtaacagcaacagcaacagtaactccaactcaaactcaaactcaaatacaaacaccaacaccaacgccggcaacgagatcttctacatcgatctgccgtttcaagacgacattaagctgaccttctccaaagggaagtacaaagttaaagtctatgagtggagagtg

SEQ ID NO: 37268 - DNA, 204 bp, synthetic construct
  source 1..204: mol_type = other DNA
ccctactgcgaactcgacatcatcctgttcgactccaatgacaaccagatgagcaagtttgtctatgacacctactactattacgagggcatgtggcacgacatgcctgtgaacgaatggggctcaaactaccataagtcccggttcggacctgatgtccacattaccaaagtcgctgtttcgctcaagggcgcttcttggtat

SEQ ID NO: 37269 - DNA, 129 bp, synthetic construct
  source 1..129: mol_type = other DNA
gggacaggcggcatttaccctatcgagatcatgggtgacctttttcaagttatttacccatacatgcccatgacctacgccatcaacatgattcgcgagagcctgctcggagtggtttggcataactat

SEQ ID NO: 37270 - DNA, 45 bp, synthetic construct
  source 1..45: mol_type = other DNA
tctcccgagaagctgttcgaatatgggatatacagctcccacatc

SEQ ID NO: 37271 - DNA, 30 bp, synthetic construct
  source 1..30: mol_type = other DNA
ggcttcgatggctatgagggctgggacgag

SEQ ID NO: 37272 - DNA, 48 bp, synthetic construct
  source 1..48: mol_type = other DNA
tacgactacgtcaccaacatgaagaacgtgaatccctacctgtatctc

SEQ ID NO: 37273 - DNA, 129 bp, synthetic construct
  source 1..129: mol_type = other DNA
ggcacaggcggaatctaccccattcaaatcatggacaaccttttccaatggctataccccttcctccctatgacctacgccatcaacctgatccgcgaagctcagctgggactagtttggagcaactat

SEQ ID NO: 37274 - DNA, 42 bp, synthetic construct
  source 1..42: mol_type = other DNA
aacgccaatcaggtctacggcaacggactcaatcctcataca

SEQ ID NO: 37275 - DNA, 36 bp, synthetic construct
  source 1..36: mol_type = other DNA
ttccatccctccatcctgaacatcatcacccacatt

SEQ ID NO: 37276 - DNA, 45 bp, synthetic construct
  source 1..45: mol_type = other DNA
atggacaactccctgaacatcaatgtgatgaccagcgagttcgtg

SEQ ID NO: 37277 - DNA, 36 bp, synthetic construct
  source 1..36: mol_type = other DNA
attctgatggactttggcatcttcacaccacacgtg

SEQ ID NO: 37278 - DNA, 54 bp, synthetic construct
  source 1..54: mol_type = other DNA
cccgaggcccggcacatcgtgaacatcgactacattgataatttccttcctgct

SEQ ID NO: 37279 - DNA, 129 bp, synthetic construct
  source 1..129: mol_type = other DNA
ggcaccggcggaatctacccaatacaattaatgcacccatttttccaaacactttatccctacctgcctatgacttacgggatcatgatgctccgcgaatccctgctgggcatgatctggtccaactac

SEQ ID NO: 37280 - DNA, 42 bp, synthetic construct
  source 1..42: mol_type = other DNA
ctggacatcttcatcgagttgggcatttactatccccatgtt

SEQ ID NO: 37281 - DNA, 33 bp, synthetic construct
  source 1..33: mol_type = other DNA
ggcatcttctacaacaccaagctggacgagtat

SEQ ID NO: 37282 - DNA, 45 bp, synthetic construct
  source 1..45: mol_type = other DNA
tacacctacatcacccacctcaataacatcaacatctacctgtat

SEQ ID NO: 37283 - DNA, 66 bp, synthetic construct
  source 1..66: mol_type = other DNA
ccccagctgttctacccttctatgagtgccacctacaagctcccaagctggaaccctgcttggagc

SEQ ID NO: 37284 - DNA, 48 bp, synthetic construct
  source 1..48: mol_type = other DNA
atgtgggagtcttccggcgactccttctacattctgcctagcatcagc

SEQ ID NO: 37285 - DNA, 126 bp, synthetic construct
  source 1..126: mol_type = other DNA
ggaacaggcggcatctaccccattgagatcatgcacgagttttttcaagtattatatccctacctcccaatgacctacgccatcaacctgattcgcgagtctcagctggggctagtctggcccaac

SEQ ID NO: 37286 - DNA, 51 bp, synthetic construct
  source 1..51: mol_type = other DNA
tcagttggaggcattcccctgcttaagccctctatccgctacctgctgaaa

SEQ ID NO: 37287 - DNA, 261 bp, synthetic construct
  source 1..261: mol_type = other DNA
cggagcctcggagaactgacaatcacaagttccacctctccgatctatagcctccaaactcgtgccgattttacactgcatgtactgaaccttctggactttataggaggcaactttggcgtcacacacgggcacatgctggccagcagcatacccggtagcgacctggggccccggatgatggtcggcaaactgattgcttggcggacagaggtcaccataacaccaaccctgatcgggcaaatggtggtggatttcgga

SEQ ID NO: 37288 - DNA, 126 bp, synthetic construct
  source 1..126: mol_type = other DNA
ggcacaggcggcatttatccaatcgagattatgcacgagttctttcaagccttgtacccctacctccctatgacctacgccatcaacctcatccgcgaatctcagctgggccttgtctggtccaat

SEQ ID NO: 37289 - DNA, 42 bp, synthetic construct
  source 1..42: mol_type = other DNA
agcgagatcttcttcgacttggggatatttgcaccccacgtg

SEQ ID NO: 37290 - DNA, 30 bp, synthetic construct
  source 1..30: mol_type = other DNA
tccaacatcctgttcaatgccatgagcaac

SEQ ID NO: 37291 - DNA, 45 bp, synthetic construct
  source 1..45: mol_type = other DNA
tacaatttcgtggagagcatggagaacgtcaacctctacctgtac

SEQ ID NO: 37292 - DNA, 30 bp, synthetic construct
  source 1..30: mol_type = other DNA
gccggcgtgatgaactacgagttcaagttt

SEQ ID NO: 37293 - DNA, 30 bp, synthetic construct
  source 1..30: mol_type = other DNA
ggcctggggaacggagagaacaacttcaac

SEQ ID NO: 37294 - DNA, 228 bp, synthetic construct
  source 1..228: mol_type = other DNA
acattcgtgctaaagcaggacgacggcaagctgatggctctgtacacccggtacaaccaggacgggacctttttcgtcggagaactgaacggcagccacgtgaacaacatcggcattgagaccctcaataattccgcaatgagctccgcgctgcaaaaatccgccttccccgacggcaactggttcaacatccagtctctgacaaacgcctgggccaatgagcttcaa

SEQ ID NO: 37295 - DNA, 72 bp, synthetic construct
  source 1..72: mol_type = other DNA
cagcctggcttcttcatgagcgagtacattctggagaactaccccctgggcgaaaacgagagctacttctac

SEQ ID NO: 37296 - DNA, 288 bp, synthetic construct
  source 1..288: mol_type = other DNA
aatactaacacaaacaccaacacccacaagaataccaatagcaacagtaattccaataagaagaccaacacacggaacacagtgctgagcaccggaagcgtgtccgccggcacgagtcagagtaccgtcgaggcaatcgggaccgtggccgctgctgaggagccaagcacagaacccaatactgaggagaagtctgaagacaccccttccgaggaatcttcctccgattctgggaaggcctacgagatatccgaaagctcgcccggcaacagcgacaactctaacgtg

SEQ ID NO: 37297 - DNA, 42 bp, synthetic construct
  source 1..42: mol_type = other DNA
agtatgcaattttttgagctgggtatccacaacccccatgtc

SEQ ID NO: 37298 - DNA, 30 bp, synthetic construct
  source 1..30: mol_type = other DNA
ggcatcttctttagcaaggacatcgatgag

SEQ ID NO: 37299 - DNA, 39 bp, synthetic construct
  source 1..39: mol_type = other DNA
ttcctgattgacatcggtggaatcaacccctacctcctg

SEQ ID NO: 37300 - DNA, 33 bp, synthetic construct
  source 1..33: mol_type = other DNA
ttcagcggctttgggcttgagaaccctcatgtc

SEQ ID NO: 37301 - DNA, 30 bp, synthetic construct
  source 1..30: mol_type = other DNA
atcttctacacaaccgctgtggacgagtac

SEQ ID NO: 37302 - DNA, 48 bp, synthetic construct
  source 1..48: mol_type = other DNA
tactcctatctcgagagcctgcccaatatcaaccagtacctggttctg

SEQ ID NO: 37303 - DNA, 39 bp, synthetic construct
  source 1..39: mol_type = other DNA
gactttttcctggagctcggcatcgaatcaccttacgtg

SEQ ID NO: 37304 - DNA, 30 bp, synthetic construct
  source 1..30: mol_type = other DNA
ggcctgattatcagcaccgacatcatcgat

SEQ ID NO: 37305 - DNA, 39 bp, synthetic construct
  source 1..39: mol_type = other DNA
aaatatgtcgctagcctggacgctaacatcttcatcacc

SEQ ID NO: 37306 - DNA, 60 bp, synthetic construct
  source 1..60: mol_type = other DNA
atgattctgagtatctgctctgagcccaagatcctcgagattatgaaatatgtgaatatc

SEQ ID NO: 37307 - DNA, 39 bp, synthetic construct
  source 1..39: mol_type = other DNA
tccaacttctgggactttggcatctcttctccacacctg

SEQ ID NO: 37308 - DNA, 42 bp, synthetic construct
  source 1..42: mol_type = other DNA
ctgatgaacatcaacaagattttcaaatactttgtgttcatg

SEQ ID NO: 37309 - DNA, 39 bp, synthetic construct
  source 1..39: mol_type = other DNA
acctacatttatgcctacggcatcagctcccctcacatc

SEQ ID NO: 37310 - DNA, 45 bp, synthetic construct
  source 1..45: mol_type = other DNA
aacttcctgaaggacatcaatcacatcaaccagtacatcattctg

SEQ ID NO: 37311 - DNA, 36 bp, synthetic construct
  source 1..36: mol_type = other DNA
tacgcaggactgggcgacggatgcactccctatgtg

SEQ ID NO: 37312 - DNA, 57 bp, synthetic construct
  source 1..57: mol_type = other DNA
gacaacaccctgatggtggccctcgctagcatcctgcccattaactccgatgaagtt

SEQ ID NO: 37313 - DNA, 33 bp, synthetic construct
  source 1..33: mol_type = other DNA
ggcatttacgagcacgagatcgctagcgagttc

SEQ ID NO: 37314 - DNA, 42 bp, synthetic construct
  source 1..42: mol_type = other DNA
ctcgatatcctgctggactttggaatggttcggccggatatc

SEQ ID NO: 37315 - DNA, 30 bp, synthetic construct
  source 1..30: mol_type = other DNA
gaactgagcctgaatcaaagaattgctgag

SEQ ID NO: 37316 - DNA, 45 bp, synthetic construct
  source 1..45: mol_type = other DNA
tacaattacgtgatcgacaccgatatcaacctgtatctgcaaata

SEQ ID NO: 37317 - DNA, 45 bp, synthetic construct
  source 1..45: mol_type = other DNA
accgtacaacataacctctacggtgacggcctgaacccacacatg

SEQ ID NO: 37318 - DNA, 51 bp, synthetic construct
  source 1..51: mol_type = other DNA
cccgaaagcatcataatcctgctggactctgtgtctggaacctacattgat

SEQ ID NO: 37319 - DNA, 39 bp, synthetic construct
  source 1..39: mol_type = other DNA
attctgctcgagaacgagatcctgaacaacgagtctgaa

SEQ ID NO: 37320 - DNA, 33 bp, synthetic construct
  source 1..33: mol_type = other DNA
ttctatggttatgggatcgagaacccacacgtc

SEQ ID NO: 37321 - DNA, 48 bp, synthetic construct
  source 1..48: mol_type = other DNA
tacaactacctggccaccattcccgacatcaatctgtatctgctcctc

SEQ ID NO: 37322 - DNA, 39 bp, synthetic construct
  source 1..39: mol_type = other DNA
agcaacgccgtgctggaccttggcctctactgtcctcac

SEQ ID NO: 37323 - DNA, 39 bp, synthetic construct
  source 1..39: mol_type = other DNA
cacctgatcgatatcgacgtgaacctcaccatctacgtg

SEQ ID NO: 37324 - DNA, 30 bp, synthetic construct
  source 1..30: mol_type = other DNA
atctacgaacacggcatcacttccgaattc

SEQ ID NO: 37325 - DNA, 153 bp, synthetic construct
  source 1..153: mol_type = other DNA
aaccgcaccgctcccatcaccgagggctggttctccacttatgccgacatgattctgtccggcaaggtgccgtaccgggatttcgaactcgttctgcctcctctttacacctacctggtggccgccgtgaacctcgtcttcgggaatcacctg

SEQ ID NO: 37326 - DNA, 90 bp, synthetic construct
  source 1..90: mol_type = other DNA
gccggagccgctgagaactgcctggaaatgctgttctctagcggagttaaaggtaacctctccgacatggcaaccgggttcttgaggcgg

SEQ ID NO: 37327 - DNA, 42 bp, synthetic construct
  source 1..42: mol_type = other DNA
agcgacatccggaccctcctgatgggtcagcttcctgagcag

SEQ ID NO: 37328 - DNA, 36 bp, synthetic construct
  source 1..36: mol_type = other DNA
caccagatctacaatgagattttttctttgaacctg

SEQ ID NO: 37329 - DNA, 33 bp, synthetic construct
  source 1..33: mol_type = other DNA
ggcatctacgaggacgagattaccagcgagttc

SEQ ID NO: 37330 - DNA, 30 bp, synthetic construct
  source 1..30: mol_type = other DNA
ggcctgcgggattacggggactatctcaac

SEQ ID NO: 37331 - DNA, 33 bp, synthetic construct
  source 1..33: mol_type = other DNA
atctttaatgagatctttgggttatcattggaa

SEQ ID NO: 37332 - DNA, 30 bp, synthetic construct
  source 1..30: mol_type = other DNA
atttacgagcacggcatcgctagcgagttc

SEQ ID NO: 37333 - DNA, 42 bp, synthetic construct
  source 1..42: mol_type = other DNA
atgcccagtagcagtggcggccagacagagttccaaactcca

SEQ ID NO: 37334 - DNA, 30 bp, synthetic construct
  source 1..30: mol_type = other DNA
tggtccggcctgagctctgagaccaacgaa

SEQ ID NO: 37335 - DNA, 33 bp, synthetic construct
  source 1..33: mol_type = other DNA
ctgatgacaggcagcgagatggacatcatgggc

SEQ ID NO: 37336 - DNA, 30 bp, synthetic construct
  source 1..30: mol_type = other DNA
ctgataacacccgagtccatcatcaacaat

SEQ ID NO: 37337 - DNA, 30 bp, synthetic construct
  source 1..30: mol_type = other DNA
tacgtgaacggcatcattagctccgatctg

SEQ ID NO: 37338 - DNA, 42 bp, synthetic construct
  source 1..42: mol_type = other DNA
gccgacttcatcaacgatcacacacccgaatccgtgtctttg

SEQ ID NO: 37339 - DNA, 45 bp, synthetic construct
  source 1..45: mol_type = other DNA
atgatgggcgaaaactttggagagggcttcagccctcacgttggt

SEQ ID NO: 37340 - DNA, 36 bp, synthetic construct
  source 1..36: mol_type = other DNA
tacctgatgcatcctgagaccatcagcttcaacatg

SEQ ID NO: 37341 - DNA, 63 bp, synthetic construct
  source 1..63: mol_type = other DNA
gaccagacattcatcaaggccatcgatgagatgattctgcccatcgacttttacgagattaag

SEQ ID NO: 37342 - DNA, 51 bp, synthetic construct
  source 1..51: mol_type = other DNA
ggatacatcttgaccgctctgaagattacacccgcacactcccattaccgc

SEQ ID NO: 37343 - DNA, 183 bp, synthetic construct
  source 1..183: mol_type = other DNA
atgacagatatcccctctagtgtttgtgacggatatttcccttatgccgatgccatgatggacgggaccttcccttacacacacgatgtttgggtttatgatgattggaacacatgggagtacccacccctggcctatgtattcattctcctcccaaggctgctggcaagcagcgtggctggt

SEQ ID NO: 37344 - DNA, 174 bp, synthetic construct
  source 1..174: mol_type = other DNA
ggcagcgatcctctgtcatttgcaaagtatcacaccgatagaccccttgagatagaaagcgttgcggccagcgttattgagatcctctctctcctcggactcaccgacgtttcatacgcatatgacttcggctccgataacatttacggctcagcaagctcagcttctgctgtt

SEQ ID NO: 37345 - DNA, 36 bp, synthetic construct
  source 1..36: mol_type = other DNA
aactttggattccgtggagaaggcgaagctatgtcc

SEQ ID NO: 37346 - DNA, 129 bp, synthetic construct
  source 1..129: mol_type = other DNA
ggcaccggcggcatctacccaatacaactaatgggcaacattctgcaatcggtcagccccttcatgcccatgacacacggcatcaccctgttgcgcgaatcagccctggggcttgtttggtctaactac

SEQ ID NO: 37347 - DNA, 228 bp, synthetic construct
  source 1..228: mol_type = other DNA
aagaagttcaccctcaaggccaccctgaagatcaacggaaagaaagtcaaggggaagaagattactttcaagttcaatgggaagacatacaaagtgaagacgaataagaagggcgtagctcagaaaacactgaataagaagatcattaagaaactcaagaagggcaagaagtacactgtgaaggtcacttataagaaagacaccatcaagaccacccttaaggtcaag

SEQ ID NO: 37348 - DNA, 123 bp, synthetic construct
  source 1..123: mol_type = other DNA
acagtgaacaacgccgacgactacaagaaggctaacggcctcaaggcaagcaccgtcatctccgagtacaacgcccttaaaaagctggagctggggaacgagacttacaacttcgacaccatc

SEQ ID NO: 37349 - DNA, 117 bp, synthetic construct
  source 1..117: mol_type = other DNA
gtggacgatgggattgtgaccatcgacggcaagaactataaggcctgtgacggcaataagctcgtgtacatgaagtccatgtctagcgagtggcagacagtggtcaaggtcgtttgc

SEQ ID NO: 37350 - DNA, 39 bp, synthetic construct
  source 1..39: mol_type = other DNA
tgcagcaacgtctacgacataaatttctgtcgctggtcc

SEQ ID NO: 37351 - DNA, 255 bp, synthetic construct
  source 1..255: mol_type = other DNA
ggcgctctgtggtcccctaccacccactacaccaaccccgatcccgatgatatgtactcactaatcccatttaactctaatacatatgttctctcctctgatcttgtctcctccattaagtctgacaacaatattcagaaaatcaacgacctgttcgacaagtctaataacgagatcacgtttaccgccgacgaggtgctggctgcaatttcttccatcaacctcaacaacgggcaggtgcatagcgtgctctat

SEQ ID NO: 37352 - DNA, 267 bp, synthetic construct
  source 1..267: mol_type = other DNA
atggccaacggcaacctcaatatcgagaagagcaaattcaactccaataatgcctccgtatcggggggagccatctacacctcttacaccgacctgaacctcaagaactctgagttcatcaacaactccgctttcaagaatggtggcgccaactatatggaactgacaaacagcactattgataacgtcctgttcatcgcaaacaacgtcgagaatagctccacactgaaccccagcaccatctacgcctatgatagctcgtcctac

SEQ ID NO: 37353 - DNA, 36 bp, synthetic construct
  source 1..36: mol_type = other DNA
aactccaagtacagtatcagctctgtgttcaccatc

SEQ ID NO: 37354 - DNA, 39 bp, synthetic construct
  source 1..39: mol_type = other DNA
attgataataaggacagcatcggcaagcccaacatgaag

SEQ ID NO: 37355 - DNA, 33 bp, synthetic construct
  source 1..33: mol_type = other DNA
gacttctcaaacgtcgacaatgccgatcttagc

SEQ ID NO: 37356 - DNA, 153 bp, synthetic construct
  source 1..153: mol_type = other DNA
ccctttgctgacaatgagatcctcaacttgtcttctcttaacgggaagctgagctcaaaagacaacgcaaagtccttccaagaagactacggaacatgggccgagaacgtcgagaatgagagcagtagtaaacgggccgagtatttcgacgga

SEQ ID NO: 37357 - DNA, 39 bp, synthetic construct
  source 1..39: mol_type = other DNA
cacgtccccaatgttagcgactacgatgacggcatcttc

SEQ ID NO: 37358 - DNA, 108 bp, synthetic construct
  source 1..108: mol_type = other DNA
ttttcgcaagctttcaagacctccgagagcgtggccaacccatcctctgattcgggcggctttggaggctttggcggaggaagtggtggtggaggaggtggtgcattt

SEQ ID NO: 37359 - DNA, 54 bp, synthetic construct
  source 1..54: mol_type = other DNA
gctatcggcaacatgcaggtctatgcaataagctctgtcaagcagcctttgacc

SEQ ID NO: 37360 - DNA, 54 bp, synthetic construct
  source 1..54: mol_type = other DNA
aattcctacctggtgctcgagttcagcggcaacgacttcatcaacctgttctcc

SEQ ID NO: 37361 - DNA, 270 bp, synthetic construct
  source 1..270: mol_type = other DNA
atccacggatcgagtattggacagctgaacattttcgacatcgaccacaagcccctgcttggtgtctcgcggataatccgctctgacgagttcatcgtgaatactccttttgcattttcgcaatacttcaacgatttttcatatttctctgaaatagttcgaggaactcttacggacatgtttatcatttatgggcagccagtgctggacatcgggatgatctttcgccctttcctgattggctacctgtttttaaatcaaggacaagga

SEQ ID NO: 37362 - DNA, 156 bp, synthetic construct
  source 1..156: mol_type = other DNA
tccattgataccatcaagatcatcctgaacacagtgtacccggcatcagaaatcaccaacggcggaggcatccttaattctttcgcttactacatcccaactatcttcttccccatttatgacaccaatctgctgctcaacacatgcgagtacagc

SEQ ID NO: 37363 - DNA, 57 bp, synthetic construct
  source 1..57: mol_type = other DNA
gtgcacctgcctgacttcataatacagcttacactgcggagcaagatgaagaataac

SEQ ID NO: 37364 - DNA, 192 bp, synthetic construct
  source 1..192: mol_type = other DNA
gtcaaccccatcgactacggcaccgacatgatctacgagagcccttttctgaacgaagtggagaacatagtcgaaaacgaccccgacgctctgtggattactaaatctcttcctaccgactacattatctctgttggtgcaaagaccgttaattccgttaacacgtatctgatttggaagaacgggaagaac

SEQ ID NO: 37365 - DNA, 30 bp, synthetic construct
  source 1..30: mol_type = other DNA
tttatcgacaccagcttcttgggtcctatt

SEQ ID NO: 37366 - DNA, 165 bp, synthetic construct
  source 1..165: mol_type = other DNA
cagtataacatcgggatcggcaactgggacacctacctctacctcgagaacggccggaattttgctaagatgggatggggcgatgtgccaagcatcgctcctgtgatccctattatcctgagcaagatgttcctgctggccggacacacataccacgaggctatc

SEQ ID NO: 37367 - DNA, 195 bp, synthetic construct
  source 1..195: mol_type = other DNA
gagttctatatccacctgggcacccctttccccttcctgggacagttttccgggaccgtctctaataccgtcgtcatggacagcggcttcctccccgattcgtggtactacatcaagcacattcccaactacctgatttcttacgtgcccaacgtgaacactttcaacgccatcgtgaaccctatggggaacata

SEQ ID NO: 37368 - DNA, 51 bp, synthetic construct
  source 1..51: mol_type = other DNA
atcggcaatatgaacgtgtatcttattgagaccacaaaggtgccgatgact

SEQ ID NO: 37369 - DNA, 36 bp, synthetic construct
  source 1..36: mol_type = other DNA
agctctaagaaatccaagatcgacggcaaagtatcg

SEQ ID NO: 37370 - DNA, 204 bp, synthetic construct
  source 1..204: mol_type = other DNA
gcttacaatgaggagaaggccattgagcatgtgattaatactgttaaacaggttaaggacattaccgaaatcattatcgtggacgacggctccaccgataacacccacaacatcgtgtcacgacaagacaatgtcatcctgctgactcacgagaagaacaaggggaagggctccgccatgaagactggactcaagcgagttaca

SEQ ID NO: 37371 - DNA, 99 bp, synthetic construct
  source 1..99: mol_type = other DNA
ctgagcgagattaacaagctgcaggtggagtccattatcaagcccatcctcaatggcgacgccgatatcacaaagaccaagttcaagcgagaagctgga

SEQ ID NO: 37372 - DNA, 138 bp, synthetic construct
  source 1..138: mol_type = other DNA
cagggaatgagaatccaggaggtcgacattggtaacatcgtccacgaaatgagcaccctcaaggaactcaacatcatggctaacgaggtcgttcgcaccatcgtggaccgggccattcattacgggaggctcaccatg

SEQ ID NO: 37373 - DNA, 30 bp, synthetic construct
  source 1..30: mol_type = other DNA
atcaagggcaacagcgacgccatggatctg

SEQ ID NO: 37374 - DNA, 39 bp, synthetic construct
  source 1..39: mol_type = other DNA
ttcatccccgaagagatcacccctaacgagattttgggc

SEQ ID NO: 37375 - DNA, 60 bp, synthetic construct
  source 1..60: mol_type = other DNA
gagattagcgaccggatctacgatggcatcgtggccgattccctggacatggacacagtg

SEQ ID NO: 37376 - DNA, 60 bp, synthetic construct
  source 1..60: mol_type = other DNA
gagataagcgacctgatttacgacggcatcgtggccgattccatcaacaccgattctgtg

SEQ ID NO: 37377 - DNA, 129 bp, synthetic construct
  source 1..129: mol_type = other DNA
gcaacaggcggaatttatccaatcgagatcatggccaagtttttccactacattcatccttacatgcccatgacctacgccatcaacctgctccgcgaagctcagctgggggtagtctggtccaactat

SEQ ID NO: 37378 - DNA, 129 bp, synthetic construct
  source 1..129: mol_type = other DNA
gccacaggcggaatttaccccatccaaatcatgcaccagttctttcaatcgatttacccctacatgccaatgacctacgccatcaagttggtccgcgaggctcagctgggagtggtttggtccaactat

SEQ ID NO: 37379 - DNA, 129 bp, synthetic construct
  source 1..129: mol_type = other DNA
gggacaggcggaatctaccctgtcgagatcatggcccactacttcaacgtgctcaacccctacctgccaatgacctatgccattaccctcatccgcgaggctcagttgggcttggtttggagcaactac

SEQ ID NO: 37380 - DNA, 129 bp, synthetic construct
  source 1..129: mol_type = other DNA
gctacaggtggcatttaccctattgagatcatgcacaagttctttcaaaccctgtacccatacatgcccatgacctacgccatcaagctcatccgcgaagctcagctgggcgtggtctggagcaactac

SEQ ID NO: 37381 - DNA, 129 bp, synthetic construct
  source 1..129: mol_type = other DNA
accactggcggaatctaccccattgagattatgcactcgtctttcaaggggctgtattattactttcctatgacatacgctatcaagctcatgcgcgaggcccagctgagtgtagtctggtcgaactat

SEQ ID NO: 37382 - DNA, 126 bp, synthetic construct
  source 1..126: mol_type = other DNA
gccaccggcggcatctaccctatcgagattatgggaaagttatttcaatttatccacccatatatgcccatgacatacgccatccggctgatcagggaggctcagctcggagtagtctggtctaac

SEQ ID NO: 37383 - DNA, 129 bp, synthetic construct
  source 1..129: mol_type = other DNA
gccaccggcggaatctatcccattgagatcatgcacaaggtcttccaaactctttacccattcatgcctatgacctacgccatcaagctcattcgcgaagctcagctgggcgtggtttggagcaactat

SEQ ID NO: 37384 - DNA, 39 bp, synthetic construct
  source 1..39: mol_type = other DNA
tcagtccgctgggtttacggcatcttcgctcctcatgtg

SEQ ID NO: 37385 - DNA, 30 bp, synthetic construct
  source 1..30: mol_type = other DNA
attaactcctcacaaggctctgacaagggc

SEQ ID NO: 37386 - DNA, 57 bp, synthetic construct
  source 1..57: mol_type = other DNA
ggctaccctaaccaatttttaaacctgaagaccatccgcaagattttccccacaatg

SEQ ID NO: 37387 - DNA, 129 bp, synthetic construct
  source 1..129: mol_type = other DNA
gccaccggaggcatttacccaattcaaataatgcaccagttctttcaaactttgtatccttacatgccaatgacatacgccattaagctgatccgggaggctcagctcggagtcgtctggtccaactat

SEQ ID NO: 37388 - DNA, 129 bp, synthetic construct
  source 1..129: mol_type = other DNA
ggcacaggaggcgtctaccctgtccaaataatgggtgactttttcaagctgatgaacccttacctgccaatgacctacgccatcactctcatccgcgaggctcagctggggctcgtttggtcaaactat

SEQ ID NO: 37389 - DNA, 30 bp, synthetic construct
  source 1..30: mol_type = other DNA
agcgacgccgagatcctgtccattccactg

SEQ ID NO: 37390 - DNA, 129 bp, synthetic construct
  source 1..129: mol_type = other DNA
ggcaccgggggcatctatcccgtcgagatcatggctgacttctttcaacttatgaacccctatctccctatgacatacgccatcaccctgatccgcgaggcccagctcggacttgtttggtccaactac

SEQ ID NO: 37391 - DNA, 126 bp, synthetic construct
  source 1..126: mol_type = other DNA
gggaccggaggcatctaccccgtggagatcatgtcccctatcttcaatattctgaacccctacctgccaatgacatatgccatcactctgatccgggaggctcagctcggcctcatttggagcaac

SEQ ID NO: 37392 - DNA, 129 bp, synthetic construct
  source 1..129: mol_type = other DNA
ggcactggcggcatatacccaatcgaaatcatgggcgagttctttaggtatctttacccatatatgcccatgacatacgccatcacgttgttaagagagagccagctcggcgtcgtctggtccaactac

SEQ ID NO: 37393 - DNA, 129 bp, synthetic construct
  source 1..129: mol_type = other DNA
gggacaggcggaatctatcccatcgagatcatggggagcttctttcaatctatatacccatacatgcctatgacctacgccattaacctgctccgcgaggctcagattggcgtagtctggtcaaactac

SEQ ID NO: 37394 - DNA, 60 bp, synthetic construct
  source 1..60: mol_type = other DNA
gagatctccgacgagatcttcgacggaattgggacaggcactaccgataccagcgctatc

SEQ ID NO: 37395 - DNA, 30 bp, synthetic construct
  source 1..30: mol_type = other DNA
agcctggagtttgacatcctgaagttcaac

SEQ ID NO: 37396 - DNA, 48 bp, synthetic construct
  source 1..48: mol_type = other DNA
atctatttctcctctagcggccacctcgacctctattcggctctcctg

SEQ ID NO: 37397 - DNA, 33 bp, synthetic construct
  source 1..33: mol_type = other DNA
tccagcgacccatctgtcttctctactccattg

SEQ ID NO: 37398 - DNA, 129 bp, synthetic construct
  source 1..129: mol_type = other DNA
ggcacaggcggcatttacccggtacaaattatgggcgaagtgttccaagcgttaaacccctacctgccaatgacctatgccatcactctgatgcgcgaagctcagctcggcctggtctggtctaactac

SEQ ID NO: 37399 - DNA, 30 bp, synthetic construct
  source 1..30: mol_type = other DNA
tcggaccctagcgtcttcaccacacctctt

SEQ ID NO: 37400 - DNA, 129 bp, synthetic construct
  source 1..129: mol_type = other DNA
ggaaccggcggcatctaccctgtggagattatggctcccatcttcgacatcgccaacccatacctgcctatgacctatgggatcacactgattcgcgaggcccagcttggcctgatctggagcaactat

SEQ ID NO: 37401 - DNA, 30 bp, synthetic construct
  source 1..30: mol_type = other DNA
tctgacccttccgtgttttcgacgcctgag

SEQ ID NO: 37402 - DNA, 30 bp, synthetic construct
  source 1..30: mol_type = other DNA
tcagatcccagcgttttctccactcctgtg

SEQ ID NO: 37403 - DNA, 132 bp, synthetic construct
  source 1..132: mol_type = other DNA
ggcacaggaggaatgtatccggtacaaatcatgaacaacatcttcggcgtgatttatccctatttgccaatgacccacggcatttccatcgttcgcgaggcacagctgggcctcatctgggccaactatatc

SEQ ID NO: 37404 - DNA, 174 bp, synthetic construct
  source 1..174: mol_type = other DNA
tttcaccaagtccgcggagccttcaaccctgacatctacgcctacctcgctggggctattgagctgagcggcctgaacttccacaacctgtccggaggccagtggatccaaaattctcccgtcatcatcttctttaccgccatcctattccgacttgggttcatcaacatcaat

SEQ ID NO: 37405 - DNA, 180 bp, synthetic construct
  source 1..180: mol_type = other DNA
ctggggtactacccttaccttagctatttctctatggccaacggctccatctccggatacaacctgtccgtggacgtcaaccaggttaattctaaactgttctacctcaagaactttatcaagatgattagctgcaatcttattagcttcgacgagaacttcgtggagatcttcaacaac

SEQ ID NO: 37406 - DNA, 288 bp, synthetic construct
  source 1..288: mol_type = other DNA
tttacaaacaccgtcgagattaatgaggacgggctggaccgcattgacttctgcgacttcatcaaggaatacgataacgactaccagagcaagtccttcatgggctacagggagctcagaatcttcgagtggtatctgaacaaggacatcctgaaatggggcgaagatgtcaccgagttcaatcccgatgattacgactacattatcaccgaagtgaaaacgctcgacaacgtgaactacgaggaagtctaccacaagggcaagtaccacttttacgagcggatctat

SEQ ID NO: 37407 - DNA, 51 bp, synthetic construct
  source 1..51: mol_type = other DNA
gccctgatgagcgggttcggcaagaacgttggtgaccaagataaaaagctg

SEQ ID NO: 37408 - DNA, 90 bp, synthetic construct
  source 1..90: mol_type = other DNA
gactccgaggacgatacagagttcaccaagacaacttttatcaccgtcaaatccaccgacggactggaacgctatgagcgcgaattggtg

SEQ ID NO: 37409 - DNA, 165 bp, synthetic construct
  source 1..165: mol_type = other DNA
attcttcgaacctacgagctgaatggccgcatctcgtttagctacatggaggactgtctgcgggaagagaaccaggctcgggcataccaggaccggtacaacaactggtgcgagaacttcaagaacgattacttgcctgacgaagtattccaagagtacttcgat

SEQ ID NO: 37410 - DNA, 189 bp, synthetic construct
  source 1..189: mol_type = other DNA
atgcacgtatatggaggtctgaacgattctagctacaccactaacgacctgttcatgttctactatctcggcggacataatcacatcaatagttcctttagcaccgctagctccacaatttccgccgccaacaacgatagtattggtggcattggtggaggctctggtggaggaggtggaggtgcattc

SEQ ID NO: 37411 - DNA, 30 bp, synthetic construct
  source 1..30: mol_type = other DNA
ggcatctggcacgggaccacaacctacggg

SEQ ID NO: 37412 - DNA, 30 bp, synthetic construct
  source 1..30: mol_type = other DNA
tttatcgacaccagcttcattggacctgtg

SEQ ID NO: 37413 - DNA, 30 bp, synthetic construct
  source 1..30: mol_type = other DNA
accatcgacacaagcttcttgggacctgcc

SEQ ID NO: 37414 - DNA, 30 bp, synthetic construct
  source 1..30: mol_type = other DNA
ttcatcgacaccagctttatgggacctgtc

SEQ ID NO: 37415 - DNA, 30 bp, synthetic construct
  source 1..30: mol_type = other DNA
tttatcgacaccagcttcatgggaccagtg

SEQ ID NO: 37416 - DNA, 30 bp, synthetic construct
  source 1..30: mol_type = other DNA
ttcatcgacaccagctttatgggatcactc

SEQ ID NO: 37417 - DNA, 30 bp, synthetic construct
  source 1..30: mol_type = other DNA
tttatcgacaccagcttcattggacctatc

SEQ ID NO: 37418 - DNA, 30 bp, synthetic construct
  source 1..30: mol_type = other DNA
tttatcgacaccagcttcatgggacctgca

SEQ ID NO: 37419 - DNA, 174 bp, synthetic construct
  source 1..174: mol_type = other DNA
tttcatcaaacaagaggcgccttcaaccccgacatctacgcctatctcgccggtagcatagagctcgccggcctgaactccaaccacatcctgggtggcttctggattcagaactctcctgtgatcatcttctttaccgctcttctgtttcggctgggattcgtcaacatcaac

SEQ ID NO: 37420 - DNA, 177 bp, synthetic construct
  source 1..177: mol_type = other DNA
ggattctaccccgaaatcagctacttttccatggcttctgggagtatcaagggatactcctctgccgtcgacgtgaataagattaacgacaagctgttctatattaagaacttcttcaagctcctgtcctgcaactggatcagcttcgatgagaactttaccgagatcttcaatgac

SEQ ID NO: 37421 - DNA, 288 bp, synthetic construct
  source 1..288: mol_type = other DNA
ttcaccaatactgtcgagattaacgaggacggcctggaccgcattgatttctgcgactttatcaaggaatacgataacgactaccagagcaaatccttcatgggctatcgagagctgcggattttcgaatggtacctgaacaaggacatcctcaaatggggcgacgacgtgaccgagttcaaccccgatgaccatgactacattataaccgaggtcaagacactcgataacgtgaattacgaggaggtctaccacaagggaaagtaccacttttacgaaaggatctac

SEQ ID NO: 37422 - DNA, 69 bp, synthetic construct
  source 1..69: mol_type = other DNA
gctattaccgatgagataagcggagccgtgctgggcggccgggacatcgactccgatttcatctctggg

SEQ ID NO: 37423 - DNA, 30 bp, synthetic construct
  source 1..30: mol_type = other DNA
ctggtcgtggagggcgaaatcggatacggc

SEQ ID NO: 37424 - DNA, 33 bp, synthetic construct
  source 1..33: mol_type = other DNA
ggaccccagatgggcatcgagcctctgtttacc

SEQ ID NO: 37425 - DNA, 63 bp, synthetic construct
  source 1..63: mol_type = other DNA
acagaaggcgagttcgtttcaattatcggtccaagcgggagtggcaagtctaccctcctgaac

SEQ ID NO: 37426 - DNA, 81 bp, synthetic construct
  source 1..81: mol_type = other DNA
agcaacaagaagctgaatgaatttcgagcccgcgagatcgggttcatatttcaacttcacaacctcattccgaacatctca

SEQ ID NO: 37427 - DNA, 189 bp, synthetic construct
  source 1..189: mol_type = other DNA
ctggattctaagacaagcaccaaaatcctgaagcagcttatcgacctccacgataccaagaacgtgactctgattatcgtgacacacgacatggacgtggccaagctggccgaccgggtcattgaggtgctcgacggcgagatcatcagcgctggcgatgactccctgatcaattccaagatcgatgtc

SEQ ID NO: 37428 - DNA, 33 bp, synthetic construct
  source 1..33: mol_type = other DNA
ggcgccgacacctctttcatcggacctgtcatt

SEQ ID NO: 37429 - DNA, 33 bp, synthetic construct
  source 1..33: mol_type = other DNA
aacgacttcgtgaacgtctttgagttgggaatc

SEQ ID NO: 37430 - DNA, 33 bp, synthetic construct
  source 1..33: mol_type = other DNA
aacaacatcgaggacattttcgcactgggatac

SEQ ID NO: 37431 - DNA, 30 bp, synthetic construct
  source 1..30: mol_type = other DNA
aacgacatcgaaggcatgttcgagcttggc

SEQ ID NO: 37432 - DNA, 30 bp, synthetic construct
  source 1..30: mol_type = other DNA
agcaacgtcgagaatatctttcgacttggc

SEQ ID NO: 37433 - DNA, 30 bp, synthetic construct
  source 1..30: mol_type = other DNA
ggcgccgacaccagcttcattggacctatc

SEQ ID NO: 37434 - DNA, 33 bp, synthetic construct
  source 1..33: mol_type = other DNA
aacgacatcgagggcatgttcgaattgggactg

SEQ ID NO: 37435 - DNA, 33 bp, synthetic construct
  source 1..33: mol_type = other DNA
ggctctgacaccagcctctttagtacacctctg

SEQ ID NO: 37436 - DNA, 129 bp, synthetic construct
  source 1..129: mol_type = other DNA
gggaccggaggaatctaccccgtcgagattatgaatgagatcttcggcgtgctgtatccttacctcccaatgacatacggcatcaacatggtccgcgaggctcagctgggcctgatttgggccaactac

SEQ ID NO: 37437 - DNA, 171 bp, synthetic construct
  source 1..171: mol_type = other DNA
atgagtggcgggatcttcaatccggacaccgccgtttacctgattagcgcgtacaaatacgctggcatggactttaacaatatttgcgatgtcaccgaactgttctatacaccggtcctgagttatctgaccgcgttgctcctcatgctgggcatcgacggacagttcagt

SEQ ID NO: 37438 - DNA, 156 bp, synthetic construct
  source 1..156: mol_type = other DNA
ctggattacggatgctccctgacctttctggagcagtcccacaactctctgaacgttgctaccgcttatgattctgggtccgtgtcttacaatatcgacaagagttactatctcgaagagctggtatcggtttccctcttcggcttctatagaagc

SEQ ID NO: 37439 - DNA, 66 bp, synthetic construct
  source 1..66: mol_type = other DNA
attacaatcatcttcgagggcgacgaaatttacaaccccactaacaccaccatcaatgtgaagctg

SEQ ID NO: 37440 - DNA, 90 bp, synthetic construct
  source 1..90: mol_type = other DNA
atcaccgtgaacatcacaagcaacgtcgagggcactgccaccattacaattaacaagcagacctaccccgtgaccatcaataacaacgat

SEQ ID NO: 37441 - DNA, 51 bp, synthetic construct
  source 1..51: mol_type = other DNA
tatattgatttcgacgtcacttatgataatgccattatacttaacatcacc

SEQ ID NO: 37442 - DNA, 84 bp, synthetic construct
  source 1..84: mol_type = other DNA
aacatcaatgacaccgtgaacatcaacatcggcaacaagaactacagcttcaagattgagaataacgacacaattatcatccct

SEQ ID NO: 37443 - DNA, 213 bp, synthetic construct
  source 1..213: mol_type = other DNA
gtgacactcacctgggatgcggtccgtataacgaagatacttaccgtgaataagatcaagacccagattaacataaaggacatcgagatgttttacaaggacggctccaaggcaataatcacacttactgacgagaacaacaatatactggctaataagaacgtttcgttcaacataaacgggcaggactacgtccgcacaacaaactctgac

SEQ ID NO: 37444 - DNA, 51 bp, synthetic construct
  source 1..51: mol_type = other DNA
aacaattgctccatcaagatcaaaccgacactgattgctaacgacctgact

SEQ ID NO: 37445 - DNA, 72 bp, synthetic construct
  source 1..72: mol_type = other DNA
ttcgtcaaagtgctggacaaggctggcaatatcaagccgaacagtaacgttaactttaatattaacggcgtg

SEQ ID NO: 37446 - DNA, 60 bp, synthetic construct
  source 1..60: mol_type = other DNA
ataattacgtctattaacgaggaaactggcgagatgatctccaacacaataaccgtactc

SEQ ID NO: 37447 - DNA, 48 bp, synthetic construct
  source 1..48: mol_type = other DNA
gtcaaagtgttcaacaaggacggcagcatcgctgctggagtggatgta

SEQ ID NO: 37448 - DNA, 72 bp, synthetic construct
  source 1..72: mol_type = other DNA
atcatcaccgccgagtaccaggattgcaaagtcagcaacaatatcaaggttaagtcggtgctttacgctgaa

SEQ ID NO: 37449 - DNA, 45 bp, synthetic construct
  source 1..45: mol_type = other DNA
aaactagttaacggcaagggggaagcctatagcatgcagtacatc

SEQ ID NO: 37450 - DNA, 60 bp, synthetic construct
  source 1..60: mol_type = other DNA
gagtatattataacttcaagttacaactctgcgtccatctctaataagatcaccatccat

SEQ ID NO: 37451 - DNA, 54 bp, synthetic construct
  source 1..54: mol_type = other DNA
attggcaacatgaatgtatacctgatcgaatcaaccaagactcccttgaccaca

SEQ ID NO: 37452 - DNA, 168 bp, synthetic construct
  source 1..168: mol_type = other DNA
ctctccggcggcactctgaaccccgatatttctctatactctattaccgctctcaaatatgctggtatcgactactatgggatcgtgaaccctgaggagatcttttacaccccaattatcagcttccttacatccctgctgttccggatgggcctggtcgataaggct

SEQ ID NO: 37453 - DNA, 150 bp, synthetic construct
  source 1..150: mol_type = other DNA
attctcgactacggcggctccctgaccttcttcgagcaatcggttaattcattcaatggcaataaggatatcattatgtccaacatcttcaacctggacaaatcttattacatcgacaatttttctgattttctgtttgagaagcaagat

SEQ ID NO: 37454 - DNA, 63 bp, synthetic construct
  source 1..63: mol_type = other DNA
acaacaatattcgacgggattaataacatcatacacggcacaggcacaatcgatatcactgga

SEQ ID NO: 37455 - DNA, 174 bp, synthetic construct
  source 1..174: mol_type = other DNA
tatcatcaaaccagaggtgcattttcatctgacttatacgtctatctagcggcggcgctcgacttcgctggcctcaacgtgaacaatatctctacacctatctatctggccaactctcccgtcatttgcttcctcacttccatcctgtttcggctgggattcgtggatgtactg

SEQ ID NO: 37456 - DNA, 189 bp, synthetic construct
  source 1..189: mol_type = other DNA
ctgtctatgggaagcgacctcacctacttcggcatggcatctggatcttttaaccacttcacatccaataacccagccgggcaggttaattacatcgaggacaagctgttttacattacacactatctccatttcctgtactgcaataagattacattctctggtctgatccctaagtttacgagtccc

SEQ ID NO: 37457 - DNA, 132 bp, synthetic construct
  source 1..132: mol_type = other DNA
cttctgaatttacaatcggcatcagtagtggtcggcgggtttcccaatgtgcttatatcggttgccgagatgcaaatgccctcaatgttaggcgccggcatggcctccatgttcctggccaacacatcagga

SEQ ID NO: 37458 - DNA, 48 bp, synthetic construct
  source 1..48: mol_type = other DNA
gccgacatcgtggatatcggcattcagaacaccgacttcaactacata

SEQ ID NO: 37459 - DNA, 36 bp, synthetic construct
  source 1..36: mol_type = other DNA
tacgacgccatcattggcaacgtactgaccggggac

SEQ ID NO: 37460 - DNA, 165 bp, synthetic construct
  source 1..165: mol_type = other DNA
aacctcaacgagaatatcgggctctattgtagtgatgtgtttatctacctgaccaactccctggccctggccggctacggggctacacgcgaatacctctatctgagccccctgatctgtttcctgacctccattttgtttagattaggcctgctctctgaagtg

SEQ ID NO: 37461 - DNA, 183 bp, synthetic construct
  source 1..183: mol_type = other DNA
aattctggatcacacctgagcttcctgacccaaggttccaccttcgcctccggctccaagggggaagtcattgacaacgcttacaccgacgatacctttttctacctccacgactttcccaacttcttgttcgccgatcacgtgatcttcgataacgtgatacctgttttgatcggttcgacc

SEQ ID NO: 37462 - DNA, 288 bp, synthetic construct
  source 1..288: mol_type = other DNA
acttttcccgggacagtgcactacgaccaggacttcaataagaataaggttatagcggattacctgatcaactacgatagtgattactcctctaaggaaatcgccgcttattcacaaagaagcctcaactggtacctcaaggacaatgccatcgccctccgggatgaccagctggattacctggaggctagcaacatcacctactacattagcgacggcaatttcgacctggtcaactataccatgatctatgacaaggacggcctgtacctctacgagcgcaacaac

SEQ ID NO: 37463 - DNA, 66 bp, synthetic construct
  source 1..66: mol_type = other DNA
actacactcatcttcgatgggattaacaagatcatccacaacactggatcgatagacctgaatgcc

SEQ ID NO: 37464 - DNA, 66 bp, synthetic construct
  source 1..66: mol_type = other DNA
acaactaccatcttcaacgggatcaataacattatccacaacaccggcaccatcgacttcaccaca

SEQ ID NO: 37465 - DNA, 63 bp, synthetic construct
  source 1..63: mol_type = other DNA
actatcatcttctacgggattaacaacatcatgaacaacactgggtccctcgattttgataca

SEQ ID NO: 37466 - DNA, 69 bp, synthetic construct
  source 1..69: mol_type = other DNA
actacaacgatcttcaacggcatcaatgccatgatgaaccacaccgacaccatcgacttcgataagctg

SEQ ID NO: 37467 - DNA, 69 bp, synthetic construct
  source 1..69: mol_type = other DNA
acaaccatcatttacgatggcattcagaacatgatccaccacactggctctgtggacattgctggactg

SEQ ID NO: 37468 - DNA, 69 bp, synthetic construct
  source 1..69: mol_type = other DNA
acaaccatcatcttcaatggcatcaacaacatcattcaccatactggttcaattgatctcgatgctctg

SEQ ID NO: 37469 - DNA, 33 bp, synthetic construct
  source 1..33: mol_type = other DNA
cctaatccctccgcacacgccatggtcttctcc

SEQ ID NO: 37470 - DNA, 39 bp, synthetic construct
  source 1..39: mol_type = other DNA
ctgggccccaacaatagcacagagctcatgaccactatc

SEQ ID NO: 37471 - DNA, 132 bp, synthetic construct
  source 1..132: mol_type = other DNA
ggaactggcggtatctacccaatcgagattatgagccaattcttccgaacgctttacccttatctgcccatgacacactctatcaccctcttgagagagtccgctctcggccttctctggacaagctacacc

SEQ ID NO: 37472 - DNA, 66 bp, synthetic construct
  source 1..66: mol_type = other DNA
accacaatcatcttcgacgggattaataacatcatccacaacaccggcaccatcgacattagtaca

SEQ ID NO: 37473 - DNA, 69 bp, synthetic construct
  source 1..69: mol_type = other DNA
aacatcctcctgaatggctacgctgggaacgtggtggccacctttggcaacttcgtcggtggaggaaac

SEQ ID NO: 37474 - DNA, 36 bp, synthetic construct
  source 1..36: mol_type = other DNA
cagggactggacatcaacgaacagcttcgtcgggcg

SEQ ID NO: 37475 - DNA, 69 bp, synthetic construct
  source 1..69: mol_type = other DNA
acaaccacaatcttcaacgggattaataacatcattcaccacacgggcagcattgacctggacactctg

SEQ ID NO: 37476 - DNA, 63 bp, synthetic construct
  source 1..63: mol_type = other DNA
acaatcatctttgatggtatcaataacattctgcacaacaccgggtccattgacttcgaaagc

SEQ ID NO: 37477 - DNA, 30 bp, synthetic construct
  source 1..30: mol_type = other DNA
tccgagagcgacgacctgaacaagtaccag

SEQ ID NO: 37478 - DNA, 168 bp, synthetic construct
  source 1..168: mol_type = other DNA
ctccagtactccattgggattggcaactgggacacatatctgtacctggagaacggccgcaatttcgccaagatgggctggggagacgtgtctagcatcgcacccgtcctccctatgatcctggccaagatcttcctgatcacccaccacacattccaagaagcaatc

SEQ ID NO: 37479 - DNA, 198 bp, synthetic construct
  source 1..198: mol_type = other DNA
cagttcaacaaggtcctcgggacccctttccctttcctgggccagtttagcgggactgtcagcaatacacaagtgatggactccggatatctgcccgatacctggtactacatcactcacattcccaactaccttagttctacaatccccctgcggtccaccttcaacgccgttgtaaatcccatgggcaacattccc

SEQ ID NO: 37480 - DNA, 63 bp, synthetic construct
  source 1..63: mol_type = other DNA
accctgatcttcgacggcatcaacaagctaatgcaacacacagggaccatcgatttcaacacc

SEQ ID NO: 37481 - DNA, 66 bp, synthetic construct
  source 1..66: mol_type = other DNA
actacaatcatctacgacgggattaacaatctgatccaccacaccggctccatcgatttcgtttcc

SEQ ID NO: 37482 - DNA, 54 bp, synthetic construct
  source 1..54: mol_type = other DNA
attggcaatatgaacgtctacctgatcgaatccaccaaggtgcccatgacaagg

SEQ ID NO: 37483 - DNA, 39 bp, synthetic construct
  source 1..39: mol_type = other DNA
gccatgattgacaatagcaccttcggcgagccaaacatc

SEQ ID NO: 37484 - DNA, 246 bp, synthetic construct
  source 1..246: mol_type = other DNA
aaggagaacgacaacctcctcctgaccatcgaggacaccagcatcaatctcgacatgggcgagaagattgtggtcaatattatcgcgcacttcgccaacaacgacgtcctgaacctcagtaaccttaagaagcgcatgaaatccaagtctaacgccgagtggttcatgaataacttcgacgactggaaggaggcagtggagaacgaatactttactgatgatgtcaagaaccggtacttcaatgac

SEQ ID NO: 37485 - DNA, 102 bp, synthetic construct
  source 1..102: mol_type = other DNA
taccacagctattactccgcgtattccactaattcgagttctggctctggcggctttgggtcatttggaggaggtagtggtggtggcggcggaggagctttt

SEQ ID NO: 37486 - DNA, 174 bp, synthetic construct
  source 1..174: mol_type = other DNA
ttccaccaaaccaggggcgctctgaactccgacatctacgtgtatctggccggcgccctggatgtggccaacatgaattacaaccacatctctagccctatctggattcagaacagtcctgtcatcatcttcctaacaagcctcctctttaggctcgggctggtggacatcaac

SEQ ID NO: 37487 - DNA, 174 bp, synthetic construct
  source 1..174: mol_type = other DNA
ctgcaatatggccagcttagctatttctcaatggcccaggggtccatcggtagatacaccaaccctactgaccctcaatttatcacaagccggtacttctttctcaagaatttcctgaacctgctctctgctaatagtatcagcttcaaccccatcgagcagttcaacgagcct

SEQ ID NO: 37488 - DNA, 294 bp, synthetic construct
  source 1..294: mol_type = other DNA
aacttcacaaacaccgtggaccacaatgaggatgatctggaccgggtggagctctgcgacttcatcaaggaatacgaccccgactaccagtccaaggagttcctgtgtatgtgggacctccgctactttgagtggtatctgaataaggacatcattaagtatcgggaggacgtcaacgagatcgacccggaccgatatgactatgtcattaccttcaacaagactttcgattacgataattatcggcttgtgcatcacgagggcaactactacctgaacgagaagatcagctat

SEQ ID NO: 37489 - DNA, 66 bp, synthetic construct
  source 1..66: mol_type = other DNA
accaccgtgatcttcaacggaattaacgacatgatgaacggcactggcactatcaatatggagaca

SEQ ID NO: 37490 - DNA, 81 bp, synthetic construct
  source 1..81: mol_type = other DNA
agaaagtattacaagatgatcacttccactaaggaggataccatcattcggaggctgaataaagacacaggcgacctgaag

SEQ ID NO: 37491 - DNA, 138 bp, synthetic construct
  source 1..138: mol_type = other DNA
ttcgaggacgaaaagcagcggatctctctcacctccattagcaaggagtccggcgccctttcacaatttatgaacgcttggaagatcgacgccctgagggacgtccccgtgacacgggtccgtcaactttatgacaag

SEQ ID NO: 37492 - DNA, 48 bp, synthetic construct
  source 1..48: mol_type = other DNA
atcaagtacagcaacatttccgagtctgtgttatacgacaacgatgtg

SEQ ID NO: 37493 - DNA, 147 bp, synthetic construct
  source 1..147: mol_type = other DNA
tggggattcaatcacatgcggacagccttcctgcccatcgggatctctaacccaaacctcggcgataccggcttcgataccggatcttttggcgacattggaggccctgggtccggaggatttggtggaggtggtggaggagtcttt

SEQ ID NO: 37494 - DNA, 171 bp, synthetic construct
  source 1..171: mol_type = other DNA
atcaaaagtgacagtaaaatagggaacttttacatacacgatgtgtacatctatctgaacaacagccttaattacgctggcctggggggttcctcaaagaatccaggcctcccccctgtgatacctgtcataaccagcatcttcttctccctgggtttcgtgtccgacaaa

SEQ ID NO: 37495 - DNA, 228 bp, synthetic construct
  source 1..228: mol_type = other DNA
tatcacatttctcctttcttcctgagccagtacaagaccatcagtgctacttctaaccccggcgccagctctgctgcggctactaacaccgtcgccctgaccacaaataacatcttctattacattaacaacatccctctttacatgggcacatacaagtggattcctttttccctgaagcccggacggtttgccttcgagaaaatggtctggttggggaatcaccct

SEQ ID NO: 37496 - DNA, 129 bp, synthetic construct
  source 1..129: mol_type = other DNA
gctaccggaggcatctaccctattcaaattatgcatccatttttccgggccctctatccttacatgccaatgacttacggcattacactggtccgcgaggcacagctgggaacagtctggtcgaactat

SEQ ID NO: 37497 - DNA, 129 bp, synthetic construct
  source 1..129: mol_type = other DNA
gccactggcggaatctatcctattgagatcatgcaccagttctttcaaactctatacccctacatgccaatgacctacgccatcacactgattcgcgaggctcagctgggcgtggtctggtcaaactat

SEQ ID NO: 37498 - DNA, 60 bp, synthetic construct
  source 1..60: mol_type = other DNA
accgcaaaccctagttcctccggcggtggcggcagtgatggtggtggatcatttggcgga

SEQ ID NO: 37499 - DNA, 30 bp, synthetic construct
  source 1..30: mol_type = other DNA
ggaaagcccatcggcaccagcgacttgaac

SEQ ID NO: 37500 - DNA, 48 bp, synthetic construct
  source 1..48: mol_type = other DNA
attgttggcaatgacaacgacatgatcatcaagcggaaagacaaggac

SEQ ID NO: 37501 - DNA, 150 bp, synthetic construct
  source 1..150: mol_type = other DNA
cgttacgaggataagaagggcaatatctctctgaagagcatcagcgagggagatcgcggcgaattttcgcaattcatggacgcctgggagattgacgtgaacaaggaggtcacctccgctcgagttaaggaactcttcgacgacacaggg

SEQ ID NO: 37502 - DNA, 117 bp, synthetic construct
  source 1..117: mol_type = other DNA
atgtacagttcctttaacaccctgaatacccctgagacagacaccgaccccgggagcttcggcgatatcggcgacattggatctggcggctttggaggtggtggaggtggagtgttt

SEQ ID NO: 37503 - DNA, 42 bp, synthetic construct
  source 1..42: mol_type = other DNA
gaatacggtttgaacatggatcctctgtcgagcacggccaca

SEQ ID NO: 37504 - DNA, 96 bp, synthetic construct
  source 1..96: mol_type = other DNA
gggatcactgccggcgaaggaggcatttcggccttctctcttgaaaacatcaagaccaactttacaccacctggctggaactggggcgttaacgac

SEQ ID NO: 37505 - DNA, 78 bp, synthetic construct
  source 1..78: mol_type = other DNA
ggcatgatgtctcctgacgacattgaggcttggggagtatcaacgctgtaccccatagcgcaattcgacttcggtagc

SEQ ID NO: 37506 - DNA, 210 bp, synthetic construct
  source 1..210: mol_type = other DNA
gtgaacgccctggtggacaacaagtctgacattggcaaccccaacatgaaggggtttgaggctaccatcctgtctctgatcgaccgcaaagtgctcgacctgtactccaaggaaaatagcgagaccgagacacacgacctcttcctcactttcaactacgatagcaagaacgagctgtccgattctgagaccatcgtcttcgatactttg

SEQ ID NO: 37507 - DNA, 162 bp, synthetic construct
  source 1..162: mol_type = other DNA
aacttcgccgacgacgggacactcaacctgagcacattgaacgacacactccaaaattcttttaacgctgggtggtttgccgatcagatcaagaattggcaaagccacgtgatcttcgaacttgatgataacggagtcgagagctatttcaacgatactgga

SEQ ID NO: 37508 - DNA, 195 bp, synthetic construct
  source 1..195: mol_type = other DNA
ctgcagatgcccgatatctacgattacaacgatggcatctttctgtaccataactatggcggctactacatgatgcacaatgcttactacattggcgatcacatgggagattcttcctcaagcgactccttcgacttcggaggctttgacgacttcggcggtggtggctttgatggaggtggtggaggagctttc

SEQ ID NO: 37509 - DNA, 195 bp, synthetic construct
  source 1..195: mol_type = other DNA
ctccagatgcctgacgtctacgaatatgacgacggcatcttcctgtaccacacctatggcggctactacatgatgcacaatgcttactacattggcgacaacatgggagatccaagtagttccgatagcttcgatttcggcggattcgacgactttggcggtggcggttttgatggaggtggaggaggtgctttc

SEQ ID NO: 37510 - DNA, 36 bp, synthetic construct
  source 1..36: mol_type = other DNA
atcgacaacacccacgagattggcacacccaacatg

SEQ ID NO: 37511 - DNA, 72 bp, synthetic construct
  source 1..72: mol_type = other DNA
gaacgcaactccgagacagaccttaatgacctttacctcaaaatcaacaaggacaacctggatggcctggca

SEQ ID NO: 37512 - DNA, 117 bp, synthetic construct
  source 1..117: mol_type = other DNA
gacctgagctatgaggccaacgctaaaatctttatgaaggagttcaacacgtggcagaaggacgtgaaatatgaatacctcgactccgaaaacctgaagacctacttcaacaacaag

SEQ ID NO: 37513 - DNA, 177 bp, synthetic construct
  source 1..177: mol_type = other DNA
aagaatattgactcctactatgatgatgacgtcttcctctatcatcactacggcggctactacatgatgcacaacgcctttgtgaccggacagaatacagctactccctctagtgattcggttggcgacttcggatctcttggtggcggctctggtggaggtggcggaggagctttc

SEQ ID NO: 37514 - DNA, 48 bp, synthetic construct
  source 1..48: mol_type = other DNA
acagccattttcgacggcatcaagaccggcaacatgaacatggagtat

SEQ ID NO: 37515 - DNA, 45 bp, synthetic construct
  source 1..45: mol_type = other DNA
ctgatcgacaacagccgggatattggcacgcctaacatgaatggc

SEQ ID NO: 37516 - DNA, 72 bp, synthetic construct
  source 1..72: mol_type = other DNA
ctctaccttaagctgaaccgggagcggacctcctctctctccatccacgaaaatactgttttcgacatcatg

SEQ ID NO: 37517 - DNA, 156 bp, synthetic construct
  source 1..156: mol_type = other DNA
ttcagcgacagtaacgacatcgtcaatctgagcaacctgaacaacgatttatcatacgagtccaatgccaagatgttcatggaggaatacaacgagtggcagcaggacgtgaagcacgagtacctggactccgataacctcgagctgtacttcaac

SEQ ID NO: 37518 - DNA, 177 bp, synthetic construct
  source 1..177: mol_type = other DNA
aagaatatcagcgtttatgatgacgacgtcttcctgtaccaccactacggtggctactacatgatgcataacgcctttatgacggggcaaagctctgccaatccaagcaccgactccgacttcggagatttcggaggactcggtggtggcagtggaggtggaggaggtggtgctttt

SEQ ID NO: 37519 - DNA, 54 bp, synthetic construct
  source 1..54: mol_type = other DNA
gtgaacgcccttctagcggcagcacccgactttagcaaggctcagaacttggag

SEQ ID NO: 37520 - DNA, 63 bp, synthetic construct
  source 1..63: mol_type = other DNA
gctctgaccaacgtctccatcactggagccgggaacccatctatggacggcttcaaggctacc

SEQ ID NO: 37521 - DNA, 162 bp, synthetic construct
  source 1..162: mol_type = other DNA
ctcttcgagtcctattccattggtggaagatttagcctcaatgatttttccgagaatatgaagaatgaatccgacgcaagagattatcgagctaaatactccgcatgggagctatcagtggagaataacatcggcgaccgggcctctagcatgttcatcggg

SEQ ID NO: 37522 - DNA, 156 bp, synthetic construct
  source 1..156: mol_type = other DNA
agcgacctgtaccggtttcactattacggaggctactcggtcttgggcacaagcatgaccctcggctcgactactggcgttgccacctcatcttccgttggtggcggttttggaggatcaggcggcggcggaggtggtggaggtggaggagctttc

SEQ ID NO: 37523 - DNA, 174 bp, synthetic construct
  source 1..174: mol_type = other DNA
aattcttcgagcaacatcctgggccacaactaccgagacgcctacctgtacctaatacaagcttatcacttcgctggcacacccatcggaggctacgattacgtgaactactatagtccactgattcctttcctgacctccctcctcttccgcctgggattcgtctctgaggct

SEQ ID NO: 37524 - DNA, 141 bp, synthetic construct
  source 1..141: mol_type = other DNA
atcaacggcctcccattcggctttattaatcaggcccgcgaagtctcgactgaaacaatatcttcgaacaccgccgccgccccggcgaacgacctgtttttttatatctcgtcgctccctaggttcatttatagtccacaa

SEQ ID NO: 37525 - DNA, 168 bp, synthetic construct
  source 1..168: mol_type = other DNA
atcctgaaggggttcatgtataacggcgtgattgacttcaagaaaatggagaacgatctccgcaatgaggagaacgctgagaggttcaacaatgtgtaccgggcctggaagacctccttcatctcccggaatattcccgagagcatcaagcgcgaatacttcgacgat

SEQ ID NO: 37526 - DNA, 45 bp, synthetic construct
  source 1..45: mol_type = other DNA
tacaacaacataacggattcatattactataccaatgatgtgttc

SEQ ID NO: 37527 - DNA, 117 bp, synthetic construct
  source 1..117: mol_type = other DNA
tacttcggcggcatgaacgccctggagtcagccatcacgaccggaataaataccgtcaacacctccgacatcggagatgttggtggcggatctggaggtggaggtggaggagcattc

SEQ ID NO: 37528 - DNA, 66 bp, synthetic construct
  source 1..66: mol_type = other DNA
aacgccctggtggataacaagaatgacatcggcaatcccaacatgaagggcttcgaggctaccatt

SEQ ID NO: 37529 - DNA, 135 bp, synthetic construct
  source 1..135: mol_type = other DNA
tccctgatcgatcgcaaagtgctcgaccttcatagccaggaaaattctgagacgaacacccgagacctctacctgaccttcaattacgactctaaggaccagttatccgactctgaaaccattgtcttcgatact

SEQ ID NO: 37530 - DNA, 162 bp, synthetic construct
  source 1..162: mol_type = other DNA
ttcgctgaagaaggcaccctgaacctttcttcctttaatgatcaacttcaaaacagtttcaacgccggatggtttgcggatcaaatacgaaattggcagagtcatgtcattttcgagatcgacgagaatggagtcgaaagctatttcaacgatacagggagc

SEQ ID NO: 37531 - DNA, 189 bp, synthetic construct
  source 1..189: mol_type = other DNA
cagatgcccgacgtttatgaatatgacgacgggatctttctgtatcatcactacggcggctactacatgatgcacaacgcctactatattggcgataagatgggcgacccttccgccgatagcttcgacttcggcggttttgatgactttggtggcggcggattcgatggtggcggaggcggtgctttc

SEQ ID NO: 37532 - DNA, 66 bp, synthetic construct
  source 1..66: mol_type = other DNA
aacgccctgatggacaatagccacgacatcggcacacccaacatggatgggttcgaggctaccatc

SEQ ID NO: 37533 - DNA, 267 bp, synthetic construct
  source 1..267: mol_type = other DNA
aaggacagcaagacagagattaacgagctttacctcaccctgcacaaggatacaacctccaatctggatatccacgaacagactgtggtggatatactctctatgttcgccgacgagaataacgtcgtcaacatgtccggcctgaacgccgacctgagcgacgagaccaacgctaagctcttcatggaggagtacaacacgtggcagaaggatgtgaaacatgaatacctggactctgagaacctgaagagctactttcacaagaag

SEQ ID NO: 37534 - DNA, 174 bp, synthetic construct
  source 1..174: mol_type = other DNA
aagaacatcgactccattctggatgatgacgtgttcctgtatcaccactacggcggctactacctgatgcatgacgctttcgtcaccgggcagagtgccgcaaatccatcttccgactctggaggttttggaggtctcggaggaggcagtggtggaggtggaggaggtgcattc

SEQ ID NO: 37535 - DNA, 51 bp, synthetic construct
  source 1..51: mol_type = other DNA
accaccgccattttcgacggcatcaattctgggaacatgaacctcgaatac

SEQ ID NO: 37536 - DNA, 54 bp, synthetic construct
  source 1..54: mol_type = other DNA
gtcaacgccctcctggccgtggcacccaacttcacacaagctcagaaccttgat

SEQ ID NO: 37537 - DNA, 54 bp, synthetic construct
  source 1..54: mol_type = other DNA
gtcaatgccctcctgagcgtggctcccgacttcactaaggcacagaacctggac

SEQ ID NO: 37538 - DNA, 54 bp, synthetic construct
  source 1..54: mol_type = other DNA
gtgaacgccctcctgaccgtcgcccccaactttagccaagcacaaaatctcgac

SEQ ID NO: 37539 - DNA, 54 bp, synthetic construct
  source 1..54: mol_type = other DNA
gtcaatgctctcctgaccgtggcacccaacttttcccaagcccagaatctcgac

SEQ ID NO: 37540 - DNA, 180 bp, synthetic construct
  source 1..180: mol_type = other DNA
ttccagatgagcggtggcatttactcacccgacgagtccctctatctgatctctgcctttaaatacgcgggtctggattactacaacatctgcgacgtcaatgacctgttctatacacctgtgatctcttatctcacttcgttactgctccggctcggcattgatggccatttcggaagc

SEQ ID NO: 37541 - DNA, 165 bp, synthetic construct
  source 1..165: mol_type = other DNA
ctctttgactacaatgccaagctgggattcttcgacctctctgccgtcaccctgcatgttagcaacaccaacacaaacgctattgactacaacggcagcaagctgttctatatcttcgggcttctgaacgatttctccttcggcttcgtccgtgatttcaacttc

SEQ ID NO: 37542 - DNA, 51 bp, synthetic construct
  source 1..51: mol_type = other DNA
accactgctattttcgaagggatcaactctggcaatatgaacctggagtac

SEQ ID NO: 37543 - DNA, 84 bp, synthetic construct
  source 1..84: mol_type = other DNA
aacgtgttgatcagcgtagccgagatgcagatgcccagcatgttgggagccggcatgaactctgccttcctggctaacaccaat

SEQ ID NO: 37544 - DNA, 57 bp, synthetic construct
  source 1..57: mol_type = other DNA
gtcaacgccatcttaaccgtcgcccccaacttctcacaagcccagaatctggatacc

SEQ ID NO: 37545 - DNA, 36 bp, synthetic construct
  source 1..36: mol_type = other DNA
atcgtcaaggaggaaaatctgggcaagaacagagtg

SEQ ID NO: 37546 - DNA, 111 bp, synthetic construct
  source 1..111: mol_type = other DNA
atgctcaactccgcatttaacgatgggatctctgccgctaacccatcctctgatggcggggggttcggtgacatcggcggcggaagcggcggtggcggaggcggagcattc

SEQ ID NO: 37547 - DNA, 51 bp, synthetic construct
  source 1..51: mol_type = other DNA
tccataactcacgtcatcgacactgtgaagatgattagcaaaattacagaa

SEQ ID NO: 37548 - DNA, 60 bp, synthetic construct
  source 1..60: mol_type = other DNA
tcttccgacaacacctatgacttagtgtcggaatatgacgatgtcatcctcctgagacac

SEQ ID NO: 37549 - DNA, 45 bp, synthetic construct
  source 1..45: mol_type = other DNA
ataatccaacctatactggatggcgaggccgacataaccaagacc

SEQ ID NO: 37550 - DNA, 78 bp, synthetic construct
  source 1..78: mol_type = other DNA
aacgccctggtggacagcaagaacgatatcggcacacccaacatgaaggggttcgaggctaccatcctgtccctcatt

SEQ ID NO: 37551 - DNA, 84 bp, synthetic construct
  source 1..84: mol_type = other DNA
cgcaaggtgctcgacctgtactcccgggaaaacagcgagacagacacccgggacctgttcctgaagttcgattacgactctaag

SEQ ID NO: 37552 - DNA, 156 bp, synthetic construct
  source 1..156: mol_type = other DNA
ttcgccgacgatggcatcctcaatctgtctaccctgaacaacctcctggaaaacgaggacaacgccatttggttcgctggccagattcagaactggcagggatacgtgatcttcgagagcgacgagagtggaatcgacgcatactttgatgacagc

SEQ ID NO: 37553 - DNA, 195 bp, synthetic construct
  source 1..195: mol_type = other DNA
aagctgcagatgcccgatatctatgactatgatgatggcattttcctgtaccatcactacggcggctactacatgatgcacaacgcctaccatgtcggagacatgggagccccttcctctagtgacagccacgacttcggaggtttcgacgacttcggtggtggcggctttgacggtggaggtggaggagctttt

SEQ ID NO: 37554 - DNA, 54 bp, synthetic construct
  source 1..54: mol_type = other DNA
gtgaatgcaatcctggctgtggcaccaaacttcagtcaagcccaaaaccttgat

SEQ ID NO: 37555 - DNA, 66 bp, synthetic construct
  source 1..66: mol_type = other DNA
aacgccctgattgagaatagccgggacatcgggacacccaacatgaatggcttcgaagctaccatc

SEQ ID NO: 37556 - DNA, 99 bp, synthetic construct
  source 1..99: mol_type = other DNA
cgggaccccaacaccgacttgactgaattgtacctgaagctcaaccggcagaagacctctagcctctccattcacgagaatactgtgttcgacatcatg

SEQ ID NO: 37557 - DNA, 156 bp, synthetic construct
  source 1..156: mol_type = other DNA
atgtttagcgactctcacgacatcgtgaacctgagcaatctgaacaacgacctctcctacgagtccaacgccaagatgttcatggaggagtacaacgagtggcagcaggacgtcaagcacgaatacctggataacctcgagctgtacttcaataac

SEQ ID NO: 37558 - DNA, 186 bp, synthetic construct
  source 1..186: mol_type = other DNA
ctccaggagaagaatatccctgcctatgatgatgacattttcctgtaccaccattacggcggttattacatgatgcacaacgccttcatgaccggccaaagtagcgcgaatccgtcgactgactctgactttggcgacttcggtggacttggcggaggatcaggaggaggtggaggtggtgcattt

SEQ ID NO: 37559 - DNA, 39 bp, synthetic construct
  source 1..39: mol_type = other DNA
acaaccttcctgactgtcaagtccatggatggtcttgag

SEQ ID NO: 37560 - DNA, 156 bp, synthetic construct
  source 1..156: mol_type = other DNA
acctacgagctcaacggccggatctctttctcctacatgcaagactgtctgcgcgaggagaaccaggccagaagctaccaggaccgatataataactggtgccagaactttaagaacgattacctgcccgaggaagtttttgaggagtacttcgac

SEQ ID NO: 37561 - DNA, 177 bp, synthetic construct
  source 1..177: mol_type = other DNA
ggaggcctggacaaccccaactacaccacaaacgacctcttcatgttctattacctgggcggctacaaccacgtgaatagctctttcgccacggcaagctcgacgatcagtgctgctaataacgattctatcggtggcattggtggaggttcaggtggaggtggaggaggagcattt

SEQ ID NO: 37562 - DNA, 48 bp, synthetic construct
  source 1..48: mol_type = other DNA
accgccatcttcgacgggattaatagcggcaacatgaacctgaatcac

SEQ ID NO: 37563 - DNA, 48 bp, synthetic construct
  source 1..48: mol_type = other DNA
accgccatcttcgacggtatcaattctggtaacatgaacattgagcac

SEQ ID NO: 37564 - DNA, 174 bp, synthetic construct
  source 1..174: mol_type = other DNA
catcagtcccggggcgcctttaattccgacatttacgtgtatctggcgtcagcactcgactacgctggaatgaattacgggcacattagcgatctgggctacatgtccaactctcccctgatctgctacttgacatcccttcttttcaagctgggcttcgtctccatcaattct

SEQ ID NO: 37565 - DNA, 174 bp, synthetic construct
  source 1..174: mol_type = other DNA
ctcagctacaacgcaccaatctcatacttctcgggggctatgggaagtataggccgcttccacaaccccaaggacccaaactacattgtggataagttcttctacatcaagaactatctgtctctgctcttcgctaacaagattacctccccgatgcaaattgaaaagtttcgc

SEQ ID NO: 37566 - DNA, 276 bp, synthetic construct
  source 1..276: mol_type = other DNA
atcaacaccgttgaaattgacgattggtccctgaacttcgattccgcctctaatttcctgctcgattacgattcagattatcagagcaaggaaatcggcgtggacgtcggggacaggtactacgagtggtacttcctcaaggacgtggacctgatcaaccctcatagctttaatagcagtgactacaattatatcttcgtgaactctaacctcgacaacgacgactaccacaaaatttaccgggacggaagaatccgggtctacgagcgcaactat

SEQ ID NO: 37567 - DNA, 42 bp, synthetic construct
  source 1..42: mol_type = other DNA
gacgctctcactggagtcaaaaaacagcagatcgatttgctg

SEQ ID NO: 37568 - DNA, 45 bp, synthetic construct
  source 1..45: mol_type = other DNA
aactcgggctattctatcgggttcgagaccgactccatcatcgac

SEQ ID NO: 37569 - DNA, 51 bp, synthetic construct
  source 1..51: mol_type = other DNA
acgctggatcttctcatctctaatctcaactcgtcgaatgacattgcaatc

SEQ ID NO: 37570 - DNA, 36 bp, synthetic construct
  source 1..36: mol_type = other DNA
atccagaataagcggagcattggcaaacccaacatg

SEQ ID NO: 37571 - DNA, 132 bp, synthetic construct
  source 1..132: mol_type = other DNA
gtcaacaatattctgaatatgagcgaactgagcagcaagttgtccaacgaaaccaatggcaagtggtttgctaataacttcgatctgtggaaaaagaccgtcgccaacgagtacctcaacaaaaaggagctg

SEQ ID NO: 37572 - DNA, 180 bp, synthetic construct
  source 1..180: mol_type = other DNA
cctcacgtctcggatgatgactattactactatgacctctataccttccatcggtactccggactgatcatgctgagcagcgcatttaacactgggattcatgcgtcgaacgcttccaattctggtggctctttcgggaacgtcggaggtggcagtggaggaggtggaggcggcgctttc

SEQ ID NO: 37573 - DNA, 51 bp, synthetic construct
  source 1..51: mol_type = other DNA
acaactgctatcttcgatgggatcaccagtggcaatatgaacattgagtat

SEQ ID NO: 37574 - DNA, 66 bp, synthetic construct
  source 1..66: mol_type = other DNA
ttcgacgagtggaaggacatcgtcaaggatgactgcattggcaaggacaaggtatctagctacttc

SEQ ID NO: 37575 - DNA, 126 bp, synthetic construct
  source 1..126: mol_type = other DNA
tccggcctgattatgctgaactccgccttcaacaccggcgtctctgccgcaaatccatcgtcctccgacatgggcgattttggagatattggtggaggtagtggcggaggaggtggaggagctttc

SEQ ID NO: 37576 - DNA, 48 bp, synthetic construct
  source 1..48: mol_type = other DNA
accgccatcttcgacggaattaacagcggtaacatgaatatcgagtac

SEQ ID NO: 37577 - DNA, 153 bp, synthetic construct
  source 1..153: mol_type = other DNA
tacgagctcaatggccggataagcttcaactatatgcaagattgtctaagatctgaatatcacgcgagagctttccaagatcgttataacaactggtgcgagaacttcaagaacgagtacctgcccgacgaggtgctgaaggagtacttcgat

SEQ ID NO: 37578 - DNA, 39 bp, synthetic construct
  source 1..39: mol_type = other DNA
ggcggactgaacgactatagctacaccacaaacgatctg

SEQ ID NO: 37579 - DNA, 129 bp, synthetic construct
  source 1..129: mol_type = other DNA
tactacctgggcggctataaccatgtcggatccagcttttccacggccagctcaaccatttctagcgccaataacgacagtattggaggcataggtggaggctctggaggtggaggtggaggagctttc

SEQ ID NO: 37580 - DNA, 66 bp, synthetic construct
  source 1..66: mol_type = other DNA
aacaccatcgtggagacatcttactccgatagcggggactatggctcaagcggcagtggtggattc

SEQ ID NO: 37581 - DNA, 48 bp, synthetic construct
  source 1..48: mol_type = other DNA
atgagcatcgccggacggttcgtgatccctgacattggacttggaccc

SEQ ID NO: 37582 - DNA, 42 bp, synthetic construct
  source 1..42: mol_type = other DNA
tatccgccgttctctgctctgtaccctttaacaacagaaata

SEQ ID NO: 37583 - DNA, 48 bp, synthetic construct
  source 1..48: mol_type = other DNA
ctcctgatcaagaatatcaccgataaatgggtagacgacatcaacttc

SEQ ID NO: 37584 - DNA, 93 bp, synthetic construct
  source 1..93: mol_type = other DNA
aacggcaaactgttcgtcgagaagttcgacgaatggaagtacatcgtgaagaaccagagcctcggcgaagagaggatctcccggtacttcaat

SEQ ID NO: 37585 - DNA, 123 bp, synthetic construct
  source 1..123: mol_type = other DNA
tccggcctcatcatgctggactccgccttcaacaacggcgtcagcgctgcaaatcctagttcggatggtggtggctttggtggtgtcggcggaggctctggaggtggaggtggtggagctttc

SEQ ID NO: 37586 - DNA, 45 bp, synthetic construct
  source 1..45: mol_type = other DNA
aatgccatgattgacaacagcaccttcggcgaaccgaatatcaga

SEQ ID NO: 37587 - DNA, 255 bp, synthetic construct
  source 1..255: mol_type = other DNA
tctatcaagaaggaaaatgaggacctcctgcttacaatcgaggacaccagcattaacctggacatgggcgagaagatcgtggtcaacatcctgtcccacttcgccaacaacggagtgctgaacctgtccgggctaaagcagaggatgaagagcaaggacaacgccgagtggttcatcaacaatttcaatgattggaaaaaggctgtcgaaaacgagtactttaaggacgaagtgaagaacaggtacttcaacgac

SEQ ID NO: 37588 - DNA, 108 bp, synthetic construct
  source 1..108: mol_type = other DNA
tgcttctaccattcttactaccgggcttattccaccaactcaagctccggctctggcggatttggtagcttcggtggcgggagtggaggtggtggcggcggagcattc

SEQ ID NO: 37589 - DNA, 162 bp, synthetic construct
  source 1..162: mol_type = other DNA
tttaataaggacctgggcatctactgttccgatgtctttatctacttgtacaattccctcgtgtttgctaggattgccttcttctctaactatctttacctctcccctctcatctgcttcctgacctccatcctcttccggctcggatacgttagtgaagtg

SEQ ID NO: 37590 - DNA, 183 bp, synthetic construct
  source 1..183: mol_type = other DNA
tcctttggatcgcagttaacattcctgacacaaggcagcacaatcagcagcggcagcaagggcgccgtgaatgattctgcctatactactgacactctgttctatctgcacgatttccttaatttccttttctcgcaaaaggttgtcttcgacggcatcattcctaatttgatcggagcatcc

SEQ ID NO: 37591 - DNA, 285 bp, synthetic construct
  source 1..285: mol_type = other DNA
ttcacaggcacaatcgaacacgacaccgactttaacgactataaggtggtgtccgactatcttatgcaatatgacgatgactacgcgtctaaggacatagcagtatcgaagcagcgccagttctcctggtttctccgaggctacactattgccgtgaccgtcgagcagaccgacttcctggagtctagtaacatcacctactacgtctgtgatgaggacatggagatcaagaattaccgcaaaatctacaactacaaggatatcttcctatatgaacgggttaat

SEQ ID NO: 37592 - DNA, 48 bp, synthetic construct
  source 1..48: mol_type = other DNA
gacgagatcattggctccatgccggactattctgaggcagatggtgtt

SEQ ID NO: 37593 - DNA, 30 bp, synthetic construct
  source 1..30: mol_type = other DNA
aacggaggcacagattggtcgtccggtttc

SEQ ID NO: 37594 - DNA, 81 bp, synthetic construct
  source 1..81: mol_type = other DNA
tggtttatggatcagttctcggagtggcaatacgaagtccaatgcgaaatcgacaatggagtggagtcatatttcaatagc

SEQ ID NO: 37595 - DNA, 36 bp, synthetic construct
  source 1..36: mol_type = other DNA
atggattacgaggacgacatcttcctgtaccacaac

SEQ ID NO: 37596 - DNA, 117 bp, synthetic construct
  source 1..117: mol_type = other DNA
tttatgagttccgcttttcacaccatgaacaatagcatgaacagcggggacttcggcgacttcggggactttggggatttcgggggaggatctggaggaggtggcggtggagcattc

SEQ ID NO: 37597 - DNA, 45 bp, synthetic construct
  source 1..45: mol_type = other DNA
ctgatcgataataaggacagcattggcaaacccaacatgaagggc

SEQ ID NO: 37598 - DNA, 153 bp, synthetic construct
  source 1..153: mol_type = other DNA
ttcgcggagaacgagatcctgaacctgagtagcctcaatgacaagctgtcttcgcaacacaatgcaaagagcttccaagaagattacaacacctgggctgaccacgtgaagaaggagtccagctccaagagatccgaatattttgatgatagg

SEQ ID NO: 37599 - DNA, 39 bp, synthetic construct
  source 1..39: mol_type = other DNA
gtgcccgacatcagcgactacgatgatggcatcttcctc

SEQ ID NO: 37600 - DNA, 120 bp, synthetic construct
  source 1..120: mol_type = other DNA
ggctactacgtgttttcccaagcctttaagacctctgagagcgcagctaacccctcgagcggatcaggcggctttggtggatttggaggcggatcaggaggtggtggaggtggagctttc

SEQ ID NO: 37601 - DNA, 63 bp, synthetic construct
  source 1..63: mol_type = other DNA
aacatcatcctggagggcagcatccggatcatgaatcacaccggcaccatcgacttcccaaac

SEQ ID NO: 37602 - DNA, 42 bp, synthetic construct
  source 1..42: mol_type = other DNA
gccatgatgaagtcccatggccttggcgacccagatatggag

SEQ ID NO: 37603 - DNA, 57 bp, synthetic construct
  source 1..57: mol_type = other DNA
tttagcaccaaagacctgatccttaagttcgagcgggacgacctcaaggatctgaag

SEQ ID NO: 37604 - DNA, 180 bp, synthetic construct
  source 1..180: mol_type = other DNA
aacctctacaacatgctttactccctgagcgacggcggagtgctgaacatgtccgagctggatagcaagctcagctctgaatccaagggcaaatggtttatgggcgagctggacaacttctatgagtctgccaagtccgaatacctgagcgaggaaactgtcaatcggtacttcaacaac

SEQ ID NO: 37605 - DNA, 171 bp, synthetic construct
  source 1..171: mol_type = other DNA
atccctgattacgcggattacgatgactccgtgctcgtttatcattactacgggggctaccacatgatgcataccgcctacgataccggttactcggctgcaaacccaagtgatagttcgggctttggcgggcttggtggaggcagtggcggaggtggtggcggcgcgttc

SEQ ID NO: 37606 - DNA, 63 bp, synthetic construct
  source 1..63: mol_type = other DNA
aacatcctcatcgagggtgctaataacattatcaatcacaccggaacatttgacttcgatcgg

SEQ ID NO: 37607 - DNA, 300 bp, synthetic construct
  source 1..300: mol_type = other DNA
gctcctgccgctgatctcaactccctggacgctgacggaaaggctttgtacactgatgcatctggactgccatacttctccgagatggacagttattacaactatcggctgaccaatgattacgtggaccacggctacgttggagacgagaaggtcaacggtagcgaatgggatttgcaccgcaacgcccctgacggcaacaagatccaatatgagctaggcattgtgtacctcactagctggatgcacgacatggccaataactttctgggctggcatatgtctgtcaaggaggtagcc

SEQ ID NO: 37608 - DNA, 177 bp, synthetic construct
  source 1..177: mol_type = other DNA
caggggatcgacggcgtcaccggaatcttctcccgcgtctttggactgctgaaccttcaatccgcgagcgtcgcggtcgggggttttcccaatgtgctgatttctgtggctgagatgcagatgcctagcatgctcggcgccgggatgacatctatgtttctggcatcgactgatggg

SEQ ID NO: 37609 - DNA, 105 bp, synthetic construct
  source 1..105: mol_type = other DNA
ggagcctttcaaacgagtaacggcgtgatccccgggacccaggactacatgtggaatgccatggagtggattggcgacacacaggataacgacacggttcgacgc

SEQ ID NO: 37610 - DNA, 84 bp, synthetic construct
  source 1..84: mol_type = other DNA
attaaccctatcgtgatttcgctcgtggtcaataacatcccctgggtgcccatccaagaactgatcgtcggaccttatgggata

SEQ ID NO: 37611 - DNA, 153 bp, synthetic construct
  source 1..153: mol_type = other DNA
ggtattttcgagttcatcatagcggccgttaggcccctcgttaacgcgatcgggctgcctgatcaaacgtcggccagcttcgtcctggggttctttcggcgcgactttggggcagctggcctgatgagcatccacaccatgctgactggcgtc

SEQ ID NO: 37612 - DNA, 111 bp, synthetic construct
  source 1..111: mol_type = other DNA
cttaacagcgcctttaacaccggcgtgtccgctgccaatccttcatcaaatggcgggggaggaatcggcgacattggcggaggttctggaggaggagggggcggggctttc

SEQ ID NO: 37613 - DNA, 63 bp, synthetic construct
  source 1..63: mol_type = other DNA
accatcatcttcgatggcatcaacgccatgaacagccacactgggacaattgacctgaacacc

SEQ ID NO: 37614 - DNA, 63 bp, synthetic construct
  source 1..63: mol_type = other DNA
acaaccatctacaacgggatcaacctcatcctgaaccacacgggcactattgacatcaatcgt

SEQ ID NO: 37615 - DNA, 63 bp, synthetic construct
  source 1..63: mol_type = other DNA
accactatcttcgatgggctgaacgccattgccactaatactggcaccatggacctgaaccgc

SEQ ID NO: 37616 - DNA, 42 bp, synthetic construct
  source 1..42: mol_type = other DNA
atcgataacagggcgtccttgggcgagccaaatatgaagggt

SEQ ID NO: 37617 - DNA, 156 bp, synthetic construct
  source 1..156: mol_type = other DNA
ctgtaccccttcgccgacggcgacatcctcaacctgtctaccctggaggacaaattgtcttctgaacggaacgccaagtcatttcaagaagactataaatcttgggtcaaacacgtggagaaggagaccgagggcaagaaggctgagtacttcgat

SEQ ID NO: 37618 - DNA, 45 bp, synthetic construct
  source 1..45: mol_type = other DNA
gtgcccaacgtcagcgactatgacgatggcatcttcatctaccac

SEQ ID NO: 37619 - DNA, 120 bp, synthetic construct
  source 1..120: mol_type = other DNA
ggttattacctgtttgcgcacgcctatgacacttccgtctccgccgctaatccttcctccggatctggtggattcggaggctttggaggcggtagtggcggaggcggcggtggagctttt

SEQ ID NO: 37620 - DNA, 42 bp, synthetic construct
  source 1..42: mol_type = other DNA
gccttgtattcaagcggaaacatcgggacgccaaacatggac

SEQ ID NO: 37621 - DNA, 93 bp, synthetic construct
  source 1..93: mol_type = other DNA
acagtgacagacaaggacaccgagaccaaagatctcattatcaacttctccgagaacaccagcggcctgaagtctaacgaaaagcaggtctat

SEQ ID NO: 37622 - DNA, 147 bp, synthetic construct
  source 1..147: mol_type = other DNA
aggttcagcaacaatgatcagctgaacctcagttctctcaattccaagctttcgaccgaatcaaacgccaagtggttcatgggccggtacaaagactggcaggagaatgtctgcgattccctggagttccgcaccgacgaagagttc

SEQ ID NO: 37623 - DNA, 174 bp, synthetic construct
  source 1..174: mol_type = other DNA
caggatatctatcgatacgacgccgatatcttcatgtaccaccgctatggcggtagttatatgatgcacagcgccattatgtccggccaatcaaccatgagtaactcctctagcgattccggtggctttggcggacttggcggaggatctggtggaggtggtggaggagctttc

SEQ ID NO: 37624 - DNA, 90 bp, synthetic construct
  source 1..90: mol_type = other DNA
aacttctttttccctgagatcaattacgaccagcccctgtcggggcaatttgctgccaagcggagcgtgctgaacaagctcaacttcgag

SEQ ID NO: 37625 - DNA, 162 bp, synthetic construct
  source 1..162: mol_type = other DNA
gtgctggacgcagacgtccggggcattaagatcatggaggttgatataggcgatattcagcacgacatgtctccgctcggcgacctgcacgaaatggccaacgaggttgttaggaccattattacgcgggctatggattatggaaggatatccatgattgac

SEQ ID NO: 37626 - DNA, 69 bp, synthetic construct
  source 1..69: mol_type = other DNA
aagcagcccaattacttgatttcgcaactgctgaaactcttcaagacaagttgcaactccaacactagc

SEQ ID NO: 37627 - DNA, 63 bp, synthetic construct
  source 1..63: mol_type = other DNA
aacatcctcctggacggcagcctgcggatcatgaaccacaccggcaccattgatttccctaag

SEQ ID NO: 37628 - DNA, 33 bp, synthetic construct
  source 1..33: mol_type = other DNA
aacctgccctttagcaagtggctctacttcatc

SEQ ID NO: 37629 - DNA, 138 bp, synthetic construct
  source 1..138: mol_type = other DNA
gatggcaatatgctgaacgtctctcggctgtcctccaagctcaacaacgaatacaacggaaagctcttcaaggagaaactggacgactggaaggagtctgttaaaaaccagcacatcgggcagattagcgagtacttt

SEQ ID NO: 37630 - DNA, 120 bp, synthetic construct
  source 1..120: mol_type = other DNA
gggctcatcatgctggagtccgcattcaataacgggatcagcgccgctaacccctctagcgatggtggcggcttcggcgatattggtggtggcagtggtggcggtggtggaggagctttc

SEQ ID NO: 37631 - DNA, 48 bp, synthetic construct
  source 1..48: mol_type = other DNA
gccgacattgtgaacgtcggcatccagaacaccaattttcaattcatc

SEQ ID NO: 37632 - DNA, 36 bp, synthetic construct
  source 1..36: mol_type = other DNA
tacgacgccctcaacggcggagtattgacgggagac

SEQ ID NO: 37633 - DNA, 60 bp, synthetic construct
  source 1..60: mol_type = other DNA
ctggtggaggatcggaccgacctcgggactcccacaatgaagggcttcgaagctagcatc

SEQ ID NO: 37634 - DNA, 78 bp, synthetic construct
  source 1..78: mol_type = other DNA
tcgccacaagaaaatgtggacttcgacacacgggatctcatcctgaccttcgatcaagataaaaaatctgagctttct

SEQ ID NO: 37635 - DNA, 180 bp, synthetic construct
  source 1..180: mol_type = other DNA
gaaaagatcgtcttcaacactctggagcactttgctaataacaacacactgaacctgtctatgcttaacggccagctgtccaccgaatatgaggcaaagtggttcatgagccagctcgagatgtgggagaagaatgtggagaatcagattaacctcgaggaatacttcgatggaacaggc

SEQ ID NO: 37636 - DNA, 180 bp, synthetic construct
  source 1..180: mol_type = other DNA
ctgcaggctcctaactacgtggattacgacgatgacctgttctattatcactactacggtggctacggcctcatgtatagcgccttccggactggacagacaaccgcaaatccttcttctgattctggcggctttggtggacttggcggaggttctggtggtggaggaggtggtgctttt

SEQ ID NO: 37637 - DNA, 33 bp, synthetic construct
  source 1..33: mol_type = other DNA
aagggggacctcggcaaacccaacatgaaagga

SEQ ID NO: 37638 - DNA, 147 bp, synthetic construct
  source 1..147: mol_type = other DNA
gctcacgacaacgccctgaatctgtcccggctcaacgggagcctgacaagcgaatatgaagcaaaatggtttatgaaccagatccagtcctgggagaactctgtaaagagttctttcgatctctccaagtacttcaacgatactggc

SEQ ID NO: 37639 - DNA, 33 bp, synthetic construct
  source 1..33: mol_type = other DNA
cccaacattagcgattacgacgacggcatcttc

SEQ ID NO: 37640 - DNA, 120 bp, synthetic construct
  source 1..120: mol_type = other DNA
ggatacggtatcatgtactctgcctataataagagctactccaccgtgtacaactctagtgatagcggcggctttggtggatttggcggaggatctggaggtggaggaggtggtgctttc

SEQ ID NO: 37641 - DNA, 87 bp, synthetic construct
  source 1..87: mol_type = other DNA
ctgttcaacaccctcactcacttcgccaaggacaacgtgctgaacctgagtcagctgaatagcaaattctcctctgagacacaagcc

SEQ ID NO: 37642 - DNA, 75 bp, synthetic construct
  source 1..75: mol_type = other DNA
ttcctgaaccacgtgaagagctgggaggagtccgtcaagaatgagatcaacctgcctgaatactttgacgatgcc

SEQ ID NO: 37643 - DNA, 126 bp, synthetic construct
  source 1..126: mol_type = other DNA
tacggcggctacgggctgttccatgggttttatagttcaagttacagcaccgtgcactcctcttccgatagcggtggtttcggcggatttggtggcggatctggaggtggaggtggtggagctttc

SEQ ID NO: 37644 - DNA, 36 bp, synthetic construct
  source 1..36: mol_type = other DNA
gccaagggaagcatcggcaaacccgacatggatggc

SEQ ID NO: 37645 - DNA, 141 bp, synthetic construct
  source 1..141: mol_type = other DNA
ggcgatacactcaatctgtccgccctcaattcctctttgagctttgaaagagacgcggaatggtttatggatgagtaccacgcatggcaggaaagtgtcgagatcgaagtgaagcagaaggtcgagcgcgagttcaacgac

SEQ ID NO: 37646 - DNA, 123 bp, synthetic construct
  source 1..123: mol_type = other DNA
ggtggctattacatgatgcatcacgccatcatgtccggcgagaagacagtgtcctcttcgagtgataccggcgactttggcggcttgggtggaggatcaggaggtggtggaggtggagctttt

SEQ ID NO: 37647 - DNA, 36 bp, synthetic construct
  source 1..36: mol_type = other DNA
tctcaggacaataccctgaacctgagccaactttcc

SEQ ID NO: 37648 - DNA, 63 bp, synthetic construct
  source 1..63: mol_type = other DNA
gaccggatcggggactgggaggaaagcgtcaagaatgagatcaatctggaagagtacttcgat

SEQ ID NO: 37649 - DNA, 33 bp, synthetic construct
  source 1..33: mol_type = other DNA
cctaacatccccgactacgacgatggactgttc

SEQ ID NO: 37650 - DNA, 123 bp, synthetic construct
  source 1..123: mol_type = other DNA
ggcggctacgggatcttcctctctgcctataataccagtaacagcacaattaattcgtcaagtgacagcggcggatttggcggattgggcggtggatctggaggaggtggaggtggagctttt

SEQ ID NO: 37651 - DNA, 42 bp, synthetic construct
  source 1..42: mol_type = other DNA
gtttatgctacgggctccattggaaagccagacatggatggg

SEQ ID NO: 37652 - DNA, 69 bp, synthetic construct
  source 1..69: mol_type = other DNA
atcgccaatgagaacaccgggacaaacgacctgtacattcggttccacggcgatatgagcgaacttgag

SEQ ID NO: 37653 - DNA, 147 bp, synthetic construct
  source 1..147: mol_type = other DNA
gccgacggcgacacactgaacctcagtgcactcaattccacccttagctttgagtccaacgctgagtggttcatggacgagtaccacgcttggcaagaatctgtggagagcgaggttaaacagaaggtcgagaaggagttcgacgat

SEQ ID NO: 37654 - DNA, 165 bp, synthetic construct
  source 1..165: mol_type = other DNA
ttcaacttccgggacgacgatatcttcatttaccactattacggcggatactacatgatgcatcacgccatcatgagcggacaggaaacagtatcgtcttcttctgattccggcggttttggaggtcttggtggaggttctggtggaggcggaggaggtgctttc

SEQ ID NO: 37655 - DNA, 66 bp, synthetic construct
  source 1..66: mol_type = other DNA
gtgaatgccatctatgctcaaggcgaaattggaacgcctaacatggacgggttcgaggcttgcatc

SEQ ID NO: 37656 - DNA, 273 bp, synthetic construct
  source 1..273: mol_type = other DNA
gtgctgaacatacagacagtgactaaccccgacaccgataccaacgacctgtacctgaaattcagcggcgatacctccgagctgaaagctaacgagaagcaggtttatgacatcctgcacaactttgccaacggcgacaccctgaacatgagcagccttaatacacggctgagcaatgagtccaacgccaagtggtttatggaccagtacaacacatggagggaccaggttagcaatgaagtcaaagggaaggtcgaagaagagttcaatgat

SEQ ID NO: 37657 - DNA, 180 bp, synthetic construct
  source 1..180: mol_type = other DNA
ctgcaggagattcccaccggttattacgatgacgacatcttcctgtatcattcctacggcggctattacatgatgcacgcggcctttatgagcggacagagcaccgtgaactctagctctagttccggtggctttggaggcttgggcggcggtagtggaggtggcggaggtggtgcattc

SEQ ID NO: 37658 - DNA, 63 bp, synthetic construct
  source 1..63: mol_type = other DNA
gtgaatgcactgtactcctctgggaacgttggaacccctaacatggacggattcgaagctgcc

SEQ ID NO: 37659 - DNA, 96 bp, synthetic construct
  source 1..96: mol_type = other DNA
gagaccgtgactgatgaggacacagagacaaaggacctcattatcaagttctccggcaacacctctggcctgaaaagcaacgaaaagcaggtctac

SEQ ID NO: 37660 - DNA, 156 bp, synthetic construct
  source 1..156: mol_type = other DNA
ctgcacagattttccaataatgacaggctcaacctgagcatcctgaactctcggctctctaccgagtccaatgccaagtggttcatgggccagtttaacgactggcaggacaacgtcagcgcgtccctggagttcagagctgatgaggagttcaat

SEQ ID NO: 37661 - DNA, 162 bp, synthetic construct
  source 1..162: mol_type = other DNA
tacggctacgacgaggatattttcatgtaccaccgttatggtggtagctatatgatgcactccgccattatgagcgggcagtctaccatgtctagttcctctgattccggcggttttggaggcctgggtggaggtagtggtggaggaggcggcggcgctttt

SEQ ID NO: 37662 - DNA, 60 bp, synthetic construct
  source 1..60: mol_type = other DNA
aacgccttgtactcctctggaaatgtcgggaccccaaacatggacggattcgaagctgca

SEQ ID NO: 37663 - DNA, 255 bp, synthetic construct
  source 1..255: mol_type = other DNA
accgtggccgacgaagacaccgagactaaggatctgttcatcaacttctccggcaatacgtcggagctgaagtctaacgagaagcaggtctacgacattttacatcgtttttccaacaacgaccggcttaacctgtcttccctcaactcgaggctttcgacggagagcaatgccaagtggtttatgggccagtacaacgattggcaggagaatgttagcgcgagcctggagttcaggacagacaaggagttcgac

SEQ ID NO: 37664 - DNA, 177 bp, synthetic construct
  source 1..177: mol_type = other DNA
caggagcaggacatcgacaaatacgatgctgacatcttcatgtatcaccgttatggggggtcttacatgatgcactccgccattatgagcggacagagcaccatgagtagctcatctgatagcggtggctttggtggcctgggtggaggatctggaggaggtggaggtggtgctttt

SEQ ID NO: 37665 - DNA, 36 bp, synthetic construct
  source 1..36: mol_type = other DNA
agcaacctgattggagccgtggctctctctgctatc

SEQ ID NO: 37666 - DNA, 63 bp, synthetic construct
  source 1..63: mol_type = other DNA
gggccaatcattggcatcctgtgccctagcgcccagatccagcccattgtgcaagtttacttc

SEQ ID NO: 37667 - DNA, 48 bp, synthetic construct
  source 1..48: mol_type = other DNA
ctgatgttgtatcaagtcaacaacccgtctgatattcctatcgttctg

SEQ ID NO: 37668 - DNA, 48 bp, synthetic construct
  source 1..48: mol_type = other DNA
atcaccgtgcctcataacctttatggcgacggcctcaatcctcacatg

SEQ ID NO: 37669 - DNA, 48 bp, synthetic construct
  source 1..48: mol_type = other DNA
cccgagtccatcattctcctcgactccgtgtctggcacctacatcgat

SEQ ID NO: 37670 - DNA, 36 bp, synthetic construct
  source 1..36: mol_type = other DNA
ctgctcgagaacgaaatcctggacaacgaatctgag

SEQ ID NO: 37671 - DNA, 30 bp, synthetic construct
  source 1..30: mol_type = other DNA
ttccacaacgtgaccctgatcaagatggag

SEQ ID NO: 37672 - DNA, 30 bp, synthetic construct
  source 1..30: mol_type = other DNA
gtggccggactgggacagacagcaatcgct

SEQ ID NO: 37673 - DNA, 60 bp, synthetic construct
  source 1..60: mol_type = other DNA
cggcccctgctcgaaagctacggggcttcaggacagacgttaaacgaggcaatcgcttat

SEQ ID NO: 37674 - DNA, 33 bp, synthetic construct
  source 1..33: mol_type = other DNA
agcatggtcggtggcgattacggagtggctaca

SEQ ID NO: 37675 - DNA, 60 bp, synthetic construct
  source 1..60: mol_type = other DNA
ctggccaccatcttcgcctacacgcctgagacagctcagctcgtgcctggcattactact

SEQ ID NO: 37676 - DNA, 129 bp, synthetic construct
  source 1..129: mol_type = other DNA
ggcaccggtggcatctaccctatcgagattatgaaccccattttccaagcattatacccctacctcccaatgacatatgctatcaacattgtccgggaaaccgtcctgggactgatttggagcaactac

SEQ ID NO: 37677 - DNA, 129 bp, synthetic construct
  source 1..129: mol_type = other DNA
ggcactggcggcatctatcccattgagatcatgaaccctatttttcaaatgctttacccattcctgcccatgacatacgccattaatatcattcgcgaagtgaccctcggcctgatctggagcaactac

SEQ ID NO: 37678 - DNA, 48 bp, synthetic construct
  source 1..48: mol_type = other DNA
gccattatcgacaataagaacagcatcggcactcctaacatgaaaggc

SEQ ID NO: 37679 - DNA, 150 bp, synthetic construct
  source 1..150: mol_type = other DNA
gccgagaacgagatcctcaacctgtctagcctcaacgacaagctgagttccaagaccaatgctaaaagttttcaagaagactacgggacatggctggatcacgtgaagaacgaatgcggtgacaaaaagtctcagtactttgacgatcgc

SEQ ID NO: 37680 - DNA, 42 bp, synthetic construct
  source 1..42: mol_type = other DNA
cacgtgtctaatatcagcgactacgacgatggtatcttcttg

SEQ ID NO: 37681 - DNA, 120 bp, synthetic construct
  source 1..120: mol_type = other DNA
ggttactatgtgtttaatcaagccttcaagacctctgagagcgccgccaatcctagctccgatagtggcggtttcggtggctttggtggaggaagtggaggcggaggtggtggagctttc

SEQ ID NO: 37682 - DNA, 45 bp, synthetic construct
  source 1..45: mol_type = other DNA
gccttccactggctggaggctaacgtggcaggagtccctaggtat

SEQ ID NO: 37683 - DNA, 69 bp, synthetic construct
  source 1..69: mol_type = other DNA
tataacgaggagacaagcgtcgcccacgtggtcaagaccgctctgtcctgcaaatatgtaaacgaagtg

SEQ ID NO: 37684 - DNA, 87 bp, synthetic construct
  source 1..87: mol_type = other DNA
ggctccagtgataagacctacgacatcgctacctctgccggcgccaacgtgatccggcacgagactaatattggaaagggaagtgca

SEQ ID NO: 37685 - DNA, 48 bp, synthetic construct
  source 1..48: mol_type = other DNA
ctgaacctcaccaaaaagcagatcgaagttatgatcgaacccattatt

SEQ ID NO: 37686 - DNA, 45 bp, synthetic construct
  source 1..45: mol_type = other DNA
ggcaaaactgacatcacaaagaccaagttcaagagggaagcaggg

SEQ ID NO: 37687 - DNA, 39 bp, synthetic construct
  source 1..39: mol_type = other DNA
accattgtggacagggccatcgaatacggacgaatcacc

SEQ ID NO: 37688 - DNA, 33 bp, synthetic construct
  source 1..33: mol_type = other DNA
ttcctcatcgggtctctgaacctggctgccatt

SEQ ID NO: 37689 - DNA, 75 bp, synthetic construct
  source 1..75: mol_type = other DNA
gaccccattgtcggactactgtgttccgccaacatggaggtctcgtcccaattgttccctctcgtgaaggacttc

SEQ ID NO: 37690 - DNA, 51 bp, synthetic construct
  source 1..51: mol_type = other DNA
cttttcctcttctccatcaacgaccctgcttacgtgcccgttgttaccgat

SEQ ID NO: 37691 - DNA, 30 bp, synthetic construct
  source 1..30: mol_type = other DNA
ttccacaacgtgaccgtcatccggatggag

SEQ ID NO: 37692 - DNA, 69 bp, synthetic construct
  source 1..69: mol_type = other DNA
gtgacaatcatattcgatggagccaacaatatcctgcacgggactggcaccatggacgcagattccttt

SEQ ID NO: 37693 - DNA, 30 bp, synthetic construct
  source 1..30: mol_type = other DNA
agccagatcaacgtgcacgccttctttgcc

SEQ ID NO: 37694 - DNA, 54 bp, synthetic construct
  source 1..54: mol_type = other DNA
ggcatcctctactccgtggaccagagtgacagttatctgctggtctgggactat

SEQ ID NO: 37695 - DNA, 30 bp, synthetic construct
  source 1..30: mol_type = other DNA
atcatgacaaccggcgagattggtcctatc

SEQ ID NO: 37696 - DNA, 54 bp, synthetic construct
  source 1..54: mol_type = other DNA
gactacgccttcggcttctttagcataaccggcatgggcaccaagatctactgg

SEQ ID NO: 37697 - DNA, 45 bp, synthetic construct
  source 1..45: mol_type = other DNA
tatatcgtggtcatcaagctgtacattcaaaatatcatctactac

SEQ ID NO: 37698 - DNA, 123 bp, synthetic construct
  source 1..123: mol_type = other DNA
ctgctgggaggcgtcaataccgccaacaccgccctgtccgacatggtcaacttatatccggctgaggctctcaagacaggcggcaccggctggacaagctttcctaagctggggactccattc

SEQ ID NO: 37699 - DNA, 108 bp, synthetic construct
  source 1..108: mol_type = other DNA
agcaacgtgtacttctacgataagctgggcaaaatcgccgtggacgtggtcggcggaaacatcgacaagatcattcctaccttcattacaatgccccttcttgcggaa

SEQ ID NO: 37700 - DNA, 84 bp, synthetic construct
  source 1..84: mol_type = other DNA
gccaagacagctaagggactcggcatctgcatggccctgttcggggtcgagaccattctccccgttgccccttggcccttcatc

SEQ ID NO: 37701 - DNA, 39 bp, synthetic construct
  source 1..39: mol_type = other DNA
gacgtgatgggcgacaacagctacgatttcgacatcagc

SEQ ID NO: 37702 - DNA, 33 bp, synthetic construct
  source 1..33: mol_type = other DNA
gtattgcaaggaggagaaatggagggacagagc

SEQ ID NO: 37703 - DNA, 30 bp, synthetic construct
  source 1..30: mol_type = other DNA
gaggtgaccatcagcggcataacagacaac

SEQ ID NO: 37704 - DNA, 48 bp, synthetic construct
  source 1..48: mol_type = other DNA
cccgctgcctggtggctacaagaccgatacggcttctatgaggatcag

SEQ ID NO: 37705 - DNA, 33 bp, synthetic construct
  source 1..33: mol_type = other DNA
aacttctttggcaagatcggactggctgctttc

SEQ ID NO: 37706 - DNA, 54 bp, synthetic construct
  source 1..54: mol_type = other DNA
aacgtggcacagatgctgggggctaccggcgagtccttcaatgcgacggtctcc

SEQ ID NO: 37707 - DNA, 30 bp, synthetic construct
  source 1..30: mol_type = other DNA
gtcatggtcggaggcctgatcttcctttct

SEQ ID NO: 37708 - DNA, 45 bp, synthetic construct
  source 1..45: mol_type = other DNA
gtctacatgttcggcaagaaccccgaggtttatgatgtaaccgta

SEQ ID NO: 37709 - DNA, 84 bp, synthetic construct
  source 1..84: mol_type = other DNA
atcaacgttcagtacatttcctacttgctggcatcaattctgaaacccattattgagaccatcattcaactcgcttacaaattg

SEQ ID NO: 37710 - DNA, 48 bp, synthetic construct
  source 1..48: mol_type = other DNA
gacaactgggataccattagcgccatcctgggcaagatcggagaatgg

SEQ ID NO: 37711 - DNA, 33 bp, synthetic construct
  source 1..33: mol_type = other DNA
ttcctcctgggctctgtccaattgagtgtcgtg

SEQ ID NO: 37712 - DNA, 57 bp, synthetic construct
  source 1..57: mol_type = other DNA
gaccagatcctcatgttctttaacacacctcacgagattttcaagctgagcaaggag

SEQ ID NO: 37713 - DNA, 48 bp, synthetic construct
  source 1..48: mol_type = other DNA
ctcaagctgttcaacgtggtcaatccctaccacgccgaagtaatctct

SEQ ID NO: 37714 - DNA, 129 bp, synthetic construct
  source 1..129: mol_type = other DNA
gggagcggcggaatctatcctgtggagatcatgtcaaagtttttcggggtcctgtttccctacctgccaatgacccacgctatctcttgtgttcgagaggcccaactgggcctcatttggtccaactac

SEQ ID NO: 37715 - DNA, 30 bp, synthetic construct
  source 1..30: mol_type = other DNA
ctgcacgacgtgaccatcattcggatggag

SEQ ID NO: 37716 - DNA, 54 bp, synthetic construct
  source 1..54: mol_type = other DNA
tccaacgaggatgacacagtgctccggctgaccaacactgacaccagcaacctg

SEQ ID NO: 37717 - DNA, 33 bp, synthetic construct
  source 1..33: mol_type = other DNA
gagcggaacggcgacattagcctgaagaccatc

SEQ ID NO: 37718 - DNA, 99 bp, synthetic construct
  source 1..99: mol_type = other DNA
gacactggcgacccttacgagttcaaggacttccgggaaacatggaagaagaacaccagcgaagccgtgcccgagtccctgatcgagcggtacttcatt

SEQ ID NO: 37719 - DNA, 120 bp, synthetic construct
  source 1..120: mol_type = other DNA
tacggcggcttcaacaatctggataccaccttcgctgctctcactccctctgattccggctcgggcggcattggctctgttggtggcggcggatttggaggtggaggaggtggcacattc

SEQ ID NO: 37720 - DNA, 174 bp, synthetic construct
  source 1..174: mol_type = other DNA
ttccatgcaagcggcggcgtgttttcccctgacaaagccgtgtacctgatcaacgccctcatgtatagcggcatggactactaccacattgctaaccctggcgacatcttcttctctcccgttatatcgttcctgacctccatcctctttcggatgggactggttgatcagctc

SEQ ID NO: 37721 - DNA, 159 bp, synthetic construct
  source 1..159: mol_type = other DNA
atcctcgactttggcggctccctgacgttcatctcgcaaagcagcaacaccattaacgtgcagtctttcactggtggtacagactacaaccccgacaagctcttctacatcaagaacttttccgagttcctgatttctgagaatagagcactggatagg

SEQ ID NO: 37722 - DNA, 291 bp, synthetic construct
  source 1..291: mol_type = other DNA
acctttatcgaacctatggagatcgagggttatagtaacagcctgatcgatgcatccgactacattatctcccatgaccctaactaccattctaagacttttgcctccaacaatcataattaccgacttgtcaaatgggatttgaatgtgaacgtctcctacatcattggagaacatgagaaccctgactcctgcaataccacgtatatcatcaattggaagaaatataacaacctggagaattatcataagatttatagcaacgataaataccatatataccggcacaac

SEQ ID NO: 37723 - DNA, 48 bp, synthetic construct
  source 1..48: mol_type = other DNA
aacgccatgatcgacaacaagaatttcggcgagcccaacattagaggc

SEQ ID NO: 37724 - DNA, 264 bp, synthetic construct
  source 1..264: mol_type = other DNA
aaggtcttcaacattaagaaggacaacgaggacctcctgatgaccttcaacgagggcgccgacaacctggactacggcgagaaaattgtttacaactgcctttccgggttcgcctccgatggcgtgctgaatctgtctgagctggacgacaaaatggacagcagggttaacagtctccgcttcgtgaatcagttcgatatgtggaaggaagctgtcgaaatggagtatctgaacgacgacatcaaggaccggtactttgatgac

SEQ ID NO: 37725 - DNA, 33 bp, synthetic construct
  source 1..33: mol_type = other DNA
gttccctctgttgatcgatacgatggcggagtc

SEQ ID NO: 37726 - DNA, 123 bp, synthetic construct
  source 1..123: mol_type = other DNA
gggtctaacacattctaccactgctacggcactgcatcaagcaacaccagtagctcctcttccggctccgactcctttgggagttttggcggaggttctggaggaggtggtggaggagctttc

SEQ ID NO: 37727 - DNA, 72 bp, synthetic construct
  source 1..72: mol_type = other DNA
aacgacatgactgacgcaatccaagagcaagtggtgtctggcgacacctccgatagcgaggtcgcggtgacc

SEQ ID NO: 37728 - DNA, 54 bp, synthetic construct
  source 1..54: mol_type = other DNA
attatcgctagttcctctggcacggcagctaagatgtcagacgatgacttctcg

SEQ ID NO: 37729 - DNA, 126 bp, synthetic construct
  source 1..126: mol_type = other DNA
accggcggcgtttacccaatcgacatcatgcacccttttttcaagacactgtacccctatctgcccatgacttacgccattaaaatgctgcgcgaggtcatgctcggcctgctctggagcaactac

SEQ ID NO: 37730 - DNA, 69 bp, synthetic construct
  source 1..69: mol_type = other DNA
aacgacatgaccgatgctatccaagaacaggtcgtcagtggcgacacaaccaactccgctgtcactgag

SEQ ID NO: 37731 - DNA, 54 bp, synthetic construct
  source 1..54: mol_type = other DNA
attatcgcgagctctagcggcacagccgctaagatgtccgaattctcggacgac

SEQ ID NO: 37732 - DNA, 129 bp, synthetic construct
  source 1..129: mol_type = other DNA
gggacaggcggcatctaccccattgagattatgcctaagctcttccaagatctgtacaactacctgcccatgacctatgccatcaagctagtcagagaggctcagcttggcgtcatctggagcaattac

SEQ ID NO: 37733 - DNA, 129 bp, synthetic construct
  source 1..129: mol_type = other DNA
ggcacaggcggcatttacccaatcgaaatcatgcctaagttgttccaagagttatactcttatctgcccatgacctatggaatcaagttggtccgagaggcccagctcgggatcatttggcccaactat

SEQ ID NO: 37734 - DNA, 168 bp, synthetic construct
  source 1..168: mol_type = other DNA
gatcacaaccttaatctcgggatctactgtagcgacgtctttgtgtacctgactaactccctgacctttgccggattcaagagcagtaacgtgtacctctatctgagccccctgatttgcttcctcacctccatcttcttccggctgggcttcctgtctgagacaagc

SEQ ID NO: 37735 - DNA, 171 bp, synthetic construct
  source 1..171: mol_type = other DNA
ggcagccacctctctttcctgactcaatcatccactttcgcctctggctctaagggcgaagtcatcgacaacgcttataccaccgacaccctgttctacttgcatgactttcccaacttcctcttttccgactatgtctcttttgacgacgtcattcctgtgctgaatggt

SEQ ID NO: 37736 - DNA, 288 bp, synthetic construct
  source 1..288: mol_type = other DNA
tccttccccgccacggtccactacaacgaggacttcaacaagaataaggttattgcggattacctcatcgactacgaccctgactacgcttccaaagaggtggccgtgtttcaccaacgatcgctgaactggttcctcaagactaatacggtagcaatcaccgatgaccagctggactatctggagtccagcaatattacttattacatatcggacgacaacttcaagctcgagaattacaccatgatccaccaagaaaacggcctgtaccttttcgagaggatcaat

SEQ ID NO: 37737 - DNA, 132 bp, synthetic construct
  source 1..132: mol_type = other DNA
ggaactggtggaatttaccccatcgagatcatggaccctatattcaaggcgctctatccctatctccccatgacctacgccatcaatatcgtccgggaagcgactctgggcctgctgtggagcaactacatg

SEQ ID NO: 37738 - DNA, 33 bp, synthetic construct
  source 1..33: mol_type = other DNA
aacttctttggcaagatcgggcttgctgcattc

SEQ ID NO: 37739 - DNA, 54 bp, synthetic construct
  source 1..54: mol_type = other DNA
gtagcccaaatattaggggctagcggagaatccttcaacgcaacgagtactgtc

SEQ ID NO: 37740 - DNA, 45 bp, synthetic construct
  source 1..45: mol_type = other DNA
gtgtatatgttcggcaagaaccccgaagtttatgacgttgctgtc

SEQ ID NO: 37741 - DNA, 33 bp, synthetic construct
  source 1..33: mol_type = other DNA
aactttttcggcaatatcggactggctgctttc

SEQ ID NO: 37742 - DNA, 54 bp, synthetic construct
  source 1..54: mol_type = other DNA
gacgtggcccagatcctgggcgcgtctggcgagagctttaactctactgtatcc

SEQ ID NO: 37743 - DNA, 45 bp, synthetic construct
  source 1..45: mol_type = other DNA
gtgtatatgttcggcaagaaccccgaagtctacgacgtggctgtg

SEQ ID NO: 37744 - DNA, 30 bp, synthetic construct
  source 1..30: mol_type = other DNA
ttccacaacgtgacccttatacgaatggag

SEQ ID NO: 37745 - DNA, 33 bp, synthetic construct
  source 1..33: mol_type = other DNA
tctagtttcatcggcgagagcgctgttgccgct

SEQ ID NO: 37746 - DNA, 60 bp, synthetic construct
  source 1..60: mol_type = other DNA
gacatcctgatcaatatcctcgagccacctgccgatgtgctgccctacattaaccagtac

SEQ ID NO: 37747 - DNA, 33 bp, synthetic construct
  source 1..33: mol_type = other DNA
atctacatgggcagtgtcggactagtgtccgta

SEQ ID NO: 37748 - DNA, 48 bp, synthetic construct
  source 1..48: mol_type = other DNA
ctggtgctctacaatctgcacaccagccccaacgtcgagacattccgg

SEQ ID NO: 37749 - DNA, 30 bp, synthetic construct
  source 1..30: mol_type = other DNA
ttccacggccctacgattatcaggatggag

SEQ ID NO: 37750 - DNA, 36 bp, synthetic construct
  source 1..36: mol_type = other DNA
ggcaacttctttggcaagctcggactgagcgctttc

SEQ ID NO: 37751 - DNA, 54 bp, synthetic construct
  source 1..54: mol_type = other DNA
caggtggccctcatgctgggcgcatcgaaagaaagtatcgctagcgtctctgac

SEQ ID NO: 37752 - DNA, 45 bp, synthetic construct
  source 1..45: mol_type = other DNA
gtctacgcatttggcaagaaccccgaggtctatgacaccgctatc

SEQ ID NO: 37753 - DNA, 177 bp, synthetic construct
  source 1..177: mol_type = other DNA
aactccaacacaaatttcctcggccgctcctaccgggacgtgtacctgtacctgtctctggccctgaggttcagtggcgtccagttcgccggatatgcttatattaacaatctccctccactcgtgccctttctaacgtcactgctgttccgcctcgggttcgttgatgtgtccgac

SEQ ID NO: 37754 - DNA, 138 bp, synthetic construct
  source 1..138: mol_type = other DNA
aaccactacgcctttgggtttttaagccagtcgggagaggtcgctggagaggtggcaaagcaatcgcaattatcgcatcccgtggtcaacgacctgggcttctacctcacccacgccgtgaactgcatctctaatctg

SEQ ID NO: 37755 - DNA, 33 bp, synthetic construct
  source 1..33: mol_type = other DNA
ttccttatcggttctcaacaactctccatcatt

SEQ ID NO: 37756 - DNA, 57 bp, synthetic construct
  source 1..57: mol_type = other DNA
gacaatatcctgatgatgtacaactgccccaaggagatcttcaacatcagcaaggag

SEQ ID NO: 37757 - DNA, 45 bp, synthetic construct
  source 1..45: mol_type = other DNA
ctggccatcttcaacgtctcaaacccctactacgctgaagtcgtt

SEQ ID NO: 37758 - DNA, 30 bp, synthetic construct
  source 1..30: mol_type = other DNA
ttccaccaagggaccgtgatcagaatggag

SEQ ID NO: 37759 - DNA, 240 bp, synthetic construct
  source 1..240: mol_type = other DNA
gaggagattaagaatatcctgaacgagcccgagacatcccctaaggaggagtctgtcaagaaagaggacgtcaagaagcaggacgagccaaaggagatccaaacacaggagaagccaaaacagcagacccaaaaggagcagaccccccaacaacaaactcaaacccaagagaaacctaaacaacaaacacagactcaggagaagccaaagcagcaaactcaaacacaagagaagccgaag

SEQ ID NO: 37760 - DNA, 177 bp, synthetic construct
  source 1..177: mol_type = other DNA
gacttctgctggtccgcctgcattagtaaccctgacattgccgtgtatctcctgagcggactgaaatacgcgggtctggactactacaacgtggtctatccatctgagctcttttacactccaatcctctctttcctgagctccctgttcttccggctgggctacgtggataagaac

SEQ ID NO: 37761 - DNA, 159 bp, synthetic construct
  source 1..159: mol_type = other DNA
atcctggattttggaggcagcctcacattcttcgagcaatctgttaaaaccttcaacggcacccagactccgtctaatattatcgacttcaacaacgacaaatcttattacatggaccactttactgatatcctgttcctggccgggtaccactctaac

SEQ ID NO: 37762 - DNA, 33 bp, synthetic construct
  source 1..33: mol_type = other DNA
atgttcctgggctcgactcaactcgccgtggtg

SEQ ID NO: 37763 - DNA, 57 bp, synthetic construct
  source 1..57: mol_type = other DNA
gacaacattctgatgttctttaatacacctgccgacatctttaatttgtctaaagag

SEQ ID NO: 37764 - DNA, 48 bp, synthetic construct
  source 1..48: mol_type = other DNA
ctgagcctcttcaacatctccaatccctaccacgtcaaggtggttacc

SEQ ID NO: 37765 - DNA, 36 bp, synthetic construct
  source 1..36: mol_type = other DNA
ggctccctgatcggctctagccaactacaagcccct

SEQ ID NO: 37766 - DNA, 48 bp, synthetic construct
  source 1..48: mol_type = other DNA
ctgctgcacctcctcaacgtaccatcgtacctgttcaactcctctaag

SEQ ID NO: 37767 - DNA, 51 bp, synthetic construct
  source 1..51: mol_type = other DNA
ctgtacaccctgttcaatatcacaacttatagtgaacaacagatcatctcc

SEQ ID NO: 37768 - DNA, 39 bp, synthetic construct
  source 1..39: mol_type = other DNA
gtggagcccctgaccggtggcgaaattatcgagcctaac

SEQ ID NO: 37769 - DNA, 30 bp, synthetic construct
  source 1..30: mol_type = other DNA
ttccacaacacaactttaattaggatggac

SEQ ID NO: 37770 - DNA, 39 bp, synthetic construct
  source 1..39: mol_type = other DNA
atcgagcccctgatgggcggcgatgtggttgaacctaac

SEQ ID NO: 37771 - DNA, 30 bp, synthetic construct
  source 1..30: mol_type = other DNA
ttccacggcgccaccatcattcggatggag

SEQ ID NO: 37772 - DNA, 39 bp, synthetic construct
  source 1..39: mol_type = other DNA
gtgggacccctgactggcggcgagatcatggaccctaac

SEQ ID NO: 37773 - DNA, 39 bp, synthetic construct
  source 1..39: mol_type = other DNA
gtggagcctctgaccggcggcgaaattatcgagccaaac

SEQ ID NO: 37774 - DNA, 243 bp, synthetic construct
  source 1..243: mol_type = other DNA
atgaactgcgacaagaacacaatcagcaataacaacttcgagtcaaaccaaaaagctgcctacgccctgaacgataacgagatcagcttcaacaagttcaagaacaacaagaacgggctgatccttaagaacaataataagatctactctaatacctttagcggcaatgacattgggatcaatagctccaataacaataagattggctctaacgacttctcaaataacgacaactccctcttt

SEQ ID NO: 37775 - DNA, 276 bp, synthetic construct
  source 1..276: mol_type = other DNA
acattcaagaacaacaagattgggatcgtccttaacgaatccaatactatttcatcaaacgtgttctacaacaattctctcgctctgaagtgcctgaagtctaaccgcatcctcaacaactccttctcttacaacgagaacggagccaggctggcgggatcaagtaacgaactattctctaatagcttttcctataacaccattggcattcacatgatccagagcaacaataacatcatcaagagcaacagctttactaacaactaccagaatagt

SEQ ID NO: 37776 - DNA, 87 bp, synthetic construct
  source 1..87: mol_type = other DNA
tccggcaagtactgcaacgtgtatatcaagggaaacgagaataaggccagcgggaacattttcaagaacaataagtaccatgctctg

SEQ ID NO: 37777 - DNA, 105 bp, synthetic construct
  source 1..105: mol_type = other DNA
aacaacattttcaaggacacaggcaacatcagcctgagggttaacggaaactccatcaagatcaagaacaacaagtttactgggaacaagaatacccagatccag

SEQ ID NO: 37778 - DNA, 30 bp, synthetic construct
  source 1..30: mol_type = other DNA
agcaagatcggcgtggaggctttcttcgcc

SEQ ID NO: 37779 - DNA, 51 bp, synthetic construct
  source 1..51: mol_type = other DNA
atcctgttctatgtcgataaagctgacaagtacatacttgtgttcgactac

SEQ ID NO: 37780 - DNA, 48 bp, synthetic construct
  source 1..48: mol_type = other DNA
gccttcagcctgttctccatcaccggcatgtctgacgagatcttttgg

SEQ ID NO: 37781 - DNA, 45 bp, synthetic construct
  source 1..45: mol_type = other DNA
tactgggccgagcccctgactggcggcgaaatcgttgatcctaac

SEQ ID NO: 37782 - DNA, 234 bp, synthetic construct
  source 1..234: mol_type = other DNA
gataactacctgaacgcctctctcaacgggagttttaaggtccgcaatcttacatctatctctctgagtctgaaggacatcatctacggcgagatcgaaaatatcacaagcatccttaacatcaacggtgtcaaccttacttatgtgatcaatggctccaacggttatgagggagtgttcaactcctccgactccctgattctgagcgacctcgacgtcggaatctacgatgta

SEQ ID NO: 37783 - DNA, 39 bp, synthetic construct
  source 1..39: mol_type = other DNA
gtcggccccctgaccggaggcgagattatcgaccctaac

SEQ ID NO: 37784 - DNA, 39 bp, synthetic construct
  source 1..39: mol_type = other DNA
atcaaccctctgatgggcggcgaatatgtttcccctgac

SEQ ID NO: 37785 - DNA, 30 bp, synthetic construct
  source 1..30: mol_type = other DNA
ttccacggcgccaccatcatccgaatggag

SEQ ID NO: 37786 - DNA, 36 bp, synthetic construct
  source 1..36: mol_type = other DNA
gaccccctgctgggaggaaactatatctccccgaat

SEQ ID NO: 37787 - DNA, 153 bp, synthetic construct
  source 1..153: mol_type = other DNA
gaaggaaccacgacctccaccaccttcaaagtcaccccacaaaccacgactattaccatcaaccatatccctagcgtgcagtacagcgaatcagtcaccatctctggcaagtacactgacaccaataacctgaacctgcggtacactccactt

SEQ ID NO: 37788 - DNA, 105 bp, synthetic construct
  source 1..105: mol_type = other DNA
accgctactacgtttcaagtaaagaccaaggacaccatcctgtccctcaaccccctgaagaatgctcagtactctgactacattaacatcaccggaagatacacc

SEQ ID NO: 37789 - DNA, 57 bp, synthetic construct
  source 1..57: mol_type = other DNA
agcaactctacctcattccaagtgacaagtattaataccacaatcacactgaaccct

SEQ ID NO: 37790 - DNA, 132 bp, synthetic construct
  source 1..132: mol_type = other DNA
cccgagaccttggtcggggacaacgtaaccatcactgggaagtacatcgatgccaacggcaaccctctgcgcaaaaccagcctgactctcgtcgtgaacgacgagaagactcacgttaggaccgacgataat

SEQ ID NO: 37791 - DNA, 48 bp, synthetic construct
  source 1..48: mol_type = other DNA
ctgcacctcctgaatattccgccggttatattcaacaccagcaagact

SEQ ID NO: 37792 - DNA, 42 bp, synthetic construct
  source 1..42: mol_type = other DNA
accatcttcaacatcaccgccgcaaaagaccagattatcatc

SEQ ID NO: 37793 - DNA, 51 bp, synthetic construct
  source 1..51: mol_type = other DNA
agtctgttgcacctcctcaacatctctgagtccatcttcgagacaagcaaa

SEQ ID NO: 37794 - DNA, 48 bp, synthetic construct
  source 1..48: mol_type = other DNA
tgcatcatgttcaacattaccggcgcctacgcgcaagaaattatctcc

SEQ ID NO: 37795 - DNA, 30 bp, synthetic construct
  source 1..30: mol_type = other DNA
agcaagatctccattgaggccttcttcgcc

SEQ ID NO: 37796 - DNA, 51 bp, synthetic construct
  source 1..51: mol_type = other DNA
atcctcttctacattaaccaagcccagacctacatcttggccttcgactac

SEQ ID NO: 37797 - DNA, 48 bp, synthetic construct
  source 1..48: mol_type = other DNA
gcctttagtttgtttagtatcaacggcatggaaaccttcgttttcgag

SEQ ID NO: 37798 - DNA, 45 bp, synthetic construct
  source 1..45: mol_type = other DNA
atcaccagcgcgcctaccggagtagataactcggtccgctttggc

SEQ ID NO: 37799 - DNA, 87 bp, synthetic construct
  source 1..87: mol_type = other DNA
gtgaacgacctgaacatagttgctagcgctatcaatgctttcctcgccatgggcgcacagattatcggctgcatggcagatccttgg

SEQ ID NO: 37800 - DNA, 48 bp, synthetic construct
  source 1..48: mol_type = other DNA
acccagggcttctcttccatcgggatgaaagtatctggctttggaatc

SEQ ID NO: 37801 - DNA, 105 bp, synthetic construct
  source 1..105: mol_type = other DNA
tacactacaatcctcggcggcgaggaccaggcactgatcaccctgatgaagacctctcccctgagcttttccggaattttcgaggcactttcggcgtcggatgcc

SEQ ID NO: 37802 - DNA, 57 bp, synthetic construct
  source 1..57: mol_type = other DNA
gacctgggcaccgccgattacctagtcggcgttctcaagggggccatacctgtcttc

SEQ ID NO: 37803 - DNA, 33 bp, synthetic construct
  source 1..33: mol_type = other DNA
gcttgggccgttaaccctgagatggggttcgtg

SEQ ID NO: 37804 - DNA, 33 bp, synthetic construct
  source 1..33: mol_type = other DNA
ttcctcattggtgccatcaacctgagcgcaatc

SEQ ID NO: 37805 - DNA, 57 bp, synthetic construct
  source 1..57: mol_type = other DNA
acactgattcctatgctgaccactagcaaggagatcatccctctggtggacgagttc

SEQ ID NO: 37806 - DNA, 54 bp, synthetic construct
  source 1..54: mol_type = other DNA
gcgctgaccttgtactctgtgcacggacaggccacgcctgccgtagtaaatgta

SEQ ID NO: 37807 - DNA, 165 bp, synthetic construct
  source 1..165: mol_type = other DNA
aacttcaatcaagccttggggatctactgctccgacgtcttcatctacctctctaatagccttgtatttgcgggttacgagtcttccattctgtatctgtacctgagccccgtgatctgtatcctgaccgccatcctgttcaagctcgggttcctgtctgaagcc

SEQ ID NO: 37808 - DNA, 180 bp, synthetic construct
  source 1..180: mol_type = other DNA
tatggctccaatttgtcattccttacacaaagctcgaccttcgctagcggaagcaaaggcgaagttattgataacgcctacacaaccgatactttcttttacctgcacgacttccctaacttcctctactctgactacgtctccttcgacaacgtgatccccgtgctgaatggcagtaat

SEQ ID NO: 37809 - DNA, 285 bp, synthetic construct
  source 1..285: mol_type = other DNA
tttacttccacggtccactacaacgaggacttcaacaagaacaaagtaatcgctgactatttgaccgaatacgacagtgattacatgtctaaggacgtggctgtctttaaacaacgcccttataactggtttctgcggatgtacaccatccccattactgacgacaggctggattacctggaatctagtaacatcacttactatataagcgacggcaatttcaacctgtccaactacaccatgatatatcaaaaggagggcctgtacctttacgagcgcatcaac

SEQ ID NO: 37810 - DNA, 33 bp, synthetic construct
  source 1..33: mol_type = other DNA
ctgatcggctccttgcaattaagtgcccttaac

SEQ ID NO: 37811 - DNA, 54 bp, synthetic construct
  source 1..54: mol_type = other DNA
cctctgctgcacatcctcaacattcccgagagcatcttcgacgcttccaagacc

SEQ ID NO: 37812 - DNA, 42 bp, synthetic construct
  source 1..42: mol_type = other DNA
gtgctgttcaacatcaccggcattaatgagcagatgatcgtg

SEQ ID NO: 37813 - DNA, 63 bp, synthetic construct
  source 1..63: mol_type = other DNA
gcgataacggatgagatcagtggcgctgtgctgggaggacgggacatcgacaccgatctgatt

SEQ ID NO: 37814 - DNA, 30 bp, synthetic construct
  source 1..30: mol_type = other DNA
ctgatcgtcggtggcgagattggatacggc

SEQ ID NO: 37815 - DNA, 33 bp, synthetic construct
  source 1..33: mol_type = other DNA
ttcctgataggcgccatcaacatcagcgcgatt

SEQ ID NO: 37816 - DNA, 60 bp, synthetic construct
  source 1..60: mol_type = other DNA
gatattatcattagcatcctctgccaaactacaaacatcatccccctggttaaggactac

SEQ ID NO: 37817 - DNA, 33 bp, synthetic construct
  source 1..33: mol_type = other DNA
gggagcctgatgggctcctctgggttcgccgcc

SEQ ID NO: 37818 - DNA, 54 bp, synthetic construct
  source 1..54: mol_type = other DNA
gccgtagtaatgtactccgttaagcaaggcgtggacgtagagctggtcgtaact

SEQ ID NO: 37819 - DNA, 42 bp, synthetic construct
  source 1..42: mol_type = other DNA
ttcgactggatgaatgagaacctgactggtctccctcggtac

SEQ ID NO: 37820 - DNA, 120 bp, synthetic construct
  source 1..120: mol_type = other DNA
aacctgaccgacattactgttgacctgcccgagacagcccagggcaatctcgaagtccggattaataactactccatctacaacgagaccatcactaacaagagcgtggctatccctatc

SEQ ID NO: 37821 - DNA, 204 bp, synthetic construct
  source 1..204: mol_type = other DNA
gtctacgtagactacgcccctatcaagattaagccaatctccaccaaagtctcttattgcggagaatacaaagtcaaggtgaccggcaagacagggaaggctatcaagaacgccgctgtgaccttcaagattaatggcaagaaggtcaagtccactaagacgaacagcaagggcatcgccaagctgaaattgccttctaactgg

SEQ ID NO: 37822 - DNA, 45 bp, synthetic construct
  source 1..45: mol_type = other DNA
atcacccaaatgccagccgacggcaacaatagcgcccgatttggc

SEQ ID NO: 37823 - DNA, 81 bp, synthetic construct
  source 1..81: mol_type = other DNA
acagacttgaacatagtcaacagtgctgtgaatgccttcctcgctatcgcgaagcagatcatcacctcgatgtcagatcct

SEQ ID NO: 37824 - DNA, 48 bp, synthetic construct
  source 1..48: mol_type = other DNA
gctgccgggttcaagaccattggcatggatgtctctggatttggaatc

SEQ ID NO: 37825 - DNA, 105 bp, synthetic construct
  source 1..105: mol_type = other DNA
ggatacacatccatcctgagcggtaacgaccagaccctcattaccctgatgaagactagccccctgagctttgagggcatcttcgaggccctctctgcttctgac

SEQ ID NO: 37826 - DNA, 57 bp, synthetic construct
  source 1..57: mol_type = other DNA
gaggtcgggaccgccgactacctggtgtccgtcctcaagggcacaatcccctattgg

SEQ ID NO: 37827 - DNA, 36 bp, synthetic construct
  source 1..36: mol_type = other DNA
gcttgggctgtctcacccgacatgggcttcgtgatc

SEQ ID NO: 37828 - DNA, 42 bp, synthetic construct
  source 1..42: mol_type = other DNA
acgagtacccctactggcgtggacaactccgttagatttggg

SEQ ID NO: 37829 - DNA, 87 bp, synthetic construct
  source 1..87: mol_type = other DNA
gtgaacgacctcaatatagtctcaacggcagttaacgccttcctgaacctgggctcccaagtcatagcctgcatggcagatccttgg

SEQ ID NO: 37830 - DNA, 48 bp, synthetic construct
  source 1..48: mol_type = other DNA
gctgccgggtttcagtcggtcggagccaccaacgtgacagggtttggg

SEQ ID NO: 37831 - DNA, 108 bp, synthetic construct
  source 1..108: mol_type = other DNA
gggtacacaaccattctcggcggagaggaccaggccctcatcaccctgatgaagactgctcccctgagcttcaacggcatcttcgaggcactgtccgcttctgatgct

SEQ ID NO: 37832 - DNA, 60 bp, synthetic construct
  source 1..60: mol_type = other DNA
ggcgaggtcgggaccgccgactacttggttggagtgctcagcaacacaatccctgctttc

SEQ ID NO: 37833 - DNA, 36 bp, synthetic construct
  source 1..36: mol_type = other DNA
ggatgggccgtttctaccggagacatgagcttcacc

SEQ ID NO: 37834 - DNA, 42 bp, synthetic construct
  source 1..42: mol_type = other DNA
agccagacgcccgctgacgccgacaattcagttaggttcggt

SEQ ID NO: 37835 - DNA, 87 bp, synthetic construct
  source 1..87: mol_type = other DNA
gcaaacgacattaacattatctccacaatcgtgaatgccttcctcaacctagcttcacaagtcatcacctgcatggctgatccatgg

SEQ ID NO: 37836 - DNA, 51 bp, synthetic construct
  source 1..51: mol_type = other DNA
gctgccgggttccaaagcgttggggtatcgaacgcaactgggtttggcatt

SEQ ID NO: 37837 - DNA, 108 bp, synthetic construct
  source 1..108: mol_type = other DNA
ggctacacttccatcctggggggcgaggatcaagccctgatcacactcatgaagacctcaccactgagcttcaacggaatcttcgaggctctctctgcttctgatgcc

SEQ ID NO: 37838 - DNA, 60 bp, synthetic construct
  source 1..60: mol_type = other DNA
ggagaagttggaacagccgactacttggtcgggattctgtccggttccatccctgctttc

SEQ ID NO: 37839 - DNA, 36 bp, synthetic construct
  source 1..36: mol_type = other DNA
ggttgggccgtctcaagcggtgacatgtctttcacc

SEQ ID NO: 37840 - DNA, 36 bp, synthetic construct
  source 1..36: mol_type = other DNA
ggcttcctgctcgactcgactcaattgtctgttctg

SEQ ID NO: 37841 - DNA, 60 bp, synthetic construct
  source 1..60: mol_type = other DNA
gacgaaatcctgatctccctcaatactccggccgagatcttcaacattagcaaggagtac

SEQ ID NO: 37842 - DNA, 48 bp, synthetic construct
  source 1..48: mol_type = other DNA
ctgattatcttcgacatcaccgaagcctattacatagagccagttacc

SEQ ID NO: 37843 - DNA, 57 bp, synthetic construct
  source 1..57: mol_type = other DNA
gaccccatcctgaagctgctgaacatccctgagaccctcttcgagattagcaagacc

SEQ ID NO: 37844 - DNA, 54 bp, synthetic construct
  source 1..54: mol_type = other DNA
atcttcaacctgctgaatataaatagcgcgcaacagcaagcatacatcactcac

SEQ ID NO: 37845 - DNA, 33 bp, synthetic construct
  source 1..33: mol_type = other DNA
ttcctcagcaactcaacacaactcagtgttctt

SEQ ID NO: 37846 - DNA, 57 bp, synthetic construct
  source 1..57: mol_type = other DNA
gacaacattctgaccatgctcaatacacctgctgagatcttcaacgatagcagaggg

SEQ ID NO: 37847 - DNA, 48 bp, synthetic construct
  source 1..48: mol_type = other DNA
ctgaagatcttcaacattgtcgatcctcaatactttgagcctgtaacc

SEQ ID NO: 37848 - DNA, 33 bp, synthetic construct
  source 1..33: mol_type = other DNA
agcaagatcaacattgacgccttctacgcaatg

SEQ ID NO: 37849 - DNA, 54 bp, synthetic construct
  source 1..54: mol_type = other DNA
ggcgtcctgttctactccgattctgagaagagctacgtgctcatctttgactac

SEQ ID NO: 37850 - DNA, 36 bp, synthetic construct
  source 1..36: mol_type = other DNA
agcctgctggtgtctatgtcgtctatggggccgatc

SEQ ID NO: 37851 - DNA, 48 bp, synthetic construct
  source 1..48: mol_type = other DNA
attttcagcctgtttgggattactgagatgcagaccgagatcttctgg

SEQ ID NO: 37852 - DNA, 36 bp, synthetic construct
  source 1..36: mol_type = other DNA
ttcatactcggttctgaatacctggccgtgatccag

SEQ ID NO: 37853 - DNA, 60 bp, synthetic construct
  source 1..60: mol_type = other DNA
gacgcctacaccgagatcctctgccaatccgccgccctccaatccctagtgaagcagtat

SEQ ID NO: 37854 - DNA, 30 bp, synthetic construct
  source 1..30: mol_type = other DNA
gctttggttggtgtcatcggactggaagcc

SEQ ID NO: 37855 - DNA, 48 bp, synthetic construct
  source 1..48: mol_type = other DNA
ctgtacctgtttaacgtccacgaccccgatcggattcctttcgtgatc

SEQ ID NO: 37856 - DNA, 36 bp, synthetic construct
  source 1..36: mol_type = other DNA
ggctttctttcatctagtactcaattgtcaatcctc

SEQ ID NO: 37857 - DNA, 60 bp, synthetic construct
  source 1..60: mol_type = other DNA
gatagcatcctgaatattctgaacacacctgaggaaatcttcaacgactccaagggtttc

SEQ ID NO: 37858 - DNA, 48 bp, synthetic construct
  source 1..48: mol_type = other DNA
attaatatcttctccatcgccgagccccagtactacgagcctatcata

SEQ ID NO: 37859 - DNA, 51 bp, synthetic construct
  source 1..51: mol_type = other DNA
ggcgagataaccgatcatattgtgctgaaccatagcgacgtcgtgatgcag

SEQ ID NO: 37860 - DNA, 54 bp, synthetic construct
  source 1..54: mol_type = other DNA
ggactgattatggggatcaccggccaggaggcccggttcctgaagtactcagac

SEQ ID NO: 37861 - DNA, 39 bp, synthetic construct
  source 1..39: mol_type = other DNA
acccagatgcccgagggcgacaactcggtccgcttcgga

SEQ ID NO: 37862 - DNA, 84 bp, synthetic construct
  source 1..84: mol_type = other DNA
accgatctgaacattgtatcttcggctgtgaacgccttcctgggcatcgggcagcaagtcatttcttgcatggcagatccttgg

SEQ ID NO: 37863 - DNA, 48 bp, synthetic construct
  source 1..48: mol_type = other DNA
gccagcggattccagtccatcggcatgacaaacgtgaccgggtttggc

SEQ ID NO: 37864 - DNA, 105 bp, synthetic construct
  source 1..105: mol_type = other DNA
tacaccgccattctgggaggcgaggatcaggccctcatccacctgatgcataccgcaccgctttcctttaacggcatcttcgaggcactggccgcatctgatgcg

SEQ ID NO: 37865 - DNA, 57 bp, synthetic construct
  source 1..57: mol_type = other DNA
gaggtcgggaccgctgactacctcgttggggtactcaaaggcgccatccccgcattc

SEQ ID NO: 37866 - DNA, 33 bp, synthetic construct
  source 1..33: mol_type = other DNA
gcttgggccgtttgccctgacatgaccttcacc

SEQ ID NO: 37867 - DNA, 30 bp, synthetic construct
  source 1..30: mol_type = other DNA
agccggatctccgacgatgccttctttgcc

SEQ ID NO: 37868 - DNA, 48 bp, synthetic construct
  source 1..48: mol_type = other DNA
gtgctgttctacgtcgatgaccagaagagctacgtgctcatcttcgac

SEQ ID NO: 37869 - DNA, 36 bp, synthetic construct
  source 1..36: mol_type = other DNA
ctcttagtcggaatgaacagcatgggacccatcctg

SEQ ID NO: 37870 - DNA, 51 bp, synthetic construct
  source 1..51: mol_type = other DNA
tatattttcggactgtttagcatcaccggcatgcagacccagattttctgg

SEQ ID NO: 37871 - DNA, 264 bp, synthetic construct
  source 1..264: mol_type = other DNA
cacgccaacgaggacggcggtgccatctgtagcaagaacagtgtctatatcaacaactgcaccttcaaggataactgcgccgacaactctggcggagcaatctacacatactacaccatcatcaacaatagcctctttgatagcaacaaggctgataatgatggcggagccattaatgctattaacaatgctcagctcaagaacgacatcttcacacggaacaccgccaagaacggcggtgctagctatgcctacgtgctgaac

SEQ ID NO: 37872 - DNA, 51 bp, synthetic construct
  source 1..51: mol_type = other DNA
acatttaaagacaacaaagctgataacggcggtgctatttatgcctcaagt

SEQ ID NO: 37873 - DNA, 135 bp, synthetic construct
  source 1..135: mol_type = other DNA
atcgccgataattgtggcggcgccatcttttcaaagaataagatcgaggctatcaactccgagttctataagaacaacgcatgcgaggacggcggcgcaatattttctgataatgcttacgtgtcaagatgtctg

SEQ ID NO: 37874 - DNA, 81 bp, synthetic construct
  source 1..81: mol_type = other DNA
gtcgaaaactccacattcaagaataactatgccgacgattacggtggtgctctctattctaaggaggactcctacattaag

SEQ ID NO: 37875 - DNA, 60 bp, synthetic construct
  source 1..60: mol_type = other DNA
aatgcctacgaggacggcggtgcaatcttctgcaacaacgccagcattgctcactgtctg

SEQ ID NO: 37876 - DNA, 30 bp, synthetic construct
  source 1..30: mol_type = other DNA
accttcaagaataactacgccgatgactac

SEQ ID NO: 37877 - DNA, 42 bp, synthetic construct
  source 1..42: mol_type = other DNA
tccagcgcacctgcggacgcggataactcggttcgcttcggc

SEQ ID NO: 37878 - DNA, 87 bp, synthetic construct
  source 1..87: mol_type = other DNA
gtcaacgacatgaacattgtgtccacattagtcaatgcattcctcaacatgggcacccagatcatcgcctgcatgagcgatccttgg

SEQ ID NO: 37879 - DNA, 48 bp, synthetic construct
  source 1..48: mol_type = other DNA
gccagcggattccagtccgtcggcgtgacaaacgtgaccgggtttggg

SEQ ID NO: 37880 - DNA, 108 bp, synthetic construct
  source 1..108: mol_type = other DNA
gggtacacaactatcctgggcggcgaggaccaggctctgattgccatcatgaagtctagcccgctgagttttaacggagtgtacaccgccttttcccaagcggatgca

SEQ ID NO: 37881 - DNA, 60 bp, synthetic construct
  source 1..60: mol_type = other DNA
ggcgaagtcggaaccgccgactacctagtcggggtcttggggaacagtatccctgcgttt

SEQ ID NO: 37882 - DNA, 36 bp, synthetic construct
  source 1..36: mol_type = other DNA
gcctgggctattagttctggggacatgtctttcacc

SEQ ID NO: 37883 - DNA, 42 bp, synthetic construct
  source 1..42: mol_type = other DNA
acccaggctcccgccaccgacaacccggccgcgaaattcgga

SEQ ID NO: 37884 - DNA, 84 bp, synthetic construct
  source 1..84: mol_type = other DNA
aatgacctgaacatcgtgtcctctgccgtgaacgctttcctcgccatcggcaacgaagtgattagctgcatggctgatccttgg

SEQ ID NO: 37885 - DNA, 45 bp, synthetic construct
  source 1..45: mol_type = other DNA
gcctccggattcaagtctatcgggatggatgtctccggattcggc

SEQ ID NO: 37886 - DNA, 105 bp, synthetic construct
  source 1..105: mol_type = other DNA
tacactaccatcctgtccggcgagaatcaggctctgatcacactcatgaagaccgctccgctgagcttcaatggcattttcgaggccctgtcggcgtctaacgca

SEQ ID NO: 37887 - DNA, 57 bp, synthetic construct
  source 1..57: mol_type = other DNA
aacgtcggaacggccgactacctggctatcgtcctcaagggcacaattccctattgg

SEQ ID NO: 37888 - DNA, 36 bp, synthetic construct
  source 1..36: mol_type = other DNA
gcttgggccatcagccccgacattggtttcgtggtc

SEQ ID NO: 37889 - DNA, 30 bp, synthetic construct
  source 1..30: mol_type = other DNA
tttataggtagccaacagctgtccatcatt

SEQ ID NO: 37890 - DNA, 60 bp, synthetic construct
  source 1..60: mol_type = other DNA
gacaacatcctgatcatgtacaattgtcctgccgaaatcttcaacattagcaaggaatat

SEQ ID NO: 37891 - DNA, 48 bp, synthetic construct
  source 1..48: mol_type = other DNA
ctgagcatcttcaacgtggtcaatccacacgacgcagaggttgtgacc

SEQ ID NO: 37892 - DNA, 42 bp, synthetic construct
  source 1..42: mol_type = other DNA
acgtctacccctgcgaatgccgacaattcagtccgttttggc

SEQ ID NO: 37893 - DNA, 81 bp, synthetic construct
  source 1..81: mol_type = other DNA
aacgacctcaatataattacctcctccgttaatgccttcctgaatctggcaacacagattatcgcatgcatggcggacccc

SEQ ID NO: 37894 - DNA, 48 bp, synthetic construct
  source 1..48: mol_type = other DNA
gccgctggcttcaagtccgttggcgttacaaacatcaccgggtttgga

SEQ ID NO: 37895 - DNA, 108 bp, synthetic construct
  source 1..108: mol_type = other DNA
ggctatactaccatcatgggcggacaggaccaggccctgatcgccatcatgaagtcttctccgctatcatttaacgggatttacactgcactagcgcaaagcgacgcc

SEQ ID NO: 37896 - DNA, 60 bp, synthetic construct
  source 1..60: mol_type = other DNA
ggagaggtcgggaccgccgactaccttgttggggtcctcaagtctacaatccctgctttt

SEQ ID NO: 37897 - DNA, 36 bp, synthetic construct
  source 1..36: mol_type = other DNA
gcctgggcgatctcatctggagacctgtctttcacc

SEQ ID NO: 37898 - DNA, 42 bp, synthetic construct
  source 1..42: mol_type = other DNA
agctctactcctgcaaacgccgacaacagcgttaggttcgga

SEQ ID NO: 37899 - DNA, 87 bp, synthetic construct
  source 1..87: mol_type = other DNA
tgcaacgacctcaacatcatttccaccgccatcaacgctttcctgaatctgggctctcaagttattagttgcatggcggacccttgg

SEQ ID NO: 37900 - DNA, 51 bp, synthetic construct
  source 1..51: mol_type = other DNA
gcagccgggtttcagagcgtcggtgtcaataacgtgaccggcttcgggatc

SEQ ID NO: 37901 - DNA, 108 bp, synthetic construct
  source 1..108: mol_type = other DNA
gggtacaccaccattctgggcggagaggaccaggccctcatcacactcatgaagacttctcccctgtccttcaacggcatcttcgaggccctctcccaatcggacgca

SEQ ID NO: 37902 - DNA, 60 bp, synthetic construct
  source 1..60: mol_type = other DNA
ggagaggtcgggaccgctgactacttagttggggtcctgagctccactataccggcttgg

SEQ ID NO: 37903 - DNA, 36 bp, synthetic construct
  source 1..36: mol_type = other DNA
gcttgggccgtctcctccggcgacatgaacttcacc

SEQ ID NO: 37904 - DNA, 42 bp, synthetic construct
  source 1..42: mol_type = other DNA
agtactaccccggctgacgctgacaactctgtccgcttcgga

SEQ ID NO: 37905 - DNA, 87 bp, synthetic construct
  source 1..87: mol_type = other DNA
agcaatgacctcaacatcattagtaccatcgtcaacgccttcctgaacctggggtcgcaggttataagctgcatggctgatccttgg

SEQ ID NO: 37906 - DNA, 48 bp, synthetic construct
  source 1..48: mol_type = other DNA
gccgctgggttccagagcgtcggagtgaccaacgtgacaggctttggg

SEQ ID NO: 37907 - DNA, 108 bp, synthetic construct
  source 1..108: mol_type = other DNA
gggtacacaactatcctgggaggcgaggaccaggcccttattaccttaatgcaaaccgcgcctctgagctttgacggcatatttcaagctctgagtcaaagcgacgct

SEQ ID NO: 37908 - DNA, 57 bp, synthetic construct
  source 1..57: mol_type = other DNA
gaggtcgggacagccgactacttggtcgggatactgagctccaccattcctgcttgg

SEQ ID NO: 37909 - DNA, 36 bp, synthetic construct
  source 1..36: mol_type = other DNA
gcttgggccgtttccaccggcgacatgagcttcacc

SEQ ID NO: 37910 - DNA, 30 bp, synthetic construct
  source 1..30: mol_type = other DNA
tggagcggaagatcccaggataccgacgac

SEQ ID NO: 37911 - DNA, 30 bp, synthetic construct
  source 1..30: mol_type = other DNA
atgatgagcggctctgacatggagatcagc

SEQ ID NO: 37912 - DNA, 30 bp, synthetic construct
  source 1..30: mol_type = other DNA
gagatcaagcccagctacctggtggacaac

SEQ ID NO: 37913 - DNA, 30 bp, synthetic construct
  source 1..30: mol_type = other DNA
ctggatgccggcatcctgagtagcgacttc

SEQ ID NO: 37914 - DNA, 45 bp, synthetic construct
  source 1..45: mol_type = other DNA
gagttcatcgccgacaacaccatgatggagatgtactctgctacc

SEQ ID NO: 37915 - DNA, 39 bp, synthetic construct
  source 1..39: mol_type = other DNA
tccctgcctgcgaattcagacaatgcgatcagattcggt

SEQ ID NO: 37916 - DNA, 87 bp, synthetic construct
  source 1..87: mol_type = other DNA
gtgaacgacgtgaacattatcacaaccgctatcaatgccttcctcgccctgggcggccaagtcatcgcttgcatggctgatccatgg

SEQ ID NO: 37917 - DNA, 51 bp, synthetic construct
  source 1..51: mol_type = other DNA
gccgctggctttcaatccgtcggtgccaccaatgtgaccggcttcgggatc

SEQ ID NO: 37918 - DNA, 108 bp, synthetic construct
  source 1..108: mol_type = other DNA
ggttacaccgggattctgggcggcgaggaccaggccctgatcactcttatgaagaccagccccctgtccttcaacgggatctttgaggctctcgccgcttctgatgcc

SEQ ID NO: 37919 - DNA, 60 bp, synthetic construct
  source 1..60: mol_type = other DNA
ggagaggtcgggaccgccgactacttggtcggcgtgctgtctggcaccatccccgcctgg

SEQ ID NO: 37920 - DNA, 36 bp, synthetic construct
  source 1..36: mol_type = other DNA
ggctgggctgtatcgtccggcgacatgaacttcacc

SEQ ID NO: 37921 - DNA, 39 bp, synthetic construct
  source 1..39: mol_type = other DNA
agcaacctgcccgagggcgacaatgctgttcgacttggc

SEQ ID NO: 37922 - DNA, 81 bp, synthetic construct
  source 1..81: mol_type = other DNA
aatgatacgaacatcattaccaccgccattaacgcctttctgaaactgggcacggaggtcattagcgtgattagtgaccca

SEQ ID NO: 37923 - DNA, 45 bp, synthetic construct
  source 1..45: mol_type = other DNA
gccagcgggttccagtctatcggcatggacgtgtccggctttggc

SEQ ID NO: 37924 - DNA, 99 bp, synthetic construct
  source 1..99: mol_type = other DNA
ctcaccatcctggacggcaacgacgccgccctgattgctctcatgaagaactctccactgagttttgaggccatcttcgaggctctgagcaactctgat

SEQ ID NO: 37925 - DNA, 60 bp, synthetic construct
  source 1..60: mol_type = other DNA
ggagagatcgggaccgcacaatatctagttagcgtgctgaagggcactatacctgcgttt

SEQ ID NO: 37926 - DNA, 39 bp, synthetic construct
  source 1..39: mol_type = other DNA
ctgtcctgggccatcagccccgacatgggctttgctgtt

SEQ ID NO: 37927 - DNA, 42 bp, synthetic construct
  source 1..42: mol_type = other DNA
agcaccacccctgccaacgccgacaactccgttaggttcggc

SEQ ID NO: 37928 - DNA, 87 bp, synthetic construct
  source 1..87: mol_type = other DNA
tgcaacgacctgaatatcatttccaccatcatcaacgccttcctggacctcgggtcgcagattataagttgcatggccgatccttgg

SEQ ID NO: 37929 - DNA, 48 bp, synthetic construct
  source 1..48: mol_type = other DNA
gccgctgggtttcagagcgtcggcgtgaccaacgtgacaggattcggg

SEQ ID NO: 37930 - DNA, 108 bp, synthetic construct
  source 1..108: mol_type = other DNA
ggctacactacaatcctcgggggggaggaccaagctctcatcaccctgatgaagacctctcccctgagtttcaacggcattttcgaggccctgagccaaagcgatgcc

SEQ ID NO: 37931 - DNA, 60 bp, synthetic construct
  source 1..60: mol_type = other DNA
ggagaggtcgggacagccgactacctggttggcgtgttaagcagcaccatccctgcttgg

SEQ ID NO: 37932 - DNA, 36 bp, synthetic construct
  source 1..36: mol_type = other DNA
gcctgggccgttagcactggcgacatgaacttcacc

SEQ ID NO: 37933 - DNA, 42 bp, synthetic construct
  source 1..42: mol_type = other DNA
agtagcacgccagctggtgctgacaacagcgtcaggttcggc

SEQ ID NO: 37934 - DNA, 84 bp, synthetic construct
  source 1..84: mol_type = other DNA
gtgaacgacgtgaacatcatctccaccgccgtcaatgctttcctgaagctctgcgtacaaatcattgcttgcatgtcggaccct

SEQ ID NO: 37935 - DNA, 48 bp, synthetic construct
  source 1..48: mol_type = other DNA
gccagcggcttcaagtccatcggagtgacaaacattaccggctttggg

SEQ ID NO: 37936 - DNA, 108 bp, synthetic construct
  source 1..108: mol_type = other DNA
gggtacaccaccatcctgggcggcgaggaccaggctctcattgccatcatgaagtccagccccctgagcttcaacggaatatataccgcattaagccaatcagatgca

SEQ ID NO: 37937 - DNA, 57 bp, synthetic construct
  source 1..57: mol_type = other DNA
gagatcggcaccgccgactacctcgtcggcgtgctctcttccactatcccggcgttc

SEQ ID NO: 37938 - DNA, 36 bp, synthetic construct
  source 1..36: mol_type = other DNA
gcctgggctatctcctctggcgacatgagcttcaca

SEQ ID NO: 37939 - DNA, 36 bp, synthetic construct
  source 1..36: mol_type = other DNA
ttcctgctgggagctggaaacttaagtgcaatccag

SEQ ID NO: 37940 - DNA, 60 bp, synthetic construct
  source 1..60: mol_type = other DNA
agcatcgccaagttcctatgtgcaagtcagtccgccctcattcccgacgtgaactcttac

SEQ ID NO: 37941 - DNA, 48 bp, synthetic construct
  source 1..48: mol_type = other DNA
ctgatgctttactctgtcaagaacccagctgacgtgcctgtggtactt

SEQ ID NO: 37942 - DNA, 33 bp, synthetic construct
  source 1..33: mol_type = other DNA
atcacgcaaataaatatccacgctagcttcgcc

SEQ ID NO: 37943 - DNA, 54 bp, synthetic construct
  source 1..54: mol_type = other DNA
gagatgctgtactccgtggattcagcaaactcttacctgctcgccatggactac

SEQ ID NO: 37944 - DNA, 30 bp, synthetic construct
  source 1..30: mol_type = other DNA
accatcacaatgggacccattggacctgtg

SEQ ID NO: 37945 - DNA, 51 bp, synthetic construct
  source 1..51: mol_type = other DNA
tacgcatttagcctgttctccatcaccggcatgcagactgagattttttgg

SEQ ID NO: 37946 - DNA, 54 bp, synthetic construct
  source 1..54: mol_type = other DNA
atcggcaacatgaatgtctacctgattgaatccaccaaggtgcccatgacacgg

SEQ ID NO: 37947 - DNA, 48 bp, synthetic construct
  source 1..48: mol_type = other DNA
atcagcgacaacgatgtgtccgccgctctggatgacgacgtcatggac

SEQ ID NO: 37948 - DNA, 42 bp, synthetic construct
  source 1..42: mol_type = other DNA
gactctttcgcgctgaccgatatgtccgcaaccgaggtcgag

SEQ ID NO: 37949 - DNA, 33 bp, synthetic construct
  source 1..33: mol_type = other DNA
atcactcaaattaatattcacgctagcttcgcc

SEQ ID NO: 37950 - DNA, 57 bp, synthetic construct
  source 1..57: mol_type = other DNA
caggagatcctgtattccgtgaacccagccgattcgtacctgctcgccatggattac

SEQ ID NO: 37951 - DNA, 33 bp, synthetic construct
  source 1..33: mol_type = other DNA
accgccacaatgggacctgttgtagttcctggc

SEQ ID NO: 37952 - DNA, 48 bp, synthetic construct
  source 1..48: mol_type = other DNA
gcctttagcctgttctcaattaccggaatgcagaccgagatcctttgg

SEQ ID NO: 37953 - DNA, 33 bp, synthetic construct
  source 1..33: mol_type = other DNA
gtgacccagattaacatccacgcttccttcgcc

SEQ ID NO: 37954 - DNA, 54 bp, synthetic construct
  source 1..54: mol_type = other DNA
gagatcatctactccattaacccggcggatagttatctgctggccatggattac

SEQ ID NO: 37955 - DNA, 30 bp, synthetic construct
  source 1..30: mol_type = other DNA
accgtcacaatgggacccgttggacctgtg

SEQ ID NO: 37956 - DNA, 45 bp, synthetic construct
  source 1..45: mol_type = other DNA
gccttcagcatcttttccattaagggcatgcagaccgagatcctg

SEQ ID NO: 37957 - DNA, 42 bp, synthetic construct
  source 1..42: mol_type = other DNA
agcagcatccctgctaacgagaataacgccattagattcggt

SEQ ID NO: 37958 - DNA, 84 bp, synthetic construct
  source 1..84: mol_type = other DNA
gtgaacgacctgaatatcatctccaccatcattaacgcctttttacaacttggagctcaggttattagttgcatggctgatccc

SEQ ID NO: 37959 - DNA, 48 bp, synthetic construct
  source 1..48: mol_type = other DNA
gccgctgggtttaagtcggttggtgctaccaatattactggctttggc

SEQ ID NO: 37960 - DNA, 102 bp, synthetic construct
  source 1..102: mol_type = other DNA
tacacagctatactgggcggacaggaccagaccctgatcaccctgatgaagaccgcacccctgagttttaaaggcgtgttcgaggccctttctgcaagcgac

SEQ ID NO: 37961 - DNA, 63 bp, synthetic construct
  source 1..63: mol_type = other DNA
gagatcgggaccgccgactacttggttggagtcctgtccggaagcatccctcaattctttcaa

SEQ ID NO: 37962 - DNA, 36 bp, synthetic construct
  source 1..36: mol_type = other DNA
ggctgggccgtctcaacgggcgacatgaacttcacc

SEQ ID NO: 37963 - DNA, 84 bp, synthetic construct
  source 1..84: mol_type = other DNA
gggttcttctttcccgagctcaaatacgagcaacctctgagcggtcaatttgcgggcaagcggagcgccctgagcaagatcaag

SEQ ID NO: 37964 - DNA, 162 bp, synthetic construct
  source 1..162: mol_type = other DNA
gtcttggacgccgacgtgcacggcatgagtatactggaggtagacataggagatatttcacacgacatgtctccactctccgatctgaacaagatggctaacgaggtcgtccggacaattatcgaccgcgccgtcgactatgggagagttaccatgatggat

SEQ ID NO: 37965 - DNA, 30 bp, synthetic construct
  source 1..30: mol_type = other DNA
ctgatgaacggccaggacatggatgtgaca

SEQ ID NO: 37966 - DNA, 30 bp, synthetic construct
  source 1..30: mol_type = other DNA
ctgattcggcccgaggacatcctgaataac

SEQ ID NO: 37967 - DNA, 30 bp, synthetic construct
  source 1..30: mol_type = other DNA
ttttccaacggcatcatcacatctgatttc

SEQ ID NO: 37968 - DNA, 48 bp, synthetic construct
  source 1..48: mol_type = other DNA
gacctgattaacaataacactcctgaggttatttcgttatatgcgact

SEQ ID NO: 37969 - DNA, 36 bp, synthetic construct
  source 1..36: mol_type = other DNA
tccaacctgattggagccgtggctcttagcgcaatc

SEQ ID NO: 37970 - DNA, 63 bp, synthetic construct
  source 1..63: mol_type = other DNA
ggcccaatcatcgccattctatgtcctagtgctcagattcagcctatcgtctttcaatatcaa

SEQ ID NO: 37971 - DNA, 51 bp, synthetic construct
  source 1..51: mol_type = other DNA
ctcatgctgtaccacgtcaattctcctagcgatatacctattgtgctcaac

SEQ ID NO: 37972 - DNA, 36 bp, synthetic construct
  source 1..36: mol_type = other DNA
ttcctgattggtgccggtaacctaagcgcgatccag

SEQ ID NO: 37973 - DNA, 57 bp, synthetic construct
  source 1..57: mol_type = other DNA
cccatcagccagatgctttgcgctagtcagcccgaactcgtccctgacgtgaacctg

SEQ ID NO: 37974 - DNA, 48 bp, synthetic construct
  source 1..48: mol_type = other DNA
ctgcttctctactccgtaaaggactccgcccaagtgccagtggttttg

SEQ ID NO: 37975 - DNA, 33 bp, synthetic construct
  source 1..33: mol_type = other DNA
ttcctcattggagccagcaatctggctcccatc

SEQ ID NO: 37976 - DNA, 60 bp, synthetic construct
  source 1..60: mol_type = other DNA
tccatagcgcagtttctttgcgcctcgcaaccggagctggtgtcagacgtcagtagctac

SEQ ID NO: 37977 - DNA, 48 bp, synthetic construct
  source 1..48: mol_type = other DNA
ctgttcttgtatagcgttaaaaacccagccgacgttcctgtcgttctc

SEQ ID NO: 37978 - DNA, 30 bp, synthetic construct
  source 1..30: mol_type = other DNA
gcctacaacgaggaggacaccgttgctact

SEQ ID NO: 37979 - DNA, 39 bp, synthetic construct
  source 1..39: mol_type = other DNA
gaggtagtgaaaaaagtctcttttgtcgacgagattatc

SEQ ID NO: 37980 - DNA, 90 bp, synthetic construct
  source 1..90: mol_type = other DNA
aacgatggctctagcgacaacacccagtccgaggccgtgaaggctggcgcccacgtcatcaaccacgagacaaataaggggaaaggagag

SEQ ID NO: 37981 - DNA, 96 bp, synthetic construct
  source 1..96: mol_type = other DNA
cacaacctcactagcaaaaaggtggaggccatgatcatccccattctggaaggcaagaccgacatcacaaagaccaagttcgctagggctcatgga

SEQ ID NO: 37982 - DNA, 69 bp, synthetic construct
  source 1..69: mol_type = other DNA
gacattggcgctatcgagcacgatatgagcccactggccgacctgaacctgatggccaatgaagtcgtg

SEQ ID NO: 37983 - DNA, 45 bp, synthetic construct
  source 1..45: mol_type = other DNA
attatgaaccgggccaataaatatggtagagtcataatgatcgac

SEQ ID NO: 37984 - DNA, 33 bp, synthetic construct
  source 1..33: mol_type = other DNA
aacaacatcgaggacatttacgctcttggttat

SEQ ID NO: 37985 - DNA, 36 bp, synthetic construct
  source 1..36: mol_type = other DNA
agcatgctcctgggccccatgaacctgtccgtgatc

SEQ ID NO: 37986 - DNA, 63 bp, synthetic construct
  source 1..63: mol_type = other DNA
cccgactccttactacaagcattgtgcaacagcaaccagcttaagcctctcgtttacgagtat

SEQ ID NO: 37987 - DNA, 30 bp, synthetic construct
  source 1..30: mol_type = other DNA
ggcgtcctggctaatgtcggactggttgct

SEQ ID NO: 37988 - DNA, 45 bp, synthetic construct
  source 1..45: mol_type = other DNA
tacctgttctctgtctcggacccgtctcacctgcctatcgtgatg

SEQ ID NO: 37989 - DNA, 81 bp, synthetic construct
  source 1..81: mol_type = other DNA
cccgcttacaatgaagaggacacagtggccaccgttgtcggggtcgtcaaggaggtctctttcgtcgatgagattatcgtg

SEQ ID NO: 37990 - DNA, 93 bp, synthetic construct
  source 1..93: mol_type = other DNA
aacgacgggagctccgacaatacagaatctgaggccatcaaagctggggcccgtgtaatcaatcacgagaccaataaggggaaaggagaagcc

SEQ ID NO: 37991 - DNA, 99 bp, synthetic construct
  source 1..99: mol_type = other DNA
atccacaacctgacaagcaaaaaggtcgaagctatgattatgcccatcctcgagggcaagactgacatcaccaagaccaagttcgctagggcacatggg

SEQ ID NO: 37992 - DNA, 138 bp, synthetic construct
  source 1..138: mol_type = other DNA
atctccatcatggaggttgacattggggcaatcgagcacgatatgagccctctggccgacctgaatctgatggctaacgaggtggtcaggaccatcatgaaccgcgccaacaaatacggacgagtcattatgatcgac

SEQ ID NO: 37993 - DNA, 33 bp, synthetic construct
  source 1..33: mol_type = other DNA
ttcctcattggtgctagcaacctggctccaatc

SEQ ID NO: 37994 - DNA, 60 bp, synthetic construct
  source 1..60: mol_type = other DNA
agtataacacagttcctctgctcttcccaacctgaactgatccctgaagtgacctcttat

SEQ ID NO: 37995 - DNA, 48 bp, synthetic construct
  source 1..48: mol_type = other DNA
ctgttcttgtactctgttaagaatcccgctgatgttcccgttgttctt

SEQ ID NO: 37996 - DNA, 33 bp, synthetic construct
  source 1..33: mol_type = other DNA
agcgccctgctcggccctatgaaccttagtgtg

SEQ ID NO: 37997 - DNA, 63 bp, synthetic construct
  source 1..63: mol_type = other DNA
cccgactcccttttgcaaatcttatgtaacagctgccagctccggcctttagttttcgaatat

SEQ ID NO: 37998 - DNA, 54 bp, synthetic construct
  source 1..54: mol_type = other DNA
atcctggcaatgttttccttaagcgactcatcgcaagtgcccgtcgtgatgaac

SEQ ID NO: 37999 - DNA, 42 bp, synthetic construct
  source 1..42: mol_type = other DNA
acacaggcacccgcctctgacaaccccgctactagattcggc

SEQ ID NO: 38000 - DNA, 84 bp, synthetic construct
  source 1..84: mol_type = other DNA
gccaacgacctcaacatagtcggctctgccgtgaatgcattcctggccatcgggcacgaggtcatctcctgcatggctgatcct

SEQ ID NO: 38001 - DNA, 45 bp, synthetic construct
  source 1..45: mol_type = other DNA
gctgccggatttaagaccatcggcatgaatgtatctggcttcggg

SEQ ID NO: 38002 - DNA, 108 bp, synthetic construct
  source 1..108: mol_type = other DNA
gggtacacaaccatcctggccggcgacaaccagactctgattaccctcatgaagacagctcctctgtccttcaatggcatcttcgaagccctgagcgcttctgatgcc

SEQ ID NO: 38003 - DNA, 60 bp, synthetic construct
  source 1..60: mol_type = other DNA
ggcaatgtcggaacagccaactacctagtcggaatcctcaaggggaccattccctattgg

SEQ ID NO: 38004 - DNA, 36 bp, synthetic construct
  source 1..36: mol_type = other DNA
gcttgggccgttagccccgacatgggcttcgtgatc

SEQ ID NO: 38005 - DNA, 36 bp, synthetic construct
  source 1..36: mol_type = other DNA
tccaacctgatcggagccgtcgctctaagcgcaatc

SEQ ID NO: 38006 - DNA, 63 bp, synthetic construct
  source 1..63: mol_type = other DNA
ggccctatcatcgctatcctatgtccgagtgctcagattcagccaattgtgttccaatacgtg

SEQ ID NO: 38007 - DNA, 48 bp, synthetic construct
  source 1..48: mol_type = other DNA
ctgatgctctaccacgtgaataaccctagcgatatccctattgtgctg

SEQ ID NO: 38008 - DNA, 36 bp, synthetic construct
  source 1..36: mol_type = other DNA
agcgccctgctcggccctatgaacctgtccgtgatc

SEQ ID NO: 38009 - DNA, 63 bp, synthetic construct
  source 1..63: mol_type = other DNA
cccgacgcctttctacaaatcttatgcaactcctcacaattaaagcctctcgtgttcgaatac

SEQ ID NO: 38010 - DNA, 30 bp, synthetic construct
  source 1..30: mol_type = other DNA
ggcgtgatggctaacgtcggtcttgttgcc

SEQ ID NO: 38011 - DNA, 48 bp, synthetic construct
  source 1..48: mol_type = other DNA
ctgaccatcttctcggtttctgacccctcgcatattccttccgtgatg

SEQ ID NO: 38012 - DNA, 36 bp, synthetic construct
  source 1..36: mol_type = other DNA
ttcctcctgggcgctggcaacctgtctgctatccag

SEQ ID NO: 38013 - DNA, 60 bp, synthetic construct
  source 1..60: mol_type = other DNA
cagtccatctcccaattcttatgtagcagtcagcctgccctgaccaacgacgttcgacag

SEQ ID NO: 38014 - DNA, 48 bp, synthetic construct
  source 1..48: mol_type = other DNA
ctctttctctactccgtcaaggaccccgctgatatccctgtggttctg

SEQ ID NO: 38015 - DNA, 36 bp, synthetic construct
  source 1..36: mol_type = other DNA
agcgccctgctgggtcccatgaacctctccgtgatc

SEQ ID NO: 38016 - DNA, 63 bp, synthetic construct
  source 1..63: mol_type = other DNA
cctgacagcttcctcgagatcctgtgcaactcttcccatctgcggcccctcgtatatgaatac

SEQ ID NO: 38017 - DNA, 33 bp, synthetic construct
  source 1..33: mol_type = other DNA
ctcggcgtcatcgctgatgttggcctagtggcc

SEQ ID NO: 38018 - DNA, 51 bp, synthetic construct
  source 1..51: mol_type = other DNA
ctctgtgttttctctgtctccgaccctagccacatcccttctgtgatggta

SEQ ID NO: 38019 - DNA, 36 bp, synthetic construct
  source 1..36: mol_type = other DNA
ttcctgattggcgctgggaacttggcccctatccag

SEQ ID NO: 38020 - DNA, 57 bp, synthetic construct
  source 1..57: mol_type = other DNA
aatattagccagctgctctgcatttcacaacccggcttggcccacgacgtgaacatg

SEQ ID NO: 38021 - DNA, 51 bp, synthetic construct
  source 1..51: mol_type = other DNA
ctgctgctctactccgtcaagaaccctagcgacatccctgtgctggtcgtg

SEQ ID NO: 38022 - DNA, 36 bp, synthetic construct
  source 1..36: mol_type = other DNA
ttcctcatcggagctagcaacctggccccaattcag

SEQ ID NO: 38023 - DNA, 60 bp, synthetic construct
  source 1..60: mol_type = other DNA
aacaatattagtcagctgctgtgcataagccaacccatgttggctagttctgtgaaggac

SEQ ID NO: 38024 - DNA, 48 bp, synthetic construct
  source 1..48: mol_type = other DNA
ctgctcctgtactctgtgaagaacccttccgatatcccggtagttctc

SEQ ID NO: 38025 - DNA, 171 bp, synthetic construct
  source 1..171: mol_type = other DNA
ggcaacagctttccctattggtatcttctcactaaccaactggacgaattgctcctgattaacaacgcacatctgggccaatatttcgccaattggaatattcatagcctgtctaagaccctggggtactcactcttcctcaagtttgtcaatgtgatcggactcccctac

SEQ ID NO: 38026 - DNA, 45 bp, synthetic construct
  source 1..45: mol_type = other DNA
agttccttcctgggctactgcgagtacaccatggcctactcaagc

SEQ ID NO: 38027 - DNA, 33 bp, synthetic construct
  source 1..33: mol_type = other DNA
ttcctcattggagccagcaacttggctccaatc

SEQ ID NO: 38028 - DNA, 57 bp, synthetic construct
  source 1..57: mol_type = other DNA
aacatcgctcaattcttgtgcataagtcaaccggaactggtccctgacgtgacaagc

SEQ ID NO: 38029 - DNA, 48 bp, synthetic construct
  source 1..48: mol_type = other DNA
ctgtttctgtatagcgtcaagaaccctgccgacgtgcctgttgttctg

SEQ ID NO: 38030 - DNA, 39 bp, synthetic construct
  source 1..39: mol_type = other DNA
tctatgttcatgggctccacctatctgagcgtggttcag

SEQ ID NO: 38031 - DNA, 60 bp, synthetic construct
  source 1..60: mol_type = other DNA
ggccaatatgtacaactcctttgccatagtgatcagctgaagcccttcgtgacccaatac

SEQ ID NO: 38032 - DNA, 45 bp, synthetic construct
  source 1..45: mol_type = other DNA
tttatcttcaacgtgtctaaccctagtgacatccctaccatcatg

SEQ ID NO: 38033 - DNA, 36 bp, synthetic construct
  source 1..36: mol_type = other DNA
tccgccctgctgggcccaatgaacctcagcgtgatc

SEQ ID NO: 38034 - DNA, 63 bp, synthetic construct
  source 1..63: mol_type = other DNA
cctgacggcttcctccaaattctatgcaacagcacccagcttaagcccctcgttttcgagtat

SEQ ID NO: 38035 - DNA, 30 bp, synthetic construct
  source 1..30: mol_type = other DNA
agcgtgatcgctaacgtcggcttggttgcc

SEQ ID NO: 38036 - DNA, 48 bp, synthetic construct
  source 1..48: mol_type = other DNA
ttggtcatcttttccgtatctgatcctagccacatcccctctgtcatg

SEQ ID NO: 38037 - DNA, 36 bp, synthetic construct
  source 1..36: mol_type = other DNA
tccgccctcctgggcccaatgaacctgagcgtgatc

SEQ ID NO: 38038 - DNA, 63 bp, synthetic construct
  source 1..63: mol_type = other DNA
cctgacgccttcctgcaaatattatgtaatagcacgcagcttaagcccttagtcttcgagtat

SEQ ID NO: 38039 - DNA, 30 bp, synthetic construct
  source 1..30: mol_type = other DNA
ggcgtgatggctaacgtcggcctcgttgcc

SEQ ID NO: 38040 - DNA, 48 bp, synthetic construct
  source 1..48: mol_type = other DNA
ctggtcattttttcggtgtccaaccctagtcacatcccctctgtgatg

SEQ ID NO: 38041 - DNA, 36 bp, synthetic construct
  source 1..36: mol_type = other DNA
tccgccctcctgggccctatgaacctgagcgtgatc

SEQ ID NO: 38042 - DNA, 60 bp, synthetic construct
  source 1..60: mol_type = other DNA
aacaatttcctcgagatcctatgttcctccacggaactgcggccccttgtctatgagtat

SEQ ID NO: 38043 - DNA, 30 bp, synthetic construct
  source 1..30: mol_type = other DNA
accgtcatggccaacgttgggctagttgcc

SEQ ID NO: 38044 - DNA, 48 bp, synthetic construct
  source 1..48: mol_type = other DNA
ctctgcgtttttagcctgtccaacccttctgacgtgcctgctgtcatg

SEQ ID NO: 38045 - DNA, 30 bp, synthetic construct
  source 1..30: mol_type = other DNA
ttcctgatcggagccagcaaccttgctcca

SEQ ID NO: 38046 - DNA, 57 bp, synthetic construct
  source 1..57: mol_type = other DNA
aacatcgctcaatttttgtgcatctcccaacccggtctcgcttctgacgttaagtca

SEQ ID NO: 38047 - DNA, 48 bp, synthetic construct
  source 1..48: mol_type = other DNA
ctgttcttatatagcgttaagaaccccgccgatgttcccgttgtactc

SEQ ID NO: 38048 - DNA, 33 bp, synthetic construct
  source 1..33: mol_type = other DNA
ttcctcctgggcgcagccaacctttctgctatc

SEQ ID NO: 38049 - DNA, 57 bp, synthetic construct
  source 1..57: mol_type = other DNA
tccattgcccaattcctatgcgccagccagcctgagctgattcctgacgtgacctct

SEQ ID NO: 38050 - DNA, 48 bp, synthetic construct
  source 1..48: mol_type = other DNA
ctgatgttgtactcggttaaggaccccgcatatgtgcctgtggtactt

SEQ ID NO: 38051 - DNA, 36 bp, synthetic construct
  source 1..36: mol_type = other DNA
ttcctgattggggccggcaacatatctgtcattcag

SEQ ID NO: 38052 - DNA, 57 bp, synthetic construct
  source 1..57: mol_type = other DNA
aacattgtacaattcttgtgcatcagccagcctgagctcatccctgatgtatcccag

SEQ ID NO: 38053 - DNA, 48 bp, synthetic construct
  source 1..48: mol_type = other DNA
ctgtacatgtattctgtgaagaatcctgcctacatccctgtggttctg

SEQ ID NO: 38054 - DNA, 42 bp, synthetic construct
  source 1..42: mol_type = other DNA
accacagccatcttcgacgggattaatagcggcaacatgaac

SEQ ID NO: 38055 - DNA, 39 bp, synthetic construct
  source 1..39: mol_type = other DNA
agcgccttcctcggccccatgaacctgtccgtgatccag

SEQ ID NO: 38056 - DNA, 63 bp, synthetic construct
  source 1..63: mol_type = other DNA
cccgacagctttttgcaaatcctatgcaacagcagccagctgagacctttggtctacgagtat

SEQ ID NO: 38057 - DNA, 48 bp, synthetic construct
  source 1..48: mol_type = other DNA
ctgtgtatcttctctgtttctaacccttccgatgtgcctaccgtactg

SEQ ID NO: 38058 - DNA, 177 bp, synthetic construct
  source 1..177: mol_type = other DNA
ccagcatacaacgaggaggatactgtggccaaggtcgtggaggtcgttagggaagtgtctttcgtcgatgaaattctggtggtcaacgacggctcctctgacaacacagaggccgaggctatcaacgccggcgctcgggttatcacccacgacatcaacaaggggaaaggagaagcc

SEQ ID NO: 38059 - DNA, 99 bp, synthetic construct
  source 1..99: mol_type = other DNA
atccacaatttaacatcgaaaaaggtcgaagccatgatcatgcccatcctcgagggcaagacagacattactaaaaccaagttcgctagagctagaggc

SEQ ID NO: 38060 - DNA, 117 bp, synthetic construct
  source 1..117: mol_type = other DNA
gggatctctattaccgaggtggatattggcgccatcgagcacgacatgagcccactcgaggatctgaatctgatggccaacgaggtagtccgcaccatcatgagccgggctaacaag

SEQ ID NO: 38061 - DNA, 33 bp, synthetic construct
  source 1..33: mol_type = other DNA
ttcctcatcggagccggcaacatgtctgctatt

SEQ ID NO: 38062 - DNA, 60 bp, synthetic construct
  source 1..60: mol_type = other DNA
cccagcgtggtccagattctgtgctccaccaagccagacctcatccctctggcatctcag

SEQ ID NO: 38063 - DNA, 48 bp, synthetic construct
  source 1..48: mol_type = other DNA
ctgacactctacaccgtgaagaaccccagcgacgttcctgttgttctg

SEQ ID NO: 38064 - DNA, 36 bp, synthetic construct
  source 1..36: mol_type = other DNA
tccgccatgctgggccccatgaacctcagcgtgatc

SEQ ID NO: 38065 - DNA, 63 bp, synthetic construct
  source 1..63: mol_type = other DNA
cccgactcctacctgcacatcctgtctaattcccccgacctgcggcctctcatcttcgaatac

SEQ ID NO: 38066 - DNA, 30 bp, synthetic construct
  source 1..30: mol_type = other DNA
ggcgtgttcaccaacgtcgggcttgttgcc

SEQ ID NO: 38067 - DNA, 48 bp, synthetic construct
  source 1..48: mol_type = other DNA
ttatatgtcttttccgtgtctaatccctcgcacatccctaccgtcatg

SEQ ID NO: 38068 - DNA, 36 bp, synthetic construct; identical to SEQ ID NO: 38033
  source 1..36: mol_type = other DNA

SEQ ID NO: 38069 - DNA, 63 bp, synthetic construct
  source 1..63: mol_type = other DNA
cccaacagcttcctggagatcctgtgcaactcatcccaactaaggcctctcgtttacgagtat

SEQ ID NO: 38070 - DNA, 30 bp, synthetic construct
  source 1..30: mol_type = other DNA
ctgggcgtcatggccaatgtcgggttggtt

SEQ ID NO: 38071 - DNA, 48 bp, synthetic construct
  source 1..48: mol_type = other DNA
ctctgcgtcttttccgtgtccgacccgtcccaaatccctagcgtgatg

SEQ ID NO: 38072 - DNA, 42 bp, synthetic construct
  source 1..42: mol_type = other DNA
gatcagtgccctgccggtgacgataacgcggtccgctttggc

SEQ ID NO: 38073 - DNA, 90 bp, synthetic construct
  source 1..90: mol_type = other DNA
tgcgccgatggcctgaacatcttctctaccatagttcaggcgttcctcgggatcgccggacaggttatatcatctatggctgatccatgg

SEQ ID NO: 38074 - DNA, 48 bp, synthetic construct
  source 1..48: mol_type = other DNA
aaggacggctttgcgtcaatcggcatgaatgttggtagttttggaatc

SEQ ID NO: 38075 - DNA, 105 bp, synthetic construct
  source 1..105: mol_type = other DNA
ggctacactaccatcctggacgggtcagaccaggctctgatcacactgatgaagaccagccccctgtcctttaacggaattttcgaggccttgagccagagtgat

SEQ ID NO: 38076 - DNA, 60 bp, synthetic construct
  source 1..60: mol_type = other DNA
ggcgaggtcggaaccgctgactacctggtcggcgtgctcaaggaagccatccccatgttc

SEQ ID NO: 38077 - DNA, 33 bp, synthetic construct
  source 1..33: mol_type = other DNA
gcttgggctatctctcccgacatgggattcgcc

SEQ ID NO: 38078 - DNA, 33 bp, synthetic construct
  source 1..33: mol_type = other DNA
ttcctcttgggcgcctcaaacctggctccaatc

SEQ ID NO: 38079 - DNA, 57 bp, synthetic construct
  source 1..57: mol_type = other DNA
aacatcgcccacttcctgtgcttgtctcaaccggaactggtctttgacgtgtcttcc

SEQ ID NO: 38080 - DNA, 48 bp, synthetic construct
  source 1..48: mol_type = other DNA
ctgttcctatattctgtgaagaaccctgctgatgtgcctgtggttctc

SEQ ID NO: 38081 - DNA, 36 bp, synthetic construct
  source 1..36: mol_type = other DNA
ttcctgctgggggccggcaacttgagtgccatccag

SEQ ID NO: 38082 - DNA, 60 bp, synthetic construct
  source 1..60: mol_type = other DNA
caccctatcgccgagttcctttgtagtagccagcctgcgctgattcccgatgtgacacag

SEQ ID NO: 38083 - DNA, 57 bp, synthetic construct
  source 1..57: mol_type = other DNA
cagagcctgctgatgctctactccgtcaaaaatcctgagcacgtgcctgtggttctt

SEQ ID NO: 38084 - DNA, 33 bp, synthetic construct
  source 1..33: mol_type = other DNA
agcgccaaacccaagaaataccagaaagtctca

SEQ ID NO: 38085 - DNA, 75 bp, synthetic construct
  source 1..75: mol_type = other DNA
cccgcttacaacgaggaagagaccgtcgccaaagtggtggaggtcatcaagaaagtctcgtttgtggacgaaatc

SEQ ID NO: 38086 - DNA, 90 bp, synthetic construct
  source 1..90: mol_type = other DNA
aacgatgggagctccgacaacaccgaaggcgaggccctgaaagctggcgccaaagtcatcaatcacgaggtcaacaagggcaaaggagag

SEQ ID NO: 38087 - DNA, 99 bp, synthetic construct
  source 1..99: mol_type = other DNA
atctacaacctcacttccaataaggtggaggccatgattcggcccatcctggagggcaagacagacatcaccaaaaccaagttcgctagggaatctggg

SEQ ID NO: 38088 - DNA, 90 bp, synthetic construct
  source 1..90: mol_type = other DNA
gggatcagcatcatggaggtggacattggcgcgatccaacacgacatgtccccactggccgatctgcacctcatggctaacgaagtcgtc

SEQ ID NO: 38089 - DNA, 48 bp, synthetic construct
  source 1..48: mol_type = other DNA
acaatcatcaaccgggccaataaatacgggcgcgtgaccatgattgac

SEQ ID NO: 38090 - DNA, 45 bp, synthetic construct
  source 1..45: mol_type = other DNA
agccggatcaccgacgcctacctgctcgaggatcacgacacagtg

SEQ ID NO: 38091 - DNA, 51 bp, synthetic construct
  source 1..51: mol_type = other DNA
atcatatttaacgcgcctaccgccgtggaacaaaagcttttgttctccgat

SEQ ID NO: 38092 - DNA, 42 bp, synthetic construct
  source 1..42: mol_type = other DNA
accaacgcaccggctggcgatgacaatgcggtccgattcggg

SEQ ID NO: 38093 - DNA, 84 bp, synthetic construct
  source 1..84: mol_type = other DNA
gtgaatgacctgaacattatttctagcgctatcaacgccttcctcgccatgggcacccagatcatctcctgcatggcagatccc

SEQ ID NO: 38094 - DNA, 45 bp, synthetic construct
  source 1..45: mol_type = other DNA
acccaggggttccagagcatcggcatgaacgtgtccggatttggc

SEQ ID NO: 38095 - DNA, 108 bp, synthetic construct
  source 1..108: mol_type = other DNA
ggctacaccaccatcctgggaggcgaggatcaggccctcatcacactgatgaagactagcccgctgtccttcaacggcatcttcgaggctcttgccgcttctgatgcc

SEQ ID NO: 38096 - DNA, 57 bp, synthetic construct
  source 1..57: mol_type = other DNA
gagctcgggaccgctgactacttggttggcgttctcgctggtgcaattcccatcttc

SEQ ID NO: 38097 - DNA, 33 bp, synthetic construct
  source 1..33: mol_type = other DNA
gcctgggctgtcaaccctgagatggggttcgtg

SEQ ID NO: 38098 - DNA, 42 bp, synthetic construct
  source 1..42: mol_type = other DNA
acaagcgcaccaaactcaaaggacaatgcagtccggttcggc

SEQ ID NO: 38099 - DNA, 87 bp, synthetic construct
  source 1..87: mol_type = other DNA
gtcaacgacctgaatatcgtgaacagcgccatcaacgcattcctcgccatggacagtcagattatctcttccatggctgatccttgg

SEQ ID NO: 38100 - DNA, 42 bp, synthetic construct
  source 1..42: mol_type = other DNA
cagggattccatagcataggaatgaacgtgtccggatttggc

SEQ ID NO: 38101 - DNA, 108 bp, synthetic construct
  source 1..108: mol_type = other DNA
ggctacaccactatcctcggtggcgaggataaagctctgattacactcatgcacaccagtcccctgtccttcaacggcatcttcgaggccctgtctgcctctgatgcc

SEQ ID NO: 38102 - DNA, 60 bp, synthetic construct
  source 1..60: mol_type = other DNA
ggcgacctcgggaccgctgattacctggtcggaatcctggccggctcaatcccggttttt

SEQ ID NO: 38103 - DNA, 33 bp, synthetic construct
  source 1..33: mol_type = other DNA
gcctgggctgtgaaccccgagatgggattcgtg

SEQ ID NO: 38104 - DNA, 33 bp, synthetic construct
  source 1..33: mol_type = other DNA
ttcctcattggagccagcaacttggctcctatc

SEQ ID NO: 38105 - DNA, 57 bp, synthetic construct
  source 1..57: mol_type = other DNA
aacatcgcccacttcctgtgcatgagccaacctgagctcaccgctgatgttagtagt

SEQ ID NO: 38106 - DNA, 48 bp, synthetic construct
  source 1..48: mol_type = other DNA
ctgttcctttatagcgttaagaacccagccgatgtccctgttgttctg

SEQ ID NO: 38107 - DNA, 72 bp, synthetic construct
  source 1..72: mol_type = other DNA
gcctataacgaggaacctaccgttggtcaggtggtctctactgcactgaaactgtcttatgtggacgaggta

SEQ ID NO: 38108 - DNA, 96 bp, synthetic construct
  source 1..96: mol_type = other DNA
ggtagcacagaccggacaaccgaggaagcagagaaggccggcgccaccgtgatcggccacatcaccaaccagggaaaggggtccgctatcaagaca

SEQ ID NO: 38109 - DNA, 93 bp, synthetic construct
  source 1..93: mol_type = other DNA
tctaatctgtccaccaacaagatcgataccatgatccggcccattctcgagggcgaagccgacatcacgaagactaaattcgcgcgagagagc

SEQ ID NO: 38110 - DNA, 114 bp, synthetic construct
  source 1..114: mol_type = other DNA
cacggcatcaaaatcgtcgaggtggacattggcgagatcaaccatgatatgagccctctggcaaacctgaacaagatggctaacgaagtggtcagaacaatcattgatagagcc

SEQ ID NO: 38111 - DNA, 180 bp, synthetic construct
  source 1..180: mol_type = other DNA
cagaacatcatccaccaaattggaatcgggtacccctacattgacatttatctctacctcatcgaggcgtcacggcttttcggcatcgaaacaggcggctacaagtacattaactttctgccaccattcatcccatttttgacgtcgctcctgttccggatcgggttcgtgtctgagttt

SEQ ID NO: 38112 - DNA, 159 bp, synthetic construct
  source 1..159: mol_type = other DNA
aataagatccccctgggcttcatcaaccaggctcaggaaatatcgtcgcgagccagcctgaagttcgccacttctgagataaacctgatgggcaacgacctgttcttctacattaagattatcgaaaagatcattagcttccctctctggaagattgaa

SEQ ID NO: 38113 - DNA, 300 bp, synthetic construct
  source 1..300: mol_type = other DNA
tacattaaccacctgaaatatgataagaacgctgccgacgagaagctggccgtgaattacctcaaggacaaggaaggcgtgatcatgtccgatcgcggtcctgtttacaccttctacctgaagaaagaagtcaagcttattcgggatatggatcagaagaacctggataaggagctgctggacaaccacgcggaatatgttaccaccttccatcaagtcaatctcacccactatagccccatcaaggagttcggcaacatcacaatctacaagaagaataacgagaacgaatttgtacag

SEQ ID NO: 38114 - DNA, 39 bp, synthetic construct
  source 1..39: mol_type = other DNA
agcaacctgatcggcgctatggccctctccgctattcag

SEQ ID NO: 38115 - DNA, 60 bp, synthetic construct
  source 1..60: mol_type = other DNA
cctcagattgtgcccatcctctgctcctccccgcaagtccagccccttgtctaccaatac

SEQ ID NO: 38116 - DNA, 51 bp, synthetic construct
  source 1..51: mol_type = other DNA
ctgactttcctgtttcacgttaagaaccccgcggacatgcctatcgtcctc

SEQ ID NO: 38117 - DNA, 30 bp, synthetic construct
  source 1..30: mol_type = other DNA
ctgttcatgggcagcacctttctctctgtg

SEQ ID NO: 38118 - DNA, 54 bp, synthetic construct
  source 1..54: mol_type = other DNA
atgataatccaattcttgtgtcattcccccaacatgaagcagtactttgctcag

SEQ ID NO: 38119 - DNA, 45 bp, synthetic construct
  source 1..45: mol_type = other DNA
ttcatctttaacatgcacaatcccgagcacgtgcctattgctatg

SEQ ID NO: 38120 - DNA, 33 bp, synthetic construct
  source 1..33: mol_type = other DNA
tttgtgctgaccagctctgccctctccatcttc

SEQ ID NO: 38121 - DNA, 57 bp, synthetic construct
  source 1..57: mol_type = other DNA
ggccccgtgctgaacaacttcctcaccgccgacctgatccagccgacccagacgttt

SEQ ID NO: 38122 - DNA, 57 bp, synthetic construct
  source 1..57: mol_type = other DNA
gagatcattctcacactttttagtgttaaggaccctttgcaagccgaatacatcagc

SEQ ID NO: 38123 - DNA, 33 bp, synthetic construct
  source 1..33: mol_type = other DNA
ttcattttgggttcaaactacttggctgttgtg

SEQ ID NO: 38124 - DNA, 60 bp, synthetic construct
  source 1..60: mol_type = other DNA
gactttttcacacaaatgctttgtcaagcacctgagctgcagcctttagtaaaccagtac

SEQ ID NO: 38125 - DNA, 51 bp, synthetic construct
  source 1..51: mol_type = other DNA
agcctgttcatatttaatgtaaacgaccctaacactattcctgtggtgctg

SEQ ID NO: 38126 - DNA, 30 bp, synthetic construct
  source 1..30: mol_type = other DNA
agcaagatcaacgccgacgctttctacgcc

SEQ ID NO: 38127 - DNA, 45 bp, synthetic construct
  source 1..45: mol_type = other DNA
ctcttctactccgtctctgagaagtcctacgtcctgatcttcgac

SEQ ID NO: 38128 - DNA, 30 bp, synthetic construct
  source 1..30: mol_type = other DNA
ttgcttatttcaatgaacaccattggaccc

SEQ ID NO: 38129 - DNA, 45 bp, synthetic construct
  source 1..45: mol_type = other DNA
atctttggcctgttcgggatcacagagatgcagaccgagattttc

SEQ ID NO: 38130 - DNA, 36 bp, synthetic construct
  source 1..36: mol_type = other DNA
tccgagaaacccaagaagtaccaggtatcgagcaaa

SEQ ID NO: 38131 - DNA, 75 bp, synthetic construct
  source 1..75: mol_type = other DNA
gcctacaacgaagaggataccgtggccaaagtggtggaggtcgtcaagaaggctagcttcgtggacgagatcatc

SEQ ID NO: 38132 - DNA, 90 bp, synthetic construct
  source 1..90: mol_type = other DNA
gatggcagtagcgataacaccatcgaggaagccgagaacgctggggccatcgtgatttcccacgagacaaataagggaaagggagaggcc

SEQ ID NO: 38133 - DNA, 96 bp, synthetic construct
  source 1..96: mol_type = other DNA
tacaacctcactagcaaaaaggtggaggctatgatccggcccattctggagggcaaggccgagatcacaaagaccaagttcgctcgggagtcaggg

SEQ ID NO: 38134 - DNA, 138 bp, synthetic construct
  source 1..138: mol_type = other DNA
atttccatcctggaggtcgacatcggcgcaatccagcacgacatgagcccactggccgacctgaatctgatggctaacgaggtcgttcggacgatcattaaccgggccaacaaatatggtcgcgtgaccatgatcgac

SEQ ID NO: 38135 - DNA, 105 bp, synthetic construct
  source 1..105: mol_type = other DNA
ttccggtacctcgatgaactcatacatagtggcgtcaaggagatcgtcctcgactctgacattgtgctggaccccgacgaggagtcccagtacctgaacggtata

SEQ ID NO: 38136 - DNA, 150 bp, synthetic construct
  source 1..150: mol_type = other DNA
gggaacgggcacgccatcgacgctcagggcctcacccggatcttctactgcaccggaaagaatatcataattaagaacatcatcctgaagaacggcttcaccaaggagaatggcggcgccatccacaacaacgagggcgagctgactatc

SEQ ID NO: 38137 - DNA, 30 bp, synthetic construct
  source 1..30: mol_type = other DNA
tccagcgagtaccggggctattctgttaga

SEQ ID NO: 38138 - DNA, 111 bp, synthetic construct
  source 1..111: mol_type = other DNA
gcaaggttccttgataagagcgggaacaatctgtctggcgtggtggacattgttatcggaggaataaaacatgaggtgctagtcagggatggcgtcggctgcgtggatgtc

SEQ ID NO: 38139 - DNA, 168 bp, synthetic construct
  source 1..168: mol_type = other DNA
gtggagatctgcaacctggacaccggcgaggtcaagaaccagactgtgtctgtgctcgagcggatcagcggcaatgaggacctgaccgggtactatggctccccattagtgtataaagtccgggtgctggacgaccacggcgatattgccctcaaggttcctgtaaca

SEQ ID NO: 38140 - DNA, 45 bp, synthetic construct
  source 1..45: mol_type = other DNA
gacctgatcgtctattatggatctcaagttgtttacaaggttcgg

SEQ ID NO: 38141 - DNA, 48 bp, synthetic construct
  source 1..48: mol_type = other DNA
gccttcgaaaccggtggcgagacatacagccggctgactgacgatgag

SEQ ID NO: 38142 - DNA, 60 bp, synthetic construct
  source 1..60: mol_type = other DNA
gtctatgaaatatccagcgaatatcggggctactccgtccggaatgtcaatctagtcact

SEQ ID NO: 38143 - DNA, 156 bp, synthetic construct
  source 1..156: mol_type = other DNA
ttcaacgcccacttcctcgataagtctggcaacaacctgagcggcaaagctctgatccggatcggcgacaattattacgacgtgctggtatccgaggggataggccgcgtcaacgttctgctcaaccccggctcctacttagtccaagtgtctaat

SEQ ID NO: 38144 - DNA, 39 bp, synthetic construct
  source 1..39: mol_type = other DNA
ttctttatacccgactccacgctgctcgctgccatcaac

SEQ ID NO: 38145 - DNA, 60 bp, synthetic construct
  source 1..60: mol_type = other DNA
gacgagctgatcatggctctctatggaccagcacaaaccatttatatcgtgttcctcgtg

SEQ ID NO: 38146 - DNA, 48 bp, synthetic construct
  source 1..48: mol_type = other DNA
gtctttatcttcaccattgacgatccaagcgagctcgaggttatctgc

SEQ ID NO: 38147 - DNA, 78 bp, synthetic construct
  source 1..78: mol_type = other DNA
gcctacaacgaggaggacaccgtggctcaggtggttgaagtggtcaagaaagtatccttcgtggatgagatcatcgtg

SEQ ID NO: 38148 - DNA, 93 bp, synthetic construct
  source 1..93: mol_type = other DNA
aatgacggatcttccgataacactgtagaggaggccgagaaggcaggcgctatcgtgatcactcacgagaccaacaagggaaagggagaagcc

SEQ ID NO: 38149 - DNA, 99 bp, synthetic construct
  source 1..99: mol_type = other DNA
tacaacctgactagcaagaaggtggagtccatgatcaggcccatcctcgagggcaaggccgaaattaccaagaccaagttcgctcgggaatctggtagg

SEQ ID NO: 38150 - DNA, 99 bp, synthetic construct
  source 1..99: mol_type = other DNA
ctcgaggtcgacattggcgcaatccagcacgatatgagccccctggccgaccttaacctgatggccaacgaagtagttcggacaatcatcaatagagcc

SEQ ID NO: 38151 - DNA, 33 bp, synthetic construct
  source 1..33: mol_type = other DNA
atgttcatgggctccatgtacctgtctgtggtc

SEQ ID NO: 38152 - DNA, 60 bp, synthetic construct
  source 1..60: mol_type = other DNA
ggccaatacgtgcaattattatgccacaccgaccagctgaagcccttcgtgacacaatac

SEQ ID NO: 38153 - DNA, 42 bp, synthetic construct
  source 1..42: mol_type = other DNA
atcttcaacgttaacaatcccgctgacattcctactgtgatg

SEQ ID NO: 38154 - DNA, 36 bp, synthetic construct
  source 1..36: mol_type = other DNA
atgttcatgggctccatgtacctgagcgtggtccag

SEQ ID NO: 38155 - DNA, 60 bp, synthetic construct
  source 1..60: mol_type = other DNA
ggcccttatgttcaactcctttgccacaccgaccagctcaagcccttcgtgacacagtac

SEQ ID NO: 38156 - DNA, 45 bp, synthetic construct
  source 1..45: mol_type = other DNA
tttatcttcaacgtgaacaatcctgccgacatccctaccatcata

SEQ ID NO: 38157 - DNA, 108 bp, synthetic construct
  source 1..108: mol_type = other DNA
ctgaacgtcggctcctacacggttagggtcatcttcgccggaaacgacaattataacggcaacgtgaacgagtctgctttcgaagtgacaaggagcggcactaacttc

SEQ ID NO: 38158 - DNA, 36 bp, synthetic construct
  source 1..36: mol_type = other DNA
atgttcatgggcagcgtgtaccttagcgtcgtacag

SEQ ID NO: 38159 - DNA, 63 bp, synthetic construct
  source 1..63: mol_type = other DNA
aatgaatatgtgaatctgctctgccactcgccccaattcaagcaattcgtgacacagtattac

SEQ ID NO: 38160 - DNA, 45 bp, synthetic construct
  source 1..45: mol_type = other DNA
ttcatgtttaacgtgaataaccctgccgacatcccaatgatcatg

SEQ ID NO: 38161 - DNA, 96 bp, synthetic construct
  source 1..96: mol_type = other DNA
aagcccctgctgaactttttcttccctgagattagctttgaacaacctctgtcgggccaattcgcggctcgcaaggagatcctgaagaagatccat

SEQ ID NO: 38162 - DNA, 168 bp, synthetic construct
  source 1..168: mol_type = other DNA
atcgtgattgacgccgacgtgctcgggatctccatcatggaggtcgacatcggagctatcgaacacgatatgagccccctggccgacctgaacaacatggctaacgaggtcgttcgaacgattatgaacagggccaataaatacggacgcgtgaccatgattgacgac

SEQ ID NO: 38163 - DNA, 240 bp, synthetic construct
  source 1..240: mol_type = other DNA
aagggctccgacaagtccgttagcattgtcatcccggcatacaacgaggaagctaccgtcgccaaggtggtatcggtagctaggaagctgagctacgtgaccgaagtgatcgtggtggatgacgggtccactgaccggaccgtcgaggaggccgagtcagctggagccaccgttataagccacatcatgaacgaggggaagggctccgccattaagactgggttcaagaactctcatggc

SEQ ID NO: 38164 - DNA, 99 bp, synthetic construct
  source 1..99: mol_type = other DNA
agcaacttcacttccgagaagatcgacaagatcattcggcccatcctggaggatcagacagacattaccaagaccaaattcgcaagggaatctggtcgc

SEQ ID NO: 38165 - DNA, 120 bp, synthetic construct
  source 1..120: mol_type = other DNA
gtgcacgggatcaaaatcctcgaagtcgacattggcgacatcagccacgacatgagcccactggccgacctgaataagatggccaacgaggtagttaggactattatcgatagagctgtc

SEQ ID NO: 38166 - DNA, 48 bp, synthetic construct
  source 1..48: mol_type = other DNA
gctagcattgtgaatatcggcatacagaacaccgacttcgcctacatc

SEQ ID NO: 38167 - DNA, 36 bp, synthetic construct
  source 1..36: mol_type = other DNA
tacgacgccctcgctggcaacatcctgactggagat

SEQ ID NO: 38168 - DNA, 42 bp, synthetic construct
  source 1..42: mol_type = other DNA
tctcagacaccggctaactccaataacagcattagatttggg

SEQ ID NO: 38169 - DNA, 81 bp, synthetic construct
  source 1..81: mol_type = other DNA
aacgatcttaacatcttctccaccattaccaacgcctttataaaactgagctcccaagttataagcagcatggcagacccc

SEQ ID NO: 38170 - DNA, 45 bp, synthetic construct
  source 1..45: mol_type = other DNA
gccgggttcgagagcatcggcatcaccaacatctccgcttttggg

SEQ ID NO: 38171 - DNA, 102 bp, synthetic construct
  source 1..102: mol_type = other DNA
tacacagcaattctcaacggctcagaccaggcgttaatcaccctgatgaagacttccccgctgagcttcgacggcatttttcaagcgctatctgcctctaac

SEQ ID NO: 38172 - DNA, 57 bp, synthetic construct
  source 1..57: mol_type = other DNA
gaggtcgggacctccgactacttagtcggcattctctccgggactcttccggctttt

SEQ ID NO: 38173 - DNA, 36 bp, synthetic construct
  source 1..36: mol_type = other DNA
gcctgggctgttagctccggggacatgggcttcacc

SEQ ID NO: 38174 - DNA, 45 bp, synthetic construct
  source 1..45: mol_type = other DNA
gctcaggtcgtcggcgtagcccgcaagctggattacgtcgatgag

SEQ ID NO: 38175 - DNA, 78 bp, synthetic construct
  source 1..78: mol_type = other DNA
agctctgaccggacctccgaggaagccaagggggctggagccatcgtgattaagcacagtgtcaacgagggcaaaggc

SEQ ID NO: 38176 - DNA, 78 bp, synthetic construct
  source 1..78: mol_type = other DNA
agcgacaagatcgacaagattatcaggcccatcctggaggacaaaaccgatattacaaagactaagttcgctagagaa

SEQ ID NO: 38177 - DNA, 45 bp, synthetic construct
  source 1..45: mol_type = other DNA
atctccagcgcaccagccggcgacgataacgctgttagattcggg

SEQ ID NO: 38178 - DNA, 87 bp, synthetic construct
  source 1..87: mol_type = other DNA
gtcaatgacctgaacatcgtttcaactgctgtgaacgccttccttcaattgggaaccgacataatcggatgcatggcagatccatgg

SEQ ID NO: 38179 - DNA, 48 bp, synthetic construct
  source 1..48: mol_type = other DNA
gccgctgggttcgagtctgttggagtcacaaacgtcaccggatttggc

SEQ ID NO: 38180 - DNA, 108 bp, synthetic construct
  source 1..108: mol_type = other DNA
ggatacactacaatcctcggcggcgaggatcaggcactgatcaccctgatgaagaccgctcccctgagcttcgatggcatattccaagctctatcgcaatcagatgcc

SEQ ID NO: 38181 - DNA, 60 bp, synthetic construct
  source 1..60: mol_type = other DNA
gggaacatcggcaccgccgactacctggtcggagtgctcagcaatgcactacctgccttc

SEQ ID NO: 38182 - DNA, 36 bp, synthetic construct
  source 1..36: mol_type = other DNA
ggctgggctatcagttcgggcgacatgtctttcacc

SEQ ID NO: 38183 - DNA, 75 bp, synthetic construct
  source 1..75: mol_type = other DNA
gcctacaacgaggaagagacagtggctaaagtcatagatgtcgtgaagaaagtgaccttcgtcgacgagattatc

SEQ ID NO: 38184 - DNA, 93 bp, synthetic construct
  source 1..93: mol_type = other DNA
aatgacggatcttctgataacacagagtccgaagccctgaaagctggcgctagggttatcacccacgaagttaacaagggaaagggagaagcc

SEQ ID NO: 38185 - DNA, 93 bp, synthetic construct
  source 1..93: mol_type = other DNA
aacctgactagccgcaaagtggaatctataattcgtcctatcctcgagggcaagaccgacattacaaagaccaagttcagtcgtgcctctggc

SEQ ID NO: 38186 - DNA, 105 bp, synthetic construct
  source 1..105: mol_type = other DNA
tccatcatggaggtcgatattggcgccatcgagcacgacatgagccccctgtctgacctcaacctgatggctaatgaagtggttcggacgatcattggtagagcc

SEQ ID NO: 38187 - DNA, 30 bp, synthetic construct
  source 1..30: mol_type = other DNA
gacattggccctcggctgttcgatatcccc

SEQ ID NO: 38188 - DNA, 129 bp, synthetic construct
  source 1..129: mol_type = other DNA
ggctccggcggcatctaccccatccaaatcatgaacaacgtcagccagatcttctaccccttcctcccaatgacctacgccatcaacattatccgcgaggctcagctgggagttgtctggggaaactat

SEQ ID NO: 38189 - DNA, 57 bp, synthetic construct
  source 1..57: mol_type = other DNA
agcaacttcatcgaggaggacaaccccgaacggctgaatatgattaggcagcttgaa

SEQ ID NO: 38190 - DNA, 45 bp, synthetic construct
  source 1..45: mol_type = other DNA
ttcgaccggaacaccaagcacattagcggcatcctgcctctcatg

SEQ ID NO: 38191 - DNA, 33 bp, synthetic construct
  source 1..33: mol_type = other DNA
atgaagatcctgtactggctgttcgttctgctg

SEQ ID NO: 38192 - DNA, 258 bp, synthetic construct
  source 1..258: mol_type = other DNA
aagaactccaaacccaagtatcagaaagtcacagtgatcatccctgccttcaacgaggaggacagcgtggctaaggtggttggtgtcatccgcaaagtgtctttcatcgatgaagttatagtagtgaacgacggaagcaccgacaatacagagagcgaggcctccaaggccggcgctatcgtcattaaccacgaaaccaacaagggcaagggagaagcactgtacaccgggtatcgccaaagcgactgcgacattatt

SEQ ID NO: 38193 - DNA, 111 bp, synthetic construct
  source 1..111: mol_type = other DNA
gacgccgacattcacaacttgacgtctaaaaaggtcgaggctattatcaaacctattttatatgggaagactgacattaccaaaaccaaattcgcccgcgagagcgggcgc

SEQ ID NO: 38194 - DNA, 30 bp, synthetic construct
  source 1..30: mol_type = other DNA
cctgagatctcctttgaacaacctttaagc

SEQ ID NO: 38195 - DNA, 144 bp, synthetic construct
  source 1..144: mol_type = other DNA
ctgggcatctccatccttgaagtggatattggagctatcgagcacgacatgtctcctctgtccgacctgaacatgatggccaacgaggtcgtccggaccatcatgaacagggccaataaatacggcagggtgaccatgatcgac

SEQ ID NO: 38196 - DNA, 54 bp, synthetic construct
  source 1..54: mol_type = other DNA
gccgacatcgtgaatattggcatccagaacaccaacttcgatattatcacgtcc

SEQ ID NO: 38197 - DNA, 36 bp, synthetic construct
  source 1..36: mol_type = other DNA
ttcgatgccttgaacggcagtctgctcactggtgac

SEQ ID NO: 38198 - DNA, 36 bp, synthetic construct
  source 1..36: mol_type = other DNA
aagagctccaagcccaaataccagaaggtgtctgtc

SEQ ID NO: 38199 - DNA, 81 bp, synthetic construct
  source 1..81: mol_type = other DNA
ccagccttcaatgaagaatcaacagttgcgagagttgtggaagtgatcaagcaggtgtcatgcgttgacgagatcatcgtc

SEQ ID NO: 38200 - DNA, 93 bp, synthetic construct
  source 1..93: mol_type = other DNA
aatgacggatcttccgacaacacagctcaggaggctacaaaggcaggcgctatcgtcatttctcacgatgtgaataaggggaaaggagaggca

SEQ ID NO: 38201 - DNA, 99 bp, synthetic construct
  source 1..99: mol_type = other DNA
attcacaacctgacctccaagaaggtctcggctatgatcaaacccatcctcgacggcaagacagacatcactaagaccaagttcgctcgggaatctgga

SEQ ID NO: 38202 - DNA, 108 bp, synthetic construct
  source 1..108: mol_type = other DNA
atctctatcatggaggtggacatcggcgccattgaacacgacatgagtcccctgagcgatctccacatgatggccaacgaggtagttaggaccattatgagtagagcc

SEQ ID NO: 38203 - DNA, 39 bp, synthetic construct
  source 1..39: mol_type = other DNA
gtggccaccttcatcggtagcaacggtttggctgcactg

SEQ ID NO: 38204 - DNA, 60 bp, synthetic construct
  source 1..60: mol_type = other DNA
gatactctcatttcgattctgcatcctgtcgccgacgcggtccaatatgttaaagcatac

SEQ ID NO: 38205 - DNA, 63 bp, synthetic construct
  source 1..63: mol_type = other DNA
gatggcattctgatgttctttaatctcgccaacgtgcataacgacgcattggtcgagaatgct

SEQ ID NO: 38206 - DNA, 57 bp, synthetic construct
  source 1..57: mol_type = other DNA
gccaacatcgtggacattggcatccagaacgctgacatcaattacatctacgacact

SEQ ID NO: 38207 - DNA, 36 bp, synthetic construct
  source 1..36: mol_type = other DNA
tacgacgccattgctggcaacatcctgactggagat

SEQ ID NO: 38208 - DNA, 54 bp, synthetic construct
  source 1..54: mol_type = other DNA
gccagcatcgtgaacaacggcattcagaagaccaatatcaacctgatctaccac

SEQ ID NO: 38209 - DNA, 36 bp, synthetic construct
  source 1..36: mol_type = other DNA
tacaccgccctgaacggcacactgctcactggagat

SEQ ID NO: 38210 - DNA, 54 bp, synthetic construct
  source 1..54: mol_type = other DNA
gccagcatagtggatattggtatccagaacgctgacctgaactacatcaccaat

SEQ ID NO: 38211 - DNA, 36 bp, synthetic construct
  source 1..36: mol_type = other DNA
tacgacgccattagcggcaacatcctgactggagat

SEQ ID NO: 38212 - DNA, 33 bp, synthetic construct
  source 1..33: mol_type = other DNA
ctcctgatcggtggaagccaactaagttctctc

SEQ ID NO: 38213 - DNA, 57 bp, synthetic construct
  source 1..57: mol_type = other DNA
gacaacatcctccatctgctgcacgctccaagcgagattttttaccaagcgaagtcc

SEQ ID NO: 38214 - DNA, 51 bp, synthetic construct
  source 1..51: mol_type = other DNA
ctgatcaaactgtttaacattaccaatccacaatatatacaaatagtaacc

SEQ ID NO: 38215 - DNA, 48 bp, synthetic construct
  source 1..48: mol_type = other DNA
gccgagatcgtcaacgtcggtatccagaataccaacttccaatttatt

SEQ ID NO: 38216 - DNA, 36 bp, synthetic construct
  source 1..36: mol_type = other DNA
tacgacgctctgagcggcggacttttaaccggtgat

SEQ ID NO: 38217 - DNA, 54 bp, synthetic construct
  source 1..54: mol_type = other DNA
agcaagatagtggatatcgggatcgctaacggcgacattgcctacatctactcc

SEQ ID NO: 38218 - DNA, 36 bp, synthetic construct
  source 1..36: mol_type = other DNA
taccagatcgaatcaggcaccataacgacaggattg

SEQ ID NO: 38219 - DNA, 48 bp, synthetic construct
  source 1..48: mol_type = other DNA
gccgctatcgtgaacattggcatccagaataccgattttcaattcata

SEQ ID NO: 38220 - DNA, 39 bp, synthetic construct
  source 1..39: mol_type = other DNA
gcttacgatgccattaacaatggcatcctgactggagac

SEQ ID NO: 38221 - DNA, 48 bp, synthetic construct
  source 1..48: mol_type = other DNA
gccgacattgtgaatatcggcatccagaacaccgattttcaatttatt

SEQ ID NO: 38222 - DNA, 39 bp, synthetic construct
  source 1..39: mol_type = other DNA
gcttacgatgccttgtctggtggcgtattaaccggggat

SEQ ID NO: 38223 - DNA, 48 bp, synthetic construct
  source 1..48: mol_type = other DNA
gccgggatcgtggatatcggcatccagaacgctgattttcaatacatc

SEQ ID NO: 38224 - DNA, 39 bp, synthetic construct
  source 1..39: mol_type = other DNA
gccttcggggctttggacggctctctcttgactggccaa

SEQ ID NO: 38225 - DNA, 51 bp, synthetic construct
  source 1..51: mol_type = other DNA
gctgatatcgtgaacattggcattcagaatacagattttaacttcatcatc

SEQ ID NO: 38226 - DNA, 36 bp, synthetic construct
  source 1..36: mol_type = other DNA
tacgatgccatgaacggcagcatcctgactggagac

SEQ ID NO: 38227 - DNA, 48 bp, synthetic construct
  source 1..48: mol_type = other DNA
gccgatatcgtggacatcggcatacagaataccaacttccaatttata

SEQ ID NO: 38228 - DNA, 39 bp, synthetic construct
  source 1..39: mol_type = other DNA
gcctacgacgctatgagcggaggcatacttaccggcgac

SEQ ID NO: 38229 - DNA, 51 bp, synthetic construct
  source 1..51: mol_type = other DNA
gccaacatcgtcaataccggcatacagaacacagacttcaactacatcgca

SEQ ID NO: 38230 - DNA, 36 bp, synthetic construct
  source 1..36: mol_type = other DNA
tacgacgccattagcggctcaatcctgactggagat

SEQ ID NO: 38231 - DNA, 180 bp, synthetic construct
  source 1..180: mol_type = other DNA
gagaacattatacatcaacgtggtatcggaacacactacaaggacgtctattgctacctgatcgaatctctgaggctcgccggcatccagattggcggctataagtttgtgaattacttccctcctttcattcctttcttgactagtttactgtttcggatcggcttcgtgtccgagtac

SEQ ID NO: 38232 - DNA, 144 bp, synthetic construct
  source 1..144: mol_type = other DNA
aacaagatccctctggggtttatcaaccaggctcaggagatttctagccgggccagcctgaagttcgccacatccgagtccaatctcatgggcaacgacctgttcttctacttcaaaattatccctcatatcatcacctaccaa

SEQ ID NO: 38233 - DNA, 297 bp, synthetic construct
  source 1..297: mol_type = other DNA
tatattgactctctcaaggacgataagaacgtgattgacgagaagaacgccgctaactggatcaaggacaaggatgggatcattatgtccgaccggggcccagcctacacattctacctgaagaaggagatcaaacacgtgaagggaatcaagcaggagcggcacctggatgagaaactgctggacaacgacgcagactatttcatcgggatcaatcccgtcaacctcacttattactcgccgatcaaggagtttggcaacgtgactgtttatcaacggaatgacgagatctatact

SEQ ID NO: 38234 - DNA, 48 bp, synthetic construct
  source 1..48: mol_type = other DNA
gccgacattgtgaatatcggcatccagaacaccaacttccaatttatt

SEQ ID NO: 38235 - DNA, 39 bp, synthetic construct
  source 1..39: mol_type = other DNA
gcctacgatgctatccacaacggcgtgttgactggagac

SEQ ID NO: 38236 - DNA, 72 bp, synthetic construct
  source 1..72: mol_type = other DNA
gcctacaacgaagaggccacagtcgcccaagtggtatctgtcgctcgcaagctcgattacgtggacgaggta

SEQ ID NO: 38237 - DNA, 99 bp, synthetic construct
  source 1..99: mol_type = other DNA
gacgggtccagcgaccggaccgtcgaggaggctgaaggcgcaggcgccaccgtgatctctcacatcactaacgagggaaaggggagtgccatcaagact

SEQ ID NO: 38238 - DNA, 93 bp, synthetic construct
  source 1..93: mol_type = other DNA
aacttcacgagcggcaagatcgataagattatcagacccattctggagggaaagacagacattaccaaaacgaagtttgcaagagaaagtggg

SEQ ID NO: 38239 - DNA, 63 bp, synthetic construct
  source 1..63: mol_type = other DNA
cacggaatctctattctggaggtggacatcggcgatatatcccatgatatgtctcctcttgct

SEQ ID NO: 38240 - DNA, 48 bp, synthetic construct
  source 1..48: mol_type = other DNA
gccgacattgtgaacatcggcatccagaataccaatttccaatttatt

SEQ ID NO: 38241 - DNA, 39 bp, synthetic construct
  source 1..39: mol_type = other DNA
gcctacgatgctatcaacaatggcgtgcttactggagac

SEQ ID NO: 38242 - DNA, 48 bp, synthetic construct
  source 1..48: mol_type = other DNA
gcctacatcgtgaacattggcatccagaataccgactttcaatttata

SEQ ID NO: 38243 - DNA, 39 bp, synthetic construct
  source 1..39: mol_type = other DNA
gcttacgatgccataagtggtggtctactcactggtgac

SEQ ID NO: 38244 - DNA, 54 bp, synthetic construct
  source 1..54: mol_type = other DNA
agcaacatcgtggatattggggtcgccaatggcgacatcgcttacatctactcc

SEQ ID NO: 38245 - DNA, 36 bp, synthetic construct
  source 1..36: mol_type = other DNA
ttccagattgagtctggcaccattcttactggcgat

SEQ ID NO: 38246 - DNA, 51 bp, synthetic construct
  source 1..51: mol_type = other DNA
ggaaagatcatcaacgagggcattcaatatggcgatatgaatgctatctac

SEQ ID NO: 38247 - DNA, 39 bp, synthetic construct
  source 1..39: mol_type = other DNA
tcctacgaagtctccggtggcctgatcatgaccggaaac

SEQ ID NO: 38248 - DNA, 30 bp, synthetic construct
  source 1..30: mol_type = other DNA
aataatgttagttttgtcgacgagatcatc

SEQ ID NO: 38249 - DNA, 81 bp, synthetic construct
  source 1..81: mol_type = other DNA
tcttccgataatacagaggaggaagctatcaaagcaggggccatcgtgatcaaccatgaatctaacaaggggaaaggagag

SEQ ID NO: 38250 - DNA, 84 bp, synthetic construct
  source 1..84: mol_type = other DNA
actagcaaaaaggtggagagcatgattaagcccatcctcctgggcgaggccgaaatcaccaagaccaaattctctagagcaagc

SEQ ID NO: 38251 - DNA, 81 bp, synthetic construct
  source 1..81: mol_type = other DNA
agctctgacaagaccgaggaggaagccattaatgcgggggctatcgtgatcaatcacgagactaacaagggaaagggagag

SEQ ID NO: 38252 - DNA, 84 bp, synthetic construct
  source 1..84: mol_type = other DNA
ctgaccagcaaaaaggtggaatccatgatcatgcccatcctcctgggcgacgccgagatcactaaaaccaagttctctagagtc

SEQ ID NO: 38253 - DNA, 75 bp, synthetic construct
  source 1..75: mol_type = other DNA
agctccgacaagacagaggaggaagccatcaaggccggcgctatcgtgattaaccacgagaccaataagggaaag

SEQ ID NO: 38254 - DNA, 72 bp, synthetic construct
  source 1..72: mol_type = other DNA
accagcaaaaaggtcgaatcaatgattatgcctattctgctcggcaacgccgaaatcaccaaaaccaagttc

SEQ ID NO: 38255 - DNA, 171 bp, synthetic construct
  source 1..171: mol_type = other DNA
aatatcgacggaaaggcgggagtctattatgtccgggatgtgttcttctaccttaacaacgctctcttctacgccggctatgataccggcttcaacgcgacaaaagggctctctcccttcattcccatgttgacctccctgttcttccggatgggcttcatctacgatttc

SEQ ID NO: 38256 - DNA, 201 bp, synthetic construct
  source 1..201: mol_type = other DNA
tacttggacatcagcctcttcttcgtgtcgcaaggacaagggatcacccaagcccagaacacttccaacatgttgcattatttcacatactatgtgaataatatccctatatatctgggctctgccaaatttatcccctactccctcaaacccggagtcttcctcatttctgagatggagtggattggggggaagccttcc

SEQ ID NO: 38257 - DNA, 42 bp, synthetic construct
  source 1..42: mol_type = other DNA
aagacccagaagcccaagaagtaccagaaagtttcaagtgtg

SEQ ID NO: 38258 - DNA, 180 bp, synthetic construct
  source 1..180: mol_type = other DNA
cccgcttacaacgaggaggaaacagtggccaaggtcgtaaaggtcatcaagaaggtgtccttcgtggatgaaattattgttgttaacgacggcagctctgacaacaccgccgaggaggccatcaatgctggcgcccgggtcatcactcacgaggtcaacaaggggaagggcgaggcactc

SEQ ID NO: 38259 - DNA, 111 bp, synthetic construct
  source 1..111: mol_type = other DNA
gacgctgacatttacaatctgacctccgccaaagtggaagccatgataagaccgatcttggaaggcaaaactgacataaccaagacaaagttctctagagcaagcggacgg

SEQ ID NO: 38260 - DNA, 30 bp, synthetic construct
  source 1..30: mol_type = other DNA
cccgagatcagcttcgaacaaccattgtcc

SEQ ID NO: 38261 - DNA, 153 bp, synthetic construct
  source 1..153: mol_type = other DNA
ctggggatcagtattatggaggtggatattggggcaattgaacacgacatgtcaccactgctggacctcaacctcatggctaatgaggtggttcgtactatcattgggcgagccaacaaatatgggcgcgtggtcatgatcgatgacatcgga

SEQ ID NO: 38262 - DNA, 36 bp, synthetic construct
  source 1..36: mol_type = other DNA
ctgatgaccggcactgacatgacaatcatagacggg

SEQ ID NO: 38263 - DNA, 30 bp, synthetic construct
  source 1..30: mol_type = other DNA
ctgattaagcccagcgacatcatcaataac

SEQ ID NO: 38264 - DNA, 39 bp, synthetic construct
  source 1..39: mol_type = other DNA
gacttcatcaacgctcacacaccggaacggatttccctg

SEQ ID NO: 38265 - DNA, 36 bp, synthetic construct
  source 1..36: mol_type = other DNA
gtgatcaaggaggtcagcttcgtggacgagattatc

SEQ ID NO: 38266 - DNA, 84 bp, synthetic construct
  source 1..84: mol_type = other DNA
ggaagcaccgacaacaccgagaatgaggccatcaatgccggcgctatcgtgattaaccacgagactaataagggcaaaggtgag

SEQ ID NO: 38267 - DNA, 90 bp, synthetic construct
  source 1..90: mol_type = other DNA
aacctgacgagcaagaaggtagaatccatgatcatgcccatcctcctgggcaaggccgagattactaagaccaaattctctagggcttca

SEQ ID NO: 38268 - DNA, 42 bp, synthetic construct
  source 1..42: mol_type = other DNA
ggccctgagatcgctcgaagcctggacgggctggaactctac

SEQ ID NO: 38269 - DNA, 33 bp, synthetic construct
  source 1..33: mol_type = other DNA
gccatctacattctgggcctgtcaacattggag

SEQ ID NO: 38270 - DNA, 30 bp, synthetic construct
  source 1..30: mol_type = other DNA
cagctcacgatagggtcagaactgacatac

SEQ ID NO: 38271 - DNA, 171 bp, synthetic construct
  source 1..171: mol_type = other DNA
aacaagatcgatgaggagctgcgcgaccacgttagtaacactgtttacgggatgattagtcatgatacagggtgcctgcaagacttatttaatgctatttcaagccctactgtggaaaacctgccgatcataaatgcagccaacggcatcttggaagcattcgcaaacagt

SEQ ID NO: 38272 - DNA, 36 bp, synthetic construct
  source 1..36: mol_type = other DNA
acccagaaacccaagaagtaccagaaggtctctgtg

SEQ ID NO: 38273 - DNA, 180 bp, synthetic construct
  source 1..180: mol_type = other DNA
cccgcttacaacgaggaggacaccgttgccaccgtagtagaggtcgtgaaacaggccgctttcgtggatgagatcatcgtcgtgaacgacggatcttccgacaatacagaagccgaggccgcaaaggccggagctcgggtcattacccacaagaccaacaaggggaagggagaagcactg

SEQ ID NO: 38274 - DNA, 99 bp, synthetic construct
  source 1..99: mol_type = other DNA
attcacaacttaacaagcaagaaggtggaggccatgatcattcccatcctcgagggcaagacagacatcaccaagactaaattcgctcgtgctagaggc

SEQ ID NO: 38275 - DNA, 30 bp, synthetic construct
  source 1..30: mol_type = other DNA
cccgaaatcacctttgaacaacccttaagc

SEQ ID NO: 38276 - DNA, 138 bp, synthetic construct
  source 1..138: mol_type = other DNA
ctgggcattagcatcaccgaggtggatatcggagctatcgagcacgacatgtccacactcgaggatctgaacctcatggccaacgaagtagttcggactatcatgtctcgggccaataaatacggccgagtgatcgtc

SEQ ID NO: 38277 - DNA, 75 bp, synthetic construct
  source 1..75: mol_type = other DNA
gcctacaacgaagaggagacagtggctaccgtcatcgaggtcgttaaaaaggtcagcttcgtggacgagatcatc

SEQ ID NO: 38278 - DNA, 96 bp, synthetic construct
  source 1..96: mol_type = other DNA
aacgatggctcctccgacaacaccgaatctgaagccataaaggccggagccagagtgattaaccatgccgtaaataggggcaaaaaggaggccggc

SEQ ID NO: 38279 - DNA, 96 bp, synthetic construct
  source 1..96: mol_type = other DNA
tacaacttaacgagccataaggtggagtccatcatcaagcccatcctcgatggcgaaacagacatcactaagaccaaattctctagagctagtggc

SEQ ID NO: 38280 - DNA, 90 bp, synthetic construct
  source 1..90: mol_type = other DNA
gggatcagcattaaggaggtcgacatcggcgctatcgagcacgacatgagcccactgtctgacctgaacctcatggccaacgaagtggtc

SEQ ID NO: 38281 - DNA, 42 bp, synthetic construct
  source 1..42: mol_type = other DNA
ggccccgaaatcgcgagaagcctggacggactcgagctctac

SEQ ID NO: 38282 - DNA, 30 bp, synthetic construct
  source 1..30: mol_type = other DNA
gccatctacattctgggcttgaccacactc

SEQ ID NO: 38283 - DNA, 171 bp, synthetic construct
  source 1..171: mol_type = other DNA
aataagattaatgatgaactgcgagagcatgtgtcatctgaagtctacggcatgatcgaacacgacacggggtgtctgcaagacctgttcaacgcggctagcaacccaacccttgagaatatgcccatcattaatgctgctaacgacattctcctctccttcgctaactcc

SEQ ID NO: 38284 - DNA, 180 bp, synthetic construct
  source 1..180: mol_type = other DNA
cccgcttacaacgaagaggataccgtagcaactgtggtggacgtcgtcaagaaagtgtccttcgtggacgagatcattgttgttaatgacggctctagcgacaacaccgaggccgaggccatgaaggccggcgcacgcgtaattacacacgttactaataaggggaagggagaagctttg

SEQ ID NO: 38285 - DNA, 102 bp, synthetic construct
  source 1..102: mol_type = other DNA
gacatccacaacctgacttcaaaaaaggtggaggctatgataatgccaattctcatgggaaaaactgacattaccaagaccaaatttgcaagagccagaggt

SEQ ID NO: 38286 - DNA, 117 bp, synthetic construct
  source 1..117: mol_type = other DNA
gggatttctataacggaggttgacatcggcgctattgagcacgatatgagcccactcgaggacctgaatctgatggccaacgaggtggtccggaccatcatgagcagggccaacaag

SEQ ID NO: 38287 - DNA, 261 bp, synthetic construct
  source 1..261: mol_type = other DNA
attaagactcagaagcctaaaaagtaccaaaaagtgtctgtgatcattccggcctacaacgaggaggatacagtggccaccgtggttggcgtcgtgaaagaggtgtccttcgtcgatgaaatcattgttgtgaatgatggaagttccgacaacacggaggcagaggcgattaaggccggagccagggtcatcacccatcgtgttaataaaggaaagggagaggctctcttcaccgggtacagaaaagcagaatgtgacgtt

SEQ ID NO: 38288 - DNA, 114 bp, synthetic construct
  source 1..114: mol_type = other DNA
gatgccgacatccacaacctcacaagcaagaaggtcgaagccatgatcatgccgattctcgaaggcaaaaccgacataactaagaccaagttcgctagggcaaggggaagagta

SEQ ID NO: 38289 - DNA, 57 bp, synthetic construct
  source 1..57: mol_type = other DNA
ttctttcctgagatcacctttgagcaaccattgagcggccagtttgctgctaggaag

SEQ ID NO: 38290 - DNA, 156 bp, synthetic construct
  source 1..156: mol_type = other DNA
gacgctgacgtgctcgggatctctatcaccgaggtcgacattggagccatcgagcacgacatgagcccccttggcgatctgaacctgatggcaaacgaagtggtcaggacaatcatgtcccgggccaataaatacgggcgagtgatcatgatcgac

SEQ ID NO: 38291 - DNA, 72 bp, synthetic construct
  source 1..72: mol_type = other DNA
gcctacaacgaggaaaacactgtggctattgttgtggacgtgatcaaaaaagtgtcctgcgtggatgagatt

SEQ ID NO: 38292 - DNA, 87 bp, synthetic construct
  source 1..87: mol_type = other DNA
ggcagctctgacaacacggcacaagaagcgatgaaggccggagccatcgtcatttcccacgaagttaacaaaggaaagggggaggcc

SEQ ID NO: 38293 - DNA, 96 bp, synthetic construct
  source 1..96: mol_type = other DNA
cacaacctcactacaaataaggtggagagcatgattaagcccattctgaccggcaaggccgagatcacaaagaccaaattcgctcgggaatcagga

SEQ ID NO: 38294 - DNA, 96 bp, synthetic construct
  source 1..96: mol_type = other DNA
gagatcgacatcggcgccattgaacacgacatgagccccttagccgatctgcacctcatggccaacgaggtggtccggacaatcatgaatagagct

SEQ ID NO: 38295 - DNA, 39 bp, synthetic construct
  source 1..39: mol_type = other DNA
gtgagcacctacatcggacacaacgcacaagctgctctg

SEQ ID NO: 38296 - DNA, 57 bp, synthetic construct
  source 1..57: mol_type = other DNA
gccctgatcaacctcctgcaccctaccgctggcgcactgccctacgtgaacgcttat

SEQ ID NO: 38297 - DNA, 30 bp, synthetic construct
  source 1..30: mol_type = other DNA
tctggcgttctcggcgaactgggacttgac

SEQ ID NO: 38298 - DNA, 63 bp, synthetic construct
  source 1..63: mol_type = other DNA
gatggacttctgatcttctttaagctgcaccaaatgccgaacgacagcctggtcgagaacgcg

SEQ ID NO: 38299 - DNA, 36 bp, synthetic construct
  source 1..36: mol_type = other DNA
agcgctcttctgggcgttgaggctctgagtggattg

SEQ ID NO: 38300 - DNA, 57 bp, synthetic construct
  source 1..57: mol_type = other DNA
aatgtgatcattggcttcctgagcaacagccctaatatcaaccaatacgcgctggac

SEQ ID NO: 38301 - DNA, 30 bp, synthetic construct
  source 1..30: mol_type = other DNA
tacctgatgggcaacgacggactcatcgag

SEQ ID NO: 38302 - DNA, 51 bp, synthetic construct
  source 1..51: mol_type = other DNA
atcctgacactgtatagcgtggacgcccattaccatgctcttgtctcccac

SEQ ID NO: 38303 - DNA, 45 bp, synthetic construct
  source 1..45: mol_type = other DNA
agctcttccgaccgggtggtggataacgtcctgagtggagaaacc

SEQ ID NO: 38304 - DNA, 177 bp, synthetic construct
  source 1..177: mol_type = other DNA
cagaactccacacactacattctgggcaattcctaccgcgacgtgtttctctacctcatcgaagccctccggatgagcggcgtcgagatcgagggctacgcctacgtcaactatctgccgcctttcgtcccatttctcactagcctgctgtttaggatgggattcgtgtctcttgca

SEQ ID NO: 38305 - DNA, 147 bp, synthetic construct
  source 1..147: mol_type = other DNA
atcaacaacatccccctgggcttcctaaaccaagcttcagaggtatcctccgaatcctccctgacaaccacccacgccggaaagctggtggtcaacgacctcttcttttacatcaaggggatcatttacgacattagctccactaga

SEQ ID NO: 38306 - DNA, 285 bp, synthetic construct
  source 1..285: mol_type = other DNA
aactatatcgtcggagttcacgacaaccccgtggctgtcaacgagcatgacgcctccggctggctcgatggcaaggatggcatcatgttctccaatcggggccctgtgtacacatggtatcttcaaaaagaggtcaaatatgcgcgaaacgttggtaacgacaccctgctgagcagggaactccacgacggcaacgcaacctattacatttctaccggcaaggtcaacttaaccggctaccggatggttaaggagttcggcgatgtgaagatctacgagtctaaa

SEQ ID NO: 38307 - DNA, 48 bp, synthetic construct
  source 1..48: mol_type = other DNA
tcctctagcgatcgggtcgtggacaacgtgctgtccgaggaaacaggg

SEQ ID NO: 38308 - DNA, 57 bp, synthetic construct
  source 1..57: mol_type = other DNA
atggacaacctagtgataaatctggctgatttcctcaaggccaattacaattcatat

SEQ ID NO: 38309 - DNA, 156 bp, synthetic construct
  source 1..156: mol_type = other DNA
ttcatcatgctgaatcccgatgaaggctttcacttcaacgtcggtcttagcttactacaagggagtaacctttatgtggacacagacaccgccactaccggcctagtgaacagtttcatcctgctcatctggttcaagatcttcggaccttctatt

SEQ ID NO: 38310 - DNA, 123 bp, synthetic construct
  source 1..123: mol_type = other DNA
gccggcagcctggagtggttcttccggctctacttttacaacgctttttcccacatctcctcttctttccaagactacctgctgaatatgtgcgctctgatcaagtatatgtccaagtttatg

SEQ ID NO: 38311 - DNA, 30 bp, synthetic construct
  source 1..30: mol_type = other DNA
gtgatcaagatggtcagcttcgtggatgag

SEQ ID NO: 38312 - DNA, 75 bp, synthetic construct
  source 1..75: mol_type = other DNA
agctccgacaacaccgagttcgaggctatcaaggccggcgcccaagtcataaaccacgatacaaataagggaaaa

SEQ ID NO: 38313 - DNA, 84 bp, synthetic construct
  source 1..84: mol_type = other DNA
ctgacaagcaagaaggtggaggccatgatcaagcccatcctcaacggcaaaactgacatcaccaagaccaagttcgctagagaa

SEQ ID NO: 38314 - DNA, 33 bp, synthetic construct
  source 1..33: mol_type = other DNA
acccagaaaccaaagaaataccagaaggtgtca

SEQ ID NO: 38315 - DNA, 204 bp, synthetic construct
  source 1..204: mol_type = other DNA
cccgcttacaatgaggaggacaccgtgtccaaagtggtggaggttgtcaagaaggtgtctttcgtggatgaaattatcgtcgtcaacgacggcagcaccgacaacaccgaggccgaagccatcaaggccggggcaaaggttataaatcacgagacaaaccgcggaaaggggcaagccctatataccgggtatcagaaggctgag

SEQ ID NO: 38316 - DNA, 108 bp, synthetic construct
  source 1..108: mol_type = other DNA
gcagacatttacaacctcacctccaagaaggtggaagctatcattcatccaatcctgatcggcaaaactgatataaccaagaccaaatttgcccgggagtcaggacgg

SEQ ID NO: 38317 - DNA, 30 bp, synthetic construct
  source 1..30: mol_type = other DNA
cccgagatcagctttgagcaaccactgtct

SEQ ID NO: 38318 - DNA, 147 bp, synthetic construct
  source 1..147: mol_type = other DNA
ctgggcatctccatcatggaggtggatatcggggcgatccagcacgatatgtctcccctgagtgacctcaacatgatggccaacgaggtcgttcgtaccataatatctagggcaaataaatatggcagggtcgtgatgatcgatgac

SEQ ID NO: 38319 - DNA, 33 bp, synthetic construct
  source 1..33: mol_type = other DNA
gccaatttcatcggacacaacggacaagcagct

SEQ ID NO: 38320 - DNA, 63 bp, synthetic construct
  source 1..63: mol_type = other DNA
gatgctctgattgccatcctccaccctccaagcccagacctgatcccctacgtgaagagtttt

SEQ ID NO: 38321 - DNA, 57 bp, synthetic construct
  source 1..57: mol_type = other DNA
attctcctgatcttctttaagttgcatcaaatgcctaacgacagccttgtggaaacc

SEQ ID NO: 38322 - DNA, 54 bp, synthetic construct
  source 1..54: mol_type = other DNA
agcggactgtccgaggagccggccgtcaaggacttcctcggaggcatcgaaaac

SEQ ID NO: 38323 - DNA, 66 bp, synthetic construct
  source 1..66: mol_type = other DNA
ggcatggctaccggaggggacgtaacctttagctccatcttctctggtgccttctctagtgccgcc

SEQ ID NO: 38324 - DNA, 75 bp, synthetic construct
  source 1..75: mol_type = other DNA
gcctacaacgaagaggagaccgtcgctaaggttattgaagtcgtcaagaaggtcagcttcgtggacgagatcatc

SEQ ID NO: 38325 - DNA, 93 bp, synthetic construct
  source 1..93: mol_type = other DNA
aacgatggctcatccgacaacaccgagaaggaggctaccgaagccggcgctatcgtgattaaccacgaaacaaataaggggaaaggagaggca

SEQ ID NO: 38326 - DNA, 96 bp, synthetic construct
  source 1..96: mol_type = other DNA
tttaacctgacttccgccaaggtggaggctatgatcaagcccattctcgacgggaagaccgatatcaccaagaccaaatttagtcgagcatctggc

SEQ ID NO: 38327 - DNA, 132 bp, synthetic construct
  source 1..132: mol_type = other DNA
ggaattagcattactgaggtggacatcggggctatagagcacgatatgtccccgctgtccgaccttaacctgatggccaacgaagtggttaggaccataattgggcgcgccaacaaatatggacgggttgtg

SEQ ID NO: 38328 - DNA, 36 bp, synthetic construct
  source 1..36: mol_type = other DNA
gccacctacgtgtcagccgatgctcaggccgctcta

SEQ ID NO: 38329 - DNA, 60 bp, synthetic construct
  source 1..60: mol_type = other DNA
gactacgtgatggccatcctgcactgccgggctgatctggcacctttggccaagagctat

SEQ ID NO: 38330 - DNA, 30 bp, synthetic construct
  source 1..30: mol_type = other DNA
gaggccgtgatggggaagccaggccttaac

SEQ ID NO: 38331 - DNA, 60 bp, synthetic construct
  source 1..60: mol_type = other DNA
gacacaattctgatgttcttttcattaaccgacaacgcagccgctgatcagatccgaaac

SEQ ID NO: 38332 - DNA, 33 bp, synthetic construct
  source 1..33: mol_type = other DNA
gctagcttcataggagaatcagctgttgccgcc

SEQ ID NO: 38333 - DNA, 57 bp, synthetic construct
  source 1..57: mol_type = other DNA
accattatcaacttcctgaatccacctgctgacgccctcccatatctgaacgcttac

SEQ ID NO: 38334 - DNA, 33 bp, synthetic construct
  source 1..33: mol_type = other DNA
accatctacatgggttcagtcggccttgtgtcc

SEQ ID NO: 38335 - DNA, 57 bp, synthetic construct
  source 1..57: mol_type = other DNA
gacatctttctcatgctgtacaacctgcacaccagcccccatgtggagacattccgg

SEQ ID NO: 38336 - DNA, 39 bp, synthetic construct
  source 1..39: mol_type = other DNA
atcctggttaaaaatgagaccatccccggcttcattccc

SEQ ID NO: 38337 - DNA, 39 bp, synthetic construct
  source 1..39: mol_type = other DNA
atcctggtcaaaaacaacgccctcgacgagttcgtacct

SEQ ID NO: 38338 - DNA, 132 bp, synthetic construct
  source 1..132: mol_type = other DNA
ggcaccggcggcatgtaccccgttcaaatcatgaacaacattttcggcgttatctatccttatctgcctatgacccacggcatttctatcgtccgcgaagcgcagttgggcctcatctgggccaactacatc

SEQ ID NO: 38339 - DNA, 36 bp, synthetic construct
  source 1..36: mol_type = other DNA
agctccctgattggcgaatctgctctcgctgcaatc

SEQ ID NO: 38340 - DNA, 57 bp, synthetic construct
  source 1..57: mol_type = other DNA
ctgatcaacattctccaccctcctgccggcgtcctgccatacgtgcaacagtatcag

SEQ ID NO: 38341 - DNA, 33 bp, synthetic construct
  source 1..33: mol_type = other DNA
gtctaccttggggagataggattagtctcgtac

SEQ ID NO: 38342 - DNA, 54 bp, synthetic construct
  source 1..54: mol_type = other DNA
ttcctgatgctgtacaagctcaacctgagccccaatgtggaaaccttccgcttc

SEQ ID NO: 38343 - DNA, 36 bp, synthetic construct
  source 1..36: mol_type = other DNA
agcaccttcatcggccacaacgcacaagctgctctg

SEQ ID NO: 38344 - DNA, 57 bp, synthetic construct
  source 1..57: mol_type = other DNA
gcactggtttccctgctgcaccctaccgccggctccctgccctacgtcaatgcttac

SEQ ID NO: 38345 - DNA, 30 bp, synthetic construct
  source 1..30: mol_type = other DNA
agcggagtgttgggcgaactgggtcttgac

SEQ ID NO: 38346 - DNA, 63 bp, synthetic construct
  source 1..63: mol_type = other DNA
gatggcttgctgatgttcttcaaactgcatcaaatgccgaatgacgggctggtagagaacgct

SEQ ID NO: 38347 - DNA, 36 bp, synthetic construct
  source 1..36: mol_type = other DNA
gtgagcaccttcatcggacacaacgcacaagccgct

SEQ ID NO: 38348 - DNA, 60 bp, synthetic construct
  source 1..60: mol_type = other DNA
gacagcctgatcaacctgctccaccctaccgccggcgcccttccctacgtgaatgcttac

SEQ ID NO: 38349 - DNA, 30 bp, synthetic construct
  source 1..30: mol_type = other DNA
agcggagtactgggcgagctaggtcttgac

SEQ ID NO: 38350 - DNA, 63 bp, synthetic construct
  source 1..63: mol_type = other DNA
gacggcctgctcatcttctttaagctgcaccaaatgccaaatgatggactcgtcgaaaacgca

SEQ ID NO: 38351 - DNA, 33 bp, synthetic construct
  source 1..33: mol_type = other DNA
ggggcctatatcggcaaggatgcagtggccgct

SEQ ID NO: 38352 - DNA, 57 bp, synthetic construct
  source 1..57: mol_type = other DNA
ccccttagcaacttcctcggcgcttccaaggccaccaagcctctggtgctggagtac

SEQ ID NO: 38353 - DNA, 30 bp, synthetic construct
  source 1..30: mol_type = other DNA
aaggccacactgggcgacactggacttacc

SEQ ID NO: 38354 - DNA, 60 bp, synthetic construct
  source 1..60: mol_type = other DNA
gagggcttcctcacactatatgggctccagaacgtcgacattaccgggttcatcgtgaac

SEQ ID NO: 38355 - DNA, 36 bp, synthetic construct; identical to SEQ ID NO: 38343
  source 1..36: mol_type = other DNA

SEQ ID NO: 38356 - DNA, 60 bp, synthetic construct
  source 1..60: mol_type = other DNA
gacgctctgattggcatcctccaccccacttcgggagccctgccctatgtgaacgcatac

SEQ ID NO: 38357 - DNA, 30 bp, synthetic construct
  source 1..30: mol_type = other DNA
ggcggagttttaggggaattgggtcttgac

SEQ ID NO: 38358 - DNA, 63 bp, synthetic construct
  source 1..63: mol_type = other DNA
gacggcctgctcatctttttcaaattgcaccaaatgccaaacgatggtctggtagagaacgct

SEQ ID NO: 38359 - DNA, 33 bp, synthetic construct
  source 1..33: mol_type = other DNA
gccaccttcatcgggcacaacggacaggccgct

SEQ ID NO: 38360 - DNA, 60 bp, synthetic construct
  source 1..60: mol_type = other DNA
gacgctgtgatcggcctcctgcaccctaccgccgatgccgtcccctatgtgaagagctac

SEQ ID NO: 38361 - DNA, 30 bp, synthetic construct
  source 1..30: mol_type = other DNA
ggtggcgttctcggcgaactgggacttgat

SEQ ID NO: 38362 - DNA, 60 bp, synthetic construct
  source 1..60: mol_type = other DNA
gacggccttctgatctttttcaacttgagtcagatgcctaacgatagcctcgtggagaac

SEQ ID NO: 38363 - DNA, 123 bp, synthetic construct
  source 1..123: mol_type = other DNA
gtcctcggaggcgtgaccgaggccaacaccgctttaacgcaaatggcacacctgtatcctgctgacgcaatcgccgagggcggcacaggctggactagctatcccgctttcggcactcctttc

SEQ ID NO: 38364 - DNA, 102 bp, synthetic construct
  source 1..102: mol_type = other DNA
aatgtgtatttctaccaaaactttggccaaatagctatagactatgtcggggggaacatggatagcatcatccccacatttatctcgactgcgcttcctgaa

SEQ ID NO: 38365 - DNA, 90 bp, synthetic construct
  source 1..90: mol_type = other DNA
tacaagaagacggcaactgggctcggcatttgtcaatttttatttggacaacccatgctgatcaacaccatgccctggtacgctatggat

SEQ ID NO: 38366 - DNA, 36 bp, synthetic construct
  source 1..36: mol_type = other DNA
gccctgttcatcggttctgaggcgatggcggccttg

SEQ ID NO: 38367 - DNA, 60 bp, synthetic construct
  source 1..60: mol_type = other DNA
gacgccctgattagtatcctgtactccccggtttctgttatcccctacgtgaagtcttat

SEQ ID NO: 38368 - DNA, 60 bp, synthetic construct
  source 1..60: mol_type = other DNA
gacggcatcctgatgttcttcaacctggccaacatgcccaatgatgtgtttgtcgagaat

SEQ ID NO: 38369 - DNA, 174 bp, synthetic construct
  source 1..174: mol_type = other DNA
aacagcacacacaatattctcggacattcctatcgcgacgtgttcttctacctgatcggcgccctgcggttcagtggcgtggaaattggaggctacaagcacatcaactacctgccaccactcatcccatttctaacgtccatcctattccgcttggggttcgtctctgaaagc

SEQ ID NO: 38370 - DNA, 147 bp, synthetic construct
  source 1..147: mol_type = other DNA
atttataacatccccctgggcttcctgaaccaggctggagaggtgtcctctaaaacaagtaccgccgccacccacaatggaaagctggtcgggaacgacctcttcttctacatcaaaggcctgacatcttacatctcctctgagcgg

SEQ ID NO: 38371 - DNA, 285 bp, synthetic construct
  source 1..285: mol_type = other DNA
gtcgtgcacttcgacgccatttcggatgactctctcgtctcttgcgaaaaaaatgctggaagctggattagcgacaaggaaggcgtggtgctggccgaacgcggatgcgcttacacttggtaccttcaaaaggaaatgccctctacacgggagtccaactccgtgctcctggacgaggaactgctcgagaataatgccacctggtacattgggctcgaggacgtgaacctgacgcactactccaaagtcaaggagttcggcaaggtgtccatttaccaacgcatt

SEQ ID NO: 38372 - DNA, 33 bp, synthetic construct
  source 1..33: mol_type = other DNA
ggtagctacatcggcgagcttgctgttggagcc

SEQ ID NO: 38373 - DNA, 60 bp, synthetic construct
  source 1..60: mol_type = other DNA
cccctggccaccatcctccacgctacacctgccaacaagccactggtgcttcaatacgtg

SEQ ID NO: 38374 - DNA, 30 bp, synthetic construct
  source 1..30: mol_type = other DNA
gccagcaccctgggtgacacaggattgact

SEQ ID NO: 38375 - DNA, 60 bp, synthetic construct
  source 1..60: mol_type = other DNA
gacgccttcctggccctctacaatttcaaccacaaggacatcggcgagtttgctaagcac

SEQ ID NO: 38376 - DNA, 33 bp, synthetic construct
  source 1..33: mol_type = other DNA
gggaccttcatcggcgagaacgcagtggccgct

SEQ ID NO: 38377 - DNA, 63 bp, synthetic construct
  source 1..63: mol_type = other DNA
gatcctctcgctgacctcctgcacgctacccccgggactaagccgctacaacttcaatatatc

SEQ ID NO: 38378 - DNA, 30 bp, synthetic construct
  source 1..30: mol_type = other DNA
gccgctgagcttggtgacatgggtctgaca

SEQ ID NO: 38379 - DNA, 60 bp, synthetic construct
  source 1..60: mol_type = other DNA
gacgggttcctggccctctacaacttcggccacaaggatatcgctggatttgcaacacac

SEQ ID NO: 38380 - DNA, 36 bp, synthetic construct
  source 1..36: mol_type = other DNA
ggcagcttcattgggccaaacgcagtggcagctatc

SEQ ID NO: 38381 - DNA, 60 bp, synthetic construct
  source 1..60: mol_type = other DNA
gatcccatcgccacacttttagggtctgacgctgtcaccaagcctctcgtaatgcaatac

SEQ ID NO: 38382 - DNA, 60 bp, synthetic construct
  source 1..60: mol_type = other DNA
caggggttcctggccctgtacaatttcaaccacctcgagatggcaggctttgctatccac

SEQ ID NO: 38383 - DNA, 33 bp, synthetic construct
  source 1..33: mol_type = other DNA
ggccgcttcattgggccaaacgctgttgccgcc

SEQ ID NO: 38384 - DNA, 57 bp, synthetic construct
  source 1..57: mol_type = other DNA
ctcgcaccttacctgggcgccagccatgctaccaagccccttctgctacaatacctc

SEQ ID NO: 38385 - DNA, 60 bp, synthetic construct
  source 1..60: mol_type = other DNA
gagggctttctcgccctgtacaagttcgagcacatggagattgctgggttcgccatcaac

SEQ ID NO: 38386 - DNA, 36 bp, synthetic construct
  source 1..36: mol_type = other DNA
gtgagcaccttcatcggccacaacgctcaagctgcc

SEQ ID NO: 38387 - DNA, 60 bp, synthetic construct
  source 1..60: mol_type = other DNA
gacccactgatcaatattctccatccgcctgagggcgcccttccctacgtgaacgcttat

SEQ ID NO: 38388 - DNA, 63 bp, synthetic construct
  source 1..63: mol_type = other DNA
gatggccttctcatgttctttaagctacaccaaatgccaaacgacagcttggttgagaacgca

SEQ ID NO: 38389 - DNA, 177 bp, synthetic construct
  source 1..177: mol_type = other DNA
cagaacagcgcccactacatcctgggcaattcctaccgcgacgtgtttctgtacctcattgaggctctgaggatgtccggcgtagagatcggcggctacgcctacgtcaactatctgccaccgttcatcccattcctgacctctctgctcttccggatgggcttcgtgtcgctcgcc

SEQ ID NO: 38390 - DNA, 147 bp, synthetic construct
  source 1..147: mol_type = other DNA
atcaacaacatcccactggggttcctgaatcaagcatctgaagtatcatctgagtcttccctgaccacaattcacgctggcaagctcgtagtgaatgacctgtttttctacgtgaagggcattatctacgacatctctagcaccaag

SEQ ID NO: 38391 - DNA, 285 bp, synthetic construct
  source 1..285: mol_type = other DNA
aactacatcgctaacgtgcatgataatagcgtcgccgtgaacgagcacgacgcctctggctggctggagggcaaggacggaatcatgttctccaaccggggccccgtctacacatggtatctccaaaaagaagttaaatacgcccgtaacgttgggaatgacacactgctgagtcaggagttgcacgatgggaacgctacttattatatctcaaccgggaaggtcaatttgaccggctatagcatggtcaaggagttcggcgatgtcaagatttacgaatccaaa

SEQ ID NO: 38392 - DNA, 36 bp, synthetic construct
  source 1..36: mol_type = other DNA
ggccggttcattggtcccaacgccgttgctgcaatc

SEQ ID NO: 38393 - DNA, 60 bp, synthetic construct
  source 1..60: mol_type = other DNA
cccctgacccctcggcttggagctagcgccgccttgaaaccactgctctacgtctaccag

SEQ ID NO: 38394 - DNA, 30 bp, synthetic construct
  source 1..30: mol_type = other DNA
gccgctacactcggcgacaagggtcttacc

SEQ ID NO: 38395 - DNA, 60 bp, synthetic construct
  source 1..60: mol_type = other DNA
gaagggttcctgagcctctacaagttcgaccacatggagatcgctggctttgccatccac

SEQ ID NO: 38396 - DNA, 45 bp, synthetic construct
  source 1..45: mol_type = other DNA
ggcgccctggataacgtggattcctggattaatagcgtgatcgac

SEQ ID NO: 38397 - DNA, 96 bp, synthetic construct
  source 1..96: mol_type = other DNA
aactacgatcagatctggaacgccattaccctcatcgttggtgacgcctttgaccccgctgactgggtgtccacaaccgacagcctgttcggtgga

SEQ ID NO: 38398 - DNA, 93 bp, synthetic construct
  source 1..93: mol_type = other DNA
cttacatattctgatttcgatgtgttaattcaagccgggtctaccaaagccgccttagtgcaagatgttatgggcgaatccttcctggacgat

SEQ ID NO: 38399 - DNA, 36 bp, synthetic construct
  source 1..36: mol_type = other DNA
agcacgttcatcggcgacgttgctgctgccgctcta

SEQ ID NO: 38400 - DNA, 60 bp, synthetic construct
  source 1..60: mol_type = other DNA
aacggcctcatcacctttttacactcaaagcctgagattacaccctatgtacaacagtac

SEQ ID NO: 38401 - DNA, 33 bp, synthetic construct
  source 1..33: mol_type = other DNA
gggggcatcttgggagccaacgggctggtaacg

SEQ ID NO: 38402 - DNA, 60 bp, synthetic construct
  source 1..60: mol_type = other DNA
cagacttatctgaccctgtacaacctgcaaaatgtttcatatctgcctctgatcacaaat

SEQ ID NO: 38403 - DNA, 36 bp, synthetic construct
  source 1..36: mol_type = other DNA
agctccctgatcggcgagtctgcactcgctgcaatc

SEQ ID NO: 38404 - DNA, 57 bp, synthetic construct
  source 1..57: mol_type = other DNA
ctgatcaacattctccaccctcctgccggagtgctgccttactatcaagtccagcaa

SEQ ID NO: 38405 - DNA, 36 bp, synthetic construct
  source 1..36: mol_type = other DNA
accgtgtacctgggcgaaatcggtctggttagcagt

SEQ ID NO: 38406 - DNA, 54 bp, synthetic construct
  source 1..54: mol_type = other DNA
ttcctgatgctctacaagcttaacctgagccccaatgtggagacctttaggttc

SEQ ID NO: 38407 - DNA, 33 bp, synthetic construct
  source 1..33: mol_type = other DNA
gggcgcttcatcggcgaatacgctgtagccgcc

SEQ ID NO: 38408 - DNA, 63 bp, synthetic construct
  source 1..63: mol_type = other DNA
gaccctatcgctaccctgctgcacgccacacctgccaccaagccactgatattacaatactac

SEQ ID NO: 38409 - DNA, 30 bp, synthetic construct
  source 1..30: mol_type = other DNA
gcaagcacactgggcgacatcggtttgacc

SEQ ID NO: 38410 - DNA, 60 bp, synthetic construct
  source 1..60: mol_type = other DNA
cagggcttcctggccctctacaacttccaccatcaagacatcgtcggctttgctgaacat

SEQ ID NO: 38411 - DNA, 33 bp, synthetic construct
  source 1..33: mol_type = other DNA
ggatctttcatcggcgagttggccgttggtgct

SEQ ID NO: 38412 - DNA, 60 bp, synthetic construct
  source 1..60: mol_type = other DNA
gaccccctggccacccttctgcacgccacacctgctaacaagagcctggtgctcgagtat

SEQ ID NO: 38413 - DNA, 30 bp, synthetic construct
  source 1..30: mol_type = other DNA
gccagcacactgggcgatacaggtttgacc

SEQ ID NO: 38414 - DNA, 60 bp, synthetic construct
  source 1..60: mol_type = other DNA
gacgcctttctggccctctacaacttcaatcacaaggatatcggcgagttcgctaagcat

SEQ ID NO: 38415 - DNA, 51 bp, synthetic construct
  source 1..51: mol_type = other DNA
gacggcttgtcttttacggatgacaccctggaggcattcgaagccgtgaaa

SEQ ID NO: 38416 - DNA, 33 bp, synthetic construct
  source 1..33: mol_type = other DNA
aacaagggcaatatgaacacactgacctacgac

SEQ ID NO: 38417 - DNA, 36 bp, synthetic construct
  source 1..36: mol_type = other DNA
ggcagcttcatcgggccaaacgccgtttccgctatc

SEQ ID NO: 38418 - DNA, 57 bp, synthetic construct
  source 1..57: mol_type = other DNA
gagctcgccaccttcctggggtcgactgctgccacaaagcccttggtcatggattac

SEQ ID NO: 38419 - DNA, 30 bp, synthetic construct
  source 1..30: mol_type = other DNA
gtgagtactctgggcgacatgggattggcc

SEQ ID NO: 38420 - DNA, 60 bp, synthetic construct
  source 1..60: mol_type = other DNA
cagggcttcctggcactgtacaactttaaccgggctgacatcgccgatttcgccatcaat

SEQ ID NO: 38421 - DNA, 75 bp, synthetic construct
  source 1..75: mol_type = other DNA
gaccccatagtcgggcttctctgctctgccaacatggaggtgtcctcgcaattattccctctggtcaaggacttc

SEQ ID NO: 38422 - DNA, 51 bp, synthetic construct
  source 1..51: mol_type = other DNA
ctcttcctgttttccattaacgaccccgcctatatccctgtggctactgat

SEQ ID NO: 38423 - DNA, 33 bp, synthetic construct
  source 1..33: mol_type = other DNA
gccacctacatcgggcacaacggacaagcagct

SEQ ID NO: 38424 - DNA, 63 bp, synthetic construct
  source 1..63: mol_type = other DNA
aaccagatgatcaacctcctgcaccctccaagcgccgaggtggtgcccttcgtcaagaacttt

SEQ ID NO: 38425 - DNA, 57 bp, synthetic construct
  source 1..57: mol_type = other DNA
gatgccttcctcatgttttacaacctgcacgccgtcgacgacagcatcgtggaagcc

SEQ ID NO: 38426 - DNA, 78 bp, synthetic construct
  source 1..78: mol_type = other DNA
gcctacaacgaggaagatactgtcggtagcgtggtcgaggtcattaaaaaggtctcgtttgtggacgagatcatcgtg

SEQ ID NO: 38427 - DNA, 93 bp, synthetic construct
  source 1..93: mol_type = other DNA
aatgatggttcttccgacaacaccgccgaggaggcgctgaaggcaggggctagggtcattacacacgagaacaataagggcaaaggagaggct

SEQ ID NO: 38428 - DNA, 102 bp, synthetic construct
  source 1..102: mol_type = other DNA
atccataacctgacaagtaaaaaggtggaggcgatgatcaaaccaattctgctcggcaatgcagagataacgaagacaaagttttctagagagtctggtcgg

SEQ ID NO: 38429 - DNA, 147 bp, synthetic construct
  source 1..147: mol_type = other DNA
ctgggcatcagcatccttgaagtcgacatcggggccatcgagcacgacatgagccctctcgacgacctgaacctgatggctaatgaggtggttaggaccatcatgggcagggccaacaaatatggccgagtgatcatgatcgatgac

SEQ ID NO: 38430 - DNA, 39 bp, synthetic construct
  source 1..39: mol_type = other DNA
ctgcagcccatcaagcagcactttggcgaaagcgagttc

SEQ ID NO: 38431 - DNA, 30 bp, synthetic construct
  source 1..30: mol_type = other DNA
tactatatagcggagatgggtcagccttat

SEQ ID NO: 38432 - DNA, 42 bp, synthetic construct
  source 1..42: mol_type = other DNA
ctgacctgtatcaagagcggactttacgaagacacgttctcc

SEQ ID NO: 38433 - DNA, 45 bp, synthetic construct
  source 1..45: mol_type = other DNA
ggcaacaaggacgataggcacagaaaggattacgatagccttcgg

SEQ ID NO: 38434 - DNA, 42 bp, synthetic construct
  source 1..42: mol_type = other DNA
atgttcggcgttgacgtcgctgccattatcacctctgctggt

SEQ ID NO: 38435 - DNA, 54 bp, synthetic construct
  source 1..54: mol_type = other DNA
ccatttcaaaaaggagatttaattcaagttgggaccgacacaaccgtgtatcgg

SEQ ID NO: 38436 - DNA, 36 bp, synthetic construct
  source 1..36: mol_type = other DNA
agcacactggagacctcccggatcaagaacatcact

SEQ ID NO: 38437 - DNA, 36 bp, synthetic construct
  source 1..36: mol_type = other DNA
ctgcagcccatcaagcagcacttcggcgaatctgag

SEQ ID NO: 38438 - DNA, 30 bp, synthetic construct
  source 1..30: mol_type = other DNA
tactacatcaccgagatggaccagccatac

SEQ ID NO: 38439 - DNA, 33 bp, synthetic construct
  source 1..33: mol_type = other DNA
atcattttgggaagcacccaggcctctgttatc

SEQ ID NO: 38440 - DNA, 57 bp, synthetic construct
  source 1..57: mol_type = other DNA
gacaatattctcatgatgctgaacgtgccggctgagatcttcaacctgggcaaggag

SEQ ID NO: 38441 - DNA, 48 bp, synthetic construct
  source 1..48: mol_type = other DNA
ctgagcatcttcaatattgtcgatcccaaccacgctaaggtggtaaca

SEQ ID NO: 38442 - DNA, 48 bp, synthetic construct
  source 1..48: mol_type = other DNA
tctagtagcgaccgggtggtcgataacgtgctgtcctcggaagggacg

SEQ ID NO: 38443 - DNA, 33 bp, synthetic construct
  source 1..33: mol_type = other DNA
aataacatcgaggacattttcgcattgggatac

SEQ ID NO: 38444 - DNA, 72 bp, synthetic construct
  source 1..72: mol_type = other DNA
gcttacggctccgacatcgccggcattatcgggagtcccagcttcttcctgtctggtttcgaaggcgaatat

SEQ ID NO: 38445 - DNA, 42 bp, synthetic construct
  source 1..42: mol_type = other DNA
tggggctctggcggctggctggcagaatgggggtaccacgac

SEQ ID NO: 38446 - DNA, 42 bp, synthetic construct
  source 1..42: mol_type = other DNA
ctggccgtgtctggttacgacggcgcagcttctgccgatttc

SEQ ID NO: 38447 - DNA, 51 bp, synthetic construct
  source 1..51: mol_type = other DNA
tttgataccgggagcggcctgttctacggaggaggtgctgacgccctgacg

SEQ ID NO: 38448 - DNA, 165 bp, synthetic construct
  source 1..165: mol_type = other DNA
ctggacagcagcgctaaggctgcattcgacgtgtttatgaagaccgccctcgaggtctctggcctgaactcctattggacaattaacaaggacgttaacctggtggccaaagtgaaggatcagttcggggcctacatcaacgaaggctccgtcaatatcaccgtg

SEQ ID NO: 38449 - DNA, 132 bp, synthetic construct
  source 1..132: mol_type = other DNA
taccccagcaacgtggtgtccaagctgattaatatcaatcccgtcaaaaccgcgttgtccctgtccctgagcaaggacgtcctctttgtcggcgatagcctctccgtcaaggtctccgtgaacgcaacacag

SEQ ID NO: 38450 - DNA, 102 bp, synthetic construct
  source 1..102: mol_type = other DNA
tatcttaacgacgtgctcaagggaaccgtgaatgtcgactccaaaggcatggcctctatcgtactcaaagatctctcctacgggacgtacaacctcaacgcc

SEQ ID NO: 38451 - DNA, 42 bp, synthetic construct
  source 1..42: mol_type = other DNA
ctcacctgcatcaagtctggcctttacgaagacactttctct

SEQ ID NO: 38452 - DNA, 42 bp, synthetic construct
  source 1..42: mol_type = other DNA
ctctatcatatcaaggccggccggtacaacgccactttcctg

SEQ ID NO: 38453 - DNA, 177 bp, synthetic construct
  source 1..177: mol_type = other DNA
cagaactctacccaccacatcctggggaaccagtaccaggacgtgttctactacctcattgaggccctgaagatgagcggcgtggagattgacggctatcggttcgtcggatacctgcctccattcattcccttccttacaagcatcctgtttaggctcgggttcgtttcctcaacc

SEQ ID NO: 38454 - DNA, 153 bp, synthetic construct
  source 1..153: mol_type = other DNA
atgatcaacgagatccccctgggattcatcaaccaggccgcttccgtgtcctctcaaagctcccgagtcatcacctacgctgggcgagtggtgcacaacgacctctttttctacattaattccatcacatacaacatttcctctggacaagca

SEQ ID NO: 38455 - DNA, 279 bp, synthetic construct
  source 1..279: mol_type = other DNA
gtgatccacatcgaagacgatccagtccccatctgcgagcagaacgcagccaactggctggacggcaaggagggcattgtgttctccaatcggggttatgcgcaaacatggtaccttcaaaagaacgtgttcattcctggaaacatcggcaacgctacactccttaacaaggagctcctgaatggcaacgccacttattatgtatcaagtggcggcaccaatcttaccgactattctctagtgcaagagtttaacgccattaagatctacaagaggaac

SEQ ID NO: 38456 - DNA, 54 bp, synthetic construct
  source 1..54: mol_type = other DNA
gctgacttcgccgaggaacctagcgttagagactatctggctagcattgataac

SEQ ID NO: 38457 - DNA, 63 bp, synthetic construct
  source 1..63: mol_type = other DNA
tacggcttcaacaccgactacggagcgcttttttctgggatgtttccctcggaacagatcata

SEQ ID NO: 38458 - DNA, 42 bp, synthetic construct
  source 1..42: mol_type = other DNA
ttcaaggagtttttcatccccacactgctcacctccatctcc

SEQ ID NO: 38459 - DNA, 63 bp, synthetic construct
  source 1..63: mol_type = other DNA
ggccctatcatcgggattctgtgcccaagcgcccagatccagcccattgtttacgtacaattc

SEQ ID NO: 38460 - DNA, 48 bp, synthetic construct
  source 1..48: mol_type = other DNA
ctcatgctttatcaagttaacaatccaagcgacatccctatcgttctg

SEQ ID NO: 38461 - DNA, 156 bp, synthetic construct
  source 1..156: mol_type = other DNA
aagcagatcaacatcggcatctactattgggatatcttcctctacctgaacaacggcctcacattcgctgggaaccggcttggcgacaccatgtacctgagccccttcctgtccttcctgtactctattttcttccgtatcgggttcatcaacgag

SEQ ID NO: 38462 - DNA, 186 bp, synthetic construct
  source 1..186: mol_type = other DNA
ttctacctgaacaccgggagtctgttcccttttatcaagcagttcgacaactccgtctctggctccgtttcaacggtcaatcccggattcaatctggacctcacatattacctcaagtttatcccaaattacataagcagcttctctatgcctaactacaccgacatcatcactccaaacaagtcc

SEQ ID NO: 38463 - DNA, 30 bp, synthetic construct
  source 1..30: mol_type = other DNA
atggacaacggcatccggttcctgggttac

SEQ ID NO: 38464 - DNA, 36 bp, synthetic construct
  source 1..36: mol_type = other DNA
tccaacctgatcggtgctgtggcactgagcgctatt

SEQ ID NO: 38465 - DNA, 66 bp, synthetic construct
  source 1..66: mol_type = other DNA
gggcccattatcggcatcctgtgcccaagcgcccagatccagcctattttccaagtagtccagtac

SEQ ID NO: 38466 - DNA, 48 bp, synthetic construct
  source 1..48: mol_type = other DNA
ctgatgttatatcaagtgaataaccctagcgacattcccatcgttctg

SEQ ID NO: 38467 - DNA, 123 bp, synthetic construct
  source 1..123: mol_type = other DNA
gtcctgggaggcgtgacagaggctaataccgccctcactaacatggcccacttataccctgctgatgctcttgccgagggcggtaccggctggacatctttccccaagtttgcaagccctttc

SEQ ID NO: 38468 - DNA, 102 bp, synthetic construct
  source 1..102: mol_type = other DNA
aacgtgtacttttatcaaaatttcggacaaattgcgatagatttcgttggtggaaatatggactccatcattcccacatttattagcactgcactgccggag

SEQ ID NO: 38469 - DNA, 90 bp, synthetic construct
  source 1..90: mol_type = other DNA
ttcaagaagactgccaccgggctgggaatctgcaaattcatcttcggcgtggacatgctcatcaacacaatgccctggtacaccatcgac

SEQ ID NO: 38470 - DNA, 57 bp, synthetic construct
  source 1..57: mol_type = other DNA
atcctcatgcttgtaataaaagagtacaccattgagctccagagcctgctggaaatg

SEQ ID NO: 38471 - DNA, 33 bp, synthetic construct
  source 1..33: mol_type = other DNA
accaacttctctctagattctctgaagatcatt

SEQ ID NO: 38472 - DNA, 123 bp, synthetic construct
  source 1..123: mol_type = other DNA
gtgctgggcggcgtcaccgaggccaatactgctcttaccaacatggcccctctctaccctccggacgcaatcgctgagggcggcaccggctggacaagctttccaaccttgggttcccctttt

SEQ ID NO: 38473 - DNA, 102 bp, synthetic construct
  source 1..102: mol_type = other DNA
aatgtgtacttttatcaaaacttcggccaaatagcgatcgactacgtcggcggcaacatggatagcatcatcccaaccttcataagtactgcgcttcccgag

SEQ ID NO: 38474 - DNA, 90 bp, synthetic construct
  source 1..90: mol_type = other DNA
ttcaagaagactgccaccgggctcggaatctgcaaactgatcttcggcgtggatatgctgatcaacaccatgccctggtacacaatcgac

SEQ ID NO: 38475 - DNA, 207 bp, synthetic construct
  source 1..207: mol_type = other DNA
cggtacagctcccctaccctgctgcatagctggcgcggctctcggaacctcgtgaattctactctccaaatacagtacctgatggacaaccccaaacacggcatcaacttcttcaagatcatctttacacgggacctccgccacctggctaacggcgtgttctccttctttggagccaggcaagttatggatgaccacactgactac

SEQ ID NO: 38476 - DNA, 48 bp, synthetic construct
  source 1..48: mol_type = other DNA
acctgggccttcatcggccagtttaacctcgggctgtcactgagatac

SEQ ID NO: 38477 - DNA, 93 bp, synthetic construct
  source 1..93: mol_type = other DNA
atgttccttatctacggccagcccgtgctggacataggaatgctgtttagaccttttctcattggttacctgttccttaaccaaggacaggga

SEQ ID NO: 38478 - DNA, 156 bp, synthetic construct
  source 1..156: mol_type = other DNA
agtatcgacgccatcaacattaccctgaacaccatttaccctgggtctgagatttataacggaggcggaactctcaattccttcaccaattacatcccaacaatcttctttcctctggactacgctaacctgcttaagaacacatgtgactattct

SEQ ID NO: 38479 - DNA, 54 bp, synthetic construct
  source 1..54: mol_type = other DNA
cagctgcccgacttcattatccaactaactctccggagcaagatgaaatccttt

SEQ ID NO: 38480 - DNA, 36 bp, synthetic construct
  source 1..36: mol_type = other DNA
atcgacgccctgattggcagcaacgacttcgatgag

SEQ ID NO: 38481 - DNA, 81 bp, synthetic construct
  source 1..81: mol_type = other DNA
cccgcctataacgaagaggcaactgtggctaaggttgtctccgtagctaggaaactcagttacgttaccgaagtaattgtc

SEQ ID NO: 38482 - DNA, 123 bp, synthetic construct
  source 1..123: mol_type = other DNA
gatgacggcagtacagacaggacagtcgaagaagcagagagtgcaggggctaccgtaataagtcacattatgaacgagggaaaggggtctgctataaagactggcttcaagaatagccatggt

SEQ ID NO: 38483 - DNA, 96 bp, synthetic construct
  source 1..96: mol_type = other DNA
agcaactttacttctgagaagattgacaagatcattcggcccatcctggaggaccagaccgatatcaccaagacaaagttcgctagggaatctgga

SEQ ID NO: 38484 - DNA, 120 bp, synthetic construct
  source 1..120: mol_type = other DNA
gtgcacgggattaagatcctcgaggttgacattggcgatatttgccatgacatgagcccactagccgatctaaataagatggccaacgaggttgtcagaacgattatcgaccgggcagtg

SEQ ID NO: 38485 - DNA, 156 bp, synthetic construct
  source 1..156: mol_type = other DNA
cagagcgtgatcggagtctcttactgggacatcttcgtctatttacaagacgccctcctcttcgccaatatcaacatcgggagtcagctgagcgttccacctgtgctgagtctgcttacctccatccctttccggctggggttcatctctgagact

SEQ ID NO: 38486 - DNA, 183 bp, synthetic construct
  source 1..183: mol_type = other DNA
caaggctcaattccattcctgagccagtttgtcgaagtcagcaacagtaaccaagtatcttctgttaacgtcggatacgagctgaaccccttctactatcttcaacacctacctgagatcctcacatgctggagcgcttcgtcgcaatactcgatgatgctgaccaccgccgtgaacaatccc

SEQ ID NO: 38487 - DNA, 36 bp, synthetic construct
  source 1..36: mol_type = other DNA
accaagatcgccaacgagctgaacggcaatggattg

SEQ ID NO: 38488 - DNA, 39 bp, synthetic construct
  source 1..39: mol_type = other DNA
tttggcaccttcatcctgttcgagctcgataccctgact

SEQ ID NO: 38489 - DNA, 66 bp, synthetic construct
  source 1..66: mol_type = other DNA
ctgcaggtggatggcgtcaaattcgacgggaacaaggagtttctctacacgataacgggaaaacca

SEQ ID NO: 38490 - DNA, 165 bp, synthetic construct
  source 1..165: mol_type = other DNA
agccaatatgttaataacctcggaacatacgctaactaccctgccgtcaccgacaaggccaccgagtttattcaacccatgctggcatacctcattcccggggcccctctatacgacgcgacaggcacagtcccaaatgctattttacaagctttcatcaagtca

SEQ ID NO: 38491 - DNA, 30 bp, synthetic construct
  source 1..30: mol_type = other DNA
gggtttggaggtcaggctgccacacatggc

SEQ ID NO: 38492 - DNA, 33 bp, synthetic construct
  source 1..33: mol_type = other DNA
gtcgccgtgatcaccggcctgaacgactattac

SEQ ID NO: 38493 - DNA, 123 bp, synthetic construct
  source 1..123: mol_type = other DNA
gccgagttggacggcgtgaccgccgcgttcgagtccctggcggatctgccggcgagtagtgccagcggtgtccttcccgggttcgagggatgggacagcgtggcagattttggatcaagtgaa

SEQ ID NO: 38494 - DNA, 132 bp, synthetic construct
  source 1..132: mol_type = other DNA
tctaatgtgttcttctggaataacggagaaggtcttgctgctgcccatgtcgcctctatatacggatcaggcagcacggattttatcattccacaatttatcctggaacttttcgatgggaagacagggggt

SEQ ID NO: 38495 - DNA, 90 bp, synthetic construct
  source 1..90: mol_type = other DNA
aacaccagcacatccgtgtttctgcctatatgcaaatggatcactggcaactctgtcctgttcaccgagggcagtatccagtactgtgac

SEQ ID NO: 38496 - DNA, 66 bp, synthetic construct
  source 1..66: mol_type = other DNA
acccaatgggacagcgtctctgatgtctggaacgacacaagcgagatggggcagatctgggaagcc

SEQ ID NO: 38497 - DNA, 54 bp, synthetic construct
  source 1..54: mol_type = other DNA
tgggggtgcccggacggcgtggatatccccgggctcggactgcatttgtctcct

SEQ ID NO: 38498 - DNA, 87 bp, synthetic construct
  source 1..87: mol_type = other DNA
ctgatgattctgggacaccagaccgactttttcaccggccccacgtacatcatgacacacaagcatggcaatgaagctactcctgag

SEQ ID NO: 38499 - DNA, 45 bp, synthetic construct
  source 1..45: mol_type = other DNA
ctgacagagccaggtgacatcgatggcggtagattggctggttcc

SEQ ID NO: 38500 - DNA, 30 bp, synthetic construct
  source 1..30: mol_type = other DNA
tggaccgacattggggatggggtccctgag

SEQ ID NO: 38501 - DNA, 96 bp, synthetic construct
  source 1..96: mol_type = other DNA
gccatcgcccctgatgtggactccgtgcccatctatattgtgaacctggttcaaaaaggagtcgagaccggcgatccaagctgctacgctgatgcc

SEQ ID NO: 38502 - DNA, 45 bp, synthetic construct
  source 1..45: mol_type = other DNA
tacgaacccaacctgaaggagctgaataagggcaagatcaccaaa

SEQ ID NO: 38503 - DNA, 69 bp, synthetic construct
  source 1..69: mol_type = other DNA
atcatcctggaagataagattaataagtgcaacagcaaagtggagctcgaggagatcgatgtcttgcgg

SEQ ID NO: 38504 - DNA, 69 bp, synthetic construct
  source 1..69: mol_type = other DNA
tcccagtccaagagcctgaataacgataagcggaataagagctacgagaacgactactattattcgacc

SEQ ID NO: 38505 - DNA, 54 bp, synthetic construct
  source 1..54: mol_type = other DNA
gaaattaaggagaataacaacgtgaagaataacaccgaggagttcaagatcctg

SEQ ID NO: 38506 - DNA, 30 bp, synthetic construct
  source 1..30: mol_type = other DNA
ggcttcggtggacaggccgctacacatggc

SEQ ID NO: 38507 - DNA, 30 bp, synthetic construct
  source 1..30: mol_type = other DNA
gtggccgtgcttaccgggttgactgactat

SEQ ID NO: 38508 - DNA, 123 bp, synthetic construct
  source 1..123: mol_type = other DNA
actctcggcggagtgacccctgcctttgaatctcttgccgacctgtcgaccagcgaagcttccggcgtcctgcccggatttaacggatggacagaggtggcatcttttgggagtaacgaatgg

SEQ ID NO: 38509 - DNA, 126 bp, synthetic construct
  source 1..126: mol_type = other DNA
agcaacgtgttcttcatgaacgagcattcgcaagcggctgctgcctatgtttcgggactggggctcgggaccgacttcatcgttccccaatacatactcgaagtgttcgactctgtgtttggaggc

SEQ ID NO: 38510 - DNA, 90 bp, synthetic construct
  source 1..90: mol_type = other DNA
aactctagcatgtccgtgttcatgcccatctgccggtggattaccggcaacgctgtcctgttccctaatacatggctggccttctgtgat

SEQ ID NO: 38511 - DNA, 123 bp, synthetic construct
  source 1..123: mol_type = other DNA
accggaggcatctacccaatccaaattatgcacaagttttttcaaagcttgtacccctatatgccaatgacatacgctattcgcctggtccgtgaagctcaactgggcgtggtttggggaaac

SEQ ID NO: 38512 - DNA, 54 bp, synthetic construct
  source 1..54: mol_type = other DNA
gctgatattgtgaatatcgggattcagaacgccaattttcaatacataatcgac

SEQ ID NO: 38513 - DNA, 39 bp, synthetic construct
  source 1..39: mol_type = other DNA
gcttacgatgcaataaacagtggaatcctgaccggagac

SEQ ID NO: 38514 - DNA, 69 bp, synthetic construct
  source 1..69: mol_type = other DNA
ggcatcatcaattctgtcgtgaacagtttcattttctccacaccttttagcatcgacgacgtgaacgat

SEQ ID NO: 38515 - DNA, 60 bp, synthetic construct
  source 1..60: mol_type = other DNA
ttctacccatcaatgtcggcaacctacaagctgccttcttggaacccagcttggtccatg

SEQ ID NO: 38516 - DNA, 156 bp, synthetic construct
  source 1..156: mol_type = other DNA
cagacaatccggtctatttcctactgggacatcttcgtgtatctgcaaaacgcaatgctgttctcccacatcaacatcggatcacagctgtcagtgccacctgtcctgagcctgctgaccagtataccatttaggcttgggttcatttctgaaacc

SEQ ID NO: 38517 - DNA, 189 bp, synthetic construct
  source 1..189: mol_type = other DNA
agctatcaggggacaatccccttcatatctcaatttatggaagtgtcttctagtagccaagtgtcgtccatcaacgtcggttacgagctgaacccttggtactatattcaaaatttgccggagtacctgacctcctttggagtctcaaatagctatttctctactctgagcaccagtgacaactcaccg

SEQ ID NO: 38518 - DNA, 201 bp, synthetic construct
  source 1..201: mol_type = other DNA
tactccactcctactttgctgcattcttggaggggctctcgcaatttggttaactctactcttcaaatcgagtatctgaaaaataaccccaaacatacactggacttctttaaaatcatttttactagagacctgcgacacctggccaacggggtcttttccttcttcggcgcccgccaagtgatagaccattacattgat

SEQ ID NO: 38519 - DNA, 48 bp, synthetic construct
  source 1..48: mol_type = other DNA
acctgggcctttatcggccggttcaacctggggctcagcattaggtac

SEQ ID NO: 38520 - DNA, 204 bp, synthetic construct
  source 1..204: mol_type = other DNA
aggtactccacgcctacactgctgcattcttggcgggcctcccgcaacttagtcaacagcacactccaaatccaatacataaaggacaaccctagctacctagtgcaattcttcaagactatctttgtccgggatcttcggcacctcgccaacggggtttttagttttttcggggctaggcaggtggtggaccactacatcgac

SEQ ID NO: 38521 - DNA, 48 bp, synthetic construct
  source 1..48: mol_type = other DNA
acctgggccttcatcggcaagtttaacttggggctcagtctgaggtac

SEQ ID NO: 38522 - DNA, 30 bp, synthetic construct
  source 1..30: mol_type = other DNA
ggcttcggaggtcaggcagctacccatggg

SEQ ID NO: 38523 - DNA, 30 bp, synthetic construct
  source 1..30: mol_type = other DNA
gccgtgctgaccgggctgacagactactat

SEQ ID NO: 38524 - DNA, 126 bp, synthetic construct
  source 1..126: mol_type = other DNA
aacgccgttggaggcgtgaccgagggcttcaccgctctgtccgaaatttcgaccggcgaggcctccggcgtcctgcctgggtttaacggctggactgaggttgcagacttcggctctaatgaatgg

SEQ ID NO: 38525 - DNA, 129 bp, synthetic construct
  source 1..129: mol_type = other DNA
ctgtccaacgtgttcttcatggacgagcaccacctggccgctagccgatatgtagcggggctcggcctcggcaccgacttcatcgttccgcaatacattctcgaagtatttgaagatattttcggtggt

SEQ ID NO: 38526 - DNA, 90 bp, synthetic construct
  source 1..90: mol_type = other DNA
aactccagcatgtctgtcttcatgcccatatgtaaatggatcacaggcgacgctgtgctgttccctgatacctggctggccttctgtgat

SEQ ID NO: 38527 - DNA, 201 bp, synthetic construct
  source 1..201: mol_type = other DNA
cggtacagcgcccctactctgctgcattcctggcgatcctctcgcaacctcataaactccacattacaatttaaccatttcatctctcaccctgcgcttgtgcctaaatttttttataacatattcttcctcgacctccctaacatggtgactggcgtgttctcctttttcggcgcacgccagtttcaccactacgatgat

SEQ ID NO: 38528 - DNA, 51 bp, synthetic construct
  source 1..51: mol_type = other DNA
ctcacatgggcaagcgtcgggtactataatctgggcatctctacccgctac

SEQ ID NO: 38529 - DNA, 54 bp, synthetic construct
  source 1..54: mol_type = other DNA
aacaccgcgccctacggaggtgccatttatatcaaggggactatgagcactgtg

SEQ ID NO: 38530 - DNA, 45 bp, synthetic construct
  source 1..45: mol_type = other DNA
accgctgactacggaggggctatatccggctatggggcaaatgga

SEQ ID NO: 38531 - DNA, 69 bp, synthetic construct
  source 1..69: mol_type = other DNA
agcacatttaacaacaataccgccgaatatggtggtgccatcttctgggacaacaaggatggagctgtg

SEQ ID NO: 38532 - DNA, 54 bp, synthetic construct
  source 1..54: mol_type = other DNA
accttcaataacaataacgctatcatgcacggcggcgccatcaactggaacaac

SEQ ID NO: 38533 - DNA, 54 bp, synthetic construct
  source 1..54: mol_type = other DNA
tctaacctgggcgaaaccatctatttgtactcctcgagtgccaatggcatcgag

SEQ ID NO: 38534 - DNA, 39 bp, synthetic construct
  source 1..39: mol_type = other DNA
accgtgattaagttccgggacgtgacaatcggcaaagtc

SEQ ID NO: 38535 - DNA, 45 bp, synthetic construct
  source 1..45: mol_type = other DNA
aaatatgataaagtgattatcaccgccatgatcaataaggatgcc

SEQ ID NO: 38536 - DNA, 291 bp, synthetic construct
  source 1..291: mol_type = other DNA
attaccactaatactaagttttggatcgcttctgctctggattttagctttggtccctctggcatcgatgtgaaagtagcctcctttgataattttgttcgcggggggatctcgttcgccgtcccgccgaataccgagcttggagaacgggtgcaggaaggcgatatctttaagctttacgactctgagaaaagttccctgctgaaagagtacaaggactatatagaatacatcctgcttttcaagagctctgttaagggactggccaagggagccagcgtggagtatctc

SEQ ID NO: 38537 - DNA, 132 bp, synthetic construct
  source 1..132: mol_type = other DNA
gttctgattaggattcagaaggaaagactgacaaatggcaatgaccaaccggatgaaaagatcatcgcccaaatagaatcagctatcaagaaagggctgcgcggcaccctggagtcctccaacctgcttacc

SEQ ID NO: 38538 - DNA, 273 bp, synthetic construct
  source 1..273: mol_type = other DNA
aacctctttgtcaacctcgtgatggacaccaagaacaactccgaaaacgaggagatcatcaccacctacaaggggtaccgggtcatccccactaaggtggctggagtgatcgaaatggccgagaaaatcgagctcttcatcgacaaccttaatagcctgaacatcaaggccatcagtgacaacctgaataacctgctgggcgagatgatcaagaccgccgataacctcaaagctatcaccgacaatctgaagtctacaacaaagaacgagaat

SEQ ID NO: 38539 - DNA, 120 bp, synthetic construct
  source 1..120: mol_type = other DNA
aatgtcctggactcttattctggaaatgccaacctctacatggagctgaacaagaccctccgcgagcttaacctggtgctcaaggatgtgaacgggctgacaaagcaggctaacgataag

SEQ ID NO: 38540 - DNA, 30 bp, synthetic construct
  source 1..30: mol_type = other DNA
gacgagcagcctaccgtgaacaagaaaaag

SEQ ID NO: 38541 - DNA, 201 bp, synthetic construct
  source 1..201: mol_type = other DNA
tatagtgcccctacattgctccactcctggcgctcctctcacaatctgatcaatagcaccatgcaattcaatcatgtgatacaccacccctcttccatctccaaatttttctacaatattgtgttcatagagatcccaaacatgatgaccggtgtcttctcttttttcggggcccatcaattccatcattacgccgaccgc

SEQ ID NO: 38542 - DNA, 48 bp, synthetic construct
  source 1..48: mol_type = other DNA
acatgggccagcgtcggatacttcaacctgggcatctcgactcgctat

SEQ ID NO: 38543 - DNA, 162 bp, synthetic construct
  source 1..162: mol_type = other DNA
cccttccaaagtgaactgaacctcgagaagaactctaagctgaacgaacttaatgccctgtacaaggggcccctggagcttaatagcaatgcatatacactcaaaaacaggattgatcagtcctacgatatagaggaaatcaagtcaattgacgtgctgaga

SEQ ID NO: 38544 - DNA, 204 bp, synthetic construct
  source 1..204: mol_type = other DNA
taccacagctccaaaattgtgtcatcgaaggacgatttcggccgcgtaatgatgtcttatggcgagaataagaatattatcatgtcggtcaaggacgctaacgacttcgttaaggacaacgatgccaagatcctgagcaacgtgcagtttaataaggtcaacactgttatcgtccccatctctctaacgagactccaggctaca

SEQ ID NO: 38545 - DNA, 141 bp, synthetic construct
  source 1..141: mol_type = other DNA
ctgagggacaacagttccgagcacatggacgactatgattccatggatagtaatgtttcatcggtgcaaagtaatgaaaccatcgccaatggcacactcgaggaaaacgaggaagatccaatcgttagtggcgctactgta

SEQ ID NO: 38546 - DNA, 252 bp, synthetic construct
  source 1..252: mol_type = other DNA
atcctgcgctctaaggacagcggcctggtggactccaccgtctctaagagcaggaccatcatcaaagggaacgagaccaagcccttcgaaaacactgtctcctactcttctgacgtcgaggaactgctcaaaagcgccgttctcaactcaaacaacgtcgtggacgctctggactcttaccttatgaactacggagttaggcttagcaactttgagagaatgagcaacctcggcgaccttgactcggagtac

SEQ ID NO: 38547 - DNA, 48 bp, synthetic construct
  source 1..48: mol_type = other DNA
gaggtccctcatagcgatgtgaatttcatcatcaacaacatggacaat

SEQ ID NO: 38548 - DNA, 96 bp, synthetic construct
  source 1..96: mol_type = other DNA
accatccccactgacttcgcccctgactgggtggtcaatgagctgaacgaaacatattacgagaacctataccaagataacagcctggatctcttg

SEQ ID NO: 38549 - DNA, 30 bp, synthetic construct
  source 1..30: mol_type = other DNA
ctgggggccggcgaggaaatcattgacatc

SEQ ID NO: 38550 - DNA, 72 bp, synthetic construct
  source 1..72: mol_type = other DNA
atacggcgggctgtggttaaagcaggtgactacaacctgaaggaggaggaagccgacttcgatagttttagg

SEQ ID NO: 38551 - DNA, 42 bp, synthetic construct
  source 1..42: mol_type = other DNA
ctgggctttaacctggccgcaattatcacttctgctggcctc

SEQ ID NO: 38552 - DNA, 69 bp, synthetic construct
  source 1..69: mol_type = other DNA
ctggccaccaggcccttcaagaagggcgacctcgtggctgttggagccgatgtgcaggtctaccgtcaa

SEQ ID NO: 38553 - DNA, 204 bp, synthetic construct
  source 1..204: mol_type = other DNA
aagtatagcacgccaacactgctgcactcctggcgcgcctctcggaaccttgtaaacagctctctacaaattgaatacttcatgtccaactctacatttagaattgactttttcaagaccatcttcctccgggacgtgaaacacctggctaatggggtcttctccttcttcggcgccaggcaagtcattgaccactacactgac

SEQ ID NO: 38554 - DNA, 48 bp, synthetic construct
  source 1..48: mol_type = other DNA
acctgggccttcatcgggcagtttaacctgggcttgagtctcagatac

SEQ ID NO: 38555 - DNA, 54 bp, synthetic construct
  source 1..54: mol_type = other DNA
aattcgattctctcggacttcttcaacaacaagacctctctgtcctttgaagcc

SEQ ID NO: 38556 - DNA, 57 bp, synthetic construct
  source 1..57: mol_type = other DNA
aacagcgtgctggacttttacattttcgataaggaggtctacatccacgagtccttc

SEQ ID NO: 38557 - DNA, 30 bp, synthetic construct
  source 1..30: mol_type = other DNA
gtggtcaaggggacactgagccttggtgag

SEQ ID NO: 38558 - DNA, 54 bp, synthetic construct
  source 1..54: mol_type = other DNA
aactccgtgctgaatttctttctcgaaaacgagcccttctatatctctgattcc

SEQ ID NO: 38559 - DNA, 33 bp, synthetic construct
  source 1..33: mol_type = other DNA
atggttatagagggcactatatcattgggagaa

SEQ ID NO: 38560 - DNA, 201 bp, synthetic construct
  source 1..201: mol_type = other DNA
cgctactctgcccccaaactgctgcattcttggcgctcttctcggaacctcattaattcaacaatgcagctgaattatgtcctctctcaccctgctagcataagcaagttcttctataatatcttctttctcgatcttcccgtgattctggtcggggtcttcaatttcttcggcgccttacaattctcccactacattgac

SEQ ID NO: 38561 - DNA, 48 bp, synthetic construct
  source 1..48: mol_type = other DNA
acatgggcctccgttggctataacaatcttgggataagcacacgttat

SEQ ID NO: 38562 - DNA, 201 bp, synthetic construct
  source 1..201: mol_type = other DNA
tactccactccaaccctgatgcactcctggcgctcctcttataactatgtggactcagcggcccaactgaattacctgataacaaatccaaaccaaatcctgaacttcctcgcacatatattcacaatcgacctgggttatgtggtcaacggcgtcttcaattttttcaatggcaagctcgggctgcactaccaagaccac

SEQ ID NO: 38563 - DNA, 51 bp, synthetic construct
  source 1..51: mol_type = other DNA
ctcacttggtcatatgtcggtcagatcaatctgggcgtgtctattaggtat

SEQ ID NO: 38564 - DNA, 204 bp, synthetic construct
  source 1..204: mol_type = other DNA
tatagcgctccaaccctgatgcacagctggcggtctagccacaacctgattaactccacaatgcagctggattacgttatcaagcacgcccggactagtatccctaagttcatctacaatatcttcattattgaggtgcccaaaatggttggcggagtcttctcctttttcggagccaggcagttccaccactacaccgatgag

SEQ ID NO: 38565 - DNA, 48 bp, synthetic construct
  source 1..48: mol_type = other DNA
acctgggcctcggttggatattacaacctggggatcagcacaagatat

SEQ ID NO: 38566 - DNA, 36 bp, synthetic construct
  source 1..36: mol_type = other DNA
tcccagctgatcctcgacctgaacaccagccttagc

SEQ ID NO: 38567 - DNA, 171 bp, synthetic construct
  source 1..171: mol_type = other DNA
gccactgctggcattgcggatgctgtggacatctatgtgccagacgcaaatcagacacaattcgaagttggaacaggtgcttacctcgagaaacttgggaacctgaatgaaagttctattctgagtcaggatgtgaaagccaagattgttaacattgtcctgaccgacgcg

SEQ ID NO: 38568 - DNA, 60 bp, synthetic construct
  source 1..60: mol_type = other DNA
gtgaacagccaggccatttacctgtttaccatcttcctcttcaagtcccgagctacaagg

SEQ ID NO: 38569 - DNA, 54 bp, synthetic construct
  source 1..54: mol_type = other DNA
aacagcatcctgtattactacttttacaagacacctttctccattgaggaaaac

SEQ ID NO: 38570 - DNA, 30 bp, synthetic construct
  source 1..30: mol_type = other DNA
aacaagggccccatgttctacgacatgccc

SEQ ID NO: 38571 - DNA, 42 bp, synthetic construct
  source 1..42: mol_type = other DNA
cctatcatcactaactactatcataagccggaggctcttctg

SEQ ID NO: 38572 - DNA, 36 bp, synthetic construct
  source 1..36: mol_type = other DNA
ggaggcttccttgccgcctctgctatcgggtacttc

SEQ ID NO: 38573 - DNA, 51 bp, synthetic construct
  source 1..51: mol_type = other DNA
gagatcatgggacttgtttatttcacgaacagcgcttacatgaatggcgct

SEQ ID NO: 38574 - DNA, 30 bp, synthetic construct
  source 1..30: mol_type = other DNA
gacgccggccccaagttctacgatatgccc

SEQ ID NO: 38575 - DNA, 30 bp, synthetic construct
  source 1..30: mol_type = other DNA
gacgttgggccccggttctacgagatgccc

SEQ ID NO: 38576 - DNA, 198 bp, synthetic construct
  source 1..198: mol_type = other DNA
agcgcaccagctctgatgcacagctggcggtccaagctgaactatatggatccaaagctgcagctgaattacctgatcaatcaccctttttccatcctgaggttcatgcgcctgattttcacatacacccttgggatcactgtgaacggcctcttcaacttctttggagccaactctctcaaccactacgctgaccac

SEQ ID NO: 38577 - DNA, 51 bp, synthetic construct
  source 1..51: mol_type = other DNA
ctcacctgggctgacgtcggaagtacaaacattggagtgtctacaaggtac

SEQ ID NO: 38578 - DNA, 30 bp, synthetic construct
  source 1..30: mol_type = other DNA
gaccggggccctatgctgttcgatatgccc

SEQ ID NO: 38579 - DNA, 33 bp, synthetic construct
  source 1..33: mol_type = other DNA
gcctccttcatcggcgagtctgctattgccgcc

SEQ ID NO: 38580 - DNA, 57 bp, synthetic construct
  source 1..57: mol_type = other DNA
gccatcctcaacttcctgcacccgccggctgatgctatgccctacctgaaggcatat

SEQ ID NO: 38581 - DNA, 36 bp, synthetic construct
  source 1..36: mol_type = other DNA
accatctacatgggcagcgtcgggcttgtgtcttat

SEQ ID NO: 38582 - DNA, 48 bp, synthetic construct
  source 1..48: mol_type = other DNA
ctgatgctgtacaacctgcacactagtccccatgtggagacattcaga

SEQ ID NO: 38583 - DNA, 33 bp, synthetic construct
  source 1..33: mol_type = other DNA
ttctttgaccacgtgaccgtgctgaggatggat

SEQ ID NO: 38584 - DNA, 39 bp, synthetic construct
  source 1..39: mol_type = other DNA
atagtcgggctagacgaggaatggatcgatctgatcaac

SEQ ID NO: 38585 - DNA, 69 bp, synthetic construct
  source 1..69: mol_type = other DNA
cggattttcatacaagctgacgactacaccaagggcgattcagcgacggatttcgagagctttagaccc

SEQ ID NO: 38586 - DNA, 48 bp, synthetic construct
  source 1..48: mol_type = other DNA
ctcgggttcaacctggctgccgtgattacctccgctggcctagtctct

SEQ ID NO: 38587 - DNA, 78 bp, synthetic construct
  source 1..78: mol_type = other DNA
attctggccacaagacccttcaagcggggcgacttaatttccgtcggcaccgatactctgatttaccgggtccgtcga

SEQ ID NO: 38588 - DNA, 123 bp, synthetic construct
  source 1..123: mol_type = other DNA
ctgctgggcggcgtgtccaatgctaacatggccctcactaacatggtcaacctgtaccctgctgacgccattgccactggcggaaccggctggaccagcttccccacaatggggactccattt

SEQ ID NO: 38589 - DNA, 102 bp, synthetic construct
  source 1..102: mol_type = other DNA
aacgtgtacttccatcaaaacctaggcaagatcgccgtagatgttgttgggggaaacatcgacaaaatcatccccacattcattacaagcgcactgcccgag

SEQ ID NO: 38590 - DNA, 84 bp, synthetic construct
  source 1..84: mol_type = other DNA
gctaagaccgccaagggcctgggcatttgcatggcgttgctgggagtggagactatcattcccactgccccttggcctttcatc

SEQ ID NO: 38591 - DNA, 123 bp, synthetic construct
  source 1..123: mol_type = other DNA
ctgcttggaggagtatcgactgccaatactgccttgaccaacatggtcaacctctaccctgctgatgccctggccaccggcggcactggatggaccgcatttccggagttcggcactccattc

SEQ ID NO: 38592 - DNA, 102 bp, synthetic construct
  source 1..102: mol_type = other DNA
aatgtgtacttttttgacaagctcggcaagatagccgtcgatgttgttggaggcaacatcgacaaagtgatccccacatttattaccatggctctgccggaa

SEQ ID NO: 38593 - DNA, 87 bp, synthetic construct
  source 1..87: mol_type = other DNA
ttcaaaaagaccgccgtcgggctcggcatctgcaagtttctgctcggggtcgagacactcctgcctgccgctccatggcctttcatc

SEQ ID NO: 38594 - DNA, 123 bp, synthetic construct
  source 1..123: mol_type = other DNA
ctgctgggaggcgtggacacagccaataccgctctcaccaacatgggcaacctgtaccctgccgacgctatggccactggcggcaccggctggacaagctttcccaagtttgggactccattt

SEQ ID NO: 38595 - DNA, 102 bp, synthetic construct
  source 1..102: mol_type = other DNA
aatgtgtacttcatggataagctggggaaaatcgccgtggacgtggtcggtggtaacatcgataagatcatccccacattcataaccatggcactgcctgag

SEQ ID NO: 38596 - DNA, 90 bp, synthetic construct
  source 1..90: mol_type = other DNA
ttcaaaaagaccgccgtcggactgggcatctgcaagtttatcttcggcgtcgagacaatactgccggctgcaccttggcccttcattgac

SEQ ID NO: 38597 - DNA, 123 bp, synthetic construct
  source 1..123: mol_type = other DNA
ctgcttggcggcatcgacactgctaacaccgccctgaccaacatgggcaatctctaccccgccgatgcattagccacggggggaacaggttggaccagttttcccgagttcgggactcctttc

SEQ ID NO: 38598 - DNA, 102 bp, synthetic construct
  source 1..102: mol_type = other DNA
aatgtatatttcatggataagctggggaagatcgccgtggacgtagtcggagggaacatcgacaaaatcatccccacattcatcacgatggctctccctgaa

SEQ ID NO: 38599 - DNA, 90 bp, synthetic construct
  source 1..90: mol_type = other DNA
ttcaaaaagaccgcagtcggcctaggaatctgcaagttcatcttcgggatcgatacactcctgcctgccgctccctggccattcatagac

SEQ ID NO: 38600 - DNA, 123 bp, synthetic construct
  source 1..123: mol_type = other DNA
ctgctcggcggagtggacaccgccaacaccgctctgaccaacatgtcccacctctatcctgcggacgcgctgtctaccggtggcactggctggacaagtttccctgaatttgggactccattc

SEQ ID NO: 38601 - DNA, 105 bp, synthetic construct
  source 1..105: mol_type = other DNA
aatgtgtacttctttgataagctcggacaaattgcagtggatgtcgttggcgggaacatcgacaaaatcatccccacattcattaccatggcccttcctgaagag

SEQ ID NO: 38602 - DNA, 84 bp, synthetic construct
  source 1..84: mol_type = other DNA
gccaaaactgccaccggcctggggatttgcaagttcatcctgggagtggagacaatcttaccggccgctccttggccctttatc

SEQ ID NO: 38603 - DNA, 123 bp, synthetic construct
  source 1..123: mol_type = other DNA
ctgctcggtggcgtcacccacgccaataccgccctgaccaacatggtcaatctgtaccctgccgaggctaccgctaccggaggaaccggatggacaagctttcctactttcggcaccacattt

SEQ ID NO: 38604 - DNA, 102 bp, synthetic construct
  source 1..102: mol_type = other DNA
aacgtgtacttttaccaaaatctgggcaaaattgccgtggacgtagtacaaggcaacatcgataagatcatccccacatttattacctctgccttgcccgaa

SEQ ID NO: 38605 - DNA, 84 bp, synthetic construct
  source 1..84: mol_type = other DNA
aaaaagaccgcggtcggactaggaatctgcaagttcatcttcggggtcgagacactgctcccaaacgctccttggcccttcatc

SEQ ID NO: 38606 - DNA, 123 bp, synthetic construct
  source 1..123: mol_type = other DNA
ctgctgggcggcatcgacaccgccaacaccgccctcaccaatatggtcaacctgtaccctgctgaggccctcaagaccggcggcacaggctggactgctttccccaagtttgggacaccattc

SEQ ID NO: 38607 - DNA, 102 bp, synthetic construct
  source 1..102: mol_type = other DNA
aatgtgtacttttacgacaagctggggaaaatcgccgtagacgtcgtcggtggaaacatcgataaggttataccaacattcattacaatggcacttcccgag

SEQ ID NO: 38608 - DNA, 84 bp, synthetic construct
  source 1..84: mol_type = other DNA
aagaagaccgccgtcggcctcggcatttgtaaattcatttgcggagtcgacaccctgctgcccaacgctccttggccattcatc

SEQ ID NO: 38609 - DNA, 123 bp, synthetic construct
  source 1..123: mol_type = other DNA
ctgctgggtggcgtagacacagccaataccgccctcacatccatggtcaacctgtaccctgctgaggccaccgccactggcggtaccggatggaccagcttccctactttcgggacacctttc

SEQ ID NO: 38610 - DNA, 105 bp, synthetic construct
  source 1..105: mol_type = other DNA
aatgtgtacttcttcgacaaagtcgggaagatagccgtggacgtcgtcggcggcaacatcgataaaatcatccccacattcattaccatggctgaacctgagctt

SEQ ID NO: 38611 - DNA, 87 bp, synthetic construct
  source 1..87: mol_type = other DNA
aagaagaccgcagttggcttaggcctctgcaaattcattttcggggctgaaacactgctggctgccgcaccttggccttctatcgac

SEQ ID NO: 38612 - DNA, 57 bp, synthetic construct
  source 1..57: mol_type = other DNA
gtgctcatgctgctcatcaaggagtacaccattgagctggacaccctgctggaaacc

SEQ ID NO: 38613 - DNA, 33 bp, synthetic construct
  source 1..33: mol_type = other DNA
gccaccttcgacctgagctccatgaagattatc

SEQ ID NO: 38614 - DNA, 123 bp, synthetic construct
  source 1..123: mol_type = other DNA
ctgctgggtggagtcagcacggccaataccgcactgaccaacatggtcaacctctatccggcggatgctatcgccactggtggtaccggctggactgctttcccacaatttggttctccattc

SEQ ID NO: 38615 - DNA, 105 bp, synthetic construct
  source 1..105: mol_type = other DNA
agcaacgtgtacttttacgacaagctcgggaaaattgccgtggacgtagttggcgggaatatcgataaggtcatccctaccttcatcacaatggctttgcctgag

SEQ ID NO: 38616 - DNA, 84 bp, synthetic construct
  source 1..84: mol_type = other DNA
aaaaagacagccgtcggactgggcatctgcaagttcatcttcggagtcgagaccctactgccggcggcgccctggcctttcatc

SEQ ID NO: 38617 - DNA, 264 bp, synthetic construct
  source 1..264: mol_type = other DNA
tatatttcccacacaattaagctcccacggatcgagaatatcctggggctggaaaactctaataacaccaacatctctatgaataacgagaacacaatcagcctgaacaacagtaacacttccgataaccctctgaatgccaccaaaaagaagccttttttgtcgttcgagaccatgaaaattatcctcaagtccgctttcctacaattatatgatcaatacgagcggctgttcaccttcggctggctgacataccagtctaaa

SEQ ID NO: 38618 - DNA, 60 bp, synthetic construct
  source 1..60: mol_type = other DNA
ggcttcaccatctacctggaccccaacgcaactgttgtttctggagtccaggggagatat

SEQ ID NO: 38619 - DNA, 123 bp, synthetic construct
  source 1..123: mol_type = other DNA
atcctcggcggcgtggatacagctaataccgccctgacctccatgggcaacctttatccggccgatgccatggccaccggcggcacgggctggacaagctttcctgagttcggtacacctttc

SEQ ID NO: 38620 - DNA, 102 bp, synthetic construct
  source 1..102: mol_type = other DNA
aacgtgtacttcttcgataaactgggcaagatcgccgtggatgtggtcggcggcaatatcgacaagatcatccccacatttataaccatggcattgcctgaa

SEQ ID NO: 38621 - DNA, 84 bp, synthetic construct
  source 1..84: mol_type = other DNA
aaaaagaccgctgttgggctgggactgtgcaagttcatcctcggagtcgagacaatcctgcctgctgccccttggccatttatc

SEQ ID NO: 38622 - DNA, 123 bp, synthetic construct
  source 1..123: mol_type = other DNA
ctgctgggcggagtggactccagtaacacagcactgagtaatatggtcaacctgtaccctgccgaggccatcaagacaggcggcaccggatggacatctttcccaaccttcgggactccattc

SEQ ID NO: 38623 - DNA, 102 bp, synthetic construct
  source 1..102: mol_type = other DNA
aacgtgtacttcttccaaaagctgggaaaaatcgcagtggacgtggtcggcggtaacatcgacaagatcatccccacatttattacaatggcattgcccgaa

SEQ ID NO: 38624 - DNA, 84 bp, synthetic construct
  source 1..84: mol_type = other DNA
gccaagacagctaaggggctcggcatctgcatggccctgttcggggtcgaaaccatcctgcctgctgcaccctggccattcatt

SEQ ID NO: 38625 - DNA, 123 bp, synthetic construct
  source 1..123: mol_type = other DNA
ctcctgggcggcgtgacccacgcgaatacggccctgaccaacatggtcaatctgtaccctgccgatgccatcgctactggcggcactggatggactagcttcccaaccctggggactccattt

SEQ ID NO: 38626 - DNA, 102 bp, synthetic construct
  source 1..102: mol_type = other DNA
aacgtgtatttccatcaaaatctgggcaaaatagcagtggatgtagtcggtggtaacatcgacaagatcatcccaacgtttataaccagtgcactgcccgag

SEQ ID NO: 38627 - DNA, 84 bp, synthetic construct
  source 1..84: mol_type = other DNA
gccaagacagccaaggggctgggcatctgcatggccctgtttggggtcgaaacccttctccctactgctccatggcccttcatc

SEQ ID NO: 38628 - DNA, 123 bp, synthetic construct
  source 1..123: mol_type = other DNA
ctgctgggcggagtcgaccacgccaataccgccctttctaacatggttggtctatacccaagttccgcggtttccaccggcggtaccggctggaccaccttccccgagtttggcactccattt

SEQ ID NO: 38629 - DNA, 105 bp, synthetic construct
  source 1..105: mol_type = other DNA
agcaatgtgtacttctacgataagctcggcaagatcgctgtcgacgtagttggaggaaacattgacaagattatccccacattcatcaccatggctcttcctgag

SEQ ID NO: 38630 - DNA, 84 bp, synthetic construct
  source 1..84: mol_type = other DNA
gccaagaccgccaagggaatcggcatctgcatgagcctgtttggagtggagtccctgattcaagcggctccttggcccttcatt

SEQ ID NO: 38631 - DNA, 204 bp, synthetic construct
  source 1..204: mol_type = other DNA
aactactccacaccaactctgctgcattcctggcggagttacctgttcgacgtgaacagcacggcccaggctcaatacttcctgagcaaccctcctaagatcctcgagttcatacaacatatattcaccgtggacttgtggaccgtgatcacgggcgttttcaacttctattctggtggaacccctaaccaccactacgaagac

SEQ ID NO: 38632 - DNA, 54 bp, synthetic construct
  source 1..54: mol_type = other DNA
ctcctgacctggagccccgtcgggaagattcggcctggagtgtcgatccggtat

SEQ ID NO: 38633 - DNA, 201 bp, synthetic construct
  source 1..201: mol_type = other DNA
tattccgagcccgccttgatgcattcgtggcgctctaagctcaactatatgaatccgagtctacaattacaattcctcatggatcatccgttcaacatactgcgcttcatccgcatgatcttcacctacaccctgggcattacattgaacggtttcttcaacttcttcggtgcctatagtgccaatcattacgccgaccat

SEQ ID NO: 38634 - DNA, 51 bp, synthetic construct
  source 1..51: mol_type = other DNA
cttacctgggccgatgttggtggcacaaacatcggggtctctactaggtac

SEQ ID NO: 38635 - DNA, 114 bp, synthetic construct
  source 1..114: mol_type = other DNA
gtgaacgagctcggcggctgggactctactgccgacatcctggacgacatgatgagcacaggccgggctcccgatcacttcacctccttattgtactccggaggcacaggtatc

SEQ ID NO: 38636 - DNA, 84 bp, synthetic construct
  source 1..84: mol_type = other DNA
cgggcatatatctctgactccggcaccgccctggataaccccgagaatattttcatcgtgctggcggactccatgttccctgct

SEQ ID NO: 38637 - DNA, 51 bp, synthetic construct
  source 1..51: mol_type = other DNA
ggcggtatcattgccggtggcgactggctcatctgggacagccagctttac

SEQ ID NO: 38638 - DNA, 198 bp, synthetic construct
  source 1..198: mol_type = other DNA
ttctctacaaacaccctggctcactcctggcggagcaagtacaatctcatcaactccacgcaacagttgtccctgctgtacaaccagccaagttttatcctcgagtttttcaataagattttcggcgaggaggtcgtgaccatggtcttcgggttctttaacttctacggctctgacaaggccagctataccgatcat

SEQ ID NO: 38639 - DNA, 54 bp, synthetic construct
  source 1..54: mol_type = other DNA
ctcctgacatgggccagggtcggccggaccaaccttggcactagtcttagatac

SEQ ID NO: 38640 - DNA, 198 bp, synthetic construct
  source 1..198: mol_type = other DNA
tcaactccggccctgatgcacagctggcggagcaagctcaattacatgaaccccagcatgcagcttcaatttctgattggacatccactccacatcctgtacttcctgaagcagatcttcacctttaacctcggctctgttgtcaacggcctgttcaacttcttcggcgctaacaaccccaactacgactccgaccac

SEQ ID NO: 38641 - DNA, 51 bp, synthetic construct
  source 1..51: mol_type = other DNA
ctcacatggagcgacgtcgggcacaggtatcttggcgtgtccacacgctac

SEQ ID NO: 38642 - DNA, 189 bp, synthetic construct
  source 1..189: mol_type = other DNA
atgtcttacaaggccttccctatggacaacgtgccctacaatgtcctgaacgtcaagttcgagggcaatgccgccgattacgactctctgctgagcgacaagctcgctggcgattataactcctttgtggagaaggccgagcactcctccgttagccaattttcggaggagatggaccagcacaagatg

SEQ ID NO: 38643 - DNA, 66 bp, synthetic construct
  source 1..66: mol_type = other DNA
ccacagctcttctacccgtcaatgtctgccacctataagctgccttcctggcaaccggtttggtcc

SEQ ID NO: 38644 - DNA, 72 bp, synthetic construct
  source 1..72: mol_type = other DNA
tgcgggaacttgcaagggatacacttcacatactgtctgcaataccccttacaaatatcttactggctccaa

SEQ ID NO: 38645 - DNA, 201 bp, synthetic construct
  source 1..201: mol_type = other DNA
tactcaactcccgccttgatgcactcatggcggtccaagctgaattacatgaatccctcccttcaactggaatttctcatcaatcatccaatcaaaatcctctactttctgaaacaaatttttactttcaacctgggctccattctgtctggcttctttaacttcttcggggcaaacaacccgaaccattactctgaccac

SEQ ID NO: 38646 - DNA, 51 bp, synthetic construct
  source 1..51: mol_type = other DNA
ctcacctgggccgacgttggagggtctgcactagggatttcaacgcgctat

SEQ ID NO: 38647 - DNA, 123 bp, synthetic construct
  source 1..123: mol_type = other DNA
atgctcggcggcgtcgacaacgcccacaccgctctgaccaatatggttaatctgtaccccgctgaagcaatcaagaccggcggcaccggatggacaagctttcccactgttggttcgcctttc

SEQ ID NO: 38648 - DNA, 102 bp, synthetic construct
  source 1..102: mol_type = other DNA
aacgtgtacttctacgacaagttgggcaaaatcgccgtggatgtggtcgaagggaatattgataaaatcatccccacatttataaccatggcactgcctgag

SEQ ID NO: 38649 - DNA, 87 bp, synthetic construct
  source 1..87: mol_type = other DNA
gccaagacagccactgggctcggaatctgcaaattcatctttggcgtggataccctgctgagcgctgcaccttggccctacatcgac

SEQ ID NO: 38650 - DNA, 42 bp, synthetic construct
  source 1..42: mol_type = other DNA
gagggcgttctgcgggactacctcgggattatccacggaaac

SEQ ID NO: 38651 - DNA, 48 bp, synthetic construct
  source 1..48: mol_type = other DNA
tttggtcaatccacgatcctgacattccccgtgctggacattcctctg

SEQ ID NO: 38652 - DNA, 60 bp, synthetic construct
  source 1..60: mol_type = other DNA
cccgagatcagcgacggcggtcacttcatgatggatatgctggacatcgccattcctagc

SEQ ID NO: 38653 - DNA, 33 bp, synthetic construct
  source 1..33: mol_type = other DNA
gtgcccgctttcggactgcagcacgacctcatt

SEQ ID NO: 38654 - DNA, 123 bp, synthetic construct
  source 1..123: mol_type = other DNA
ctcctgggcggtgtcaatagcgcaaatacagcgctaaccaacatggtcaacttgtacccggccgaagctcttgccactggtggcacaggatggaccgctttccctgagtttggcacaccattc

SEQ ID NO: 38655 - DNA, 105 bp, synthetic construct
  source 1..105: mol_type = other DNA
agcaacgtctacttctacgacaagctcggaaaaattgccgtcgacgtggttggaggcaacatcgataaagttatccctacattcatcaccatggctcttcctgag

SEQ ID NO: 38656 - DNA, 87 bp, synthetic construct
  source 1..87: mol_type = other DNA
tttaaaaagaccgcggtcggactgggcatttgcaagttcgtgtttggggtcgagacactgctgcctgctgccccatggcctttcatc

SEQ ID NO: 38657 - DNA, 201 bp, synthetic construct
  source 1..201: mol_type = other DNA
cggtacagcacgcccacattactccatagttggcgatcttccctaaggtttatcgatagcaccgcccaactacattatattgctgaccaccccgtctttacattgaagttcataagccagctgtttacatacaacttttcccacatcgtctatggggctttcaatttcttcggtgctgcgcaaaaggtccactattgtgac

SEQ ID NO: 38658 - DNA, 48 bp, synthetic construct
  source 1..48: mol_type = other DNA
acttgggcctcggttggattcctgaacctcgggatcaccacacgatac

SEQ ID NO: 38659 - DNA, 48 bp, synthetic construct
  source 1..48: mol_type = other DNA
aatagtagctccgatcgggtcgtggacaacgtgctgtctggagaaacc

SEQ ID NO: 38660 - DNA, 51 bp, synthetic construct
  source 1..51: mol_type = other DNA
aacagtctcatgcgctacgcgctggacctgaatggcaacccaaccaagaca

SEQ ID NO: 38661 - DNA, 201 bp, synthetic construct
  source 1..201: mol_type = other DNA
tacagcgagcccgctctgatgcattcttggcggtccaagcttaactacatgaacccagcgctccaagccgaataccttatcaacaaccccctggccattctgaatttccttcgccttatcttcacacaaaccctggggatcaccgtgaacggccttttcaattttttcgctgccggctccgcatatcattactctgatcac

SEQ ID NO: 38662 - DNA, 51 bp, synthetic construct
  source 1..51: mol_type = other DNA
ctcacctgggctgatgttgggaacacaaacatcggcgtctcaacccggtat

SEQ ID NO: 38663 - DNA, 198 bp, synthetic construct
  source 1..198: mol_type = other DNA
tacagtacaccggcgttaatgcacagctggaggtccagctataactacgtcaactcgacgcaacagttacaatatttgacaaacaaccctagcgacattttcaagttcctgtaccacaccgttacgggggggctttctaatatcctccctgagctatttaactatgactaccggaatgccgcttctttcgagacctat

SEQ ID NO: 38664 - DNA, 48 bp, synthetic construct
  source 1..48: mol_type = other DNA
acctgggccaatgtcggagacatgaatgtcggggttcacatgagatac

SEQ ID NO: 38665 - DNA, 33 bp, synthetic construct
  source 1..33: mol_type = other DNA
tcacgaatgttggggcccgagggctatggactg

SEQ ID NO: 38666 - DNA, 42 bp, synthetic construct
  source 1..42: mol_type = other DNA
gacttcattgccaacgagatcttccacaagcccttggtcgtg

SEQ ID NO: 38667 - DNA, 36 bp, synthetic construct
  source 1..36: mol_type = other DNA
ggggtctttatgctgagcaccgatgttggtttctac

SEQ ID NO: 38668 - DNA, 42 bp, synthetic construct
  source 1..42: mol_type = other DNA
atcattcaactcctgttcggggaagtctatacacctggctct

SEQ ID NO: 38669 - DNA, 54 bp, synthetic construct
  source 1..54: mol_type = other DNA
aacagcctgatgcgatatgcgttggacctgtccgatgctccctctaagacattg

SEQ ID NO: 38670 - DNA, 33 bp, synthetic construct
  source 1..33: mol_type = other DNA
cttgtatacaccgggtcgatcgacatgggaaca

SEQ ID NO: 38671 - DNA, 30 bp, synthetic construct
  source 1..30: mol_type = other DNA
ttcggaggcttggctgggaccaacggaatg

SEQ ID NO: 38672 - DNA, 123 bp, synthetic construct
  source 1..123: mol_type = other DNA
atcctgggcggcgtgaccgaggcccacactctcctggccaacatggccccacttttccccgagagcgccaaggctaccggggctacaggttggacaactttcccacaagttggaaccgtattc

SEQ ID NO: 38673 - DNA, 105 bp, synthetic construct
  source 1..105: mol_type = other DNA
tccaacgcctacttttatcaaactactgggcagatcgcaatacaggccgcaggaggcaacgtggacaagattatcccaactttcattagctctgctatgcctcaa

SEQ ID NO: 38674 - DNA, 90 bp, synthetic construct
  source 1..90: mol_type = other DNA
caccagaaggaggctgctgggatcggcctgtgcaagctcctcaccgggcagaccgtcctgttcaccgctatgccttggccatacgtggac

SEQ ID NO: 38675 - DNA, 198 bp, synthetic construct
  source 1..198: mol_type = other DNA
tactccacacctactctcttgcattcttggcggtcctcccttaggtttatcgatagtacagcccaaataaactatataacagagaatcccgcatttagcctgaagttcctgagtcagctattcacctataacctgagccacattctctatgggacattcaacttctttggggcggcccaaaaagtccattactctgat

SEQ ID NO: 38676 - DNA, 48 bp, synthetic construct
  source 1..48: mol_type = other DNA
acctgggcctcagttggattcattaacctggggatcactacaaggtac

SEQ ID NO: 38677 - DNA, 207 bp, synthetic construct
  source 1..207: mol_type = other DNA
tacagcatgcctaatatgcgtcgatctcaccggggccccagagcccaggagctgaacatcgacacggttctacaactaaagtttatgttctctagtgtcaaatacttcaccgctgtcatgggcgatattctgtccaagacctggtacgtgttcaaggacctgttccggttctgcgactggcagggcaaatatggcgtctaccaatca

SEQ ID NO: 38678 - DNA, 54 bp, synthetic construct
  source 1..54: mol_type = other DNA
ctgacctggacacccgtcggaagccttcgtatccaaggagttcaaggaagatac

SEQ ID NO: 38679 - DNA, 201 bp, synthetic construct
  source 1..201: mol_type = other DNA
tatagcgaacccgctttgatgcacagctggcgatccaagttgaactatatggatcccgctctacaagccaaatacctcatcaacaatcccatgtttatacttgagtttctccggatgatcttcacctacaccctggggataactgtaaatggactgttcaatttcttctctgctgctaacccataccactatagcgatcac

SEQ ID NO: 38680 - DNA, 51 bp, synthetic construct
  source 1..51: mol_type = other DNA
ctcacctgggccgacgttgggaataccaatatcggggtctccgcacgctat

SEQ ID NO: 38681 - DNA, 201 bp, synthetic construct
  source 1..201: mol_type = other DNA
cggtactccgaaccagccctgatgcattcctggagggcccgcctcaaataccttgacccaactggacagatgcactattttatgacccaccccatttttatcggccggttcttttctcaaatatttacctataacatcgcgaagattctctatggcacgttcaactttttcggcgccgctcaaaaaactcactattctgac

SEQ ID NO: 38682 - DNA, 54 bp, synthetic construct
  source 1..54: mol_type = other DNA
ctgctgacctgggcctccgtcggcaagctcaacctggggcttagcacaagatac

SEQ ID NO: 38683 - DNA, 30 bp, synthetic construct
  source 1..30: mol_type = other DNA
agcaagatcggagtggaggccttctacgcc

SEQ ID NO: 38684 - DNA, 57 bp, synthetic construct
  source 1..57: mol_type = other DNA
gagggcattctgtacaccctggacgctggcgatagctacgccctcatcttcgactat

SEQ ID NO: 38685 - DNA, 30 bp, synthetic construct
  source 1..30: mol_type = other DNA
atcggaaccatgggcgccattggaccaatc

SEQ ID NO: 38686 - DNA, 48 bp, synthetic construct
  source 1..48: mol_type = other DNA
tacgctttttctttgttctccattaccggcatggacaacgccatcttc

SEQ ID NO: 38687 - DNA, 204 bp, synthetic construct
  source 1..204: mol_type = other DNA
caccaggtcaccccaacactggctcattcctggcggagcaagtatcagcccgtcaattctacgttacaaattaattacctcatgaaccatcctggccacgctctcaacgtgttctctcgcttcctcaatgaggagattctgaaactgagtggacaattcttcaatttcttcaactccgccaaactgccacattatagtgaccgc

SEQ ID NO: 38688 - DNA, 54 bp, synthetic construct
  source 1..54: mol_type = other DNA
ctcctgtccttcgccaaagtcggaggacacggactgggaatcagccttcgctac

SEQ ID NO: 38689 - DNA, 198 bp, synthetic construct
  source 1..198: mol_type = other DNA
agatacgccacccccgctctgatgcacagctggcggtccaagctgaactacgtcaatagcggcgatcagattgcatacctcctgcacaaccacgggttcgccgtgaaattcataacgcagatcttcaccaccgaccttggagccatgttctatggcgtgtttaacttcttttcgagcgcgagcaagtatcactatgct

SEQ ID NO: 38690 - DNA, 51 bp, synthetic construct
  source 1..51: mol_type = other DNA
ctcacctgggcgggggtcgggtacaccggcctggggatcaacacaagatac

SEQ ID NO: 38691 - DNA, 99 bp, synthetic construct
  source 1..99: mol_type = other DNA
agcgatatgtccattgccgactctgtgttcgagagcgtcagcgctttcaccacaaccggcgccactatcctgaacgaccccgagtctgtggatggaagt

SEQ ID NO: 38692 - DNA, 96 bp, synthetic construct
  source 1..96: mol_type = other DNA
ggggtcagccctttcgagagtgtttgtataagtctctccgatattccaaccggcggactgctgcctcgggccgactccatggcttcttacgacttc

SEQ ID NO: 38693 - DNA, 132 bp, synthetic construct
  source 1..132: mol_type = other DNA
gtttcctccgaaacagagtattcatttgatacactcgggaaaatcggcgagtctctctggcacgcagcttataccgtggtcgccgctgggacaaccagcggcttcgccattaccgactatactcaatggcca

SEQ ID NO: 38694 - DNA, 117 bp, synthetic construct
  source 1..117: mol_type = other DNA
attgagcctggctacgacgttcatacggcttttgggaccgttctcgctgccatcactaatacgggcgttgggagcggccacttcaaccccttcacctcctacgaggaacttggtgcc

SEQ ID NO: 38695 - DNA, 69 bp, synthetic construct
  source 1..69: mol_type = other DNA
agtgacgaaacaagcatcgactccactgagaacgtcgagccggtacaacagacagagaacatctctgac

SEQ ID NO: 38696 - DNA, 72 bp, synthetic construct
  source 1..72: mol_type = other DNA
atcctgggagccagtgcccagtccgccgactcaaagaacgtgaataaggtcagcagcaacagcaccaaggaa

SEQ ID NO: 38697 - DNA, 129 bp, synthetic construct
  source 1..129: mol_type = other DNA
gtgaagaaggggaatacctactatgtcaagctgacaacctccaacggaaaggccgtggctaacaagaagctcagtgtctcttttaatgggaagacatacaccaagacaacggacagtaatggcaagata

SEQ ID NO: 38698 - DNA, 279 bp, synthetic construct
  source 1..279: mol_type = other DNA
tttagcaagtcctacaagctctacctggtcaacaccttctctatcaacatcgctaacgccaagctgctgaccaatgggtatctccggatctacttcactggctctaagaagtttatcgccgataatacagccaagatctccatcggcggaaagattttcaacaagaaggctaacagcgagggcttcatcgtgattaaaccccagctgagtgccaagaagtacacagtgaccgtcgacatcggcaaacacttcaagtccaaaaaagttaagtgtatcaag

SEQ ID NO: 38699 - DNA, 117 bp, synthetic construct
  source 1..117: mol_type = other DNA
gaggtgctcaagcgggacagctacgccctgtatctttatgggaagctgtctaaatacgtctgcttcaaaaccaagactgctcccaagacataccacatactgcatcgttcgaagtgg

SEQ ID NO: 38700 - DNA, 216 bp, synthetic construct
  source 1..216: mol_type = other DNA
tatggcgactacaacgttggaggcgacagcagaatccctaccggatgggtcagcctgtctaaattcaaggccaagttcgccggcgtcggcctggttgtgaaactcaattacaagctgtccaagaacgtcaagacacagattaagaactattaccaatccatgggacccaattgggccaggcagaacacgaacgagcgcatccccaacgtacctatc

SEQ ID NO: 38701 - DNA, 132 bp, synthetic construct
  source 1..132: mol_type = other DNA
tacgaccccggaatactgtccgtagattcatataaccaattgcatcaaattgcaaccggacatttttccaactggcaccctttcttccatacattcatcgaaatgatttgcatcaagatatacgcaaatcct

SEQ ID NO: 38702 - DNA, 201 bp, synthetic construct
  source 1..201: mol_type = other DNA
cggtacagtacccccacactcatgcattcatggcggtctaagttgaactgggtcaactccgccgaccagatctccctcctcatccatgacccaatgtttgcttggaagttcatctctcaaatattcacgactgatctggcatggatgatctacggcatcttcaacttcttctccgccggttcgaaataccactatgccaac

SEQ ID NO: 38703 - DNA, 51 bp, synthetic construct
  source 1..51: mol_type = other DNA
ctcacttggagcagcgtcggttacatccaactgggcattaacacccggtat

SEQ ID NO: 38704 - DNA, 30 bp, synthetic construct
  source 1..30: mol_type = other DNA
ttcggcggtctggctggaacaaacggactg

SEQ ID NO: 38705 - DNA, 126 bp, synthetic construct
  source 1..126: mol_type = other DNA
atgcttggaggcgtcacccacgcccatcaattgctcaccaacatggccccactcttccctgagagctccaagatcacaggcgctactggctggactacctttcctgtgacgggggttttttttagc

SEQ ID NO: 38706 - DNA, 102 bp, synthetic construct
  source 1..102: mol_type = other DNA
aacgtttatttctatcaaacttcagggcagctcgcgatccaggccgcggggggaaacgttgacaagataatccctacttttataaacagcgccatgcccaca

SEQ ID NO: 38707 - DNA, 90 bp, synthetic construct
  source 1..90: mol_type = other DNA
cacaagaaagaggctgccggactcgggatctgcaagctgctcaccgggcagaccgtactcttttcgtctatgccttggccttacgtggac

SEQ ID NO: 38708 - DNA, 195 bp, synthetic construct
  source 1..195: mol_type = other DNA
actaatgagtggccactgtcctgggatgtctacacccacatcaactacgccatgacatacatgaactacggaataaatacggtagacccgtacctgaacgcaccgagtggcaaaaccatcggttatgcgccactgtttcacttcctgctgatcttcgtggctttcattaccaactctagcctactctccgcggcc

SEQ ID NO: 38709 - DNA, 105 bp, synthetic construct
  source 1..105: mol_type = other DNA
atctctccttctcacatatctcaaatatttagcggctttaattcgatcctttccgaccccatgagcctcttcatgggtcagaaggccatgggactggagagatac

SEQ ID NO: 38710 - DNA, 33 bp, synthetic construct
  source 1..33: mol_type = other DNA
cactggttcggaattccggtttacactttccgg

SEQ ID NO: 38711 - DNA, 201 bp, synthetic construct
  source 1..201: mol_type = other DNA
aggtactctacaccaactttgatgcacagttggcgctccaaactgaactacgtcaattctgcggagcaggtttcgtatttcattcatcaccctatgttcgcctggaagtttatttctcaaatcttcacaaccgacctcgcttggatggtctacggaattttcaatttctttagcgcgggaagcgcaaatcattacgcaaac

SEQ ID NO: 38712 - DNA, 51 bp, synthetic construct
  source 1..51: mol_type = other DNA
ctcacatgggctggggttggctatacgggactgggaatcaatactcggtat

SEQ ID NO: 38713 - DNA, 51 bp, synthetic construct
  source 1..51: mol_type = other DNA
acaactgcttcggatcgggtggtcgacaacgtcctgtccggggagacagcc

SEQ ID NO: 38714 - DNA, 201 bp, synthetic construct
  source 1..201: mol_type = other DNA
tatagcgaaccctcactgatgcactcctggcgatctaagctgaactatatgaatccagcactccaagtcgagtacctccttaaccatccatttgctattttgaatttccttaggatgatttttactttcaccctcggcatcactctgaatggactgttcaattttttttctgccggatctgcctatcattactcggatcac

SEQ ID NO: 38715 - DNA, 51 bp, synthetic construct
  source 1..51: mol_type = other DNA
cttacctgggccgatgttggaaagaccaatatcggggtgtctgctcggtat

SEQ ID NO: 38716 - DNA, 201 bp, synthetic construct
  source 1..201: mol_type = other DNA
agatattctgaacctgccctgatgcatagttggcgcgcaagacttaaatacctcgatcctactggccaaatgcattacttcatgacccaccctatcttcattggccggtttttttcacaaattttcacatacaacatcgccaagatcctatatgggacgtttaacttcttcggagcagcacagaagacccattactctgac

SEQ ID NO: 38717 - DNA, 51 bp, synthetic construct
  source 1..51: mol_type = other DNA
ctcacctgggcctctgtcggcaagctgaacctggggctgagcacgcggtat

SEQ ID NO: 38718 - DNA, 123 bp, synthetic construct
  source 1..123: mol_type = other DNA
aagcttggcggcattcagaacgccaacatggccctgaccaatatggcaccgttatactctaaggaggccatagctcaaggtggcctgggctggacagcctttcctaagttcgggtctccattt

SEQ ID NO: 38719 - DNA, 102 bp, synthetic construct
  source 1..102: mol_type = other DNA
aacgtgtacttctaccaaaagctgggaaagaccgccgtcgaggtggtcggaggtaacatcgacaaaatcatccccacattcattaacatggcactgcctgaa

SEQ ID NO: 38720 - DNA, 90 bp, synthetic construct
  source 1..90: mol_type = other DNA
tacaagaagacagccgctgccctcgggatatgtcaattccttaccggcaaccccgtgctgattactaccatgccatggcctgttgttgac

SEQ ID NO: 38721 - DNA, 30 bp, synthetic construct
  source 1..30: mol_type = other DNA
taccggacaatcgctcaccctacctacgag

SEQ ID NO: 38722 - DNA, 201 bp, synthetic construct
  source 1..201: mol_type = other DNA
cggtacagtgaacctgccctgatgcactcctggcgcgcccggctgaggtacataaatccaaccggccaaatgaactacatcatgtctcatcccgcgtttatcggaaagttctttgggcaaattttcacttacaatctcgccaaaatactttacggcacattcaacttttttggagcagcccagaggagccattactcggat

SEQ ID NO: 38723 - DNA, 51 bp, synthetic construct
  source 1..51: mol_type = other DNA
cttacctgggctagcgttggtcagctgaacctgggcctttctgctaggtat

SEQ ID NO: 38724 - DNA, 204 bp, synthetic construct
  source 1..204: mol_type = other DNA
cgatacagcgagcctaccctgatgcacagctggcgggcccgccttcgttatctcgaccctgcgggccaacgcaagtatattatgagcaaccccggatttctcggcaactttttcggtcaaatcttcacatacaacattgctaagattctttatggtacctttaacttcttcgggggagcacagcggactcacgacgcccattac

SEQ ID NO: 38725 - DNA, 48 bp, synthetic construct
  source 1..48: mol_type = other DNA
acctgggcctcagtcggcaatcttaatctgggcttgtccgcaaggtac

SEQ ID NO: 38726 - DNA, 201 bp, synthetic construct
  source 1..201: mol_type = other DNA
aggtactccgcccctgcactgatgcattcttggcgctcaagactgaagtacctggatccgcctgggcaaatgaactacatcatatcacacccgtcatttatgggaaacttcttcgcgcaaatcttcactcacaacatcgcaaagattctttacggcacctttaactttttcggcgcggcccagaagatccactatgccgat

SEQ ID NO: 38727 - DNA, 51 bp, synthetic construct
  source 1..51: mol_type = other DNA
cttacttgggcttcagttgggaaactgaacctcggcctttcgacccggtac

SEQ ID NO: 38728 - DNA, 201 bp, synthetic construct
  source 1..201: mol_type = other DNA
cggtactcagcgcccacacttatgcactcctggcgctctaggctgagattcaccaactccaccgcacaaatggcctacgtctcctctcatcctgctttctcactggactttgtgtcccaactgtttacttacaacctgtcccacatcgcctatggtgccttcaacttcttcggcgcggccaagaaggtccattatacggat

SEQ ID NO: 38729 - DNA, 51 bp, synthetic construct
  source 1..51: mol_type = other DNA
ctgacctgggcctccgttggctacttgaacctcggcatcagcacgaggtat

SEQ ID NO: 38730 - DNA, 201 bp, synthetic construct
  source 1..201: mol_type = other DNA
agatatagccagcctgcccttatgcactcctggaggtctcggctgaagtatctcgaccccactggacagatgaactatgtgatgactcatcctatattcataggccggtttttcactcaaatctttacatacaatattgccaaaattctttacggcacctttaacttcttcggagcagctcagaaaacgcattactcggat

SEQ ID NO: 38731 - DNA, 51 bp, synthetic construct
  source 1..51: mol_type = other DNA
ctcacctgggcctctgtcggcaagctcaaccttgggctgtccactcggtac

SEQ ID NO: 38732 - DNA, 204 bp, synthetic construct
  source 1..204: mol_type = other DNA
aagtacagcaccccaacccttatgcattcttggcggtcaaggctgagatttatcaactctaccgcccaaatggactacatcacatcccatcctatgttttccctgaaatttatttaccaactcttcaccaattctctctctcacgtcatctacggcgtctttaacttcttcggggctgcccaaaaagtttcatactacgaccat

SEQ ID NO: 38733 - DNA, 51 bp, synthetic construct
  source 1..51: mol_type = other DNA
ctcacctgggctagtgtcggctacctgaacctgggcttgtctactcggtac

SEQ ID NO: 38734 - DNA, 201 bp, synthetic construct
  source 1..201: mol_type = other DNA
tacagtgaacccgctctgatgcacagctggcgtagcaaactgaactatatgaacccagagttgcaggccaagtacctgatcaataatcctatggaaatccttcggttcctgcggcttatcttcacgtacactgtgtccattacgctgaatgggctgttcaactttttcggggccggctccgcgaatcactatagcgatcat

SEQ ID NO: 38735 - DNA, 51 bp, synthetic construct
  source 1..51: mol_type = other DNA
ctgacctgggccgacgttggtggcaccaacatcggagtatcggcgcggtac

SEQ ID NO: 38736 - DNA, 204 bp, synthetic construct
  source 1..204: mol_type = other DNA
aggtacagcgagcccacactgatgcactcctggcgggcccgcctcaaatacatcgatcctactggacagatgaactatattatgtctcatcctaccttcattggcaagttcttcggccaaatctttacctataacctggccaagaccatgtacggcacctttaatttcttcggagcagccaagatcccgcattatgccgattct

SEQ ID NO: 38737 - DNA, 51 bp, synthetic construct
  source 1..51: mol_type = other DNA
ctcacatgggcttccgttggcaagctcaacctgggtttgagcacccgctac

SEQ ID NO: 38738 - DNA, 201 bp, synthetic construct
  source 1..201: mol_type = other DNA
tactccgagcctgcccttatgcattcatggcggtctaagctgaattacatggatccggggatgcaggtacagtacctcctgaaccaccccttcgccatactgcgcttcctccgccttatattcacatatactgtcggaattacactgaacggccttttcaatttcttcgccgccgggtccgctaaccactactccgaccac

SEQ ID NO: 38739 - DNA, 48 bp, synthetic construct
  source 1..48: mol_type = other DNA
acctgggcttcggttggcgatacaaacatcggagtctccgcaaggtac

SEQ ID NO: 38740 - DNA, 201 bp, synthetic construct
  source 1..201: mol_type = other DNA
cgctatagccaaccggcgctgatgcattcttggcgcgcgaggctgaagtacctcgatccaactggtcagatgaattacgtactgtcacaccccatgtttatggtggattttttctcccaaattttcacctacaatatcgctaagatcttttacgggaccttcaacttttttggcgcggcccagaaaacacactatagtgat

SEQ ID NO: 38741 - DNA, 51 bp, synthetic construct
  source 1..51: mol_type = other DNA
cttacctgggccagcgttgggaaacttaacctgggcttgtctactcggtac

SEQ ID NO: 38742 - DNA, 48 bp, synthetic construct
  source 1..48: mol_type = other DNA
gactctagttttgtgtccacctttctcggatcttatgcacaagccgct

SEQ ID NO: 38743 - DNA, 60 bp, synthetic construct
  source 1..60: mol_type = other DNA
gacaccctgatcggcctgctttatcctcctcaaggcgcactcccttacgtgaacgcttat

SEQ ID NO: 38744 - DNA, 63 bp, synthetic construct
  source 1..63: mol_type = other DNA
gacggactgctgatcttcttcaagttgcatcaaatgccaaatgatgctatggtggagaacgcc

SEQ ID NO: 38745 - DNA, 204 bp, synthetic construct
  source 1..204: mol_type = other DNA
cggtacagccagccagctctgatgcattcttggcggtcccgtttaaaatacctggacccggctggacagatgaactacatcctctcacaccctaacttcattgggaacttcttctctcaaatttttacatacaatatcgccaaaattctctacgggacctttaacttcttcggcgccgcgcaaaagacgcactatagcgatgac

SEQ ID NO: 38746 - DNA, 51 bp, synthetic construct
  source 1..51: mol_type = other DNA
ctcacctgggcctcggttgggcgactcaatctgggcctgtccactcgctac

SEQ ID NO: 38747 - DNA, 201 bp, synthetic construct
  source 1..201: mol_type = other DNA
tactccgaaccagcacttatgcattcctggaggagcaagctgaattacatgaaccccagtctgcaagcgcaatatctgattaacaatcctatggctattctgcatttcttgcgcatgatttttactcacaccctgggcatcaccctgaacggcctgttcaatttcttcgccgctggaagtgctaatcattattcggaccaa

SEQ ID NO: 38748 - DNA, 51 bp, synthetic construct
  source 1..51: mol_type = other DNA
ctgacttgggctgacgttgggaaaaccaatatcggcgtcagcgcccggtac

SEQ ID NO: 38749 - DNA, 189 bp, synthetic construct
  source 1..189: mol_type = other DNA
tactctacccctactttaatgcacagctggcggtctaacctgaactacatcaatagcacgcagcaaatcgctttcctcaagaataacccgttacaaattctggagttcctgaaacacacagtgacaggcggactgtcctttattatttcccaactcttcaactttgactatcggaacgctgagtccatc

SEQ ID NO: 38750 - DNA, 51 bp, synthetic construct
  source 1..51: mol_type = other DNA
ctcacttgggcctatgtcggtaacatgtacgtggatgtgcatatgcggtac

SEQ ID NO: 38751 - DNA, 36 bp, synthetic construct
  source 1..36: mol_type = other DNA
accatcttcgaggataacaaggccgacgattacgcc

SEQ ID NO: 38752 - DNA, 192 bp, synthetic construct
  source 1..192: mol_type = other DNA
aacaagtatagtcagtttaagaactgcgtctttaaatataatgtggctggggacgacaacggcggagcaataaacagcaaagctaagctgtacctgaagaactgcacgttcgactccaacaaggccaaagttgacggcggagccatctgctgtgacgaggacgtgcaggcttacggctgcctcttcaagaac

SEQ ID NO: 38753 - DNA, 87 bp, synthetic construct
  source 1..87: mol_type = other DNA
aagaaggacgtctacgtggaggcctgcgacttcatcgagaacagcgctgaggattatggtggcgccatctacgctaagaacatttac

SEQ ID NO: 38754 - DNA, 135 bp, synthetic construct
  source 1..135: mol_type = other DNA
gccctctacgcggaaggcgatgtcgacgccgacaacgtgaccctggagaagaataaggcttacgaggacggtggcgctatcttctgcaagaacgccaagctgcggaatgcagacctcgcttacaaccgcgccgag

SEQ ID NO: 38755 - DNA, 66 bp, synthetic construct
  source 1..66: mol_type = other DNA
atctatgagaatttcgctcacgatatcggcggcgccattacctgcgacaacatcaacttctaccac

SEQ ID NO: 38756 - DNA, 117 bp, synthetic construct
  source 1..117: mol_type = other DNA
ttctgggaaagtacaactgatagagatgggggaatgtactcttgccccgtgtacattggcgacatcaaatatgatggggagtttgaggtcaacgcctcccacgccaactgctacttc

SEQ ID NO: 38757 - DNA, 201 bp, synthetic construct
  source 1..201: mol_type = other DNA
aggtacagcacccccgccttgatgcactcttggcggagcaaactgaactatatgaactctagcgcgcagatagactacatgatgcatcaccccgtctttgtgaaaaactttttgactcaaatcttcaccattgatctggggtccatgatgtatggcgttttcaacttcttctacgcggcgtcagcatatcactatagcgac

SEQ ID NO: 38758 - DNA, 51 bp, synthetic construct
  source 1..51: mol_type = other DNA
ctcacttgggcaagtgtcggatataccaatttggggatcaatacaaggtac

SEQ ID NO: 38759 - DNA, 117 bp, synthetic construct
  source 1..117: mol_type = other DNA
tttccagttggtgtcaaatatgggtcgggcgacagctatctcgggatgatcggcaatgccatcgctcctattttcacacctctgggcttcggtacttggcaagcagacggaaggaat

SEQ ID NO: 38760 - DNA, 201 bp, synthetic construct
  source 1..201: mol_type = other DNA
tcctattccaccccaaccttgatgcattcttggcgtagcatgtataattacgtgaactccacacaacaattgaacttcctccttaccaatcacttctttatctttgactttctccatcaaattttcactagcgagctgtccttccttgcaaatgggctgtttaacttctataacgggaccccaggcatacattatgatgat

SEQ ID NO: 38761 - DNA, 51 bp, synthetic construct
  source 1..51: mol_type = other DNA
cttacatgggcctatgttggagagatcaacctgggaataagtatccgctac

SEQ ID NO: 38762 - DNA, 96 bp, synthetic construct
  source 1..96: mol_type = other DNA
ctcaacatccactttgtggacgctctgttcgagaatatgagcgcctggaccgggtccggcatgacattcttcgtgaatgtcgaggtgctgccttac

SEQ ID NO: 38763 - DNA, 99 bp, synthetic construct
  source 1..99: mol_type = other DNA
ggcctgcctgtgttcgacgctgtcaacctggccttcacctctatctcgacgggaggaatgagcattaagaacctgaacgtcggcttctaccaaaacaat

SEQ ID NO: 38764 - DNA, 105 bp, synthetic construct
  source 1..105: mol_type = other DNA
aactccggcatcgtgcccatggacatactgtttcatgtggtgtccgctgtcactacaactggctcgaacatcagcaccgcacaaaccatcagcacatggcacggg

SEQ ID NO: 38765 - DNA, 93 bp, synthetic construct
  source 1..93: mol_type = other DNA
ggcctcgatcctctgaacgccctgttcgacgtcgtgtccatccttagcaataacggcctgtcaaccggcatcgtttggggaggacttccattg

SEQ ID NO: 38766 - DNA, 57 bp, synthetic construct
  source 1..57: mol_type = other DNA
atgcagtccattagcaccgacggcaacgggatcgccaacctgggagtggatcttcca

SEQ ID NO: 38767 - DNA, 84 bp, synthetic construct
  source 1..84: mol_type = other DNA
gacgatgactacggggccagcgagtcctccttcaacattcacgtccacaagatcggcacaacaatcaccgttagaaataccaca

SEQ ID NO: 38768 - DNA, 129 bp, synthetic construct
  source 1..129: mol_type = other DNA
gtctacggcggaactttctacgcttacctgaaggatgcctacggcaactctatgattggctccgacgtgttttacactgtcaacggcgtgacctatagcatcacaaccaaaatctatggtggagtggca

SEQ ID NO: 38769 - DNA, 69 bp, synthetic construct
  source 1..69: mol_type = other DNA
aagactattgacctcaaggtgctggcctccacaagcatcgtcatcggcaatgatatccttctgaccaat

SEQ ID NO: 38770 - DNA, 105 bp, synthetic construct
  source 1..105: mol_type = other DNA
tgcctccggatctacctgaagagcaatcaacaaaatctgatctctaacaagaccgtgaaaatcacaattaataacgtcactttcattaagcagaccaacagcgag

SEQ ID NO: 38771 - DNA, 63 bp, synthetic construct
  source 1..63: mol_type = other DNA
accgccagtaaagaggtgacagggatcagtggctctcccaagaaccctttgatatcatccatc

SEQ ID NO: 38772 - DNA, 180 bp, synthetic construct
  source 1..180: mol_type = other DNA
acaaagtggctgaccgtcaattacatgtacgccaggttcaacaattacgacacatctgggctgattgtgaaactcaagtacagcctgaacgccgcaactaaggctaaagtcaataacttctataactccatgggcaccaagtggacgaggcagaacgtaaacgaacgcatcccccaaatt

SEQ ID NO: 38773 - DNA, 162 bp, synthetic construct
  source 1..162: mol_type = other DNA
ttctacgtggaccccggcgtcttcgcttcgtgccgctccgtccattacgacaacagcgctaatgcaatagagcagttgaagttcatcttgtctcacaagaaagatacccttatcgaactctgtcatatctttgcaaacattaacaatgacctgtcattcacc

SEQ ID NO: 38774 - DNA, 54 bp, synthetic construct
  source 1..54: mol_type = other DNA
ctcagttggacccctgttggtcaactgacacccatcggagtccagcctagatac

SEQ ID NO: 38775 - DNA, 171 bp, synthetic construct
  source 1..171: mol_type = other DNA
aacttcaatcaaaatctgggcatctactgttccgacgtttatgtgtacctcttgaatgccgtttactataccggccataatatctactctacaaccacaatttacctgtctcccgtgatctgtttcctgactagcattctcatgaccttggggatcaaggatgcaacctcc

SEQ ID NO: 38776 - DNA, 189 bp, synthetic construct
  source 1..189: mol_type = other DNA
gtcacatccatgggtgacggcaactttgagcctacgactcagattagtgaagggatcggcggcgagcacggccggaccaacgacccagcctattctaccgatgttggttactacctgagcaacttcctgaatttcatatcatcctctaaggtgacattcgaaggaaatactcccgctctcaaagatccg

SEQ ID NO: 38777 - DNA, 288 bp, synthetic construct
  source 1..288: mol_type = other DNA
ttttgcctggctttcgaggagaccaaccagtacatcgcaccacaagaaatctccgaatatattattcacgagatccccaactacgagaaatacgagataggcgtctacaacattcggcctttctactggtacctcggcgagaacgtgactggcatcgagaatcacaatacagccaagatcgacgcctccaatgtttcatactacatctctaaagctccactcaatggactgaacaactactccgaaatcaagaacatccataacatgtatctgtacaagaagaatgtg

SEQ ID NO: 38778 - DNA, 201 bp, synthetic construct
  source 1..201: mol_type = other DNA
tactccgaacccgctctgatgcacagctggcggtccaaactcaactatatggacgcagacagacagctggagtatattatgggacatccatggttcatcgtccatttcttccgcttgatctttaccttcaccctgggactgacagttaacggtctctttaacttctttgctgctgggagccctaatcactatatggaccac

SEQ ID NO: 38779 - DNA, 51 bp, synthetic construct
  source 1..51: mol_type = other DNA
ctcacttgggcggacgtcggcaagtacaacatcggcgtcagcactaggtat

SEQ ID NO: 38780 - DNA, 126 bp, synthetic construct
  source 1..126: mol_type = other DNA
tacagccttggcggcgtgactaccgctcaccaaagccttacaaacatcgcctacctggtccccgagtctgctcgggcattcgggtgcaatggctggaccgagttccctacctttggctctcaactg

SEQ ID NO: 38781 - DNA, 105 bp, synthetic construct
  source 1..105: mol_type = other DNA
agcaacgtgtactttctgcgcgagaccggccagatcgcagtacaagtagctcagaacaatatcgactccattatccctattttcatcaacatggcacttcctgaa

SEQ ID NO: 38782 - DNA, 84 bp, synthetic construct
  source 1..84: mol_type = other DNA
gctaagacggccggcggactgggactggtgactcttctgaccgggcagacaagcatccttacgcaaccttggtccatcatggat

SEQ ID NO: 38783 - DNA, 42 bp, synthetic construct
  source 1..42: mol_type = other DNA
gactacatcgccattaacatcttcaaaaagccacttgccgcc

SEQ ID NO: 38784 - DNA, 33 bp, synthetic construct
  source 1..33: mol_type = other DNA
aagctgatggccaccgaattcactggatactac

SEQ ID NO: 38785 - DNA, 42 bp, synthetic construct
  source 1..42: mol_type = other DNA
ctcgagttactattttcgaccgaatacgtggcagcagcggcg

SEQ ID NO: 38786 - DNA, 90 bp, synthetic construct
  source 1..90: mol_type = other DNA
ttcacaaagggctggggcgctaatcccgacgtctttttctcatccaacgtgttgcaagcatcggatagcatcgccggaattttcaccttc

SEQ ID NO: 38787 - DNA, 72 bp, synthetic construct
  source 1..72: mol_type = other DNA
ctcactctgcccggcgctagcatcgggtacactcaaatatatacccctgactggtccgcccttctcaacttc

SEQ ID NO: 38788 - DNA, 108 bp, synthetic construct
  source 1..108: mol_type = other DNA
ggcttcatgacattcacaaccggaatccccttcaacgacctggtgaccgaaggcaccgggctcgccttcgtggtctttcctcaagttttcaatcaaatgggggctgtg

SEQ ID NO: 38789 - DNA, 123 bp, synthetic construct
  source 1..123: mol_type = other DNA
atcctgggcggcgtggaccacgccaacaccgctctcactaatatgagcagtctctaccccaaggaggccctggctcaaggggggaccgggttcacatctttccctaccctgttttccccattt

SEQ ID NO: 38790 - DNA, 105 bp, synthetic construct
  source 1..105: mol_type = other DNA
agcaacgtctacttctaccaaaaactgggcaagaccgccgtggaagtggtcgggggcaatatcgataagattatccctacattcattgacatggctttgcctgag

SEQ ID NO: 38791 - DNA, 90 bp, synthetic construct
  source 1..90: mol_type = other DNA
tatgataagagcgccaccactctcggcatctgcaagtttatcttcgctaaacctgtgttaattcaaaccatgccatggccctacatcgat

SEQ ID NO: 38792 - DNA, 201 bp, synthetic construct
  source 1..201: mol_type = other DNA
tactccgaacccgctctcatgcactcttggcgctctaaactcaactatatggattcccataggcaacttgaatatgtgctgaatcatccttggtttatagttcgattcttccgctccatcttcacatacaccattggcataacaattaacggtgtcttcaacttcttttctgcggctaacgggcaacactacgcggattcg

SEQ ID NO: 38793 - DNA, 54 bp, synthetic construct
  source 1..54: mol_type = other DNA
ctgctgacctgggccgacgttggtcagcttaacctcgggatcagcacaagatac

SEQ ID NO: 38794 - DNA, 93 bp, synthetic construct
  source 1..93: mol_type = other DNA
agcttcaccaagggatggggcgccaaccccgacgtgttcttctcttccaatgttctccaagcctcggatagcattgctggcatcttcaccttc

SEQ ID NO: 38795 - DNA, 75 bp, synthetic construct
  source 1..75: mol_type = other DNA
ctcaccctgcctggcgcctccatcgggtacacacaaatatatacacccgactggagcgctctgctgaacttcaac

SEQ ID NO: 38796 - DNA, 108 bp, synthetic construct
  source 1..108: mol_type = other DNA
gggttcatgaccttcacaaccggcatccccttcaacgacctcgtgaccgaaggcaccggcctggcttttgtagtattcccgcaagtcttcaaccaaatgggagatgcc

SEQ ID NO: 38797 - DNA, 42 bp, synthetic construct
  source 1..42: mol_type = other DNA
ccctggcttgcctacggctatctgaataagcctctcgctctg

SEQ ID NO: 38798 - DNA, 33 bp, synthetic construct
  source 1..33: mol_type = other DNA
aagtttctgaccctcgacgccgttggcttcttc

SEQ ID NO: 38799 - DNA, 51 bp, synthetic construct
  source 1..51: mol_type = other DNA
ccaacactcagagtgctgtatttcgccaagcctgaatacgtggcgggtgct

SEQ ID NO: 38800 - DNA, 162 bp, synthetic construct
  source 1..162: mol_type = other DNA
tttaatctcaacttcgggatctactgctctgacgtatatgtttatctcctgaacgccctgtattacacgggaacgaacatacgcgccaccggcaccatctacctgagccccatgatctgctacctgacaagcatctttttccgattcggctttgtggataaa

SEQ ID NO: 38801 - DNA, 186 bp, synthetic construct
  source 1..186: mol_type = other DNA
ctcatcatggggagcggcacattcggggctggcgaccagatttctgatggcatcaacggcgtccagggaactgagatcgatcctgcctacaacaccaatgtgacctactacgtctctaatctgctgaatttcattagtaactctcatacggtcattgacggcaaccctgtgctggagaactctacc

SEQ ID NO: 38802 - DNA, 294 bp, synthetic construct
  source 1..294: mol_type = other DNA
ttcacctttaccttcgacgaaaccgctgagtacactaccatcgaggacgtgtctgattacattattaacacaaaccccgactacaagaacctgagcattgggacctataacgtccgggcctataactggtggctcggcgaggacctcctggccatcaagagcaacgacgagcctaccatcgacgcctccaacgctacatactatatctccgacaaggtcctggagaatgtcactaactacaccgaaatcaagaatatcaacaacgtgtacatttacaagaaaaagtgcctgaag

SEQ ID NO: 38803 - DNA, 201 bp, synthetic construct
  source 1..201: mol_type = other DNA
tatagcgaacccgcactgatgcacagctggcgatctaagctcaattacatggatgcaagcggacagatggaatacctcatgtcacatccattcgccatcttgacgttcttccggctgatttttacctacacactggggataacattaaccggtgtctttaacttcttcgcggccgggtccgccaatcactacgcggatact

SEQ ID NO: 38804 - DNA, 51 bp, synthetic construct
  source 1..51: mol_type = other DNA
cttacctgggcggatgtcggagccttcaacctgggtatcagtactcgctac

SEQ ID NO: 38805 - DNA, 201 bp, synthetic construct
  source 1..201: mol_type = other DNA
tatagcgagccagccctcatgcactcttggcgctctaagcttaattatatggacccagcgcttcaagtaaagtacctgatcgatcaccctctggccatacttaagtttctccggatgatttttacctacaccctggggatcacgttgaatggcctcttcaacttcttctccgccgggtctgcctatcactactccgatcac

SEQ ID NO: 38806 - DNA, 51 bp, synthetic construct
  source 1..51: mol_type = other DNA
ctcacatgggccgatgtcggaaagacaaatatcggcgtgtccgctcgctac

SEQ ID NO: 38807 - DNA, 192 bp, synthetic construct
  source 1..192: mol_type = other DNA
tcaaacgagttccccctcggctgggatatctatacacatattaattatgccctggcctatatgaacaacggaattacaagcgtcgattacctgctgaatgccccaaacggcaaggttatcgggtaccccccactgttccacgctctgctcataatagtcagctctataactggtagcaacctgatgaatgga

SEQ ID NO: 38808 - DNA, 90 bp, synthetic construct
  source 1..90: mol_type = other DNA
agtcccagccatctttcccaactgctgaacgggatcgtctccattatcaacaatcctttcgacctgttcatgggacaagtggcaatggga

SEQ ID NO: 38809 - DNA, 30 bp, synthetic construct
  source 1..30: mol_type = other DNA
tggtttggcatccccgtgtacaccttccgg

SEQ ID NO: 38810 - DNA, 168 bp, synthetic construct
  source 1..168: mol_type = other DNA
aacttcaacctcgaagtcggtatctcctgtagcgacgtctacgtgtacctcctgaatgccctctattacaccgggatcaaccaccactccaccaacaacatttacctgtctcccattatctgcttcctgacaagcatcctgtttcggttcggcctggtggataagttg

SEQ ID NO: 38811 - DNA, 180 bp, synthetic construct
  source 1..180: mol_type = other DNA
gggatgggcaacggccagttcgaggctgctagtcagataagcaacgggatcgccggaaagggtggtgccgagactgaccccgcttttaatacggaagttggatattacctcttcaatatggcaaatttcatctctaattctcacaccgtgttcgaaggcaatccagtcctggagaacccc

SEQ ID NO: 38812 - DNA, 291 bp, synthetic construct
  source 1..291: mol_type = other DNA
ttcacctacactttcgagccaaccgacaaatacaacaccactgaggaaatgagccaatacctgaagtctgtggaccccaattatgaaaatgtaaagattggcgtgtacaatatccggccgttcctctggtggattggagataacgtggaaggcatcccgatcgtcgaccaggctgcaattgataaaagtaacatgacttattacatttcaaacgccaaaatgaagaacctcaccaattacaccgaaataaagaatatcaacaatctgtacctctacaatcggacctcctac

SEQ ID NO: 38813 - DNA, 102 bp, synthetic construct
  source 1..102: mol_type = other DNA
tacggatttcatccggttgacgccttctttgaggctatctccgggtacacgaccaccggcgcaaccattgtccccgatctcgacgaattaagtagtagccct

SEQ ID NO: 38814 - DNA, 99 bp, synthetic construct
  source 1..99: mol_type = other DNA
tgcagcgtggagctgtttgactctgtttgcatctcttttagtaatgtccctaccggcggcctcctgccccgggatgactctatggcctcctatggaatg

SEQ ID NO: 38815 - DNA, 117 bp, synthetic construct
  source 1..117: mol_type = other DNA
gagcactctggcgatttcactggcgagtacctggctgacacattctggacatctctgtatagcgtaatttcgtccggtaccggcaccgggtttgctatacaagactttgtgtatccc

SEQ ID NO: 38816 - DNA, 129 bp, synthetic construct
  source 1..129: mol_type = other DNA
ctggagcctgatgtcggtcgcttcacccccgatggtgtcgacgagctccagacctactttggcattatcctggctgccatcgccaacgctgggatcggcccgctggcctcctatgatgtgctgagcatt

SEQ ID NO: 38817 - DNA, 165 bp, synthetic construct
  source 1..165: mol_type = other DNA
aacttcaattactccctgggcatcgactgtagcgatgtatatgtctacctcctgaactctctgtattacgccggatacgacgtcaacgtgacatataacatcttcctgagccccgtgatttgcatcctcacctccatccttttccggtttgggctggtcgataag

SEQ ID NO: 38818 - DNA, 177 bp, synthetic construct
  source 1..177: mol_type = other DNA
attggacacggatcattcgaggctggagcccagatggctcggggcatccagggcacacttggatcccagaatgatccagcctacaaccctgacttctcctactacctgatgaacatgctgaactttgtgtcgaattcccacacctacttcgacggtaaccccgtgttggacagtgct

SEQ ID NO: 38819 - DNA, 291 bp, synthetic construct
  source 1..291: mol_type = other DNA
tttactttcacgtttgagcccacaacccagtacattactacggaggaggttagcaactacatcattgagaacaaccctgattatgagaacattaagattggggtctacaacatccgcccgttctcatggtggttgggcgccaacgcaacaggcatccctgtcaacaaccagactgcgatagactccagcaatgtcacctattacatctcaaacatgaagctcgataatctgacgaactactctgaaatcaaaaacatcaacgaaattcacctctatgaaaagatcaacgtc

SEQ ID NO: 38820 - DNA, 120 bp, synthetic construct
  source 1..120: mol_type = other DNA
ccaggcgtccagtacttcggcggccacaatcctagcctcattgggtctatgctgcccgcttccctgaacggaaccctggcctccatgtataacacaggcatcgtctacgtgttctctgac

SEQ ID NO: 38821 - DNA, 72 bp, synthetic construct
  source 1..72: mol_type = other DNA
acaatcggctccctgaatattaccgacatcgtctacgtcctgaaccacaacctcgtcgatccattgtctcct

SEQ ID NO: 38822 - DNA, 165 bp, synthetic construct
  source 1..165: mol_type = other DNA
tttaactataatttcgggatttattgttccgacgtatacgtgtacctgctcaacgccatctactactcgacgggagagaacatccggagcaccggcactatttacctgtctcctctcgtttgcttccttacttcaatcttgttccggctgggcctggtcgacaaa

SEQ ID NO: 38823 - DNA, 177 bp, synthetic construct
  source 1..177: mol_type = other DNA
atggggtccggtcaatttggggctagcggcgaaatctctggaggcatcagcggcaccctcgggtctcaaaaggacccagcctataaccccgacgtggcctactacgtctccaactttgccaacttcattagcaataccaacacaacaatggagggcaatcctaccctggaaaatgcg

SEQ ID NO: 38824 - DNA, 288 bp, synthetic construct
  source 1..288: mol_type = other DNA
ttcaccatgacctttgagaagacacacgagttcatggccatcgaggacgtcagcgattacatcaaggacaataatcctgactatgagaacatgtccattggcgtcttcaatgtccgagccttcaactggtggttgggcgagaacctcttaccgatctcgagtaccgacgaggctctgattgactcctgcaacgccacctattatatttccaatagggtgctcgataacgtgactaactatacggaaatcaaggaaatcgacaacatccacatctacgagaagatcgtg

SEQ ID NO: 38825 - DNA, 177 bp, synthetic construct
  source 1..177: mol_type = other DNA
tactccaataaagttattgcaaactcgacgaataggcggtactacctcgctaacgaggccacccacaagtcctatatcctgcaccacttcacgtcctatctgcaagcactcttcgacccctctctttattcttatctcatcaaggacatcttcttctttagcaaccctggctacttc

SEQ ID NO: 38826 - DNA, 54 bp, synthetic construct
  source 1..54: mol_type = other DNA
tacctgagctataccaagcggttcgacattatccttggcgttcaaggacgctac

SEQ ID NO: 38827 - DNA, 39 bp, synthetic construct
  source 1..39: mol_type = other DNA
attctgcaccacctgttcccttcgatgaagatcctgatc

SEQ ID NO: 38828 - DNA, 171 bp, synthetic construct
  source 1..171: mol_type = other DNA
aacttcaacaacaacataggcatctactgttccgatgtttacgtatatctcctgaatgccctttattacacgggcacaaacatcagaagcaccgcgaccattcacctctccccactcatctgcttcctcacaagcatattcttcgacttgggattcgtggacaagcaggca

SEQ ID NO: 38829 - DNA, 180 bp, synthetic construct
  source 1..180: mol_type = other DNA
atgggcaatgggcacttcggagccgggtctcagatctccgatggcatctccggggcccaaggcgctgagatcgaccctgcctataacaccgatgtatcgtattacgctgccaacttcctcaacttcattagcaacagccacaccgtcatcgacggcaatcccattctggagaactctact

SEQ ID NO: 38830 - DNA, 288 bp, synthetic construct
  source 1..288: mol_type = other DNA
tttactttcaccttcgagccaacagacgagttcaagaccatcgaggaggtatcggattacatcatcacaactcaccctgattacgagaacatttccattggcgtttataacgtccgggcctacaactggtggctgggaggcaacctcatccccattgcttctgacgacgaggaccttattgatagctctaacgtgacctactatattagcaacgaaatcctgaacgacgtgaccaattactccgacatcaagaacatcaataatgtgtacatctacgagaagagtgtg

SEQ ID NO: 38831 - DNA, 171 bp, synthetic construct
  source 1..171: mol_type = other DNA
aacttcaacgacaatctgggcacctactgctccgatgtttatgtctacttgctgaacgctctctactataccggcacgaacatacgcgcgactgggactatctatcttagcccactcatttgtcgcctgacctccattttcttttacttcggatttgtcgataagcaggca

SEQ ID NO: 38832 - DNA, 186 bp, synthetic construct
  source 1..186: mol_type = other DNA
atgggcatgggaaacggcaacttcgccgccgggaaccagatttcttccggggtctctggcgctcagggcagccagactgaccccgcatacaacacagacgtatcttattatctcaccaacttcatcaactttatctcaaatagccataccacaatcgatggcaaccctgtgctgtccaatcctact

SEQ ID NO: 38833 - DNA, 288 bp, synthetic construct
  source 1..288: mol_type = other DNA
tttacatataccttcgaggagaccgacaagttcaagaccattgaagacgtgtccgactacataatctcgaacaatcctgactacgaaaacatttccatcggcgtttataacgtccgggcttacaactggtggcttggcggcaaccttgtccccatcaagagccacgaggccgggctcatcgatagtagcaacgtgacttactacatctctgataggacactgtccaacatcaccaactatacggagattaagaacattaacgacgtgcacatctacgagaagtctgtg

SEQ ID NO: 38834 - DNA, 42 bp, synthetic construct
  source 1..42: mol_type = other DNA
gagaacatcttgttttcgaccctgaagtatattcaaggcgat

SEQ ID NO: 38835 - DNA, 48 bp, synthetic construct
  source 1..48: mol_type = other DNA
ttcggtcaatccccaatcttcccctttacctccctgaaccttcctctg

SEQ ID NO: 38836 - DNA, 60 bp, synthetic construct
  source 1..60: mol_type = other DNA
cccaacgtgctgggcggcggatacagcatgatgcacctcatcgaatatgctttgcctccg

SEQ ID NO: 38837 - DNA, 168 bp, synthetic construct
  source 1..168: mol_type = other DNA
atcttcaattccaacttcggcatttattgctctgacgtctacgtgtacctcctcaacgccctgtactataccggggtcaacatacggtctactgggacaatctatctgagccccctgatttgcttcctgacctccatcttcttctacgctggattcattgacaagctc

SEQ ID NO: 38838 - DNA, 180 bp, synthetic construct
  source 1..180: mol_type = other DNA
atgggctctgggcactttgccgcctctgggcaaatcagcaacggaatcagtggagcacagggctccaatgtcgaccccgcttacaacacagatgtttcttactatgttagcaacttcctcaatttcataagtaattcccataccgtcgtgaacggcaaccctattctggagaaccctact

SEQ ID NO: 38839 - DNA, 288 bp, synthetic construct
  source 1..288: mol_type = other DNA
ttcacattcaccttcgaacccacaaacgaatttaaggctattgaggaggtgtccgactacatcatcgacaacaaccccgactacgagaacctgccaatcggcgtctacaatgttcgagcatacaactggtggctcggtagccacctgctgcctatctcgagctcggatcaggacattatagattcctctaacgccacttactatataagcgacagggtactcaacaacgtgaccaattataccgagatcaagaatatcgaccacatctacatttacgagaagtctgtg

SEQ ID NO: 38840 - DNA, 42 bp, synthetic construct
  source 1..42: mol_type = other DNA
gagaacattttgttttctactctgaagtatatacaaggagat

SEQ ID NO: 38841 - DNA, 48 bp, synthetic construct
  source 1..48: mol_type = other DNA
ttcggacaaagtccgatcttccccttcacctcactcaacttgcctctg

SEQ ID NO: 38842 - DNA, 60 bp, synthetic construct
  source 1..60: mol_type = other DNA
cctaacgtgctcggcggtggacacagcatgatgcatctgatcgagtacactttgccacct

SEQ ID NO: 38843 - DNA, 45 bp, synthetic construct
  source 1..45: mol_type = other DNA
gctcctattatcaccgcctacttccaaaaacctgaagcactgctc

SEQ ID NO: 38844 - DNA, 36 bp, synthetic construct
  source 1..36: mol_type = other DNA
ggcggatttctggctgccagcgcaatcggctacttc

SEQ ID NO: 38845 - DNA, 51 bp, synthetic construct
  source 1..51: mol_type = other DNA
gagatcatggggctcgtgtatttcactaattccgcctacatgaatggggct

SEQ ID NO: 38846 - DNA, 168 bp, synthetic construct
  source 1..168: mol_type = other DNA
atgttcaacctcaacctgggcatttactgtagcgacgtctacgtgtacctgctgaacgctctgtattacaccggcaccaatattcgggccaccggaacaatctacctgtctccgctgatctgctatctcacctccatctttttccggttcggatttgtggacaagctc

SEQ ID NO: 38847 - DNA, 189 bp, synthetic construct
  source 1..189: mol_type = other DNA
atcctgatcatggggagcggcaccttcggggccggagatcagatctccaacggaatctctggcgtgcagggcgccgagatcgaccccgcttacaacacagacaccagctactatgtctccaactttctcaacttcattagcaactcccatactgtaatcgacggcaatcctattctggagaactctact

SEQ ID NO: 38848 - DNA, 288 bp, synthetic construct
  source 1..288: mol_type = other DNA
ttcacatttaccttcgacgagacctccgaatacaataccatcgaggacgtctccgattacattatcgatacaaaccccgactataagaacctgagcatcggcgcatacaacgtccgtgcctacaactggtggttgggcgagaacctcctggccatcaagtcctctgacgaggccaccatcgacgccagcaatgctacttattacatatccgacaaggtgctcgagaatgtgacaaactacaccgaaatcaagaatattaacaacgtgtacatctatgagaagtctgtc

SEQ ID NO: 38849 - DNA, 168 bp, synthetic construct
  source 1..168: mol_type = other DNA
ttcaataacaacctgggcatttactgctccgatgtctatgtgtatctgctgaacgccctctactatactggcacaaacatccggagtaccgggactatctacctgagccctctgatctgttatctgacctctattttttttaggctgggcttcgtcgatctgcaagcc

SEQ ID NO: 38850 - DNA, 183 bp, synthetic construct
  source 1..183: mol_type = other DNA
accctgggcgagggtaccttcggagccggcgatcagattagcagtggcgttagcgggacacagggcgcacagaccgatcccgcatataacaccgatgtttcatactacgttacaaacttcatcaatttcattagtaatagccatactgtcatagatggcaaccccgtgctcgataacccaaca

SEQ ID NO: 38851 - DNA, 291 bp, synthetic construct
  source 1..291: mol_type = other DNA
acattcacctacacctttgaagaaaccggagaatttcgggccatcaaagatgtttctgactacatcatcgccaataaccctgattataaaaatataagcattggcacatacaatgttcgagcctataattggtggctgggagaaaacgctcttcctattaagtcctacgataccgaaacaatcgacgccagcaacgtgacttactatatctccaatcggattcagaataaccttacaaattatactgaggtcaagaatataaacaatctctacatttacaaaaagagcgtg

SEQ ID NO: 38852 - DNA, 30 bp, synthetic construct
  source 1..30: mol_type = other DNA
ggcaacctgctccacgagggcgtaatgtgg

SEQ ID NO: 38853 - DNA, 171 bp, synthetic construct
  source 1..171: mol_type = other DNA
aacttcaacaatagtatcggtgtctactgttccgatgtctatgtgtatcttctcaatgctctttattataccgggattaatctacggtcaacgagcaccatatacctgagccccgtaatttgccgactgaccagcatttttttctatttcggatttgtaaacaagcaggct

SEQ ID NO: 38854 - DNA, 180 bp, synthetic construct
  source 1..180: mol_type = other DNA
atgggcaacggccagttcgatgctgggagccaaataagttcaggaatgatcggagctcagggcacccagtctgaccccgcgtacaccgaagataccggctattacatcgccaatctcccaaactttatatctaactcccatacggttatagacggcaaccctaccctggacaacccaacc

SEQ ID NO: 38855 - DNA, 288 bp, synthetic construct
  source 1..288: mol_type = other DNA
gccttcacctacacatttgaggagacaaataagttcaaggccatcgaggaaatcgctgactacattattgtgaaccatcctgactacgagaacatcaagattggggtctataacgttagagcctacaactggtggctcggcgagaacctcctgcctattaagtcttccgacactggaattatcgattcctccaacgctacctactacatttccaacaaggacatcaacctgaccaattacacaatgatcaagaatatcgataccatctacctttacgagaagtctgtc

SEQ ID NO: 38856 - DNA, 42 bp, synthetic construct
  source 1..42: mol_type = other DNA
gagagcatcgtgtttaacgtcatcttcattgtgaagaccaac

SEQ ID NO: 38857 - DNA, 48 bp, synthetic construct
  source 1..48: mol_type = other DNA
ttcggacaatctaccgtgtttaagatcgccagccccaacattcctctg

SEQ ID NO: 38858 - DNA, 60 bp, synthetic construct
  source 1..60: mol_type = other DNA
ccccagattctcgagggcggctattccatggttaacagcctgaattacctgatccctggc

SEQ ID NO: 38859 - DNA, 30 bp, synthetic construct
  source 1..30: mol_type = other DNA
attcccgtgttcggcctgaaccctaccatc

SEQ ID NO: 38860 - DNA, 42 bp, synthetic construct
  source 1..42: mol_type = other DNA
gagaacatccttttttctacgatcgaatacgtgaagggagac

SEQ ID NO: 38861 - DNA, 48 bp, synthetic construct
  source 1..48: mol_type = other DNA
ttcggacaatcccctatcttcccatttacctctctcaaccttcctctg

SEQ ID NO: 38862 - DNA, 60 bp, synthetic construct
  source 1..60: mol_type = other DNA
cccaacgtgctcggcggcggatactctatgatgtccctgattgagatctcattgcctccg

SEQ ID NO: 38863 - DNA, 30 bp, synthetic construct
  source 1..30: mol_type = other DNA
cccattttcggctttgaccctctgatcgcc

SEQ ID NO: 38864 - DNA, 42 bp, synthetic construct
  source 1..42: mol_type = other DNA
gaggacattctgcggcactacctgaccatcatcaatggcaac

SEQ ID NO: 38865 - DNA, 48 bp, synthetic construct
  source 1..48: mol_type = other DNA
tttggccaaagcacggccctgacattcccgatatctaatattcctttg

SEQ ID NO: 38866 - DNA, 60 bp, synthetic construct
  source 1..60: mol_type = other DNA
cccgagatcagctgcggcggacactacatgctcgggctgttcgacgttgccgttcctagc

SEQ ID NO: 38867 - DNA, 33 bp, synthetic construct
  source 1..33: mol_type = other DNA
atccccatttgcggcctggacaacgtgctcatc

SEQ ID NO: 38868 - DNA, 240 bp, synthetic construct
  source 1..240: mol_type = other DNA
atgacaaacgtggacagttgggggtggtaccgatccggcgaaaatattatctccggagacggcttttacgcccggtctggctatagctacggcccagccttcggctaccttatcaccttctctctgatccctctgacttacctgctgcctatcgggacattctcacaacaaagtgacgctatgatcgctttacaaccgtattttgacttttcacccgcactgcaaaccatagagttcctg

SEQ ID NO: 38869 - DNA, 81 bp, synthetic construct
  source 1..81: mol_type = other DNA
cagctgatggacggcacatttatggatacgtggcaagtcgtcttcgggagagtggatcacgcgggaaacttggttgggaga

SEQ ID NO: 38870 - DNA, 42 bp, synthetic construct
  source 1..42: mol_type = other DNA
agcggcggcatcacgaacatgttttccgacctcttccacgtc

SEQ ID NO: 38871 - DNA, 111 bp, synthetic construct
  source 1..111: mol_type = other DNA
gcggccctgctcgtgtctatagcacaatacacagatctgatttccatggatctcgtgatcgacctcacaaaaatgtatgtcacgggaggtgtcgtaatcggcgactactca

SEQ ID NO: 38872 - DNA, 30 bp, synthetic construct
  source 1..30: mol_type = other DNA
attatcctgggcctcgaggaaagcgacaag

SEQ ID NO: 38873 - DNA, 105 bp, synthetic construct
  source 1..105: mol_type = other DNA
ttcaccatgggtggttggggcgaagtgaccagcaactgggatgaggtctccatcgaggtggcccactttactgacctgttctacgatggcggagctcctcttact

SEQ ID NO: 38874 - DNA, 96 bp, synthetic construct
  source 1..96: mol_type = other DNA
cgggcctgggcgcacagtcagggaatcgagacagactttaccgggacagccaaggagaccattttcatcgcgatggctggggcgatgtttgctacc

SEQ ID NO: 38875 - DNA, 54 bp, synthetic construct
  source 1..54: mol_type = other DNA
agcggcggtatcattggcgccggcgagtattgcctgtacaacacccagctctac

SEQ ID NO: 38876 - DNA, 45 bp, synthetic construct
  source 1..45: mol_type = other DNA
agcgaggacgtgctgcggtcctacctggccattataaattcgaac

SEQ ID NO: 38877 - DNA, 48 bp, synthetic construct
  source 1..48: mol_type = other DNA
ttcggtcaaagcaccgccctgaccttccccattagcaacatccctctg

SEQ ID NO: 38878 - DNA, 60 bp, synthetic construct
  source 1..60: mol_type = other DNA
cccaagatcagctgcggcggccactacatgatgggactgttcgacgtggccattccttct

SEQ ID NO: 38879 - DNA, 30 bp, synthetic construct
  source 1..30: mol_type = other DNA
attcccatctgcggactggacaacgctctc

SEQ ID NO: 38880 - DNA, 45 bp, synthetic construct
  source 1..45: mol_type = other DNA
ccctggctggccaatgacatcttccacaaccctaacgctctgctc

SEQ ID NO: 38881 - DNA, 39 bp, synthetic construct
  source 1..39: mol_type = other DNA
ggcgtgttcttgagcgactcactaatcgggtactactat

SEQ ID NO: 38882 - DNA, 48 bp, synthetic construct
  source 1..48: mol_type = other DNA
atcatgcggattgtgtacttcaccaaccctgcttatacatctggagcc

SEQ ID NO: 38883 - DNA, 33 bp, synthetic construct
  source 1..33: mol_type = other DNA
accatcattctgggcctgagcgagaacgacaag

SEQ ID NO: 38884 - DNA, 108 bp, synthetic construct
  source 1..108: mol_type = other DNA
gtcaccctgggcggatggggcgaggtgaccgccatctggaacagccctctctccggactgcccgctcacttcactgacatcatgtacgatggaggggagaaaatcacc

SEQ ID NO: 38885 - DNA, 93 bp, synthetic construct
  source 1..93: mol_type = other DNA
cgggcatgggccatccactccggctccgtggccagcctgatcggaaacgaggagaccatcttcattgctatggctggcgctctctttacaacc

SEQ ID NO: 38886 - DNA, 54 bp, synthetic construct
  source 1..54: mol_type = other DNA
ggcggcggaattatcggcggtggcagctactgcatctatgacaccggactctac

SEQ ID NO: 38887 - DNA, 45 bp, synthetic construct
  source 1..45: mol_type = other DNA
tccgaggacatcctgcggggctacctgtctatcattaattctaac

SEQ ID NO: 38888 - DNA, 48 bp, synthetic construct
  source 1..48: mol_type = other DNA
ttcggacaatcaacaatcctgagcttccccgtggccaacattcctctc

SEQ ID NO: 38889 - DNA, 60 bp, synthetic construct
  source 1..60: mol_type = other DNA
cccgagatcagcgacggcggacacttcatgatgggcatgctggatgtggctgtaccttct

SEQ ID NO: 38890 - DNA, 33 bp, synthetic construct
  source 1..33: mol_type = other DNA
attccaatctgcggcctcgagtctgtgcttgtg

SEQ ID NO: 38891 - DNA, 42 bp, synthetic construct
  source 1..42: mol_type = other DNA
ccctggctggcctactcctatctcggaaaacctgttgctctg

SEQ ID NO: 38892 - DNA, 36 bp, synthetic construct
  source 1..36: mol_type = other DNA
ggcaagttcctggctctcgacgccatcgggttctac

SEQ ID NO: 38893 - DNA, 54 bp, synthetic construct
  source 1..54: mol_type = other DNA
cccatcctgcgcgtattttatttcaccgaccctgcctatgtggccggtgcaagt

SEQ ID NO: 38894 - DNA, 171 bp, synthetic construct
  source 1..171: mol_type = other DNA
aacttcaacaactccataggcatctactgtagtgatgtttacgtctacctcctgaacgccctgtactacactgggattaacctccgatccacttctaccatatacctgagcccaattatttgccgattaaccagcatctttttctactttggattcgttgacaaacaagcg

SEQ ID NO: 38895 - DNA, 180 bp, synthetic construct
  source 1..180: mol_type = other DNA
atgggacacggccagttcggggctggcactcagattagtagcgggatgatcggcgcccagggttcgcaagcggatcccgctttcaacgaggacgtgtcctactatgtcgccaacttcatcaacttcattagcaactctcacaccgtgatcgacggcaatccaatcctggataaccccaca

SEQ ID NO: 38896 - DNA, 285 bp, synthetic construct
  source 1..285: mol_type = other DNA
tttacctacacattcgaggagaccaacaagttcaatgccatcaaagacatggcagactacgtgatcgacaacaaccccgactacgagaacattactatcggggtcttcaacgtcagggcctataactggtggctcggcgagaacctgctgcctattaggagtaccgacatcagcaccatcgactcctccaacgtgacatactacatctctgacaacgccctgaatctgaccaattacaccgaaattaagcagatcgattctatccacctctatgagaagtctgtt

SEQ ID NO: 38897 - DNA, 39 bp, synthetic construct
  source 1..39: mol_type = other DNA
ctgatggccaacgtgttcctcaagaaacctgagactctc

SEQ ID NO: 38898 - DNA, 33 bp, synthetic construct
  source 1..33: mol_type = other DNA
aagttcctgaccctcgagtctgttgggtttttt

SEQ ID NO: 38899 - DNA, 51 bp, synthetic construct
  source 1..51: mol_type = other DNA
cctacactacaagtattctacttcaagaaccccagttatgtcaatggggcg

SEQ ID NO: 38900 - DNA, 294 bp, synthetic construct
  source 1..294: mol_type = other DNA
aaccccatctgcaacgtcagtgacgagatcgaacacctgacccgggctgacatcacatctcacggcattctgatgcccgactacgttaatggaagcttcaaggtatcgagctttgtgcccgacttcttcgaaaagtctagggccctcaccgttctccaagtcagcggggacaccgctaaaatcaacaactccatgagcacataccatagcgcgtttcaacaaaatcccttttacccttacattccgcaaactatgggcatcctgattgccaagttccttgatctgaacgtgata

SEQ ID NO: 38901 - DNA, 216 bp, synthetic construct
  source 1..216: mol_type = other DNA
atcgcaatgccttcgtatactcactcctggcgggctgagtactacaagaaccacatcatcaacccaccacaacaaaccaattatattctccatcaccctgtcgacttcgccatctccgtgctccacattcccaacacactgctgaacagctccattctgagcgagttcaacaccgtgcactctgtgatcccattgcaaacaaaggtctacacgagt

SEQ ID NO: 38902 - DNA, 54 bp, synthetic construct
  source 1..54: mol_type = other DNA
atcagctggggcatggtcggtcatctcgaggacatggcccttcatgctagatac

SEQ ID NO: 38903 - DNA, 168 bp, synthetic construct
  source 1..168: mol_type = other DNA
ttcaacctgaacctgggcattcagtgtagcgatgtctacctgtacctcgtgaatgccctgtactataacggaatcaccattcctcatatcgagaacatcgtgctctcccctacaatctgctacctgacttccctgctcttcaagctcgggctgacagacactagctct

SEQ ID NO: 38904 - DNA, 189 bp, synthetic construct
  source 1..189: mol_type = other DNA
atcaccaacctgagtggcggcgatttcttacccgggtctcaaattaacagcggcatctctgggagccagggcaaggagacagaccctgcttttaaccaagacattggatactacctgaacaacctccctaatttcatttctaactcccacacctatttcggagccaaccccgtgcttgataaccctacg

SEQ ID NO: 38905 - DNA, 285 bp, synthetic construct
  source 1..285: mol_type = other DNA
ttcaccctgacaatcgacgaaacctacacctttaagcaaactgaagatatgtccaattacatcatcgagaataaccccgactacaagaacatccctatcgctacctataacatgaggccttacatgtggtggctggggccacagatcagcggcatcgcccacactgagacacagcggattgatgagagcaactttacctattacatttcctctaaccccctgaacctcaccaattacactgaggtcaagaatattggaacactctacctgtacaagaagaacgtc

SEQ ID NO: 38906 - DNA, 42 bp, synthetic construct
  source 1..42: mol_type = other DNA
cccgtgctggcttacaaatatttggggaagcccttggctctg

SEQ ID NO: 38907 - DNA, 36 bp, synthetic construct
  source 1..36: mol_type = other DNA
gggaagtttctgacctttgccgacgtcgggtttttt

SEQ ID NO: 38908 - DNA, 51 bp, synthetic construct
  source 1..51: mol_type = other DNA
ccaaccctctccctgctttatttcaagaaccccgcttatgtagcaggtgct

SEQ ID NO: 38909 - DNA, 39 bp, synthetic construct
  source 1..39: mol_type = other DNA
ctcctggccaataacttcctgcacaagcctcttgctctg

SEQ ID NO: 38910 - DNA, 33 bp, synthetic construct
  source 1..33: mol_type = other DNA
aagttcctcaccctggacgcggtcgggttcttc

SEQ ID NO: 38911 - DNA, 51 bp, synthetic construct
  source 1..51: mol_type = other DNA
cctacactccgcgtgctgtatttcgccaagcccgaatacgtggcgggggct

SEQ ID NO: 38912 - DNA, 42 bp, synthetic construct
  source 1..42: mol_type = other DNA
ctgctggccaacaatttcatgggcaagcccgagatggaggtt

SEQ ID NO: 38913 - DNA, 36 bp, synthetic construct
  source 1..36: mol_type = other DNA
ggccggttcctgaccctggagagcatcgggttcttt

SEQ ID NO: 38914 - DNA, 48 bp, synthetic construct
  source 1..48: mol_type = other DNA
attctccggctgctgtacttcaagatcccagcctatgcggccggtgct

SEQ ID NO: 38915 - DNA, 42 bp, synthetic construct
  source 1..42: mol_type = other DNA
gaccacagcctgggcatcccgttgactgatgggactaccatt

SEQ ID NO: 38916 - DNA, 93 bp, synthetic construct
  source 1..93: mol_type = other DNA
ctgaccgttggtggaggcgaactaagtggcttctccattgataacattgtggaccacctgacccctgatggctgggactggggagtctcagac

SEQ ID NO: 38917 - DNA, 81 bp, synthetic construct
  source 1..81: mol_type = other DNA
tatggcatgatgtctcccgaacaaatcgacgcatggggcgtctccaccttgtaccccattgctgaatacgatttcggttct

SEQ ID NO: 38918 - DNA, 168 bp, synthetic construct
  source 1..168: mol_type = other DNA
ttcaacgaccacctcggcatatattgttctgacgtttacgtctatctgcttaatgccctgtactatgccgggaccaacatctattccactaagtccatttacctgagccccgtagtctgctttctgacctctctcatcttcgacctgggatacgtcgataagacagcg

SEQ ID NO: 38919 - DNA, 189 bp, synthetic construct
  source 1..189: mol_type = other DNA
acctctatgggcgacggccagctggtcttcgacggactgctgacctctggcgttgaaggcaacctcgggtccacccacgataacgcttataacccagaccttggatactacctgatcaatatgggcaacttcatctcgtcctccaatacaacattcgtggccaacactccctcactgaaccagccacaa

SEQ ID NO: 38920 - DNA, 291 bp, synthetic construct
  source 1..291: mol_type = other DNA
ttcacttacacatttgacgataccaacgagttcaacgcacccgagaagatgaccgactacatcaaggaaaacatcgataactggtccgaaataaagatcggtaactataacatcaggccatactactggtacctggggatgaatagccccggaatcgaaagctataacacacagaagataatcgatagcaacgtcacctattatatctccgacatagaacagaagaacctcaccaactataccgagattaagcagatcgagaacctgtatctgtacaagaagataagggaa

SEQ ID NO: 38921 - DNA, 42 bp, synthetic construct
  source 1..42: mol_type = other DNA
ctcctggctaataacttcatgggaaagcccgaagtgcaggtt

SEQ ID NO: 38922 - DNA, 36 bp, synthetic construct
  source 1..36: mol_type = other DNA
ggcaggttcctgtccctggagagcatcggcttcttt

SEQ ID NO: 38923 - DNA, 48 bp, synthetic construct
  source 1..48: mol_type = other DNA
attctccggctgctgtacttccaaatacccgcctatgctgctggggcc

SEQ ID NO: 38924 - DNA, 42 bp, synthetic construct
  source 1..42: mol_type = other DNA
cccatcataaccaattattatcacaagcctgaggccctgctt

SEQ ID NO: 38925 - DNA, 51 bp, synthetic construct
  source 1..51: mol_type = other DNA
ggcgttatgggacttgtatatttcacgaacgcagcctatatgaatggcgca

SEQ ID NO: 38926 - DNA, 165 bp, synthetic construct
  source 1..165: mol_type = other DNA
ttcaacaataacctcggcatctattgtagcgacgtctatgtgtacctgctcaacgctctctattacgccggcactaacatccactctaccaagagtatctaccttagtcccgtggtctgcttcctgacaagcctcatttttgagctgggatacgtggacaaggtg

SEQ ID NO: 38927 - DNA, 192 bp, synthetic construct
  source 1..192: mol_type = other DNA
gtctcctctatgggcgaatcctatctcggatttgatgggatgcttgtcggaggggccgaaggcaatctcgggtccacccacgacaactcctacaaccctgatatcggatattacctcctgaacatggggaacttcatctcatcctcaaatactacattcgtggttaagactcctgccctcaacaaccccacg

SEQ ID NO: 38928 - DNA, 288 bp, synthetic construct
  source 1..288: mol_type = other DNA
ttcaccctgacctttgaggagaccaacgagttcaacgcccctgagaagatgacagactacattaaggctaacatcgagaactggtctgacattcacattgggaactacaacatccggccctactactggtatctgggactcaacactcctggcatagagagctccaacgcccagaagataatcgactctgatgtgacatactatattagcgaccagaaggagaagaatctgactgggttcgctgagatcaaggaaatcgatggcctgtacctctacaagaggaatgct

SEQ ID NO: 38929 - DNA, 45 bp, synthetic construct
  source 1..45: mol_type = other DNA
ccttggctggtggacaactacctccacaagcccattgctctgatc

SEQ ID NO: 38930 - DNA, 36 bp, synthetic construct
  source 1..36: mol_type = other DNA
gggaagttcctgagtttagattcgatcggctttttc

SEQ ID NO: 38931 - DNA, 51 bp, synthetic construct
  source 1..51: mol_type = other DNA
cccacacttcgagtgttttatttcaccaattctgcatacgtcgccggagcc

SEQ ID NO: 38932 - DNA, 45 bp, synthetic construct
  source 1..45: mol_type = other DNA
ccctggctgacctatagctacttgggaaagcccgaagctcttgtg

SEQ ID NO: 38933 - DNA, 33 bp, synthetic construct
  source 1..33: mol_type = other DNA
aagttcctcaccctggacgctgttgggttcttc

SEQ ID NO: 38934 - DNA, 51 bp, synthetic construct
  source 1..51: mol_type = other DNA
cccaccctgcgcgtcttgtacttcgccaagcctgaatatgtggcaggagcc

SEQ ID NO: 38935 - DNA, 39 bp, synthetic construct; identical to SEQ ID NO: 38430
  source 1..39: mol_type = other DNA

SEQ ID NO: 38936 - DNA, 30 bp, synthetic construct
  source 1..30: mol_type = other DNA
tattacatcgccgagatggaccagccatat

SEQ ID NO: 38937 - DNA, 33 bp, synthetic construct
  source 1..33: mol_type = other DNA
agccggatgttggggcctgagggttatggactg

SEQ ID NO: 38938 - DNA, 42 bp, synthetic construct
  source 1..42: mol_type = other DNA
gattttatcgcaaacgccattttccataagcctttggtggtg

SEQ ID NO: 38939 - DNA, 36 bp, synthetic construct
  source 1..36: mol_type = other DNA
ggggtcttcatgctgagcagagatgttggattttac

SEQ ID NO: 38940 - DNA, 39 bp, synthetic construct
  source 1..39: mol_type = other DNA
atccagctcctgttcggcgaagtctacacgccaggaagc

SEQ ID NO: 38941 - DNA, 42 bp, synthetic construct
  source 1..42: mol_type = other DNA
gaggacattctgcgcggctacctgctgatcatcaacggcaat

SEQ ID NO: 38942 - DNA, 48 bp, synthetic construct
  source 1..48: mol_type = other DNA
tttggacaatctaccgtgctctcctttcccgtctctaacatccctctg

SEQ ID NO: 38943 - DNA, 60 bp, synthetic construct
  source 1..60: mol_type = other DNA
cctgagatcagctgcggcggacactacatgatggggatgctagacgtggctgtaccatca

SEQ ID NO: 38944 - DNA, 30 bp, synthetic construct
  source 1..30: mol_type = other DNA
atccccatttgcggccttgagaacgctctg

SEQ ID NO: 38945 - DNA, 45 bp, synthetic construct
  source 1..45: mol_type = other DNA
agcgagtccgtgctgcgggactacctcggcattatccacggaaac

SEQ ID NO: 38946 - DNA, 51 bp, synthetic construct
  source 1..51: mol_type = other DNA
ttcggccaatcaaccatcctgaacttccctgtactcaccataccacttccc

SEQ ID NO: 38947 - DNA, 60 bp, synthetic construct
  source 1..60: mol_type = other DNA
cccgagatttccgacggcggccacttcatgatggacatcctggatatcgctgtaccttcc

SEQ ID NO: 38948 - DNA, 33 bp, synthetic construct
  source 1..33: mol_type = other DNA
gtcccagcgttcggctggcagcacgacgttatc

SEQ ID NO: 38949 - DNA, 42 bp, synthetic construct
  source 1..42: mol_type = other DNA
gagcacatccttcggaactacctgaacataatccatggcaat

SEQ ID NO: 38950 - DNA, 48 bp, synthetic construct
  source 1..48: mol_type = other DNA
tttggtcaatcgacaatcctcaattttcccgtgctgaacattcctctg

SEQ ID NO: 38951 - DNA, 60 bp, synthetic construct
  source 1..60: mol_type = other DNA
cccgagattagcgacggcggacacttcatgatggatatgctgggagtggctatccctagc

SEQ ID NO: 38952 - DNA, 30 bp, synthetic construct
  source 1..30: mol_type = other DNA
gtgcccgctttcggttggcagcacgaactg

SEQ ID NO: 38953 - DNA, 39 bp, synthetic construct; identical to SEQ ID NO: 38897
  source 1..39: mol_type = other DNA

SEQ ID NO: 38954 - DNA, 33 bp, synthetic construct
  source 1..33: mol_type = other DNA
aagttcctgaccctcgagtctgtcggcttcttc

SEQ ID NO: 38955 - DNA, 51 bp, synthetic construct
  source 1..51: mol_type = other DNA
cccacgctgcaagtattttattttaagaatcccagttacgtgaacggtgct

SEQ ID NO: 38956 - DNA, 42 bp, synthetic construct
  source 1..42: mol_type = other DNA
gagcacattcttcggaactacctgaacgtgatccatgggaac

SEQ ID NO: 38957 - DNA, 48 bp, synthetic construct
  source 1..48: mol_type = other DNA
tttggtcaatccaccattctcaactttcccgtgctgaatatccctctg

SEQ ID NO: 38958 - DNA, 60 bp, synthetic construct
  source 1..60: mol_type = other DNA
cccgagatctccgacggcggacacttcatgatggatatgctgggcgttgccattccttcc

SEQ ID NO: 38959 - DNA, 45 bp, synthetic construct
  source 1..45: mol_type = other DNA
agcgagcacgtgctccgggactacctgtccatcattaacggaaat

SEQ ID NO: 38960 - DNA, 48 bp, synthetic construct
  source 1..48: mol_type = other DNA
ttcggacaatcaacgattctgaacttccccgtgctcaatatccctctc

SEQ ID NO: 38961 - DNA, 60 bp, synthetic construct
  source 1..60: mol_type = other DNA
cccgagatcagcgacggtggccacttcatgatggacatgctggatatcgccattccttcc

SEQ ID NO: 38962 - DNA, 30 bp, synthetic construct
  source 1..30: mol_type = other DNA
gtgcctactttcggatggcagcacgatctg

SEQ ID NO: 38963 - DNA, 165 bp, synthetic construct
  source 1..165: mol_type = other DNA
tttaacgctaatctcggaatatactgttcggacgtctacgtatatcttctgaacgccctctactattccggtaccaatatccactccacacggtccatataccttagtcccgtcgtttgctatttgacctccctgctgttcgatctgggatacgtggacaaggtg

SEQ ID NO: 38964 - DNA, 186 bp, synthetic construct
  source 1..186: mol_type = other DNA
acttacagcatgggagaaggtaaccttgtgttcgacaagctgatcgaaggaggcgtcgaaggcaatctcggaagctctaacgacaacgcctacaatcccgactttggctactatctcgtgaacatggggaacttcatttcctcctcaaacaccaccttcatggggaagacaccctacctgggaaac

SEQ ID NO: 38965 - DNA, 288 bp, synthetic construct
  source 1..288: mol_type = other DNA
tttactctgacattcgaagacaccaacgagttctccgctcccgaggagatgagcgactacatcaaggccaatattgagaactggtccgaaatcaagatcgggaattacaacattcggccttactactggtacctgggcctcaactctcccggaattgagtctagccatcctgagaaaattatcgagaacaatgtgtcatactatattagtaatgtcaagcagaacaatctgaccaattatactgaaataaagcagatcgataacctgtacctctacaagaagaatgtg

SEQ ID NO: 38966 - DNA, 42 bp, synthetic construct
  source 1..42: mol_type = other DNA
gagatgaaagttggtcgactggaagaactggagccgtacaaa

SEQ ID NO: 38967 - DNA, 48 bp, synthetic construct
  source 1..48: mol_type = other DNA
gctccttactggctgaccgtggaaggcagcgacgagttcctgtccaac

SEQ ID NO: 38968 - DNA, 102 bp, synthetic construct
  source 1..102: mol_type = other DNA
gaatgtgaaatcagcacacttttcccgttgacctattaccctatattcaacggtgacgtggagctggtcgagggcattcgggccctggaccagaaagaaatc

SEQ ID NO: 38969 - DNA, 33 bp, synthetic construct
  source 1..33: mol_type = other DNA
acaaacaatagcggcctgacccacatcttcgac

SEQ ID NO: 38970 - DNA, 42 bp, synthetic construct
  source 1..42: mol_type = other DNA
ccttacctggcctatgactatttggagaagcccgtgacactc

SEQ ID NO: 38971 - DNA, 36 bp, synthetic construct
  source 1..36: mol_type = other DNA
ggccgatttctgaccctggacgagatcggcttcttc

SEQ ID NO: 38972 - DNA, 51 bp, synthetic construct
  source 1..51: mol_type = other DNA
cctacgttgcgagtgttgtacttcaagaatcctgcttacgtggctggtgca

SEQ ID NO: 38973 - DNA, 33 bp, synthetic construct
  source 1..33: mol_type = other DNA
tccagaatgctcgggcctgagggctatggactg

SEQ ID NO: 38974 - DNA, 42 bp, synthetic construct
  source 1..42: mol_type = other DNA
gactttatcgctaacgaaattttccataagccactggtggtg

SEQ ID NO: 38975 - DNA, 36 bp, synthetic construct
  source 1..36: mol_type = other DNA
ggggtctttatgttatcctctgacgtcggattttac

SEQ ID NO: 38976 - DNA, 39 bp, synthetic construct
  source 1..39: mol_type = other DNA
atccagctcctgttcggcgaagtttacacccctgggtcc

SEQ ID NO: 38977 - DNA, 42 bp, synthetic construct
  source 1..42: mol_type = other DNA
ccttacctggcctacgactacctcggaaagccagcggctctg

SEQ ID NO: 38978 - DNA, 36 bp, synthetic construct
  source 1..36: mol_type = other DNA
ggcaagtttctgaccttcgccgacatcgggtttttc

SEQ ID NO: 38979 - DNA, 51 bp, synthetic construct
  source 1..51: mol_type = other DNA
cctaccttgcgcatactgtacttcaagaaccccgcctacgttgctggcgct

SEQ ID NO: 38980 - DNA, 45 bp, synthetic construct
  source 1..45: mol_type = other DNA
ccctggctgacctaccactatctgaacaagcctcttgctcttgtg

SEQ ID NO: 38981 - DNA, 36 bp, synthetic construct
  source 1..36: mol_type = other DNA
ggcaggttcctgaccctcgatgatgttgggtttttc

SEQ ID NO: 38982 - DNA, 54 bp, synthetic construct
  source 1..54: mol_type = other DNA
cctaccctgagaatcctctacttcgagaaccccgcatatgtagctggagcatcc

SEQ ID NO: 38983 - DNA, 42 bp, synthetic construct
  source 1..42: mol_type = other DNA
ccttacctggcctatcactacctcggcaaacctgctgctctg

SEQ ID NO: 38984 - DNA, 36 bp, synthetic construct
  source 1..36: mol_type = other DNA
ggccggtttctgaccttcgacgagatcgggttcttt

SEQ ID NO: 38985 - DNA, 51 bp, synthetic construct
  source 1..51: mol_type = other DNA
ccgactctgcgtatcctctatttcaagaaccccgcctacgtggcaggcgcg

SEQ ID NO: 38986 - DNA, 102 bp, synthetic construct
  source 1..102: mol_type = other DNA
tatggcatgaatgtgaccgacagctttttcgagggcatcagcggatacaccacaaccggagctactatcgtcgacgacctgggagctatgcccgattctttg

SEQ ID NO: 38987 - DNA, 96 bp, synthetic construct
  source 1..96: mol_type = other DNA
tccgtcaccgctttcgactctctctgtatcgccctgagcaatgtacctaccggcggtcttctgcctcggaacgaatccatggcgtgttatagcatc

SEQ ID NO: 38988 - DNA, 135 bp, synthetic construct
  source 1..135: mol_type = other DNA
cctcatctggacgggctaactgctggagagctgggcgatagtgcctggaagagcgtgtactccgtcatctcctcgggtactggaactggattcgccatcttctcttatagccagctctacggagctggaaacctc

SEQ ID NO: 38989 - DNA, 102 bp, synthetic construct
  source 1..102: mol_type = other DNA
tgcgagcccgacctcaatttacaagaacagttcggtgtcaccctggcggcgatcaccaatgccggcatcgggcctcttgatagctacggctctcttagtatc

SEQ ID NO: 38990 - DNA, 42 bp, synthetic construct
  source 1..42: mol_type = other DNA
ctgctcgccatcaacttcatgggcaagcctgaaatgatggtt

SEQ ID NO: 38991 - DNA, 36 bp, synthetic construct
  source 1..36: mol_type = other DNA
ggccgctttctgaccatggccgacatcggcttcttc

SEQ ID NO: 38992 - DNA, 48 bp, synthetic construct
  source 1..48: mol_type = other DNA
attctgcggctgctctatttccaaattccagcttatgtagcaggagcc

SEQ ID NO: 38993 - DNA, 168 bp, synthetic construct
  source 1..168: mol_type = other DNA
ttcaacaataacctcgggatttactgtagcgacgtctatgtgtacctgctgaatgctctgtactttgccggaaccaacatccactccaccaagtccatctacctgtctcccgtcgtctgcttccttacaagcctgattttcgacctcggctacgtggataaggttgcc

SEQ ID NO: 38994 - DNA, 186 bp, synthetic construct
  source 1..186: mol_type = other DNA
aattacatgggcaatggcttcattgccttcgacggactgctttcctcgggagtcagcgggaacctgggctctacccacgacaactcctataaccctgatctggggtactacctcgtgaacatggggaactttatatcgagctctaacaccacattcgtggccaagactccatctctggctaatccc

SEQ ID NO: 38995 - DNA, 288 bp, synthetic construct
  source 1..288: mol_type = other DNA
ttcacctacacctttgaacaaacggacgagtttaattcacccgaattgatgaccaactatattaaggaaaatatcgacaactggagcgagatccagatcgggaactacaacattcggccctactactggtacctggggctgaacagccctggaatagagagcggcaacacacagaagatcattgattccaacgtgtcttactatatatccaatcatccgcaaaagaatctgacaaattacactgagatcaagaatattaacgacctctacctctacaagaggaacggc

SEQ ID NO: 38996 - DNA, 42 bp, synthetic construct
  source 1..42: mol_type = other DNA
ccctttatcgctaataacttcatgcacaagccggaagtgatg

SEQ ID NO: 38997 - DNA, 36 bp, synthetic construct
  source 1..36: mol_type = other DNA
gggaagttcctgaccctcgccgacatcggcttcttt

SEQ ID NO: 38998 - DNA, 51 bp, synthetic construct
  source 1..51: mol_type = other DNA
ccaacgttgcaattactatacttcaagaaccctgattatgtcgccggcgcc

SEQ ID NO: 38999 - DNA, 42 bp, synthetic construct
  source 1..42: mol_type = other DNA
ccctacctggcctacaactatctccaaaaaccggcggccttg

SEQ ID NO: 39000 - DNA, 36 bp, synthetic construct
  source 1..36: mol_type = other DNA
ggcaagtttctgaccttcaacgacatcgggttcttc

SEQ ID NO: 39001 - DNA, 51 bp, synthetic construct
  source 1..51: mol_type = other DNA
cctacactggccctgctgtacttcaagaatcctgcatatattgctggtgct

SEQ ID NO: 39002 - DNA, 99 bp, synthetic construct
  source 1..99: mol_type = other DNA
tatggcatggggatcaccgactccttctttgagggcatctctggatacaccacaaccggagccactattgtggacgatctgcgcgctatgcctgattcc

SEQ ID NO: 39003 - DNA, 96 bp, synthetic construct
  source 1..96: mol_type = other DNA
gaggtgaccgccttcgactctctctgcatcgctctgtccaatatccccaccggaggtcttctgcctcggaacgaatccatcgcctgctatagcatc

SEQ ID NO: 39004 - DNA, 135 bp, synthetic construct
  source 1..135: mol_type = other DNA
cccaatctcaacggcctaaccgctgatcaactgggcgactctgcctggaagtccgtctactctgtcattagttctgggacaggaaccgggttcgcgattttctcgtactcgcaactctacggcgctggaaacctg

SEQ ID NO: 39005 - DNA, 102 bp, synthetic construct
  source 1..102: mol_type = other DNA
tgcgagcctcacctcaatttacaagaacaattcggagtgacactggctgccatcaccaatgccggcattgggccactggactcttatgggagccttagcatt

SEQ ID NO: 39006 - DNA, 171 bp, synthetic construct
  source 1..171: mol_type = other DNA
ttcaataataacctcgggatctattgtagcgacgtttacgtatacctgctgaatgctctttactttgcgggaaccaacattcattcaaccaaatccatttacctgtcacccgttgtctgttttttgacctcactgattttcgatctcggctacgttgataaagtggctata

SEQ ID NO: 39007 - DNA, 186 bp, synthetic construct
  source 1..186: mol_type = other DNA
tacacaatgggcaacggcttcatcgccttcgacggacttattagtggcggagtcagcggacatttaggctccacccacgataacagctacaaccctgactttggctactatctgaccaatatggggaatttcatctcttcctccaacaccacattcgtggccaagactccctctctcgctaatccc

SEQ ID NO: 39008 - DNA, 291 bp, synthetic construct
  source 1..291: mol_type = other DNA
gcctttacctccacttttgagcaaacaaacgagttcaacgggccagaattgatgacagactacattaaggaaaacattgataattggtctgagatccaaatcggaaactataacatccgcccctactactggtatcttggcatgaattcccccggtatcgagtctggcgcgacccaaaaaataatcgagtccaatgtctcttactacatttcaaaccacccgcaaaagaaccttaccaattacaccgagataaagaacattgacggcctgtatctataccaaaggaacgcc

SEQ ID NO: 39009 - DNA, 33 bp, synthetic construct
  source 1..33: mol_type = other DNA
tcacggatgttgggtcctgagggctatggactg

SEQ ID NO: 39010 - DNA, 42 bp, synthetic construct
  source 1..42: mol_type = other DNA
gatttcattgccaacaatatctttcacaaaccactggtggtg

SEQ ID NO: 39011 - DNA, 33 bp, synthetic construct
  source 1..33: mol_type = other DNA
atcctgatgctcagcaccgacgtcggctactac

SEQ ID NO: 39012 - DNA, 45 bp, synthetic construct
  source 1..45: mol_type = other DNA
cccatcattgagctgctcttcggctccgcctacatctctggtagc

SEQ ID NO: 39013 - DNA, 42 bp, synthetic construct
  source 1..42: mol_type = other DNA
gagaacgttctgcggagctaccttaagattatccacgggaat

SEQ ID NO: 39014 - DNA, 48 bp, synthetic construct
  source 1..48: mol_type = other DNA
ttcggccaatccacgattctgaattttcccgtgctgaacatccctctc

SEQ ID NO: 39015 - DNA, 60 bp, synthetic construct
  source 1..60: mol_type = other DNA
cccgagatttccgacggcggacacttcatgatggacatgctggatctgaccatccctagc

SEQ ID NO: 39016 - DNA, 42 bp, synthetic construct
  source 1..42: mol_type = other DNA
cccatcatggccaacgtcttccttaaaaagcccgagaccctg

SEQ ID NO: 39017 - DNA, 33 bp, synthetic construct
  source 1..33: mol_type = other DNA
aagttcctgtccctcgcaagcgtcgggtttttc

SEQ ID NO: 39018 - DNA, 51 bp, synthetic construct
  source 1..51: mol_type = other DNA
cctacactgcaagttttctactttaaaaatccttcttatgtgaacggcgcc

SEQ ID NO: 39019 - DNA, 42 bp, synthetic construct
  source 1..42: mol_type = other DNA
ccctggctggcctatggctaccttaataagcctttggctctg

SEQ ID NO: 39020 - DNA, 36 bp, synthetic construct
  source 1..36: mol_type = other DNA
ggcaagttcctgaccctcgacgccgttggcttcttc

SEQ ID NO: 39021 - DNA, 51 bp, synthetic construct
  source 1..51: mol_type = other DNA
cccactctgcgggtgctttacttcgccaagccggaatatgttgctggcgct

SEQ ID NO: 39022 - DNA, 171 bp, synthetic construct
  source 1..171: mol_type = other DNA
gcgcatagtcttattcacatagacgaatactttactctcgaagtcgttaagcttcctctgctggatgcgtggcgcgtcatcataggggactatcatcccccactttactatatactgctcaaaatcgttaagaaactgttgctcacgacaaatatcccgctggatttgatc

SEQ ID NO: 39023 - DNA, 102 bp, synthetic construct
  source 1..102: mol_type = other DNA
ttccgtcaaaccggaaaggtcagcgaggactactggatcgccactcccgacatcaacgagatctttcactacttctacatttgcgggaccaattctggtgat

SEQ ID NO: 39024 - DNA, 45 bp, synthetic construct
  source 1..45: mol_type = other DNA
ccttacctcgcctataacttcctgcacaagcccattactttggtg

SEQ ID NO: 39025 - DNA, 36 bp, synthetic construct
  source 1..36: mol_type = other DNA
ggcaagtttctgaccctcgccgacatcgggttcttc

SEQ ID NO: 39026 - DNA, 51 bp, synthetic construct
  source 1..51: mol_type = other DNA
ccgacactccaagtactctatttcaagaatcctgcctacgtggcaggagct

SEQ ID NO: 39027 - DNA, 45 bp, synthetic construct
  source 1..45: mol_type = other DNA
tccgagcacgtgctccgggactacctgagcattatccacggaaac

SEQ ID NO: 39028 - DNA, 48 bp, synthetic construct
  source 1..48: mol_type = other DNA
tttggtcaaaccactatcctcaacttccccgtgctgaacattcctctg

SEQ ID NO: 39029 - DNA, 60 bp, synthetic construct
  source 1..60: mol_type = other DNA
cctgagatctccgatggcggccacttcatgatggacatgctgggcctcaccattccaagc

SEQ ID NO: 39030 - DNA, 45 bp, synthetic construct
  source 1..45: mol_type = other DNA
ccctacatcgccaatgaagtctggcgcaaccctgatgctctcctg

SEQ ID NO: 39031 - DNA, 30 bp, synthetic construct
  source 1..30: mol_type = other DNA
gtgttcatcaccaacaatctgattggatac

SEQ ID NO: 39032 - DNA, 54 bp, synthetic construct
  source 1..54: mol_type = other DNA
cccatcatgcggctcgtatacttcaccaactctgcatactcatgcggtgctcct

SEQ ID NO: 39033 - DNA, 45 bp, synthetic construct
  source 1..45: mol_type = other DNA
agcgagcacgtgctgcgggactacctcaccatcattagaggaaac

SEQ ID NO: 39034 - DNA, 48 bp, synthetic construct
  source 1..48: mol_type = other DNA
tttggacaatcaacagccctgacctttgtgatccctaacattccactg

SEQ ID NO: 39035 - DNA, 60 bp, synthetic construct
  source 1..60: mol_type = other DNA
cccgagatcagcgacggcggccacttcatgatggatatgctggacattgctatgccttca

SEQ ID NO: 39036 - DNA, 33 bp, synthetic construct
  source 1..33: mol_type = other DNA
gtgcccattttcggcttcgaacaagatctcatc

SEQ ID NO: 39037 - DNA, 45 bp, synthetic construct
  source 1..45: mol_type = other DNA
agcgagtccgtgctgcggggctacctcaacatcattcacggaaat

SEQ ID NO: 39038 - DNA, 48 bp, synthetic construct
  source 1..48: mol_type = other DNA
tttggccctgccaccatcctgtccttcccaataaattccatcccattg

SEQ ID NO: 39039 - DNA, 60 bp, synthetic construct
  source 1..60: mol_type = other DNA
cccgagatctccgacggcggacacttcatgatggatatgctggacctcgccattccttcc

SEQ ID NO: 39040 - DNA, 33 bp, synthetic construct
  source 1..33: mol_type = other DNA
gtgccgactttcggctggcagcacgacctgatc

SEQ ID NO: 39041 - DNA, 39 bp, synthetic construct
  source 1..39: mol_type = other DNA
cccctgatggccgtgttcctcaaaaagcctgagaccatg

SEQ ID NO: 39042 - DNA, 33 bp, synthetic construct
  source 1..33: mol_type = other DNA
aagttcctcaccctggccgaagttggtttcttt

SEQ ID NO: 39043 - DNA, 48 bp, synthetic construct
  source 1..48: mol_type = other DNA
atcctgcaactcttttacttcaagaaccccagctatgtgaatggagcc

SEQ ID NO: 39044 - DNA, 45 bp, synthetic construct
  source 1..45: mol_type = other DNA
agcgagtccgtgctgcggaattacctgtctatcattcatggaaac

SEQ ID NO: 39045 - DNA, 48 bp, synthetic construct
  source 1..48: mol_type = other DNA
tttggccaatcaacaattctgcacttccccgtgctgaacatccctctc

SEQ ID NO: 39046 - DNA, 60 bp, synthetic construct
  source 1..60: mol_type = other DNA
cccgagatctccgatggcggtcacttcatgatggacatgctggacgtggccattcctagc

SEQ ID NO: 39047 - DNA, 42 bp, synthetic construct
  source 1..42: mol_type = other DNA
ccttggctcgcctacaacttcctgcacaagcccttgactatg

SEQ ID NO: 39048 - DNA, 36 bp, synthetic construct
  source 1..36: mol_type = other DNA
ggacggttcctgaccctcgccgacatcggctttttc

SEQ ID NO: 39049 - DNA, 51 bp, synthetic construct
  source 1..51: mol_type = other DNA
cccacactgaaggtgctctatttcaaaaacacagcatacgtggctggagcg

SEQ ID NO: 39050 - DNA, 36 bp, synthetic construct
  source 1..36: mol_type = other DNA
ctggagcagctcgcccctaacgctccccatatctcc

SEQ ID NO: 39051 - DNA, 48 bp, synthetic construct
  source 1..48: mol_type = other DNA
atctacggccccgacgccgctattgtgaagacctttagccggatcttc

SEQ ID NO: 39052 - DNA, 69 bp, synthetic construct
  source 1..69: mol_type = other DNA
acaacaggcttatcaaattggatgggcagctgcctgagtggcatgatcggatctgaaccttcatctaat

SEQ ID NO: 39053 - DNA, 33 bp, synthetic construct
  source 1..33: mol_type = other DNA
accacagccatgtccatgggcttcagccctatc

SEQ ID NO: 39054 - DNA, 201 bp, synthetic construct
  source 1..201: mol_type = other DNA
ctctactctgtgcctacctactacaattccttccgcatagaccacgcgctcaagagcaacatcaacatgacaaatcagatctcttttatgactacgcacctgcccgagaccatgtttactctgattcaaataccaaaaagcatcggaatccatttcaattcactctttatctactccttccatccttacgaatacactagc

SEQ ID NO: 39055 - DNA, 60 bp, synthetic construct
  source 1..60: mol_type = other DNA
ttcctcacctggacacccgtcggcgactttaaggagatcctgggagttagcgttaggtat

SEQ ID NO: 39056 - DNA, 165 bp, synthetic construct
  source 1..165: mol_type = other DNA
ttcaacgccaacttgggaatatactgctcggatgtctacgtttacctgctgaacgctctgtattatgtcggcactaacattcactcaacgaagtccatctatctgtctcccatcatatgcttcctgacatccctgatcttcgatctgggctacgtggacaaggtc

SEQ ID NO: 39057 - DNA, 186 bp, synthetic construct
  source 1..186: mol_type = other DNA
atgtccatgggtggcggcaacctggtcttcgatggaatgctgagcaacggcatccagggcaatctcgggtctacccacgacaacgcttataaccccgacttcggatactacctgctcaacattggaaatttcatatcctcatcaaacactacctttgtcgggaaaacaccagccctgaacaatccc

SEQ ID NO: 39058 - DNA, 285 bp, synthetic construct
  source 1..285: mol_type = other DNA
ttcacctacaccttcgaggacacaaacgagtttaatgcaccagaacagatgtgtgattacatcaaagctaacatcgacaactggagcgacattcagatcggcaactacaacatccggccttattactggtatctgggtctcaatagtcccggaatcgagagcaagtctccacaaaagatcatcgactctaatgtctcctactacatttccaacatcgagcagacaaatctcactggctatgtggaaatcaagaagatcgagaacctgtatctgtaccaaaagatt

SEQ ID NO: 39059 - DNA, 42 bp, synthetic construct
  source 1..42: mol_type = other DNA
ccttggctggccgaccactacctgcataaaccggccgcactt

SEQ ID NO: 39060 - DNA, 36 bp, synthetic construct
  source 1..36: mol_type = other DNA
ggccgcttcctgacctttgatgacatcggcttcttt

SEQ ID NO: 39061 - DNA, 51 bp, synthetic construct
  source 1..51: mol_type = other DNA
cctactctgcgcgtcttgtatttcaagaaccctgcctacgtcgctggagca

SEQ ID NO: 39062 - DNA, 45 bp, synthetic construct
  source 1..45: mol_type = other DNA
tccgagaccgtgctccgggactacctgagcatcattcacggaaac

SEQ ID NO: 39063 - DNA, 48 bp, synthetic construct
  source 1..48: mol_type = other DNA
ttcggtcaagccaccatcctgagcttccccatttacgacatccctctc

SEQ ID NO: 39064 - DNA, 60 bp, synthetic construct
  source 1..60: mol_type = other DNA
cctgagatctccgacggcggacacttcatgatggatatgctggacgtggccattcctagc

SEQ ID NO: 39065 - DNA, 33 bp, synthetic construct
  source 1..33: mol_type = other DNA
gtgccctctctgggactccagcacgacctcatc

SEQ ID NO: 39066 - DNA, 45 bp, synthetic construct
  source 1..45: mol_type = other DNA
agcgagcacatcctgcgggactacctgggcatgattcatggaaat

SEQ ID NO: 39067 - DNA, 48 bp, synthetic construct
  source 1..48: mol_type = other DNA
tttggccaatccacaatcctgagctttcccatctacaacattcctctg

SEQ ID NO: 39068 - DNA, 60 bp, synthetic construct
  source 1..60: mol_type = other DNA
cccgagatctccgacggcggacacttcatgatggatatgctggacctggcaatgccttct

SEQ ID NO: 39069 - DNA, 33 bp, synthetic construct
  source 1..33: mol_type = other DNA
gtgcctgcattcggactggagcacgaccttatc

SEQ ID NO: 39070 - DNA, 45 bp, synthetic construct
  source 1..45: mol_type = other DNA
tctgagtccgtgctgcgggactacctgagcattatccatggcaac

SEQ ID NO: 39071 - DNA, 48 bp, synthetic construct
  source 1..48: mol_type = other DNA
ttcggccaagcaacgatcctgagctttcccattatcgacgtacctctg

SEQ ID NO: 39072 - DNA, 60 bp, synthetic construct
  source 1..60: mol_type = other DNA
cccgagatctccgacggcggccacttcatgatggacatgctggatatggccattccttca

SEQ ID NO: 39073 - DNA, 33 bp, synthetic construct
  source 1..33: mol_type = other DNA
gtgccagctctcggactgcacaacgacctcatc

SEQ ID NO: 39074 - DNA, 45 bp, synthetic construct
  source 1..45: mol_type = other DNA
gctcccatcttcaccgacttctttggcaagcctgaggcactgctc

SEQ ID NO: 39075 - DNA, 33 bp, synthetic construct
  source 1..33: mol_type = other DNA
gcctttcttaccgctgccgctgttggctacttc

SEQ ID NO: 39076 - DNA, 51 bp, synthetic construct
  source 1..51: mol_type = other DNA
gagatcctgggtctggtttatttcaccaacggagcttatatgaacggcgga

SEQ ID NO: 39077 - DNA, 42 bp, synthetic construct
  source 1..42: mol_type = other DNA
gagcccattgccatcgggtggtggcacaaacctgctgccctg

SEQ ID NO: 39078 - DNA, 33 bp, synthetic construct
  source 1..33: mol_type = other DNA
gcctaccttactagtaactacgctggctattat

SEQ ID NO: 39079 - DNA, 42 bp, synthetic construct
  source 1..42: mol_type = other DNA
atcctcggactgctgttcgggcacgagtacaccctcggaacc

SEQ ID NO: 39080 - DNA, 33 bp, synthetic construct
  source 1..33: mol_type = other DNA
agccgcatgcttgggcccgagggttatggactg

SEQ ID NO: 39081 - DNA, 42 bp, synthetic construct
  source 1..42: mol_type = other DNA
gattttatcgctaacgcaattttccacaagcctgctgtagtc

SEQ ID NO: 39082 - DNA, 33 bp, synthetic construct
  source 1..33: mol_type = other DNA
atcttcatgttgagctcggacgttgggtactat

SEQ ID NO: 39083 - DNA, 48 bp, synthetic construct
  source 1..48: mol_type = other DNA
gagcccgtgatcaccatcctgttcggaagcaactacattaagggagcc

SEQ ID NO: 39084 - DNA, 39 bp, synthetic construct
  source 1..39: mol_type = other DNA
gtggacatcggggacgatttcggccgcggatcacatgat

SEQ ID NO: 39085 - DNA, 30 bp, synthetic construct
  source 1..30: mol_type = other DNA
tacctacaaagtatcggagctctgactgcc

SEQ ID NO: 39086 - DNA, 63 bp, synthetic construct
  source 1..63: mol_type = other DNA
tccatgatcatgggcagcgctgacggattggaacctgagagatacggcgtcttcgccgataca

SEQ ID NO: 39087 - DNA, 33 bp, synthetic construct
  source 1..33: mol_type = other DNA
cgcggcgctggaactgctacggtgtctgtcacc

SEQ ID NO: 39088 - DNA, 60 bp, synthetic construct
  source 1..60: mol_type = other DNA
accaacgtgacagtgaccgttaataaggtccccactgaaatcacagccgaaggttgtgag

SEQ ID NO: 39089 - DNA, 39 bp, synthetic construct
  source 1..39: mol_type = other DNA
accgcaaccgtgtcggtctcttatttcggcaacgacatg

SEQ ID NO: 39090 - DNA, 30 bp, synthetic construct
  source 1..30: mol_type = other DNA
cggctcctgtcgacaacgggatacggtatc

SEQ ID NO: 39091 - DNA, 42 bp, synthetic construct
  source 1..42: mol_type = other DNA
gaacccattgccgtcggaatttggaacaagcccgaggctctc

SEQ ID NO: 39092 - DNA, 42 bp, synthetic construct
  source 1..42: mol_type = other DNA
atggtgctgcttttcggcaacgaatacgctcaaggtagcgag

SEQ ID NO: 39093 - DNA, 30 bp, synthetic construct
  source 1..30: mol_type = other DNA
cgcatcctgagcgctgccgactacggaatc

SEQ ID NO: 39094 - DNA, 42 bp, synthetic construct
  source 1..42: mol_type = other DNA
gagccgatcgcggtcggctggtgggctaagcctaacgctgtg

SEQ ID NO: 39095 - DNA, 39 bp, synthetic construct
  source 1..39: mol_type = other DNA
ggcgccaaccttccgtctaaattcgctgggtactatggg

SEQ ID NO: 39096 - DNA, 39 bp, synthetic construct
  source 1..39: mol_type = other DNA
ctcggcctgctgttcggggccgagtatacccttggagcc

SEQ ID NO: 39097 - DNA, 30 bp, synthetic construct
  source 1..30: mol_type = other DNA
ttccggatcaccctgcccatcattgacaag

SEQ ID NO: 39098 - DNA, 132 bp, synthetic construct
  source 1..132: mol_type = other DNA
caggaatacgcctattaccacctcatcaacctggagcaaatgaacaagctccaggtccttctccaagagttatttcgtattggcattaatataagcgacctgaccgctatcaaggcctggctgtcccttata

SEQ ID NO: 39099 - DNA, 141 bp, synthetic construct
  source 1..141: mol_type = other DNA
ggatacctttgcgggaatcaattctgtgccgagctgctcaaaactattaatccctacctttacgagccgcaacaaaacgtcgggtggtggccacctctcctgtggccagaccgcttgcgaagcctgtttgtggagcctagt

SEQ ID NO: 39100 - DNA, 69 bp, synthetic construct
  source 1..69: mol_type = other DNA
gtggtcaacgccatctacgccaatggagacatcggcactccaaacatggacgggttcgaggctgcaata

SEQ ID NO: 39101 - DNA, 267 bp, synthetic construct
  source 1..267: mol_type = other DNA
ctgacaaagcagttcgacgagaacactgagaccaacgatctgtacattgagtttagcgggaacacacagaacctcaagagcaacgagaaacaggtctatgatatcctgcacaatttcgcttacggcgacaccctgaacctctcatctttgaacacaagcctctcctctgaggccaacgccaagtggttcatggagcaatacgctgattggtgcgctaacgtggaggacgagctcgagccccgggtgtccgaggagttcaacgataca

SEQ ID NO: 39102 - DNA, 33 bp, synthetic construct
  source 1..33: mol_type = other DNA
gatgacatcttcgggcaatggactagcaagggc

SEQ ID NO: 39103 - DNA, 30 bp, synthetic construct
  source 1..30: mol_type = other DNA
cggctcctgactactacgggctacggaatc

SEQ ID NO: 39104 - DNA, 42 bp, synthetic construct
  source 1..42: mol_type = other DNA
gaacctgttgccatcgggatgtggcacaaaccggaggcactg

SEQ ID NO: 39105 - DNA, 30 bp, synthetic construct
  source 1..30: mol_type = other DNA
gtgttcctgcctgccgcatttgctggtctg

SEQ ID NO: 39106 - DNA, 42 bp, synthetic construct
  source 1..42: mol_type = other DNA
atcatgtcactgctgttcgggaatgcttacgcacaaggcgcc

SEQ ID NO: 39107 - DNA, 114 bp, synthetic construct
  source 1..114: mol_type = other DNA
gtgaacgagctcggcggctgggactccaccatggatattctggacaacatgatgagtacaggagaggctcccgaccactttacgtccctcctgtactctggaggtgcaggaatc

SEQ ID NO: 39108 - DNA, 87 bp, synthetic construct
  source 1..87: mol_type = other DNA
ggcagagcttatattagcgattctggcaccgcactggacaactccgagaatatcttcatcgtgctcgccgatagcatgttccctgca

SEQ ID NO: 39109 - DNA, 54 bp, synthetic construct
  source 1..54: mol_type = other DNA
gccggcggaattatcgctggcggagactggtgcctctacaacaccaagctgtat

SEQ ID NO: 39110 - DNA, 87 bp, synthetic construct
  source 1..87: mol_type = other DNA
gtgtacatctggggtctggaccagactgagagcctcgatatcttcgctcaataccggaccattatggccggagcttccggaacaatc

SEQ ID NO: 39111 - DNA, 48 bp, synthetic construct
  source 1..48: mol_type = other DNA
ggctacctggtgcctagcgataccttcgtcgacatgtttggttctgcc

SEQ ID NO: 39112 - DNA, 168 bp, synthetic construct
  source 1..168: mol_type = other DNA
accctcaattggtacgccgtcgacgacagcgctgccacctccctgtccaatccccctgcgggcactattcccaaggctatctacgtgctgatgaatacaaactctagcgatatgatgaacggcggctatgagatgatcttcctgggacacttaggacaacctaaccct

SEQ ID NO: 39113 - DNA, 186 bp, synthetic construct
  source 1..186: mol_type = other DNA
ttctacacaaatgggtttttaagctccatacccttcctcggcgcaaacgacagcattggctactatgagtcgggttctaccaccgcttccgccggaatggcctggtacctgagcacccctcaaggccttaccgactggctgctgccaatcctgaacccatcaagctacggcaatggccattctgtc

SEQ ID NO: 39114 - DNA, 42 bp, synthetic construct
  source 1..42: mol_type = other DNA
ccctggctcgccctggagttctacaaaaaacctattgctctg

SEQ ID NO: 39115 - DNA, 48 bp, synthetic construct
  source 1..48: mol_type = other DNA
gaaattctgggcttcatcttctttaccaaccccgagtacatgaatggg

SEQ ID NO: 39116 - DNA, 36 bp, synthetic construct
  source 1..36: mol_type = other DNA
acccagctggtggacgatctgcacacaaacgtcaat

SEQ ID NO: 39117 - DNA, 168 bp, synthetic construct
  source 1..168: mol_type = other DNA
atcatgggcggcgtgtcggacgccgtcgacatgtacattcccgaacactctggcgacgaggctttcgagtccgacgtttatgactactttcaaaatatggactccgtggatacagtgaaggagaacagcaccgtcgagaatatcctggacactatcactcaagagtcc

SEQ ID NO: 39118 - DNA, 192 bp, synthetic construct
  source 1..192: mol_type = other DNA
aaatatgcatatccgattagctgggatgtgtactaccatatgcatatgatcgagctgtacatgcaaaacgggcttgtgttctgggattacgccaccgtcgcacctaagggccgcctgataatgtatccgcctctgttccatctcgtgtttgccgaactgagcaaacttctgaacatatcatccgcggaattg

SEQ ID NO: 39119 - DNA, 66 bp, synthetic construct
  source 1..66: mol_type = other DNA
atcgctatcaactacacactcgtatttaattcattgcccggcgccaatctgctgattaccgacttt

SEQ ID NO: 39120 - DNA, 30 bp, synthetic construct
  source 1..30: mol_type = other DNA
ctcctgggcttcaacattgtctctattagg

SEQ ID NO: 39121 - DNA, 168 bp, synthetic construct
  source 1..168: mol_type = other DNA
tacgccgaccctgggttctacatgagtttccgcacaaagcactatgccctgcggggcattaatcctggggcccagattaactacatgctgtctaacctcggactcacattcgtgaccatcctggggctgcccgctaacattggaagttgggacggattcctgcattct

SEQ ID NO: 39122 - DNA, 57 bp, synthetic construct
  source 1..57: mol_type = other DNA
ctgagctggacccctgtcgggcagctctctcctatcctgggcgtgcagacaagatat

SEQ ID NO: 39123 - DNA, 42 bp, synthetic construct
  source 1..42: mol_type = other DNA
atctcctctgtggtcgccgaccttaacaccgatgtgtccaca

SEQ ID NO: 39124 - DNA, 171 bp, synthetic construct
  source 1..171: mol_type = other DNA
gtgatcggtggaatctccgatggagttaacacatacgcacctgaccactctggggaccagatgtacgagaaaggcgtgtataactatttccaatccatctcttccatcaatgaagtaaatcaagaaaactctaccgtccaaaacgtcgtgaatgtgattatcaaggatagc

SEQ ID NO: 39125 - DNA, 30 bp, synthetic construct
  source 1..30: mol_type = other DNA
agaggccctatgctctgggacatgcctctg

SEQ ID NO: 39126 - DNA, 45 bp, synthetic construct
  source 1..45: mol_type = other DNA
gcccctatcattaccggctattaccacaagcctgaggctctgctg

SEQ ID NO: 39127 - DNA, 30 bp, synthetic construct
  source 1..30: mol_type = other DNA
accttcctgcctgccgtggctatcggatac

SEQ ID NO: 39128 - DNA, 51 bp, synthetic construct
  source 1..51: mol_type = other DNA
gggatcatgggactggtctacttcaccaacgcatcctatatgaatggagcc

SEQ ID NO: 39129 - DNA, 84 bp, synthetic construct
  source 1..84: mol_type = other DNA
aacctgccaaatcggctctcctccggcactagcatcgggatcgaatatgtcctggccatccctggaatcaaccctctgttgccc

SEQ ID NO: 39130 - DNA, 174 bp, synthetic construct
  source 1..174: mol_type = other DNA
ctcaaccatctgatcctgcacgtggacgagtacttcacactgactctgatcaactttaacgtcaacgaaatggtccgtcttaccgctgccgatgtccatcctcctctgtactatctcatcctgaagttcgccatgtctgtgttcgggttctttggcattagctcccacaacttg

SEQ ID NO: 39131 - DNA, 96 bp, synthetic construct
  source 1..96: mol_type = other DNA
ttcgcccaattgggcacaatccaccacggcttctgggtcccccggattaccgtgaagagcctgatcgaggacttcggatactatgcctactccaac

SEQ ID NO: 39132 - DNA, 39 bp, synthetic construct
  source 1..39: mol_type = other DNA
attagccagatctctgccaacctgaataccgacgtttcc

SEQ ID NO: 39133 - DNA, 171 bp, synthetic construct
  source 1..171: mol_type = other DNA
gtcatgggcggaatcaataccgctgtggacacctacgcccccgagcacagcggcgatgagcaattccaccaagacgtttatgactatttccaaaaagttgggaatattgatgacgtgaaggcccaagactccatcatcgttaatactgccgacatcattatacaaaacgcc

SEQ ID NO: 39134 - DNA, 39 bp, synthetic construct
  source 1..39: mol_type = other DNA
atctccagcgtggtcgccgacctgaacaccgatgtttct

SEQ ID NO: 39135 - DNA, 171 bp, synthetic construct
  source 1..171: mol_type = other DNA
attattggaggaatctccgacggcgttaacacctatgctcccgagcactcaagtgaccagacctacgaaaaatccgtctacgactactttcaatcaattggcagcattaacgaagttaacgccgagaatagcacagtgcagagtatagtcaacatcatcatcaaagacagc

SEQ ID NO: 39136 - DNA, 102 bp, synthetic construct
  source 1..102: mol_type = other DNA
tacctgaccattaccaacgctctggttgaggacggcgctgccggaatgggccttttcgctactggacaggctatggtcttgggggtccaagttaccgatctg

SEQ ID NO: 39137 - DNA, 45 bp, synthetic construct
  source 1..45: mol_type = other DNA
gcttccgccatccggaacgcctccaccttcattaatgagtctgga

SEQ ID NO: 39138 - DNA, 144 bp, synthetic construct
  source 1..144: mol_type = other DNA
cctttcgactttaccgccattggcggaaccgccgtggtcggcggcgagacagtatacggggccgccaacatcttttacgccgaaatgcccctgatcgccaacggcactctgacaaccgttgatagctccctccggtttgcaagt

SEQ ID NO: 39139 - DNA, 81 bp, synthetic construct
  source 1..81: mol_type = other DNA
agcggctgcaagacctataatatctatggattgattgaactgctcacggtcaatttggccctcccaatgtcagttactaaa

SEQ ID NO: 39140 - DNA, 198 bp, synthetic construct
  source 1..198: mol_type = other DNA
agccagaccacaccaatctacgacttctcacgtcaaggctattacgccattaacaatatcaactcttcgcaacaaataaacttcatgatccaccacccaactgactcaatcatctccctgctctatatcattcctaacgtgttcgagatgctgtacaacacctttaccttctacaatgggatcgagttattctcgagc

SEQ ID NO: 39141 - DNA, 60 bp, synthetic construct
  source 1..60: mol_type = other DNA
ctcttcaagtggacccctgtcggccagctgtaccccatccttggagtgcagagcaggtac

SEQ ID NO: 39142 - DNA, 198 bp, synthetic construct
  source 1..198: mol_type = other DNA
tccaacacaactcccatttacgactttagtcgtcagggctattacatgatccacaacatcaactccaccaaccagatcagttacatgctgtcccacccaaatgacagcattgtttcatttctctacattatcccttctgtgttcgagaacctgttttacacctacacattctatgttagcaccgacctctttagcgat

SEQ ID NO: 39143 - DNA, 60 bp, synthetic construct
  source 1..60: mol_type = other DNA
cttctcaagtggacccctgtcgggcagctgttccccatcctgggagtgcagccacgatac

SEQ ID NO: 39144 - DNA, 48 bp, synthetic construct
  source 1..48: mol_type = other DNA
ttcggggacgccctgaccggggttaagtcacagaacatcgatttgctg

SEQ ID NO: 39145 - DNA, 42 bp, synthetic construct
  source 1..42: mol_type = other DNA
tccggatacagcatcgggttcgagaccgactctgtgattgac

SEQ ID NO: 39146 - DNA, 51 bp, synthetic construct
  source 1..51: mol_type = other DNA
gtcgacctgctcatcgctaacctgaatagctctaatgatatcgccatttac

SEQ ID NO: 39147 - DNA, 96 bp, synthetic construct
  source 1..96: mol_type = other DNA
gtctggggcatgaacgacttcctcgatcccgactgcatcgccggactgggcggcgctattctggagaagaaggacgtctctactgacaccgcatat

SEQ ID NO: 39148 - DNA, 45 bp, synthetic construct
  source 1..45: mol_type = other DNA
gccggcttccccatgatggacaccatcggcgaaattgctgatccc

SEQ ID NO: 39149 - DNA, 51 bp, synthetic construct
  source 1..51: mol_type = other DNA
gggccagccagcgctctgggatatacagacagtacctcctctggcgacaag

SEQ ID NO: 39150 - DNA, 177 bp, synthetic construct
  source 1..177: mol_type = other DNA
tactctacccctggatttcttcaaagttaccggatggacctttggatcactaaccacgtgaactccaccgagcagatcaactacctgatcgccaacaaaaaggatggcctgattatgctattacaaacacctaagtacattgtcaagaacctgaatctcaattatgacatgtctggc

SEQ ID NO: 39151 - DNA, 57 bp, synthetic construct
  source 1..57: mol_type = other DNA
ctgacctggacacctatcggccagctcaacgacattctgggagtgcagcctagatac

SEQ ID NO: 39152 - DNA, 189 bp, synthetic construct
  source 1..189: mol_type = other DNA
tacgctaccaagcacctgctcaactcttggcggggcacatacttcatcaagaacaatgtcaacattctggggcagcttacctacatggcccaccatccactaaattctttatatctcctgttcacacccgacaatctgatcaacgtgatcagcggctacttttccttcggaaacctgccgccatacact

SEQ ID NO: 39153 - DNA, 57 bp, synthetic construct
  source 1..57: mol_type = other DNA
tacctgacctggtgcaacgtcgggatgagccggatcgagggagtcttcggtagatat

SEQ ID NO: 39154 - DNA, 30 bp, synthetic construct
  source 1..30: mol_type = other DNA
atcacacaaataaatatccacgcctcattc

SEQ ID NO: 39155 - DNA, 45 bp, synthetic construct
  source 1..45: mol_type = other DNA
agcctgatctcccgctacatagggttcggcgattacgagatgatg

SEQ ID NO: 39156 - DNA, 30 bp, synthetic construct
  source 1..30: mol_type = other DNA
acagctaccatgggccctgttggaccagtc

SEQ ID NO: 39157 - DNA, 51 bp, synthetic construct
  source 1..51: mol_type = other DNA
tatgcgtttagcctgttttccattaccggaatgcagaccgagatcctgtgg

SEQ ID NO: 39158 - DNA, 204 bp, synthetic construct
  source 1..204: mol_type = other DNA
atcattacacactgcgacaagacggccgatcagaacatcatcactgaggtcatcgacgggattaaggagtccaccattggcgagctcattcgggacctgtccgggtccgacgaggacatcgacatcaattctctgtaccccaacgaggtgcacaccgagggactcaaggtcatgagcatgatctactctgacaagctgactatc

SEQ ID NO: 39159 - DNA, 294 bp, synthetic construct
  source 1..294: mol_type = other DNA
attcccattgatagcgtatcggatgagggcgaacacttcactcgggccgagcttacctctaggggcatcctctttcccgaatacgtgaacgggtccttcaagacgatagactcaattcctggcttcttcgtacattctatagacaagacagtctttgaggttaacggagatacaggcaagatcaacaacaccctggtcgaggtgtcttccgcttttgaacaaaacccgttcttcggatacctgttctccgggctgggcatcttcatcgccaagctcctggacctgaacgtcatt

SEQ ID NO: 39160 - DNA, 213 bp, synthetic construct
  source 1..213: mol_type = other DNA
aaatcatatgccacccctgccctggtgcattcctggcgcgccacatatataacccagaacaatgtcagcattgccaaccagatgaacttcctgctgtccgatcccttgaatatcttcaacgcctttatcaacatcctgtactcattttcgtatatctttaacggattcttctctttctacgcttatacaatcgagggcggcgtctacaatgcc

SEQ ID NO: 39161 - DNA, 57 bp, synthetic construct
  source 1..57: mol_type = other DNA
ctgctcagctggtctcccgctgggtctctgaccatcactggcgtgcatacacgatac

SEQ ID NO: 39162 - DNA, 87 bp, synthetic construct
  source 1..87: mol_type = other DNA
gtgtatatttggggcctggaccaatcaggaagcctggacatgtttgctcaataccgtaccatcatggctggcgcctctggaacaatt

SEQ ID NO: 39163 - DNA, 45 bp, synthetic construct
  source 1..45: mol_type = other DNA
tacctggtgcccagcgacgcctttgtttcgcaattcggctcttgg

SEQ ID NO: 39164 - DNA, 162 bp, synthetic construct
  source 1..162: mol_type = other DNA
gccctcaactggtatcccctgcaaggtttcggaacagaatatgctttatctaatccacctgctggcaccatccctaaagctatctacatcctcacacatacctcgagtgctgagatggcctccggcggatatgaaatgatactcctcggcgcacctaaccct

SEQ ID NO: 39165 - DNA, 186 bp, synthetic construct
  source 1..186: mol_type = other DNA
ctgtacaccaacgattttctttcttcaatccccctgattggaggcaacggagcaatcggcacttacgagaccgggtctaccactgctagcggcggaattgcctggtacctgtccacaccacaaggtttgacggactggcttctgcccatcctgaaccctgcctcctatgggaatggccatagtgtt

SEQ ID NO: 39166 - DNA, 39 bp, synthetic construct
  source 1..39: mol_type = other DNA
cccggcattgccatcgagctgaacttcagttttgaagct

SEQ ID NO: 39167 - DNA, 33 bp, synthetic construct
  source 1..33: mol_type = other DNA
ctgcatctacaatacgtattgaacgtggaggaa

SEQ ID NO: 39168 - DNA, 54 bp, synthetic construct
  source 1..54: mol_type = other DNA
atcgggaaccagcagctgggccccaaccacattaatcacctcttcgtgcaaagt

SEQ ID NO: 39169 - DNA, 87 bp, synthetic construct
  source 1..87: mol_type = other DNA
gtgtacatctggggcctggaccaatcagattcactggatatcttcgcacaataccggaccatcatggccggagcttccggaacaatt

SEQ ID NO: 39170 - DNA, 45 bp, synthetic construct
  source 1..45: mol_type = other DNA
tacctaatcccatcaagtgccttcactagccagttcggcgatggc

SEQ ID NO: 39171 - DNA, 159 bp, synthetic construct
  source 1..159: mol_type = other DNA
gctctcaattggtaccccgtgtcatcggcggccgactattctttgtcgaatccgcctgctggcaccatccccaaggccatctacatcctgatgaacacagatagcgccgacatggccagcggcggctatgagatgattctgctgggtcagcctaatcct

SEQ ID NO: 39172 - DNA, 186 bp, synthetic construct
  source 1..186: mol_type = other DNA
ttctatacctccgacttcttgtcctcgattccactgctcggacacaacgacgccctcggcgtttacgagaccggcagcacaaccgcctctggtggcctggcttggttcctgagcaccccccaaggactcactgactggctgatgcccatgctgaaccctgattcatatggcaatggacatggagtc

SEQ ID NO: 39173 - DNA, 33 bp, synthetic construct
  source 1..33: mol_type = other DNA
ctgcagatcatcttcaagaccacagcaatcggc

SEQ ID NO: 39174 - DNA, 210 bp, synthetic construct
  source 1..210: mol_type = other DNA
gtgtctcacgccatgagcttacccgccttggaaatgttcttctcccaaagtgctaataccggaaactcctccattaacactgggaacagcaactccctgacctcgaaattctccattaagaacctcaacttccttatcaagtctgagatcttcggcttctacgagcaatgtgttaggctgttcacattcggctggctgacttacacatcc

SEQ ID NO: 39175 - DNA, 63 bp, synthetic construct
  source 1..63: mol_type = other DNA
attgactattccctgtatcactgccccgatgccaccctcatccaaggcgtacaaggcagatac

SEQ ID NO: 39176 - DNA, 33 bp, synthetic construct
  source 1..33: mol_type = other DNA
tttaagacccctagcggcacatggttgtctggg

SEQ ID NO: 39177 - DNA, 90 bp, synthetic construct
  source 1..90: mol_type = other DNA
aacctgaagaccaagactatcggcgatatcgcttccatagcttccgggctgccaaaatttcacatcccaatggtgcctatcacattccag

SEQ ID NO: 39178 - DNA, 33 bp, synthetic construct
  source 1..33: mol_type = other DNA
tttaagaccccaagcggagcatggctgactggc

SEQ ID NO: 39179 - DNA, 93 bp, synthetic construct
  source 1..93: mol_type = other DNA
ggcctgaacacccagactattggcgacatcgcctccatatccccccaactcccatctttccacatcccaatggtgcccatcacatacgaaagc

SEQ ID NO: 39180 - DNA, 36 bp, synthetic construct
  source 1..36: mol_type = other DNA
gtatccggccttggaactgcctctgcttcggcggtc

SEQ ID NO: 39181 - DNA, 54 bp, synthetic construct
  source 1..54: mol_type = other DNA
caggccgtccggttcatgggcgccgaggatgtgatggacgaggctgtgctctac

SEQ ID NO: 39182 - DNA, 66 bp, synthetic construct
  source 1..66: mol_type = other DNA
gagcctctgatgagcgttatgaccgtcgaggagtccatgagggaagtccgccccgatttcgtgaag

SEQ ID NO: 39183 - DNA, 183 bp, synthetic construct
  source 1..183: mol_type = other DNA
aacaatacagccgattggggcggcgcaaattatttcaagaacaccatctcccacctgatcatcactggggattttatcaataacgtggcccagatcagcggtggcgccaactacttcaacgacgaggtgaccaacgtcagcatcaccggcgatttctccgataacgtggcagccaatggtagc

SEQ ID NO: 39184 - DNA, 33 bp, synthetic construct
  source 1..33: mol_type = other DNA
ttcaagacgccctctggcgattggctcaccggt

SEQ ID NO: 39185 - DNA, 93 bp, synthetic construct
  source 1..93: mol_type = other DNA
gccctgcacactaaaaccatcggcgacatcgctagtatcagcctgggcctcccatctttccatatccctatggtgcccatcactgttgaatcc

SEQ ID NO: 39186 - DNA, 36 bp, synthetic construct
  source 1..36: mol_type = other DNA
ttcaagactggaaccggcgcatggctgacaggaacc

SEQ ID NO: 39187 - DNA, 90 bp, synthetic construct
  source 1..90: mol_type = other DNA
ggcctcaatactaagaccatcggcgatatcgccaacattgctagcgggctgccaaccttccacatccctatggtgcccgtcacaatcgag

SEQ ID NO: 39188 - DNA, 165 bp, synthetic construct
  source 1..165: mol_type = other DNA
tacgccaaccccgggttctttgagagttggcggtccaacaagtggctgcttgagaacatcaacactaccgaacagattaactacgtgttcaataacaacaaggagactctcatatctctgctcaatacactgggcctgctcaaggacgacatctcttggaatatc

SEQ ID NO: 39189 - DNA, 57 bp, synthetic construct
  source 1..57: mol_type = other DNA
ctctcctggacccctgttggacagctgagccccattatgggggtccaagtcaggtat

SEQ ID NO: 39190 - DNA, 213 bp, synthetic construct
  source 1..213: mol_type = other DNA
ttctacagtatcaattcattaaacaactcaattcggacatacatgttcgaactgcacgggaccaaccccaacgagcagataaagtacatgtctacccacattaaggagaccattctgctgtttagcacactcatctacgaggtgcctaaactcatgctgaagatgttcaacctctcctacaactactattacgtcgactactccaagggtatt

SEQ ID NO: 39191 - DNA, 57 bp, synthetic construct
  source 1..57: mol_type = other DNA
tgggtcggcgtcggcaacttcgagaagggcgtagtttggggcgtccacctgagatat

SEQ ID NO: 39192 - DNA, 39 bp, synthetic construct
  source 1..39: mol_type = other DNA
atggatgccacaatcttcaccgacatctttggctattac

SEQ ID NO: 39193 - DNA, 81 bp, synthetic construct
  source 1..81: mol_type = other DNA
cactacattgatagcctgggcgactacatctacttcggttctgaggacgctccgtattgcgggatctttatgtacacctca

SEQ ID NO: 39194 - DNA, 72 bp, synthetic construct
  source 1..72: mol_type = other DNA
ggggctctgggcaccattgatctcgccgtgatcggagccaagacacacgaccccgacacatattactccttt

SEQ ID NO: 39195 - DNA, 33 bp, synthetic construct
  source 1..33: mol_type = other DNA
ttcgttggcgtcaccgctgtcaaggtggaacct

SEQ ID NO: 39196 - DNA, 33 bp, synthetic construct
  source 1..33: mol_type = other DNA
ggggccatctacaacgacggcgtgatgtctcag

SEQ ID NO: 39197 - DNA, 57 bp, synthetic construct
  source 1..57: mol_type = other DNA
gacattatcctggacccctgcgctaccgccgcaaacgatctgctccactggtggatg

SEQ ID NO: 39198 - DNA, 72 bp, synthetic construct
  source 1..72: mol_type = other DNA
atggtcattgagaactgctctttcgattcatttaacgccaatttcggaggggccatctgtgctctcgacacc

SEQ ID NO: 39199 - DNA, 33 bp, synthetic construct
  source 1..33: mol_type = other DNA
ggcaccggcggaatctacccgatacaaattatg

SEQ ID NO: 39200 - DNA, 84 bp, synthetic construct
  source 1..84: mol_type = other DNA
tacaggatgcctcaaacgttaaccaacggcggcctgggtctcgaatatgttctcgccatccccgggctgaatcctcttcttcca

SEQ ID NO: 39201 - DNA, 81 bp, synthetic construct
  source 1..81: mol_type = other DNA
cgccttccatccaccttcggaagagctgggatgggagtggaatacgtcttggccatccctggcttgaaccctctgctgccc

SEQ ID NO: 39202 - DNA, 183 bp, synthetic construct
  source 1..183: mol_type = other DNA
atgtttgactcaaacaagatcgacggatacggcgactcctcacaatgttatggtggagcaatccgggcaaagaatgacgtgactgtggacaacagtacattcaaggacaactacgcccacgactatggcggagcgatttatgggaataatatctacgtgaacaacaatcagggaagcaacggc

SEQ ID NO: 39203 - DNA, 36 bp, synthetic construct
  source 1..36: mol_type = other DNA
agcaagatcgtggccgacctgaacaccgatgtttcc

SEQ ID NO: 39204 - DNA, 171 bp, synthetic construct
  source 1..171: mol_type = other DNA
gtaatgggcggcatcagcaccgccatcgacacctacgcccccaaccatagcggcgatgaacagttccatcaagatgtttatgactacttccaaaagttaggcaacattgacgatgtgaaagcacaggacaacattattgtcaacacggctgatatcataatacagaacgct

SEQ ID NO: 39205 - DNA, 36 bp, synthetic construct
  source 1..36: mol_type = other DNA
agccaggtggtcgtggacctgaacaccgatgttagc

SEQ ID NO: 39206 - DNA, 171 bp, synthetic construct
  source 1..171: mol_type = other DNA
atcgggggaatctccaacgccgtggacgtttacgcgccacaatactctgctgacgagcaatttcatcaagacgtttacgatgcttttcaaaaagtcaacaacattgacgagatcaaagcccaggacaatacagttgtcgttaatgtcgtggacatcatcatccatagcgcc

SEQ ID NO: 39207 - DNA, 36 bp, synthetic construct
  source 1..36: mol_type = other DNA
atggacgccacattcattaccgatattttccaacat

SEQ ID NO: 39208 - DNA, 81 bp, synthetic construct
  source 1..81: mol_type = other DNA
acagccgacaacggactggcaggctttaacgagtttgggcaagccggggacgccttttttggcctcttcgtgtacaacaag

SEQ ID NO: 39209 - DNA, 60 bp, synthetic construct
  source 1..60: mol_type = other DNA
agcctgggcaccctgaagctcgctgcccttggacccgctcttgctgcttccggatacact

SEQ ID NO: 39210 - DNA, 30 bp, synthetic construct
  source 1..30: mol_type = other DNA
gtcgcggcgcaagcgacagtcagcattgag

SEQ ID NO: 39211 - DNA, 39 bp, synthetic construct
  source 1..39: mol_type = other DNA
ggagccatctacgatggcggtgctggagcggtgtcggga

SEQ ID NO: 39212 - DNA, 48 bp, synthetic construct
  source 1..48: mol_type = other DNA
gacctgatcctcggtccatgcgcggatgcagcggcagtactctttgcc

SEQ ID NO: 39213 - DNA, 42 bp, synthetic construct
  source 1..42: mol_type = other DNA
gaccagtgcccggccggtgacgataacgccgtccggttcgga

SEQ ID NO: 39214 - DNA, 93 bp, synthetic construct
  source 1..93: mol_type = other DNA
tgcgccgacggactcaacatcttctccaccattgttcaagcttttctggggatcgcaggccaagtaatatcaagcatggctgatccatggaat

SEQ ID NO: 39215 - DNA, 57 bp, synthetic construct
  source 1..57: mol_type = other DNA
aaggacggctttgcgagtatagggatgaatgtcggtagcttcggaatcttccttcag

SEQ ID NO: 39216 - DNA, 99 bp, synthetic construct
  source 1..99: mol_type = other DNA
actatcctggatgggagcgaccaggccctcatcacactgatgaagaccagcccactgagttttaacggcattttcgaggctttgagccagtctgacgcc

SEQ ID NO: 39217 - DNA, 60 bp, synthetic construct
  source 1..60: mol_type = other DNA
ggcgaagtcgggaccgctgactacctcgtcggcgtactcaaggaggccatccccatgttt

SEQ ID NO: 39218 - DNA, 33 bp, synthetic construct
  source 1..33: mol_type = other DNA
gcttgggccatctccccggacatgggattcgcc

SEQ ID NO: 39219 - DNA, 39 bp, synthetic construct
  source 1..39: mol_type = other DNA
agccaggtcgtggccgacctgaacacaagtgtcagcacc

SEQ ID NO: 39220 - DNA, 168 bp, synthetic construct
  source 1..168: mol_type = other DNA
atgggcggcattgctaacggcgttgacacctatgctccggagtacagcggcaatgaacaggtgcaccaggatattttcgactacttcgagaaggtcggcaacgtcgacgacatcaagtccgagaacagtaccgtgatcaacatcgcggacacggtcattcaagactcc

SEQ ID NO: 39221 - DNA, 36 bp, synthetic construct
  source 1..36: mol_type = other DNA
agccaggtggtggtcgatctgcacaccgacgttagc

SEQ ID NO: 39222 - DNA, 168 bp, synthetic construct
  source 1..168: mol_type = other DNA
gtcatgggcggcatcagcaacgctgtggacgtgcacgcacctgaccactccggcgacgagcaatttcaattagaagtggccaactattttcaaaaagtcggaaacatagataacctgaaggacaacagtaccgtggtggatatcgtgaatattattgtgcaatcgaca

SEQ ID NO: 39223 - DNA, 36 bp, synthetic construct
  source 1..36: mol_type = other DNA
agccaggtcgtggccgacctgaacaccgatgtatcc

SEQ ID NO: 39224 - DNA, 165 bp, synthetic construct
  source 1..165: mol_type = other DNA
atgggtggcgtctctcatgctgtggacgtttacgccccgcaacacagcggcgacgagcacttccaacaagtggttattgagcagtttcaaaaggttggcaacatcaacgatattaagagcgaccagaccgttgtacaaattgttgacaccgttatccaagagacg

SEQ ID NO: 39225 - DNA, 174 bp, synthetic construct
  source 1..174: mol_type = other DNA
ctcgaccaccttattctgcacgtggacgaatacttcaccctcactctgatcaactttgacgttggagagatgatcagcctgaccgccgctgacgtccacccacctctgtactatctcatcctgaagttcgcgatgacagtttttggcttctttggcgtctctgcccattccatt

SEQ ID NO: 39226 - DNA, 96 bp, synthetic construct
  source 1..96: mol_type = other DNA
ttcgcgcaactcggcgctgtgcaccacgggttttgggtcccccgggtgaccgtgaagagcctgatcgaggacttcggctactacgcctactgcaat

SEQ ID NO: 39227 - DNA, 33 bp, synthetic construct
  source 1..33: mol_type = other DNA
tttctcgactgcctgggcgcagagtttatcgga

SEQ ID NO: 39228 - DNA, 39 bp, synthetic construct
  source 1..39: mol_type = other DNA
cccctgatcttcgagaaggccgaaatgccttggagcatc

SEQ ID NO: 39229 - DNA, 39 bp, synthetic construct
  source 1..39: mol_type = other DNA
atcaactggtggctggggccacagtatatactggaagac

SEQ ID NO: 39230 - DNA, 183 bp, synthetic construct
  source 1..183: mol_type = other DNA
ttctatgccaaccccgggttcctcaatagttggcggggcaataaatgggttctcgaaaattttaattctacccggcaaatggactacatcatgcaccacaaaaaggaagcgatcttcgagctgaccaaaatgcctctgtatcttcctgatgcactttcgttttccatgaactacgtggacttc

SEQ ID NO: 39231 - DNA, 63 bp, synthetic construct
  source 1..63: mol_type = other DNA
atgattagctggtgcgaggtgggcaagctctaccactactaccctggagtgcagatccgctat

SEQ ID NO: 39232 - DNA, 36 bp, synthetic construct
  source 1..36: mol_type = other DNA
gcccaggtggtcgctgatctgcacaccgacgttagt

SEQ ID NO: 39233 - DNA, 168 bp, synthetic construct
  source 1..168: mol_type = other DNA
gtcatgggcggagtgtcccatgccgtggacatctacgctcccgactactctggcaacgagacttttcaactcgaggtgcttaaccattttcaaaaggttgggaatctcaacgacgtgaaggccgatagtacaatcgtgaacgtcgtcgatattatccttcaagactcc

SEQ ID NO: 39234 - DNA, 39 bp, synthetic construct
  source 1..39: mol_type = other DNA
tcccaggtggtcgttgatctgaagactgacgtgtcaacc

SEQ ID NO: 39235 - DNA, 168 bp, synthetic construct
  source 1..168: mol_type = other DNA
gtcatgggggctatcgggactgcagtggacacatacgctcccgagcacagcggagatgcccagtttcaccaagatgtggccaactatctccaaaaagttgggaatgttgacaacttacaagataactccaccttcgtggacgccgtgaacctgatcattcaaaacacc

SEQ ID NO: 39236 - DNA, 60 bp, synthetic construct
  source 1..60: mol_type = other DNA
gacttctttacccaaatgctatgtcaagctcctgagctccagccccttgttaaccaatac

SEQ ID NO: 39237 - DNA, 51 bp, synthetic construct
  source 1..51: mol_type = other DNA
agcctgctcatcttcaatgtgaacgatcccaacacgatccccgtggtcctt

SEQ ID NO: 39238 - DNA, 36 bp, synthetic construct
  source 1..36: mol_type = other DNA
tcccaggtcgtggccgatctgaacaccgacgttagc

SEQ ID NO: 39239 - DNA, 171 bp, synthetic construct
  source 1..171: mol_type = other DNA
atcatgggtggaattagcaacgctgtcgatcactatgcccctgagcactctggagacgaacagttccaccaagacatatatgactacttccaaaaagtcggaaatatgaacgaaattagactccagggaagcaccgtcgtgactatcgtagatgaaatctttcaagacgca

SEQ ID NO: 39240 - DNA, 39 bp, synthetic construct
  source 1..39: mol_type = other DNA
atcagccacattgtcgtggacctgaacaccgatgtttcc

SEQ ID NO: 39241 - DNA, 162 bp, synthetic construct
  source 1..162: mol_type = other DNA
gttatgggagggatcagcaccgcggtcgatacctacgctcctgattactccggagatgaacagtttcatcaagaagtctatgatcattttcaaaagctggacacgatcgacggtcacgactccgtcgttgtcaacaccgctgacattattatacaaaacgcg

SEQ ID NO: 39242 - DNA, 174 bp, synthetic construct
  source 1..174: mol_type = other DNA
ctggaccacctgatcctccacgtcgacgagtacttcaccctgaccctgattaacttcgacgttggggaaatgatcagcctcacggcggcggacgtgcatcctcctctctattacctgatcctgaagttcgctatgactgtgtttgggttcttcggaattagcccacattccatc

SEQ ID NO: 39243 - DNA, 93 bp, synthetic construct
  source 1..93: mol_type = other DNA
gcccagctcaatgcaatacaccagggcttttgggtgccccggatcaccatccaatcgctcatcgaggacttcggctactatgcttactgtaac

SEQ ID NO: 39244 - DNA, 87 bp, synthetic construct
  source 1..87: mol_type = other DNA
aatgtcaacgacctgagcaaattcgacgtgaactacggctggatcaacgctgccgggctgaagatgtccatcatcttaacggttgac

SEQ ID NO: 39245 - DNA, 87 bp, synthetic construct
  source 1..87: mol_type = other DNA
ttcgagagcgcctacctggccgggtccggcaccattgacttttcgtttgcattcgtcaagcagtggatgcccggagctgatagtgtg

SEQ ID NO: 39246 - DNA, 30 bp, synthetic construct
  source 1..30: mol_type = other DNA
atcgaggccctgcccggcgccctgggcagc

SEQ ID NO: 39247 - DNA, 39 bp, synthetic construct
  source 1..39: mol_type = other DNA
atgggaggcgtggcctctggcgacgctaatctggtcaag

SEQ ID NO: 39248 - DNA, 45 bp, synthetic construct
  source 1..45: mol_type = other DNA
gacctggccatcagctatatttccggatacgctggaggtctgatc

SEQ ID NO: 39249 - DNA, 39 bp, synthetic construct
  source 1..39: mol_type = other DNA
atggacgccagcttcatcaccaacatttttttctatcag

SEQ ID NO: 39250 - DNA, 78 bp, synthetic construct
  source 1..78: mol_type = other DNA
accgccgataatggcctcggctcctacaacatgctgggacagcccggcgacgctttctatggattatttgtttataac

SEQ ID NO: 39251 - DNA, 66 bp, synthetic construct
  source 1..66: mol_type = other DNA
ggcagcctgggtacacttgagctgggagccctggggtccgctttggcaaccaagggctactcttgg

SEQ ID NO: 39252 - DNA, 36 bp, synthetic construct
  source 1..36: mol_type = other DNA
ttcgtagccgcccaagctacagtatctatagaaccc

SEQ ID NO: 39253 - DNA, 36 bp, synthetic construct
  source 1..36: mol_type = other DNA
ggcgctatcttcgggacggaaggtgctgttagtggc

SEQ ID NO: 39254 - DNA, 48 bp, synthetic construct
  source 1..48: mol_type = other DNA
gacctgatcctcaacccctgtgctgatgctgcggcggctctgtttgcc

SEQ ID NO: 39255 - DNA, 36 bp, synthetic construct
  source 1..36: mol_type = other DNA
agccaggtggtggccgacctgaacaccgatgtctca

SEQ ID NO: 39256 - DNA, 168 bp, synthetic construct
  source 1..168: mol_type = other DNA
gtgatgggcggcgtctcccacgccgtcgacgtctacgctcccgaccatagcggggacgatgccttcaaactccaggttctggagcaattccaaaaggttggaaacattaacgacgtgaagtctgatcacaccgtggtgcagatcgtggacatgatcatccaagacgcc

SEQ ID NO: 39257 - DNA, 39 bp, synthetic construct
  source 1..39: mol_type = other DNA
tcccaggtggtcgccgacctgaacacctccgtagtcgac

SEQ ID NO: 39258 - DNA, 168 bp, synthetic construct
  source 1..168: mol_type = other DNA
atcggcggcatcgccaatggagtcgatacatatgctcccgaatacagcgggaacgagcaggtgcaccaggacatcttcgactactttcaaaaggtcggtaacgtggacgatattaagtctgagaactccaccgtgatcaacatcgccgacactgtcatccaagatagc

SEQ ID NO: 39259 - DNA, 222 bp, synthetic construct
  source 1..222: mol_type = other DNA
agtgcccagtcggccgattcaaaaaatgtcaacaaggtggcctctaattctacaaaggaagatttgaagatcgttaagtcttccaatttcgtgaagaaggggaatacctactatatgaagctcaccacaagcaacggcaaagctgtcgccaacaagaagttgtcggtgtcctttaacgggaagacttacgccaaaaccaccgactccaatggaaaattcggg

SEQ ID NO: 39260 - DNA, 120 bp, synthetic construct
  source 1..120: mol_type = other DNA
aacgctttctctaagtcctacaagttatacactgtgaatatgctgtccataaacatcgcaaacgccaaactgctgaccaatggctacctcaagatctatatcaccgcatcaaagaaattt

SEQ ID NO: 39261 - DNA, 156 bp, synthetic construct
  source 1..156: mol_type = other DNA
accgtcaagatcagcattggaggcaaagtgtttaaaaaaaaggctaacgtcgagggcttcgtcgtgattaagccccagctgtccgccaagaaatacacagtgaccgtggacatcaacaagtactctaagactaagaaagtaaagtgcatcaagggc

SEQ ID NO: 39262 - DNA, 216 bp, synthetic construct
  source 1..216: mol_type = other DNA
tacggagcctacaacgtcggcggcaatagccgcatacccactggatgggtctcgctatctaagttcaaagccaaatttgctggagtcggtctagtagtaaagctgaactacaagctgtccaagaaggtcaagactgagatcaagaactattacaagtccatggggcccaactgggcaaggcagaacaccaacgagcgcattccaaatgttcctata

SEQ ID NO: 39263 - DNA, 66 bp, synthetic construct
  source 1..66: mol_type = other DNA
ccccagctcttctacccttccatgagcgccacctacaagttgccaagttggaacccagcttggagt

SEQ ID NO: 39264 - DNA, 48 bp, synthetic construct
  source 1..48: mol_type = other DNA
atgtgggagagttccggcgacagcttctacatcctgccttctatctcc

SEQ ID NO: 39265 - DNA, 39 bp, synthetic construct
  source 1..39: mol_type = other DNA
agccaggttgtggtggacctgaacaccgatgtcagtaca

SEQ ID NO: 39266 - DNA, 165 bp, synthetic construct
  source 1..165: mol_type = other DNA
gtgatgggcggaatctctaccgccgtggacacatatgctcccgatcactccggcgatgagcagtttcatcaagatgtgtacaactatttccaaaaggtcggaaacattgacaacattacgcaagatagctttctggtggacgtcaccaacattatcatccaagaa

SEQ ID NO: 39267 - DNA, 36 bp, synthetic construct
  source 1..36: mol_type = other DNA
gcccaggtcgtggctgacctgaacaccgatgtatct

SEQ ID NO: 39268 - DNA, 168 bp, synthetic construct
  source 1..168: mol_type = other DNA
gtgttcggcggtatctccaacgctgtggacatctacgcacccgagtactctgggaacgaaacatttcacattgacgtgttcaatcacttcgagaagatgggcaatatgaacgagatcaacgcggacagtaccgtcatggccattgccaacgtcatcatacaagacgct

SEQ ID NO: 39269 - DNA, 36 bp, synthetic construct
  source 1..36: mol_type = other DNA
agccaggtggtggtcgatctgaacaccgacgttagc

SEQ ID NO: 39270 - DNA, 165 bp, synthetic construct
  source 1..165: mol_type = other DNA
gtcatgggaggcatatctacggccgttgatacctacgctcccgaccactccggggacgagcagtttcaactcgaagtggctaactacttccaaaaggttgccactattgacgacctgaagcaggactctaccctcgtggacgtcgccaacataataatacaaaat

SEQ ID NO: 39271 - DNA, 171 bp, synthetic construct
  source 1..171: mol_type = other DNA
cagaaacctttccttcacatcgatgagtggttcactaggggcctgctgaacattagcttcaaagagatggtatctgttaccgcgggcgacgtccaccctccactttattacgcaatcgccctggtgcccgtgtacttgctggagtggttgcatattccttatgacatgatt

SEQ ID NO: 39272 - DNA, 105 bp, synthetic construct
  source 1..105: mol_type = other DNA
tacaggcaaatgaaaaccgtcaagggctcatattggatcgaaggcattaccatcgagaaattcctggagttcttcgccactacgtttgtcactgaaaatcaagac

SEQ ID NO: 39273 - DNA, 36 bp, synthetic construct
  source 1..36: mol_type = other DNA
gcccaggtcgtggctgacctgcacactgatgtttca

SEQ ID NO: 39274 - DNA, 168 bp, synthetic construct
  source 1..168: mol_type = other DNA
gtgattggcggcgtgtcgcatgccgtcgatatctacgcacccgaccaatccggcaacgagacatttcaacttgaagtgctggatcattttcaaaaggtcggcaacctcaatgacgctaaggctgaccatacggtcgtggaaatcgtcgacaccatcttgcaagatgcc

SEQ ID NO: 39275 - DNA, 294 bp, synthetic construct
  source 1..294: mol_type = other DNA
accccaagctttatcgtttgcgatgagattgaacattacgcccggtctgacctcaccgcccaaggcattctgttccccgagtatatcaacaacgagggctacaacgtgtcttccaacttcaatcacctgctggctatccgaggctccagcatcctcgaccctgcaatctttaacgataacgtcgccgagaaccacagcctcttcaacgggtgcttcccacaaaatccgttctacccctacctgctgagtggcctgggcattctcctggctaagctgctgaatctttccgacatc

SEQ ID NO: 39276 - DNA, 195 bp, synthetic construct
  source 1..195: mol_type = other DNA
aacgcttccaaactgctcaagtacacgattcggaacgatcacttcatcgagcaccacgtgaaccccggcaaccagtttgtgaacatgatcaatcaccctcaccacacattcgtattgttctcgtccattttcgcctttacacaagatatgatttgggacctgttccggttctcttacgagaagtggacttgtgcc

SEQ ID NO: 39277 - DNA, 63 bp, synthetic construct
  source 1..63: mol_type = other DNA
ctgtcctgggctcccttcgcctaccctaggctcgacatgaacatcggagtttattctcgctat

SEQ ID NO: 39278 - DNA, 39 bp, synthetic construct
  source 1..39: mol_type = other DNA
gcccaggtcgtggctgacctgcacactgacgtatcaaca

SEQ ID NO: 39279 - DNA, 168 bp, synthetic construct
  source 1..168: mol_type = other DNA
gtgtttggcggaatttctcacgctgtcgatgtctatgcccctgaatacagcggcaacgagaccttcgagctggaggcctacgagagttttcaaacggtgtcctccatcaacgacatccagagcgaccccactgtggttggcattgtggacatcatcctccaagatacc

SEQ ID NO: 39280 - DNA, 48 bp, synthetic construct
  source 1..48: mol_type = other DNA
tccttcgacctgatgttcgagctcaacgctttcccttccaccctgtac

SEQ ID NO: 39281 - DNA, 36 bp, synthetic construct
  source 1..36: mol_type = other DNA
atcgccctgttcacctaccaaatgagcgtgttggag

SEQ ID NO: 39282 - DNA, 174 bp, synthetic construct
  source 1..174: mol_type = other DNA
aacgtgtacatgaaggacaagatcggggcaaccatcgattactggaatagcgtcctgcccgtctccctgccgagtgacaccggactcgccaaccttcttgtgacccctctccgggatgtgattatgatgatcccgggactggacctggacatcgccaatatcttcgctgatggg

SEQ ID NO: 39283 - DNA, 36 bp, synthetic construct
  source 1..36: mol_type = other DNA
agccggatcgtcgtggacctgaacaccgatgttagc

SEQ ID NO: 39284 - DNA, 162 bp, synthetic construct
  source 1..162: mol_type = other DNA
gttatgggcggaatctccactgcggtggacacatatgctcctgactactctggggacgagcaatttcaccaagaagtctacgactacttccaaaagcttgacacaattgaaggacaggatagtatcgtggtggataccgccgatatcattatccaaaacgcc

SEQ ID NO: 39285 - DNA, 186 bp, synthetic construct
  source 1..186: mol_type = other DNA
tacgcaagcttcgcctttcaaaacagcttccggcataactactggatcctcaagcacattaacaacaagtctcagctgtcctacgtgctgagtcacaagtttgcctccctgatcgctgttttgcaaatgtttaccaagtacttaggctcggacctttatttcaagtccagcaacctgttcgtcaat

SEQ ID NO: 39286 - DNA, 60 bp, synthetic construct
  source 1..60: mol_type = other DNA
ctgttcacctggacacctgttggtcagctcaacaagatcattggagtccagagtagatat

SEQ ID NO: 39287 - DNA, 36 bp, synthetic construct
  source 1..36: mol_type = other DNA
tcccggatcgtggtggacctgaacaccgatgtcagc

SEQ ID NO: 39288 - DNA, 162 bp, synthetic construct
  source 1..162: mol_type = other DNA
gtcatgggtggaattagtactgccgtggatacctacgcaccagactacagtggaaacgaacaatttcaccaagagatctacgattacttccaaaaattagacaccatcgagggccaagatagtgtcgtggtcaacaccgccgacattatcatccaaaatgcc

SEQ ID NO: 39289 - DNA, 39 bp, synthetic construct
  source 1..39: mol_type = other DNA
agccaggtcgtggccgacctgaacaccgatgtgtctgcc

SEQ ID NO: 39290 - DNA, 171 bp, synthetic construct
  source 1..171: mol_type = other DNA
gtgatcggaggaatttcgaccgctgtcgatacctacgcacccgaacacagcggggacgaggagtatcagcaaggcgtctatgactactttcaaaagattggatctattaacgaagtcaagtcccaggacgccttcattgtcaacatcgtggacgctattatcaacaaccaa

SEQ ID NO: 39291 - DNA, 36 bp, synthetic construct
  source 1..36: mol_type = other DNA
tccaagatcgtcgtggacctgaacaccgatgttagc

SEQ ID NO: 39292 - DNA, 162 bp, synthetic construct
  source 1..162: mol_type = other DNA
gtcatgggcggcatttccaccgcggtcgacacctacgcccctgcttatagcggcgatgaacaatttcaccaagaagtatacgattatttccaaaagctggatactatcaacggccaagattctattatcgtgaataccgccgatattattatccaaaacgcc

SEQ ID NO: 39293 - DNA, 39 bp, synthetic construct
  source 1..39: mol_type = other DNA
atcagccacattgtggtggacctgaacaccgatgtctcc

SEQ ID NO: 39294 - DNA, 162 bp, synthetic construct
  source 1..162: mol_type = other DNA
gtcatgggcggcatttccaccgctgtagatacctatgccccttctcactccggcgacgaccaattccatctcgaagtctacaaccattttcaaaaattagacaatcttgatggacaggataagattatcgttaacaccgccaacatcataatacaaaacgct

SEQ ID NO: 39295 - DNA, 195 bp, synthetic construct
  source 1..195: mol_type = other DNA
acgtccgtgctcgcgaacagctggagaggcgaccatttcatctccaatcacgtgaacgccaaggaacagatgaacctcctgctgtccaaccccattttctctatcgaaaggtttagcaacgtgttcaatgagttccctgtcatcattgatcggttcttctatttttcaaacgcaggcggagcatacagctcacgg

SEQ ID NO: 39296 - DNA, 57 bp, synthetic construct
  source 1..57: mol_type = other DNA
ctgacatgggcctcggtcggcgctgagaccgtcatgaacggtgtctttagccgatat

SEQ ID NO: 39297 - DNA, 132 bp, synthetic construct
  source 1..132: mol_type = other DNA
tacaaccccggcatcctcaccactgaatccttcaaccaactccaccaaatcgccaccggggagttcaataacggacagccattcttccatacctttatcgagatgattttcctcaaaatcttcggtagtcct

SEQ ID NO: 39298 - DNA, 285 bp, synthetic construct
  source 1..285: mol_type = other DNA
gtgatctacgatgtggacgatatgcagaagtctgggactcacgatctcaagaccaaggccatggtcttcggaatcacacggaacgccaactgggacggccaagtgtactatatcttcgaggacggcgctcatctgaaggaggccagggacaagtacttcaaggacatcaatcagacacctaaggagtcctatgagagcctgacttcacctaagctggggcagcacaactacaacgcagtcaatagctatgccctcgctttcaagaataacactgtgctggatact

SEQ ID NO: 39299 - DNA, 36 bp, synthetic construct
  source 1..36: mol_type = other DNA
agccaggtggtcgtggatctgaacaccgacgtttca

SEQ ID NO: 39300 - DNA, 168 bp, synthetic construct
  source 1..168: mol_type = other DNA
gtgatgggtggaattagcactgctgtggacgtctacgctcctgaccactctggcgacgagcagttccaacaagatgttctggactacttccaaaaggtcggcacaattgatgacctcaaggggaactccaccgtggtggatatcgtcaacatcatagtccaaaatacg

SEQ ID NO: 39301 - DNA, 36 bp, synthetic construct
  source 1..36: mol_type = other DNA
tcccagctcgtggccgacctgaacaccgaggttagc

SEQ ID NO: 39302 - DNA, 150 bp, synthetic construct
  source 1..150: mol_type = other DNA
gtgttcggcggtatctccaatgccgtcgacatctacgctcccgagtacagcgacaacgagacattccaaatcgaggtcttcgactctttcgaaaagatggacaccgtgaacggggtcgaggtggatatcctgaacacaataatccaggag

SEQ ID NO: 39303 - DNA, 39 bp, synthetic construct
  source 1..39: mol_type = other DNA
gtgcggctaggacaactcactaggctggaggacttcaag

SEQ ID NO: 39304 - DNA, 90 bp, synthetic construct
  source 1..90: mol_type = other DNA
gccttcatccgcttcattcctgagggttatgtcaatgacgtggaagtttatatatttcgggatagcaacatccccattctgagggatctc

SEQ ID NO: 39305 - DNA, 66 bp, synthetic construct
  source 1..66: mol_type = other DNA
gagatctgcaacgacttcgatcgatatgcgtacatcacctttggcaacattctgaatgctcctatt

SEQ ID NO: 39306 - DNA, 33 bp, synthetic construct
  source 1..33: mol_type = other DNA
ccagccaccggcatctccaacttgttctctttc

SEQ ID NO: 39307 - DNA, 36 bp, synthetic construct
  source 1..36: mol_type = other DNA
agccggatcgtcgtggatctgaacacagacgtatcc

SEQ ID NO: 39308 - DNA, 162 bp, synthetic construct
  source 1..162: mol_type = other DNA
gttatgggcggcatctccaccgctatagacacatatgcgcctgactactctggtgacgaacaatttcaccaagaagtttacgatcacttccaaaagttggataccatagatggtcaagacagtatcgttgtgaacacagccgacattgtgatccaaaacgcc

SEQ ID NO: 39309 - DNA, 174 bp, synthetic construct
  source 1..174: mol_type = other DNA
attaaccacctgattctccacatcgatgagtacttcaccctgactctgattaattttaacgtctcggatatcatctcgataacggccgcggacgtgcatcctcctctgtactatctgatcctgaagttcgctatgaacgtcttcgggtttttcggcatctctagccacaacctc

SEQ ID NO: 39310 - DNA, 93 bp, synthetic construct
  source 1..93: mol_type = other DNA
aaccagcttaacgccgtccacaaggcattttgggtgcccaggctgcggatcgagaccctaatacaagctgttggctactacgcctacctgaat

SEQ ID NO: 39311 - DNA, 90 bp, synthetic construct
  source 1..90: mol_type = other DNA
ctcttcaagggctggggtagcaaccccgacgccttctttatgaacaacatcgtggtcggctccaacaacctgaataatgtgaccggattt

SEQ ID NO: 39312 - DNA, 72 bp, synthetic construct
  source 1..72: mol_type = other DNA
accctccctggcatgtttattgggctgacaaacctcctgaaccccgattgggccctgctctgggacatcaac

SEQ ID NO: 39313 - DNA, 108 bp, synthetic construct
  source 1..108: mol_type = other DNA
gggttcatgagcttcacctccggcctgcctattaacgagatcgccactagtggtactggactgctgttcatcgtgttccctgagatctttaatgtcatgggagacatg

SEQ ID NO: 39314 - DNA, 36 bp, synthetic construct
  source 1..36: mol_type = other DNA
agccaggtcgtggccgacctgaacaccgatgttagc

SEQ ID NO: 39315 - DNA, 168 bp, synthetic construct
  source 1..168: mol_type = other DNA
gtcttcggaggcatcagccacgccgtggacatttacgcacccgagtactctgggaacgagacctttcatcaagaggcctacgactatttccaaaaggtcggctccatcaatgagattaaggaaaacgccactatcgaggacatcgtgaacattatcattcaagatact

SEQ ID NO: 39316 - DNA, 36 bp, synthetic construct
  source 1..36: mol_type = other DNA
agccagctagtcatcgatctcaagaccgacgttagc

SEQ ID NO: 39317 - DNA, 168 bp, synthetic construct
  source 1..168: mol_type = other DNA
gtgttcggcggaatcagccacgctgtggacatctacgcaccagagtactccggcaatgagacttttcaattggaagcctttaaccagttcgaacagatggagaacattaacaacacagagaccgacatcacggtcaggggcattctcgacaccataattcaggataca

SEQ ID NO: 39318 - DNA, 36 bp, synthetic construct
  source 1..36: mol_type = other DNA
agccaggtggtcgccgacctgaacaccgatgttagc

SEQ ID NO: 39319 - DNA, 168 bp, synthetic construct
  source 1..168: mol_type = other DNA
gtgttcggtggaattagccacgccgtggacatctatgccccacaatatagtggcaacgagacttaccatcaagaagtctacgattattttcaaaccgtcggcaatattaacgactttaaggatgacgggaccgtggaagacatcgtgaacatcattatccaagatacc

SEQ ID NO: 39320 - DNA, 126 bp, synthetic construct
  source 1..126: mol_type = other DNA
accatcataacggtcaatgtgacactgaacaacgctaacatcaccgccaaggatatcgagctcaccgttggcgagaatagcacaattgaatacactactacccctgccgacctgaatgtctccttc

SEQ ID NO: 39321 - DNA, 90 bp, synthetic construct
  source 1..90: mol_type = other DNA
cccgatgactccggaatcgtcaaagtatcagacaatggcacagtgactgccctgaaggaaggcacagctaacatcaccattaccgttgga

SEQ ID NO: 39322 - DNA, 258 bp, synthetic construct
  source 1..258: mol_type = other DNA
accatcaactctaccgttatcactgttacggtttcgaaaatccctactaagatcataatccagaataagaccctcgacatgaaagtcggcgacgaggctaatcccgtcgtgtctctcatgccaagcaacgccggcaacctgtccttcgtggtgtccgatgagtccatcatcctggtcaacggatatggaatagtaacggctgttggccagggcaacgccaccgtcacaatctccttccgcggcaacgacaagtatttg

SEQ ID NO: 39323 - DNA, 42 bp, synthetic construct
  source 1..42: mol_type = other DNA
atggatgcaaccgtgatcactgacattttcggagagtactct

SEQ ID NO: 39324 - DNA, 57 bp, synthetic construct
  source 1..57: mol_type = other DNA
ggcgacaattacccctctgaatatgccacttacgctaacctgttcacctacaacgat

SEQ ID NO: 39325 - DNA, 63 bp, synthetic construct
  source 1..63: mol_type = other DNA
ggagccctcggcaccttgtcgatctctgagatgggcgcagctctgggtgacgcaggctacagc

SEQ ID NO: 39326 - DNA, 39 bp, synthetic construct
  source 1..39: mol_type = other DNA
gtgttcgcaaacgccgccgctggactggaaatagaggag

SEQ ID NO: 39327 - DNA, 42 bp, synthetic construct
  source 1..42: mol_type = other DNA
ggcgccatatacgccgaggacgggagtggagtgatcacgcag

SEQ ID NO: 39328 - DNA, 45 bp, synthetic construct
  source 1..45: mol_type = other DNA
attatcctggacctgtgctccgacgcggcgagcgctcttcttggc

SEQ ID NO: 39329 - DNA, 84 bp, synthetic construct
  source 1..84: mol_type = other DNA
gtatatgacctccccgacctgctgaattcactgtctgctaacctgaccgagaaccacccttctttatctacggacgcaaacacg

SEQ ID NO: 39330 - DNA, 33 bp, synthetic construct
  source 1..33: mol_type = other DNA
ctgatcgctggaaataccgagtccagcaacccc

SEQ ID NO: 39331 - DNA, 48 bp, synthetic construct
  source 1..48: mol_type = other DNA
tgcggctacaacctgttctatgccatcggcgacgtgctctgcgatcct

SEQ ID NO: 39332 - DNA, 42 bp, synthetic construct
  source 1..42: mol_type = other DNA
ttcggccctgaggacgccctgggatatgacgatgattctatg

SEQ ID NO: 39333 - DNA, 291 bp, synthetic construct
  source 1..291: mol_type = other DNA
acacccgttttgatcgtctgtgacgaatcagaacattttgctagaagcgacctaacggcgcaagggatactgaaccctgaatacgtgaatggaggatacggcgtcacccacctgtgtaaccagctgttctcccactctggggaaaccttcttcgacaacaatctcataaacgagaagatcgattcatccatttcattctatgactcttgctttgcccataatccattctacgcctatctcatctctgccttcggaatcttcctggccaaactgctcgacctgaatgtcatt

SEQ ID NO: 39334 - DNA, 192 bp, synthetic construct
  source 1..192: mol_type = other DNA
agcgccctgctcctcaatagcgcaaggcgtgattactttattggcaataatgttaattcatctttgcaacttaataacctgcttgactatcctttcaagaccatgctcctggtttcgagtatatttagttttaccatcgggatgatcaccgatctgttccgcttttcccacgcatattggtcatatgagagt

SEQ ID NO: 39335 - DNA, 63 bp, synthetic construct
  source 1..63: mol_type = other DNA
ctgagctgggcgccggttggctatggcaagctcgacatgatcattggggtctattcacggtac

SEQ ID NO: 39336 - DNA, 129 bp, synthetic construct
  source 1..129: mol_type = other DNA
gatggaacagatagcagctatttgcaagacgattcactggtggtggactgcgacggctcatccctggacggcggcgattccctggtggtcgattgtgacgactctagtctcaacgatgaagattctgcc

SEQ ID NO: 39337 - DNA, 294 bp, synthetic construct
  source 1..294: mol_type = other DNA
accccagccttcgtagtttgtgatgaaattgaacactatgcacggagtgacctgacgtcacaaggaatcctcttccccgaatacatcaacaatgaaggttacagcgttagctctggattcaactacctgtttcccttcgtcggggagactattcacaacttcgactttttctccccaaacgctaataacaaccattccctgttcaacggctgcttcccacaaaacccgttctacccttatctgctgagcggccttgggatcttcatcacctccctcctcaacctgaatcctgct

SEQ ID NO: 39338 - DNA, 198 bp, synthetic construct
  source 1..198: mol_type = other DNA
aatgcttctaaaatgctcaagaacactatccggaacgagcacttcattgccaacaaggttaacccaaagaaccagctgaacaacatgatcaaccaccctatggacacactcatactgtttagttcgatattcagcctgaccctggatctttgcgtcgacttgtttcgctttagctaccagatgtggacctacacatca

SEQ ID NO: 39339 - DNA, 63 bp, synthetic construct
  source 1..63: mol_type = other DNA
ctgagctgggcccctttcgcttaccccaagctcgacatgattgtcggagtatatgcacgctac

SEQ ID NO: 39340 - DNA, 171 bp, synthetic construct
  source 1..171: mol_type = other DNA
gcccacagcctgatacatatcgatgaatacttcactctcgagatagttaagctgcccctgtccgacgcctggaagattataattggtgactatcacccaccgctgtattatattttgctgaaaatagtgaaaaagctttctctgatgacatctcttaatctggatctgatc

SEQ ID NO: 39341 - DNA, 102 bp, synthetic construct
  source 1..102: mol_type = other DNA
ttcaaccaaacagggaaggtttctgacgaatactggatcgcaactcccgacattaatgaaatctttcactacttttatatatcaggcacaaactcaggagac

SEQ ID NO: 39342 - DNA, 141 bp, synthetic construct
  source 1..141: mol_type = other DNA
ggaaaccactattttggtggataccagcctctgataaatggcggactgacagctcagttgccggcatatgccaatgccatcattagcgggagcgtgctggaatatttccaccccgccatcacctacgcctttggtccggga

SEQ ID NO: 39343 - DNA, 75 bp, synthetic construct
  source 1..75: mol_type = other DNA
ctgaccggcaacgtcaatattagcgatatggttatgatgatccactccggggccgttgaccctacaaaccctgtg

SEQ ID NO: 39344 - DNA, 39 bp, synthetic construct
  source 1..39: mol_type = other DNA
aagtacatgctatgtcaagccgccatgacggccggcatt

SEQ ID NO: 39345 - DNA, 54 bp, synthetic construct
  source 1..54: mol_type = other DNA
cccgacatagttacaagtcgtctaggagtactagctctgtccgctctcacattg

SEQ ID NO: 39346 - DNA, 192 bp, synthetic construct
  source 1..192: mol_type = other DNA
acaaacgaattgctgcactcctggcggggccttcacatgtccgaaaagcatgtaaactccaccgaacagctgagctaccttttctctaatcccatagtatttggcgacaagattatccgcctgttcactgagttgccaatcataatcgaccgctatttcttttttcccgacgcgggccgagtccagtttagt

SEQ ID NO: 39347 - DNA, 57 bp, synthetic construct
  source 1..57: mol_type = other DNA
ctgacctggagctccgtcggggcagccaagatcacagctggggtctatggaaggtac

SEQ ID NO: 39348 - DNA, 36 bp, synthetic construct
  source 1..36: mol_type = other DNA
tcccaggtggtggccgacctgaataccaacgtcagc

SEQ ID NO: 39349 - DNA, 171 bp, synthetic construct
  source 1..171: mol_type = other DNA
gtgattggcggcatcatcgacgccattgacacctacgctcctgagcacatagatgatgtgcagctctacgatgacatttatgaagatttccaaaaagtcggcaatgtggacgacctcaaagcctacaatagcacagtcgtgcacgctgctgacctgattgtccaaaatgtt

SEQ ID NO: 39350 - DNA, 39 bp, synthetic construct
  source 1..39: mol_type = other DNA
agccaggtggtcgccgaccttcacaccgatgtgtccacc

SEQ ID NO: 39351 - DNA, 168 bp, synthetic construct
  source 1..168: mol_type = other DNA
gtcttcggcggcatctcccacgccgtggacatctacgctccgcaatatagcggcaatgaaacttttcaattagaggtctacaaccatttccaagaagttggaaacattaacgacgtgaatgtggataacaatgtcgtgaacatcgtgaacaccgtggttcaggatgcc

SEQ ID NO: 39352 - DNA, 33 bp, synthetic construct
  source 1..33: mol_type = other DNA
ttcaagctggctaacggacagtggatcagcggt

SEQ ID NO: 39353 - DNA, 93 bp, synthetic construct
  source 1..93: mol_type = other DNA
ggcctcaagaccaaatccatcggcgacattgcctccgtctcggcgggtttacctgcattccacatccctatggtgccaataacactggaaagc

SEQ ID NO: 39354 - DNA, 135 bp, synthetic construct
  source 1..135: mol_type = other DNA
atgtccagctttgctttcaagctgctctctttggtttcgatatacgacctgtacatcgtcaatgcctccaacgccatcaccatcacaccgcctaacaacaagatgtattctgccgctccgtgtcctgaatttagc

SEQ ID NO: 39355 - DNA, 54 bp, synthetic construct
  source 1..54: mol_type = other DNA
gaatatggagcaatttacgacgaccggaagagcatctccgatatccgatctgac

SEQ ID NO: 39356 - DNA, 174 bp, synthetic construct
  source 1..174: mol_type = other DNA
atcaaccacctcatcctgcatgtcgatgagtacttcacactgtccattatcaacttcaacgtgaacgacttgattagcgtcaccgctgccgacgtccatccgcctctgtactacctgatcctgaagttcgccatgaatgtgttcgggctcttcggcatttctagccacaacttg

SEQ ID NO: 39357 - DNA, 96 bp, synthetic construct
  source 1..96: mol_type = other DNA
tttaatcaactggacgctgtgcaccacgggttttgggtgccccgggtcaaatttgactccctagtacaaagccttggctactacgcctattgcaag

SEQ ID NO: 39358 - DNA, 198 bp, synthetic construct
  source 1..198: mol_type = other DNA
tacgccacctccgtgctggccaatagctggcggggcgagtacttcatcaactcccacgtcaactcaacgcaacaggcgaacaacctcatcaatcaccctaagttcgctttcgaacgctttctgaacgtgtttacccaatttcctattattgctgatcgcttcttctactttagtaacgacgtccgccaatactcatct

SEQ ID NO: 39359 - DNA, 60 bp, synthetic construct
  source 1..60: mol_type = other DNA
tatctgacctgggccaaggttggggccgagagcgtggtcaacggggttttcgcaagatat

SEQ ID NO: 39360 - DNA, 195 bp, synthetic construct
  source 1..195: mol_type = other DNA
gccacctccgtgttaaccaactcttggcgcggcgagttcttcgccaataagcacgtgaatgcaacagagcagctcaactatctggtgtccaaccccggctttgctgtggaacggttcatcaacctgtttactcaatttcctaccgtcgtggagagattcttctactttagtaacgatgtcagggactacagctcc

SEQ ID NO: 39361 - DNA, 60 bp, synthetic construct
  source 1..60: mol_type = other DNA
tatctgacctgggctagcgtcggcgccaagtccgtgatgaacggcgtcttctctaggtac

SEQ ID NO: 39362 - DNA, 51 bp, synthetic construct
  source 1..51: mol_type = other DNA
tccgaagtggtcaagatctcgctccaaaaatacaacgtgactctgacccct

SEQ ID NO: 39363 - DNA, 36 bp, synthetic construct
  source 1..36: mol_type = other DNA
cagtttggcaagagctacgcaaaccttcccgtattc

SEQ ID NO: 39364 - DNA, 66 bp, synthetic construct
  source 1..66: mol_type = other DNA
gacggaagaaacttcaaggactttaccgacaatgagggctatgcttacatcaacgccgatgtgaat

SEQ ID NO: 39365 - DNA, 69 bp, synthetic construct
  source 1..69: mol_type = other DNA
aagaagtgccaggtgacaatcattaagaaaaccagcatcaccatctacaacgacaagctcctgaaggga

SEQ ID NO: 39366 - DNA, 117 bp, synthetic construct
  source 1..117: mol_type = other DNA
aaacagactctgaccatcaagattggggccaagaccttcgtggagaagacaaatagcgaaggcatcgttattatcaagcccaacatgaccaagaagacttacactgttgacgttacc

SEQ ID NO: 39367 - DNA, 105 bp, synthetic construct
  source 1..105: mol_type = other DNA
aagagcaagtccgtcgagggtatctatggctacgccattaaccccctgtacaaggacgtgccatctaagggaggagtgcctgacatcgactacatgaccgaagac

SEQ ID NO: 39368 - DNA, 42 bp, synthetic construct
  source 1..42: mol_type = other DNA
ggcgacatgacgtacaccgtgcttaaaagccagtacaaggag

SEQ ID NO: 39369 - DNA, 297 bp, synthetic construct
  source 1..297: mol_type = other DNA
aagtggaatgtcctggagcgcgaactgttcaagagcctcattctcaagaatcagcacgactattggccatctgaaattacagcaagtctcaagggcaaggcctacacctatagcgaggttagggacgtgcagaacacagattacacctgtggtcctacttcctgctccatgtgctctcaagtcctgcggaattactgctgcgagtcttacctggctcggctgtctggatctgagcctgacgtcgggacgtccgtgcccgctatggacagtgccctggagaagaacaacttcaagtgc

SEQ ID NO: 39370 - DNA, 66 bp, synthetic construct
  source 1..66: mol_type = other DNA
agctatgactacgctctgtccgagctcaagaagggcggatgcgccgtggtcttccacgcaaagaac

SEQ ID NO: 39371 - DNA, 39 bp, synthetic construct
  source 1..39: mol_type = other DNA
gtggccatcctggacattagcaaggatggcaactacgtg

SEQ ID NO: 39372 - DNA, 78 bp, synthetic construct
  source 1..78: mol_type = other DNA
tacgataacatcgagaccggctggcagagcacaaactacatgaagacccggtactataagaattacgacgatggactg

SEQ ID NO: 39373 - DNA, 90 bp, synthetic construct
  source 1..90: mol_type = other DNA
cccagcaccaagaacgagatcaatcagttctatcacaacatgggctcctggactaggcaaaataccaacgagaacattctggtggactac

SEQ ID NO: 39374 - DNA, 171 bp, synthetic construct
  source 1..171: mol_type = other DNA
cctctgaatcagctcatcattcacatagacgagtatttctcactgacactggtcacattgccaattcacgacattcttactgtcactacctgggatgttcacccccccctctattacttgctcggcaaaatggctgccaaatttgcttccatgacgggcatggacctgctc

SEQ ID NO: 39375 - DNA, 96 bp, synthetic construct
  source 1..96: mol_type = other DNA
ataattcaagtgacgcaggttcaccaatcttattggatccccgaggtgtccgcccctaccctgatgaacagcttcggctattacgcttacacatcc

SEQ ID NO: 39376 - DNA, 54 bp, synthetic construct
  source 1..54: mol_type = other DNA
cagagcgagtacttcgacgaatatattggctttatggccgacatcgatccaacc

SEQ ID NO: 39377 - DNA, 75 bp, synthetic construct
  source 1..75: mol_type = other DNA
atcgacggtagctttagcctcgacaccgtgtcccgggactggacaagtcccgattgggaatgggacgcaaatgga

SEQ ID NO: 39378 - DNA, 87 bp, synthetic construct
  source 1..87: mol_type = other DNA
ttcggaaccctcggttacgacggagtggacgtggcaggctacgccacactggctcccctttgtgtctccgactttggagacgaaggc

SEQ ID NO: 39379 - DNA, 36 bp, synthetic construct
  source 1..36: mol_type = other DNA
ttctacatcttctttcccaacttccggaccattctg

SEQ ID NO: 39380 - DNA, 45 bp, synthetic construct
  source 1..45: mol_type = other DNA
gtgattgagatcgatctcaccgacaacatccaggtggtccttctg

SEQ ID NO: 39381 - DNA, 30 bp, synthetic construct
  source 1..30: mol_type = other DNA
ggccagagcatggatgacatcttcaacgtg

SEQ ID NO: 39382 - DNA, 126 bp, synthetic construct
  source 1..126: mol_type = other DNA
atttctgtgctccctatccacccatacgccttctccatggcatccgggatcggatctgcatcgatgaacgccgcctccctggcaagtattagccatgtgcacccatcaatggctaccgagtttgag

SEQ ID NO: 39383 - DNA, 48 bp, synthetic construct
  source 1..48: mol_type = other DNA
ggcgtgccaacttcctctttcgtcatgcactacgtatcccaaatcaac

SEQ ID NO: 39384 - DNA, 30 bp, synthetic construct
  source 1..30: mol_type = other DNA
ctggccatcctgctgaacctcgtggttttg

SEQ ID NO: 39385 - DNA, 36 bp, synthetic construct
  source 1..36: mol_type = other DNA
tccaaggtggtcgtggacctgcacaccgatgtttct

SEQ ID NO: 39386 - DNA, 165 bp, synthetic construct
  source 1..165: mol_type = other DNA
gtgatgggaggtctttcaaccgctatcgacatgtacgctcctgaccacgccaacgatccccaattctttgacgatgcagccaactaccttcaagccgcaggcactgagaacataacacaggactccactgtgatgaatgccgtggacgtcatcatccaagaagcc

SEQ ID NO: 39387 - DNA, 36 bp, synthetic construct
  source 1..36: mol_type = other DNA
atgagcaccctgtccgccaagaacttcgagaaaccc

SEQ ID NO: 39388 - DNA, 204 bp, synthetic construct
  source 1..204: mol_type = other DNA
tcctactccgagccagccctaatgcatagttggagatctaagctcaattatatggatcctgccttacaagctaaatacctgatcaataaccccttcgagatcctccgcttcctccggctgatattcacatacaccctcggtatcactgtgaacggactgtttaatttcttttccgcgggcagtgctaaccactattcggaccag

SEQ ID NO: 39389 - DNA, 51 bp, synthetic construct
  source 1..51: mol_type = other DNA
cttacctgggccgatgttggtagcacaaacattggagtttcggcaaggtac

SEQ ID NO: 39390 - DNA, 87 bp, synthetic construct
  source 1..87: mol_type = other DNA
atcacattctcttggggcaccgacgccgccctgtacttcgtgaataacgtcggaggcagcagcaacctctccaacgctagtttcctg

SEQ ID NO: 39391 - DNA, 69 bp, synthetic construct
  source 1..69: mol_type = other DNA
accctgcccggcgccgacatcgggattaacacactcctgaaccctacctggagcaagctctacgatgta

SEQ ID NO: 39392 - DNA, 105 bp, synthetic construct
  source 1..105: mol_type = other DNA
ggattcatgagctatacgacggggacacctatggtgcagctgatcactgaaggcaccgggctgatctttatcgtcttccccatgatcttcaacattatgggagcc

SEQ ID NO: 39393 - DNA, 90 bp, synthetic construct
  source 1..90: mol_type = other DNA
acacccgtcggagagctggacaagttcaactttaccgccgactggattagcgctggcggactcaagatgtccttcatcttcgtggttgac

SEQ ID NO: 39394 - DNA, 81 bp, synthetic construct
  source 1..81: mol_type = other DNA
caggctgcgagcatcaacggcgtggccgactttagctttgaggccgttaagaccgcactgaatgggagccctgatagtctc

SEQ ID NO: 39395 - DNA, 54 bp, synthetic construct
  source 1..54: mol_type = other DNA
gatcttgccctctcctacctggctgactactctgcctatgttggcggactcatc

SEQ ID NO: 39396 - DNA, 168 bp, synthetic construct
  source 1..168: mol_type = other DNA
aaccggtccatttggtctgacgaggctctgaccctggacatcatcaaccagagttacttcggcatgatccagctgaccgccagcgacgtgcatcctcctctctactacatcattatcaagactacactcattatcattaatttcttcaagatccctttcgatgagatc

SEQ ID NO: 39397 - DNA, 117 bp, synthetic construct
  source 1..117: mol_type = other DNA
ctgcggatcaagaataactactggattcaggccatcaactttaagtccatcatctcctacttctactttataacgtccccctcaagttactatgacctcatttacctgacatccttc

SEQ ID NO: 39398 - DNA, 171 bp, synthetic construct
  source 1..171: mol_type = other DNA
ttgaaccactacattatgcacattgacgaatacttctccatgtcactgactaccctgcctctctgggatattatcaacgtcacctcctgggacgtgcatcctccactttattacattctcggcaagatcgctgtcaagatagggggtgctataggaatggagcctatccac

SEQ ID NO: 39399 - DNA, 93 bp, synthetic construct
  source 1..93: mol_type = other DNA
cggcagcttacgcaagtacatgggtcctactggatcccacaagtcaacagcaatgtcttcatcaacgccctgggctactatgcttacgcaaat

SEQ ID NO: 39400 - DNA, 171 bp, synthetic construct
  source 1..171: mol_type = other DNA
cctctcaacaactacatcatgcacgtcgacgaatatttcacgatttccgtcctgaccttgccaatcggcgatatactcaacattacgagttgggatgtccacccaccactgtattactttctgggcaagattgccataaatgtggcagatacattcggcctggactacctc

SEQ ID NO: 39401 - DNA, 99 bp, synthetic construct
  source 1..99: mol_type = other DNA
atgaggcagatgacccaggtcaaagctgcctattggattcgtcaacttaatcccgagaccttcatcaaaacgctgagttacttcgcctacacaaacgac

SEQ ID NO: 39402 - DNA, 294 bp, synthetic construct
  source 1..294: mol_type = other DNA
tctccaatcttcgtcgtgcccgacgaggtggaacacttcgcccggtccgacctgacaagcgagggcgtgctctttccgcaatatacgccaaaccaaggttattacatgaacaactatttctgggacatgctctacaatgctggcctgaccatcttcaacgccaacctgacccactgggacatttgggatgctcaggccttctttgagagtgctttttcccaaaacctattctacggctacatagcccaggctattgggattctgctggccaagatcctggatctcagcgtcatc

SEQ ID NO: 39403 - DNA, 198 bp, synthetic construct
  source 1..198: mol_type = other DNA
aaatatgcatctcccgagctgctgaagtctggccgggccctgattatggctcagaacaacgtgtccgtgtcggggcagattaattacatgttgaacaatcctctcaacgccacactgaccctgatcaagtctgttggggggagcatctacaccattttcatctacgagctgaagctctactccgagtattacgttaag

SEQ ID NO: 39404 - DNA, 54 bp, synthetic construct
  source 1..54: mol_type = other DNA
ctgtcctggagcccggtcggtggaaacgagattctcggaatccaggcaagatac

SEQ ID NO: 39405 - DNA, 63 bp, synthetic construct
  source 1..63: mol_type = other DNA
atcagctggtacgtgggacagcacaactatgaccccgattaccaagcgtggaagacctacgcc

SEQ ID NO: 39406 - DNA, 90 bp, synthetic construct
  source 1..90: mol_type = other DNA
aacctgctttacgccgagatcctgagcgacacagcttccgtggctcctaacaatcagatgccagcatctgcctacttatatactgtcttg

SEQ ID NO: 39407 - DNA, 39 bp, synthetic construct
  source 1..39: mol_type = other DNA
tatatcgacaacctcgggctggcaacctacggcatcatt

SEQ ID NO: 39408 - DNA, 45 bp, synthetic construct
  source 1..45: mol_type = other DNA
ccctatatcttcggagtggccggcaatagctacggggaagtccag

SEQ ID NO: 39409 - DNA, 30 bp, synthetic construct
  source 1..30: mol_type = other DNA
aacatttacatcggagccgaagctgaaggg

SEQ ID NO: 39410 - DNA, 48 bp, synthetic construct
  source 1..48: mol_type = other DNA
caagtaatcgaagcttgggtcggggccgactacgtctatttggctgac

SEQ ID NO: 39411 - DNA, 36 bp, synthetic construct
  source 1..36: mol_type = other DNA
atgctgagcccctctgactccttcgaaagagtagag

SEQ ID NO: 39412 - DNA, 96 bp, synthetic construct
  source 1..96: mol_type = other DNA
tctggcgacctcggttttatcgattcgattttccaagggatgagcggcatcaccacaactggcttctccctgatacctgccgaagaaaccagtttt

SEQ ID NO: 39413 - DNA, 102 bp, synthetic construct
  source 1..102: mol_type = other DNA
gggctcgacctgttcgatgccatttgctactgtttctgcggcatcgctaccggaggcttttccgtcgacgccaaccacgtggagcactttcaacaaccttct

SEQ ID NO: 39414 - DNA, 117 bp, synthetic construct
  source 1..117: mol_type = other DNA
ttcggaggctactaccaccaagatattgtcaagatctttagccatagcctattccaagtagtttctgtgatgtccagtaccgggttcacaactacggatataacaccttggccttca

SEQ ID NO: 39415 - DNA, 93 bp, synthetic construct
  source 1..93: mol_type = other DNA
tgcaataacctcgaaatcgcctactcgttagcggctagttccctgggaaacaccggcgtcggccctgactatttctctattaccatgcctttg

SEQ ID NO: 39416 - DNA, 171 bp, synthetic construct
  source 1..171: mol_type = other DNA
tacgccctgaatgggcttattcaatcgccacggtacaatttcaacctgaacacccactatcaacttctattcattaagagccacttcacctcttacctgatcactattactaagccttctctttattatagcttgatcttcatcaaggttgggtttttccgctatgtcgtg

SEQ ID NO: 39417 - DNA, 57 bp, synthetic construct
  source 1..57: mol_type = other DNA
tatctgaccaacaataagatcggggccaacaatgtgtccggggtacagttccgctac

SEQ ID NO: 39418 - DNA, 174 bp, synthetic construct
  source 1..174: mol_type = other DNA
ccactgaaccactacatcatgcatatcgatgagtatttcacaatgagtatcaccacactccctctcggcgacattgtcaacgtggcctcttggtacgtccatccaccactgtactacatcctcggcaaggtggctgtgaccatcggagccaccattggcatggacagcttgcat

SEQ ID NO: 39419 - DNA, 96 bp, synthetic construct
  source 1..96: mol_type = other DNA
aatcagatgagtcaggcccatgcaatcagcggcattgctcaaataaatctcaacaccttcattaacgccctgggttatatagcctacgctaacgac

SEQ ID NO: 39420 - DNA, 171 bp, synthetic construct
  source 1..171: mol_type = other DNA
cttaacaattatataatgcacgttgatgagtactttaccatctccgtgctgtctcttcccgtccaagacataatccatataaccagctgggatgtccaccctccactgtattacctcctcggcaaaatcgctgtcaacatagggacagctataggcatggatgagctgcat

SEQ ID NO: 39421 - DNA, 96 bp, synthetic construct
  source 1..96: mol_type = other DNA
atggtgcagatgaccaaggtcaaggccgcctactggattcgacaactaaatctggagaccttccccaagactctgagctacttcgcttataccaat

SEQ ID NO: 39422 - DNA, 90 bp, synthetic construct
  source 1..90: mol_type = other DNA
ttcttcaagggctggggctccgaccccaatacctttctgagccacaacattctgcatagtacaaactctctcggcggcatcttccacttt

SEQ ID NO: 39423 - DNA, 72 bp, synthetic construct
  source 1..72: mol_type = other DNA
accctgcccggcgccaacatcggactgaacgagctcttcaagcctaacttcgaagctctttggaacttcgac

SEQ ID NO: 39424 - DNA, 102 bp, synthetic construct
  source 1..102: mol_type = other DNA
ggttatatgtcattacaatccggtatccccattgagaagatcgtctcggagggcgcctcactgatcttcgttacatatccacaaatctttaacatccttgga

SEQ ID NO: 39425 - DNA, 177 bp, synthetic construct
  source 1..177: mol_type = other DNA
gtgaagtacccattcctgtccgtggatgagggctacacccgaggcctgctcaacctgaatttggccgatatggttagcgtgacagctaatgacgtccacccaccactctactatttcattaactacctgttcgcgcaacttgtaaacgccatcggactcaagatgtctgtgatgcac

SEQ ID NO: 39426 - DNA, 102 bp, synthetic construct
  source 1..102: mol_type = other DNA
tatcaccaattgcactacgtccaaggcaactttttcatcaccaaggtgacatttaacaacctcgtctattatctgagctacggcttcacaatcagcggaaac

SEQ ID NO: 39427 - DNA, 174 bp, synthetic construct
  source 1..174: mol_type = other DNA
actaagccattcctgcacatcgacgagcggttcaccatgggcctcctggatatctccttcaaggagatggtgcacctcactgctatagacgtgcatccacctctgtactacgcttttaacctcattcccgtctacatcctgaagggcatcttccacttacaatttgacaagatt

SEQ ID NO: 39428 - DNA, 102 bp, synthetic construct
  source 1..102: mol_type = other DNA
tacaagcagatgaaaagcgtgcacggctcctactggatcgagaaaatcacaatcgtcgagtttgtggagttcttctcatctatcttcaccgtgaacactgaa

SEQ ID NO: 39429 - DNA, 174 bp, synthetic construct
  source 1..174: mol_type = other DNA
ctgaaccagctgattctgcacgtggatgagtactttactctgaccattgtgaacttcaatgttggggacctgatcaacaccactgcggccgacgtccacccaccactctactatcttatcctgaagttcgctatgtacctcttcggcctgttcgggataagttcccacaacctg

SEQ ID NO: 39430 - DNA, 93 bp, synthetic construct
  source 1..93: mol_type = other DNA
aaccagctcaccgctattcacaaggggttctgggtgccccgggtccggttcgacaccctcatccaatcggtcggctactacgcccactgttcc

SEQ ID NO: 39431 - DNA, 96 bp, synthetic construct
  source 1..96: mol_type = other DNA
ctcaacttccccctgatcaacgggctcttcgagaacatgagcacttggaccggcaccggactgacgatgttcacaaatgtcgaagtgctgcctaag

SEQ ID NO: 39432 - DNA, 99 bp, synthetic construct
  source 1..99: mol_type = other DNA
ggcctcccacctttcgacgccattaacctgtgctttgctatgatctgtaccggcggcatgagcatcaagaacgccaatatcggattctacaacaacgag

SEQ ID NO: 39433 - DNA, 99 bp, synthetic construct
  source 1..99: mol_type = other DNA
tgcaagatcctcccaaccgacgccctcttcatggttatatcggctactactagcactggcgcaaactgtatctcttcgaaccagatgatgggatggaat

SEQ ID NO: 39434 - DNA, 96 bp, synthetic construct
  source 1..96: mol_type = other DNA
aacgggtacaacggtcttgattcgctcttcgacgtcattagtgcctgcggcaactccggcctgagctctggcgttaccggacctgatatgccaatc

SEQ ID NO: 39435 - DNA, 93 bp, synthetic construct
  source 1..93: mol_type = other DNA
tccttcaccaaggcttggggcagtaaccccgacctgttctttagcaacaatgtccttcaagctagtgactctatttccggcatgttcaccatc

SEQ ID NO: 39436 - DNA, 75 bp, synthetic construct
  source 1..75: mol_type = other DNA
ctgacactgcccggggcttccattggctatacgcaaatctttacccctgactggagcgccctcaccaatctgaac

SEQ ID NO: 39437 - DNA, 105 bp, synthetic construct
  source 1..105: mol_type = other DNA
ttcatggccctttcgaccggcataccatttaacgagctggtgaccgaaggcaccggcctggccttcgtggtcttcccgcaagtattcaacatcatgggtccttgg

SEQ ID NO: 39438 - DNA, 87 bp, synthetic construct
  source 1..87: mol_type = other DNA
gaggccgacgatttgggccaattcgacttttctgcgaactggatcgactccgccgggctgaccatgaacctgatgtttactgtggat

SEQ ID NO: 39439 - DNA, 87 bp, synthetic construct
  source 1..87: mol_type = other DNA
ttcgaggctgcctccattaatggcgagggcataaacttttccttcgagtacatcagccaagcctgtggaaacttcggggaaaccttc

SEQ ID NO: 39440 - DNA, 30 bp, synthetic construct
  source 1..30: mol_type = other DNA
atcgagaacttacaactaggcgctgaaaac

SEQ ID NO: 39441 - DNA, 45 bp, synthetic construct
  source 1..45: mol_type = other DNA
ctcgccctggacatgatcggctacttcgcgtatcctgcgtggatg

SEQ ID NO: 39442 - DNA, 60 bp, synthetic construct
  source 1..60: mol_type = other DNA
gacggggtcatcaacctcctgcaccctaccgccggcgcactgccctatgtgcatgcttat

SEQ ID NO: 39443 - DNA, 60 bp, synthetic construct
  source 1..60: mol_type = other DNA
gacgggctgctgatgttcttcaagctgcacaatatgcccaacgatggcctcgtggaaaac

SEQ ID NO: 39444 - DNA, 30 bp, synthetic construct
  source 1..30: mol_type = other DNA
ctcatcctgggccccaactacttgagtgtg

SEQ ID NO: 39445 - DNA, 60 bp, synthetic construct
  source 1..60: mol_type = other DNA
gacagcattgcacaaattttatgcaactctgtacaattgcggcccctggtcaatcagtac

SEQ ID NO: 39446 - DNA, 60 bp, synthetic construct
  source 1..60: mol_type = other DNA
gagacaattctgaccatcttcatcctgaattcaccggccgaaatacccatggttgttgag

SEQ ID NO: 39447 - DNA, 39 bp, synthetic construct
  source 1..39: mol_type = other DNA
aatagcgggtacacaatcggcttcgagaccaactctgtg

SEQ ID NO: 39448 - DNA, 51 bp, synthetic construct
  source 1..51: mol_type = other DNA
acacttgacctgcttatctccaacctaaactcctccaatgacatagctatc

SEQ ID NO: 39449 - DNA, 30 bp, synthetic construct
  source 1..30: mol_type = other DNA
ctggccggcaacgagatccagcttggaact

SEQ ID NO: 39450 - DNA, 93 bp, synthetic construct
  source 1..93: mol_type = other DNA
agtttcaccaaggcctggggcagcaaccccgacctgtacttcactaactctgtgctccactctacggattctatctctggctttttcaccatt

SEQ ID NO: 39451 - DNA, 75 bp, synthetic construct
  source 1..75: mol_type = other DNA
ctcaccctgcccggagcctccgctgggtacacgcaaatttttactcctgactggtctgccctgggcaatctcgac

SEQ ID NO: 39452 - DNA, 108 bp, synthetic construct
  source 1..108: mol_type = other DNA
gggtttatgactgtgacctccggcatccccttcaatgagctggtcaccagcggaacaggcctcgccttcgtcgtgttccctcaagtgttcaacaccatgggacctgcc

SEQ ID NO: 39453 - DNA, 171 bp, synthetic construct
  source 1..171: mol_type = other DNA
cagaagcccttcctggacatcgatgaatggtacaccatgggaatcctcaatacatcattcaaaaatattatccacttgactgctattgacgtgcatccccccgtctattacttgattgctagaattccaatctatattctcaatcacctcaatgttgcctacgacatgata

SEQ ID NO: 39454 - DNA, 105 bp, synthetic construct
  source 1..105: mol_type = other DNA
tacaagcagatgaccggggtcaaccagggctactggattgagtctataacctttaacgacttcctgggcttcttttctagtgtcttcacctttaacgatgatcca

SEQ ID NO: 39455 - DNA, 171 bp, synthetic construct
  source 1..171: mol_type = other DNA
cagaagcctttcctgcacattgacgagtggtttacaagagggctcttgaatgtcagcttcaaagaaatggtctcggtgaccgccggagatgttcaccctccactgtattacgcgattgccctggtccccgtttatctcctggagtggctgcacatcccatatgacatgatt

SEQ ID NO: 39456 - DNA, 105 bp, synthetic construct
  source 1..105: mol_type = other DNA
tatcggcaaatgaaaacagtcaagggatcatactggattgaaggcatcaccatcgagaaattcctggagttcttcgccactacatttgtgaccgagaaccaagac

SEQ ID NO: 39457 - DNA, 300 bp, synthetic construct
  source 1..300: mol_type = other DNA
agtccaattaattccgtgtctgatgaaggcgagcatttcatgcggtcagagataacgagccacggagacttcttccctaagtatatcacgcaaaacaataagaacgggtttatgagcatcgactctctggctcacatgcccatggacaagacattcttcgagactacctcctggaatacccagccaatcaacacaactccgcaactagtcaacagcgcctttgagcaaaaccccttctacgtgtacatagctcaggcgatgggcattgacctggccaagctcctgaacctgaaccagatt

SEQ ID NO: 39458 - DNA, 189 bp, synthetic construct
  source 1..189: mol_type = other DNA
tacgccgtcggttccatttcacattcttggcgggcttccctgtttgcgcaaaaaaatgtgaacgctaacgggcagatcaagtatctacttagtgacgcccacggcctcattaccttcttgcaaatcgaaaaccagatccccgtgcaaatcgatgccttatctaagctgtacacaaactacaacaacttt

SEQ ID NO: 39459 - DNA, 63 bp, synthetic construct
  source 1..63: mol_type = other DNA
tatctgacatgggcacccgtcggtgctaaggacctgatcgagagcggcgtagtgcctaggtat

SEQ ID NO: 39460 - DNA, 258 bp, synthetic construct
  source 1..258: mol_type = other DNA
ctcacaatgccctacatcttcgagaagggcatcctccaacccggcgaattcctcatcatcccaaacgaccccaactacctccgcaagggaaacgtttccgacctgaacgtgtctgactacgtgttcgctagccgctacatcgccgccctggatggatatggtgtcgctcggaccaacgagttcacttacaacttcgtcaccgacgagttcaacgagaaatacgtggacatttatgtggccaatgacgatggaagtctt

SEQ ID NO: 39461 - DNA, 237 bp, synthetic construct
  source 1..237: mol_type = other DNA
caatatgtaataactgccattaacctcgttaccggcgagaaaactgccaacaatattaccgttataccgagaattatcgagaacaacgacattatcaagtattaccgcaacgggacacagtacaccgtcaaaatcctcggcggcgacggcaatcctgttggagccggcgaaaacgtgacattcaacattaacggagtgttctacacgcgccaaacagatgagaatggcatcgctaag

SEQ ID NO: 39462 - DNA, 216 bp, synthetic construct
  source 1..216: mol_type = other DNA
atagtgacagcggaatgcaagggctgtgtcgtctccaacaatatcaaggtcctgagcgtcctgaacgccaacgacatcaccatgaaatacggggacggaactcagttcaaagtgaacctagtggacggcagaggtaacccatatgctgatcagtctgtggccttcaacatcaacggcatgttttacaataggatgaccgacagcaacggacaagct

SEQ ID NO: 39463 - DNA, 63 bp, synthetic construct
  source 1..63: mol_type = other DNA
gagtacatcataacctcctcctactacggatcttccatcgccaacaagatcactattgaaagt

SEQ ID NO: 39464 - DNA, 174 bp, synthetic construct
  source 1..174: mol_type = other DNA
atttccaatgtgctcatccacatcgacgagtggtggactgtggctttgatcaaaaccagcttcctggaatgcctcaagatcaccattaaggatgtgcatccacctctgtactacatgatcgtacaaacagtttgttatgtgctcaacgccctgcacatccaatacgacctgatt

SEQ ID NO: 39465 - DNA, 108 bp, synthetic construct
  source 1..108: mol_type = other DNA
aagcaagtgtccaagacaatggagtatcagaagaacttccctcatctctacgacctatttagttatgtgtcctggttcgctgtgaactcaacgactgacttttcctac

SEQ ID NO: 39466 - DNA, 90 bp, synthetic construct
  source 1..90: mol_type = other DNA
ttcttcaagggatggggctccaatcccaacgctttcctgacaaacaacgtcctccacgcctctagcaatctgggcgacgtgaccactttc

SEQ ID NO: 39467 - DNA, 78 bp, synthetic construct
  source 1..78: mol_type = other DNA
ctcaccctgcctggcgccaacctgggcctgaacgagctctttaagcccgactggagcctgcttagcaacttctttagc

SEQ ID NO: 39468 - DNA, 108 bp, synthetic construct
  source 1..108: mol_type = other DNA
ctgggctacatgtccttgcaatcaggcgttcctgtctcggaaattgtcagtcaaggcaccgggctgatctttgtagtttacccgaccgtattcaacattttgggaccg

SEQ ID NO: 39469 - DNA, 171 bp, synthetic construct
  source 1..171: mol_type = other DNA
cagaagccatttctgcacatcgatgagtggttcacccgggggctgatgtatatcagcttcaaagagatggtgcatgttaccgctatagatgtccaccctccgctgtattatgctattgccttaatccccgtatacctcttcaattggctgcatattccttatgacatgacc

SEQ ID NO: 39470 - DNA, 99 bp, synthetic construct
  source 1..99: mol_type = other DNA
cggcagatgaagtccgtcaagggggattactggatcgagcctatatccttgaacgactttttacaattcttcgcctctattttcactgataccggagaa

SEQ ID NO: 39471 - DNA, 90 bp, synthetic construct
  source 1..90: mol_type = other DNA
ttcgtgaagggctggggaagcgaccccaacaccttcctgtcgaacacggttctccaatcgtccgattctatcaatgggatcttcaacttt

SEQ ID NO: 39472 - DNA, 72 bp, synthetic construct
  source 1..72: mol_type = other DNA
accctgcctggcgcaagcatcggcctggctgagctcttcgcccctgacctctcccttctttggcactttgac

SEQ ID NO: 39473 - DNA, 108 bp, synthetic construct
  source 1..108: mol_type = other DNA
ctcggctacatgtcgcttcaatccgggactcctgtcgccgacctggtctccggcggcaccacactgattttcgtcgtctacccccaaatttttaacgtgcttggagtc

SEQ ID NO: 39474 - DNA, 66 bp, synthetic construct
  source 1..66: mol_type = other DNA
ctgagccccaactacacaataccagaatttacaacccctggcctgtacctgaccgacaagcctctg

SEQ ID NO: 39475 - DNA, 93 bp, synthetic construct
  source 1..93: mol_type = other DNA
gccttctttcactcccaaccgcaattggcggcctctttcgccggcaccccatccattggcgtttatgagatgagcagcaagctgctgaacccc

SEQ ID NO: 39476 - DNA, 132 bp, synthetic construct
  source 1..132: mol_type = other DNA
tatgggaaccacttcttcggcggatacagtccactgttccttaatagctcatgggcgaccaacctgccgagcactataacaaactcaattctgtttaatttccatcctgccatcacatacgtctttggcgga

SEQ ID NO: 39477 - DNA, 72 bp, synthetic construct
  source 1..72: mol_type = other DNA
cttactgggaatgttaatattagcgatataattatcgccattaaaaccggcgtcgttacacctgacaaccct

SEQ ID NO: 39478 - DNA, 45 bp, synthetic construct
  source 1..45: mol_type = other DNA
aatatcgtgaccaacgccttttcccaatttgcaatgggacttctg

SEQ ID NO: 39479 - DNA, 300 bp, synthetic construct
  source 1..300: mol_type = other DNA
tctcctttaaactcagtgtccgacgagggcgagcacttcatgcggagcgaaatcaccagtcatggcgacttctttccccaatacatcacaaatggatctaggactggctttatgagcatcgagtccctcgcacacatgcctatggataagaccttctttaagaccactgactggaacaaccagcccattaacaagactccacgcgtagttaattccgcttttgaacaaaacccattctatgcctacctggcccaagcaatcgggatcgacatcgctaagctgctcaacctgaaccagatc

SEQ ID NO: 39480 - DNA, 186 bp, synthetic construct
  source 1..186: mol_type = other DNA
tatgccgtggattgcattagtcattcctggcgcgctaacctgttccgcgagaaacatgtcaatagcacagagcagctccactacatcctgtctagtccgcaatctattgtgaccttcctccacattggcaaccagatcccagttcaaatagacgccctgtccaagctgtacaccaactacgacaac

SEQ ID NO: 39481 - DNA, 63 bp, synthetic construct
  source 1..63: mol_type = other DNA
ttcttgacctgggctccggtcgggtctaagaacctggtcgatgctggcgtggttccacgctac

SEQ ID NO: 39482 - DNA, 90 bp, synthetic construct
  source 1..90: mol_type = other DNA
ttctttaagggatggggaaccgaccccaataccttcctgaacgtcaacctgctgcaagcaacagacagtctgtcgggggtgtccaacttt

SEQ ID NO: 39483 - DNA, 69 bp, synthetic construct
  source 1..69: mol_type = other DNA
accctccctggcgcctacatcgggctggctgagctctttgaccccgattggagcctgctgtggcacttt

SEQ ID NO: 39484 - DNA, 108 bp, synthetic construct
  source 1..108: mol_type = other DNA
ctgggatacatgtccttgcaaagcggggccccaatatccgaaatcgttagccagggtacaaccctgatcttcgtggcctacccacaagtttttaacattcttggaact

SEQ ID NO: 39485 - DNA, 153 bp, synthetic construct
  source 1..153: mol_type = other DNA
acccatactttcattaacgtagacgaatattggacctactctcttgttaacttaccatttatgcaaggcatgatcgtggccgtgcacgacgtccatccacctctgtactacatgattctctacctgctgacaccactcggcctgcaaaatctt

SEQ ID NO: 39486 - DNA, 105 bp, synthetic construct
  source 1..105: mol_type = other DNA
caccagatgcagacccaggccggagaaccgcgcgagggtttcgagctggccaacgccattcactacttaactgccttcgctatcaaggggcagaacttcgagttt

SEQ ID NO: 39487 - DNA, 129 bp, synthetic construct
  source 1..129: mol_type = other DNA
tcctacgggctgcactacttcggtggacaccagccacttgctctgagcaatatcgccaatctctctacctacatcaccaatagtagtctgtacaacctgcatcccgctattacctacgcatatactccc

SEQ ID NO: 39488 - DNA, 75 bp, synthetic construct
  source 1..75: mol_type = other DNA
atctgcgggtccgtgaacatcaccgacatctctctcgccattagcaatctggtccacacacccgaagcttcaggc

SEQ ID NO: 39489 - DNA, 45 bp, synthetic construct
  source 1..45: mol_type = other DNA
gagctggtgaccaaccccataagtcagagtattggcggtctgctg

SEQ ID NO: 39490 - DNA, 48 bp, synthetic construct
  source 1..48: mol_type = other DNA
tccctatatcaacctagtaatatcatttatgacaactacgtgttcacc

SEQ ID NO: 39491 - DNA, 45 bp, synthetic construct
  source 1..45: mol_type = other DNA
ctcgatctgtccgtggaccgcaaattcctgagctttgagcttcct

SEQ ID NO: 39492 - DNA, 36 bp, synthetic construct
  source 1..36: mol_type = other DNA
ctggatatgaacgccctcccactggacaagatcagc

SEQ ID NO: 39493 - DNA, 63 bp, synthetic construct
  source 1..63: mol_type = other DNA
ttcccagcggagcgcaagatgctgagcgacctgagcttcagtttcaatatcccaaccaacggt

SEQ ID NO: 39494 - DNA, 30 bp, synthetic construct
  source 1..30: mol_type = other DNA
ttcggaggagtggccggcaaatatggtatg

SEQ ID NO: 39495 - DNA, 123 bp, synthetic construct
  source 1..123: mol_type = other DNA
gtcctcgggggagtaactgaagcaaatacagccctgaccaacatggcccacctgtatcccccggacgctcttgccgagggaggtaccggctggactagcttccctaagtttggctctccattc

SEQ ID NO: 39496 - DNA, 102 bp, synthetic construct
  source 1..102: mol_type = other DNA
aacgtgtacttttaccaaaattttgggcaaatcgctatcgattatgttggcggcaatatggactcaatcatcccaacatttattagtaccgcactgcccgag

SEQ ID NO: 39497 - DNA, 90 bp, synthetic construct
  source 1..90: mol_type = other DNA
ttcaaaaagaccgccaccggcctaggcatctgcaagatgctgtttggcgtcgacatgctgattaacaccatgccctggtacaccatcgac

SEQ ID NO: 39498 - DNA, 93 bp, synthetic construct
  source 1..93: mol_type = other DNA
agcttctttaagggctggggcgccaaccccaacgctttcctcgccaataacgtgctgcatgcctcatcaaatctgtctgacatcacaaccttt

SEQ ID NO: 39499 - DNA, 75 bp, synthetic construct
  source 1..75: mol_type = other DNA
ctcatgctgcctggagccagcatcggcctgaatgagctcttcaaccccgattggtccctgctggggcacttcgat

SEQ ID NO: 39500 - DNA, 108 bp, synthetic construct
  source 1..108: mol_type = other DNA
ctcggctatatgtctctgcaaagtgccacacccgtttcgcaaatcgtgacccaaggcactggcctgattttcgtcgtgtaccctactgtatttaacatcctgggagac

SEQ ID NO: 39501 - DNA, 168 bp, synthetic construct
  source 1..168: mol_type = other DNA
cagaagcccttcctccatattgacgagtggttcacacaagggctaatgtacatcagcttcaaggagatggtgcacttaactgctattgatgtccacccacctctgtactacgccatcgccctgatccccgtgtacctgctgaactggcttcacattccttatgacatg

SEQ ID NO: 39502 - DNA, 102 bp, synthetic construct
  source 1..102: mol_type = other DNA
tatagacagattaaggacgtgaagggggactattggatccagagcatcaccgttgacaaattcgtgcaatttttcgcctccatctttaccgacgtgaacgac

SEQ ID NO: 39503 - DNA, 93 bp, synthetic construct
  source 1..93: mol_type = other DNA
tccttcaccaaggcttggggccccaacacggacttatacttcacgcaaaatgtgctgcatgccacggatagcatcaacggcatcttcaccatt

SEQ ID NO: 39504 - DNA, 72 bp, synthetic construct
  source 1..72: mol_type = other DNA
accctgcccggggcctacatcggatacagccagctctttcaccctgactggagcgctctgacaaacttggac

SEQ ID NO: 39505 - DNA, 105 bp, synthetic construct
  source 1..105: mol_type = other DNA
ttcatgtctatgagctccggaatcgccttcaatgagctggtgaccgagggcactgggctcgccttcgtcgtgttcccgcaagcatttaacatcatgaagacagga

SEQ ID NO: 39506 - DNA, 168 bp, synthetic construct
  source 1..168: mol_type = other DNA
ttctatgttacgcctggtcttttaaactcgtttcggcatggcctggtgtcgaacagggccattcccatcgagcagctgaagtacatcctgtcccacaagaaggatgccttcgtccacctattgcaactgcctctgaccatctctggcaacctcacattcgcttggaac

SEQ ID NO: 39507 - DNA, 57 bp, synthetic construct
  source 1..57: mol_type = other DNA
ctgttcagctggacccctgccggccagctcgacatcattggcgtacagcccagatat

SEQ ID NO: 39508 - DNA, 90 bp, synthetic construct
  source 1..90: mol_type = other DNA
ttttttcaaggctggggcgctaaccccgatgtctttttcacaacgagcgtacttaatgcttccgactcactgtctgggatcttcactatt

SEQ ID NO: 39509 - DNA, 75 bp, synthetic construct
  source 1..75: mol_type = other DNA
gtgaccctgcccggcgcttccatcgggtacacacaaatctttacccctgattggagcgcgcttaccgacttgaac

SEQ ID NO: 39510 - DNA, 108 bp, synthetic construct
  source 1..108: mol_type = other DNA
ggcttcatgacctttactagcggcatcccttttaatcaattagtaaccgagggaacagggctcgccttcgtcgtgttccccaatgtgttcaacgtcatgcatccatgg

SEQ ID NO: 39511 - DNA, 93 bp, synthetic construct
  source 1..93: mol_type = other DNA
tcctttaccaagggctggggagctgaccccaacgccttcttctctaccaccctgcttcaatctagcgagtctgttagctctctgctcaacttt

SEQ ID NO: 39512 - DNA, 72 bp, synthetic construct
  source 1..72: mol_type = other DNA
cttaccctgcctggggctagcatcggcctggccgagctcttcaaccccgactggtccctgctgttcaacttc

SEQ ID NO: 39513 - DNA, 111 bp, synthetic construct
  source 1..111: mol_type = other DNA
ctgggatacatgagcatgcaatccggcacggcagtggccgacctggtgacccaaggcaccggccttgtcttcgttgtctatccaactgttttcaatgtgctcggagattgg

SEQ ID NO: 39514 - DNA, 90 bp, synthetic construct
  source 1..90: mol_type = other DNA
ttcttcaagggctggggcgccgaccccaacacattcctgaacgtcaatctactacaatcgaccaactccctctctggagtgttcaacttt

SEQ ID NO: 39515 - DNA, 72 bp, synthetic construct
  source 1..72: mol_type = other DNA
accctgcccggagccaacatcggcctggctgagctctttcaccctgactggagccttctggggcacttcgac

SEQ ID NO: 39516 - DNA, 108 bp, synthetic construct
  source 1..108: mol_type = other DNA
ctgggttacatgagcctccaatctggaacgcctgtgtccgagatcatatcccaaggaactacactcatcttcgtcgcctatccgcaagtgtttaacattttgggaact

SEQ ID NO: 39517 - DNA, 96 bp, synthetic construct
  source 1..96: mol_type = other DNA
ctgagttttgtacaaggatggggcgctaaccccgatgtgttcttcaccgtggacgtcctgcacgcatcagactcgctttccggcattttcaccatc

SEQ ID NO: 39518 - DNA, 72 bp, synthetic construct
  source 1..72: mol_type = other DNA
ctgacccttcccggcgccagcatcggctacaagcagattttcactccgaactggtccgcgcttaccgaccta

SEQ ID NO: 39519 - DNA, 105 bp, synthetic construct
  source 1..105: mol_type = other DNA
ttcatgaccttcacgagtggaatccccttcaatgagctggtcactgagggcacaggcctggccttcgtggtttttccgaacgtgttcaacctcatgcaaccttgg

SEQ ID NO: 39520 - DNA, 90 bp, synthetic construct
  source 1..90: mol_type = other DNA
ttcttcaagggctggggagccgaccccaacacttttttcaacacatccctgctgcaagtttcttcctcacctaccggactcctgaccttt

SEQ ID NO: 39521 - DNA, 69 bp, synthetic construct
  source 1..69: mol_type = other DNA
atgctgcccggggcctccataggtttaagcgaactgtaccaacccgattggagttctctgttcgacttt

SEQ ID NO: 39522 - DNA, 111 bp, synthetic construct
  source 1..111: mol_type = other DNA
cttggttatatgtctctgcaaaccgggaccgcggtagaacaattggtgacccagggtgccggtctgatctttattgtgtatccgaccgctttcaatgctattggaacctgg

SEQ ID NO: 39523 - DNA, 129 bp, synthetic construct
  source 1..129: mol_type = other DNA
taccccgggattggcacctacgacacctttaatcaaattcaccaaattgcctccaatcacttcacaaactggcatcctttcttccacacattcatcgagatgctctgcctgaaggtctacccaagcacg

SEQ ID NO: 39524 - DNA, 93 bp, synthetic construct
  source 1..93: mol_type = other DNA
ttctttaagggatggggcgccgatcccaacgtgtatttcaccacaactttgctacaaagttccgattcctatatgggcttattacaattcttt

SEQ ID NO: 39525 - DNA, 75 bp, synthetic construct
  source 1..75: mol_type = other DNA
ctgaccctccctggagctagcatcgggctggccgagctgtttaatcccgactggtccctgctcggcaactttgag

SEQ ID NO: 39526 - DNA, 108 bp, synthetic construct
  source 1..108: mol_type = other DNA
ctgggatatatgagtttgcaatcaggaactcccgtcgccgagctggtgacacaggggaccggcctcgtgttcatcgtgtaccctaccgtgttcaacgtcttgggacag

SEQ ID NO: 39527 - DNA, 57 bp, synthetic construct
  source 1..57: mol_type = other DNA
atcctgaaccccattatccggcctgtgacccacctcttcctgatgggcagtagcaag

SEQ ID NO: 39528 - DNA, 189 bp, synthetic construct
  source 1..189: mol_type = other DNA
tttcgacaacaaatgggcattaagctgaataccgttttttgctctatgtccaacaccatgagtagtacatccatactccacacacacctgctgaagtctatcatcggcgccctgattagccaaattatgggaccctttgttcaatccaacataaataccggcgtcggcctctatagctacgtaccttcc

SEQ ID NO: 39529 - DNA, 240 bp, synthetic construct
  source 1..240: mol_type = other DNA
cggatgagcgtcggagtcgccggcgctgagactgaccactataccgtcgacgtgatcaacccaaccgataacattgacctcggcgacattaacctgaaggtcatcgagcagaagaattacaccgattctaacaagaccacctattacatcgaccacaattacaatgagatggaactgatcaacgatctcaagcatcctctcaagatcactctgaagctcatcgatattgtgctttactat

SEQ ID NO: 39530 - DNA, 30 bp, synthetic construct
  source 1..30: mol_type = other DNA
cggacccttacgcaaaacggtatcgattcc

SEQ ID NO: 39531 - DNA, 33 bp, synthetic construct
  source 1..33: mol_type = other DNA
gagagcatgaacaccgttccactgtctcttgcc

SEQ ID NO: 39532 - DNA, 30 bp, synthetic construct
  source 1..30: mol_type = other DNA
ctcgacgtgctgaacttcagcatccctctg

SEQ ID NO: 39533 - DNA, 48 bp, synthetic construct
  source 1..48: mol_type = other DNA
ttctatcaccctagcactatcacctacgacacacccgtgttcaacacc

SEQ ID NO: 39534 - DNA, 48 bp, synthetic construct
  source 1..48: mol_type = other DNA
tttatcaccgactatgtcgagcgggatgtgtcgttttactccattccc

SEQ ID NO: 39535 - DNA, 33 bp, synthetic construct
  source 1..33: mol_type = other DNA
ttcatcgataccggcgccatcgacgagatcaac

SEQ ID NO: 39536 - DNA, 51 bp, synthetic construct
  source 1..51: mol_type = other DNA
tttcccatagatgtcgaagtgaaatttatccacaacgtacctgtgaatgga

SEQ ID NO: 39537 - DNA, 195 bp, synthetic construct
  source 1..195: mol_type = other DNA
gccaccagcgtcatgaacaactcctggcgcggacactactcgattgttaacaatgtgaaccctcaaaagcaagtgaattaccttctgtctcaccctgccttcttcctcgaacgcattggcaatctgttctccgagttctccatcatggtggagcggatgttctgcttttctaacggggacggcaagtatcagagt

SEQ ID NO: 39538 - DNA, 57 bp, synthetic construct
  source 1..57: mol_type = other DNA
ctgacatgggccagcgttggagagaagaccctcatctccggcgtctatggaagatac

SEQ ID NO: 39539 - DNA, 90 bp, synthetic construct
  source 1..90: mol_type = other DNA
tttttcaagggatggggaacagaccccaacacttacctcaacgtgaatctactccaagcgactaactctctgagcggcctctccaacttc

SEQ ID NO: 39540 - DNA, 69 bp, synthetic construct
  source 1..69: mol_type = other DNA
accctgcctggcgcctacatcgggctggctgagctgttcaatcccaactggagcctgctctggaacttc

SEQ ID NO: 39541 - DNA, 108 bp, synthetic construct
  source 1..108: mol_type = other DNA
ctcggctacatgtcccttcaatccggaatccccgtctccgagattgtgtctcaaggcaccaccctgatcttcgtggcctatccacaagtttttaacatcctgggaact

SEQ ID NO: 39542 - DNA, 93 bp, synthetic construct
  source 1..93: mol_type = other DNA
agcttcaccaagggatggggcgccaaccccgacacttttttcgccaccacacttctgcaatcgtcagattccatgtctgggctggctcatttc

SEQ ID NO: 39543 - DNA, 75 bp, synthetic construct
  source 1..75: mol_type = other DNA
ctcacactgcccggggccagtattggcctggctgagctcttcaaccctgactggagcctgctgacccactttgag

SEQ ID NO: 39544 - DNA, 114 bp, synthetic construct
  source 1..114: mol_type = other DNA
ctcggttacatgtccctgcaatctggaaccgccgtggccgatcttgtaacacagggcaccgggctggtcttcgtggtctatcctacggttttcaatgtcggggggcagtggctc

SEQ ID NO: 39545 - DNA, 90 bp, synthetic construct
  source 1..90: mol_type = other DNA
ttcttcaagggctggggagctaaccccgacgccttcttcgccaccacattactacaaagtagcgagtcttacctcgggctcctgaacttt

SEQ ID NO: 39546 - DNA, 72 bp, synthetic construct
  source 1..72: mol_type = other DNA
acactccccggagccagcatcggcctagcggagctgtttaatcccgactggtcccttctcgggcatttcgag

SEQ ID NO: 39547 - DNA, 108 bp, synthetic construct
  source 1..108: mol_type = other DNA
cttggctacatgtcgctacaatcggggactgccgtgtctgagctggtgacacaaggcaccggcctggtttttgtcgtctatccaactgtgttcaacgtcctcggacag

SEQ ID NO: 39548 - DNA, 93 bp, synthetic construct
  source 1..93: mol_type = other DNA
agtttctttaagggctggggagccgaccccaacacatacttcaccaccacactgttacaagctagtagctcctacaccggcctgctcaacttc

SEQ ID NO: 39549 - DNA, 75 bp, synthetic construct
  source 1..75: mol_type = other DNA
ctgaccctgcccggagctagtgttgggctagccgagctgttccaccctgactggagcctcctcggaaactttgag

SEQ ID NO: 39550 - DNA, 111 bp, synthetic construct
  source 1..111: mol_type = other DNA
ctgggatatatgagcatgcagagcgggaccgccgtggcggacctggtgacccaagggactggccttgttttcatcgtctatcccactgtcttcaacgtgctgggacaatgg

SEQ ID NO: 39551 - DNA, 132 bp, synthetic construct
  source 1..132: mol_type = other DNA
tacaatcccggcgtcctgaccgcctcgtcatactcacaactccaccaaattgtgactggccagttcactaacgcacacccaatcttccataccctgttcgagaaggcctgcattaaaatcttcaaatctcct

SEQ ID NO: 39552 - DNA, 231 bp, synthetic construct
  source 1..231: mol_type = other DNA
atttacgacgttgataacgacacgtccaacatcaaaactaatgacgcctttgaggaggggattaaccttgagaacgccaaaaaccagtttttttcctctatcaacgataacccctctaatgacattgagaataccgcctccatcaatatcaaaaatagcaattatcacatggtggacagctttgtgaacctgtttagagaaaatttcattattgatggtctgctgaacaac

SEQ ID NO: 39553 - DNA, 42 bp, synthetic construct
  source 1..42: mol_type = other DNA
caccagaacggcggaattgagctggacagcatcgtgttcaac

SEQ ID NO: 39554 - DNA, 45 bp, synthetic construct
  source 1..45: mol_type = other DNA
attgacagcttcgtccaacgagattttggctccttcgtgatcccc

SEQ ID NO: 39555 - DNA, 36 bp, synthetic construct
  source 1..36: mol_type = other DNA
tacatcgacattggaaccctggatgtagtgaataag

SEQ ID NO: 39556 - DNA, 48 bp, synthetic construct
  source 1..48: mol_type = other DNA
ttccctgagaaccctccaatcttcatctacaatatccccttcaacggc

SEQ ID NO: 39557 - DNA, 90 bp, synthetic construct
  source 1..90: mol_type = other DNA
tttttcaagtcttggggcgccaaccccggattctacttcgagcacaccctgatgcaatctagcgacagtttcatgggcatcctgaacttc

SEQ ID NO: 39558 - DNA, 69 bp, synthetic construct
  source 1..69: mol_type = other DNA
accctgcccggggcctctatcggcctctccgagctgtacaatcctgactggagcctgctgttcaacttt

SEQ ID NO: 39559 - DNA, 108 bp, synthetic construct
  source 1..108: mol_type = other DNA
ctcggctacatgagcttgcaaacaagtacaccagtgcctaacctgatcgaccaggggaccggcctcatcttcgtcacctacccaactatcctgaacattttgggacaa

SEQ ID NO: 39560 - DNA, 93 bp, synthetic construct
  source 1..93: mol_type = other DNA
tccttcaccaagggctggggagctaaccccgataccttctttgccactaccttgttgcaaagtagcgactcaattagtggcctcctgcatttc

SEQ ID NO: 39561 - DNA, 75 bp, synthetic construct
  source 1..75: mol_type = other DNA
ctgaccctgcctggggcttctatcggcctggccgaactgttcaaccccgactggagcctcctctcccactttgag

SEQ ID NO: 39562 - DNA, 111 bp, synthetic construct
  source 1..111: mol_type = other DNA
ctgggctatatgtctatgcaatcaggtactgccgtatcggaactagtaacacaaggaactggccttgtatttgtagcgtatccaaccgtgttcaatgtgctggggcaatgg

SEQ ID NO: 39563 - DNA, 90 bp, synthetic construct
  source 1..90: mol_type = other DNA
tttttcaagggctggggagctgaccccaacacttacttcgccacaaccttgttacaatcatcagagagcgtgtccggcatcacctccttc

SEQ ID NO: 39564 - DNA, 72 bp, synthetic construct
  source 1..72: mol_type = other DNA
accctgcctggcgccatgatcggactcaacgagcttttctcgcctgattggagcctgctgctcgactttaat

SEQ ID NO: 39565 - DNA, 111 bp, synthetic construct
  source 1..111: mol_type = other DNA
ctcggttacatgtcgcttcaaagtggaacggctgttgcggacctggtgacacagggcacaggtttagtcttcattgcctatccaaccgtgctgaatgtgttggggcaatac

SEQ ID NO: 39566 - DNA, 99 bp, synthetic construct
  source 1..99: mol_type = other DNA
acaatcgacatcagctttctggatgctttcttcgagaacctgtccgcctggaccggctctgggctgaccctcattagtgacgttgaagcactccctatg

SEQ ID NO: 39567 - DNA, 99 bp, synthetic construct
  source 1..99: mol_type = other DNA
ggcctgagcatttttgactccataaacctcactttcacaaccatctctaccggcggcatgtccatcaagaacgccaatgtcggcttctaccaaaacaat

SEQ ID NO: 39568 - DNA, 102 bp, synthetic construct
  source 1..102: mol_type = other DNA
gccaatattgccccaatgaacgttatcttccacgtcgtttctgccattacaactaccggcgctaacatcgtaccgagttcagaactcgcttcaatcgctcca

SEQ ID NO: 39569 - DNA, 96 bp, synthetic construct
  source 1..96: mol_type = other DNA
ttcactaacgacccctttaacgctctcttcgatactgcctccactattggcaacgttgggttgagcacgggagtaatcaacgagggactgaaccca

SEQ ID NO: 39570 - DNA, 90 bp, synthetic construct
  source 1..90: mol_type = other DNA
ttctttaagggatggggcgccgaccccaacaccttcctgaacgtcaacttgcttcaagcaacagattccctgagcggagtgttcaacttt

SEQ ID NO: 39571 - DNA, 69 bp, synthetic construct
  source 1..69: mol_type = other DNA
acactgcctggcgccctgatcgggctcaccgtgctgttcaaccccaattggagcctgctctggcacttt

SEQ ID NO: 39572 - DNA, 105 bp, synthetic construct
  source 1..105: mol_type = other DNA
ggctacatgagtttgcaaagcggaacccctgtctctgagatagtatcccaaggtactacactgatcttcgtggcctatccccaagttttcaatattcttgggacc

SEQ ID NO: 39573 - DNA, 93 bp, synthetic construct
  source 1..93: mol_type = other DNA
tctttcaccaagggatggggtgccgaccccaacacattcttcaccaccactcttcttcaatcttccggcaactacctgcacctcacacacttc

SEQ ID NO: 39574 - DNA, 75 bp, synthetic construct
  source 1..75: mol_type = other DNA
ctgaccctccctggcgcttccatcggactggccgagctgttcaaccccgattgggccgtgctgagcgactttggt

SEQ ID NO: 39575 - DNA, 111 bp, synthetic construct
  source 1..111: mol_type = other DNA
ctgggatacatgtccatgcaaagcgggacggcggtagctgatttggtgacccagggaacagggctggtcttcatcgtttaccccaccgtgtttaacgtactgggagattgg

SEQ ID NO: 39576 - DNA, 168 bp, synthetic construct
  source 1..168: mol_type = other DNA
ctgaatcactacatcatgcatgtggacgagtacttcacactgtctgtcctgaccctgcctatcggcgatgtgatcaacattacttcctgggacgttcaccctccactctactatattttgggaaaaatagcggtggatattgccgccgcaatcggaatggatagtctg

SEQ ID NO: 39577 - DNA, 96 bp, synthetic construct
  source 1..96: mol_type = other DNA
atcaggcagatgacccaggtgcacgctgcctactggatcagacaagtaaatcccgacctcctgatcaaggcactgggctatatagcatatagtgat

SEQ ID NO: 39578 - DNA, 45 bp, synthetic construct
  source 1..45: mol_type = other DNA
ctctatgatcccaatctgcccgtccgggataccatcgtgttcaac

SEQ ID NO: 39579 - DNA, 45 bp, synthetic construct
  source 1..45: mol_type = other DNA
atcaacgactatgtgcaacgggacctgggctttttcacggtgccc

SEQ ID NO: 39580 - DNA, 30 bp, synthetic construct
  source 1..30: mol_type = other DNA
atcgatataggttccgtagataagattggg

SEQ ID NO: 39581 - DNA, 51 bp, synthetic construct
  source 1..51: mol_type = other DNA
ttccccactgaagagagttctagctttatattctctatgccaattaatggc

SEQ ID NO: 39582 - DNA, 90 bp, synthetic construct
  source 1..90: mol_type = other DNA
ttcttcaagggctggggcgccgacccctctaccttcttcactgcctccctcatccaagattccgagaactacatgggactcttccacttc

SEQ ID NO: 39583 - DNA, 72 bp, synthetic construct
  source 1..72: mol_type = other DNA
ctcacactgcccggtgcatccatcggccttagcgagctgttcaatcctaactggacgctgctttgggacttc

SEQ ID NO: 39584 - DNA, 105 bp, synthetic construct
  source 1..105: mol_type = other DNA
ggttacatgtcactccaaagcggaactcctgtggccgagctggttactcaagggactggacttgtgttcaacgtgtaccccatcgtgtttaatgtcctcggacag

SEQ ID NO: 39585 - DNA, 93 bp, synthetic construct
  source 1..93: mol_type = other DNA
agcttcaccaagggctggggcgccaaccccgacgccttctttgctaccactcttctacaaagtagcgagtctatctctgggctgttccacttc

SEQ ID NO: 39586 - DNA, 75 bp, synthetic construct
  source 1..75: mol_type = other DNA
ctgaccctgcccggagcttccatcggcctggccgagctgttcaatcctgactggagcctcctcggacacttcgaa

SEQ ID NO: 39587 - DNA, 114 bp, synthetic construct
  source 1..114: mol_type = other DNA
ctgggatacatgtcgctacaaagtggaacggccgttgccgatcttgtgacccaaggcacaggcttggtttttgtcgtgtaccctaccgtgttcaatgtcggtggccagtggctt

SEQ ID NO: 39588 - DNA, 93 bp, synthetic construct
  source 1..93: mol_type = other DNA
tccctgaccaaggcttggggcgccaaccccgacctgtttttcacggtcaatgtcctgcacgcaagcgacagtctctctggcatcttcactatc

SEQ ID NO: 39589 - DNA, 75 bp, synthetic construct
  source 1..75: mol_type = other DNA
ctgactctccctggcgcctccattgggtacacgcaaatcttcacacccgactggagcgctctgaccaacctgaac

SEQ ID NO: 39590 - DNA, 108 bp, synthetic construct
  source 1..108: mol_type = other DNA
ggcttcatgacacttacatctggaatccccttcaacgaactggtgaccgagggcaccggactggccttcgtggtctttcctaaagtctttaatgtgatgggaccatgg

SEQ ID NO: 39591 - DNA, 33 bp, synthetic construct
  source 1..33: mol_type = other DNA
atccatgtactccacttttcaatacctttgtca

SEQ ID NO: 39592 - DNA, 45 bp, synthetic construct
  source 1..45: mol_type = other DNA
ttatatgcgccttcgagtgtccagctgaccactatcacattcaac

SEQ ID NO: 39593 - DNA, 54 bp, synthetic construct
  source 1..54: mol_type = other DNA
atcctcttcgaggagaactatgtcctgcgcgactacggctttctggtgcttccg

SEQ ID NO: 39594 - DNA, 42 bp, synthetic construct
  source 1..42: mol_type = other DNA
agctaccagattgacatcggcgccaccgataatgtggttaaa

SEQ ID NO: 39595 - DNA, 57 bp, synthetic construct
  source 1..57: mol_type = other DNA
ttccccgggccagagagcaccgtgaattacattggccacatgcctatcaacggactg

SEQ ID NO: 39596 - DNA, 42 bp, synthetic construct
  source 1..42: mol_type = other DNA
atcacctcatgtcaatataacctggcccacgatcgcctgaaa

SEQ ID NO: 39597 - DNA, 168 bp, synthetic construct
  source 1..168: mol_type = other DNA
ctgaatcactacatcatgcatgtcgacgagtacttcaccctgtccgtgctgactctgccaatcggggacgtgatcaacatcacctcttgggacgtgcacccaccgctgtactatatcctcggcaagattgcagtcgacatggccgctgccattggaatggattcactg

SEQ ID NO: 39598 - DNA, 96 bp, synthetic construct
  source 1..96: mol_type = other DNA
atcaggcagatgacccaggtgcacgccgcctactggatacgccaagtaaatcccgacatgttcatcaagagcctgggctatctcgcatacgctcac

SEQ ID NO: 39599 - DNA, 30 bp, synthetic construct
  source 1..30: mol_type = other DNA
ctcgacgtgctgaacttcagcatcccactg

SEQ ID NO: 39600 - DNA, 45 bp, synthetic construct
  source 1..45: mol_type = other DNA
ctgtacacacctaataacccggttcgcgataccatcatcttcaac

SEQ ID NO: 39601 - DNA, 42 bp, synthetic construct
  source 1..42: mol_type = other DNA
gatatgtacgtgcaaagagatctttcatttttcaccatcccc

SEQ ID NO: 39602 - DNA, 33 bp, synthetic construct
  source 1..33: mol_type = other DNA
tacatcgacatcgatgccgtgaacaagatcagc

SEQ ID NO: 39603 - DNA, 51 bp, synthetic construct
  source 1..51: mol_type = other DNA
tttcctgaggaaggttctgtgtcattcatcttcggcctccccatcaatgga

SEQ ID NO: 39604 - DNA, 93 bp, synthetic construct
  source 1..93: mol_type = other DNA
tcctttttcaagggctggggcgccgaccccaacacctacttcactgctacattactgcaatcatctgagtctatgaacgggatgttccacttc

SEQ ID NO: 39605 - DNA, 75 bp, synthetic construct
  source 1..75: mol_type = other DNA
ctgactttaccgggagctagcatcggactggccgagctgttccaccctgactggtccctgctcgggaagtttgaa

SEQ ID NO: 39606 - DNA, 108 bp, synthetic construct
  source 1..108: mol_type = other DNA
ctgggctacatgtcgttgcaatcgggtaccgccgtgtctgacctggtgacccagggaactggcctcgtcttcatcgtctaccctactgtcttcaacgttctcggacaa

SEQ ID NO: 39607 - DNA, 96 bp, synthetic construct
  source 1..96: mol_type = other DNA
ctgggtatccccttcattgacgctgtgttcgagaatatgagcgcctggaccggctccggaatgacattctttatcaacgtcgagatcctccctaaa

SEQ ID NO: 39608 - DNA, 99 bp, synthetic construct
  source 1..99: mol_type = other DNA
gggctgccaatcttcgactctgtcaacctgaccttcacaagcatttccaccggcggcatgagtatcaagaatgccaatgttggcttctaccaaaacgac

SEQ ID NO: 39609 - DNA, 102 bp, synthetic construct
  source 1..102: mol_type = other DNA
aataagactgtcccaatcgaagagctgttcactatcgtttccgcaataacaacgactggggcgaacgtagtgccaccaaccgacctcgctacgtggaaatcc

SEQ ID NO: 39610 - DNA, 96 bp, synthetic construct
  source 1..96: mol_type = other DNA
tacggctacgaccccttcaccgccctgttcgacgtgatttcattgcaaagcaacaacggcctgtctactggaattgtgttcggtggacttcctaca

SEQ ID NO: 39611 - DNA, 90 bp, synthetic construct
  source 1..90: mol_type = other DNA
ttcttcaagggttggggcgctgaccccaacaccttctttaccgccacattattgcaaagccaggagtccgtgtctgggctgaccacattc

SEQ ID NO: 39612 - DNA, 75 bp, synthetic construct
  source 1..75: mol_type = other DNA
ctgaccctccctggcgccatgatcgggctgaaggagcttttcgctcccgattggagcctcctgctggacttcgat

SEQ ID NO: 39613 - DNA, 108 bp, synthetic construct
  source 1..108: mol_type = other DNA
ctcggatatatgagtttgcaatccgggaccgctgtggccgacctggtcacgcaaggaactggactcgtgttcatcgcctaccctactgtcctgaacgtgttgggacag

SEQ ID NO: 39614 - DNA, 90 bp, synthetic construct
  source 1..90: mol_type = other DNA
ttctttaagggatggggcgccgaccccaacacctacttcgctacgactctcttgcaaagtcaggagaccttttccgggatcaccaacttc

SEQ ID NO: 39615 - DNA, 72 bp, synthetic construct
  source 1..72: mol_type = other DNA
accctgcctggcgccatgatcggacttaacgagctgttttctcccgactggagcctgcttctcgactttgac

SEQ ID NO: 39616 - DNA, 108 bp, synthetic construct
  source 1..108: mol_type = other DNA
ctgggatatatgtccctacaatccggaactgcagtcgccgacctggtggctcagggcacagggctcgtgttcgtggcctaccctacggtgctcaacgtgttgggacag

SEQ ID NO: 39617 - DNA, 69 bp, synthetic construct
  source 1..69: mol_type = other DNA
ggagagtggatcattagcatctttgggcattccatgatttcttctttcctggtcgacggcgtgattggc

SEQ ID NO: 39618 - DNA, 234 bp, synthetic construct
  source 1..234: mol_type = other DNA
atgcacaactacaaatccaagaacaacaagatcaattacaattacatagtgaacgagaagcacaacctggtcggaaccggcaatatcgatgctgactacaactggtggggcaagaataagctcttcaaagtctctaaaagcttcaaaatcaaaaagttcgttgttatgtacctgaacgctcctcataatctgaagttcaacaagacatacaagatcaacatactgttcaaagac

SEQ ID NO: 39619 - DNA, 63 bp, synthetic construct
  source 1..63: mol_type = other DNA
aagattagcaatatccttggcaaagtggacttcgcatacgaaatgataagcaaccccatacgg

SEQ ID NO: 39620 - DNA, 48 bp, synthetic construct
  source 1..48: mol_type = other DNA
accgtcaagatcgtgaaaggctattacgacaactttctgacattcatc

SEQ ID NO: 39621 - DNA, 36 bp, synthetic construct
  source 1..36: mol_type = other DNA
gccttcaagaacaatgtgacctttctgcggaagaaa

SEQ ID NO: 39622 - DNA, 195 bp, synthetic construct
  source 1..195: mol_type = other DNA
aagatcaaactgtacttcaagaagcatccaaagtacctctatggagccagcaaggcagcgcaaaaaatactgtggccaggatacaagagcaagcgaagttattctaataagaacacaaagcctatcaagcactccaccaagaatatcctgtacaagggcctcaacttcatcaagaacaagatcctgaaaaagagc

SEQ ID NO: 39623 - DNA, 30 bp, synthetic construct
  source 1..30: mol_type = other DNA
ctctacgtgctggacttcagcatcccactg

SEQ ID NO: 39624 - DNA, 51 bp, synthetic construct
  source 1..51: mol_type = other DNA
agccttgatgcacccattaatccgatacaagatactatcgtattcaacctc

SEQ ID NO: 39625 - DNA, 45 bp, synthetic construct
  source 1..45: mol_type = other DNA
atcgacacctacgtccaacgcgacctgagcttctataccattcct

SEQ ID NO: 39626 - DNA, 33 bp, synthetic construct
  source 1..33: mol_type = other DNA
tacatcgatattggttccgttgacaagatcagc

SEQ ID NO: 39627 - DNA, 51 bp, synthetic construct
  source 1..51: mol_type = other DNA
catttcccgcaagaagaagcggacttcatttttaacttgcctataaatgga

SEQ ID NO: 39628 - DNA, 132 bp, synthetic construct
  source 1..132: mol_type = other DNA
tataaccccggcgtgctgactgcctcttcctactcacaattacatcaaatagtgactgggcagtttaccaacgctcaccctatcttccataccctcttcgagaaagcctgtatcaagatcttcaaaagtccc

SEQ ID NO: 39629 - DNA, 228 bp, synthetic construct
  source 1..228: mol_type = other DNA
atttacgacgtggagaatgacacttccaacatcaagaccaatgatgccttcgaggagggcattaacctggagaacgctaagaaccagtttttttcgtctatcaacgataatccgagcaatgaactggagaagaccgatagtatcaacattaagaactccaagtataacctggtggactccttcgtcaacctgttccgggagaacttcatcctcgacggcctcttcaat

SEQ ID NO: 39630 - DNA, 93 bp, synthetic construct
  source 1..93: mol_type = other DNA
tccttcttcaagggctggggcgccgatcccaacgcttacttcactaccacattgctgcaatcatccgatagtctaagtggactcctgagcttt

SEQ ID NO: 39631 - DNA, 75 bp, synthetic construct
  source 1..75: mol_type = other DNA
ctgaccctgcccggagctagcgttggtctcgccgagctgtttcaccctgattggtccctcctgggaaacttcgac

SEQ ID NO: 39632 - DNA, 117 bp, synthetic construct
  source 1..117: mol_type = other DNA
ctgggctatatgagccttcaatccggaacggccgttgccgacctggtgactcaggggaccgggctggtttttattgtgtacccgacggttttcaacgtgctgaattggggcggttgg

SEQ ID NO: 39633 - DNA, 174 bp, synthetic construct
  source 1..174: mol_type = other DNA
aacagcagcagtaacattctgggccacaattaccgggacgcatacctgtaccttatacaagcctatcactttgccgggacacccatcggcggatatgattacgtcaactattactcccctctgatcccattcctcacatcactactgttccgcctgggatttgttagtgaagcc

SEQ ID NO: 39634 - DNA, 141 bp, synthetic construct
  source 1..141: mol_type = other DNA
atcaatggcctgcctttcgggtttattaatcaagcacgcgaagtttccactgaaacggtatcctcgaacacagctgccactcccgcaaacgacctcttcttttatataagctctctgccacgattcatttactctccgcag

SEQ ID NO: 39635 - DNA, 54 bp, synthetic construct
  source 1..54: mol_type = other DNA
agccggctgctgtccaagcaatgcgagtacaaacggacctggagactctctcag

SEQ ID NO: 39636 - DNA, 30 bp, synthetic construct
  source 1..30: mol_type = other DNA
ctttatgtgctcgatttttctattcctctg

SEQ ID NO: 39637 - DNA, 45 bp, synthetic construct
  source 1..45: mol_type = other DNA
ctttacgaccccaacaaccctgttcgagataccatcgtcctgaac

SEQ ID NO: 39638 - DNA, 45 bp, synthetic construct
  source 1..45: mol_type = other DNA
atcaacacatacgtgcaaagagacctgagctttttcaccattccc

SEQ ID NO: 39639 - DNA, 33 bp, synthetic construct
  source 1..33: mol_type = other DNA
tacatcgacatcgatagcgtggacaagatcagc

SEQ ID NO: 39640 - DNA, 57 bp, synthetic construct
  source 1..57: mol_type = other DNA
cggtttcccccggaaggtaccgagtccttcatcttccacatgcctgtgcatggactc

SEQ ID NO: 39641 - DNA, 93 bp, synthetic construct
  source 1..93: mol_type = other DNA
agcttctttaagggctggggagccgaccccaacacatacttcaccactaccttacttcaatcctcgaactctatggacggactgttcaacttt

SEQ ID NO: 39642 - DNA, 75 bp, synthetic construct
  source 1..75: mol_type = other DNA
ctgaccctcccgggcgcttccatcggactctctgagctgttccaccctgactggagcctgctgggtaactttgag

SEQ ID NO: 39643 - DNA, 111 bp, synthetic construct
  source 1..111: mol_type = other DNA
ctgggctacatgtctctgcaaagcgggacagcggtgtctgatctggtggtgcaaggcaccggcctcgtgttcattgcctaccctactgtctttaatgtgctgggacagtgg

SEQ ID NO: 39644 - DNA, 93 bp, synthetic construct
  source 1..93: mol_type = other DNA
tcctttacaaaggcctggggcgccaaccccgacctctacttcaccaacaacgtgctgcacgtggctaactcttgggacggagtattctctata

SEQ ID NO: 39645 - DNA, 72 bp, synthetic construct
  source 1..72: mol_type = other DNA
ctcactctccccggggcttcagtcggatatactcaaattttcacccctgactggagcgccctgacgaacctg

SEQ ID NO: 39646 - DNA, 105 bp, synthetic construct
  source 1..105: mol_type = other DNA
tttatgactgtgtcctctgggatcgccttcaatgagctggtcacaagtggaagcggcctcgccttcgttgtatttccccaagtgtttaacaccatgggacctgca

SEQ ID NO: 39647 - DNA, 87 bp, synthetic construct
  source 1..87: mol_type = other DNA
tcatttaacttcggctggggcaacgacccagctagcttcttcactaattatgtcggcggttcctcatcgagcagtcttacaaccatc

SEQ ID NO: 39648 - DNA, 69 bp, synthetic construct
  source 1..69: mol_type = other DNA
actcttcctgggttccaagttggaattaccaccctgctgacacccaactggagcgcactcctggacatc

SEQ ID NO: 39649 - DNA, 105 bp, synthetic construct
  source 1..105: mol_type = other DNA
ggctatatgtcgatgcactcctcgatccctatgaatgagctgatcagtcaagggtctggcctcatcttcatcgtgttccctcaaatttttaacaccatgggaatg

SEQ ID NO: 39650 - DNA, 96 bp, synthetic construct
  source 1..96: mol_type = other DNA
ctctcgttttctaagggctggggcgctaatcccgataccttcttcgccaacaccctactgcactctacggatagtgtttcgggccttctcacattt

SEQ ID NO: 39651 - DNA, 75 bp, synthetic construct
  source 1..75: mol_type = other DNA
ctgaccctgcccggcgccagcatcgggctgtctgagctcttcaaccccaattggtccctcctgggacactttgag

SEQ ID NO: 39652 - DNA, 111 bp, synthetic construct
  source 1..111: mol_type = other DNA
ctgggctatatgtccatgcaatcgggcacggcagtggcagaccttgtgacacagggcaccgggcttgtatttgtcgtatacccgacggtcttcaacgtcctggggcagtgg

SEQ ID NO: 39653 - DNA, 30 bp, synthetic construct
  source 1..30: mol_type = other DNA
tacatcctgaacttcagccatcctttggcc

SEQ ID NO: 39654 - DNA, 48 bp, synthetic construct
  source 1..48: mol_type = other DNA
agcttatatgtaccaagcaccatccaatacgatcactacatttccaac

SEQ ID NO: 39655 - DNA, 51 bp, synthetic construct
  source 1..51: mol_type = other DNA
ttctttattgataattacgtagatagaaatatcagtttctttaacattccg

SEQ ID NO: 39656 - DNA, 36 bp, synthetic construct
  source 1..36: mol_type = other DNA
tacatcgatatcgacgcggtatcgaagattaacctg

SEQ ID NO: 39657 - DNA, 57 bp, synthetic construct
  source 1..57: mol_type = other DNA
gagtttcctgtctatgacacccctaagtttgtgtatagtatacccatcgatggaatc

SEQ ID NO: 39658 - DNA, 93 bp, synthetic construct
  source 1..93: mol_type = other DNA
tcctttaccaaggcctggggcgcgaatccagacctctacttctcgaacaacgtcctgcacgcgactgactccgtgtctggcatcttcaccatt

SEQ ID NO: 39659 - DNA, 72 bp, synthetic construct
  source 1..72: mol_type = other DNA
ctgaccttgcctggagctagtatcggatacacgcaaatctttacccccaactggagcgcccttgggaatctg

SEQ ID NO: 39660 - DNA, 102 bp, synthetic construct
  source 1..102: mol_type = other DNA
ttcatggccctctcttccggcattccattcaacgaactcgttaccgaaggtaccgggcttgcctttgttgtctttccacaagtgttcaacatcatgggtcct

SEQ ID NO: 39661 - DNA, 171 bp, synthetic construct
  source 1..171: mol_type = other DNA
cagaaaccttttatgcatatcgatgagtggtttacgcaaggaattctcaatatttcctttaaagagatgatccatctcaccgccaaggatgtgcatcccccgctctattatgccatcgctctggtccctgtctatttactcaagtggctgcatataccgttctcaatgatg

SEQ ID NO: 39662 - DNA, 99 bp, synthetic construct
  source 1..99: mol_type = other DNA
aagcagatcaacagcgtttccggctcttactggatcgacgagatcactttcgagacatttgtgcaattttttgcatctattttcatggatactagtgag

SEQ ID NO: 39663 - DNA, 93 bp, synthetic construct
  source 1..93: mol_type = other DNA
agctttactaaggcttggggcgccaaccccgacgtcttctttacccaaaacgttctccacgccaccgagtccatgaccgggctgttcaccatt

SEQ ID NO: 39664 - DNA, 72 bp, synthetic construct
  source 1..72: mol_type = other DNA
ctgacgctgcctggtgcctctgttggttactcccaaatattcactcccgactggtccgccctcacgaacctg

SEQ ID NO: 39665 - DNA, 105 bp, synthetic construct
  source 1..105: mol_type = other DNA
tttatggcggtgactactgccatcccttttaatgagctcgtgacaagcggctccgggctggccttcgtcgtcttcccccaagttttcaacattatgggagatgcc

SEQ ID NO: 39666 - DNA, 273 bp, synthetic construct
  source 1..273: mol_type = other DNA
atgctgatcgaaggttacggcacatcaatcgacagctccaactttactagcaacaacgtcaccaagaacggcggagccatctacatcttgggctctaacacacgaatctcagactcctccctggagttcaacaacgccattcccgacaaggccgacatctctcgcggcctcggcggagctctgtacatcaaaggaaacgacaacatcgtggacggctctaacttcacctttaacaccgctagaaacggctctgctatctatactgacggaata

SEQ ID NO: 39667 - DNA, 93 bp, synthetic construct
  source 1..93: mol_type = other DNA
tccatgttcaaggcttggggcgccgaccccaacttattctattcctcgacactgacccactctaccactaatgtgtcgggagtcctcaacttc

SEQ ID NO: 39668 - DNA, 72 bp, synthetic construct
  source 1..72: mol_type = other DNA
acccttcctggcgcctccatcgggctggctgagctctacacacccgactggagcctcctgactgacttcaac

SEQ ID NO: 39669 - DNA, 108 bp, synthetic construct
  source 1..108: mol_type = other DNA
ctcggatatatgagcttgcaaactgccacacccgtgtccgacatcgtctcccaaggcactggcctgattttcgtcgtgtaccctgctgtgttcaacatccttggacag

SEQ ID NO: 39670 - DNA, 93 bp, synthetic construct
  source 1..93: mol_type = other DNA
tcctttactaaggcatggggcgccaaccccgacctctacttcgccaacaatgtcctgcacgctaccgagtccgtgtctggcatcttcaccatc

SEQ ID NO: 39671 - DNA, 69 bp, synthetic construct
  source 1..69: mol_type = other DNA
acactgcccggggcttccctgggctatactcaaatctttaaccctgactggagcgccctcaccaacctg

SEQ ID NO: 39672 - DNA, 102 bp, synthetic construct
  source 1..102: mol_type = other DNA
ttcatggccctctcttctggagtgccatttaatgaactggtaactgaggggaccggtctggcctttgtcgtattcccgcaagtcttcaacacaatgggacct

SEQ ID NO: 39673 - DNA, 171 bp, synthetic construct
  source 1..171: mol_type = other DNA
cagaagccctttctccatatcgacgagtggtttaccaagggcctgatgaccctgagtctccgcgacatggtccatatcaccgccggcgatgtccaccctccattgtattatataaccgtttgggctcctgctaaggtcttgaacctgctgcatattaaatttgacaaaatc

SEQ ID NO: 39674 - DNA, 105 bp, synthetic construct
  source 1..105: mol_type = other DNA
tacaagcagaccattgaggacaagggcggcaattgggctaacaccatctcactggacgccatcttcgaattctttagctcggccttctcttctagctccgataca

SEQ ID NO: 39675 - DNA, 168 bp, synthetic construct
  source 1..168: mol_type = other DNA
ctgaaccatgtgatcgtgcactacgacgagtacttcaccctcacactgctcaatctgcctgtcatggatatgatcactattaccgctggcgatgtgcaccctccactgtactatctgatggccgaagtgttcgtcaacatcacaaagcctttgggctgggatctcctg

SEQ ID NO: 39676 - DNA, 96 bp, synthetic construct
  source 1..96: mol_type = other DNA
attagccagctagagactgtgcaccacacctactggatccccggcatcacaatctcgacgatcattaacgccctcgggtacttcgcttacaacaac

SEQ ID NO: 39677 - DNA, 36 bp, synthetic construct
  source 1..36: mol_type = other DNA
gtggctggtctgggtgccgagccgttggccgccatc

SEQ ID NO: 39678 - DNA, 45 bp, synthetic construct
  source 1..45: mol_type = other DNA
ctgaagatcatgggcgcaagtagtgttctcaaatacgccatggac

SEQ ID NO: 39679 - DNA, 33 bp, synthetic construct
  source 1..33: mol_type = other DNA
accatcgtgagcggcagcctggccgtggccgtg

SEQ ID NO: 39680 - DNA, 63 bp, synthetic construct
  source 1..63: mol_type = other DNA
cagatcgcctttatcttctcctactcggagtcttcctcccacctggaaccccttatcgcgagc

SEQ ID NO: 39681 - DNA, 39 bp, synthetic construct
  source 1..39: mol_type = other DNA
attagccagatctctgccgacctgaacaccgatgtttcc

SEQ ID NO: 39682 - DNA, 171 bp, synthetic construct
  source 1..171: mol_type = other DNA
gtgatgggcggcatctcaacggcagtcgatacatacgcgccggagcactccggcgatgagcagttccatcaagacgtttatgactacttccaaaaagtcggaaatatagacgacgtgaaggcacaagatagcatcatcgtcaacaccgccgacatcataatacagaatgct

SEQ ID NO: 39683 - DNA, 123 bp, synthetic construct
  source 1..123: mol_type = other DNA
gtgccaggcgtacagtatttcggcggacacaacccttctctgatttcttccatgctccctgctagccttaacgggacgctcgcaagcatgttcaataccggaatcgtctatgtgttttccgat

SEQ ID NO: 39684 - DNA, 72 bp, synthetic construct
  source 1..72: mol_type = other DNA
acaatcggcagcctgaatattaccgatatcgtctatgtcttgaatcacaacttggtagacccactttcaccc

SEQ ID NO: 39685 - DNA, 42 bp, synthetic construct
  source 1..42: mol_type = other DNA
atcgtcaccaacgtcttttcaagctttattggcggtcttatc

SEQ ID NO: 39686 - DNA, 33 bp, synthetic construct
  source 1..33: mol_type = other DNA
accaagagcttctccactgctgaggaatacggt

SEQ ID NO: 39687 - DNA, 39 bp, synthetic construct
  source 1..39: mol_type = other DNA
gggcccatcgccggcggcctgttcaacggaaatgtgtac

SEQ ID NO: 39688 - DNA, 45 bp, synthetic construct
  source 1..45: mol_type = other DNA
ctgctcagcatcacaaccttcgacatcgcgcaaaatggttttttc

SEQ ID NO: 39689 - DNA, 39 bp, synthetic construct
  source 1..39: mol_type = other DNA
cccgacatcgccaatgagctgaactttagtgctgaggct

SEQ ID NO: 39690 - DNA, 33 bp, synthetic construct
  source 1..33: mol_type = other DNA
ctccacctccaatatattctggacatcgaagca

SEQ ID NO: 39691 - DNA, 54 bp, synthetic construct
  source 1..54: mol_type = other DNA
attggcaaccagcagctgggccccgatcacatcgaccacctgttcgtccaagcc

SEQ ID NO: 39692 - DNA, 87 bp, synthetic construct
  source 1..87: mol_type = other DNA
tccagcatcgacttctcttggggctccgataccgccctctacttcgagaaggttggcggctctagcgacctgagcacaatgaccact

SEQ ID NO: 39693 - DNA, 72 bp, synthetic construct
  source 1..72: mol_type = other DNA
atctccttacctggttccggaattggcatcaatgccctcttgaaccctaaatgggaagcgctgacaaacatc

SEQ ID NO: 39694 - DNA, 105 bp, synthetic construct
  source 1..105: mol_type = other DNA
ggctacatgagctctacatccggcattcctattgtgaacctcatcaaggaaggcaccggactgatcttcgtggtcttcccaactatctttaatatcatgggtccc

SEQ ID NO: 39695 - DNA, 90 bp, synthetic construct
  source 1..90: mol_type = other DNA
ttcacaaaggcctggggcagcaaccccgacctctacttctctcaaaatgtcctgcacgcttctgatagtatctccggcatcttcaccatc

SEQ ID NO: 39696 - DNA, 75 bp, synthetic construct
  source 1..75: mol_type = other DNA
accctgcccggcgcaagcattggatactcccaaatctttagcccaaactggagcgctctcgcggacccagacgat

SEQ ID NO: 39697 - DNA, 105 bp, synthetic construct
  source 1..105: mol_type = other DNA
tttatggccatgactagcggcatcgcatttaacgacctcgtgaccgaaggcaccgggctggccttcgtcgtgtttccacaagcccttaatatgatgcagacagga

SEQ ID NO: 39698 - DNA, 114 bp, synthetic construct
  source 1..114: mol_type = other DNA
gtccagtatttcggcggacataatcctagtctactgacctcctctctgcctgccaacctcgtgaacaccctcgtggctgggtacaacacaggcatcgtctacgcgttcgctaat

SEQ ID NO: 39699 - DNA, 75 bp, synthetic construct
  source 1..75: mol_type = other DNA
ggcaccatcggatcggtcaacattgccgacatcattttcgtgatctccaacaagttcgtacaaccgtatagtcca

SEQ ID NO: 39700 - DNA, 45 bp, synthetic construct
  source 1..45: mol_type = other DNA
aacatcgtcaccgacgtgttcatcccctttgctggcggacttatt

SEQ ID NO: 39701 - DNA, 45 bp, synthetic construct
  source 1..45: mol_type = other DNA
atgctgggttttggcggcctgtttgggtccagccctatcggaatc

SEQ ID NO: 39702 - DNA, 42 bp, synthetic construct
  source 1..42: mol_type = other DNA
ctggcgcctgtatcatctctctcggggagtgacatcagtggt

SEQ ID NO: 39703 - DNA, 201 bp, synthetic construct
  source 1..201: mol_type = other DNA
aggtactccacacccactctgctgcactcttggcgctcatccctccgctttatcgattccacggcgcaattacactatatcgctgatcaccccgtattcacccttaagttcatctctcaactcttcacatataacttctcccatattgtatatggtgccttcaactttttcggcgccgcccaaaaagtgcattactgtgac

SEQ ID NO: 39704 - DNA, 48 bp, synthetic construct
  source 1..48: mol_type = other DNA
acctgggccagcgtcgggtttctgaacctgggcatcactacaaggtac

SEQ ID NO: 39705 - DNA, 30 bp, synthetic construct
  source 1..30: mol_type = other DNA
gtgagcgaatgtggttccgcttccctgatc

SEQ ID NO: 39706 - DNA, 45 bp, synthetic construct
  source 1..45: mol_type = other DNA
ctgctcgcccttaacatctacgagcccgcaattgaacctgctctg

SEQ ID NO: 39707 - DNA, 33 bp, synthetic construct
  source 1..33: mol_type = other DNA
ctattaaattctccacctgacctggctgctttt

SEQ ID NO: 39708 - DNA, 60 bp, synthetic construct
  source 1..60: mol_type = other DNA
cagattacccacctgttcgtggtcaacaacgacatggccgagatcgccgctctcaacttc

SEQ ID NO: 39709 - DNA, 168 bp, synthetic construct
  source 1..168: mol_type = other DNA
ctgaaccactacattctgcacgtggatgagtacttcaccatctccgtcctcacactgccccttggggacatcgtgaacatcacctcttgggacgtgcatcctccactgtattacatcctcggcaagattgccgtcaagatcgctgaggccattggaatcgacagcatg

SEQ ID NO: 39710 - DNA, 102 bp, synthetic construct
  source 1..102: mol_type = other DNA
ccgctaattagacaaatgacccaagtcagagcagcttactggatcaggcaggttaatcccgacctcttcatcaagtctcttggctacattgcctacgcaaac

SEQ ID NO: 39711 - DNA, 114 bp, synthetic construct
  source 1..114: mol_type = other DNA
atccagtacttcggcggtcacgaccctgcactcctcgctagtagcctgccctctaatcttgtcggaacactggtcgcctcctacaacaccggcattgtctatgtcttcgaaaat

SEQ ID NO: 39712 - DNA, 72 bp, synthetic construct
  source 1..72: mol_type = other DNA
acaattggttccgtcaatattaacgatattatctttgccatctcaaataactatgtgaatccctatgcacct

SEQ ID NO: 39713 - DNA, 45 bp, synthetic construct
  source 1..45: mol_type = other DNA
aacattgtgaccgacgtcttcatcccctttgctggaggccttatt

SEQ ID NO: 39714 - DNA, 114 bp, synthetic construct
  source 1..114: mol_type = other DNA
gtccagtacttcggaggccacaaccctagtcttctggcctctagcctaccttcaaacctcctgggcacactcgccgctagctataacaccggcatcgtgtacattttcggtaac

SEQ ID NO: 39715 - DNA, 72 bp, synthetic construct
  source 1..72: mol_type = other DNA
accattggctccgtcaatatcaacgacatcatttacgccatctccaataacttcgttaacccctattcacct

SEQ ID NO: 39716 - DNA, 45 bp, synthetic construct
  source 1..45: mol_type = other DNA
aacatcgtcaccgacgtgttcatccctttcgctggaggactgatt

SEQ ID NO: 39717 - DNA, 39 bp, synthetic construct
  source 1..39: mol_type = other DNA
ccctattacatggacgatttcgctgtgtcttcggctaca

SEQ ID NO: 39718 - DNA, 30 bp, synthetic construct
  source 1..30: mol_type = other DNA
gtccagaacgtggcctactatagctctaca

SEQ ID NO: 39719 - DNA, 48 bp, synthetic construct
  source 1..48: mol_type = other DNA
ctggccaacggcaagattacccacaatcagatctcagtaaattcgttc

SEQ ID NO: 39720 - DNA, 90 bp, synthetic construct
  source 1..90: mol_type = other DNA
tttacaaaggtctggggcagcaaccccgatctgttctttagtaacaatgtcctgcactctaccgactccatcactggcattttcaccatc

SEQ ID NO: 39721 - DNA, 69 bp, synthetic construct
  source 1..69: mol_type = other DNA
accctgcctggggccagcatcggctatatgcaaatcttcactcccgactggaatgctctgacaaacctg

SEQ ID NO: 39722 - DNA, 105 bp, synthetic construct
  source 1..105: mol_type = other DNA
ttcatggccctatccacgggcctgaactttaaccaattggtgaccgagggcagcggcctggctttcatcgtgttcccccaagtcttcaacatcatgggaccttct

SEQ ID NO: 39723 - DNA, 102 bp, synthetic construct
  source 1..102: mol_type = other DNA
tctggggacctgagcttcatcgacgcttactttgagggcatgtccggaatcacctccaccggcttcacaatgtacgccaacgtgcccattgcgatatcttac

SEQ ID NO: 39724 - DNA, 99 bp, synthetic construct
  source 1..99: mol_type = other DNA
ggactggacctgtttactgcgatttgctactccttctctgggctgggcaccggcgggttttcgtccgatcccaactatctcaattacttttctaatcca

SEQ ID NO: 39725 - DNA, 117 bp, synthetic construct
  source 1..117: mol_type = other DNA
cagaacaacatctacgatcacaatattcttgtgaccctcaaccacgccctttttcaagtgataagcgtgctgacatccaccggttttcaaacaacagacatcaacgcatggcctgcc

SEQ ID NO: 39726 - DNA, 93 bp, synthetic construct
  source 1..93: mol_type = other DNA
tgcaacgacttcaagattgcctactccattgtggctggcagcatcggcaacaccggcctggggccttcttacatcaatccgtccataccattc

SEQ ID NO: 39727 - DNA, 93 bp, synthetic construct
  source 1..93: mol_type = other DNA
agcttcaccaaggcttggggctctaaccccgacctgtacttcaccaacaacgtacttcaagcgacggactccataagtggaatatttaccatt

SEQ ID NO: 39728 - DNA, 72 bp, synthetic construct
  source 1..72: mol_type = other DNA
ctgaccctccctggcgcctccatcgggtacacgcaaatcttcacccctgattggagcgctctgacgaatctt

SEQ ID NO: 39729 - DNA, 105 bp, synthetic construct
  source 1..105: mol_type = other DNA
ttcatgaccctcacctccggcatcccatttaacgagctggtgacaagcggaaccggcctggccttcgtggtcttccctcaagtattcaatacaatgggtcctgca

SEQ ID NO: 39730 - DNA, 93 bp, synthetic construct
  source 1..93: mol_type = other DNA
tctgtcaccaaggcctggggagcaaaccccgacctctacttcgctaacaacgtgctgcacgccactgactccatgagcggcctgttcaccatc

SEQ ID NO: 39731 - DNA, 72 bp, synthetic construct
  source 1..72: mol_type = other DNA
ctgaccctgcctggcgcctccattggctatagtcagatttttacgcccgattggtctgctctcggcaacttg

SEQ ID NO: 39732 - DNA, 105 bp, synthetic construct
  source 1..105: mol_type = other DNA
ttcatgacgttcactagcggcatccccttcaatgagctcgtcaccgagggcaccggactggccttcgtggtcttcccacaagtattcaacacaatgggcgatgta

SEQ ID NO: 39733 - DNA, 54 bp, synthetic construct
  source 1..54: mol_type = other DNA
tacattcttgacttggttaatatacccaagagcctgctcgagacatccaagacc

SEQ ID NO: 39734 - DNA, 54 bp, synthetic construct
  source 1..54: mol_type = other DNA
atcatcttcaccctcctgaacattacatcaccccaacaacaaacttacatcgaa

SEQ ID NO: 39735 - DNA, 96 bp, synthetic construct
  source 1..96: mol_type = other DNA
ctgagcttcaccaaggcttggggagccaatcccgacctctacttcacaaacaacgtgctgcacgccactgactccatgagcggcattttcaccatt

SEQ ID NO: 39736 - DNA, 72 bp, synthetic construct
  source 1..72: mol_type = other DNA
ctcacactgcccggcgcctccgttggttacacccaaatcttcacgcctgactggagcgcgttgaccaacctg

SEQ ID NO: 39737 - DNA, 108 bp, synthetic construct
  source 1..108: mol_type = other DNA
ggatttatgactgtgacatccggaatcccattcaacgagctcgtcacatccgggacaggcctggccttcgttgtgtttccccaagtttttaataccatgggacctgct

SEQ ID NO: 39738 - DNA, 171 bp, synthetic construct
  source 1..171: mol_type = other DNA
ctcaatcactacattatgcacgtggatgagtactttaccatgagcgtcctgacgctgccgatcgctgatgtgatctccatcacttcttgggatgtgcatccacctgtgtactatatcctcgccaaaattgctgtaatgatggctgaagcggtcggcatggattctctgcat

SEQ ID NO: 39739 - DNA, 96 bp, synthetic construct
  source 1..96: mol_type = other DNA
atcaggcagatgacccaggtacatgctgcctactggattcgtcaagttaaccccgagatgctggttaagagtgtcggctacatcgcttatgctgac

SEQ ID NO: 39740 - DNA, 93 bp, synthetic construct
  source 1..93: mol_type = other DNA
tccttcaccaaggcctggggaagcaatccagacctctacttcacaaacactgttttacaatccactgaaagcgttagcggactgttcaccatc

SEQ ID NO: 39741 - DNA, 72 bp, synthetic construct
  source 1..72: mol_type = other DNA
ctcaccctgcccggtgcaagcgctggttacacccaaatatttacacctgactggagtgctctggggaacttc

SEQ ID NO: 39742 - DNA, 108 bp, synthetic construct
  source 1..108: mol_type = other DNA
ggatttatgaccgtcacctccggcatcccattcaacgagctggtgaccagcggcacagggctcgctttcgttgtttttccccaagtcttcaacacaatgggacctgct

SEQ ID NO: 39743 - DNA, 99 bp, synthetic construct
  source 1..99: mol_type = other DNA
tctctcgacattcccttcgtcgatgctctgtttgagaacatgtccgcctggaccggttctggcatgaccttcttcgtgaatgtggagatcctgcctaag

SEQ ID NO: 39744 - DNA, 99 bp, synthetic construct
  source 1..99: mol_type = other DNA
gggctgcctatcttcgacgccattaacctgaccttcacatcaatcagtaccggtggcatgtccatcaagaacgctaatgttggattttaccaaaactca

SEQ ID NO: 39745 - DNA, 102 bp, synthetic construct
  source 1..102: mol_type = other DNA
aataagatggtgcctatcgaagaacttttcaccatcgttagcgcaatcacaacaactggagcgaatgtggtgcccccatacgaactagcgagatggtcctca

SEQ ID NO: 39746 - DNA, 96 bp, synthetic construct
  source 1..96: mol_type = other DNA
tacggatacgacccctttaccgccctgttcgacgtgattagcatacagtctaacaacggcctttcaactggaatcgtgttcggtggtctgcctatg

SEQ ID NO: 39747 - DNA, 96 bp, synthetic construct
  source 1..96: mol_type = other DNA
ctggatatttccttcatcgacgctttctttgagaacatcagcgcgtggacgggctccgggctcacgatgttttcggacgtggaatctctgccaatg

SEQ ID NO: 39748 - DNA, 99 bp, synthetic construct
  source 1..99: mol_type = other DNA
ggcctgcctctgttcgactccattaacctgaccttcactacaatctctaccggcggaatgagcatcaagaacgccaacgttggcttttacaataacaac

SEQ ID NO: 39749 - DNA, 102 bp, synthetic construct
  source 1..102: mol_type = other DNA
acccacatggcaccgatgaacgttatcttccatatcgtttctgctgtgacgaccaccggcgccaatatcgcctcctcttccgaacttgcttcatgggctccc

SEQ ID NO: 39750 - DNA, 96 bp, synthetic construct
  source 1..96: mol_type = other DNA
tacacaaacgacccaataaactcgttgttcgacgtaactagcactatcggcaacgtcgggctatccaccggcatgatcaatggatctttggctacc

SEQ ID NO: 39751 - DNA, 93 bp, synthetic construct
  source 1..93: mol_type = other DNA
tccatgttcaagggctggggcgctgaccccaatgcctttttcaccacaaccctgacacactctagcacaagcgttagcggaatcctcaacttc

SEQ ID NO: 39752 - DNA, 75 bp, synthetic construct
  source 1..75: mol_type = other DNA
gtgactctccctggggcctccatcgggctggctgagctgtaccggcccaattggtctctccttagcgaccctaac

SEQ ID NO: 39753 - DNA, 108 bp, synthetic construct
  source 1..108: mol_type = other DNA
ctgggctacatgtcacttcaaaccgccactcctgtcggggacctcgtatcccaaggcaccgggcttatcttcattatctatcccgctatcttcaacatcttgggacaa

SEQ ID NO: 39754 - DNA, 33 bp, synthetic construct
  source 1..33: mol_type = other DNA
atccacgtgctgcatttctccattccattgtcc

SEQ ID NO: 39755 - DNA, 48 bp, synthetic construct
  source 1..48: mol_type = other DNA
ctttatgcgccaggcgccgtcgagcagacagtgatcaccttcaacctg

SEQ ID NO: 39756 - DNA, 54 bp, synthetic construct
  source 1..54: mol_type = other DNA
gtcatcttcgaagagagctacgtggttcgcgattacggctttctcgttcttccc

SEQ ID NO: 39757 - DNA, 36 bp, synthetic construct
  source 1..36: mol_type = other DNA
tacctgattgacgttggcgtgaccaacaagatcaat

SEQ ID NO: 39758 - DNA, 57 bp, synthetic construct
  source 1..57: mol_type = other DNA
atctttcccgcctctgaggtgccaaccctgttcattggctcctttcccatcaacggc

SEQ ID NO: 39759 - DNA, 93 bp, synthetic construct
  source 1..93: mol_type = other DNA
tcctttactaaggcctggggcgctaaccccgacctctacttcgccaacaacgtgctgcacgcaaccgacagcatgtctgggctgttcaccatc

SEQ ID NO: 39760 - DNA, 69 bp, synthetic construct
  source 1..69: mol_type = other DNA
accctgcccggcgccagcattgggtacacccaaatatttacacctgactggtccgctctgaccaacctg

SEQ ID NO: 39761 - DNA, 105 bp, synthetic construct
  source 1..105: mol_type = other DNA
ttcatgacgttgagtagtggaatccccttcaatgagctcgtgactgagggtaccggactggcctttgtcgtgtttccacaagtgttcaacactatgggacctgcc

SEQ ID NO: 39762 - DNA, 99 bp, synthetic construct
  source 1..99: mol_type = other DNA
tctctggatatccactttgtggacgctctgtttgagaacatgagcgcgtggacagggtcggggatgaccttcttcgtcaacgtggagattctgccaaag

SEQ ID NO: 39763 - DNA, 99 bp, synthetic construct
  source 1..99: mol_type = other DNA
gggctgcccatcttcgacgccgtgaacctcaccttcacatctatttccactggcggcatgagcatcaagaatgctaacgtcggattctaccaaaatagt

SEQ ID NO: 39764 - DNA, 102 bp, synthetic construct
  source 1..102: mol_type = other DNA
aataagatggttcctattgaagagctgttcacaatcgtatctgccattaccactaccggagcaaacgtggtccctccatacgagctagcaagatggtcctcc

SEQ ID NO: 39765 - DNA, 96 bp, synthetic construct
  source 1..96: mol_type = other DNA
tacggatatgatcctttcaccgcattattcgacatcgtgtctttgcaatgcaacaacggtctaagtaccggaattgtcttcggaggtcttcctaca

SEQ ID NO: 39766 - DNA, 93 bp, synthetic construct
  source 1..93: mol_type = other DNA
agtttcacaaaggcttggggttccaaccccgacatctactttgccaacaacgtgctgcactctaccgattccatctctgggatcttcaccatt

SEQ ID NO: 39767 - DNA, 72 bp, synthetic construct
  source 1..72: mol_type = other DNA
ctcacactgcctggggcttctgagggatatacgcaaatcttcacgcccgactggtccgccttgactaacttg

SEQ ID NO: 39768 - DNA, 105 bp, synthetic construct
  source 1..105: mol_type = other DNA
ttcatggccgtgacctccggcattgcatttgacaacctcgtgaccgaggggagtggactggctttcgtcgtgtttccgcaagttttcaatatcatgggacctgcc

SEQ ID NO: 39769 - DNA, 93 bp, synthetic construct
  source 1..93: mol_type = other DNA
agttttaccaaggcttggggcgccaaccccgacctctatttctcgaacaacgtgctccacgccactgactccatgtctggtctcttcaccatc

SEQ ID NO: 39770 - DNA, 72 bp, synthetic construct
  source 1..72: mol_type = other DNA
ctgaccctgcctggcgctagcattggttacacccaaatctttacgcccgactggagtgctctgctgaacctg

SEQ ID NO: 39771 - DNA, 108 bp, synthetic construct
  source 1..108: mol_type = other DNA
gggtttatgacggcgactagcggcatccctttcaacgagctcgtgaccgagggcacaggcctggccttcgtggtcttcccccaagtctttaataccatgggtggagcc

SEQ ID NO: 39772 - DNA, 57 bp, synthetic construct
  source 1..57: mol_type = other DNA
cccgatgtgaccgtgttttcatctacggtcaacgtcatcttctacgacgttaactac

SEQ ID NO: 39773 - DNA, 51 bp, synthetic construct
  source 1..51: mol_type = other DNA
cccaagtacatcctggggattgcattcgattcgggaggagtcaccaccgga

SEQ ID NO: 39774 - DNA, 90 bp, synthetic construct
  source 1..90: mol_type = other DNA
gccggcatcagcgacctgatggtgcccaacgtcactgaggctaccgtggacaccgtgtccctcgatacaatgatgcaccactacaagcag

SEQ ID NO: 39775 - DNA, 60 bp, synthetic construct
  source 1..60: mol_type = other DNA
agcgggttcatgcccattgcgcaagaaataggcgtgtacctgatcgacaacgatgctggg

SEQ ID NO: 39776 - DNA, 36 bp, synthetic construct
  source 1..36: mol_type = other DNA
gccgaggtgctgggcggagagatcgctagcgaaaac

SEQ ID NO: 39777 - DNA, 291 bp, synthetic construct
  source 1..291: mol_type = other DNA
accccccctttttccttcatcgatgagtctgctcatttcacgcgagcggagttgatcagtgaaggctccctttatcccgagaccactgacaagggaatttatgtgaacgactattatttcccatttcaagagtcctactacggcgtcaccatcctgagcgaaaacaactataacaacccaatcactgatcacaagaactactggctgatgaccacgaaaacacccttctattcttacctgttgtccggtttcggaatattgatcgcaaaactgctgaacctcacggctatc

SEQ ID NO: 39778 - DNA, 189 bp, synthetic construct
  source 1..189: mol_type = other DNA
atcttcatctccaccactgcggcaaacaattccggcggtgtcatcaccaacatttccatgattggacaggcccggttcatcgcttctaaccctgctattatcctcactctgattaaggatatgatcgtgtcgatccctaacctgttcctgctcaagagcaatttcttccattataccgggtacaagggc

SEQ ID NO: 39779 - DNA, 54 bp, synthetic construct
  source 1..54: mol_type = other DNA
ctgatcggcacacctatgaagtcccaggtcattctcggagtgcagtcacgctat

SEQ ID NO: 39780 - DNA, 93 bp, synthetic construct
  source 1..93: mol_type = other DNA
tccttcaccaaggcctggggcagtaaccccgacctgtacttcaccaattccgtattgcattccactgactctatctctggcatcttcaccatt

SEQ ID NO: 39781 - DNA, 72 bp, synthetic construct
  source 1..72: mol_type = other DNA
ctgactctgcccggcgcctccgtcggctacacgcaaattttcacccctgactggagtgccctcacaaatctg

SEQ ID NO: 39782 - DNA, 102 bp, synthetic construct
  source 1..102: mol_type = other DNA
ttcatgacactcacctctggcattccattcaatgagctggttactagcggtaccggactggccttcgtagtcttcccccaagtgttcaacattatgggacca

SEQ ID NO: 39783 - DNA, 168 bp, synthetic construct
  source 1..168: mol_type = other DNA
ctgaaccacctggtctgccaaatagatgagtacttcactcggacaatcctgttgttaccggtatcagacattatcaccgtgaccgccggggacgtccatcctcctctttattacctcatgggcaaggcagtggcggaattaagcgctgtgctcggcgttgatctgctt

SEQ ID NO: 39784 - DNA, 96 bp, synthetic construct
  source 1..96: mol_type = other DNA
ctgagccagatggcccacgtgcacaatgggtactggatccccgagattacctgggagtccgctctcctgttctacggatactacggctacaacgaa

SEQ ID NO: 39785 - DNA, 36 bp, synthetic construct
  source 1..36: mol_type = other DNA
cagatgttcgaatgggacatcgagggatggacctac

SEQ ID NO: 39786 - DNA, 69 bp, synthetic construct
  source 1..69: mol_type = other DNA
agcggcgagttcgagttctctaacattaccgacaacattactgcgcccggctggtcctgggattttgaa

SEQ ID NO: 39787 - DNA, 90 bp, synthetic construct
  source 1..90: mol_type = other DNA
ggctcctttgaccaaagcaaccccgacgacgccgccctgatgacaaatgctatcctggcacctctctctgaggccgtgtttggagacacc

SEQ ID NO: 39788 - DNA, 93 bp, synthetic construct
  source 1..93: mol_type = other DNA
agttctctcaattttagctggggatccgattcggccctgtacttcgtcaagaacgttgggggttcctctaacctgagcaacatgggcaacttc

SEQ ID NO: 39789 - DNA, 72 bp, synthetic construct
  source 1..72: mol_type = other DNA
acccttcccggagctggcatcggcattggcgccctgctgaaccctgactggaacatgttgctcaacgtcaac

SEQ ID NO: 39790 - DNA, 105 bp, synthetic construct
  source 1..105: mol_type = other DNA
ggttacatgagttatacttcgggaacacccatggtgcagctggtgtccgagggaagctctctcgtcttcatcgtgttccctatgatcttcaacgctatgggtttc

SEQ ID NO: 39791 - DNA, 63 bp, synthetic construct
  source 1..63: mol_type = other DNA
acagtgaccgagtctcccgctctgagtagcgattccctcgacgtcgacaatgcatactcaaaa

SEQ ID NO: 39792 - DNA, 267 bp, synthetic construct
  source 1..267: mol_type = other DNA
gacgtttacgagcccttttctattaccgtgaacgtgacagtcaacaagatcgccagccagctgagctctcggaatgtgacagccttcttcaacgagggaaaaatcgtggcccgcctcaccgataaatatggaaaaccgctggctgactccaatgtctccctgcatctggcttacatccataggacgtttaagactaaccagtctggcgaggtggagttcgaaattgaaggactgacagaaggaaaccacaccggccagatcgtcttt

SEQ ID NO: 39793 - DNA, 93 bp, synthetic construct
  source 1..93: mol_type = other DNA
tctctgaccaaggcttggggcgcaaaccccgacctgttcttcgccaacaacgtgctacaagccacagactcgatatcgggaatcttcaagatt

SEQ ID NO: 39794 - DNA, 72 bp, synthetic construct
  source 1..72: mol_type = other DNA
ctcacactgcctggtgcttccatcggttacacgcaaattttcacccccgactggtccgccttgaccaacctg

SEQ ID NO: 39795 - DNA, 111 bp, synthetic construct
  source 1..111: mol_type = other DNA
ggcttcatggccctgaccaccggcatgcctttcaacgaactggtgactgaaggcacggggctcgctttcgtcgtgtttccgcaagtgtttaataccggagatgtagtgatg

SEQ ID NO: 39796 - DNA, 90 bp, synthetic construct
  source 1..90: mol_type = other DNA
ttcacaaaggcttggggctctaaccccgacctctacttttctcaaaatgtactgcacgccaccgactccattagcgggatcttcaccatc

SEQ ID NO: 39797 - DNA, 72 bp, synthetic construct
  source 1..72: mol_type = other DNA
acccttcccggggcctccattggttatagccaaatcttcgcccctaactggagcgctctagcggacccagac

SEQ ID NO: 39798 - DNA, 105 bp, synthetic construct
  source 1..105: mol_type = other DNA
tttatggcaatgaccagcggcatcgccttcaatgacctggtcaccgaaggcactggactcgctttcgtggtcttcccgcaagcattgaacctaatgcaaacaggg

SEQ ID NO: 39799 - DNA, 171 bp, synthetic construct
  source 1..171: mol_type = other DNA
gccaactcccttttccatatcgacgagttttttacactctctctcatcaaatatagcatcaacaacgccattaccataacatcttacgacgtgcaccctcctctttactatataatcctcaaaattgtgactaaaattcttaccctcctcaatatcaacttcaacacaatc

SEQ ID NO: 39800 - DNA, 105 bp, synthetic construct
  source 1..105: mol_type = other DNA
aaccagatttcccgggtgcaccagagtttctgggtggagcctgtcaccttcatcacaatcatggacagcctgtcttactttatgatccccattacatgcgacgac

SEQ ID NO: 39801 - DNA, 48 bp, synthetic construct
  source 1..48: mol_type = other DNA
ttcggacaagcttggagcatcgctgatctgcccgtatccgactacgtg

SEQ ID NO: 39802 - DNA, 30 bp, synthetic construct
  source 1..30: mol_type = other DNA
gtgaacgtcaatttcgacctcataagtgta

SEQ ID NO: 39803 - DNA, 36 bp, synthetic construct
  source 1..36: mol_type = other DNA
aagctgtacctgaccttttacgagttcaacatctac

SEQ ID NO: 39804 - DNA, 132 bp, synthetic construct
  source 1..132: mol_type = other DNA
atctcaaacgtgatcgacaggaatcatgtctccgaagccatcaacctgagtgccgccgacaatattgtctctgcgatcatggaatatgttatgtccggcgttaaatatgtcgcggattcccttgcatccggc

SEQ ID NO: 39805 - DNA, 93 bp, synthetic construct
  source 1..93: mol_type = other DNA
tccttcacaaagggctggggtgctaaccctgacctctacttcgccaacaacgtgctgcacgccactgactctgttagcggcatctttaccatt

SEQ ID NO: 39806 - DNA, 75 bp, synthetic construct
  source 1..75: mol_type = other DNA
ctcacactgcctggcgcttccatcgggtacacccaaattttgacgcctgactggagcgcccttggaaacgcagag

SEQ ID NO: 39807 - DNA, 108 bp, synthetic construct
  source 1..108: mol_type = other DNA
ggcttcatgacactgactagcggtatccccttcaacgagctcgtcaccgaaggctccggactggcctttgtagtcttcccgcaagtattcaacaccatgggtccagcc

SEQ ID NO: 39808 - DNA, 291 bp, synthetic construct
  source 1..291: mol_type = other DNA
ggaccccctttggcttttctggacgaaagtgcacattttactcgcgccgagcttctgtccgaaggcgtgatcaaccccgaagagaaggacaatggcttctacgtgaataactattacttcggactcaacaaagcccagaagggtctgaccgtgctggataatcctgccgttaataatcccattaacgagtccaaaggctactggagctttaccactgaaactccattctactcctatattccttccgcgataggaatctcaatcgcaaaatttttggacctgaccgccatc

SEQ ID NO: 39809 - DNA, 195 bp, synthetic construct
  source 1..195: mol_type = other DNA
ctggatatcatctttcctgtggcaactcaagtaaaatctcacatgccctctaacatctctcctggcaagcagctgaattacatcctgacaaaccctctcattatgttcgacctcatgaaatatatcgtgacctccattccaagcgtcttcgtcattgacctgactatcttccactacgctgacttcaagggactg

SEQ ID NO: 39810 - DNA, 57 bp, synthetic construct
  source 1..57: mol_type = other DNA
tacctgacctacacacccattggatcgggggagatcttgggcgtgcaggcaagatat

SEQ ID NO: 39811 - DNA, 96 bp, synthetic construct
  source 1..96: mol_type = other DNA
atctccttcttcaagggctggggcagcgaccctgagcaattttttggaaccgtgcttcttcaaagctctacaactcctgatggcctgttccatgtg

SEQ ID NO: 39812 - DNA, 72 bp, synthetic construct
  source 1..72: mol_type = other DNA
acccttcctggcgcctcactcggcgtcgccactctctttacacctgattggaacagcattgtgaatcctgtc

SEQ ID NO: 39813 - DNA, 102 bp, synthetic construct
  source 1..102: mol_type = other DNA
ggctacatgagtaccacaagtaacatccccattggtaacctggtgtcccaaggtaccacgctggccttcattgctttcccgcaaatattcaatatcatggga

SEQ ID NO: 39814 - DNA, 132 bp, synthetic construct
  source 1..132: mol_type = other DNA
ttccaccctggcatcgccactctcgattctttcgatcaactccatcaaattgcttcgtctcaattcactaactggcacccattcttccacaccttcatcgagatactgtgcctgaaagtttaccctagcata

SEQ ID NO: 39815 - DNA, 90 bp, synthetic construct
  source 1..90: mol_type = other DNA
agctttacctttagctggggcactgacgccgctgcctacttcacccaaaatgtcgggggctcctctaacctgtccaacgttggcttcctg

SEQ ID NO: 39816 - DNA, 69 bp, synthetic construct
  source 1..69: mol_type = other DNA
accctgcccggcgccgggatcggggttaacacgctgcttactcctgactggagcaagctcatggatgtg

SEQ ID NO: 39817 - DNA, 105 bp, synthetic construct
  source 1..105: mol_type = other DNA
ggttatatgtcgttcacatccggtactcctatggtgcagctgattaccgagggcaccggcctcattttcatcgtgtttcccatgatcttcaacatcatgggacca

SEQ ID NO: 39818 - DNA, 237 bp, synthetic construct
  source 1..237: mol_type = other DNA
atgcacaactacaagtctaagaataataagattaactacaactatatcgtcaatgagaagcataatttagtcggcacgggcaatatcgatgccgactataactggtggggcaagaacaagctgttcaaggtcagcaagtccttcaagatcaagaagttcgtggtcatgtacctgaacgctccacataacctgaagttcaacaagacatacaagatcaacattctctttaaggacaat

SEQ ID NO: 39819 - DNA, 78 bp, synthetic construct
  source 1..78: mol_type = other DNA
ttcctcagttttctgagcaagtatagcaaagtgtccaagatcatcaagggctactacgacaacgtcctgtctaccatc

SEQ ID NO: 39820 - DNA, 159 bp, synthetic construct
  source 1..159: mol_type = other DNA
agcaagcagcacaagaaaaagagcgtccgtggcgccgtccgcaagatcgtgaagaataaccctaagatcgtctacaaggctgtgaagatcgccaagcgcattctgatgcccaaatataacagtaaccggaacccaaacaagaacaataagtccaaggac

SEQ ID NO: 39821 - DNA, 51 bp, synthetic construct
  source 1..51: mol_type = other DNA
tctatcaggaaagtgatataccagggagttaagtatattaagaaatacctt

SEQ ID NO: 39822 - DNA, 90 bp, synthetic construct
  source 1..90: mol_type = other DNA
tccttcactttctcctggggcaccgatgctgcggcgtacttcactcaaaacgttggcggctcaagcaacctgtctaacgccaacttcctg

SEQ ID NO: 39823 - DNA, 69 bp, synthetic construct
  source 1..69: mol_type = other DNA
accctgcccggcgccgggatcggaattaacaccctcctgacacctgactggagcaagctgatggatgta

SEQ ID NO: 39824 - DNA, 105 bp, synthetic construct
  source 1..105: mol_type = other DNA
ggatacatgagctacactgccggcaccccaatggtgcagctcatcaccgagggcacaggcctgatcttcattgtcttccctatgatcttcaacatcatgggacct

SEQ ID NO: 39825 - DNA, 264 bp, synthetic construct
  source 1..264: mol_type = other DNA
tactgggagggcggttctaactatgatgtgtccctcaatccgatcgtgatcgccaatccaatcaacgtcaacaagcccaacaacaatctgacctttatcgttcccgaggaatacgaaggcatcctgaccttgaccattggcggagagaagcgctcagtaaatgtaacacacggcattgtgtctattgagctgttcaaccttaatagcactgaatacgacgacgaatatgaatcatttgtgctgcgatacgacctaaggttcgag

SEQ ID NO: 39826 - DNA, 39 bp, synthetic construct
  source 1..39: mol_type = other DNA
accgagatcatggccgacttccacgtatcgagcacaagc

SEQ ID NO: 39827 - DNA, 36 bp, synthetic construct
  source 1..36: mol_type = other DNA
ttcgtacaatccgtggcgtaccattcggcgacagag

SEQ ID NO: 39828 - DNA, 51 bp, synthetic construct
  source 1..51: mol_type = other DNA
ttcgccggaggaaaccccacccacaacaatgtttccgtgtctgcattcggg

SEQ ID NO: 39829 - DNA, 93 bp, synthetic construct
  source 1..93: mol_type = other DNA
tccagcttcaactttgcttggggcaacgacgccggactgttcttcaccaacgttgttggagggtcctctaacctcaatagcatcacaactttc

SEQ ID NO: 39830 - DNA, 75 bp, synthetic construct
  source 1..75: mol_type = other DNA
ctgaccctgcctggagccgggatcggcattaacacactcctcactcccgactggagcaagctgctggatgtgaat

SEQ ID NO: 39831 - DNA, 105 bp, synthetic construct
  source 1..105: mol_type = other DNA
ggttatatgagtcacaccgctggcacaccaatggtcgagctcgtggccgagggcactggactgatctttatcgtgttccccatgatcttcaacattatgggacct

SEQ ID NO: 39832 - DNA, 93 bp, synthetic construct
  source 1..93: mol_type = other DNA
agcttctaccacggctggggcagtaaccccaacctgtttttcaccgagaccctgctgcactctacttcaagtatctctggactcggagacatt

SEQ ID NO: 39833 - DNA, 75 bp, synthetic construct
  source 1..75: mol_type = other DNA
gtgaccctgcctggggcctccattggctatagcgctctgttcaaccccaagtggtactctatctgcgacccacac

SEQ ID NO: 39834 - DNA, 105 bp, synthetic construct
  source 1..105: mol_type = other DNA
ggatatatgtcctttgtacaagacgtccctctgcggtacctcgtcaccgagggcacagggctgatcttcgtggcgtttccctccatattcaacgaaatgggagtg

SEQ ID NO: 39835 - DNA, 96 bp, synthetic construct
  source 1..96: mol_type = other DNA
attaagttccccctgatcgatggcctctttgagaacatgagcatgctcaccggcactgggctgaccctgttcctggacatcgaggcccttcctaaa

SEQ ID NO: 39836 - DNA, 99 bp, synthetic construct
  source 1..99: mol_type = other DNA
ggcatgcccctgttcgactccatcacactctgcttcgccatgatctgcaccggaggcatgagcattaagaaccagaatatcgggttctaccactctaac

SEQ ID NO: 39837 - DNA, 99 bp, synthetic construct
  source 1..99: mol_type = other DNA
aaggtcttcaatattgacatcctgtttgccattatcacaaccatctccaccactggcgctaactctgtgcctagcaacgtgatgatgagttggcctcgg

SEQ ID NO: 39838 - DNA, 96 bp, synthetic construct
  source 1..96: mol_type = other DNA
tgcggatacagcgacttcaacgctctctttgacgtgatttctgccatcggcaataacgggctgagttccggcttcaccaaccctggtctgcctatc

SEQ ID NO: 39839 - DNA, 93 bp, synthetic construct
  source 1..93: mol_type = other DNA
agctccctcaacttcaactggggcagcaattccaccctttactttctggaaaatgttggcggtagtagcaacctgtccaacatgaccaatttc

SEQ ID NO: 39840 - DNA, 69 bp, synthetic construct
  source 1..69: mol_type = other DNA
accctgcctggggccaacatcggcattaatacactcctgaagcccgactggcagatgctgctcaacgtg

SEQ ID NO: 39841 - DNA, 105 bp, synthetic construct
  source 1..105: mol_type = other DNA
ctcggctacatgagttacacatctgggacacctatgactaagctggtgtctgagggcacagggctggttttcatcgtcttcccaatgatctttaacaagatgggc

SEQ ID NO: 39842 - DNA, 96 bp, synthetic construct
  source 1..96: mol_type = other DNA
ggctctagcttcaatttcgcttggggctctgactccgccctgtacttcatcgagaatgtcggggggagctcaaatctgtcccatatttccaacttc

SEQ ID NO: 39843 - DNA, 69 bp, synthetic construct
  source 1..69: mol_type = other DNA
accctgagcggggcctccatcggagtcaacgctctccttaatcccgactggcagatgctgctgaacgtg

SEQ ID NO: 39844 - DNA, 108 bp, synthetic construct
  source 1..108: mol_type = other DNA
ctgggatacatgtcgtacacatctggaacacctattgccaagcttgtatcggagggcaccggcctcgtgttcatcgtctttcccaaaatcttcaacatcatgggaccc

SEQ ID NO: 39845 - DNA, 75 bp, synthetic construct
  source 1..75: mol_type = other DNA
tataccgacggcatcatgtacgggacatcctctgtggacctgagcgactacggactcgctatgggagctagtgac

SEQ ID NO: 39846 - DNA, 105 bp, synthetic construct
  source 1..105: mol_type = other DNA
ctcagctgggacagtctgcctgctgttgctcaagttttagtttttgcgatcccattctcccatccgatgatggttatgaacaatctggtctttggcaacatcagc

SEQ ID NO: 39847 - DNA, 171 bp, synthetic construct
  source 1..171: mol_type = other DNA
gttcggtatcctttcttaactgtagatggctggttcacgaagggcttgctttccctccctattacacaacagatctccattacggccatcgacgtccacccccccctgtattacttgatccttaatgctgtagtgtcggtgctaggcgttttcaacgccgatctcatcctg

SEQ ID NO: 39848 - DNA, 99 bp, synthetic construct
  source 1..99: mol_type = other DNA
cggcagatgcggagcgtcaagtcagggtactggattgagcctgcctccctcaagctggtggtggactgctttggctcttacatcaccttctatccaagc

SEQ ID NO: 39849 - DNA, 99 bp, synthetic construct
  source 1..99: mol_type = other DNA
tctctggacatccacttcattgatgctctgtttgagaacatgtccgcctggaccggcagcgggatgacattcttcgtcaacgtggagatcctgccaaag

SEQ ID NO: 39850 - DNA, 99 bp, synthetic construct
  source 1..99: mol_type = other DNA
ggcctgcccatcttcgactctgtgaacctcaccttcactagcatttcgaccggcggcatgagcatcaagaacgccaatatcgggttttaccaaaacagc

SEQ ID NO: 39851 - DNA, 102 bp, synthetic construct
  source 1..102: mol_type = other DNA
aatactggtgtcccaatcgaggaactgtacacaatcatctccgccgtcaccactactggggcaaacgtgattccacctcaagaactagctacatggaagggg

SEQ ID NO: 39852 - DNA, 96 bp, synthetic construct
  source 1..96: mol_type = other DNA
tacggctatgatccctttaccgccctgttcgacgtcatctcgctgcaatccaataacggtctatctacgggaatcgtttggggaggattgcctatc

SEQ ID NO: 39853 - DNA, 102 bp, synthetic construct
  source 1..102: mol_type = other DNA
gtgatcgacatcagctttttggatgctttcttcgagaacatcagcgcatggacaggcagtggattgaccctaatctccgacgtggagtccctgccccattct

SEQ ID NO: 39854 - DNA, 99 bp, synthetic construct
  source 1..99: mol_type = other DNA
ggcctgcccttgtttgactccgtcaatctcacatttaccaccatctccactggaggcatgtctattaagaacgccaacatcggcttctaccacaacaac

SEQ ID NO: 39855 - DNA, 102 bp, synthetic construct
  source 1..102: mol_type = other DNA
gccaaccttgctcctatcgacgctatgtttcacgtcatctccgccattaccacgactggtgctaacatcgcgtctcctgacgacatggtcggatgggcaccc

SEQ ID NO: 39856 - DNA, 96 bp, synthetic construct
  source 1..96: mol_type = other DNA
tacaccaatgatcccatcatgaccctgttcgacgtcacatccacaattggcaatgtcggcttgagcactggcatcgtgaacggctctctcgacccc

SEQ ID NO: 39857 - DNA, 39 bp, synthetic construct
  source 1..39: mol_type = other DNA
gtgcccgctattgcgcaagagttcgccatgaacaacgtc

SEQ ID NO: 39858 - DNA, 33 bp, synthetic construct
  source 1..33: mol_type = other DNA
tatcactttcaatacgtccggggatgggacgca

SEQ ID NO: 39859 - DNA, 36 bp, synthetic construct
  source 1..36: mol_type = other DNA
atgggcaccctgccacttgccaccaaatatgctggc

SEQ ID NO: 39860 - DNA, 132 bp, synthetic construct
  source 1..132: mol_type = other DNA
tataatcccggcatactcacatatgactcctttaatcaattacaccaaatcgctactggaaactttaacaactggcagcccttcttccataccttcattgagatggtctgcatcaaaatctacgcttcacca

SEQ ID NO: 39861 - DNA, 30 bp, synthetic construct
  source 1..30: mol_type = other DNA
ggcggaaacgcctggttcgggatcacagct

SEQ ID NO: 39862 - DNA, 120 bp, synthetic construct
  source 1..120: mol_type = other DNA
gcaaacgaggacggcggcgccatttgttccaagaacagcgtgtacattaataactgcaccttcaaggacaactgcgctgataactctggaggcgccatctacacctactacaccatcatt

SEQ ID NO: 39863 - DNA, 69 bp, synthetic construct
  source 1..69: mol_type = other DNA
ctgttcgatagcaacaaggccgacaacgacggcggagcaatcaacgctattaacaatgctcagctcaaa

SEQ ID NO: 39864 - DNA, 63 bp, synthetic construct
  source 1..63: mol_type = other DNA
atcttcacacggaataccgctaagaacggtggcgcaagctatgcctatgtgctgaactcagac

SEQ ID NO: 39865 - DNA, 63 bp, synthetic construct
  source 1..63: mol_type = other DNA
tctaccttcaaggataataaagccgacaacggaggcgccatttatgcgagttccgcactcatt

SEQ ID NO: 39866 - DNA, 126 bp, synthetic construct
  source 1..126: mol_type = other DNA
atcgccgacaactgtggaggcgctatcttctctaagaataagatcgaggccattaattctgaattttacaagaacaacgcttgcgaggacggaggcgcaatcttctccgataatgcctatgtctcc

SEQ ID NO: 39867 - DNA, 90 bp, synthetic construct
  source 1..90: mol_type = other DNA
tctttcactttcggctggggcagtgacccctctgcgttcttcacggctaacgttggtggatcatccaatctgagcgggatcaccagtatc

SEQ ID NO: 39868 - DNA, 75 bp, synthetic construct
  source 1..75: mol_type = other DNA
ttcacccttcctggcttcgagctggggctgaccactctcctcacacccaactgggagatgctgctggacatcaac

SEQ ID NO: 39869 - DNA, 105 bp, synthetic construct
  source 1..105: mol_type = other DNA
ggctacatgtccgtgacaagctctattcctatcaccgagctcatctccgacggaaccagcctgatcttcattgtcctgcccgaagtgttcgaagtgatgggacct

SEQ ID NO: 39870 - DNA, 75 bp, synthetic construct
  source 1..75: mol_type = other DNA
tataccgacggcgtcatgtacggggccgactccgtgaacctcggcgattacggactggctatgggcgcatctgat

SEQ ID NO: 39871 - DNA, 102 bp, synthetic construct
  source 1..102: mol_type = other DNA
atgtcttgggactccctgccggctgctgcccaagcccttatcttcgccatcccgttctcacatccgatgatggttatgaataacctggtcttcggcaacatc

SEQ ID NO: 39872 - DNA, 36 bp, synthetic construct
  source 1..36: mol_type = other DNA
gcaagcggtctcggcgacgaggatctgagtgcactc

SEQ ID NO: 39873 - DNA, 57 bp, synthetic construct
  source 1..57: mol_type = other DNA
gaccctatcatctcttttatgggtgccgatgatgtccgagatggctgccgagaatac

SEQ ID NO: 39874 - DNA, 30 bp, synthetic construct
  source 1..30: mol_type = other DNA
atcgccggcggaactgtcgctgtgatgatg

SEQ ID NO: 39875 - DNA, 60 bp, synthetic construct
  source 1..60: mol_type = other DNA
cccctgatcggcgtgttcacaaccgagcctagcatggctgagcaccgggacgaaatggtt

SEQ ID NO: 39876 - DNA, 93 bp, synthetic construct
  source 1..93: mol_type = other DNA
ctgagcttcttcaagggatggggcaccgacacaaacgcctttttcaacaacgtggtcctcgaggcttccaaccccggcggcatctttcacatt

SEQ ID NO: 39877 - DNA, 72 bp, synthetic construct
  source 1..72: mol_type = other DNA
actctgcctggcgccagcatcggcatcatgacccttctgacgcctcaacctagtacactcaccaacgtgaac

SEQ ID NO: 39878 - DNA, 105 bp, synthetic construct
  source 1..105: mol_type = other DNA
ggcttcatgagcaccacaaacaatatccccatcgaccagctggtaacccaaggcacgggcctcgctttcatcgtgtttcctcaaatctttaacgccatgggaatc

SEQ ID NO: 39879 - DNA, 168 bp, synthetic construct
  source 1..168: mol_type = other DNA
aaggtcaacttgggcctgaacgtggacgaggctttctccctgatgattactaacacaaacttcatggataccatctctttaacggcaagcgacgtccatccacctctttactacctgatcctcaaagtcttcatgaagattttcgcctttgagaacatcgaccgaatc

SEQ ID NO: 39880 - DNA, 99 bp, synthetic construct
  source 1..99: mol_type = other DNA
tcccagatcaacaagtaccagggcgactactggattcagcctctgtaccttcaacaacttattgagacctattggtacgtgttctctagctacaccacc

SEQ ID NO: 39881 - DNA, 90 bp, synthetic construct
  source 1..90: mol_type = other DNA
tccttcaacttcggatggggcaacgaccccacaagttttttcacctcctacgtcggtggttcatccaatctgagctctagtaccactatc

SEQ ID NO: 39882 - DNA, 72 bp, synthetic construct
  source 1..72: mol_type = other DNA
actctccctggcttccacatgggcgtgacaaccctgctgaatccaaactggagcgccctgcttaacatcaac

SEQ ID NO: 39883 - DNA, 105 bp, synthetic construct
  source 1..105: mol_type = other DNA
ggttacatgagcctcaactctagcatccctatgaatgagctgatctctgaaggcactggcctgatcttcattatctttccccaaatctttaacacaatgggaatg

SEQ ID NO: 39884 - DNA, 132 bp, synthetic construct
  source 1..132: mol_type = other DNA
tacaatcccggcatccttaccacacaatccttctctcaactccaccaaattgcctccgggcaatttaactcgtccgtccccttcctctatacggttatagtcatgatcttcctcaaggttttccaaacacct

SEQ ID NO: 39885 - DNA, 285 bp, synthetic construct
  source 1..285: mol_type = other DNA
ttcgcttaccacgtcgaagacgctcatacaaacagcgctggcggcgtgcccatggtctggtcggtgctccggggcgacgattgggagggtcaggcctactacctcacggcaaatgcagaccccgtgaaggaggctcagaataagttctatactcaaggaaaaatcacccctaccgaatcttacgagaagctgacatccgccaactacggcaagggctcctacaatatggtcaacagttacgccctctatttcaaggaccacactctgaccgataccctgttcatg

SEQ ID NO: 39886 - DNA, 30 bp, synthetic construct
  source 1..30: mol_type = other DNA
acctgccccctgaatgagaaccggttcctg

SEQ ID NO: 39887 - DNA, 93 bp, synthetic construct
  source 1..93: mol_type = other DNA
acatcgttctcattcggctggggagccgatacggctgcgtactttactaacaccgtcggcggttctgctgatctggccaagggcggtatcttc

SEQ ID NO: 39888 - DNA, 69 bp, synthetic construct
  source 1..69: mol_type = other DNA
accctgcccgggcacatgattggcatcgacgccctgcttcggcctaagtggagcatgctgctcgatatc

SEQ ID NO: 39889 - DNA, 105 bp, synthetic construct
  source 1..105: mol_type = other DNA
ggatacatgagcctgaactccggcatggccttatcgaagctggtgaccgagggtaccggcctggtcttcatcgtctttcccatgattttcaacgtgatgggaacg

SEQ ID NO: 39890 - DNA, 90 bp, synthetic construct
  source 1..90: mol_type = other DNA
tccctgacctttagctggggcaccgacacggcggcatacttcgtgcacaacgtcggcggcggggaaaacctgtctaagatcgggaacttt

SEQ ID NO: 39891 - DNA, 69 bp, synthetic construct
  source 1..69: mol_type = other DNA
accctgcccggggctggaatcggcattaacgccctgatcaaccctaactggaatctcctctgggatatc

SEQ ID NO: 39892 - DNA, 105 bp, synthetic construct
  source 1..105: mol_type = other DNA
ggatacatgtctgccacttcggggacgcctctcgtcgagctagtttctgagggcacaggcctgatctttgtcgtctttcccaagattttctccctgatgggattc

SEQ ID NO: 39893 - DNA, 93 bp, synthetic construct
  source 1..93: mol_type = other DNA
agctcctttacattttcatggggcactaatgctgccaattacttcgtgtctaccgtcggaggttcctcaaatctgagcaacgcttcattcctg

SEQ ID NO: 39894 - DNA, 75 bp, synthetic construct
  source 1..75: mol_type = other DNA
ctgaccctgcctggggccggactcggggtctcaacactgctgagccctgattggggcaagctcactgatgtcaac

SEQ ID NO: 39895 - DNA, 105 bp, synthetic construct
  source 1..105: mol_type = other DNA
ggatacatgtctcacattagcggaacacccatggtgcagctgatcaccgagggcaccgggctcattttcatcgtctttccaatgatcttcaacatcatgggaccc

SEQ ID NO: 39896 - DNA, 84 bp, synthetic construct
  source 1..84: mol_type = other DNA
agcttcacattttcctggggctccgacaccacctctttcttcgccaataccgtcggggggggatctgacttcgcaaacgctggg

SEQ ID NO: 39897 - DNA, 72 bp, synthetic construct
  source 1..72: mol_type = other DNA
ttcaccctgcccgggcacatgatcggcatcgacacccttctccggcctcgttgggggatgctgtggaacatc

SEQ ID NO: 39898 - DNA, 105 bp, synthetic construct
  source 1..105: mol_type = other DNA
ggatttatgagtctccatagtggcacagccatgtcccaccttgtgtccgaaggcacctctctcgtcttcgtggtttttcccatgattttcaacatcatgggaccg

SEQ ID NO: 39899 - DNA, 132 bp, synthetic construct
  source 1..132: mol_type = other DNA
ttcaacccgggtatcgctacaacggatacatttaatcaattccatcaaatcgcaagcggtgcattcactaactggcatccatttttccacacattcatcgaaatgatgtgtctttccgtttatccttcaacc

SEQ ID NO: 39900 - DNA, 87 bp, synthetic construct
  source 1..87: mol_type = other DNA
attaccttcggatggggctctgacactgccgcgtactttgtgcaaaacgtcggcggtagcgagaatctggctaacatcggcaacttt

SEQ ID NO: 39901 - DNA, 72 bp, synthetic construct
  source 1..72: mol_type = other DNA
acccttcccggcgccagcatcgggatagacgctctgattcaccctaactggaacctcttgagcgacatcaac

SEQ ID NO: 39902 - DNA, 105 bp, synthetic construct
  source 1..105: mol_type = other DNA
ggctacatgagcgccacgagcgggacccctttagtgcaactggtctctgagggcacagggctcatcttcgtagtgttccctaagatcttctccctgatgggagtc

SEQ ID NO: 39903 - DNA, 90 bp, synthetic construct
  source 1..90: mol_type = other DNA
tctttcaccttcaactggggcacaaacactgccgagtacttcgtccaaaccgtcggcggtagttccaatctgagcaacgcttccttcctg

SEQ ID NO: 39904 - DNA, 72 bp, synthetic construct
  source 1..72: mol_type = other DNA
acccttcccggcgccggaataggcattaacacactgctgaagcctgactggaatatgctgctcgacgttaac

SEQ ID NO: 39905 - DNA, 105 bp, synthetic construct
  source 1..105: mol_type = other DNA
ggctacatgagcgtgaccgccggaactccaatggtgcagctcgtgaccgagggcaccggcctcgtattcattgtcttccccatgatctttaacattatgggaccc

SEQ ID NO: 39906 - DNA, 93 bp, synthetic construct
  source 1..93: mol_type = other DNA
agcttcaccttttcctggggatcggacactgctgcatacttcgtccaaaatgttggtggttccgagaacctgagcaagatcggcgaggagttc

SEQ ID NO: 39907 - DNA, 69 bp, synthetic construct
  source 1..69: mol_type = other DNA
acccttcctggcgctagcattggcatcaatgccctcatcaaccccaactggaatctgctctgggatata

SEQ ID NO: 39908 - DNA, 105 bp, synthetic construct
  source 1..105: mol_type = other DNA
ggctacatgtcagcaacatctgggactcccatggtgcagctggttagcgagggaacagggctcatcttcgtcgtgttccctaagatcttctctctgatgggattt

SEQ ID NO: 39909 - DNA, 90 bp, synthetic construct
  source 1..90: mol_type = other DNA
agcttcaccttcaattggggaaccgacacggccgcttacttcgtgcaaaatgtcggcggcagttccaacctctctaacgctggattcctg

SEQ ID NO: 39910 - DNA, 72 bp, synthetic construct
  source 1..72: mol_type = other DNA
acactgcccggggctggactcgggatcaacacgctgcttactcctgattggggacgtctggctgacgtgaat

SEQ ID NO: 39911 - DNA, 105 bp, synthetic construct
  source 1..105: mol_type = other DNA
ggatacatgagcgtgaccgccggcacaccaatgacccagctcgtcaccgagggcacagggctgatcttcgtcgtattcccgatgattttcaacatcatgggacct

SEQ ID NO: 39912 - DNA, 93 bp, synthetic construct
  source 1..93: mol_type = other DNA
tcctcatttagttttcaatggggggccgatgctgccctgtactttgtcgactctgtcggaggaagtagcaacctcaacaatatcggcctgttc

SEQ ID NO: 39913 - DNA, 69 bp, synthetic construct
  source 1..69: mol_type = other DNA
acactgcctggcgccaacatcgggatcgagaccctcctcaagcccgactggatgaagctgctggatatt

SEQ ID NO: 39914 - DNA, 105 bp, synthetic construct
  source 1..105: mol_type = other DNA
ggttacatgtcctttactagcggcacacccatgatccagctcgtgtctgagggcaccgggctgatcttcattgtgttccctatgatcttcaacattatgggagtg

SEQ ID NO: 39915 - DNA, 90 bp, synthetic construct
  source 1..90: mol_type = other DNA
agctttaacttctcctggggcgccgaccccacaatcttttttgcggggttcgttggagggagttctaatctcgctaacgcttggacactg

SEQ ID NO: 39916 - DNA, 75 bp, synthetic construct
  source 1..75: mol_type = other DNA
ttcaccctgcccgggcacatgatcggcatcgacgccctgattcggcctaactggagcacactcctggacattgat

SEQ ID NO: 39917 - DNA, 105 bp, synthetic construct
  source 1..105: mol_type = other DNA
ggattcatgagtcttcactccggcatccggctgtctaacctggccaccgagggcaccggccttgtgttcaacgtcttccccatgatcttcaatgtgatgggaccc

SEQ ID NO: 39918 - DNA, 90 bp, synthetic construct
  source 1..90: mol_type = other DNA
tctttcactttttcctggggcgccgataccgctgcttactttaccacaacggtcgggggttccagtgacctggcctcggctggattcctg

SEQ ID NO: 39919 - DNA, 75 bp, synthetic construct
  source 1..75: mol_type = other DNA
cttaccctgcctgggcacatgatcggagttgacgcgttgctgcggccccggtggagcatgctcctggatatcaac

SEQ ID NO: 39920 - DNA, 105 bp, synthetic construct
  source 1..105: mol_type = other DNA
ggctacatgtcacttcattctgggatggccatgtccaagctcgtcaccgagggcaccggactagttttcgttgtgttccccatgattttcaacatcatgggacca

SEQ ID NO: 39921 - DNA, 93 bp, synthetic construct
  source 1..93: mol_type = other DNA
agctccttcacctttcgttggggaaccgatgctgccctctacttcgtggactccgtcggtggctctagcaacctgaacaatatctgcttcctg

SEQ ID NO: 39922 - DNA, 69 bp, synthetic construct
  source 1..69: mol_type = other DNA
acactgcccggcgccaacatcgggatcgagaccctgctgaagcctgactggaccaagctcctcgacatt

SEQ ID NO: 39923 - DNA, 105 bp, synthetic construct
  source 1..105: mol_type = other DNA
ggttacatgagcttcacatccggcactcctatgatccagctggtcagcgagggcaccgggctcatcttcatcgtgttccccatgatcttcaacatcatgggaatc

SEQ ID NO: 39924 - DNA, 90 bp, synthetic construct
  source 1..90: mol_type = other DNA
agcttcaatctcggatggggcaacgacccttcttcctttttttcacactacgtcggagggtccagcaatctatcctcacctattaccatc

SEQ ID NO: 39925 - DNA, 75 bp, synthetic construct
  source 1..75: mol_type = other DNA
ttcactctgcctggctcccacctgggcattacaaccctgctgacccctaactggtccgccctttacgacatcaat

SEQ ID NO: 39926 - DNA, 108 bp, synthetic construct
  source 1..108: mol_type = other DNA
ctgggctacatgtccgtcacatcctctactcctatgaatgagctgatcagcgaaggcaccggcctcattttcatcgtgtttcctcaaatatttaactcgatgggaatc

SEQ ID NO: 39927 - DNA, 90 bp, synthetic construct
  source 1..90: mol_type = other DNA
agtttcacctttggatggggctcagacaccgctgcgtacttcatccaaaacgtcggcggcagcgagaacctgtctaacattggcaacttc

SEQ ID NO: 39928 - DNA, 69 bp, synthetic construct
  source 1..69: mol_type = other DNA
acactccctggcgctagcattgggaccgatgccctgctgaatcccgactggaaccttctgttcaacatc

SEQ ID NO: 39929 - DNA, 105 bp, synthetic construct
  source 1..105: mol_type = other DNA
ggctacatgtctgccactagcgggacacctctggttcaattggtcaccgaaggcaccggactgatcttcgtggtcttccctaagatcttctccctgatgggaatt

SEQ ID NO: 39930 - DNA, 36 bp, synthetic construct
  source 1..36: mol_type = other DNA
cccgagatcagttcgaagctgaacttctctgccgaa

SEQ ID NO: 39931 - DNA, 36 bp, synthetic construct
  source 1..36: mol_type = other DNA
ctgcatctacaatacgtgctggacacaacaacggaa

SEQ ID NO: 39932 - DNA, 54 bp, synthetic construct
  source 1..54: mol_type = other DNA
gtgggaaaccgggagctgggcccgcaacatttggacttcttgctcatccaatcc

SEQ ID NO: 39933 - DNA, 90 bp, synthetic construct
  source 1..90: mol_type = other DNA
tctttcactttttcctggggcaacgataccgccacatactttgttcaaaacgttggaggcggacggaatcccgctgacatcagcaacttt

SEQ ID NO: 39934 - DNA, 69 bp, synthetic construct
  source 1..69: mol_type = other DNA
acccttcctggcgccgggatcggaatcaatgctctgatcgagcccaactggaacctgctctggaacatc

SEQ ID NO: 39935 - DNA, 105 bp, synthetic construct
  source 1..105: mol_type = other DNA
ggatacatgtcggcaacctccggcatccctctcactcaactggtgtctgagggcactggcctgatcttcgtggtttttccgaagatcttcaccctgatgggagtg

SEQ ID NO: 39936 - DNA, 90 bp, synthetic construct
  source 1..90: mol_type = other DNA
tccttcagctttggctggggctctgacaccgccgcttacttcgtgcacaatgtcggcggcagcgagaatctgtccaagatcgggaacttt

SEQ ID NO: 39937 - DNA, 72 bp, synthetic construct
  source 1..72: mol_type = other DNA
accctgcctggcgccagcatcggcatcgacgccctgataaaccccaactggaacctcctctccgacattaat

SEQ ID NO: 39938 - DNA, 105 bp, synthetic construct
  source 1..105: mol_type = other DNA
ggctacatgagtgctactagcggcacacccttagctcaattggtatccgaaggcaccgggcttatcttcgttgtgttccctaagatcttctccctgatgggagtg

SEQ ID NO: 39939 - DNA, 93 bp, synthetic construct
  source 1..93: mol_type = other DNA
aacagctttaatttcggctggggaaacgaccctactgccttcttcacaaaccacgttggtggctcaagcaatctcgcttctgccactacactg

SEQ ID NO: 39940 - DNA, 69 bp, synthetic construct
  source 1..69: mol_type = other DNA
actctgcctggcttccacctcgggatcaccacccttctgacacccgactggagcgccctgttcaacatc

SEQ ID NO: 39941 - DNA, 105 bp, synthetic construct
  source 1..105: mol_type = other DNA
ggatacatgagtctcacatcttccgtgcctatgaacgagctgattagcgaaggaaccggactcgtctttatcgtctttcctcaaatctttaacaccatgggagtg

SEQ ID NO: 39942 - DNA, 96 bp, synthetic construct
  source 1..96: mol_type = other DNA
acaggaatcggcatcgtggactctattttcgagtgcatgtccgccctcaccgggagcggcatcaccatctaccctgacgtcgagattctgccttac

SEQ ID NO: 39943 - DNA, 99 bp, synthetic construct
  source 1..99: mol_type = other DNA
gggatgcccctgttcgactctatctgtaataccttctgcattatttcaacgggtggcatgtccgtgaagaacgccaacatcggattttatcaaaatgat

SEQ ID NO: 39944 - DNA, 102 bp, synthetic construct
  source 1..102: mol_type = other DNA
tctaacattgtgcccatggacaatctcttcacggtcgtcagcgccgtcactacgaccggcgcctctatacaatcggccactgtgatggggggatggccccca

SEQ ID NO: 39945 - DNA, 96 bp, synthetic construct
  source 1..96: mol_type = other DNA
tacggccacgacccctttaactctctgttcttcacaatgagcatgcaggggaacgttggtttggagatcggccagatcagtcagaccatggaatgg

SEQ ID NO: 39946 - DNA, 87 bp, synthetic construct
  source 1..87: mol_type = other DNA
ctgacttttggctggggcacagacaccgctgcctactttgttcaaaacgtcggcggcagcgagaacctcaagaacatcgggagattt

SEQ ID NO: 39947 - DNA, 69 bp, synthetic construct
  source 1..69: mol_type = other DNA
accctccctggggctagcatcggcatcaacgccctgattaatcccaactggaacctgctttgggacata

SEQ ID NO: 39948 - DNA, 105 bp, synthetic construct
  source 1..105: mol_type = other DNA
ggctacatgagtgctacatccggcattcccttggttcaactagtgtccgaaggcacaggccttatctttgtggtcttccctaaaatcttttcactgatgggtgtg

SEQ ID NO: 39949 - DNA, 36 bp, synthetic construct
  source 1..36: mol_type = other DNA
cccgatatcagcaacgacctgaatattcctctcaac

SEQ ID NO: 39950 - DNA, 30 bp, synthetic construct
  source 1..30: mol_type = other DNA
tacctgcaagtaatattaggactcgatacc

SEQ ID NO: 39951 - DNA, 51 bp, synthetic construct
  source 1..51: mol_type = other DNA
attcttaagaatgaaaacatgaaatccgacattgtcggcctgtcctactcc

SEQ ID NO: 39952 - DNA, 99 bp, synthetic construct
  source 1..99: mol_type = other DNA
gtgaccgatattggcgttatcgactccatcttcgagtgcatgagcgccctgaccggctctggaatcacaatctaccccgacgtcgagattctccctcac

SEQ ID NO: 39953 - DNA, 99 bp, synthetic construct
  source 1..99: mol_type = other DNA
ggaatgcccttcttcgactccatctgcaacaccttctgtatcataagcacgggtggaatgtccgtcaaaaatgccaacatcgggttttatcaaaatgat

SEQ ID NO: 39954 - DNA, 102 bp, synthetic construct
  source 1..102: mol_type = other DNA
tccaacatcgttccgatggacaatctcttcactgttgtttctgcggtcacaaccaccggcgcctctatacaatctagtactgtcatgggagggtggccccct

SEQ ID NO: 39955 - DNA, 96 bp, synthetic construct
  source 1..96: mol_type = other DNA
tacggacacgacccattaaatagtttattcttcacaatctccatgcaagggaacgtcggattggagattgggcagatcagccagacactcgaactg

SEQ ID NO: 39956 - DNA, 96 bp, synthetic construct
  source 1..96: mol_type = other DNA
aactacgggctgcactacttcggcggataccagccaatgacagacaatgtgactaacattatctaccaccctgccatcacgtactcattcaacttc

SEQ ID NO: 39957 - DNA, 72 bp, synthetic construct
  source 1..72: mol_type = other DNA
attacaggaaccgtgaacgtcaccgatatcgtcgccatcatccgcggcggccttatcgacgcaacttctccc

SEQ ID NO: 39958 - DNA, 48 bp, synthetic construct
  source 1..48: mol_type = other DNA
gacgtcgtgacctccggcatcagcaactacgttggtggattgctgctc

SEQ ID NO: 39959 - DNA, 96 bp, synthetic construct
  source 1..96: mol_type = other DNA
aactacggactgcacttcttcggcggctacgagcccatggtcgataatgtgacaaacatcctctaccaccctgccattacctatagctttgacttc

SEQ ID NO: 39960 - DNA, 72 bp, synthetic construct
  source 1..72: mol_type = other DNA
atgactgggaccgtgaatgtcaccgacatcgtcgccattctccgcggaggcctcctcaatgtaacgagtccc

SEQ ID NO: 39961 - DNA, 48 bp, synthetic construct
  source 1..48: mol_type = other DNA
aatgtcgtgaccagcgggatctccaactacgttggaggcctcttgctg

SEQ ID NO: 39962 - DNA, 93 bp, synthetic construct
  source 1..93: mol_type = other DNA
tctagctttaatttctcctggggcgctgactctgccctctactttgtccggaacgtcggcggttcttccaatctgtccaacatgaccagtttt

SEQ ID NO: 39963 - DNA, 69 bp, synthetic construct
  source 1..69: mol_type = other DNA
accctgcccggagctggcatcgggattaatgccctcctgaaccctgactggcagatgctgttcaacgtt

SEQ ID NO: 39964 - DNA, 105 bp, synthetic construct
  source 1..105: mol_type = other DNA
ggctacatgtcttacacctccgggacacccatggtggagctagtcagcgagggcactggcctcgtgttcgtcgtgtttccaatgatcttcaacattatgggacca

SEQ ID NO: 39965 - DNA, 90 bp, synthetic construct
  source 1..90: mol_type = other DNA
agcttcacattccactggggcactgacaccgccgcctacttcgtgcaatccgttggcggaagctctaacctctccaatgcttccttcctg

SEQ ID NO: 39966 - DNA, 75 bp, synthetic construct
  source 1..75: mol_type = other DNA
cttacactgcccggtgctagcctcgggatctccacactgctgactcctgactggggcatgctgctggatatcaac

SEQ ID NO: 39967 - DNA, 108 bp, synthetic construct
  source 1..108: mol_type = other DNA
ctcggatatatgtctacaaccagcggcacacctatggtgcagctggtgaccgagggcaccgggctggtttttatcgtcttcccaatgattttcaacatcatgggtccc

SEQ ID NO: 39968 - DNA, 99 bp, synthetic construct
  source 1..99: mol_type = other DNA
ctggacatgagtttcattgatgcttttttcgagaacatcagcgcctggaccggcagcgggctcacaatgatctctgatgtggagtccctgcctatgagc

SEQ ID NO: 39969 - DNA, 99 bp, synthetic construct
  source 1..99: mol_type = other DNA
ggcctgcccctgtttgatgctgtgaacctcaccttcacgaccatctcgactggggggatgtccattaagaacgccaacgtcggcttctacaacaacgac

SEQ ID NO: 39970 - DNA, 102 bp, synthetic construct
  source 1..102: mol_type = other DNA
actcacatggcccctatgaacgtagtgttccatattgtttctgctatcactaccaccggagctaatatcgctacatcctctgagttggctagttgggcacca

SEQ ID NO: 39971 - DNA, 96 bp, synthetic construct
  source 1..96: mol_type = other DNA
tacaccgacaaccccatgaatgccctcttcgacgtgacatccaccattggcaacgttggtctatctacgggggtcatcaacgctagcctggatact

SEQ ID NO: 39972 - DNA, 93 bp, synthetic construct
  source 1..93: mol_type = other DNA
aatagcttcaactttggctggggagacaacccctcttccttcttcatcaacaacgtcgggggatccaccaacctggctaatgccacatcattc

SEQ ID NO: 39973 - DNA, 69 bp, synthetic construct
  source 1..69: mol_type = other DNA
accctgcctaatagcaacctgggcatcaagacactgctgaaccccaactggtccgccctcctcaacatt

SEQ ID NO: 39974 - DNA, 108 bp, synthetic construct
  source 1..108: mol_type = other DNA
ctcggctacatgtcgtcggtatctcctattcctatgaatgagctgatctctgagggcaccggactgatcttcatcgtctttccgcaaatttgtaacgagatgggaatg

SEQ ID NO: 39975 - DNA, 96 bp, synthetic construct
  source 1..96: mol_type = other DNA
aactacggcctgcacttcttcggcggctaccagcctatcatggacaatgtgacaaacgtcatttaccatcctgccatcacctatagcttcgatttt

SEQ ID NO: 39976 - DNA, 72 bp, synthetic construct
  source 1..72: mol_type = other DNA
atgaccggaaccgtcaacgtgaccgacattgtctccatcattcgcggtggactgctcgacgttacaagtccc

SEQ ID NO: 39977 - DNA, 48 bp, synthetic construct
  source 1..48: mol_type = other DNA
gacgtggtgaccagcgggatctccaactacgtcggtggactgttgcca

SEQ ID NO: 39978 - DNA, 96 bp, synthetic construct
  source 1..96: mol_type = other DNA
aactatggcctccactactttggcggctaccagcccgtgctggagcctatcaccaacatgacatatcacccggctatcacttactccttcaacttc

SEQ ID NO: 39979 - DNA, 72 bp, synthetic construct
  source 1..72: mol_type = other DNA
ctcaccgggtccgtcaacattaccgacatcgtcctcgccatccgctccggcatcgtgaatttcaagtctcca

SEQ ID NO: 39980 - DNA, 48 bp, synthetic construct
  source 1..48: mol_type = other DNA
gacgtggtgaccaacgggattagccaatacgttggcggaatgatccac

SEQ ID NO: 39981 - DNA, 96 bp, synthetic construct
  source 1..96: mol_type = other DNA
actggcaccggcattatcgactgtgcattcgagtgcatgtccgcattaaccggttctgggatcaccatctacgctgatgtggaagcactcccttat

SEQ ID NO: 39982 - DNA, 99 bp, synthetic construct
  source 1..99: mol_type = other DNA
gggatgcccatcttcgacgccgtttgcaataccttctctatcatctcaacgggcggcatgagcattaagaacgccaacatcggcttttatcaaaacgac

SEQ ID NO: 39983 - DNA, 102 bp, synthetic construct
  source 1..102: mol_type = other DNA
tccaatatactccctatggacgtcctgttcaccgttgttagtgcaattacaaccactggcgcatcaatcgaatcctctacggttatgggagcttggccctcc

SEQ ID NO: 39984 - DNA, 96 bp, synthetic construct
  source 1..96: mol_type = other DNA
tactgccacgaccccttcaattccctcttcttttctatgagcatgcagggcaacatcgggctggagattggacagttatctcaaactatggaatgg

SEQ ID NO: 39985 - DNA, 93 bp, synthetic construct
  source 1..93: mol_type = other DNA
aattctttttctttctcttggggttccgacaccgccgcttacttcgtgcacaacgtcggcggcagcgagaatctaagcaaaattggcaacttt

SEQ ID NO: 39986 - DNA, 72 bp, synthetic construct
  source 1..72: mol_type = other DNA
acactgcctggggctatgattggcataaacgccctgctgaaccccaactggatggccctcaccgacatcaac

SEQ ID NO: 39987 - DNA, 105 bp, synthetic construct
  source 1..105: mol_type = other DNA
gggttcatgtccgtgacgtcggggacacccatggtggagctcgtgtccgagggcactggcctgatcttcgtggtctttcctaagatcttcgacatgatgggaatt

SEQ ID NO: 39988 - DNA, 93 bp, synthetic construct
  source 1..93: mol_type = other DNA
aattacgggctgcactacttcggcggatatgagcctatgattaacgacgccgtgaaaatgatgtaccatcctgctattacatatagcttcacc

SEQ ID NO: 39989 - DNA, 75 bp, synthetic construct
  source 1..75: mol_type = other DNA
ctcactggatctgtaaatgtgacagacatcgcggctgcggtgcacaatgggctggtggatgctacttcacctgta

SEQ ID NO: 39990 - DNA, 45 bp, synthetic construct
  source 1..45: mol_type = other DNA
gacgtcgtgaccaacgggattagcaattttgttgggggcatcctt

SEQ ID NO: 39991 - DNA, 93 bp, synthetic construct
  source 1..93: mol_type = other DNA
agttcattcaccttctcctggggcgtcgacactgcccactacttcgtatctacggtcggcggctcctctaacctgtctaacgctaacttcctg

SEQ ID NO: 39992 - DNA, 72 bp, synthetic construct
  source 1..72: mol_type = other DNA
acactgcccggggctggcatcggagttaacaccctccttacccctgattggagcaagctggctgacgtgaac

SEQ ID NO: 39993 - DNA, 108 bp, synthetic construct
  source 1..108: mol_type = other DNA
ctgggctacatgagcctcaccaacggaacacccatggtccagctgattactgagggtaccgggctgatcttcatagtgttccctatgatcttcaacatcatgggaccc

SEQ ID NO: 39994 - DNA, 96 bp, synthetic construct
  source 1..96: mol_type = other DNA
aactacggcctccactactttggcggctacgagcccatgctggacaatgtgacaaacgtcatgttccaccctgccatcacttatagcttcaccttc

SEQ ID NO: 39995 - DNA, 75 bp, synthetic construct
  source 1..75: mol_type = other DNA
atgacagggtcggttaatattaccgacatcgctgccgccgtccacaatggcctggtggatgtcacaagcccggtt

SEQ ID NO: 39996 - DNA, 48 bp, synthetic construct
  source 1..48: mol_type = other DNA
cccgacgtcgtgaccaacggcattagcaatttcgttggtggaatcctg

SEQ ID NO: 39997 - DNA, 90 bp, synthetic construct
  source 1..90: mol_type = other DNA
agctttaccttttcttggggcaccgacgctgccgcatactttacacaaaccgtcggcggatcctctaacctgtccaatgccagtttcctg

SEQ ID NO: 39998 - DNA, 72 bp, synthetic construct
  source 1..72: mol_type = other DNA
accctgcccggagccgacattggagtgtccacactcctgactcctgactggggcaagcttatggatgtgaat

SEQ ID NO: 39999 - DNA, 105 bp, synthetic construct
  source 1..105: mol_type = other DNA
ggttatatgtcagccacctccggaaccccaatggtgcagctgatcaccgagggcaccggactcatcttcgtggtcttccctatgattttcaacatcatgggtccc

SEQ ID NO: 40000 - DNA, 93 bp, synthetic construct
  source 1..93: mol_type = other DNA
aattacggcctgcactacttcggcggataccagcccatgctcgacaacgtgaccggcgtcatgtatcaccctgccataacctactcctttacc

SEQ ID NO: 40001 - DNA, 72 bp, synthetic construct
  source 1..72: mol_type = other DNA
ctcaccggttcggtcaacgtcagcgatatcgccgctgccgtgcacgcgggtcttgtgaatgctacttctcca

SEQ ID NO: 40002 - DNA, 45 bp, synthetic construct
  source 1..45: mol_type = other DNA
gacgtggtcaccagcggaatctccaacttcgttggaggcatcctg

SEQ ID NO: 40003 - DNA, 30 bp, synthetic construct
  source 1..30: mol_type = other DNA
gtgagcgaatgcggggaggggtcactgatc

SEQ ID NO: 40004 - DNA, 45 bp, synthetic construct
  source 1..45: mol_type = other DNA
atggccctgcacatccacgagtttgccctcgacgatgctttcacc

SEQ ID NO: 40005 - DNA, 60 bp, synthetic construct
  source 1..60: mol_type = other DNA
ttcatcgccgggctgtttgtgaccgacggcaacatgatggagatggaagctatcaagtac

SEQ ID NO: 40006 - DNA, 96 bp, synthetic construct
  source 1..96: mol_type = other DNA
aactatggcctgcactacttcggcggctacgagcccatcctcgacaatgtcaccaacgtgatgtaccaccctgccatcacgtatagtttcacattt

SEQ ID NO: 40007 - DNA, 72 bp, synthetic construct
  source 1..72: mol_type = other DNA
atgaccggttccgtcaacgtgaccgacatcgctgctgccgttcataatgggctcatttcctctacttcaccc

SEQ ID NO: 40008 - DNA, 45 bp, synthetic construct
  source 1..45: mol_type = other DNA
gacgtcgtgaccaacgggatcagcaattttgtcgggggaattctc

SEQ ID NO: 40009 - DNA, 90 bp, synthetic construct
  source 1..90: mol_type = other DNA
agcttctacttcggatggggcgccgacaccgctctgtttttcgtgaacaacgtcggcggcggttccaatttcaactctcccgtgacaatc

SEQ ID NO: 40010 - DNA, 72 bp, synthetic construct
  source 1..72: mol_type = other DNA
ttcaccctccctaattttcacctgggcatcagcacattgttcaaacccaattggaacatgctgctggacatt

SEQ ID NO: 40011 - DNA, 105 bp, synthetic construct
  source 1..105: mol_type = other DNA
ggctacatgtccgtgaagtctggcatccctattgacaagctcattaccgatggtagcgggcttatcttcgtggtctttccccaaattttcaactccatgggattt

SEQ ID NO: 40012 - DNA, 93 bp, synthetic construct
  source 1..93: mol_type = other DNA
aactacggcctgcactactttggcggatatgagcccattctcgacaacgtcactaacgtgatgtaccaccctgccatcacgtattctttcaca

SEQ ID NO: 40013 - DNA, 72 bp, synthetic construct
  source 1..72: mol_type = other DNA
ctgaccggctccgtcaacgtcaccgatatcgtcgctgccgtacacaacggcttggttaatgtgaaaagtccg

SEQ ID NO: 40014 - DNA, 45 bp, synthetic construct
  source 1..45: mol_type = other DNA
gacgtcgtgaccaatgggatcagcaacttcgttggtggcattctg

SEQ ID NO: 40015 - DNA, 96 bp, synthetic construct
  source 1..96: mol_type = other DNA
ggatctagcttcaacttttcctggggcagcgacaccgccctgtacttcatcaagaatgtcggtggtagctccaacctctctaatatgacacagatc

SEQ ID NO: 40016 - DNA, 72 bp, synthetic construct
  source 1..72: mol_type = other DNA
accctgcctggggcttacatcggcatcaatgccctgatgacgcctgagtggtccttgcttttcaacgtgaac

SEQ ID NO: 40017 - DNA, 108 bp, synthetic construct
  source 1..108: mol_type = other DNA
ctcggatacatgacttatacatcaggtacacctttgacccaactggtgtccgaaggtacaggcctcgtgttcgtggtcctgccccggatctttgacgcaatgggacca

SEQ ID NO: 40018 - DNA, 93 bp, synthetic construct
  source 1..93: mol_type = other DNA
agctccttcacattttcctggggcaccgacgctgcctactattttgtgtccaaggtcgggggaagttccaacctgtcaaacgcttctttcctt

SEQ ID NO: 40019 - DNA, 72 bp, synthetic construct
  source 1..72: mol_type = other DNA
acacttcctggggccgagattggtatcaacaccctcctgactcccgactggggcaagctgatggacgtgaac

SEQ ID NO: 40020 - DNA, 108 bp, synthetic construct
  source 1..108: mol_type = other DNA
ctgggctacatgagcttcactaatgggaccccaatggtccagctgatcaccgaaggaaccggcctgatcttcattgtgtttcctatgattttcaacatcatgggcccc

SEQ ID NO: 40021 - DNA, 90 bp, synthetic construct
  source 1..90: mol_type = other DNA
agcttcaccctcggatggggcaatgacccatcgagcttcttcacatcttacgttgggggaagttcaaatctggctagtgccaccactatt

SEQ ID NO: 40022 - DNA, 75 bp, synthetic construct
  source 1..75: mol_type = other DNA
ttcaccttgcccgggtttagcattgggatcaccacccttctgactcctgactggtccgccctgctgaacgtgaat

SEQ ID NO: 40023 - DNA, 105 bp, synthetic construct
  source 1..105: mol_type = other DNA
ggctacatgtcattgacatccagcatgcctatgaacgagctggtgtctgaaggcacaggcctgatcttcatcgtctttccccaaatatttactaccatgggtcct

SEQ ID NO: 40024 - DNA, 93 bp, synthetic construct
  source 1..93: mol_type = other DNA
aactacggcctgcactttttcggaggctacgcacctatcgccgacaacgtgacagggctcatcttccatcccgctatcacgtattccttcacc

SEQ ID NO: 40025 - DNA, 72 bp, synthetic construct
  source 1..72: mol_type = other DNA
atgacaggaagcgttaacattaccgacatagccgcggccgttcacaacgggcttgtttcatcaacttctccc

SEQ ID NO: 40026 - DNA, 45 bp, synthetic construct
  source 1..45: mol_type = other DNA
gacgtggtcaccaacgggatcagcaatttcgtcggtggcattctc

SEQ ID NO: 40027 - DNA, 93 bp, synthetic construct
  source 1..93: mol_type = other DNA
agctccatcaacttcggctggggagcagattctgccctctacttcgttcgaaacgtcggcgggtcttccaatctggccaacatggccaatttc

SEQ ID NO: 40028 - DNA, 69 bp, synthetic construct
  source 1..69: mol_type = other DNA
accctgcctggcgctgggattggaatcagcgccctgctcaaccccgactggcagatgctgctgaacgtc

SEQ ID NO: 40029 - DNA, 105 bp, synthetic construct
  source 1..105: mol_type = other DNA
ggctatatgtcttacacctctggcacacctatggtcgagctggtgtccgagggaaccgggctcgtgttcgtggtcttcccgatgatcttcaacgtcatgggattc

SEQ ID NO: 40030 - DNA, 90 bp, synthetic construct
  source 1..90: mol_type = other DNA
agcttcacttttgcttggggcaccgatacaagttcctacttcatcaacaacgtcggcggctctgccaatctcctggacgccacaaccttc

SEQ ID NO: 40031 - DNA, 69 bp, synthetic construct
  source 1..69: mol_type = other DNA
accctgcccgggcacatgatcggcatcgatgccctcctgcggcctaagtggcacacacttctggacatc

SEQ ID NO: 40032 - DNA, 105 bp, synthetic construct
  source 1..105: mol_type = other DNA
ggatacatgtccctacacacgggaactgccctcgaacatatagtatctgaaggcaccggcctggtcttcgtggtcttccccatggtcttcaacatcatgggtccc

SEQ ID NO: 40033 - DNA, 93 bp, synthetic construct
  source 1..93: mol_type = other DNA
tccagctttaacttctcctggggcgccgacaccacaagcttcttcatcaatagtgtcggcggctctactaacctggctagacctggtaccttc

SEQ ID NO: 40034 - DNA, 75 bp, synthetic construct
  source 1..75: mol_type = other DNA
ctgaccctgcctgggcacatgattggcatcgatacactcctgcggcccaagtggtttatgctgctcgacgtgaat

SEQ ID NO: 40035 - DNA, 108 bp, synthetic construct
  source 1..108: mol_type = other DNA
ctgggctacatgtccctgcacactggtaccgccatgagcaagctggtgaccgagggcacctctctcgtcttcgtcgtgttcccgatgattttcaacatcatgggaaca

SEQ ID NO: 40036 - DNA, 93 bp, synthetic construct
  source 1..93: mol_type = other DNA
tcttccatcaatttcaactggggctcagacgccagtctgtacttcgtcaatgtggtcggcggcagctccaacctgagcaacatgacaaccttt

SEQ ID NO: 40037 - DNA, 72 bp, synthetic construct
  source 1..72: mol_type = other DNA
ctcaccctgcctggcgcctatatcggcatcgagaccctgctcaaaccagactggaacatgctgtggaacatt

SEQ ID NO: 40038 - DNA, 108 bp, synthetic construct
  source 1..108: mol_type = other DNA
ctcggctacatgagttatagctccggcacaccaatgattgagctgatctctgagggcaccggcctagtcttcgtagtgtttcctcggatcttcaacgttatgggtccc

SEQ ID NO: 40039 - DNA, 93 bp, synthetic construct
  source 1..93: mol_type = other DNA
tcttccctgagctttggctggggcagtgacaccgccctctacttcgtcaagaacgtcggaggcacagctaatatcgccgatttcgccaacttt

SEQ ID NO: 40040 - DNA, 75 bp, synthetic construct
  source 1..75: mol_type = other DNA
ctgaccctgcccggagccggcatcggcatcgacgccctcatcaaccctaattgggctgggctcctggacataaac

SEQ ID NO: 40041 - DNA, 105 bp, synthetic construct
  source 1..105: mol_type = other DNA
ggttatatgactgccacctccgggactcctttggtgcaactagtttctgagggtacaggcctgatcttcgtcgtgtttcccaaaattttttctctaatgggaccc

SEQ ID NO: 40042 - DNA, 93 bp, synthetic construct
  source 1..93: mol_type = other DNA
aactacgggctgcactactttggaggctacgagcccatcctcgacaacgtgacatccttcgtgtaccaccctgccatcacttattctttcaca

SEQ ID NO: 40043 - DNA, 75 bp, synthetic construct
  source 1..75: mol_type = other DNA
ttaactggatccgtgaacgttaccgatatcgccaccgccgtgcacaatggactggtcgacgctacttcacctgtc

SEQ ID NO: 40044 - DNA, 45 bp, synthetic construct
  source 1..45: mol_type = other DNA
gacgtggtcgtgaacggcatctctagcttcgttggtggcattctg

SEQ ID NO: 40045 - DNA, 93 bp, synthetic construct
  source 1..93: mol_type = other DNA
agttccttcaatttcaactggggctcggatagcgcgctgtacttcgtcaagaacgttggtggctcatccaacctgagcaacatggctaacttt

SEQ ID NO: 40046 - DNA, 69 bp, synthetic construct
  source 1..69: mol_type = other DNA
accctgcctggcgctgggattggaatcaatgccctcctcaagcccgactggcagatgctgctgaacgtg

SEQ ID NO: 40047 - DNA, 105 bp, synthetic construct
  source 1..105: mol_type = other DNA
ggctatatgagctacacctctgggacacctatggtggagctggtctctgaaggcactggcttagtgtttgtagtttttcctatgattttcaacatcatgggaccc

SEQ ID NO: 40048 - DNA, 90 bp, synthetic construct
  source 1..90: mol_type = other DNA
tccttcactttcggttggggcaacgacccctctagtttttttacctcctacgttggagggaactccaacctggctagcgccaccacaatc

SEQ ID NO: 40049 - DNA, 72 bp, synthetic construct
  source 1..72: mol_type = other DNA
acactgcccggcttccacattggcgtggctaccctgctcactcctgactggagcgcccttttcaacatcaac

SEQ ID NO: 40050 - DNA, 105 bp, synthetic construct
  source 1..105: mol_type = other DNA
ggctacatgagcattagtagctcgatccctatgaacgagctgatcagcgagggcaccgggctcatcttcattatctttcctcaaatattcaattccatgggaatg

SEQ ID NO: 40051 - DNA, 93 bp, synthetic construct
  source 1..93: mol_type = other DNA
agctccttcaccttctcttggggcgccgacgccgcacactacttcgtgaacaatgtcggggggagctcaaacctctcaaacgcttccttcctg

SEQ ID NO: 40052 - DNA, 72 bp, synthetic construct
  source 1..72: mol_type = other DNA
actctgcccggcgctaacgttgggatcgccacactgctcacccctgactggagcaagcttgtggacgtgaac

SEQ ID NO: 40053 - DNA, 108 bp, synthetic construct
  source 1..108: mol_type = other DNA
ctcggctacatgagcgtgaccaatgggacccctatggtccagctgattaccgagggtactggcctgatcttcatcgtgttcccaatgatcttcaacatcatgggccct

SEQ ID NO: 40054 - DNA, 90 bp, synthetic construct
  source 1..90: mol_type = other DNA
tatggactccactactttggcggctacgagcccatgctggacaccgtgtccggggtcctgtaccaccctgccattacatattcgtttaca

SEQ ID NO: 40055 - DNA, 72 bp, synthetic construct
  source 1..72: mol_type = other DNA
ctcactggctccgtcaatgtcaccgacatagcagtggccgtgcacaacggtctcgtggacgttacctctccc

SEQ ID NO: 40056 - DNA, 45 bp, synthetic construct
  source 1..45: mol_type = other DNA
gacatggccaccggcggcattagcaacttcgttggtggaatcctc

SEQ ID NO: 40057 - DNA, 96 bp, synthetic construct
  source 1..96: mol_type = other DNA
aactacggcctgcactactttggcggatacgctcccatgctcgacaacgtgacatccgtcatgtaccaccctgccatcacctatagcttcaccttt

SEQ ID NO: 40058 - DNA, 75 bp, synthetic construct
  source 1..75: mol_type = other DNA
ctgaccggcagcgttaatgtaacagacatcgccgccgctgtccacaatgggctggttgacgcaacttctcctgtc

SEQ ID NO: 40059 - DNA, 48 bp, synthetic construct
  source 1..48: mol_type = other DNA
gacctggtgacctccggaatcagcaacttcgtcggcattgggcttggt

SEQ ID NO: 40060 - DNA, 90 bp, synthetic construct
  source 1..90: mol_type = other DNA
agcctgacctttgactggggcgccgatgctgccaattacttcgtaaacacagtcggcggcagcagtaacctcgctgacgcctcttccttc

SEQ ID NO: 40061 - DNA, 72 bp, synthetic construct
  source 1..72: mol_type = other DNA
ttcaccctccctggcgccaaaattggcatagacaccttgatctatcccaaatgggagatgttatgggacgtg

SEQ ID NO: 40062 - DNA, 105 bp, synthetic construct
  source 1..105: mol_type = other DNA
ggatacatgagctttacaagtggcacccctatgatccagctgatcactgagggtacaggcctcattttcattgtgttcccccggatcttcaacgtcatgggactg

SEQ ID NO: 40063 - DNA, 93 bp, synthetic construct
  source 1..93: mol_type = other DNA
agctccttcacattctcttggggcaccgacgcggcacaatatttcgtgtccaacgtcggcggttcttctaatctgagcaacgcaagctttttg

SEQ ID NO: 40064 - DNA, 69 bp, synthetic construct
  source 1..69: mol_type = other DNA
acactgcctggcgccggaatcgggattagcaccctgttaacaccggattgggctaagctcatggacatt

SEQ ID NO: 40065 - DNA, 108 bp, synthetic construct
  source 1..108: mol_type = other DNA
ctcggctacatgagctacaccggcggcacccctatggtccagctgattaccgagggcactgggctgatctttatcgtgttcccaatgattttcaacatcatgggacct

SEQ ID NO: 40066 - DNA, 93 bp, synthetic construct
  source 1..93: mol_type = other DNA
agcagctttacattctcttggggcaccgacgccgcccactactttgtgaataacgttggagggagtagtaacctgtcaaacgcatccttcctg

SEQ ID NO: 40067 - DNA, 72 bp, synthetic construct
  source 1..72: mol_type = other DNA
ctcagcctgcctggcgccaacatcgggattggaaccctgctgactcctgactggtccaaattgcttgatgtg

SEQ ID NO: 40068 - DNA, 108 bp, synthetic construct
  source 1..108: mol_type = other DNA
ctcggctacatgtcattcacaaacggaactcctatggtgcagctgattaccgagggcaccggcctgatctttgtggtcttccccatgatcttcaatatcatgggtcca

SEQ ID NO: 40069 - DNA, 90 bp, synthetic construct
  source 1..90: mol_type = other DNA
agcttcacattcggctggggaaacgacccctcttccttctttaccacctacgttggtggaagctccaatctgacctctagtacaactatt

SEQ ID NO: 40070 - DNA, 72 bp, synthetic construct
  source 1..72: mol_type = other DNA
accctgcctggctttaacatcggcgtggccactcttctcacacccgactggagcgctctcttcaacatcaat

SEQ ID NO: 40071 - DNA, 105 bp, synthetic construct
  source 1..105: mol_type = other DNA
ggctacatgagcttgtcctcctcgatccctatgaacgagctgatctccgaaggcaccggcctgatcttcatcatcttcccccaaattttcaactctatgggaatg

SEQ ID NO: 40072 - DNA, 30 bp, synthetic construct
  source 1..30: mol_type = other DNA
gcccggtacctgggcaccacaaacttcggc

SEQ ID NO: 40073 - DNA, 39 bp, synthetic construct
  source 1..39: mol_type = other DNA
aacatgctgacaacaagcgctgtctacggaggcgaagtt

SEQ ID NO: 40074 - DNA, 45 bp, synthetic construct
  source 1..45: mol_type = other DNA
atcatactgttcatctatggccctgcatacgtgaacaccattccc

SEQ ID NO: 40075 - DNA, 93 bp, synthetic construct
  source 1..93: mol_type = other DNA
gcatcctttaatttctcttggggcgccgactccgctctctacttcgtcaagaacgtcggcggttcctcaaacctgtctaacgtggcctcattt

SEQ ID NO: 40076 - DNA, 69 bp, synthetic construct
  source 1..69: mol_type = other DNA
accctgccgggcgccgggattggaatcaacgctctgctgaagcctgactggcagatgctgttcaacatc

SEQ ID NO: 40077 - DNA, 105 bp, synthetic construct
  source 1..105: mol_type = other DNA
ggctacatgagttatacttccggcactccaatggtggagctggtgtccgaaggcacagggctcgtgtttgtagtctttccaatgatcttcaacattatgggaccc

SEQ ID NO: 40078 - DNA, 90 bp, synthetic construct
  source 1..90: mol_type = other DNA
agttttacattctcctggggcgccgatgcggccgcgtatttcacccaaaccgttggcggaagctccaatctgtctaacgctggattcctg

SEQ ID NO: 40079 - DNA, 72 bp, synthetic construct
  source 1..72: mol_type = other DNA
accctgcctggcgctggcatcggcatgaacgccctcctttctcctgactggagcaagctgggggatgtgaat

SEQ ID NO: 40080 - DNA, 105 bp, synthetic construct
  source 1..105: mol_type = other DNA
ggctacatgagcttcaccgccggcacaccaatgatcgagctcatcaccgagggcactgggctgattttcgtcgtcttccccatgatcttcaacattatgggaccc

SEQ ID NO: 40081 - DNA, 93 bp, synthetic construct
  source 1..93: mol_type = other DNA
aattacggactccactactttggcggctacgagcccatcctggacaacgtcactggcatcacttatcaccctgccattgtgtatagcttcact

SEQ ID NO: 40082 - DNA, 72 bp, synthetic construct
  source 1..72: mol_type = other DNA
ttgactggctctgtgaacatcaccgacatcgtctacgccgtgcacaacgggctggtcgattctaaaagtccc

SEQ ID NO: 40083 - DNA, 48 bp, synthetic construct
  source 1..48: mol_type = other DNA
gacgtggtgaccaatggaatcagcaacttcgtcctggggattatcggt

SEQ ID NO: 40084 - DNA, 90 bp, synthetic construct
  source 1..90: mol_type = other DNA
ggcctgcattactttggcggctatgcccctattctggacaacgtgacttccaccgtctatcatcctgctattacctattcgtttaccttc

SEQ ID NO: 40085 - DNA, 72 bp, synthetic construct
  source 1..72: mol_type = other DNA
ctgaccggcagcgtcaacattacggatatagcggccgcggtgcacaacgggttggtggatatgacatctcct

SEQ ID NO: 40086 - DNA, 48 bp, synthetic construct
  source 1..48: mol_type = other DNA
gacgtcgtagtcagtggcatcacctccttcgttggtctcatactgggg

SEQ ID NO: 40087 - DNA, 93 bp, synthetic construct
  source 1..93: mol_type = other DNA
tcaagcttcacattttcctggggcaccgacgtggcccactacttcgtgaacaatgtcggcggctcttctaatctgtctaacgcttcctttctg

SEQ ID NO: 40088 - DNA, 75 bp, synthetic construct
  source 1..75: mol_type = other DNA
ctcacactgcccggcgccagcattgggatcaacaccctcctgacccctgactggacaaagctgactgatgtgaat

SEQ ID NO: 40089 - DNA, 108 bp, synthetic construct
  source 1..108: mol_type = other DNA
ctgggctacatgagctttacccacgggacccctatggtccagctcatcaccgaaggcactggactcgttttcgtcgttttccccatgatcttcaacattatgggccct

SEQ ID NO: 40090 - DNA, 93 bp, synthetic construct
  source 1..93: mol_type = other DNA
aactacggcctgcactactttggaggctacgagcccatcctcgacaacgtgactggcgtgatgtaccaccctgccatcacatatagcttcacc

SEQ ID NO: 40091 - DNA, 75 bp, synthetic construct
  source 1..75: mol_type = other DNA
ctcaccgggagcgttaacgtgacagacatcgctgccgccgtgcactcgggtctgatcgatgcaacaagtccagtg

SEQ ID NO: 40092 - DNA, 45 bp, synthetic construct
  source 1..45: mol_type = other DNA
gacgtcgtgacccaggggatcagcaactttgtcgggggcattctc

SEQ ID NO: 40093 - DNA, 93 bp, synthetic construct
  source 1..93: mol_type = other DNA
agctttaacttcggctggggaaacgatcctagttccttcttcacctcctatgttggcggtagctccaacctggcctcatccgggactattatt

SEQ ID NO: 40094 - DNA, 69 bp, synthetic construct
  source 1..69: mol_type = other DNA
acactgaagggcttcaacgtcggcattaccaccctcctgactcccaattggagcgccctgttcaacatc

SEQ ID NO: 40095 - DNA, 105 bp, synthetic construct
  source 1..105: mol_type = other DNA
ggatacatgtccttaacatcgagcgtgcccatgaacgagctgatcagcgagggcaccgggctgatcttcattatctttcctcaaatctttaacacaatgggtctg

SEQ ID NO: 40096 - DNA, 93 bp, synthetic construct
  source 1..93: mol_type = other DNA
aactatggcctgcactactttggcggctacgctcccatcatggacaatgtcactaacgtgatgtttcaccctgccataacatactcatttacc

SEQ ID NO: 40097 - DNA, 72 bp, synthetic construct
  source 1..72: mol_type = other DNA
ctcacaggttcggttaacgtcactgacatagcagcggcggttcacaatggcctcgtgaatgttacaagtccc

SEQ ID NO: 40098 - DNA, 45 bp, synthetic construct
  source 1..45: mol_type = other DNA
gacgccgtgaccagcgggatttccaactttgttggcggtatcctc

SEQ ID NO: 40099 - DNA, 90 bp, synthetic construct
  source 1..90: mol_type = other DNA
tctttcacctttagctggggcacagacgctgccgcctactttacgcaaactgttggtggctcttcaaatctcagcaatgcatccttcctg

SEQ ID NO: 40100 - DNA, 72 bp, synthetic construct
  source 1..72: mol_type = other DNA
actctgcccggagccggcatcggcattagtacactcctgacccctaactgggctatgctgctggacgtgaac

SEQ ID NO: 40101 - DNA, 105 bp, synthetic construct
  source 1..105: mol_type = other DNA
ggctacatgtccgctacgtccggcactcccatggtgcagctggtgaccgaaggcacaggactgatcttcatcgtgttcccaatgattttcaacgtgatgggacca

SEQ ID NO: 40102 - DNA, 93 bp, synthetic construct
  source 1..93: mol_type = other DNA
tcttcattcacattctcctggggcgcagacgccgctcaatactttacttccaccgtcggcgggagttcaaacctgtctaatgcctcctttctg

SEQ ID NO: 40103 - DNA, 72 bp, synthetic construct
  source 1..72: mol_type = other DNA
actcttcccggcgccgagatcggcatcaatacactgctgacccctgactggaccaagctcatggacgtgaac

SEQ ID NO: 40104 - DNA, 108 bp, synthetic construct
  source 1..108: mol_type = other DNA
ctcggctacatgagcttcaccaacggaaccccaatggtgcagctgatcaccgagggcactgggctgatcttcattgtctttcctatgatcttcaatattatgggacct

SEQ ID NO: 40105 - DNA, 90 bp, synthetic construct
  source 1..90: mol_type = other DNA
tccttcacctttggatggggtaacgatccttcgtccttcttcgcttcctacgtcggaggctctagtaatctggcctctgccacaactatc

SEQ ID NO: 40106 - DNA, 69 bp, synthetic construct
  source 1..69: mol_type = other DNA
accctgcctggctttaatatcgggattacaactctgctgacccctgactggagcgccctgttcaacatc

SEQ ID NO: 40107 - DNA, 105 bp, synthetic construct
  source 1..105: mol_type = other DNA
ggctatatgagcctgacctcctctattcccatgaatgagctgatcaccgaagggaccggactcatcttcatcatcttcccgcaaatcttcaacgcaatgggtagc

SEQ ID NO: 40108 - DNA, 93 bp, synthetic construct
  source 1..93: mol_type = other DNA
agctccctgaatttccaatggggcaacgacgctgccctgtacttcgtggaaagcgtcggcggttcctctaacctcaacaacatcggatttctc

SEQ ID NO: 40109 - DNA, 69 bp, synthetic construct
  source 1..69: mol_type = other DNA
accctccctggggccaacatcggcatcgagactctgctcaagcccgactggacaaagctgctggatatt

SEQ ID NO: 40110 - DNA, 105 bp, synthetic construct
  source 1..105: mol_type = other DNA
ggctacatgagtttcacctccgggacacccatgatccagctggtcagcgagggtactggcctcatcttcattgtgttccctatgatcttcaacatcatgggaatc

SEQ ID NO: 40111 - DNA, 93 bp, synthetic construct
  source 1..93: mol_type = other DNA
agcagctttacattctcctggggcaccgacgctgccaactacttcgtgtctactgtcggcggctcctccaatttaagcaatgcttctttcctg

SEQ ID NO: 40112 - DNA, 72 bp, synthetic construct
  source 1..72: mol_type = other DNA
accctgcctggggccggcatcggcatcaacactcttctgacacccgactggagcaagctcaccgacgtgaat

SEQ ID NO: 40113 - DNA, 108 bp, synthetic construct
  source 1..108: mol_type = other DNA
ctgggatacatgagcttcacaaacggtaccccaatggtgcagctgatcactgagggcaccggcctcattttcatcgtcttccctatgatcttcaacatcatgggacct

SEQ ID NO: 40114 - DNA, 90 bp, synthetic construct
  source 1..90: mol_type = other DNA
tctttcaccttcggatggggcaacgatccagctagcttctttacttcctacgttggcggcagctccgacctgtctagtagcaccacaatc

SEQ ID NO: 40115 - DNA, 69 bp, synthetic construct
  source 1..69: mol_type = other DNA
accctgcccggcttccacatcggagtcagcacactgctcacccctaactggtccatgctgctcgacatc

SEQ ID NO: 40116 - DNA, 108 bp, synthetic construct
  source 1..108: mol_type = other DNA
ggctacatgtcattgcattcctctatccccatgaacgagctcattagcgagggcacaggactgatcttcatcgtgttcccccaaatctttaataccatgggtggaatg

SEQ ID NO: 40117 - DNA, 96 bp, synthetic construct
  source 1..96: mol_type = other DNA
acagggatctccatcgtggacagcattttcgagtccatgagcgctctgaccggctctggaattactatctacgccgatgtggaggtactccctcat

SEQ ID NO: 40118 - DNA, 99 bp, synthetic construct
  source 1..99: mol_type = other DNA
ggcatgcccgtgtttgattctatttgcaatacctttagcacaatctctactggcggcatgtccgtgaagaacgccaacatcggctattaccaaagcgac

SEQ ID NO: 40119 - DNA, 102 bp, synthetic construct
  source 1..102: mol_type = other DNA
tccaacatcgtgccaatggagattctcttccacgtcgtttccgccatcaccacaaccggggcctctattcaatcaagcacagtcatggggacttggcctgct

SEQ ID NO: 40120 - DNA, 96 bp, synthetic construct
  source 1..96: mol_type = other DNA
tacggccacgaccccttcaactctctgttctttacgataagcatgcaggggaacgtcggcctcgagattggacagatgtcccaagttatagaatgg

SEQ ID NO: 40121 - DNA, 96 bp, synthetic construct
  source 1..96: mol_type = other DNA
aattacggcctccactactttggcggctatgagcccattctggacaacgtgactaacgccgtctaccaccctgctatcacgtatagctttaccttc

SEQ ID NO: 40122 - DNA, 72 bp, synthetic construct
  source 1..72: mol_type = other DNA
atgactggcacggtcaacgtcaccgacattgctgctgcggtgcacaacggcctcatcaatgtgacctccccg

SEQ ID NO: 40123 - DNA, 45 bp, synthetic construct
  source 1..45: mol_type = other DNA
gacatcgtcattaacgggatcagcaatttcgttggaggtatcctg

SEQ ID NO: 40124 - DNA, 90 bp, synthetic construct
  source 1..90: mol_type = other DNA
agcttcactttctcttggggcaccgacgccgccgcatacttcacccaaactgtcggcggttcctccaacctgtccaacgctaacttcctg

SEQ ID NO: 40125 - DNA, 75 bp, synthetic construct
  source 1..75: mol_type = other DNA
ctcaccctgcccggagccggcattggcatcaataccctcctgacacctaactggggcatgctgctgaacgtgaat

SEQ ID NO: 40126 - DNA, 108 bp, synthetic construct
  source 1..108: mol_type = other DNA
ctgggctacatgtccgcaaccgctgggacacccatgactcagctgatcaccgaaggcaccggactcatcttcgtcgtgttcccaatgatcttcaacatcatgggaccc

SEQ ID NO: 40127 - DNA, 93 bp, synthetic construct
  source 1..93: mol_type = other DNA
agttcagtgaccttctcttggggctccgacgtggctgcctactttgtccaaaacgttggcggctcttccaacctgtccaacctcggttcactg

SEQ ID NO: 40128 - DNA, 69 bp, synthetic construct
  source 1..69: mol_type = other DNA
acactgcccggggcctccattggcatccagaccctccttcaacctgattggagcaagctgaccgatatt

SEQ ID NO: 40129 - DNA, 105 bp, synthetic construct
  source 1..105: mol_type = other DNA
gggttcatgagcttctcaactgggacccctatggtccagctggtgtctgagggaacaggcctcattttcgtagtttttcctatgatctttaacatcatgggaatc

SEQ ID NO: 40130 - DNA, 87 bp, synthetic construct
  source 1..87: mol_type = other DNA
ttcactagtgcctggggctccgacacaaccagcttcttcgtgaacaacgtcgggggatcaagtaatctgacctcttcggtttcgatc

SEQ ID NO: 40131 - DNA, 69 bp, synthetic construct
  source 1..69: mol_type = other DNA
agtttgcctggctccttctccggcatctctacactgtttacccctaactggaatgccttatatgacata

SEQ ID NO: 40132 - DNA, 105 bp, synthetic construct
  source 1..105: mol_type = other DNA
ggctatatgtctctgatgagcagcgtgcccatcaacgagctgatcacctctggcccatccctcatcttcgtcgtctttccgcaaatcttcaacgtgatgggacca

SEQ ID NO: 40133 - DNA, 93 bp, synthetic construct
  source 1..93: mol_type = other DNA
tcctccttcaatttcgcctggggatctgacgttgtcggctattttaccaactctgtcggcggcagcagtaatttgtccttgaccacatcactg

SEQ ID NO: 40134 - DNA, 72 bp, synthetic construct
  source 1..72: mol_type = other DNA
acacttcccggggctaacattgggatcaatgccctgctgacccctgactggtacaagctcctggacgtgaac

SEQ ID NO: 40135 - DNA, 105 bp, synthetic construct
  source 1..105: mol_type = other DNA
ggattcatgagcctaaattctggtctgcctatagctcagcttgtatctgagggcaccggtctgatctttatggtcctgcctatgattttcaacaagatgggactg

SEQ ID NO: 40136 - DNA, 90 bp, synthetic construct
  source 1..90: mol_type = other DNA
agtatcaacttctcttggggctccgatcctgccctctacttcgctaattcggtcggtggctctcccgacctgagccagattacctccttt

SEQ ID NO: 40137 - DNA, 75 bp, synthetic construct
  source 1..75: mol_type = other DNA
atctctctgcctgggtccgccatcggcattaatacactcctgaaccccgactggaacagcctgaccaaggttgag

SEQ ID NO: 40138 - DNA, 105 bp, synthetic construct
  source 1..105: mol_type = other DNA
ggctacatgtccgccactgctggtacaccaattgtgcacttgatatccgaaggcaccgggctggtcttcatcgtgttccccatgatcttcaacatcatgggaccc

SEQ ID NO: 40139 - DNA, 63 bp, synthetic construct
  source 1..63: mol_type = other DNA
atgtccgggctagactccttcattgatagcctgtctgactccgtcaacgacggcatcgcattt

SEQ ID NO: 40140 - DNA, 75 bp, synthetic construct
  source 1..75: mol_type = other DNA
aacctgggtggagtccctcatgctttcaagatgatctttgaatatgcattcaccgtgccctcggcgttgggggga

SEQ ID NO: 40141 - DNA, 90 bp, synthetic construct
  source 1..90: mol_type = other DNA
agttacggaaactttgagagcattctcgccttcggcgagaagggatctgtcttagtacaatctatagctagcgaatcggttggtaacgac

SEQ ID NO: 40142 - DNA, 90 bp, synthetic construct
  source 1..90: mol_type = other DNA
agtttcaatttcggatggggcaacgaccccgcttccttcttcacctcctacgtcgggggatctagcaacttggcctcatttaccacaatc

SEQ ID NO: 40143 - DNA, 72 bp, synthetic construct
  source 1..72: mol_type = other DNA
acactccctggcttcaacatgggcattgccacccttctgaaccccaactggagcgccctgctgaacatcaac

SEQ ID NO: 40144 - DNA, 105 bp, synthetic construct
  source 1..105: mol_type = other DNA
ggctacatgagcatggcctctagtatccccatggacgagctgattactcaaggtaccggcctcatcttcattgtgttccctcaaatatttaactccatgggtatt

SEQ ID NO: 40145 - DNA, 42 bp, synthetic construct
  source 1..42: mol_type = other DNA
atcgatgttctggagttcgatataatccaagaccaaaccgtg

SEQ ID NO: 40146 - DNA, 132 bp, synthetic construct
  source 1..132: mol_type = other DNA
tacaacccaggcattcttacggcggcaagcttctcccaactgcatcaaatcgccacgggcgagttcactggcgcttaccccattctccacaccatcatcgagatgatctgtctgaagatttacgcttcacca

SEQ ID NO: 40147 - DNA, 225 bp, synthetic construct
  source 1..225: mol_type = other DNA
atttatcaaacggatgccaacaataattttcccgctaacgacgccttcgaggatggcgttaacctggaaaacgctaaatctcagttcttcaaggggatcaacgatgtccctaaggagggcttcgagaatgcaacacaagtcaatgtgaagaccgacaagtttaaaagcctgaactccatcgtggacatgacccgcgagaacattatcctggacgggctccttaac

SEQ ID NO: 40148 - DNA, 36 bp, synthetic construct
  source 1..36: mol_type = other DNA
cccagcattgctgccgaatatggcatgtccaacatc

SEQ ID NO: 40149 - DNA, 36 bp, synthetic construct
  source 1..36: mol_type = other DNA
taccaccttcaatatataaagggcctcgatagtcag

SEQ ID NO: 40150 - DNA, 54 bp, synthetic construct
  source 1..54: mol_type = other DNA
atcatgggcgacgtggccatcattgagccctactatcctctgctcgtccaaagc

SEQ ID NO: 40151 - DNA, 90 bp, synthetic construct
  source 1..90: mol_type = other DNA
agcttcaactttggatggggcacagacacggcggcatacttcgccaacactgtcggaggctccagcaatctctctaactccgggtttctg

SEQ ID NO: 40152 - DNA, 72 bp, synthetic construct
  source 1..72: mol_type = other DNA
accctgcccggcgccggaattggcattgatgctctcctgaagcctaattgggccatgctgctggacgtaaac

SEQ ID NO: 40153 - DNA, 105 bp, synthetic construct
  source 1..105: mol_type = other DNA
ggtttcatgtcattaaattctggcatccccatcaatgagctggtgactgagggcaccggcctgattttcatcgtgttcccacggatcttcaaccttatgggaccg

SEQ ID NO: 40154 - DNA, 90 bp, synthetic construct
  source 1..90: mol_type = other DNA
agcttcactttcggctggggcacggacacagtgtcctactttacccacaccgtcggcggcagcagcaacctggaatctgccggtttcttg

SEQ ID NO: 40155 - DNA, 75 bp, synthetic construct
  source 1..75: mol_type = other DNA
ctgaccctgcctggcgccgggattggaatcaacacactgctaacgccggactggagcaagctgctcgacgtgaac

SEQ ID NO: 40156 - DNA, 105 bp, synthetic construct
  source 1..105: mol_type = other DNA
ggctacatgtcacacactgccggcacccctatgatccagctcattactgagggcaccggactgatctttatcgtgttccccatgattttcaacatcatgggaccc

SEQ ID NO: 40157 - DNA, 156 bp, synthetic construct
  source 1..156: mol_type = other DNA
cttagcaacatgatgatccatgtcgacgagtactggacagtgtctctgattaacctgcccttcatcgagggcatgcgggtggccgcttgcgacgtgcacccacctctccactacctcatcatttatgccctgtctcctatcacccacaactcgctg

SEQ ID NO: 40158 - DNA, 102 bp, synthetic construct
  source 1..102: mol_type = other DNA
cgccaaatcgggacccagatgaatgtgacgtacaaggatatgactctcgccgacatattcaactacattacatctttcgccattaacaatcccgatttcact

SEQ ID NO: 40159 - DNA, 84 bp, synthetic construct
  source 1..84: mol_type = other DNA
agcttcaacttcggatggggcaacgaccccgctagcttctttactaactatgttggcgggtcctctaatctaacaagcgcaaca

SEQ ID NO: 40160 - DNA, 75 bp, synthetic construct
  source 1..75: mol_type = other DNA
ttcacactccctggctttaacaccggaattaccaccctgctaactcccgactggagcgccctgttcaacatcaat

SEQ ID NO: 40161 - DNA, 105 bp, synthetic construct
  source 1..105: mol_type = other DNA
ggttacatgtccttgacctcctcgatccctatgaatgagctgatctctgagggcactggcctgatcttcatcgtgttcccacatatctttaacacaatgggagtg

SEQ ID NO: 40162 - DNA, 87 bp, synthetic construct
  source 1..87: mol_type = other DNA
aaccgctgtgacggacagggcgactgcatcaagaactgcccaagcgaggccattcgcttcgtagacaataagtcattttcgtgcatg

SEQ ID NO: 40163 - DNA, 48 bp, synthetic construct
  source 1..48: mol_type = other DNA
cccaaccacgccatcttcaagaacaaatacggcggctatgtggtagac

SEQ ID NO: 40164 - DNA, 45 bp, synthetic construct
  source 1..45: mol_type = other DNA
aagttcacctgccccattgagtctatccacctggacaacggtgtc

SEQ ID NO: 40165 - DNA, 141 bp, synthetic construct
  source 1..141: mol_type = other DNA
gtgaaatgtggacgatgtgcttactactgccccacccgtgctatcgaagtcataatacaggatgaaggttactgtgtcgggtgcaaagtctgcgaagacctgtgccctaccggcgccctcaaggatggacaatatgatcag

SEQ ID NO: 40166 - DNA, 102 bp, synthetic construct
  source 1..102: mol_type = other DNA
atatccgacgctctttctgtgaaagacttcgaaatcgttaggagcatcaaggatgacactctgtactccaacgccgagggctccatcgtatcttgcttgaac

SEQ ID NO: 40167 - DNA, 66 bp, synthetic construct
  source 1..66: mol_type = other DNA
ggcctctgcgttgacaccttcgatagcccggctatggtccgaaagctcaacgctctgcgttacgac

SEQ ID NO: 40168 - DNA, 36 bp, synthetic construct
  source 1..36: mol_type = other DNA
ctcaccgagaatgaggacaacaagctgttcggttac

SEQ ID NO: 40169 - DNA, 42 bp, synthetic construct
  source 1..42: mol_type = other DNA
ggcaaatgtgtagaggtttgcaatgaggatgccaggaatttc

SEQ ID NO: 40170 - DNA, 75 bp, synthetic construct
  source 1..75: mol_type = other DNA
gccgagctgtgtcccaaagaggctatcaccctcaagaagggcaagatcaacgtggatctggacgaatgcatcatg

SEQ ID NO: 40171 - DNA, 66 bp, synthetic construct
  source 1..66: mol_type = other DNA
gaaacctgtggcatccactgccctaaggacgccatccccaaaaagagctctgttaaatatgaatat

SEQ ID NO: 40172 - DNA, 39 bp, synthetic construct
  source 1..39: mol_type = other DNA
aactacatcgacgagaacctgaaggtctgctgtgtagtg

SEQ ID NO: 40173 - DNA, 33 bp, synthetic construct
  source 1..33: mol_type = other DNA
cccgaggacgccatttacaccatcgatatcagc

SEQ ID NO: 40174 - DNA, 93 bp, synthetic construct
  source 1..93: mol_type = other DNA
tcctcttttactttttcatggggcaatgacgtggccctgtactttgtcaagaacgtcggcggcagctccaacctctctaacctgagctccttt

SEQ ID NO: 40175 - DNA, 69 bp, synthetic construct
  source 1..69: mol_type = other DNA
acactgcctggcgccaacattggcatccagacccttctgcaacctgattggagcaagctgactgacatc

SEQ ID NO: 40176 - DNA, 105 bp, synthetic construct
  source 1..105: mol_type = other DNA
ggattcatgagcttctcctccggtactcctatggtgcagctggtgtctgagggcacagggctgatcttcgtggtctttcccatgattttcaacatcatgggagcc

SEQ ID NO: 40177 - DNA, 102 bp, synthetic construct
  source 1..102: mol_type = other DNA
atgtacctcacgaccaacaaatgcgacgggcagggcgattgcattaggaattgcccttccgaggcgatccgattcgtggataacaaggctttctcttgtatg

SEQ ID NO: 40178 - DNA, 141 bp, synthetic construct
  source 1..141: mol_type = other DNA
gaggcctgtccgaaccatgcaatcttcaagaataaatacgggggttacgtggtggatagagcgaaatgcaacggatgtggcgtttgtcaattcacatgcccaatcgaaagcatccacctggatgacgggatcgttaaaggc

SEQ ID NO: 40179 - DNA, 144 bp, synthetic construct
  source 1..144: mol_type = other DNA
gtgaaatgcggccgttgtgcttattactgtcccacacggagcattgaagtcattatacaagacgagggctactgtgtcggctgcaaagtctgcgaggatgtttgccctaccggcgccctcaaagatggggaatacgacaaatcc

SEQ ID NO: 40180 - DNA, 102 bp, synthetic construct
  source 1..102: mol_type = other DNA
atcaacgaagccctttgcgtcgatgacttcaagatcaaacggtccatcaaggacgacaccttgtactccaatgtggaggggtctatagtttcctgcctgaac

SEQ ID NO: 40181 - DNA, 135 bp, synthetic construct
  source 1..135: mol_type = other DNA
aactgtcctgtatcatccttaaccgagagcgaggataacaagctctttggctactgcgtctcctgcggcaaatgcgttaatgaatgcaaagaggacgcccggaacttccaagtcatatcttgggacggagaagtc

SEQ ID NO: 40182 - DNA, 204 bp, synthetic construct
  source 1..204: mol_type = other DNA
gggatctgcgccgagctctgccctgaggacgctatcacgcttcaacgaggcgccattaacgtggatctggacaagtgcatcatgtgcgagacatgtgctatccactgccccaaggacgccattccaaagactaccagcgtcaaatacgagatatccggtggattcaactacattgatgacaacctctgtgttaaatgcggactg

SEQ ID NO: 40183 - DNA, 45 bp, synthetic construct
  source 1..45: mol_type = other DNA
gccatcaacgctgtggagattccttccgacgaagtcaatttggga

SEQ ID NO: 40184 - DNA, 153 bp, synthetic construct
  source 1..153: mol_type = other DNA
ctgacccaagtaattacgaatatcaacgagttcttcactctgacactgatcaacttccccatttccgatatcctccacattcttggcggagagaccaatcctccactgtacttcctcctggtcaaggggctgagcaagctcgccaatgacttt

SEQ ID NO: 40185 - DNA, 87 bp, synthetic construct
  source 1..87: mol_type = other DNA
aagctcttacaaagcatgaacccccttggcaatctgacaaccgatagcataatacagtcatttgctcactttgcctatagtggcgac

SEQ ID NO: 40186 - DNA, 108 bp, synthetic construct
  source 1..108: mol_type = other DNA
atgtacctgaccacaaacaaatgtgacgggcagggcgactgtatccggaactgtccatctgaggccatccggttcatcgacaacacttccttctcgtgcatgtgctgc

SEQ ID NO: 40187 - DNA, 144 bp, synthetic construct
  source 1..144: mol_type = other DNA
gaggcctgtcctaatcacgctatctttgagaataaatacggtggttatgtcgtggaccgggccaagtgcaacggttgtggcgtttgtgaatttacctgccccatcgagtcaatccacctggataacggcattgttaagggaatc

SEQ ID NO: 40188 - DNA, 162 bp, synthetic construct
  source 1..162: mol_type = other DNA
gagaaatgcgttaaatgcggcagatgcgcgtactattgtcccacccggagcatcgaggtcatcatccaagatgaggggtactgcgtcggctgtaaagtctgcgaggacctgtgtccaactggcgccctcaaggatggagaatatgacaaaagcctgtgtaca

SEQ ID NO: 40189 - DNA, 150 bp, synthetic construct
  source 1..150: mol_type = other DNA
gaaaactgcgtcaacgacgccctgagtgtcaatgattttaaaatcatccggaatatcaaggacgatacactgtactctaatgttgaaggcagcattgtgtcctgcctcaattgcggtctttgcaaggagaccttcgatagtccagctctg

SEQ ID NO: 40190 - DNA, 72 bp, synthetic construct
  source 1..72: mol_type = other DNA
gacatctgccccgaggaggctatctataccgtcgaaatctctaacgacgaggccaacctgggcaccaagaac

SEQ ID NO: 40191 - DNA, 45 bp, synthetic construct
  source 1..45: mol_type = other DNA
gacaagtgcatctactgcggcgcctgcatgaacatttgtccttcc

SEQ ID NO: 40192 - DNA, 30 bp, synthetic construct
  source 1..30: mol_type = other DNA
gcccggtacctgggcacctatgactacggc

SEQ ID NO: 40193 - DNA, 30 bp, synthetic construct
  source 1..30: mol_type = other DNA
ctcagcggctcttacgccgtcggccttttt

SEQ ID NO: 40194 - DNA, 51 bp, synthetic construct
  source 1..51: mol_type = other DNA
aaggacatcatctacatcatttatgggtctgaatacgtggttggagccaac

SEQ ID NO: 40195 - DNA, 39 bp, synthetic construct
  source 1..39: mol_type = other DNA
tacgatctgatcgccattgacgacagcaacctcacactg

SEQ ID NO: 40196 - DNA, 93 bp, synthetic construct
  source 1..93: mol_type = other DNA
agcagctttacgttctcttggggcaatgacgtggccctgtacttcgttcaaaacgttggaggctcctccaacctctctaacctgtcttcattc

SEQ ID NO: 40197 - DNA, 69 bp, synthetic construct
  source 1..69: mol_type = other DNA
accctgcccggggccaacattggcatccagacactcttgcaacccgattggagcaagctgaccgacatc

SEQ ID NO: 40198 - DNA, 102 bp, synthetic construct
  source 1..102: mol_type = other DNA
ggattcatgagcttctccactgggacacctatggtacaactgatctccgagggcactggactgattttcgtcgtgtttcccatgatcttcaacattatgggc

SEQ ID NO: 40199 - DNA, 129 bp, synthetic construct
  source 1..129: mol_type = other DNA
aaccccgggattgccacacacgacaccttcaatcaactacatcaaatcgcctccggccacttcactaattggcacccattcttccatacattcatttcgatgctgtgcctcaacgtgtaccctaacacc

SEQ ID NO: 40200 - DNA, 93 bp, synthetic construct
  source 1..93: mol_type = other DNA
tcctccttttctttctcttggggcaacgacgtggccctctacttcgtcaagaacgttggcggcagctctaatctgagcaacctggggagtttt

SEQ ID NO: 40201 - DNA, 69 bp, synthetic construct
  source 1..69: mol_type = other DNA
acactgcccggggccaacatcggcattcagaccttactccaaccggattggagcaagctgttcgacatc

SEQ ID NO: 40202 - DNA, 105 bp, synthetic construct
  source 1..105: mol_type = other DNA
ggattcatgagcttctctactggaacccctatggtccagctggtgtccgagggcaccgggctcatcttcgtggtttttccgatgatcttcaacattatgggtttc

SEQ ID NO: 40203 - DNA, 45 bp, synthetic construct
  source 1..45: mol_type = other DNA
gggagaagcgctagggtggtcgactccgtggcctctggcgaatac

SEQ ID NO: 40204 - DNA, 66 bp, synthetic construct
  source 1..66: mol_type = other DNA
atgaagcagcttcggaatatcctcgggtttcactctctggtggccgacctgaacaccgatgttgga

SEQ ID NO: 40205 - DNA, 168 bp, synthetic construct
  source 1..168: mol_type = other DNA
ttcatgggcggaatctcccacgccgtggacgtctacgccccggaccactcgggggaccctcaatacgagcaaggaatttacgactacttccaaaaggttggatctatcaatgacattaagtccgataacctggtcatgaacattgtggactccattctgcaagatgct

SEQ ID NO: 40206 - DNA, 60 bp, synthetic construct
  source 1..60: mol_type = other DNA
atcttcgctaatagcgcccagaataagacagtcgtgaacaaggcttccgacaataagacc

SEQ ID NO: 40207 - DNA, 291 bp, synthetic construct
  source 1..291: mol_type = other DNA
aacgtcattttgtcgctaacggaagtgaccaacgtcaccgaggcagttgtcggggaaagcattaaatatacgattactattcacaactcaggcctgagcgacgcaaccgacataaaagtctggaatatactcccggcgggggttaaatatgtcagcggagcagacacttacaacgagaccaccagaaatgccacctggacgatcgacaagatcgaaactgggaaaagcgcccggttcgtcctagtcatcaaggttattcaagctggcaagcttaacaacaccttctttgca

SEQ ID NO: 40208 - DNA, 297 bp, synthetic construct
  source 1..297: mol_type = other DNA
aagactgtcgttaatcggaccagcgataatattaccgtgatccccaacgtcgtcctctccgtggacaagtctgtggacgtgtcctacgtggttgtcggggacctagttaagtatatcattatcgtgcacaacgacggcctgtctgacgcgactgatgtaaaggtctgggatgtgctgcctgttggagtcatgtacgtgtcaggagcggacgcttacgatgaggcaacccacaacgccacttggactatcgctaagatcgaggccggcaaatccgcttctgtggtgctcgtcgtgaat

SEQ ID NO: 40209 - DNA, 222 bp, synthetic construct
  source 1..222: mol_type = other DNA
cggggcaacgatagcgcttttgcctactgttgcgaaaacacaaccgtggtcaatggcacatgtggtgtcgtgatcatctggaatcttgaatacagcgggttgacagacgccaacgaccagttcaagctgtccgccgtcgactttgcatttggacaaagcaatagcataagccacaggaagaataacaacccgagcaacgagacatttaatttcatcgtcaag

SEQ ID NO: 40210 - DNA, 93 bp, synthetic construct
  source 1..93: mol_type = other DNA
aatagtattaactttagctggggcacagacaccgccgcttacttcgtacaaaatgtcggcggcggttctaatctgtccaagatcggcaatttt

SEQ ID NO: 40211 - DNA, 72 bp, synthetic construct
  source 1..72: mol_type = other DNA
accctgcctggggccaacatcggcattgatgctctcctcaagcccaactggaacgctctgctggacgtgaat

SEQ ID NO: 40212 - DNA, 105 bp, synthetic construct
  source 1..105: mol_type = other DNA
ggatacatgaccgccacaagcggcactcccctggtggagatcgtgtccgaaggtaccggcctcatcttcgtcgtgtttcctcggatcttcgacattatgggactg

SEQ ID NO: 40213 - DNA, 93 bp, synthetic construct
  source 1..93: mol_type = other DNA
aacagcttcaccttcaattggggcagtgatcccgctgcctacttcgtgcacaacgtcggcggctccgacaacctgtctaacatctggaacttt

SEQ ID NO: 40214 - DNA, 72 bp, synthetic construct
  source 1..72: mol_type = other DNA
accctgcctggggctattattgggatcaatgccctgctgaaccccaactggaacgccctcttggacgtgaat

SEQ ID NO: 40215 - DNA, 105 bp, synthetic construct
  source 1..105: mol_type = other DNA
ggatatatgagcgccacaagcggaactccgctggctgagatcgtgtccgagggcaccggcctgatcttcgtagtatttcccaagatcttcgacctgatgggtttc

SEQ ID NO: 40216 - DNA, 33 bp, synthetic construct
  source 1..33: mol_type = other DNA
gtgatgggtggctggacattaaccgatatggag

SEQ ID NO: 40217 - DNA, 69 bp, synthetic construct
  source 1..69: mol_type = other DNA
gggcacttcgagttcagcaacatcaccgaagcctggcggtttcccgtagacggccgggacgatattgca

SEQ ID NO: 40218 - DNA, 81 bp, synthetic construct
  source 1..81: mol_type = other DNA
tatggcgagatagggcaggccggagtggtcggaaacgactaccatagcctttacccgattgcaattgccgctttcggagat

SEQ ID NO: 40219 - DNA, 33 bp, synthetic construct
  source 1..33: mol_type = other DNA
cccagcgaggccatccggttcgtggacaacaag

SEQ ID NO: 40220 - DNA, 69 bp, synthetic construct
  source 1..69: mol_type = other DNA
tactactgtcctacacgggccatcgaagtgattatacaagacgatggctattgtgttggttgcaaggtg

SEQ ID NO: 40221 - DNA, 42 bp, synthetic construct
  source 1..42: mol_type = other DNA
gaggatgtctgtcccactggcgctctcaaggacggactgtac

SEQ ID NO: 40222 - DNA, 30 bp, synthetic construct
  source 1..30: mol_type = other DNA
aacgtttgtaaagaggacgccagaaacttc

SEQ ID NO: 40223 - DNA, 48 bp, synthetic construct
  source 1..48: mol_type = other DNA
gtggacgccatttccctcaagcggggcagcatcaacgtcgatctggac

SEQ ID NO: 40224 - DNA, 36 bp, synthetic construct
  source 1..36: mol_type = other DNA
gtgatgggcggatgggagctgagcgacatgcagaac

SEQ ID NO: 40225 - DNA, 69 bp, synthetic construct
  source 1..69: mol_type = other DNA
ggcaacttccaatttagcaatatcagcaacgcctggcacttccccgtggtcgggtactccgacatgatg

SEQ ID NO: 40226 - DNA, 84 bp, synthetic construct
  source 1..84: mol_type = other DNA
tatggcgaaatcgggcagggcggccttgaggctgcagggtaccactctctgcatcccattgccatcgacgccttcggagatgtc

SEQ ID NO: 40227 - DNA, 36 bp, synthetic construct; identical to SEQ ID NO: 40224
  source 1..36: mol_type = other DNA

SEQ ID NO: 40228 - DNA, 69 bp, synthetic construct
  source 1..69: mol_type = other DNA
ggcaacttccaattttctaacatctctaatgcctggcacttccccgtggtcgggtactccgacatgatg

SEQ ID NO: 40229 - DNA, 84 bp, synthetic construct
  source 1..84: mol_type = other DNA
tatggcgaaatcggacagggaggcctcgaggccgcaggctaccactcgctgcatccaattgccatcgatgctttcggagaagtg

SEQ ID NO: 40230 - DNA, 30 bp, synthetic construct; identical to SEQ ID NO: 40072
  source 1..30: mol_type = other DNA

SEQ ID NO: 40231 - DNA, 36 bp, synthetic construct
  source 1..36: mol_type = other DNA
aacatgctgaccacaagcgccgtggttggcgaatac

SEQ ID NO: 40232 - DNA, 45 bp, synthetic construct
  source 1..45: mol_type = other DNA
atcattatgttcatgtacggcagcgcctatgtgaacaccgttcct

SEQ ID NO: 40233 - DNA, 30 bp, synthetic construct
  source 1..30: mol_type = other DNA
gcccggtaccttggcaccttcaactttggg

SEQ ID NO: 40234 - DNA, 33 bp, synthetic construct
  source 1..33: mol_type = other DNA
ttcatgtcgggaagcgttgccgtcggtcttttt

SEQ ID NO: 40235 - DNA, 45 bp, synthetic construct
  source 1..45: mol_type = other DNA
gacattatcaacatcattttcggggccgagtttctggatgctggt

SEQ ID NO: 40236 - DNA, 30 bp, synthetic construct
  source 1..30: mol_type = other DNA
acaaagagcttcactaccgccgaatatggt

SEQ ID NO: 40237 - DNA, 42 bp, synthetic construct
  source 1..42: mol_type = other DNA
gggccaatcgccgacgctctgttcaacggctcgatgcaaatg

SEQ ID NO: 40238 - DNA, 42 bp, synthetic construct
  source 1..42: mol_type = other DNA
ctctacgtgatcaccacccctgagattgctctgggaggatac

SEQ ID NO: 40239 - DNA, 144 bp, synthetic construct
  source 1..144: mol_type = other DNA
atggcctttgtcggcgacgacattcactacgccaagatcctgagcaaccagagcctgtcgtcgtttcttacgttccgctactatgagtggtccagtcggctgatcattgattgcataacagttattctcgctaaggagaactat

SEQ ID NO: 40240 - DNA, 123 bp, synthetic construct
  source 1..123: mol_type = other DNA
gcacccggcaatagcaagcgtgtcattgccgagactgctcggttctacgccgaatatgtcaacttcggaattatcgagaagctctacctgggaacaattcctaccatcggcatcctcctgaag

SEQ ID NO: 40241 - DNA, 153 bp, synthetic construct
  source 1..153: mol_type = other DNA
atcgatataacgtctatccctacctatctcaaaatcgggctgatgcacaacccaatcgtgatcagcgtcttctccaccgtggactctatcacaaagtctatgccgctgatcaatgacacaatccggctgctgacttacaagggtctgcctaac

SEQ ID NO: 40242 - DNA, 30 bp, synthetic construct
  source 1..30: mol_type = other DNA
tcccctaccgtcttcgcttccggatctcgc

SEQ ID NO: 40243 - DNA, 132 bp, synthetic construct
  source 1..132: mol_type = other DNA
ttcaatcctggcttcctgactttcgactcctacaatcagatgcatcagatagccaccaattcctacaacaactggcatccattctttcacactttcatcgaaatgctttgtcttaagctttatgcttctccc

SEQ ID NO: 40244 - DNA, 132 bp, synthetic construct
  source 1..132: mol_type = other DNA
tttaatcctggctttctcgcatacgatagctataaccaactccatcaaatcgcgaccaactcctacaataactggcatccattcttccacacattcatcgaaatgctttgcttgaaagtatacgcaagtcca

SEQ ID NO: 40245 - DNA, 144 bp, synthetic construct
  source 1..144: mol_type = other DNA
atgtctttcatcggcgacgatatctggtacgctaaggtcctgagcaaccagcccctcgttaattttctctcctttaggtactatgagtggtcctcccggctgctgattgactgcattaccgtgatcctcgccaaggagaactac

SEQ ID NO: 40246 - DNA, 120 bp, synthetic construct
  source 1..120: mol_type = other DNA
agccccgggaatgacaaacgggtcatcgctgaaactgccaggttctacgtggaatacgcgaatttcggcatcattgagaagctctacctgggcacaattcctaccatcggaatcctcctg

SEQ ID NO: 40247 - DNA, 153 bp, synthetic construct
  source 1..153: mol_type = other DNA
atcgacatcacgtccatcccaaactatcttaagatcggcctgatgcataaccctatcgtggtttcggcttttagtactgtggatagcatcaccaaatctatgcccctgatcaacgacaccatccatctcttcacatacaagggattgcctaac

SEQ ID NO: 40248 - DNA, 30 bp, synthetic construct
  source 1..30: mol_type = other DNA
agcccaacggttttcgcttccggttctcgg

SEQ ID NO: 40249 - DNA, 129 bp, synthetic construct
  source 1..129: mol_type = other DNA
aacccaggcatcgctaccatcgacaccttcaatcaactgcaccaaatagcgagcgggcacttcacaaactggcaccctttcttccacacattcatcgagatgctctgcctgcggatttacccttctacc

SEQ ID NO: 40250 - DNA, 36 bp, synthetic construct
  source 1..36: mol_type = other DNA
cccaacatgctgatcgacctcaacttaacggccgat

SEQ ID NO: 40251 - DNA, 33 bp, synthetic construct
  source 1..33: mol_type = other DNA
ttccacctgcgatacgtattggactacgaagag

SEQ ID NO: 40252 - DNA, 57 bp, synthetic construct
  source 1..57: mol_type = other DNA
ttcatcgacaaacagcccctgaccctgaagtacctgaaccctctcatcatcaagtct

SEQ ID NO: 40253 - DNA, 30 bp, synthetic construct
  source 1..30: mol_type = other DNA
atcgacgggttgggcgctagtgccgttatc

SEQ ID NO: 40254 - DNA, 57 bp, synthetic construct
  source 1..57: mol_type = other DNA
aagcccatttgcgtgatggccaacatcggcgagtacagcaatatgatctacgcttac

SEQ ID NO: 40255 - DNA, 57 bp, synthetic construct
  source 1..57: mol_type = other DNA
aaccccattatctctctcttttcttcggaatacctggtggtcagggaggtccggaat

SEQ ID NO: 40256 - DNA, 258 bp, synthetic construct
  source 1..258: mol_type = other DNA
aaattcgaagagttacgacaattactagaacagttgaaggatggagatacattcgatttcgaccgggattgcctgttcgagatcgacggcgacctgaccatcaatgccaacaatatcaccatcaacggaaacggctacaagatttacggcaatgattctctctcttgcctgttcaacattttcggcgacaacgtccgcataatcgggctgacatttgactttatgagccagtgctattcctgcccttccttcattacc

SEQ ID NO: 40257 - DNA, 69 bp, synthetic construct
  source 1..69: mol_type = other DNA
ggcaacaatgggatgctggttaactgcacattcatgggcaacgctgccaaggttgggggcaccgtcaac

SEQ ID NO: 40258 - DNA, 33 bp, synthetic construct
  source 1..33: mol_type = other DNA
ggcgataacgggctgatcgacaattgcgtgttc

SEQ ID NO: 40259 - DNA, 48 bp, synthetic construct
  source 1..48: mol_type = other DNA
ggcctcctgaccgggtgcagcttcatcggcaacattgccgagtttgga

SEQ ID NO: 40260 - DNA, 54 bp, synthetic construct
  source 1..54: mol_type = other DNA
atcatcgataacaatgagttcatcgacaactgtgctctatatgcggggggcgcc

SEQ ID NO: 40261 - DNA, 228 bp, synthetic construct
  source 1..228: mol_type = other DNA
cacagtttcattgacggatacgtgaacgacatcgaccttgactatctctctacctaccaatgtgtactagggttcgccgatgagtacatcaacctgtaccccctggtttatgctgcgaatatgaatgccggcgtcaagtactacaacgatgacctgtactcctacggcaactacaactctgaaaacggcgagttcacatttaatcttgttaaagaattccgggatttt

SEQ ID NO: 40262 - DNA, 33 bp, synthetic construct
  source 1..33: mol_type = other DNA
acaaagagcttcaccactgcggaatacggttac

SEQ ID NO: 40263 - DNA, 39 bp, synthetic construct
  source 1..39: mol_type = other DNA
aacgctatcgccaatgccctgttcaacggctctatgcag

SEQ ID NO: 40264 - DNA, 42 bp, synthetic construct
  source 1..42: mol_type = other DNA
ctttacatcatcaccacacctgagattgcactgggaggctac

SEQ ID NO: 40265 - DNA, 33 bp, synthetic construct
  source 1..33: mol_type = other DNA
acaaagagcttcacaacggcaggatacggcgag

SEQ ID NO: 40266 - DNA, 39 bp, synthetic construct
  source 1..39: mol_type = other DNA
aacaccatcgccaacgctctgttcaatggctctatgcag

SEQ ID NO: 40267 - DNA, 42 bp, synthetic construct
  source 1..42: mol_type = other DNA
ctctacatcataaccacacccgagatcgcattgggaggctat

SEQ ID NO: 40268 - DNA, 36 bp, synthetic construct
  source 1..36: mol_type = other DNA
cctgctattagcgagtacttcaccatctccctgaac

SEQ ID NO: 40269 - DNA, 33 bp, synthetic construct
  source 1..33: mol_type = other DNA
ttctacaccgagaagattctgggtatcagctcc

SEQ ID NO: 40270 - DNA, 81 bp, synthetic construct
  source 1..81: mol_type = other DNA
ctgtcgctatcgataccggagggcctgctgacaaacacaattataagaggtagcggcatccaggagttcttgactggaatg

SEQ ID NO: 40271 - DNA, 126 bp, synthetic construct
  source 1..126: mol_type = other DNA
aatcccggcatagcaacggtggacagcatcaaccagcttcaccaaatcgcctctgggcacttcaccaactggcatccattctttcacaccttcatcgagatgctgtgcctgaagatctacccatcc

SEQ ID NO: 40272 - DNA, 144 bp, synthetic construct
  source 1..144: mol_type = other DNA
atgggcctgatgggggatgacgtcagattcagcaaggtcctgtctaaccacaccgtgatcgactacgcctacatgcggtatcacgattggtcaagtcgaatgatcattgagtccgtcctgatttcaattagccatgtgaatatg

SEQ ID NO: 40273 - DNA, 123 bp, synthetic construct
  source 1..123: mol_type = other DNA
tgccctggaaacgccgtccgagtcgccgccgaaaccgctagatggtacccagagttcgcttcctttggcctcatgcaaaagttgtatctggggctggtgcccacatttggtctgctgtttgag

SEQ ID NO: 40274 - DNA, 165 bp, synthetic construct
  source 1..165: mol_type = other DNA
gacatcgcccatctacaagattccctcggggctatgggaagcgttgctagtctgattaagatccccatagtctcgtctatcctcggcgtgttcaagtccattgtcggtatcctgcccggtttggagaacaccatctacctgctgacatacgaaggcattcctaaa

SEQ ID NO: 40275 - DNA, 30 bp, synthetic construct
  source 1..30: mol_type = other DNA
acccccaccgtgttcgccagcggctaccgg

SEQ ID NO: 40276 - DNA, 141 bp, synthetic construct
  source 1..141: mol_type = other DNA
actttcattggcgatgatatcggttacgccaatgtgttgtccaatcaatccctgaccgattttataagcttcaggtatcatgagtggtcttcccggctcattatcgattgtatcaccgtgattttggcaaaggaaaattac

SEQ ID NO: 40277 - DNA, 123 bp, synthetic construct
  source 1..123: mol_type = other DNA
acccctggaaacgctaaaagagttatagtagagactgcccggtactatcccgaatacgtcaacttcggcatcatcgagaagctgtacctcggcacaatcccaaccattggcatcctgctgaag

SEQ ID NO: 40278 - DNA, 153 bp, synthetic construct
  source 1..153: mol_type = other DNA
atcgacatcagtagcatacctgagtacctgaacatcggcctgatgcacaatccaaccgtcgtgtctgcgttctctgccgtggacagcatctccaagtgcatcccactgatctacgatacactgtccctcttcgcctataagggactgcctaac

SEQ ID NO: 40279 - DNA, 30 bp, synthetic construct
  source 1..30: mol_type = other DNA
agccctaccatcttcgagtctggatcacgc

SEQ ID NO: 40280 - DNA, 132 bp, synthetic construct
  source 1..132: mol_type = other DNA
tttaaccctggtatcctcactgtcaactcttactcaatacttcaccaaatcgcttccggggaatttgtcggcccctattccatcttttacacctttatcgtgatggtctgcctaaagatttaccctagtgcg

SEQ ID NO: 40281 - DNA, 219 bp, synthetic construct
  source 1..219: mol_type = other DNA
gtgttcaacgtccacgactccaatgagaagcttatcgagtctaacggcattaacctcgagaagtccaaatacgactttttctcacggatcaatgaaaaccctagcgccagctacgagtctgccacctccatcaaccaggggtccgataaatacacaagcatgaatgggttcgtctcggcatttagcaacaaccccattctgggcactctgttcgagaac

SEQ ID NO: 40282 - DNA, 144 bp, synthetic construct
  source 1..144: mol_type = other DNA
atgggcttcatcggcgacgatatctggtactctaaggtgctaagccgctatactttgccggattttctgagctaccgctactacgagtggtccggccggctcgtgattgacgccatcacaatcattctcactaaggagtcctat

SEQ ID NO: 40283 - DNA, 123 bp, synthetic construct
  source 1..123: mol_type = other DNA
tgccctgggaacgctgagcgtgtcatcgctgagacaggccggttctacgccgaatacgtcaactttggaatcatcgagaagctctatctgggcaccatccccactattgggatattcctgaag

SEQ ID NO: 40284 - DNA, 150 bp, synthetic construct
  source 1..150: mol_type = other DNA
atcgacatctcctcaattccacggtacctgaatatcgggctcatgcacgagcctatcgtcaaatccctgtttagtaccgtgaactctatcacaaagtctatccccctaataaacagcacaattcacgtgttcacttacaagggcattcct

SEQ ID NO: 40285 - DNA, 30 bp, synthetic construct
  source 1..30: mol_type = other DNA
agcccaactatcttcgcttccggatctagg

SEQ ID NO: 40286 - DNA, 39 bp, synthetic construct
  source 1..39: mol_type = other DNA
ctccagtacctggcaaccaacgctgccgttggcatgtat

SEQ ID NO: 40287 - DNA, 45 bp, synthetic construct
  source 1..45: mol_type = other DNA
cccctgatgaccctgatctacggctcccaatatgcaggcagtggt

SEQ ID NO: 40288 - DNA, 156 bp, synthetic construct
  source 1..156: mol_type = other DNA
agcgtggacttctacaataagatctacaatcagtctacacctattggcgatatgaatttcatcattcccgtgctggagaacttcaccatcaagttttccaaggactatgtctccaactgcgtgtttaccaacaacgtcgcaaacggtagaggcggc

SEQ ID NO: 40289 - DNA, 36 bp, synthetic construct
  source 1..36: mol_type = other DNA
agcaccttcacatccaacaaggccggagagaaaggc

SEQ ID NO: 40290 - DNA, 45 bp, synthetic construct
  source 1..45: mol_type = other DNA
tccaagttcaccggcaactccgcctctaaatacggaggagctgtg

SEQ ID NO: 40291 - DNA, 240 bp, synthetic construct
  source 1..240: mol_type = other DNA
cacgagagcagtggacattacgaagggagcaagtggatctccgaagtgaaatatttcaagaatttaatccaaaccagcagttttaccaagaacactgctagcaagggcggcgccatctacggctttaagtcctcttcttccgactcccattccgccaaggctgtcaaatgcaacttcaccaataacaaggcaacaaccggccgggacattttcggcgccacttctagcaactgcatttat

SEQ ID NO: 40292 - DNA, 255 bp, synthetic construct
  source 1..255: mol_type = other DNA
accgtcacaatcaagaagtcagcctctaagctgacactgaccgccaagctgactaaagggaagaccctcatcaagggaaagaaaatcaccttcaccttcaacggaaaaacctactccgccaagaccaactctaaaggcattgcaaagatcacaatttccaagacagtcctgaagaagcttaaggtcggaaagaccatcaagtaccaggctaaatatggcagtctcactgttaagaagagcgccaaagttaagaaa

SEQ ID NO: 40293 - DNA, 129 bp, synthetic construct
  source 1..129: mol_type = other DNA
tatatgcccggcattctgaccttcgactccttcaatcaactgcatcaaatcgcaggcaataactacaacaattggcagccatttttccacacattcatcgagatgctctgcatcaaagtatatccgagc

SEQ ID NO: 40294 - DNA, 138 bp, synthetic construct
  source 1..138: mol_type = other DNA
gggttcctcggcgacgatgagggctactccaagctgctgtctgactaccctctgacacgcctgattgtggatcgttataatgaatggagcagtcgggtcattatcgacgcccttaccatcatccttagccgggagttt

SEQ ID NO: 40295 - DNA, 123 bp, synthetic construct
  source 1..123: mol_type = other DNA
tgccctggaaatgccgagcggacagtgattgagaccggcaggtactacgctgaatacgccaacttcgggatcgtcgagaagctgtatctgggcaccatccccactatcgaaattctcctgaaa

SEQ ID NO: 40296 - DNA, 156 bp, synthetic construct
  source 1..156: mol_type = other DNA
gtggatatcagctccatcaatacacacctcaacattggcctcatgcacaagcccgtggtggccagcctgctgtctgccgctaaaaccgtgactgagtccgtccctctggtcaacgacgcaatcgggctatttagttataaggggattccaaagacc

SEQ ID NO: 40297 - DNA, 30 bp, synthetic construct
  source 1..30: mol_type = other DNA
agccctactatcttcgagtccggatctcga

SEQ ID NO: 40298 - DNA, 33 bp, synthetic construct
  source 1..33: mol_type = other DNA
agcggccttgggcacgtagaggttagcgccgtg

SEQ ID NO: 40299 - DNA, 57 bp, synthetic construct
  source 1..57: mol_type = other DNA
gataagatcctctatgtggtcggggccggagtctcattcgagtattgctacgactac

SEQ ID NO: 40300 - DNA, 33 bp, synthetic construct
  source 1..33: mol_type = other DNA
atctacgagggcctggtctatatcaccgcatat

SEQ ID NO: 40301 - DNA, 54 bp, synthetic construct
  source 1..54: mol_type = other DNA
ttcctgagctatacactgtatcaaactaaagacatggtcgtgatcaaccagatt

SEQ ID NO: 40302 - DNA, 36 bp, synthetic construct
  source 1..36: mol_type = other DNA
ccccagatcgccgtggacctgaacttcaacattgat

SEQ ID NO: 40303 - DNA, 33 bp, synthetic construct
  source 1..33: mol_type = other DNA
ttccacctgctgtacatcaacgactacggagag

SEQ ID NO: 40304 - DNA, 51 bp, synthetic construct
  source 1..51: mol_type = other DNA
atagtcggcgggcagctcggagataccaacgtggactatctcctgattgtc

SEQ ID NO: 40305 - DNA, 51 bp, synthetic construct
  source 1..51: mol_type = other DNA
atgagtatcgctgacacactgaacggccccattagcgatgccttttacttc

SEQ ID NO: 40306 - DNA, 78 bp, synthetic construct
  source 1..78: mol_type = other DNA
ctgaatattagcggcgtcgtgaacgccttcgtgatgatttttcaatatgctttcaactggcagtccatgtttggaggc

SEQ ID NO: 40307 - DNA, 93 bp, synthetic construct
  source 1..93: mol_type = other DNA
tcctacggctcctatgaccagatcctggccattggggccaagggggctcctcttgttcaaaacgtaattgcctctaccgctattggagaggct

SEQ ID NO: 40308 - DNA, 30 bp, synthetic construct
  source 1..30: mol_type = other DNA
atgaaccccaacggccccttttcgaatagc

SEQ ID NO: 40309 - DNA, 48 bp, synthetic construct
  source 1..48: mol_type = other DNA
cccatggtcgtcgtcaatgatcagacagggatgtactctacgggacct

SEQ ID NO: 40310 - DNA, 30 bp, synthetic construct
  source 1..30: mol_type = other DNA
accaagaacttttccacggctgactacggt

SEQ ID NO: 40311 - DNA, 39 bp, synthetic construct
  source 1..39: mol_type = other DNA
ctaccgatctcacaagccctgttcaatggcaacatgcag

SEQ ID NO: 40312 - DNA, 45 bp, synthetic construct
  source 1..45: mol_type = other DNA
ctggagatcctgacaaccgacataattgcgtcccaaggctacatg

SEQ ID NO: 40313 - DNA, 30 bp, synthetic construct
  source 1..30: mol_type = other DNA
acaaagaacttcagcacctccgactacggc

SEQ ID NO: 40314 - DNA, 39 bp, synthetic construct
  source 1..39: mol_type = other DNA
aatcagatcgccggcgctctgttcgacggaaacatgcag

SEQ ID NO: 40315 - DNA, 45 bp, synthetic construct
  source 1..45: mol_type = other DNA
ctttacgttttgacgacggatataattgccaaccagggctacatg

SEQ ID NO: 40316 - DNA, 33 bp, synthetic construct
  source 1..33: mol_type = other DNA
acaaaatcatttagcacggcaggagaaggctat

SEQ ID NO: 40317 - DNA, 39 bp, synthetic construct
  source 1..39: mol_type = other DNA
ggccccatcgctggagccctgttcaatgggaacgtgtac

SEQ ID NO: 40318 - DNA, 45 bp, synthetic construct
  source 1..45: mol_type = other DNA
ctgctgagcattaccacattcgacatagcacagaatggttttttc

SEQ ID NO: 40319 - DNA, 36 bp, synthetic construct
  source 1..36: mol_type = other DNA
ccccagatcctgatcgattttaacttttcgtccgac

SEQ ID NO: 40320 - DNA, 33 bp, synthetic construct
  source 1..33: mol_type = other DNA
ttccaccttcaatatatactggactttgaagaa

SEQ ID NO: 40321 - DNA, 54 bp, synthetic construct
  source 1..54: mol_type = other DNA
atcggcgaccaggcccttgggcccgagcacctcgataacatgttgttggcatcc

SEQ ID NO: 40322 - DNA, 30 bp, synthetic construct
  source 1..30: mol_type = other DNA
acaaaatctttttctactgctgactacggg

SEQ ID NO: 40323 - DNA, 42 bp, synthetic construct
  source 1..42: mol_type = other DNA
aaccagatcgctggggctctgttcgaccaatcaggtcagatg

SEQ ID NO: 40324 - DNA, 45 bp, synthetic construct
  source 1..45: mol_type = other DNA
ctgtacatcctgacgacaacagtcatagccgacaacggcttcatg

SEQ ID NO: 40325 - DNA, 36 bp, synthetic construct
  source 1..36: mol_type = other DNA
ccccagatcctgattgactttaacttttcctctgag

SEQ ID NO: 40326 - DNA, 30 bp, synthetic construct
  source 1..30: mol_type = other DNA
tatttgcaatacattctggacttcgaggag

SEQ ID NO: 40327 - DNA, 51 bp, synthetic construct
  source 1..51: mol_type = other DNA
attggcaatcaggccctgggacccgagcacctggaccatatgctgctcatc

SEQ ID NO: 40328 - DNA, 135 bp, synthetic construct
  source 1..135: mol_type = other DNA
acagggaatatcatcgaaggatacttcgagaacaacacctgcactaacactgggggcgtgatgacctctatggcgacggtgcagaataacaccttcaaaggctcattttacaagaacagcgccagaattggaggc

SEQ ID NO: 40329 - DNA, 138 bp, synthetic construct
  source 1..138: mol_type = other DNA
aatatcattatcggagagttcatcaataactccgctacccgatacggatctgccatttattttcggggaacacctttcaacaagatcattaactcttccttcatcaacaaccaaattccttcaaagaacctgaacgtc

SEQ ID NO: 40330 - DNA, 108 bp, synthetic construct
  source 1..108: mol_type = other DNA
gctattaacctgaaccccgggaattacaccatcgagaccatcttcaacggcactagcgtcgagaataacattgaggtgctgcctacactcatcgcgcaaaatctaatt

SEQ ID NO: 40331 - DNA, 57 bp, synthetic construct
  source 1..57: mol_type = other DNA
ttcctgatctccctgattgacggcaagagcaatcccgtcgccaacgtgaacatcaca

SEQ ID NO: 40332 - DNA, 102 bp, synthetic construct
  source 1..102: mol_type = other DNA
attcttactgccatcgatccactgaccggcctgatggtgtcttacaacatcaccgtcctccctacacttaccgtggatgacctcaacatgacatatctggac

SEQ ID NO: 40333 - DNA, 54 bp, synthetic construct
  source 1..54: mol_type = other DNA
cagttcaaggccaagctggtggacggccagggcaaggaactcgagaacgcaggt

SEQ ID NO: 40334 - DNA, 36 bp, synthetic construct
  source 1..36: mol_type = other DNA
cggtacacagattcgagcggtatcgccgctttgaac

SEQ ID NO: 40335 - DNA, 57 bp, synthetic construct
  source 1..57: mol_type = other DNA
agcatgtacgaaaacgccgtgacatccaacaagattacgattttctctaaggaggac

SEQ ID NO: 40336 - DNA, 39 bp, synthetic construct
  source 1..39: mol_type = other DNA
atccctacaatcgccgctgagttccacatgagcaacatt

SEQ ID NO: 40337 - DNA, 36 bp, synthetic construct
  source 1..36: mol_type = other DNA
taccatctgcaatacatcaagggctatgattcccag

SEQ ID NO: 40338 - DNA, 54 bp, synthetic construct
  source 1..54: mol_type = other DNA
gtgatgggcaacgtgcctattgtcgaggagtattaccccttgctaattagctca

SEQ ID NO: 40339 - DNA, 30 bp, synthetic construct
  source 1..30: mol_type = other DNA
acaaagaacttctcgaccgctgactatggg

SEQ ID NO: 40340 - DNA, 39 bp, synthetic construct
  source 1..39: mol_type = other DNA
caccagatcagcgacgtgctgttcgatggatctatgcaa

SEQ ID NO: 40341 - DNA, 45 bp, synthetic construct
  source 1..45: mol_type = other DNA
ctgcacattctgactacaaccgtgatcgccgacaacggcttcatg

SEQ ID NO: 40342 - DNA, 30 bp, synthetic construct
  source 1..30: mol_type = other DNA
accaagagcttttctaccgccgactacggc

SEQ ID NO: 40343 - DNA, 39 bp, synthetic construct
  source 1..39: mol_type = other DNA
ccccagatcgccgacgctctgttcgatggaagtctccag

SEQ ID NO: 40344 - DNA, 45 bp, synthetic construct
  source 1..45: mol_type = other DNA
ctgtacattctgacaaccactatcatcgccgatagcggcttcatg

SEQ ID NO: 40345 - DNA, 30 bp, synthetic construct
  source 1..30: mol_type = other DNA
accaagaactttagtaccgccgactacggc

SEQ ID NO: 40346 - DNA, 39 bp, synthetic construct
  source 1..39: mol_type = other DNA
caccagatcgctgacgccctgttcgatggctctatgcag

SEQ ID NO: 40347 - DNA, 45 bp, synthetic construct
  source 1..45: mol_type = other DNA
ctgtacatcctgacaaccactgtgattgccgacaacggcttcatg

SEQ ID NO: 40348 - DNA, 30 bp, synthetic construct
  source 1..30: mol_type = other DNA
accaaaagcttctcaactgccgattacggc

SEQ ID NO: 40349 - DNA, 42 bp, synthetic construct
  source 1..42: mol_type = other DNA
aaccagatcgccagcgctctgttcgactcaatgatgggccaa

SEQ ID NO: 40350 - DNA, 45 bp, synthetic construct
  source 1..45: mol_type = other DNA
ctgtacatcctgacaactaccgtgattgccgacaacggcttcatg

SEQ ID NO: 40351 - DNA, 96 bp, synthetic construct
  source 1..96: mol_type = other DNA
gtcaacgcacccttcatcgatgctttcttcgagaatatgagcgcctggaccggctccgggctcacactgttcgccgacgtggaaatcctgccttat

SEQ ID NO: 40352 - DNA, 99 bp, synthetic construct
  source 1..99: mol_type = other DNA
ggtctacctgtcttcgatgctatcaacctgactttcacaaccatctccaccggaggcatgagcattaagaacgccaacgtcggattctaccacgacaac

SEQ ID NO: 40353 - DNA, 102 bp, synthetic construct
  source 1..102: mol_type = other DNA
acccgcaatgaacccgtcgagacgctcttccacgtaatcagcgccatcaccaccactggagcaaacatctcatctcctgcatacatgacaacctggccatcc

SEQ ID NO: 40354 - DNA, 99 bp, synthetic construct
  source 1..99: mol_type = other DNA
ttcggttatgatccgtttcaaagcctgttcgacatcataagcacccagggcaacgttgggctgtctctcggcgtcattggacctgggttgttggatccc

SEQ ID NO: 40355 - DNA, 99 bp, synthetic construct
  source 1..99: mol_type = other DNA
gctaccaacattcctatcattgacggagtctttgaaagcatgtccgccctcaccggcaccggaatcactatgttcatggatgtggagatcctgccacac

SEQ ID NO: 40356 - DNA, 99 bp, synthetic construct
  source 1..99: mol_type = other DNA
gggatgcccctgttcgactccatttgcaacacctttcatactgtatcaaccggcggaatgtctatcaagaacgccaacatgggcttctaccacaataac

SEQ ID NO: 40357 - DNA, 102 bp, synthetic construct
  source 1..102: mol_type = other DNA
tccaacatcgtgccaatagagttgctgttcaccgtcgttagcgccatgacaactaccggagctagtgtcgcatcgccaacggcaatggcaggctggcaaccc

SEQ ID NO: 40358 - DNA, 93 bp, synthetic construct
  source 1..93: mol_type = other DNA
ggatacgatccctttaagtccctgttcgccgctatgtcactacaagggaataatggactggacctgggaatcatcaactatcaccttgacccg

SEQ ID NO: 40359 - DNA, 96 bp, synthetic construct
  source 1..96: mol_type = other DNA
acaggaattagtcctgtggacagcgtcttcgagtccatgagcgccctgaccgggtctggcatcactatctactccgatgtggaggctctgccttac

SEQ ID NO: 40360 - DNA, 99 bp, synthetic construct
  source 1..99: mol_type = other DNA
ggcatgcccttttttgactcaatttgcaacacattctgcatcatctccaccggtggcatgtctgtgaagaatgccaacatcggatactacaacgactat

SEQ ID NO: 40361 - DNA, 99 bp, synthetic construct
  source 1..99: mol_type = other DNA
tccactattatcccaatggacatgctgttcaccgtggtctcatccatcactacgacgggggcctctatccctaactccacggttatggctgcttggccc

SEQ ID NO: 40362 - DNA, 96 bp, synthetic construct
  source 1..96: mol_type = other DNA
tacggccacgaccccttcaactctctgttctttacattctcaatgcaaggcaacatcggcctcgagattggacagctgagccagaccatcgaatgg

SEQ ID NO: 40363 - DNA, 144 bp, synthetic construct
  source 1..144: mol_type = other DNA
atgggcctcaacggggacgacattaaatatgctaaggtgctgtccaaccaaacccttgtcgactaccttcactaccgctattacaactggagctctaggctgatcattgacggaatcctcgtcattctagcgcgtttggatatg

SEQ ID NO: 40364 - DNA, 120 bp, synthetic construct
  source 1..120: mol_type = other DNA
cctggcaactccatccggttcgctcacgaggccgccttctggtaccccgagttcgtgaattttaccatcattgagaagtcctatctgggactggtcaccacattcgggactctcatcgag

SEQ ID NO: 40365 - DNA, 171 bp, synthetic construct
  source 1..171: mol_type = other DNA
atagatattagcatacttgattcatccgtgaaatccctgggatcattctcgaatgtcatcaagagcagtccactgatagtgattcctaagatgttcaagcacgttgttggggccacaccctatctgactgagacactgaagctgttcacctatgagggcgtgccggcgctg

SEQ ID NO: 40366 - DNA, 30 bp, synthetic construct
  source 1..30: mol_type = other DNA
agccccgtcgtgttccctagtggtgctaga

SEQ ID NO: 40367 - DNA, 99 bp, synthetic construct
  source 1..99: mol_type = other DNA
tccactaacatccccatcgtcgacggcgtgttcgaatctatgtctgccctgactggcaccggaattaccatgttcgaggacgtggaaatcttgcctcac

SEQ ID NO: 40368 - DNA, 99 bp, synthetic construct
  source 1..99: mol_type = other DNA
ggaatgcccttattcgattcgatctgcaattctttccatataatatcaactggaggcatgtccatcaagaacgccaacatgggctactatcaaaatgat

SEQ ID NO: 40369 - DNA, 102 bp, synthetic construct
  source 1..102: mol_type = other DNA
tctaacatcgtgccgatagatctgctgttcaccgttgtgtctgcaattaccacaactggcgcgtctgtggccatgcccgccgaaatggcaggctggccacct

SEQ ID NO: 40370 - DNA, 96 bp, synthetic construct
  source 1..96: mol_type = other DNA
tatggctacgatccttttaagtccctgttcgctgccatgtctctacaaggtaacaacgggctcgacctgggcatcgtgaaccacacccttaaccct

SEQ ID NO: 40371 - DNA, 144 bp, synthetic construct
  source 1..144: mol_type = other DNA
atggggttcaacggagacgacatcaaatacgcaaaggtgctcacaaaccagagcctggtggattacatcaactatcggtactacaattggtcctctcgcctcatcattgacggcctgctggtcatcctcacacggattgatatg

SEQ ID NO: 40372 - DNA, 123 bp, synthetic construct
  source 1..123: mol_type = other DNA
tgccctggcaacaacatccggtttgctcacgaagtcgcctactggtaccccgagtttgccaacttcacgatcctggacaagtcctatctgggactcgtgacaacattcgggtccctgattgaa

SEQ ID NO: 40373 - DNA, 171 bp, synthetic construct
  source 1..171: mol_type = other DNA
attgacataagcgttctggagacaagcctgaaaagcctgggaaacgtgcctggggtcattaagaatagccctcttatggccataccacacctgtttgagcaaatagtttccgccacgccttatctcactgagacccttaaactctttacctacgaaggacttcctaagctg

SEQ ID NO: 40374 - DNA, 33 bp, synthetic construct
  source 1..33: mol_type = other DNA
tcccctgtcgtgtttccctcgggtgcaagagtc

SEQ ID NO: 40375 - DNA, 99 bp, synthetic construct
  source 1..99: mol_type = other DNA
accaacatgccctacattgacgccgtgtttgagtctctctccgcgctcactggaactgggatcacaatgttttctgatgtcgaggctctgcctcatagc

SEQ ID NO: 40376 - DNA, 99 bp, synthetic construct
  source 1..99: mol_type = other DNA
ggaatgcccgcttttgattcgctgtgcaacaccttcacaattatctccaccggaggcatgaacatcaagaacgccaatatgggctactaccaatctgat

SEQ ID NO: 40377 - DNA, 102 bp, synthetic construct
  source 1..102: mol_type = other DNA
tctaacatcgtcccgatggaattgctgttcactatcgtgtctgccataacgacaaccggggcaaacgtggcccctcaacacgtgatggccgcttggccctcc

SEQ ID NO: 40378 - DNA, 93 bp, synthetic construct
  source 1..93: mol_type = other DNA
ggatacgaccccttcaaatctctgtttgccgctatgaccatgcaaggaaataacggcctcgagctcggcatcattaaccacacactgaaccct

SEQ ID NO: 40379 - DNA, 99 bp, synthetic construct
  source 1..99: mol_type = other DNA
attacagggctgagcatgattgactccatcttcgagtgcatgtctgccctcaccggaagtggcatcaccatctaccccgacgtggagatcctgccttac

SEQ ID NO: 40380 - DNA, 99 bp, synthetic construct
  source 1..99: mol_type = other DNA
ggcatgcccatattcgattcggtctgcaatacattctgtattatctctaccggaggcatgtccgtgaagaacgccaacatcggcttttaccaaaacaat

SEQ ID NO: 40381 - DNA, 102 bp, synthetic construct
  source 1..102: mol_type = other DNA
agttacattgtccccatggacattctgttcgtcgtggtcagcgcaattaccactaccggtgcctccatccaatcttctactgtaatgggcggatggcctgct

SEQ ID NO: 40382 - DNA, 96 bp, synthetic construct
  source 1..96: mol_type = other DNA
tacggacacgacaccttcgactctctctttttcacaatctccatgcaaggcaatatcggcctggagatcggccagattagccagtccctggattgg

SEQ ID NO: 40383 - DNA, 48 bp, synthetic construct
  source 1..48: mol_type = other DNA
atgattaatatgtacaccatcattaacatcgccaacctgctcaaccag

SEQ ID NO: 40384 - DNA, 69 bp, synthetic construct
  source 1..69: mol_type = other DNA
ttcaagaacattcctagcatgtttatcctgatatttcaagatgctttcaactttcaaagcattttcggc

SEQ ID NO: 40385 - DNA, 78 bp, synthetic construct
  source 1..78: mol_type = other DNA
tgcaccgggattatgcccgacgcatccctggccggcgctccttacgttcaaaacagcatccagaccgtcctaggaaac

SEQ ID NO: 40386 - DNA, 99 bp, synthetic construct
  source 1..99: mol_type = other DNA
agcactaacattcccatcgtcgacggcgtgttcgagtctatgtccgccctgaccgggaccgggataaccatgtttgagaacgtggagatcctgcctcat

SEQ ID NO: 40387 - DNA, 99 bp, synthetic construct
  source 1..99: mol_type = other DNA
ggcatgcccctgttcgactccatttgcaatagcttccatattatttcgaccggcggaatgtctatcaagaacgccaacatggggtactaccaaaacgac

SEQ ID NO: 40388 - DNA, 102 bp, synthetic construct
  source 1..102: mol_type = other DNA
tctaatattgtgcccattgatctcctcttcaccgttgtctccgcgattacgaccactggagccagcgttgccatgccgcacgacatggcgggctggccaagt

SEQ ID NO: 40389 - DNA, 93 bp, synthetic construct
  source 1..93: mol_type = other DNA
ggctacgatcctttcaagtccctgtttgctgccatgagcctccaaggcaataacggactggaccttggcatcgtgaatcacaccctgaacccc

SEQ ID NO: 40390 - DNA, 141 bp, synthetic construct
  source 1..141: mol_type = other DNA
ggattcaatggtgacgacatcaaatatgcaaaggtcctgagcaaccagaccctcattgattacctccactttcggtactataactggagtagtagactgattatcgatggcctgttagttatactagtcagacttgacatg

SEQ ID NO: 40391 - DNA, 120 bp, synthetic construct
  source 1..120: mol_type = other DNA
cccggcaactccatccggttcgctcacgaagccgccttttggtaccctgagttcgtgaacttcactatcattgagaagtcttacctcgggctggtcaccaccttcggaacactgatcgag

SEQ ID NO: 40392 - DNA, 171 bp, synthetic construct
  source 1..171: mol_type = other DNA
atcgatatctccattctggattccagcctgaagagcctgggctcttcctccaacgcaatcaaatctagtcctctcatcggaattacgaagatgttcaaacaaatcgtcggcgcgacgccctttctcactgaaaccctgaaactgttcacctatgaaggggttccggcgctg

SEQ ID NO: 40393 - DNA, 30 bp, synthetic construct
  source 1..30: mol_type = other DNA
agccccgtggtcttccctagtggagcacgg

SEQ ID NO: 40394 - DNA, 96 bp, synthetic construct
  source 1..96: mol_type = other DNA
actcacatgcccgcaatcgacgctgtcttcgagtccatgagcgccctgaccggcaccggcattaccatgtttgaggatgtggaagtgcttcctcat

SEQ ID NO: 40395 - DNA, 99 bp, synthetic construct
  source 1..99: mol_type = other DNA
ggcatgcccgtgttcgattccatttgcaacaccttctcgataatctctaccggcggcatgagcatcaagaacgccaacatgggcttttatcaaaatgat

SEQ ID NO: 40396 - DNA, 102 bp, synthetic construct
  source 1..102: mol_type = other DNA
tctaacattgtaccaatcgacctgctgttcaccgtggtgtcggcaataacaaccacgggcgcatctgtcgcttccccacttgcgatgggcaattggccttct

SEQ ID NO: 40397 - DNA, 93 bp, synthetic construct
  source 1..93: mol_type = other DNA
ggctacgaccccttccggtcactgtttgccgctatgtccctacaaggaaacaatggcttggagcttggcgtgatcaaccacaccctgcatccg

SEQ ID NO: 40398 - DNA, 96 bp, synthetic construct
  source 1..96: mol_type = other DNA
acagatattagtatcgtggacagcatcttcgagtccatgtccgccctgactgggtctggcatcactatatactctgatgtcgaagtgctgccacag

SEQ ID NO: 40399 - DNA, 99 bp, synthetic construct
  source 1..99: mol_type = other DNA
ggcatgcccgtgttcgattccgtctgcaacacattctgtataatttccacgggcggaatgtctatcaagaatgccaacattgggttctaccaaaacgat

SEQ ID NO: 40400 - DNA, 102 bp, synthetic construct
  source 1..102: mol_type = other DNA
tcaaacattctgcccatggacatcgtgttcgtggtcgtgtcggccgtcaccactaccggcgcctctatccaatcatccactgtgatgggaggatggcaccca

SEQ ID NO: 40401 - DNA, 96 bp, synthetic construct
  source 1..96: mol_type = other DNA
tacggccacgacccgctgaacagccttttcttctcgatgtccatgcaagggaacgttgggcttgaaatcggctctatgtctcaaaccatagagatg

SEQ ID NO: 40402 - DNA, 99 bp, synthetic construct
  source 1..99: mol_type = other DNA
atcaccgacgccaatatcgtgaactgtctcttcgagtgcatgtccgctctaaccggttccgggatcactatcttcgctgatgttgagagcttgcctcag

SEQ ID NO: 40403 - DNA, 99 bp, synthetic construct
  source 1..99: mol_type = other DNA
ggcatgcccctctttgattccgtttgtaacactttcaccatcatatccacgggtggaatgtctatcaagaacgccaatattgggttttatcaatctgat

SEQ ID NO: 40404 - DNA, 102 bp, synthetic construct
  source 1..102: mol_type = other DNA
tccaacatcgttccaatcgaaatacttttcaccgtcgttagcgccattaccacaacgggcgctagcgtccaatctagtactgtcatgggaagttggcctcct

SEQ ID NO: 40405 - DNA, 99 bp, synthetic construct
  source 1..99: mol_type = other DNA
tgcgggcacgatgtgattgactctctcttctatacgataagcatacagggcaacgtcggactggagatcggcaatatatctcaagcgttgcaacctcag

SEQ ID NO: 40406 - DNA, 300 bp, synthetic construct
  source 1..300: mol_type = other DNA
tccccaatgggctccattgcccacgagaaaagcgagttcgtccactctgagattacgagtcaaggcgtccttttccccggctatatcgattcgcaaaataatgcctctgggtacctgaccattgctagcgccgcaaatctgcctaaggagaagacaatcttcacaaccgattggagcaacgagaatatcaattacactaaagtcagttataacctggactttaaggacaacatcttctattcttacgtggcgcaggcgatcggaattgaactcgccaagatcctgaacctcaacaatatt

SEQ ID NO: 40407 - DNA, 132 bp, synthetic construct
  source 1..132: mol_type = other DNA
agctcttacatcgggttttcgcaactcaaatttgtcatcaccgattacccctctctgataagtatcattaagattcctaaccaaatcgcaatgcagattaacctcttttccgtgatcgataatcatcccctg

SEQ ID NO: 40408 - DNA, 54 bp, synthetic construct
  source 1..54: mol_type = other DNA
agcctgtccaagggcattattaacctcgagaccgggatcgacatcatctactac

SEQ ID NO: 40409 - DNA, 102 bp, synthetic construct
  source 1..102: mol_type = other DNA
gcgaccaacatggccccaattgatgctgtgttcgagtctatgagtgcccttaccggcaacggcatgacgctatacccggatgtggaaatcctgcctcattcc

SEQ ID NO: 40410 - DNA, 99 bp, synthetic construct
  source 1..99: mol_type = other DNA
ggaatgccactttttgactccatctgttcaactctgtctatcgtgtccaccggcggcatgagcatcaagaacgccaatatgggctactatcacgacgac

SEQ ID NO: 40411 - DNA, 102 bp, synthetic construct
  source 1..102: mol_type = other DNA
tccaatattgtgcctatggatctccttttcaccgtagtgtcagccatcaccacgactggcgcatctgtcgcctcaccaaccgcgatgggaaactggccttct

SEQ ID NO: 40412 - DNA, 96 bp, synthetic construct
  source 1..96: mol_type = other DNA
tacggctatgaccccttcaaatccctgtttgccgctatgtccctgcaaggcaataacggacttgagctgggcattatcaccccttctctcgatccc

SEQ ID NO: 40413 - DNA, 144 bp, synthetic construct
  source 1..144: mol_type = other DNA
atggggttcaacggcgacgacattagatacgcaaaggtcctgtcaaatcagacgttgatcgattatattggattcaggtactacaattggagctccagaatcattattgacggcctgaccgtgtttctgactcgtcaaaatatg

SEQ ID NO: 40414 - DNA, 117 bp, synthetic construct
  source 1..117: mol_type = other DNA
cctggcaacggcgttcggtttgcctacgaagtgaccagctggtatcccgagttcgctggattcggcgtcatggagaagtcctacctgggcctcgtgaccacattcgggaagctgatt

SEQ ID NO: 40415 - DNA, 171 bp, synthetic construct
  source 1..171: mol_type = other DNA
atcgacatttccgtgctcgactcctccctcaaaagtttgggctcagtgttcgatgcaatcaagaactcaccactgatggccattcctgatatgttcaaacacattgtcaatgcggtccccttcgtcaccggaacactgaagctgtttacatacgagggagtgcctggtatc

SEQ ID NO: 40416 - DNA, 30 bp, synthetic construct
  source 1..30: mol_type = other DNA
agccccgtgatcttcccttctggagctcgg

SEQ ID NO: 40417 - DNA, 99 bp, synthetic construct
  source 1..99: mol_type = other DNA
atcaccgggatcaacattgaggatagcctgttcgagtctatgagtgccctgaccggttccggcattacaatataccaagatgtggagatcttgccacaa

SEQ ID NO: 40418 - DNA, 99 bp, synthetic construct
  source 1..99: mol_type = other DNA
ggaatgcccatcttcgactccgtctgtaatacctttacaattatctccaccggaggaatgagcatcaagaacgccaatattggcttctaccaaaatgat

SEQ ID NO: 40419 - DNA, 102 bp, synthetic construct
  source 1..102: mol_type = other DNA
tccgacatcgtgccaatcgagattctcttcaccgtcgtgtccgccgtgacgacaaccggggcctccgtacaatcgagtactgttatggggaattggcccccg

SEQ ID NO: 40420 - DNA, 99 bp, synthetic construct
  source 1..99: mol_type = other DNA
tacggccacgaccctatcgagggcctgtttttcaccatgtcacttcaagggaacgtcggtctcgagattgggcatgtgacaagcgcccttcaacctcag

SEQ ID NO: 40421 - DNA, 39 bp, synthetic construct
  source 1..39: mol_type = other DNA
ctggagaacatcattggcaatttcgccactggcatctac

SEQ ID NO: 40422 - DNA, 48 bp, synthetic construct
  source 1..48: mol_type = other DNA
gacataatcctgctcatctacggccccgagtatattgattctgcacct

SEQ ID NO: 40423 - DNA, 99 bp, synthetic construct
  source 1..99: mol_type = other DNA
gccacccacattcccgtgctggacggagtgttcgaatccatgagcgctctgaccgggacaggcatcactatgtttatggatgtcgagatccttcctcat

SEQ ID NO: 40424 - DNA, 99 bp, synthetic construct
  source 1..99: mol_type = other DNA
ggaatgcccgtgtttgatagcatatgcaataccttccacatggttagcaccggaggaatgtctattaagaacgccaacatggggttttaccacgacgat

SEQ ID NO: 40425 - DNA, 102 bp, synthetic construct
  source 1..102: mol_type = other DNA
tccaacatcgtgcccatcgatctcctctttaccgtggtcagcgcgatgacgacaacaggcgccagcgtggcatctccggctaccatggccggatggccacct

SEQ ID NO: 40426 - DNA, 93 bp, synthetic construct
  source 1..93: mol_type = other DNA
ggttatgacccgttcaagtccctgttcgctgccatgagcctgcaaggcaacaacggattggagctcggaattattaactataccctcgatcct

SEQ ID NO: 40427 - DNA, 45 bp, synthetic construct
  source 1..45: mol_type = other DNA
ctgccctctatcgagcagagcttctccctcacctctagagaaagt

SEQ ID NO: 40428 - DNA, 39 bp, synthetic construct
  source 1..39: mol_type = other DNA
atcgacagcagtaacttcaccgcctccctgctgtctatg

SEQ ID NO: 40429 - DNA, 33 bp, synthetic construct
  source 1..33: mol_type = other DNA
ctcgtgatccttagcatgggccttaacgaccag

SEQ ID NO: 40430 - DNA, 96 bp, synthetic construct
  source 1..96: mol_type = other DNA
acacatatgcctcctctggatgccgtgttcgaatctatgagcgctctctccgggactggcattaccatgtttaacgacgtcgagatcctgcctcac

SEQ ID NO: 40431 - DNA, 99 bp, synthetic construct
  source 1..99: mol_type = other DNA
ggtatgcccgtgttcgactccatatgtaatagttttcacattatatcgactggcggaatgggcatcaagaatgccaacatgggctattaccacaacgat

SEQ ID NO: 40432 - DNA, 102 bp, synthetic construct
  source 1..102: mol_type = other DNA
tccaacatcgtgcccatcgaattgctcttcacggtcgtctccgccatgacgacaactggtgcttctgtggcaagctcaaccaccatggccgggtggcctagt

SEQ ID NO: 40433 - DNA, 93 bp, synthetic construct
  source 1..93: mol_type = other DNA
ggctacgacccttttaaatctctcttcgctgccatgaccctccaaggtaacaatggcctggagcttgggatcatcaacaacacactgaacccc

SEQ ID NO: 40434 - DNA, 132 bp, synthetic construct
  source 1..132: mol_type = other DNA
tacgatcctggcatactggcccaagacagcttttaccaaatgaaccagattgctcgcgggtcattcaccaattggcacccttttttccacacttttatcgagatgctgtgcctcaaactatacccggacact

SEQ ID NO: 40435 - DNA, 141 bp, synthetic construct
  source 1..141: mol_type = other DNA
gggttcaacggcgatgatatcaaatatgcaaagatcctcaacaatcaaaccctgatcgactatgtgaattttaggtactacaattggagctcccggatcattatagatactgttttggcaatcctcgcgaggcagaatatg

SEQ ID NO: 40436 - DNA, 120 bp, synthetic construct
  source 1..120: mol_type = other DNA
cccggcaactctatccggttcgcacaagaggttagctactggtatcctgagttcgccaacttcaccattttgcaaaaatcttacctgggcctcgtgacaaccttcggtaacctgatcgaa

SEQ ID NO: 40437 - DNA, 168 bp, synthetic construct
  source 1..168: mol_type = other DNA
attgacattagtgtcttggagacatccctgaagtctctcggatccgtacccaacgtcatcaaatcttcccctctcatgctgatcccacaaatattcaagcaaatcgtcaacattgtgccattcatcaccgacaccctgaagctgtttacttacgaagggcttccaaaa

SEQ ID NO: 40438 - DNA, 33 bp, synthetic construct
  source 1..33: mol_type = other DNA
agccccgtcatcttcccttctggtgctagagtg

SEQ ID NO: 40439 - DNA, 42 bp, synthetic construct
  source 1..42: mol_type = other DNA
ctgggctacctggcctccaatagcgctgttggcctctataat

SEQ ID NO: 40440 - DNA, 45 bp, synthetic construct
  source 1..45: mol_type = other DNA
ctgatgaacctcatctacggcaaccaatacgttaacgctggtagc

SEQ ID NO: 40441 - DNA, 42 bp, synthetic construct
  source 1..42: mol_type = other DNA
gcagtgccaagcatagacgccgaatatgggatgaacaatatc

SEQ ID NO: 40442 - DNA, 36 bp, synthetic construct
  source 1..36: mol_type = other DNA
taccatttgcaatacatcaagggctacgatagccag

SEQ ID NO: 40443 - DNA, 54 bp, synthetic construct
  source 1..54: mol_type = other DNA
gtgatgggcaacgtccccatgaccgagaagtactttccacaactaatagccagc

SEQ ID NO: 40444 - DNA, 96 bp, synthetic construct
  source 1..96: mol_type = other DNA
actgacattcatatcattgatgctatcttcgagagcatgagtgcactcaccggttcgggcatcacaatttactccgacgtggaatccttgccacac

SEQ ID NO: 40445 - DNA, 99 bp, synthetic construct
  source 1..99: mol_type = other DNA
ggaatgcccctgttcgactccgtctgtaacacattttgcattatctctaccggcggaatgtcagttaagaatgccaacatcggcttctacaacaacgag

SEQ ID NO: 40446 - DNA, 102 bp, synthetic construct
  source 1..102: mol_type = other DNA
tctaccatcatcccaatggacatgttttttacggtggtgtcagccattactaccactggtgccagcattcctaactccgtcaccatgggaggttggcctagc

SEQ ID NO: 40447 - DNA, 99 bp, synthetic construct
  source 1..99: mol_type = other DNA
tacggacacgacccttttaatagcctgttcttcaccatgagcatgcagggtaacgtcggtctggaaattgggcagatctctcaaaccatggagttgccc

SEQ ID NO: 40448 - DNA, 99 bp, synthetic construct
  source 1..99: mol_type = other DNA
gctaccaacatgcctatcatcgacgccgtcttcgagtctatgagcgctctaacgggttctgggatgaccatgtaccccgacgtggagattcttccacac

SEQ ID NO: 40449 - DNA, 99 bp, synthetic construct
  source 1..99: mol_type = other DNA
ggcctgcccgcttttgactctatctgcaataccctctccataatctctacgggtggcatgagcattaagaacgccaacatgggcttctaccacgacgat

SEQ ID NO: 40450 - DNA, 102 bp, synthetic construct
  source 1..102: mol_type = other DNA
tccaatattgtgcccatggatctcctcttcacggtcgttagcgccatcactaccacgggcgccaacgtggcatcacctgcaaccatggcttcttggcccccg

SEQ ID NO: 40451 - DNA, 93 bp, synthetic construct
  source 1..93: mol_type = other DNA
ggttacgacccttttcggagcctgttcgctgtgatgtccctgcaaggtaacaacggccttgagctcggaatcattaattctgctctgcatccc

SEQ ID NO: 40452 - DNA, 90 bp, synthetic construct
  source 1..90: mol_type = other DNA
agcttcaccttcaactggggaactgacaccgccgcatacttcgtgaacacagtcggcggctcatctaatctgagtaacgcttccttcctg

SEQ ID NO: 40453 - DNA, 72 bp, synthetic construct
  source 1..72: mol_type = other DNA
accctgcccggcgccgggattgggatcaacacactgctgacccctgactggtctatgctttggaacgtggat

SEQ ID NO: 40454 - DNA, 105 bp, synthetic construct
  source 1..105: mol_type = other DNA
ggatttatgagcttcaccaacggaacacccatgattcagctcattaccgagggcactggcctggtcttcatcgtgttccctatgatcttcaacatcatgggtccc

SEQ ID NO: 40455 - DNA, 99 bp, synthetic construct
  source 1..99: mol_type = other DNA
agcaccaacatccccattctcgacggagtcttcgagtccgtgtctgccctgaccgggactggcatcacaatgttccaagacgttgagatcttgcctcac

SEQ ID NO: 40456 - DNA, 99 bp, synthetic construct
  source 1..99: mol_type = other DNA
gggatgcccatcttcgatgctctgtgcaacaccttccacataatttcaactggggggatgtccgttaagaacgccaacatgggctattaccatgacgac

SEQ ID NO: 40457 - DNA, 102 bp, synthetic construct
  source 1..102: mol_type = other DNA
tccaatattctccctatggaactgctctttaccgtggtgtctgctattaccacaactggcgccaatatcgttccaagtaacgtaatgggctcctggccctct

SEQ ID NO: 40458 - DNA, 93 bp, synthetic construct
  source 1..93: mol_type = other DNA
ggttatgacccctttaagtccctgttcgttgccatgtcgctgcaaggtaacaacggcctggacatcggactcatcaatcacaccctgaacccc

SEQ ID NO: 40459 - DNA, 96 bp, synthetic construct
  source 1..96: mol_type = other DNA
accgacatttcctttattgactcggcgttcgagtctatgagtgccctgaccgggagcggcatcacaatctactccgatgtcgaagtgctgccttat

SEQ ID NO: 40460 - DNA, 99 bp, synthetic construct
  source 1..99: mol_type = other DNA
ggcatgcccttctttgactctatctgtaacaccttctgcattataagtactggggggatgagcgtcaagaatgccaacatgggcttctacaacaacgac

SEQ ID NO: 40461 - DNA, 99 bp, synthetic construct
  source 1..99: mol_type = other DNA
tcccagatcgtgcccattgacatgctattcacggtggtgtctgccgtcacaaccaccggggctagtattccgaactcaactgtgatgggcaattggcca

SEQ ID NO: 40462 - DNA, 96 bp, synthetic construct
  source 1..96: mol_type = other DNA
tacgggcacgacgccttcaatagcctgttctttacaattagcatgcaggggaacgtcggcctagagatcggacagatttctcaaacaatgcaatgg

SEQ ID NO: 40463 - DNA, 99 bp, synthetic construct
  source 1..99: mol_type = other DNA
tctactaacatccccattatcgatggcgtctttgaatccatgagcgccctcaccggaaccgggattacaatgttcatggacgtggagatcctgccacac

SEQ ID NO: 40464 - DNA, 99 bp, synthetic construct
  source 1..99: mol_type = other DNA
ggcatgcccgtattcgatagtgtctgcaacacatttactattatctccaccggcggcatgtctatcaagaatgccaacatgggcttctaccacaacgac

SEQ ID NO: 40465 - DNA, 102 bp, synthetic construct
  source 1..102: mol_type = other DNA
tccaacattatccccatcgaacttctctttactgtagtatctgccattaccacgactggcgcctctatagccatgcctcacactatggccggctggccttcc

SEQ ID NO: 40466 - DNA, 93 bp, synthetic construct
  source 1..93: mol_type = other DNA
ggctatgacccctttaagtccctgttcgccgctatgagcctgcaaggcaataacggtcttgagctcggaattatcaattacaccctcaacccc

SEQ ID NO: 40467 - DNA, 102 bp, synthetic construct
  source 1..102: mol_type = other DNA
gttaccgacatcgggattatcgatgccgtattcgaatccgtgtccgccctgaccgggagtggcatcacaatctaccccgacgtggaatccctccctcattct

SEQ ID NO: 40468 - DNA, 99 bp, synthetic construct
  source 1..99: mol_type = other DNA
ggcatgcccgtgttcgattctatttgcaacacattctcaatcataagtacaggcggcatgaatgtcaagaacgccaacatgggcttctacaacaacgat

SEQ ID NO: 40469 - DNA, 102 bp, synthetic construct
  source 1..102: mol_type = other DNA
tccaccatcattcctatggacaatctcttcgtcgtcgtgtccgcggttaccactaccggggctagcattcagtcaccaatggtcatgggaggctggcctccc

SEQ ID NO: 40470 - DNA, 96 bp, synthetic construct
  source 1..96: mol_type = other DNA
ggaggtcacgaccccttcgatagtctgttctttacatttagcatgcagggcaatatcggcctggagattgggaacatcagccaggcgttatcgtct

SEQ ID NO: 40471 - DNA, 96 bp, synthetic construct
  source 1..96: mol_type = other DNA
accggcatttctcctatcgacggcgtgttcgagtccatgagcgccctcactggaactggcatcaccatgtttgtggatgttgaggtcttgccacac

SEQ ID NO: 40472 - DNA, 99 bp, synthetic construct
  source 1..99: mol_type = other DNA
ggcatgcccgtcttcgacgccatctgcaacacatttcacattgtgtccaccggcggaatgggcatcaagaatgctaacatgggctactaccaatcagat

SEQ ID NO: 40473 - DNA, 102 bp, synthetic construct
  source 1..102: mol_type = other DNA
tccgatatcgttccgatcgacctcgtctttacggtcgtctccgctatcaccactaccggagcttcagtcgctgtacctaacgtaatggctgggtggccatct

SEQ ID NO: 40474 - DNA, 93 bp, synthetic construct
  source 1..93: mol_type = other DNA
ggatacgacccatttcgctccctgttcgccgctatgtcactgcaaggcaataacggactggagctcggcatcattacacctaccctgaatcct

SEQ ID NO: 40475 - DNA, 99 bp, synthetic construct
  source 1..99: mol_type = other DNA
gccacacacatccccctgctcgacggggtcttcgagtccctgagtgcactgactggcaccggaattaccatgttcaacgacgtggagatccttcctcac

SEQ ID NO: 40476 - DNA, 99 bp, synthetic construct
  source 1..99: mol_type = other DNA
ggcatgcccgtgttcgactctatctgcgccaccttccacatcatatcgaccgggggaatgggcatcaagaatgccaacatggcttattacaattccgat

SEQ ID NO: 40477 - DNA, 105 bp, synthetic construct
  source 1..105: mol_type = other DNA
actagcaccatcgtccccatggaactcctgttcaccgtcgtgtccgccatcaccacaaccggcgctacaatcgtacccgctcccgtcatggggaattggcctccg

SEQ ID NO: 40478 - DNA, 93 bp, synthetic construct
  source 1..93: mol_type = other DNA
ggctacgatccctttaagtctctcttctccgtcatcacgctgcaagggaacaacggcctggactctggagtgattacaaacgccttgcatccc

SEQ ID NO: 40479 - DNA, 99 bp, synthetic construct
  source 1..99: mol_type = other DNA
gtctcagatttgtcttttatcaacggagtgttcgaatcaatgtccgccctgaccggctccgggatcacaatgtaccagaatgtggagatcctgccatac

SEQ ID NO: 40480 - DNA, 99 bp, synthetic construct
  source 1..99: mol_type = other DNA
ggcatgcccgtattcgattcaatatgcaacaccttcaccatcataagtactggcgggatgtccattaagaatgccaacatcggctactatcaaagtgat

SEQ ID NO: 40481 - DNA, 102 bp, synthetic construct
  source 1..102: mol_type = other DNA
tccgacatttatccaatcgaactcctgtttactgtggtatctgccgcaacaaccacgggagcctctgtggtcgggttcgacgtcatgaggacgtggccaagt

SEQ ID NO: 40482 - DNA, 99 bp, synthetic construct
  source 1..99: mol_type = other DNA
tacgggcacgatcccttttactccctgtttgacaccatctcaatacaaggaaatgtcggcttaacactgggcgagatcaacttctctctcgaagacccc

SEQ ID NO: 40483 - DNA, 96 bp, synthetic construct
  source 1..96: mol_type = other DNA
accaacatcccactgctggatggaattttcgagtccatgagcgccctcacgggaacagggattactatgtttcaagatgttgaaatcctgcctcac

SEQ ID NO: 40484 - DNA, 99 bp, synthetic construct
  source 1..99: mol_type = other DNA
ggaatgcctctgttcgatgcgatatgctctacgctgcacatcgtgtccaccggaggcatgggcattaagaatgccaacatggcctattaccacaacgat

SEQ ID NO: 40485 - DNA, 102 bp, synthetic construct
  source 1..102: mol_type = other DNA
tccaacatcgtgcccatggaactcctcttcaccgtggtgtccgcaatcactacgaccggggccacggttgtacaccctgacattatggctgggtggccctcc

SEQ ID NO: 40486 - DNA, 93 bp, synthetic construct
  source 1..93: mol_type = other DNA
ggctacgaccctttcaaatccctgtttgctgccatgaccctgcaaggcaataatggtctcgagttgggaatcattaaccacacattgcatcca

SEQ ID NO: 40487 - DNA, 99 bp, synthetic construct
  source 1..99: mol_type = other DNA
gccacaaacattccaatcatcgacgccatcttcgagtccatgagcgctctgactgggactggcgtgaccatgtaccccgatgtcgaagtgttgcctcac

SEQ ID NO: 40488 - DNA, 99 bp, synthetic construct
  source 1..99: mol_type = other DNA
ggcatgcccctgttcgactccgtctgtaacaccttttcgatcattagcaccggtggcatggggatcaagaacgccaacatgggattttaccaaaatgat

SEQ ID NO: 40489 - DNA, 102 bp, synthetic construct
  source 1..102: mol_type = other DNA
tccaacatcattcccatggaactcctcttcaccgtggtgtcagccatgacaaccactggagctagtgtcgtccctgcgcacgtaatggccggatggcccagc

SEQ ID NO: 40490 - DNA, 93 bp, synthetic construct
  source 1..93: mol_type = other DNA
ggatacgacccttttaattcactatttgccgctatgacactccaagggaataacggccttgagcttggcgtggtgacccacaagttgcatcct

SEQ ID NO: 40491 - DNA, 96 bp, synthetic construct
  source 1..96: mol_type = other DNA
acaggaatctccattgtggacgccattttcgagagcatgagtgctctcactggctctgggatcaccatctacggcgatgtcgaaagcctgccttac

SEQ ID NO: 40492 - DNA, 99 bp, synthetic construct
  source 1..99: mol_type = other DNA
ggcatgcccttgtttgatagcatctgcaacacattctgtatcatctccaccggcggcatgagcgttaagaacgccaacatcgggttctacaacaacgat

SEQ ID NO: 40493 - DNA, 102 bp, synthetic construct
  source 1..102: mol_type = other DNA
tccaagatagtgcctatggatattctgttcactgtagtgtctgcaataactactacgggagcttcgatccaaagctctactgtaatggttggatggcccagc

SEQ ID NO: 40494 - DNA, 96 bp, synthetic construct
  source 1..96: mol_type = other DNA
tacggccacgaccccatacatagcctctttttcaccatctctatgcaaggaaacgtcggactggagatcgggcagatttcttccgtgctggaatgg

SEQ ID NO: 40495 - DNA, 144 bp, synthetic construct
  source 1..144: mol_type = other DNA
atgggcctgaacggtgacgacatcaaatacgctaagattctgaataatcagaccattatcgagtacatcaatttccgatactttaattggtcgtctcgactcatcatcgacacactgctcgccatcctggctcgccaaaatatg

SEQ ID NO: 40496 - DNA, 120 bp, synthetic construct
  source 1..120: mol_type = other DNA
cccggaaactctatccggttcgcccacgaggtcagctattggtaccctgagttcgctaatttcacaattatcgagaagtcctacctgggcctggtgaccacttttggcaacctcattgag

SEQ ID NO: 40497 - DNA, 171 bp, synthetic construct
  source 1..171: mol_type = other DNA
atcgacatttccgtgcttgagacttctattaagtctctgggctcagttcctgaggttattaagaattctcaagcaatggccgtccctgccatgttcaaacaagtagttaacgctactccatatatcaccgaaacgctgaagctgtttacttacgagggtatccccaaggtc

SEQ ID NO: 40498 - DNA, 30 bp, synthetic construct
  source 1..30: mol_type = other DNA
agccccactgtgtttccgtctggcgccaga

SEQ ID NO: 40499 - DNA, 96 bp, synthetic construct
  source 1..96: mol_type = other DNA
accgatatcaacatcctcgacggaatgttcgagtctatgtccgccttgacgggatctggcattacgatctactccgacgtcgaagttctgccacag

SEQ ID NO: 40500 - DNA, 99 bp, synthetic construct
  source 1..99: mol_type = other DNA
ggaatgcccatcttcgattctatctgcaacaccttcactacaatctccaccggcggcatgagcattaagaacgccaacatcgggttctaccaaaacgat

SEQ ID NO: 40501 - DNA, 99 bp, synthetic construct
  source 1..99: mol_type = other DNA
tctaacattatccccatcgagctgctcttcaccgtagtgtctgcggtgacaacaacaggggcgtcggttcaaccctcaactgtgatgggaacatggcca

SEQ ID NO: 40502 - DNA, 93 bp, synthetic construct
  source 1..93: mol_type = other DNA
gggcacgaccccatagttggtctcttctacaccatgagcattcaaggaaatgtcgggcttgagatcggacagataacgcaggtacttcaacct

SEQ ID NO: 40503 - DNA, 96 bp, synthetic construct
  source 1..96: mol_type = other DNA
accgggatctccatcgtggactccgtgttcgagtctatgagtgccttaaccgggagtggcattacgatctattcggacgtcgaagtgcttccatac

SEQ ID NO: 40504 - DNA, 99 bp, synthetic construct
  source 1..99: mol_type = other DNA
ggcatgcccttattcgattctatttgtaatacattttgcatcatctccaccggcggcatgtctgtgaagaacgccaacatcggatactacaacgattac

SEQ ID NO: 40505 - DNA, 99 bp, synthetic construct
  source 1..99: mol_type = other DNA
agcacaatcatcccaatggacatgctgttcaccgtagttagcagtatcaccactaccggcgcctctattcctaattctaccgtgatggctagatggccc

SEQ ID NO: 40506 - DNA, 96 bp, synthetic construct
  source 1..96: mol_type = other DNA
tacggccacgaccccttcaactccctgttctttaccttcagcctgcagggcaacattggactggagatcgggcagctcagccaaacaatcgaatgg

SEQ ID NO: 40507 - DNA, 99 bp, synthetic construct
  source 1..99: mol_type = other DNA
gtcaccggcatcggactcatcgacggcatcttcgagtctatgtccgccctgaccgggagcgggattacaatttacgacaacgtggagatccttccatac

SEQ ID NO: 40508 - DNA, 99 bp, synthetic construct
  source 1..99: mol_type = other DNA
ggcatgcccattttcgatagcgtttgttcaacattctccattatctccaccggaggcatgtccatcaagaatgccaacatcggctactatcaatctgac

SEQ ID NO: 40509 - DNA, 105 bp, synthetic construct
  source 1..105: mol_type = other DNA
acaaccactatcgtgcctatcgacctgctcttcacaatagtgtccgctgtgactaccaccggcgcctccgtcgagtctcccattatgatgggatcttggccaaca

SEQ ID NO: 40510 - DNA, 96 bp, synthetic construct
  source 1..96: mol_type = other DNA
tacggacacgagcccatcgcctctctgttctacaccattagtttgcaaggaaacgttggcctagaaatcagccggatgactagtacactcgaactg

SEQ ID NO: 40511 - DNA, 99 bp, synthetic construct
  source 1..99: mol_type = other DNA
tctacacacattcccatcatcgacggagtcttcgaatcaatgtccgccctgaccggcactgggattaccatgttcatggacgtggagatcctccctcac

SEQ ID NO: 40512 - DNA, 99 bp, synthetic construct
  source 1..99: mol_type = other DNA
ggcatgcccctgttcgactccgtctgcaacaccttccacatggtatcgaccggcggaatgtctatcaagaacgccaatatgggcttttaccacaacgat

SEQ ID NO: 40513 - DNA, 102 bp, synthetic construct
  source 1..102: mol_type = other DNA
tccaacattgtccccatcgaccttctgttcacggtggtcagcgctatgacgaccaccggcgcatccgttgcgtctccaactacgatggcaggctggccgtct

SEQ ID NO: 40514 - DNA, 93 bp, synthetic construct
  source 1..93: mol_type = other DNA
ggctacgaccccttcaagtccctctttgctgccatgagcctgcaaggcaataacggactggagctcggcatcataaactacacccttgatcca

SEQ ID NO: 40515 - DNA, 96 bp, synthetic construct
  source 1..96: mol_type = other DNA
accgggatctccattgtggacagcgtcttcgagagcatgtccgcactgactggcagtggaatcaccatctactctgacgtggaagtgttgccatat

SEQ ID NO: 40516 - DNA, 99 bp, synthetic construct
  source 1..99: mol_type = other DNA
gggatgcccctgttcgattccatttgcaacacattctgcatcattagcaccggaggcatgtctatcaagaacgccaacatcggctactataacgactac

SEQ ID NO: 40517 - DNA, 99 bp, synthetic construct
  source 1..99: mol_type = other DNA
tccaccatcattccaatggacatgctgttcactgtggtgtctgcaatcactactacgggcgccagcatccctaacgccactgtcatggctagatggccc

SEQ ID NO: 40518 - DNA, 96 bp, synthetic construct
  source 1..96: mol_type = other DNA
tacggccacgaccccttccactctctgttcttcacatttagcatgcaggggaacatcggcctcgagattggccagttatctcaaacgatcgaatgg

SEQ ID NO: 40519 - DNA, 42 bp, synthetic construct
  source 1..42: mol_type = other DNA
atgctgaccaacatggtcgggagctacgagaacggcatctat

SEQ ID NO: 40520 - DNA, 48 bp, synthetic construct
  source 1..48: mol_type = other DNA
gacatcgtggtcctgttcttcggccaaaagtattccccaacctctagc

SEQ ID NO: 40521 - DNA, 144 bp, synthetic construct
  source 1..144: mol_type = other DNA
atgggattcaatggcgatgacattaaatacgcgaaagtgctcgctaaccagtctctggtcgactacatccactaccggtactataactggagctcccgagttattatcgacgggctgctcgtgatcctgacccgctacaatatg

SEQ ID NO: 40522 - DNA, 123 bp, synthetic construct
  source 1..123: mol_type = other DNA
cccggaaacagcatccggttcgcccacgaagtgtcttactggtacccggagtttgcgaatttcaccattatcgacaagtcctacctcgggctcgtgaccacattcggcaatatcatcgaacag

SEQ ID NO: 40523 - DNA, 168 bp, synthetic construct
  source 1..168: mol_type = other DNA
atcgacatcagcgtgctggatacatccctgaagtcactaggttcggttccggggttcatcaagtctagccctctcatggccattccccaaatatttaaacaaatagtatccgctacaccctatctgaccgagactctgaagctgttcacctacgagggactgcctaag

SEQ ID NO: 40524 - DNA, 30 bp, synthetic construct
  source 1..30: mol_type = other DNA
agccccgtgatcttccctagtggagctagg

SEQ ID NO: 40525 - DNA, 96 bp, synthetic construct
  source 1..96: mol_type = other DNA
accaacctgcccattctcgacggcgtgttcgagtctatgtccgccctgaccggtagtggcatcacaatgtacgagaatgtcgagatcttgcctcac

SEQ ID NO: 40526 - DNA, 99 bp, synthetic construct
  source 1..99: mol_type = other DNA
ggcatgcccatgttcgactccatctgcaatgccttctcaattatcagtaccggaggcatgaacgttaagaacgctaacatggggtactaccaatccgat

SEQ ID NO: 40527 - DNA, 102 bp, synthetic construct
  source 1..102: mol_type = other DNA
agcaatattatgcccatggatctccttttcaccattgtctctgccatcaccactactggagccaacgtggctccacctaccgctatggctaactggccacct

SEQ ID NO: 40528 - DNA, 93 bp, synthetic construct
  source 1..93: mol_type = other DNA
ggctacgacccgtttcggagtttattcgccatcatgtcccttcaaggcaataacgggctcgagttgggaatcgtaaattataccctccatcct

SEQ ID NO: 40529 - DNA, 96 bp, synthetic construct
  source 1..96: mol_type = other DNA
accgaaattcacatcgtggacggcatgttcgagagcatgtccgcgctgactgggagtggcatcaccatctacggcgatgtcgaggttctcccaaag

SEQ ID NO: 40530 - DNA, 99 bp, synthetic construct
  source 1..99: mol_type = other DNA
gggatgcccctgttcgactctatctgcaacaccttttctacgatatccactggcggaatgggcattaagaacgccaacatgggattttatcaaaacgat

SEQ ID NO: 40531 - DNA, 99 bp, synthetic construct
  source 1..99: mol_type = other DNA
tcttacatcgtccccattgagctgctgttcacggttgtgtccgcaatcactaccaccggggctagtgttcagcctgcatccgtgatgggaacatggcct

SEQ ID NO: 40532 - DNA, 93 bp, synthetic construct
  source 1..93: mol_type = other DNA
ggctacgaacccttttccggccttttctatacaatgagcatccagggaaatgtcggtctcgaaatttctaccatcgcacctactctggaattg

SEQ ID NO: 40533 - DNA, 36 bp, synthetic construct
  source 1..36: mol_type = other DNA
ctgagcaagatggtcggcaactatgcaacaggcatt

SEQ ID NO: 40534 - DNA, 48 bp, synthetic construct
  source 1..48: mol_type = other DNA
gacataatccagttaatttacggccacaaatatgatgccgcttcaagc

SEQ ID NO: 40535 - DNA, 36 bp, synthetic construct
  source 1..36: mol_type = other DNA
agcatgctggctggcgactatgccaccggactttac

SEQ ID NO: 40536 - DNA, 42 bp, synthetic construct
  source 1..42: mol_type = other DNA
ctgattaaccttatctacaccaatgagttcgcccttgcatca

SEQ ID NO: 40537 - DNA, 39 bp, synthetic construct
  source 1..39: mol_type = other DNA
ctgggcttcatgaccactgcatactcaactgggatctat

SEQ ID NO: 40538 - DNA, 39 bp, synthetic construct
  source 1..39: mol_type = other DNA
attgtgctgatctacggcaacgcctatatctcctctagc

SEQ ID NO: 40539 - DNA, 30 bp, synthetic construct
  source 1..30: mol_type = other DNA
gcccggtatctgggcgtggagaaatatggt

SEQ ID NO: 40540 - DNA, 36 bp, synthetic construct
  source 1..36: mol_type = other DNA
ctgcagaacatgattggcaactacgccactggaatc

SEQ ID NO: 40541 - DNA, 48 bp, synthetic construct
  source 1..48: mol_type = other DNA
gatatcatacaacttatttacggcaacaaatactcgccttctcctgac

SEQ ID NO: 40542 - DNA, 30 bp, synthetic construct
  source 1..30: mol_type = other DNA
gccagatacctgggagtctctgatttcggc

SEQ ID NO: 40543 - DNA, 39 bp, synthetic construct
  source 1..39: mol_type = other DNA
acccagttcgttgggggttacttcactggactttacaac

SEQ ID NO: 40544 - DNA, 48 bp, synthetic construct
  source 1..48: mol_type = other DNA
ggcgatgtgatctccattatctatgggaatcagtatagtgactctgcc

SEQ ID NO: 40545 - DNA, 39 bp, synthetic construct
  source 1..39: mol_type = other DNA
ctgcagaacatggttggaaattacgctaccggcatctat

SEQ ID NO: 40546 - DNA, 51 bp, synthetic construct
  source 1..51: mol_type = other DNA
gatatcatacaatttatatacggcaacaaatatgacccatcctctccggct

SEQ ID NO: 40547 - DNA, 96 bp, synthetic construct
  source 1..96: mol_type = other DNA
accggcatcaacatcatcgacggcgtgttcgagtccatgtctgccctgaccggaagcgggatcacaatttaccccgacgtcgagattctcccttat

SEQ ID NO: 40548 - DNA, 99 bp, synthetic construct
  source 1..99: mol_type = other DNA
ggaatgcccattttcgattctatctgccacacattcaccaccatctccactggcggcatgagcatcaagaacgccaacattggcttttaccacaacgac

SEQ ID NO: 40549 - DNA, 102 bp, synthetic construct
  source 1..102: mol_type = other DNA
tccaacattgtccccatggacatactctttcacatcgtatccgccatcaccaccactggcgcttctatccaatcacctaccgtgatgggaacttggcctgcc

SEQ ID NO: 40550 - DNA, 96 bp, synthetic construct
  source 1..96: mol_type = other DNA
tacggccacgacccctttaattccctgttcttcgccattagcatgcagggcaatgtcggcctagagatcgggcagatgagccaaaccctggaactc

SEQ ID NO: 40551 - DNA, 39 bp, synthetic construct
  source 1..39: mol_type = other DNA
ctgaccaatattgtcgggaattatgctagtggtatctac

SEQ ID NO: 40552 - DNA, 51 bp, synthetic construct
  source 1..51: mol_type = other DNA
aacgacattattcaccttatctatggcaataaatacgatgcggcctctccc

SEQ ID NO: 40553 - DNA, 36 bp, synthetic construct
  source 1..36: mol_type = other DNA
ctgacaaacatggttggttcatacgcaaccggaatc

SEQ ID NO: 40554 - DNA, 48 bp, synthetic construct
  source 1..48: mol_type = other DNA
ctcgatcttatccaacttatatacggccacgaatacgactcagcatat

SEQ ID NO: 40555 - DNA, 39 bp, synthetic construct
  source 1..39: mol_type = other DNA
aaggagaacaagaataacaaggagaaggaagagaagcac

SEQ ID NO: 40556 - DNA, 72 bp, synthetic construct
  source 1..72: mol_type = other DNA
acctacacaatcttcttctttatcccacctacaattcagaccttcactacgtcggactccgctcggcattcc

SEQ ID NO: 40557 - DNA, 33 bp, synthetic construct
  source 1..33: mol_type = other DNA
ctgaacaatatcattggagactacgcaacaggc

SEQ ID NO: 40558 - DNA, 45 bp, synthetic construct
  source 1..45: mol_type = other DNA
gacattatgctgatcatctatggtcaggaatatgcaatgggcggg

SEQ ID NO: 40559 - DNA, 42 bp, synthetic construct
  source 1..42: mol_type = other DNA
atgctgaccaacatggttagcagctacgccaacggcatctat

SEQ ID NO: 40560 - DNA, 51 bp, synthetic construct
  source 1..51: mol_type = other DNA
gacatcgtcgtgttcttttttggtcaaaaatacgctccaactacaagttct

SEQ ID NO: 40561 - DNA, 156 bp, synthetic construct
  source 1..156: mol_type = other DNA
ctggccaacacatttatccacgtcgacgagtactggacctataccctcgtgaacctgcccttcatcgatgggatgaaggtggctttccacgacgtgcatccacctctgtactacatgattctgtacctcctgactcctttcggcctggacaatctg

SEQ ID NO: 40562 - DNA, 114 bp, synthetic construct
  source 1..114: mol_type = other DNA
attaggcagatatcgaccgaggccgccgggtcccacgaaggctttgagatgtccagcctcgtgcactacatgctgggattcgcaattaagagcgagaacttcagggctgattcc

SEQ ID NO: 40563 - DNA, 39 bp, synthetic construct
  source 1..39: mol_type = other DNA
ctgcagaacatggttgggtcctatgccaccggaatctac

SEQ ID NO: 40564 - DNA, 48 bp, synthetic construct
  source 1..48: mol_type = other DNA
gacattatacaactcatatatggcaacaaatatgaccctgctagctcc

SEQ ID NO: 40565 - DNA, 132 bp, synthetic construct
  source 1..132: mol_type = other DNA
tatgaccccggcatccttactcaagactctttctatcaaatgaaccaaattgctagttccaattttaccaattggcaccctttcttccacacattcatcgaaatgctttgtctgaagttatacccggacacg

SEQ ID NO: 40566 - DNA, 96 bp, synthetic construct
  source 1..96: mol_type = other DNA
actggcatcaacttcatcgactgcattttcgagtccatgagcgccctcaccggatctggcatcacgatatatagtgacgtcgaggtgctgccttat

SEQ ID NO: 40567 - DNA, 102 bp, synthetic construct
  source 1..102: mol_type = other DNA
gccggcatgcctgtgtttgactctatatgccacaccttttcgaccattagcaccgggggaatgtctgtcaagaacgctaacatcggtttttatcatagcgac

SEQ ID NO: 40568 - DNA, 102 bp, synthetic construct
  source 1..102: mol_type = other DNA
tccaacatcgtccccatggaagtgctgttccacgtcgtgtctgctattaccacaaccggggcgagcatacagagcgcaactgtgatggcgggatggccaagt

SEQ ID NO: 40569 - DNA, 99 bp, synthetic construct
  source 1..99: mol_type = other DNA
tacgggcacgacccgttccaatccttgttcttcaccatttcgatgcaagggaatgttggactagagatcggccagatgtcgcaagcaatcgagttgccc

SEQ ID NO: 40570 - DNA, 36 bp, synthetic construct
  source 1..36: mol_type = other DNA
ctgagcaacatcattggcgactatgctactggtata

SEQ ID NO: 40571 - DNA, 51 bp, synthetic construct
  source 1..51: mol_type = other DNA
accgatataatccaactgatctttggcattgagtttatcgaatcagcaagc

SEQ ID NO: 40572 - DNA, 30 bp, synthetic construct
  source 1..30: mol_type = other DNA
gcccggtatctgggcgtcagcaactacggc

SEQ ID NO: 40573 - DNA, 36 bp, synthetic construct
  source 1..36: mol_type = other DNA
ttgactcaaattgttggaaattacgccaccggcata

SEQ ID NO: 40574 - DNA, 51 bp, synthetic construct
  source 1..51: mol_type = other DNA
ctcgacataatccaactgatctatgggcacgaatatgacgctgcaagcagt

SEQ ID NO: 40575 - DNA, 33 bp, synthetic construct
  source 1..33: mol_type = other DNA
gccaggtacttgggcgtggagggatattaccaa

SEQ ID NO: 40576 - DNA, 36 bp, synthetic construct
  source 1..36: mol_type = other DNA
ctgaccaacatggttggcaactacgccactggaatt

SEQ ID NO: 40577 - DNA, 51 bp, synthetic construct
  source 1..51: mol_type = other DNA
accgatatcattcatctcatctacgggcaccaatacgacgcttcatcctct

SEQ ID NO: 40578 - DNA, 96 bp, synthetic construct
  source 1..96: mol_type = other DNA
actggcattaacattatcgatgggatcttcgagtctatgtccgctcttacgggcagcggcatcaccatctaccccgacgtcgaagtgctcccttac

SEQ ID NO: 40579 - DNA, 99 bp, synthetic construct
  source 1..99: mol_type = other DNA
ggcatgcccttcttcgactctgtctgccatactttcaccacaattagcaccggcggcatgtccatcaagaacgccaatatcggcttttaccacaacgat

SEQ ID NO: 40580 - DNA, 102 bp, synthetic construct
  source 1..102: mol_type = other DNA
agcaacatcgtccccatggacatcctgttccacatcgtatccgccatcaccacaaccggtgcatccatacaatcatcaactgtcatgggtacttggcccgct

SEQ ID NO: 40581 - DNA, 96 bp, synthetic construct
  source 1..96: mol_type = other DNA
tacgggcacgacccgtttaatagtctattcttcgccatctcgatgcaagggaacgtcggtctcgagattggccagattagccaaaacctggaactg

SEQ ID NO: 40582 - DNA, 36 bp, synthetic construct
  source 1..36: mol_type = other DNA
ctgaccaacattatcggcgattacccaactgggatc

SEQ ID NO: 40583 - DNA, 51 bp, synthetic construct
  source 1..51: mol_type = other DNA
gacatcatccatttcatttatggccaccaatacgagtctgctgaaagcagc

SEQ ID NO: 40584 - DNA, 39 bp, synthetic construct
  source 1..39: mol_type = other DNA
ctgaccaacatggttggaagttacgcaacaggaatttat

SEQ ID NO: 40585 - DNA, 54 bp, synthetic construct
  source 1..54: mol_type = other DNA
ttcgatatcgttcaactgatctatggacacaagtttgaccccgcctcttccccg

SEQ ID NO: 40586 - DNA, 42 bp, synthetic construct
  source 1..42: mol_type = other DNA
atgcttaccaacatggttggaaactacgcaaccgggatctac

SEQ ID NO: 40587 - DNA, 51 bp, synthetic construct
  source 1..51: mol_type = other DNA
accgacatcatacatctgatctatggtcaccaatacgatgcaagcgcctct

SEQ ID NO: 40588 - DNA, 36 bp, synthetic construct
  source 1..36: mol_type = other DNA
cagttcttagtcggtgactaccctacgggaatttac

SEQ ID NO: 40589 - DNA, 45 bp, synthetic construct
  source 1..45: mol_type = other DNA
tatctgatcaacctgatctactcttcggaatacgcattggctgct

SEQ ID NO: 40590 - DNA, 96 bp, synthetic construct
  source 1..96: mol_type = other DNA
accaacattcctattatcgacggggtcttcgagagcgtgtccgccctcaccggaactggcatcacaatctttgagaacgtggaagctctgccatac

SEQ ID NO: 40591 - DNA, 99 bp, synthetic construct
  source 1..99: mol_type = other DNA
gggatgcccctgttcgacgccgtttgcaataccttctgtatcatctctactggcggcatgggcgtcaagaacgccaatatggggtactaccaaaacgac

SEQ ID NO: 40592 - DNA, 102 bp, synthetic construct
  source 1..102: mol_type = other DNA
agcgatatcatccctatggagcttgtgttcaccgtcacgtccgttattacaacaactggcgcaagcgtggcctccgtcgacgcaatggcttcttggcctgcc

SEQ ID NO: 40593 - DNA, 93 bp, synthetic construct
  source 1..93: mol_type = other DNA
ggctacgaccctttcaagtctctgttcgcgtcgatgagcttacaaggtaacaacggcctggagctggggatcatcaaccacaccatgaacccc

SEQ ID NO: 40594 - DNA, 36 bp, synthetic construct
  source 1..36: mol_type = other DNA
ctgacaaagcttgtcggaaattacgctaccggaatc

SEQ ID NO: 40595 - DNA, 51 bp, synthetic construct
  source 1..51: mol_type = other DNA
acagacattatccatctcatttatggacacgaatacgatgcagcgtctagt

SEQ ID NO: 40596 - DNA, 30 bp, synthetic construct
  source 1..30: mol_type = other DNA
gcccggtatctgggtgtcaataattacgga

SEQ ID NO: 40597 - DNA, 36 bp, synthetic construct
  source 1..36: mol_type = other DNA
ctgagcgagcttgtcggagattacgccaacggaatc

SEQ ID NO: 40598 - DNA, 45 bp, synthetic construct
  source 1..45: mol_type = other DNA
gatataatacagctcatttacggccaccaatatgacgctgccgct

SEQ ID NO: 40599 - DNA, 36 bp, synthetic construct
  source 1..36: mol_type = other DNA
ctgactaacatggttggcacctatgcaactgggata

SEQ ID NO: 40600 - DNA, 48 bp, synthetic construct
  source 1..48: mol_type = other DNA
gacattatcaccctgatctatggccacgaatatgacgctgctagctcc

SEQ ID NO: 40601 - DNA, 96 bp, synthetic construct
  source 1..96: mol_type = other DNA
acaggcctcaatattatcgactccatcttcgaatccatgtctgccctgactggcagcggcgtgaccatgtaccacaacgtcgagatccttcctcat

SEQ ID NO: 40602 - DNA, 99 bp, synthetic construct
  source 1..99: mol_type = other DNA
ggcatgcccatatttgattcggtttgcaatacgttttccatcatctctactgggggcatgtctattaagaatgccaatatcggcttctaccacaacaac

SEQ ID NO: 40603 - DNA, 102 bp, synthetic construct
  source 1..102: mol_type = other DNA
acaaacatcgtgcccatggagctcctgtttaccatcgtctccgctatcacgacaactggtgcttcggttcaaggccctgctgtgatgatgacctggccaagt

SEQ ID NO: 40604 - DNA, 93 bp, synthetic construct
  source 1..93: mol_type = other DNA
tacgggcacgatccctttaaaagcctgttcgacaccatctcaattcaaggtaacgtcggcctagacctgggccaaatcactacatgcgaattg

SEQ ID NO: 40605 - DNA, 39 bp, synthetic construct
  source 1..39: mol_type = other DNA
ctcaccgctctgattggggactacgctaccggaatttac

SEQ ID NO: 40606 - DNA, 45 bp, synthetic construct
  source 1..45: mol_type = other DNA
gagatcatcaccttcatttacggccacgagtttgacgctagtgcc

SEQ ID NO: 40607 - DNA, 36 bp, synthetic construct
  source 1..36: mol_type = other DNA
ctgaccaagatcgtcggagactatgctacgggtata

SEQ ID NO: 40608 - DNA, 45 bp, synthetic construct
  source 1..45: mol_type = other DNA
gacatcatacaactcatctacggccatcaatatgacgcggctgcc

SEQ ID NO: 40609 - DNA, 33 bp, synthetic construct
  source 1..33: mol_type = other DNA
gcccggtacctgggtccaagcgagttcggaatc

SEQ ID NO: 40610 - DNA, 42 bp, synthetic construct
  source 1..42: mol_type = other DNA
cttacacaattctcaagcacttacgacacaggcctctacaac

SEQ ID NO: 40611 - DNA, 48 bp, synthetic construct
  source 1..48: mol_type = other DNA
ttcgacatcattaacatatacgggtctgattacgatggagctgctgat

SEQ ID NO: 40612 - DNA, 39 bp, synthetic construct
  source 1..39: mol_type = other DNA
ctgaccaacctgatcggcaacagtgccacgggtatctac

SEQ ID NO: 40613 - DNA, 42 bp, synthetic construct
  source 1..42: mol_type = other DNA
atcgtccttctgatttacggccctgagttcaccgactctgcc

SEQ ID NO: 40614 - DNA, 102 bp, synthetic construct
  source 1..102: mol_type = other DNA
acagacattgggatcgtggactccctgttcgagtctatgagcgccctgaccggaagcggcatcaccatctaccctgatgtcgagagttcaccgaacagtctt

SEQ ID NO: 40615 - DNA, 99 bp, synthetic construct
  source 1..99: mol_type = other DNA
ggaatgcccctttttgatagtatttgccatactttctccgtcatctccaccggcggcatgtctacaaagaacgccaacatcgggttttaccacgacgac

SEQ ID NO: 40616 - DNA, 102 bp, synthetic construct
  source 1..102: mol_type = other DNA
agccagatcacacccatggataatctcttcgtcgtggtgtcagcaattaccacaacgggctcttctatacaatcttcaacggttatggggggttggccccca

SEQ ID NO: 40617 - DNA, 96 bp, synthetic construct
  source 1..96: mol_type = other DNA
tacgggcacgatgcatttgattctttattcttctccatgagcatgcagggcaatgtcggtttggagatcggacagatgagtcaaaccatagaatgg

SEQ ID NO: 40618 - DNA, 132 bp, synthetic construct
  source 1..132: mol_type = other DNA
tacaaccccggcgttttgactgtgtcttcctactcccaactccaccaaattgccaccggggaatttaccaccgctcatcctatctttcacacactgattgaaatgctcctgatcaaaatcttcggaacacct

SEQ ID NO: 40619 - DNA, 213 bp, synthetic construct
  source 1..213: mol_type = other DNA
tacgacgtgcagaccgataagctgaagataccagccgacgacgcgttcgagaacaacattaacctgaagggcgcccagaaccagtttttttctactatcaacgccgagcctgagcaagaatacgagaagatcagtagcgtcaacaccaaacaggggagctacgccatcatcgatagctacgtggacacatggcaggaaaaccctatccttgaa

SEQ ID NO: 40620 - DNA, 45 bp, synthetic construct
  source 1..45: mol_type = other DNA
atcaaggagatccggatcaccgacacaattagcttcctgttgctc

SEQ ID NO: 40621 - DNA, 30 bp, synthetic construct
  source 1..30: mol_type = other DNA
tctggtcaatcaatagagaccatcttccac

SEQ ID NO: 40622 - DNA, 126 bp, synthetic construct
  source 1..126: mol_type = other DNA
gtgagtctcctgccttatcacccatacgccttcgccatggcttctgggatcggcagcgcatccatgaacgccgctgctcttgtgcccctggtccacatgcatcccgcaatggagacccaactggag

SEQ ID NO: 40623 - DNA, 48 bp, synthetic construct
  source 1..48: mol_type = other DNA
ggcatgcccacaagcgagttcgtgacccactacgcctcacaagtagaa

SEQ ID NO: 40624 - DNA, 66 bp, synthetic construct
  source 1..66: mol_type = other DNA
ccacctattatgtttgaggaaatggccgacctttattcaatcccctattggctgaccggcttcaat

SEQ ID NO: 40625 - DNA, 54 bp, synthetic construct
  source 1..54: mol_type = other DNA
cagtacctctggggcaccatgggcgactccttctacctgaaggccaacatcagc

SEQ ID NO: 40626 - DNA, 36 bp, synthetic construct
  source 1..36: mol_type = other DNA
ctgagctacctgtctggcaactattccactggattg

SEQ ID NO: 40627 - DNA, 51 bp, synthetic construct
  source 1..51: mol_type = other DNA
cgaccactcgttgacctcatctatcggaaccagtactctctggctactaca

SEQ ID NO: 40628 - DNA, 30 bp, synthetic construct
  source 1..30: mol_type = other DNA
gctaactacctgggggctgaaggattcggc

SEQ ID NO: 40629 - DNA, 36 bp, synthetic construct
  source 1..36: mol_type = other DNA
agctttatccaaggggacattagcgttggcttatac

SEQ ID NO: 40630 - DNA, 45 bp, synthetic construct
  source 1..45: mol_type = other DNA
gagatcattttcttcatctactcgcctgaatacctggactcagtg

SEQ ID NO: 40631 - DNA, 93 bp, synthetic construct
  source 1..93: mol_type = other DNA
agttctttcaacttcgcctggggctccgaccccgctctgtacttcgtgaagagcgtcggaggaagctccaacattagcaactttacgtctatc

SEQ ID NO: 40632 - DNA, 72 bp, synthetic construct
  source 1..72: mol_type = other DNA
atctcccttccgggagcaggcattgggattgacacactgctgaaccctaattggaattccctgaccgatgcc

SEQ ID NO: 40633 - DNA, 105 bp, synthetic construct
  source 1..105: mol_type = other DNA
ggttacatgtccctgacatctggcactcccatgatccagctgatcagcgagggcaccggattggttttcatcgtgttcccaatgattttcaacatcatgggaccc

SEQ ID NO: 40634 - DNA, 36 bp, synthetic construct
  source 1..36: mol_type = other DNA
ctgacacccatggctggcgactacgcgacgggtatt

SEQ ID NO: 40635 - DNA, 51 bp, synthetic construct
  source 1..51: mol_type = other DNA
accgatatcgttgtgctgtttttcggtagagaatacgccgctgcttccacc

SEQ ID NO: 40636 - DNA, 36 bp, synthetic construct
  source 1..36: mol_type = other DNA
ctcagctacctgaccggcgactatgctacggggcta

SEQ ID NO: 40637 - DNA, 51 bp, synthetic construct
  source 1..51: mol_type = other DNA
cgcccgttggtcgacctgatttactcgaaccagtatagtctggcaaccaca

SEQ ID NO: 40638 - DNA, 132 bp, synthetic construct
  source 1..132: mol_type = other DNA
ttcaaccccggcgtactgacttacgattcgttcgaccaattgagccaaatcgcttatcacaactttggcacctggcacccattcttccatacattcatagagatgttgtgtctcaagatctaccctgaccct

SEQ ID NO: 40639 - DNA, 39 bp, synthetic construct
  source 1..39: mol_type = other DNA
attcagttcctggccggcgactatgctaccgggatctac

SEQ ID NO: 40640 - DNA, 51 bp, synthetic construct
  source 1..51: mol_type = other DNA
ccctacattatcgatttgatctattcttccgaatacgcgctagccagcagt

SEQ ID NO: 40641 - DNA, 36 bp, synthetic construct
  source 1..36: mol_type = other DNA
cagatgatcgccggcgactatgctaccggactgtac

SEQ ID NO: 40642 - DNA, 48 bp, synthetic construct
  source 1..48: mol_type = other DNA
tacattatcaaccttatttactcctcgcaatatgcactagcttctcct

SEQ ID NO: 40643 - DNA, 42 bp, synthetic construct
  source 1..42: mol_type = other DNA
atgttgactcaaatgtcgaacacctactacgttggactatac

SEQ ID NO: 40644 - DNA, 45 bp, synthetic construct
  source 1..45: mol_type = other DNA
gacatgatcgtgttctgcttcgggtcgaaattttccgaagctgga

SEQ ID NO: 40645 - DNA, 33 bp, synthetic construct
  source 1..33: mol_type = other DNA
gcccggtacttgggccctagcgaatatggatac

SEQ ID NO: 40646 - DNA, 42 bp, synthetic construct
  source 1..42: mol_type = other DNA
atgataactcaaatgtcaacaacttacaacgctggcctctac

SEQ ID NO: 40647 - DNA, 45 bp, synthetic construct
  source 1..45: mol_type = other DNA
tacgacctgatcgggatttatggagcgcagttcatcgaagctggc

SEQ ID NO: 40648 - DNA, 36 bp, synthetic construct
  source 1..36: mol_type = other DNA
agctggctggtcggggattatgccaccggtatctac

SEQ ID NO: 40649 - DNA, 51 bp, synthetic construct
  source 1..51: mol_type = other DNA
ccctacctgatcactctcatctatggctccacttacgccctcgcggctatt

SEQ ID NO: 40650 - DNA, 36 bp, synthetic construct
  source 1..36: mol_type = other DNA
atctcctacctgagcggcgactatgcaactggactt

SEQ ID NO: 40651 - DNA, 51 bp, synthetic construct
  source 1..51: mol_type = other DNA
cgcccactggtcgatctcatctactccaaccaatattctctcgccacgacg

SEQ ID NO: 40652 - DNA, 39 bp, synthetic construct
  source 1..39: mol_type = other DNA
atcagctggctgtccggcgactattctaccgggatctac

SEQ ID NO: 40653 - DNA, 48 bp, synthetic construct
  source 1..48: mol_type = other DNA
tacatcgtgaccctcatttattcttcccaatatgcacttgctagtgcc

SEQ ID NO: 40654 - DNA, 36 bp, synthetic construct
  source 1..36: mol_type = other DNA
atcgcaggccttggggttgaccagctggctgctatt

SEQ ID NO: 40655 - DNA, 60 bp, synthetic construct
  source 1..60: mol_type = other DNA
gagctgatcatcttcatgggcggacggggcattgccctcgactacgctcaagcgatgtac

SEQ ID NO: 40656 - DNA, 36 bp, synthetic construct
  source 1..36: mol_type = other DNA
ctggaggtcagcacaaccgactacatcgctgtgttc

SEQ ID NO: 40657 - DNA, 60 bp, synthetic construct
  source 1..60: mol_type = other DNA
ctcgcctaccttttctcctatggcgagaccagcatccggctgctgaaccctactaccaca

SEQ ID NO: 40658 - DNA, 33 bp, synthetic construct
  source 1..33: mol_type = other DNA
agcttcctcaccggcaactacgcaaccggactg

SEQ ID NO: 40659 - DNA, 51 bp, synthetic construct
  source 1..51: mol_type = other DNA
aggcccatcgtggacttcatttactctaaccaatactcactcgcttcaacg

SEQ ID NO: 40660 - DNA, 30 bp, synthetic construct
  source 1..30: mol_type = other DNA
gccaggtacctgggcaagagcgacttcggt

SEQ ID NO: 40661 - DNA, 39 bp, synthetic construct
  source 1..39: mol_type = other DNA
ctggagtatttgagcgcacagtcttctgtcggcatgtat

SEQ ID NO: 40662 - DNA, 39 bp, synthetic construct
  source 1..39: mol_type = other DNA
atgaacttcatctacggtagccagtattacggaactgga

SEQ ID NO: 40663 - DNA, 36 bp, synthetic construct
  source 1..36: mol_type = other DNA
atcagctggctggccaacgactatgcgactggactc

SEQ ID NO: 40664 - DNA, 51 bp, synthetic construct
  source 1..51: mol_type = other DNA
ccgtatctcatagaccttatctacaccaaccaatatgcgctggcgtctctg

SEQ ID NO: 40665 - DNA, 39 bp, synthetic construct
  source 1..39: mol_type = other DNA
ctgaccaatatggtgtccagctatgccaacggcatctac

SEQ ID NO: 40666 - DNA, 48 bp, synthetic construct
  source 1..48: mol_type = other DNA
gacatcgtggtcctgttctttggcaaggagttcctcgctgcttcaagc

SEQ ID NO: 40667 - DNA, 39 bp, synthetic construct
  source 1..39: mol_type = other DNA
attcagttcctggctggcgactacgcgacgggaatatac

SEQ ID NO: 40668 - DNA, 51 bp, synthetic construct
  source 1..51: mol_type = other DNA
ccctacatcatcgacctgatatattcatctgaatacgccttggctagctcc

SEQ ID NO: 40669 - DNA, 36 bp, synthetic construct
  source 1..36: mol_type = other DNA
agccaggttgtggtggacctgaacaccgatgtttct

SEQ ID NO: 40670 - DNA, 162 bp, synthetic construct
  source 1..162: mol_type = other DNA
atcatgggcggcatctccaacgccgttggtacttacgcaccagcccactccggggatgaacaattccatcaagatgtattcaaccactttcaaaagatggcctctgtcaacgagattgccagccagggcagcaccgtggtcaccattgtcgattcaatcttc

SEQ ID NO: 40671 - DNA, 30 bp, synthetic construct
  source 1..30: mol_type = other DNA
gcccggtatctgggcgtgtacaacaatggc

SEQ ID NO: 40672 - DNA, 42 bp, synthetic construct
  source 1..42: mol_type = other DNA
atgctcacgcaattttcgtccgcataccagacggggctgtat

SEQ ID NO: 40673 - DNA, 51 bp, synthetic construct
  source 1..51: mol_type = other DNA
aatgacattattgtcttctgctacggcaaccaatacgcgagcgcggacaac

SEQ ID NO: 40674 - DNA, 36 bp, synthetic construct
  source 1..36: mol_type = other DNA
agctggctggccggcgactatgctaccgggctttac

SEQ ID NO: 40675 - DNA, 51 bp, synthetic construct
  source 1..51: mol_type = other DNA
ccttatctgatcaccctcatctacggctctacttacgctttggctgcggtc

SEQ ID NO: 40676 - DNA, 39 bp, synthetic construct
  source 1..39: mol_type = other DNA
ataacacagttttctaccacctacgccactggactgtat

SEQ ID NO: 40677 - DNA, 45 bp, synthetic construct
  source 1..45: mol_type = other DNA
tacgacctgatcgggatctacggcgccgagtatattgaagctggg

SEQ ID NO: 40678 - DNA, 63 bp, synthetic construct
  source 1..63: mol_type = other DNA
atcggcggatacagctttcctgccatgtccattgagaacctccatcctgctggtctcgaactg

SEQ ID NO: 40679 - DNA, 96 bp, synthetic construct
  source 1..96: mol_type = other DNA
gcatattacggaggcacaggtggcctcaccgcctctctggatgcccacggcgcctccgctgtgatttacgatctgagcatcgacgttgctggttcc

SEQ ID NO: 40680 - DNA, 105 bp, synthetic construct
  source 1..105: mol_type = other DNA
tacctcgatgatcttaattcttatgtgttggcttcaaccctcaacgactatgtgcaaaattccgccctggacgcctatgctactgcggctgatgctgcccgccta

SEQ ID NO: 40681 - DNA, 30 bp, synthetic construct
  source 1..30: mol_type = other DNA
gacctcaccgcccttcaagccattgagaac

SEQ ID NO: 40682 - DNA, 39 bp, synthetic construct
  source 1..39: mol_type = other DNA
gcctggactggctccgaatgggatcagttcggaagcatc

SEQ ID NO: 40683 - DNA, 54 bp, synthetic construct
  source 1..54: mol_type = other DNA
gtgatgaacgacggcaaggtcacagcccaggaatctgggattctgatcaccact

SEQ ID NO: 40684 - DNA, 36 bp, synthetic construct
  source 1..36: mol_type = other DNA
gaaatcgagtgcattgacaactgtcccatccaaggc

SEQ ID NO: 40685 - DNA, 42 bp, synthetic construct
  source 1..42: mol_type = other DNA
tccaacggccctgccggcttcaccggaaaggttggtgacagt

SEQ ID NO: 40686 - DNA, 51 bp, synthetic construct
  source 1..51: mol_type = other DNA
ggatcatacgctgtggtttacgaccagtctgctaagtatcctgctgtcgat

SEQ ID NO: 40687 - DNA, 33 bp, synthetic construct
  source 1..33: mol_type = other DNA
agctacctcaccggcaactatagcacgggactg

SEQ ID NO: 40688 - DNA, 51 bp, synthetic construct
  source 1..51: mol_type = other DNA
aggccactcgtggacctaatatactctaaccaatatagtctggcgactacc

SEQ ID NO: 40689 - DNA, 240 bp, synthetic construct
  source 1..240: mol_type = other DNA
agcatggtctatgacaccgactactgggcacttgtgatccggaatatcgattccggaaacggcttatacgggcttgatgggtacttctacacacccgtctggggctacctgctggccctggaggagtggttcaacgattccttcctcggactgggcgagagcgcagtcagagtctccgaaatcgtgtacttcgagaacggcgatcaccagactgccgctaccattacatctgtggctttt

SEQ ID NO: 40690 - DNA, 84 bp, synthetic construct
  source 1..84: mol_type = other DNA
atcagtgacggcaccgtcggggaatgcttccgcttcatcaccgatcggatggggatcagcttcggagactcagccggatcgcgc

SEQ ID NO: 40691 - DNA, 96 bp, synthetic construct
  source 1..96: mol_type = other DNA
atgcccattgccgtttggaccgatcttctcgacgtatcatcgcttgcccactattacgacgtctggaacgcaggtccgggcgtcttaaccgtggtt

SEQ ID NO: 40692 - DNA, 36 bp, synthetic construct
  source 1..36: mol_type = other DNA
ctcggccttgatgaggagctgatcgacctgatcaac

SEQ ID NO: 40693 - DNA, 66 bp, synthetic construct
  source 1..66: mol_type = other DNA
atcttcctgcgggcagacgagttcaccaagggcgacgccgccgctgattttgatagctttagacca

SEQ ID NO: 40694 - DNA, 48 bp, synthetic construct
  source 1..48: mol_type = other DNA
ctgggcttcaatctcaccgcgattattacgtctgccggactcgtttcc

SEQ ID NO: 40695 - DNA, 75 bp, synthetic construct
  source 1..75: mol_type = other DNA
atcctcgccacccggcccttcaagaagggcgatctggtggctgtcggagccgacgttcaagtttatagagttcgg

SEQ ID NO: 40696 - DNA, 249 bp, synthetic construct
  source 1..249: mol_type = other DNA
ctggagaactgggacaacacagacgtgttcattatgccgaattcgctcctcacaaccaacaagatccggaacatcactcgcgagacccttataagtaaagtgtacctcaccgtggacattgcctatgggtctgacgtcaatctggcccgcaagctcatgcaagaagctgctaccgagaacccacacgtgatctccgacggctccgtcaagcggccctacacacgccttgaggccttcgaagatagcaat

SEQ ID NO: 40697 - DNA, 156 bp, synthetic construct
  source 1..156: mol_type = other DNA
acccatactatcctgcacattgacgagtactggacatacagcttggttaatcttcctttcatgcaaggcatgaccgtcgccgtgcacgacgtgcaccctatcctgtactacctgatcctttatctcttcaagccaattgctgggtccgataacttt

SEQ ID NO: 40698 - DNA, 102 bp, synthetic construct
  source 1..102: mol_type = other DNA
caccagatccaagggcaatcagacgagtttcatcaagccatcaactggagcaccattcccaattacttcacctactttgcgataaagtccgattccttcgcc

SEQ ID NO: 40699 - DNA, 36 bp, synthetic construct
  source 1..36: mol_type = other DNA
ctgtcctatatttctggcgactatgctactggtctg

SEQ ID NO: 40700 - DNA, 51 bp, synthetic construct
  source 1..51: mol_type = other DNA
cgccctattgtggatctgatttactcaaaccaatatagcttggctagcacg

SEQ ID NO: 40701 - DNA, 153 bp, synthetic construct
  source 1..153: mol_type = other DNA
acacatactatcatcaacgttgacgaatattggacctatagcctcgtgaacctgcccttcatgcaagggatgatcgttgccgtgcacgatgttcacccacctctttactacatgattctgtacctgctcacccctctggggctcgagaatctg

SEQ ID NO: 40702 - DNA, 105 bp, synthetic construct
  source 1..105: mol_type = other DNA
caccagatgcagacacaggctggcgagccacgcgaaggcttcgagctggccagcgctatccactacctcaccgccttcgccattaagggacagaactttgagttt

SEQ ID NO: 40703 - DNA, 33 bp, synthetic construct
  source 1..33: mol_type = other DNA
accaagagcttcaccactgctgaatacggagaa

SEQ ID NO: 40704 - DNA, 42 bp, synthetic construct
  source 1..42: mol_type = other DNA
aacaccatcgccaatagcctgttcaactccatgatgggccag

SEQ ID NO: 40705 - DNA, 42 bp, synthetic construct
  source 1..42: mol_type = other DNA
ctttatattatcaccacacctgagatcgctttgggcggatac

SEQ ID NO: 40706 - DNA, 63 bp, synthetic construct
  source 1..63: mol_type = other DNA
agctacatttatcccgagttcctccaaggatatctctacaccgtggaaggctacgacatctat

SEQ ID NO: 40707 - DNA, 63 bp, synthetic construct
  source 1..63: mol_type = other DNA
ttctccggagaccccgctaatatcagcgagaacgcattttctggttctggcgcggatgccggt

SEQ ID NO: 40708 - DNA, 96 bp, synthetic construct
  source 1..96: mol_type = other DNA
ggcagcgtcatggatgagtcccagatccaggcctctatgaccgggaacggactggtaaccgcggacgccatggctattgctctgggcaatcaagcc

SEQ ID NO: 40709 - DNA, 78 bp, synthetic construct
  source 1..78: mol_type = other DNA
ctctctggcgatgggattctggatgcttttggctccatcttcggcgatgccctgagtcctcctagcgtgatcggaggc

SEQ ID NO: 40710 - DNA, 90 bp, synthetic construct
  source 1..90: mol_type = other DNA
tcctacgccgacgttggggcgttcatcggtggagacggagacagcatcgactgtttacaagaagtattcaaggagaccatcggatctggc

SEQ ID NO: 40711 - DNA, 39 bp, synthetic construct
  source 1..39: mol_type = other DNA
atgagcttcgatagcttcatcgactcggtttgggagttt

SEQ ID NO: 40712 - DNA, 33 bp, synthetic construct
  source 1..33: mol_type = other DNA
agctttaccggcgcctatgagttcgaatacaac

SEQ ID NO: 40713 - DNA, 81 bp, synthetic construct
  source 1..81: mol_type = other DNA
atgaatgcaggcggcatacccgacgccatcgaggccatctttacctgcgcttttaacgtgccagccgccgtcggaggaggg

SEQ ID NO: 40714 - DNA, 93 bp, synthetic construct
  source 1..93: mol_type = other DNA
tttttccacggcgattacgacgcaatgatggggttgggcattgaggacagcatgcccctgctcgaacacgtacttagcgaatcccttggtggc

SEQ ID NO: 40715 - DNA, 78 bp, synthetic construct
  source 1..78: mol_type = other DNA
ctgagcggcgacggcatcctggacgcctttggctccatcttcggcgatgctctctctccaccctctgttataggtgga

SEQ ID NO: 40716 - DNA, 90 bp, synthetic construct
  source 1..90: mol_type = other DNA
tcttacgctgatgtcggcgccttcatcggcggcgacggcgacagcatcgattgtcttcaagaagtatttaaagacaccattggatctggt

SEQ ID NO: 40717 - DNA, 69 bp, synthetic construct
  source 1..69: mol_type = other DNA
atggacctcctgctgaaatatagcatcttcaagaataactacgccacaactcaggctggggcggtgctc

SEQ ID NO: 40718 - DNA, 30 bp, synthetic construct
  source 1..30: mol_type = other DNA
atcaagaactgcagcttcatcaacaacagc

SEQ ID NO: 40719 - DNA, 153 bp, synthetic construct
  source 1..153: mol_type = other DNA
acccacaccattattaatatcgacgaatactggacatactctctagtgaatctaccattcatggagggcatggctgtggccatccacgatgtccatcctcctctctactattggatcctgtacctgttcactcccttcggacttggcaatctg

SEQ ID NO: 40720 - DNA, 108 bp, synthetic construct
  source 1..108: mol_type = other DNA
caccagatccagacccacgcaaacgatgccaaggaaggcttcgaacttgtcaatgttatccattacttcacggcgttcgccattaagtcccagaactttaggttggac

SEQ ID NO: 40721 - DNA, 66 bp, synthetic construct
  source 1..66: mol_type = other DNA
ctgaaccccaactacaccatccccgagttcacaacaccggggctgtacctgactgacaagcctatt

SEQ ID NO: 40722 - DNA, 90 bp, synthetic construct
  source 1..90: mol_type = other DNA
ttctttcatagccagcctcaacttgccgcctccttcgctggcacccctagcatcggcgtctacgagatgtcctctaagctcctgaacccc

SEQ ID NO: 40723 - DNA, 132 bp, synthetic construct
  source 1..132: mol_type = other DNA
tacaaccccggcgttctgaccgccgcctcgttctctcaacttcatcaaatcgctactggaaaatttaccggtgcatacccaattctgcacaccctcatcgagattatctgcctcaagatctatgcatcaccc

SEQ ID NO: 40724 - DNA, 219 bp, synthetic construct
  source 1..219: mol_type = other DNA
taccacgtcgacggcaccggtaacagcaatttccctgccaacgacgcttttgaggacggcgttaacttggccaacgctaagaaccagttcttcacctctgtgaacgacgttccaagggagaacttcgagaacagtacaagcgccaacctcaagaccgacaagtttaagtccctgaactccttcgtggacctgacacgcgagaatattatcctggatggt

SEQ ID NO: 40725 - DNA, 51 bp, synthetic construct
  source 1..51: mol_type = other DNA
ctgtattatatggcctcttccatccctgaacacagcgtctttctgtttaca

SEQ ID NO: 40726 - DNA, 57 bp, synthetic construct
  source 1..57: mol_type = other DNA
ctgttctgcaagacctatgtctcccccacaatccctttcaccaacttcaacatttcc

SEQ ID NO: 40727 - DNA, 33 bp, synthetic construct
  source 1..33: mol_type = other DNA
aagacctacgacggcagcacaccaatcgatatg

SEQ ID NO: 40728 - DNA, 63 bp, synthetic construct
  source 1..63: mol_type = other DNA
gcctatccatctgaccctggggtcgtgaccaaattcctgggcctcatacctgtgcctgatctg

SEQ ID NO: 40729 - DNA, 57 bp, synthetic construct
  source 1..57: mol_type = other DNA
agctactatgcatacggcggagccgtgtattgggctggcgataaggggacacttgcc

SEQ ID NO: 40730 - DNA, 81 bp, synthetic construct
  source 1..81: mol_type = other DNA
atcgtggccgtgcccttcctttctaatggcgtcatcgttgctgtccccacgatcgcttccgattttgctatgaataacgtg

SEQ ID NO: 40731 - DNA, 33 bp, synthetic construct
  source 1..33: mol_type = other DNA
taccatttccaatacgtccgtggatggaacaca

SEQ ID NO: 40732 - DNA, 57 bp, synthetic construct
  source 1..57: mol_type = other DNA
tggatcatgggcgacctgcccatgctcgccaaatacgcagatctgattgtgcaaggg

SEQ ID NO: 40733 - DNA, 156 bp, synthetic construct
  source 1..156: mol_type = other DNA
atcagcaacgtcctgatccatgtggatgagtactggacactctctcttattaacctgcccttcctggagggcatgcggatcgctatttccgacgtgcatccgccactccactacattatcctctatgcggcatctcctatcacctccaacaacatt

SEQ ID NO: 40734 - DNA, 102 bp, synthetic construct
  source 1..102: mol_type = other DNA
aggcaaatcggaacccaaacttcagcctctcacgaggcgactacattcaacaatgtggccaattacttaaccgtatttgctataaataaggggggattcagc

SEQ ID NO: 40735 - DNA, 45 bp, synthetic construct
  source 1..45: mol_type = other DNA
gtgaaggagattaagatcaccgacacaatcagtgttctcctgctg

SEQ ID NO: 40736 - DNA, 123 bp, synthetic construct
  source 1..123: mol_type = other DNA
agcctgatcccctttcacccatacgccttcgctatggccagtggcatcgggtccgctagcatgaacgctgctgccctggtgccattggtccacacctaccctgccatggcaacacaactcgaa

SEQ ID NO: 40737 - DNA, 48 bp, synthetic construct
  source 1..48: mol_type = other DNA
ggcgttccaacggcagagttcatcgtgcactacgttagtcaggttgaa

SEQ ID NO: 40738 - DNA, 153 bp, synthetic construct
  source 1..153: mol_type = other DNA
atgaacatttatctccacgtcgacgagtactggacctacactctgattaacctgcccatccggaacgccatcaccgtcattgtcaacgatgtgcatcctccactgtactacgggatcgtgtacctgctgacccctttcggcctgaacaatctc

SEQ ID NO: 40739 - DNA, 108 bp, synthetic construct
  source 1..108: mol_type = other DNA
aggcagatcatgaccgagtcttccggcttccacgaaggcttcaaactagactccctcatccactacctgtttgccttcgctattaagtcagaggatttcagacatgaa

SEQ ID NO: 40740 - DNA, 42 bp, synthetic construct
  source 1..42: mol_type = other DNA
atgctcgacgttatcgtgacaatcttgactgaaatagataac

SEQ ID NO: 40741 - DNA, 33 bp, synthetic construct
  source 1..33: mol_type = other DNA
atcgaatacagcttctataacccttctaccacc

SEQ ID NO: 40742 - DNA, 72 bp, synthetic construct
  source 1..72: mol_type = other DNA
aactacgccaatataccctccatgttcattctgatactgcaagatgctttcgacttcaagagcatagctgga

SEQ ID NO: 40743 - DNA, 78 bp, synthetic construct
  source 1..78: mol_type = other DNA
agcacaggcgttgctcggaatgccgccgtgtctggagcaccctacgtgcaagacgcgatttccaccgtcttcggaatc

SEQ ID NO: 40744 - DNA, 132 bp, synthetic construct
  source 1..132: mol_type = other DNA
tttaatcaaggagttgctacaatcgactccttcaaccaattacaccaaatcgcgtccggagagtttactaactggcatcctttctttcataccttcatcgaaatgctgtgcctgaaaatctacccaagcacc

SEQ ID NO: 40745 - DNA, 153 bp, synthetic construct
  source 1..153: mol_type = other DNA
actaacatgttcataaatgtggatgagtactggacctattccctcgtgaacctgcccttcatgcaagggatgatcgttgccgtgcatgacgttcatccaccactgtactatatgatcctgtacctgttcgctcctttcggactggccaatctg

SEQ ID NO: 40746 - DNA, 102 bp, synthetic construct
  source 1..102: mol_type = other DNA
caccagatccagacccagtccggcgagcccaacgagggctttgagctggttaatgccatccactatttgacggcgttcgccatcaagtcccagaacttcgaa

SEQ ID NO: 40747 - DNA, 39 bp, synthetic construct
  source 1..39: mol_type = other DNA
atgatagatccctcgttcattctgaatcaggtggataac

SEQ ID NO: 40748 - DNA, 30 bp, synthetic construct
  source 1..30: mol_type = other DNA
atggactacagcttctataactcagcaacc

SEQ ID NO: 40749 - DNA, 72 bp, synthetic construct
  source 1..72: mol_type = other DNA
aactaccataatataccaagcatgtttgtcctgatatttcaagacgctttcgactttaaaagcattgccggc

SEQ ID NO: 40750 - DNA, 78 bp, synthetic construct
  source 1..78: mol_type = other DNA
tccacaggggtggcacgtgacgcgacagtggcaggagctccctatgtacaaacggcgattggttctgtattgggtatc

SEQ ID NO: 40751 - DNA, 30 bp, synthetic construct
  source 1..30: mol_type = other DNA
atggactacgctttctataacgccaatacc

SEQ ID NO: 40752 - DNA, 72 bp, synthetic construct
  source 1..72: mol_type = other DNA
aattacgcgaatattccttctatgattatgatcatcttccaagatgcattcgatttccaaagtattgccggg

SEQ ID NO: 40753 - DNA, 78 bp, synthetic construct
  source 1..78: mol_type = other DNA
agcactggcgtcgcccgggatgctgctgtgtccggggctccttacgtgcaaaatgctctgtctaccgttatgggaacg

SEQ ID NO: 40754 - DNA, 39 bp, synthetic construct
  source 1..39: mol_type = other DNA
atgctggatatcttcaccatcctgaaccagattgacagc

SEQ ID NO: 40755 - DNA, 72 bp, synthetic construct
  source 1..72: mol_type = other DNA
ctcttctacatcccttcaatgtttatgctgattttccaaaatgctttcgacttccaaagcatcgccggcggc

SEQ ID NO: 40756 - DNA, 78 bp, synthetic construct
  source 1..78: mol_type = other DNA
agcaccggggttgctcggaatgccgccgtctccggagctccttacgttcaaaacgcgatcttttcggtcttcggacca

SEQ ID NO: 40757 - DNA, 39 bp, synthetic construct
  source 1..39: mol_type = other DNA
atgcagaacatcgtatccattctgaatcagaccgatgac

SEQ ID NO: 40758 - DNA, 30 bp, synthetic construct
  source 1..30: mol_type = other DNA
atcgactattcattctatagtccagctact

SEQ ID NO: 40759 - DNA, 72 bp, synthetic construct
  source 1..72: mol_type = other DNA
aactaccagaatgtgcccgctatggtgcttctgatttttcaagatgctttcaattttcaatcgattcttggt

SEQ ID NO: 40760 - DNA, 78 bp, synthetic construct
  source 1..78: mol_type = other DNA
tccaccggggttgcacggaatgccactgtatctggtgctccctacgtccaaaacgctatccacactgtcttcggaacc

SEQ ID NO: 40761 - DNA, 69 bp, synthetic construct
  source 1..69: mol_type = other DNA
tacgccaacataccctcgatgttcttcctgatcttccaagatgctttcgatttccaatcgatagctggc

SEQ ID NO: 40762 - DNA, 78 bp, synthetic construct
  source 1..78: mol_type = other DNA
tccaccggagtcgctcgggacgctgccgtgtctggggccccatacgtgcaaaacgctatttccactgtattcgggtgg

SEQ ID NO: 40763 - DNA, 72 bp, synthetic construct
  source 1..72: mol_type = other DNA
aacatccagaatgtgccagctatgttcctgttgatattccaagacgcctttgactttcattctattctgggg

SEQ ID NO: 40764 - DNA, 78 bp, synthetic construct
  source 1..78: mol_type = other DNA
tccaccggagtggcacgggatgccgtcgtgtctggggctccttacgtccaaaacgctatatcaaccgtactcggacca

SEQ ID NO: 40765 - DNA, 39 bp, synthetic construct
  source 1..39: mol_type = other DNA
gtgcccagcatcgccaatgagttcggcatgaacaacgtg

SEQ ID NO: 40766 - DNA, 33 bp, synthetic construct
  source 1..33: mol_type = other DNA
tatcattttcaatacgttagaggctggaacgcc

SEQ ID NO: 40767 - DNA, 54 bp, synthetic construct
  source 1..54: mol_type = other DNA
atcatgggctccctgaagctctctagccaatacgctgggatggttgtccaagcg

SEQ ID NO: 40768 - DNA, 39 bp, synthetic construct
  source 1..39: mol_type = other DNA
gtgtacctgatgtcggacttcagcgtttcttcaactcag

SEQ ID NO: 40769 - DNA, 36 bp, synthetic construct
  source 1..36: mol_type = other DNA
ctgttcattcaaggaattgcctataatagtgctatc

SEQ ID NO: 40770 - DNA, 45 bp, synthetic construct
  source 1..45: mol_type = other DNA
gccggcggagccatcggacacaactccgcgtctgttgtggcattc

SEQ ID NO: 40771 - DNA, 30 bp, synthetic construct
  source 1..30: mol_type = other DNA
atgctcgaggtgctgcatttttccgttccc

SEQ ID NO: 40772 - DNA, 54 bp, synthetic construct
  source 1..54: mol_type = other DNA
ctgttctacctcaccgctaacgtggccgagcacagctccttcctgttttcctac

SEQ ID NO: 40773 - DNA, 54 bp, synthetic construct
  source 1..54: mol_type = other DNA
agcatggactacgtgaacaacattatccccgtcatcaattacgagatcttccct

SEQ ID NO: 40774 - DNA, 60 bp, synthetic construct
  source 1..60: mol_type = other DNA
gctctcccgagcggcggcgaaaccacaatgctcctgggaatcattcctatctccaacata

SEQ ID NO: 40775 - DNA, 66 bp, synthetic construct
  source 1..66: mol_type = other DNA
taccagaacataccgtcaatgttcatgctcattttccaagacgcttttaatctgaagcctatcatc

SEQ ID NO: 40776 - DNA, 78 bp, synthetic construct
  source 1..78: mol_type = other DNA
tctaccggcgtggcccgggacgtgtcggtgtccggggctccctatgtgcaaaacgctatctctaccgtattcggaacc

SEQ ID NO: 40777 - DNA, 45 bp, synthetic construct
  source 1..45: mol_type = other DNA
atgatgagcctgtccggcatgttcggctctggaaccatggatgtt

SEQ ID NO: 40778 - DNA, 54 bp, synthetic construct
  source 1..54: mol_type = other DNA
tccatgctcgagcccattaaggagctggccagcgggatctctatcggtcctacc

SEQ ID NO: 40779 - DNA, 30 bp, synthetic construct
  source 1..30: mol_type = other DNA
atgatcgacgtgcttcacttttctgacccc

SEQ ID NO: 40780 - DNA, 54 bp, synthetic construct
  source 1..54: mol_type = other DNA
tccctctttaatatcaccgccaacgtgcatgagcacagcgctctgctgttcacc

SEQ ID NO: 40781 - DNA, 54 bp, synthetic construct
  source 1..54: mol_type = other DNA
gctgagagtcatgtgaacaacgttattccattcatcaatcagtcgtcgagtgta

SEQ ID NO: 40782 - DNA, 54 bp, synthetic construct
  source 1..54: mol_type = other DNA
ttcccaaatcaaaatcctaccatgctgtttaatatcattcccatcgctaacctc

SEQ ID NO: 40783 - DNA, 39 bp, synthetic construct
  source 1..39: mol_type = other DNA
atgatagacattgtggctatcctgaccgccatcgacgat

SEQ ID NO: 40784 - DNA, 66 bp, synthetic construct
  source 1..66: mol_type = other DNA
taccagaacataccttcaatgattatgctgatcttccaagacgcgttcaacttcaagaccatcctc

SEQ ID NO: 40785 - DNA, 78 bp, synthetic construct
  source 1..78: mol_type = other DNA
agtaccggagtggcccgggacgtctctgtctctggagctccttatgtacaaaacgctatctcgacggtcttcggaacc

SEQ ID NO: 40786 - DNA, 36 bp, synthetic construct
  source 1..36: mol_type = other DNA
gtgggcatcatgagcgacttccacgtctcctctaca

SEQ ID NO: 40787 - DNA, 36 bp, synthetic construct
  source 1..36: mol_type = other DNA
ctgttcgttcaaggcgtttgtaatcagtctgctacc

SEQ ID NO: 40788 - DNA, 54 bp, synthetic construct
  source 1..54: mol_type = other DNA
gtatttactggaggatacgtggctcacaacaagatcaccgtcggagccttttca

SEQ ID NO: 40789 - DNA, 30 bp, synthetic construct
  source 1..30: mol_type = other DNA
atgtacgaggtgctacacttctccgtccag

SEQ ID NO: 40790 - DNA, 57 bp, synthetic construct
  source 1..57: mol_type = other DNA
agcctgtactaccttactgaggccgtgcccacacactccaccctcctgttctcttac

SEQ ID NO: 40791 - DNA, 51 bp, synthetic construct
  source 1..51: mol_type = other DNA
atacactatatcaataacacaattccgttcactaacatcaccatcgcccct

SEQ ID NO: 40792 - DNA, 60 bp, synthetic construct
  source 1..60: mol_type = other DNA
tgcgtgcctacacccggccactgtaccaagctgttcgggctgatccaaatcaattctctc

SEQ ID NO: 40793 - DNA, 66 bp, synthetic construct
  source 1..66: mol_type = other DNA
atgaacccacactacacaattcccgagttcaccacccctggcctgtacctcacaaccaagagcatc

SEQ ID NO: 40794 - DNA, 90 bp, synthetic construct
  source 1..90: mol_type = other DNA
ttctttcacggacaaccacaacttgctgtgatctacggtgccacacccgctgttggagttaacgagatggccactaccctggttggatca

SEQ ID NO: 40795 - DNA, 33 bp, synthetic construct
  source 1..33: mol_type = other DNA
gtggctggactgggtgccgagccattggccgca

SEQ ID NO: 40796 - DNA, 48 bp, synthetic construct
  source 1..48: mol_type = other DNA
ctgaaaatgatgggagccacaagcgtactgaaatatgctctagactat

SEQ ID NO: 40797 - DNA, 36 bp, synthetic construct
  source 1..36: mol_type = other DNA
accatagtttcgggacccacttcggtagccgtctat

SEQ ID NO: 40798 - DNA, 63 bp, synthetic construct
  source 1..63: mol_type = other DNA
caaattgcatttatcttctcttattctgagaacagtgcccagctggaacctctgattgcttcc

SEQ ID NO: 40799 - DNA, 39 bp, synthetic construct
  source 1..39: mol_type = other DNA
ttccctcatatcatggtggaatatgcaatctctgctgga

SEQ ID NO: 40800 - DNA, 30 bp, synthetic construct
  source 1..30: mol_type = other DNA
tacctggagacctccctccacacatcttcc

SEQ ID NO: 40801 - DNA, 75 bp, synthetic construct
  source 1..75: mol_type = other DNA
atcgggcagaacaactacctgagcgctattgccaatccaaccgcggttcaacacgctctggctctcgccaaaggc

SEQ ID NO: 40802 - DNA, 66 bp, synthetic construct
  source 1..66: mol_type = other DNA
ctgaaccctagctattccattcccgagttcacaacccagggcctctacctgactgacaagaacatc

SEQ ID NO: 40803 - DNA, 90 bp, synthetic construct
  source 1..90: mol_type = other DNA
ttcttccacggacaaccacaactagctgccatttacggcgctcagcctgctgttgctgttaaagagatggccactgtcctcgttggcccg

SEQ ID NO: 40804 - DNA, 30 bp, synthetic construct
  source 1..30: mol_type = other DNA
gtgtctagcatcggggaagctgctgtttcc

SEQ ID NO: 40805 - DNA, 60 bp, synthetic construct
  source 1..60: mol_type = other DNA
tatatcatcgacattctgttcggtcaaataggagacgatgtgttttacaacgcccatatc

SEQ ID NO: 40806 - DNA, 36 bp, synthetic construct
  source 1..36: mol_type = other DNA
agcaccttcggaacggtcgctgcaatcgctgccgcc

SEQ ID NO: 40807 - DNA, 54 bp, synthetic construct
  source 1..54: mol_type = other DNA
ctcagcctatatggacttactcccgagtgcaaggatcttgcggcaatggcccag

SEQ ID NO: 40808 - DNA, 39 bp, synthetic construct
  source 1..39: mol_type = other DNA
gtctacctgatgtccgacttctccgtttcttcaacacag

SEQ ID NO: 40809 - DNA, 33 bp, synthetic construct
  source 1..33: mol_type = other DNA
atctttgtgcaaggcgtggcttacaatagcgcg

SEQ ID NO: 40810 - DNA, 48 bp, synthetic construct
  source 1..48: mol_type = other DNA
ctggccggaggcgctatcgaccataacgcggcgtccgtggctggattc

SEQ ID NO: 40811 - DNA, 33 bp, synthetic construct
  source 1..33: mol_type = other DNA
gtcgctggattgggacctggagcactgtctgcc

SEQ ID NO: 40812 - DNA, 48 bp, synthetic construct
  source 1..48: mol_type = other DNA
ctgatcctcattggggctggcaacgtgctgaattacgccatggactac

SEQ ID NO: 40813 - DNA, 30 bp, synthetic construct
  source 1..30: mol_type = other DNA
atgcaagtatctaatcacatctccgttgct

SEQ ID NO: 40814 - DNA, 63 bp, synthetic construct
  source 1..63: mol_type = other DNA
cagatcgccaccatcttctcctactcgagcgaatcagcaggccttgcaccacaaatagcttcc

SEQ ID NO: 40815 - DNA, 93 bp, synthetic construct
  source 1..93: mol_type = other DNA
tctttcactaagggctggggcgccaatcccgacaccttcttcgccaacacccttctacaatcgtccgagtctatggctggactgactcacttt

SEQ ID NO: 40816 - DNA, 75 bp, synthetic construct
  source 1..75: mol_type = other DNA
ctgacactgcccggcgccagcatcggcctggctgagctgttcaaccccgactggtccctccttacccactttgaa

SEQ ID NO: 40817 - DNA, 111 bp, synthetic construct
  source 1..111: mol_type = other DNA
ttgggctacatgagtttgcaaagcggcacggctgtggccgatctggtgactcaggggacaggacttgtcttcgttgtctacccaaccgtctttaacgtcctcggccactgg

SEQ ID NO: 40818 - DNA, 90 bp, synthetic construct
  source 1..90: mol_type = other DNA
aacgtgacctacactttcctgatcaatggcacagtcatcaagcaggccacagtggccattaacgagaccgacgctagctacaccgacaag

SEQ ID NO: 40819 - DNA, 45 bp, synthetic construct
  source 1..45: mol_type = other DNA
atcctgattgagtacacaggccccactaacaccgaacaacagcag

SEQ ID NO: 40820 - DNA, 39 bp, synthetic construct
  source 1..39: mol_type = other DNA
atgggagacgctgtcggagcctacgagcggatgcatctg

SEQ ID NO: 40821 - DNA, 48 bp, synthetic construct
  source 1..48: mol_type = other DNA
agcatagtgcaggacaccatcgccaaggccgaggctgatggcatcatt

SEQ ID NO: 40822 - DNA, 42 bp, synthetic construct
  source 1..42: mol_type = other DNA
aacgacaacatcgagttcgctaccggactgccttcaattgac

SEQ ID NO: 40823 - DNA, 54 bp, synthetic construct
  source 1..54: mol_type = other DNA
tctcccgaagccaccagcggcctgatcaaggaggtctattcggagattgacgaa

SEQ ID NO: 40824 - DNA, 36 bp, synthetic construct
  source 1..36: mol_type = other DNA
gtgtcatctataagttccgacgctgtcgtggctatg

SEQ ID NO: 40825 - DNA, 51 bp, synthetic construct
  source 1..51: mol_type = other DNA
gtgctgaaattcatggatgtctccgaaagcgttgaactcgcaaagcagtac

SEQ ID NO: 40826 - DNA, 45 bp, synthetic construct
  source 1..45: mol_type = other DNA
tacgtgtaccaaagtttctccgtagtgaacatggagacctccatc

SEQ ID NO: 40827 - DNA, 87 bp, synthetic construct
  source 1..87: mol_type = other DNA
atcacctttagctggggaacagacgccgctctctacttcgtcaacaatgtcggcggcagttccaacctgagcgatgcctctttcctg

SEQ ID NO: 40828 - DNA, 69 bp, synthetic construct
  source 1..69: mol_type = other DNA
accctgcccggcgtggacattgggatcaatacactgcttaaccctagctgggacaagctcttcgatgtg

SEQ ID NO: 40829 - DNA, 105 bp, synthetic construct
  source 1..105: mol_type = other DNA
ggtttcatgagctacaccaatggcacccctatggtccagctgatcaccgagggcacagggctgatcttcatcgtgttccccatgatcttcaacatcatgggagtc

SEQ ID NO: 40830 - DNA, 66 bp, synthetic construct
  source 1..66: mol_type = other DNA
ctcaatcctgcctacaccattcccgagttcacaactcagggcctgtatctgaccgacaagaacatc

SEQ ID NO: 40831 - DNA, 90 bp, synthetic construct
  source 1..90: mol_type = other DNA
ttctttcatgtacaaccacaactggccgccggctacgctgccgcaccaaccgtcgccgtttacgaaatggctacaaagctgctcaacccc

SEQ ID NO: 40832 - DNA, 63 bp, synthetic construct
  source 1..63: mol_type = other DNA
attattgataccttcaatgtgaacatctttgacgcctccaccgttaaaaccgctgtcatggga

SEQ ID NO: 40833 - DNA, 51 bp, synthetic construct
  source 1..51: mol_type = other DNA
ctctacaacctctccactgccatccctacacactctaacttcctgtttaca

SEQ ID NO: 40834 - DNA, 51 bp, synthetic construct
  source 1..51: mol_type = other DNA
atgaattatgtgaacaataccgtcccattcatcaactataccctgtccccc

SEQ ID NO: 40835 - DNA, 63 bp, synthetic construct
  source 1..63: mol_type = other DNA
gccttccctgagaaaccgggcgtggtcaactctctctttgggctgatccccattccaaacctg

SEQ ID NO: 40836 - DNA, 30 bp, synthetic construct
  source 1..30: mol_type = other DNA
agcttcctgctgaccatcctctctcctgag

SEQ ID NO: 40837 - DNA, 33 bp, synthetic construct
  source 1..33: mol_type = other DNA
ttccagacaccgataagcggctctgtggtgtca

SEQ ID NO: 40838 - DNA, 66 bp, synthetic construct
  source 1..66: mol_type = other DNA
atcgggaacccccggagcggcattgccgtgtacatgtcctatctgatctctgagatgaccctgaat

SEQ ID NO: 40839 - DNA, 108 bp, synthetic construct
  source 1..108: mol_type = other DNA
accctgaaccactggatggacggcgccttcgagctctggacgagttgctccacttcctccgcctctaaggctctgcctaccacatcccacttctcaaggcctttgtct

SEQ ID NO: 40840 - DNA, 60 bp, synthetic construct
  source 1..60: mol_type = other DNA
gtcctgtgttgccggttccggctggcagtctgcacgcatatgagccacatctgcacatgc

SEQ ID NO: 40841 - DNA, 45 bp, synthetic construct
  source 1..45: mol_type = other DNA
tctaagacaatccccatcactagttccgttactatcgtcatcatg

SEQ ID NO: 40842 - DNA, 30 bp, synthetic construct
  source 1..30: mol_type = other DNA
ggccagagcataatcaccatcattcaagcc

SEQ ID NO: 40843 - DNA, 120 bp, synthetic construct
  source 1..120: mol_type = other DNA
agcgtgctgcctctgcacccatacgccttcgctatggccagcgggattggctccggctccatgaacgctgccgccctggcacctctgctcaagacctttccctctatggctcgggatatc

SEQ ID NO: 40844 - DNA, 48 bp, synthetic construct
  source 1..48: mol_type = other DNA
ggcatgcccaccgctgatttcctgattaactacaccaatcagatcgag

SEQ ID NO: 40845 - DNA, 51 bp, synthetic construct
  source 1..51: mol_type = other DNA
ttcaaaaccaccatgtttggccccatcgggggcactctgccgctttggaac

SEQ ID NO: 40846 - DNA, 51 bp, synthetic construct
  source 1..51: mol_type = other DNA
tttaagaccacgctcttcggccccatcggggggcacctgggtttctcctct

SEQ ID NO: 40847 - DNA, 54 bp, synthetic construct
  source 1..54: mol_type = other DNA
ttccacactaccctgtttggacccatcggcgaccatctgggatacgagacgtac

SEQ ID NO: 40848 - DNA, 54 bp, synthetic construct
  source 1..54: mol_type = other DNA
ttttacacaaccattttcggacccatcggtggccacctgggctacgaagagtat

SEQ ID NO: 40849 - DNA, 54 bp, synthetic construct
  source 1..54: mol_type = other DNA
ttcgaaacaaccctgtttgggcccatcggcgaccacctgagctacgagacttac

SEQ ID NO: 40850 - DNA, 51 bp, synthetic construct
  source 1..51: mol_type = other DNA
tttaagacgaccctgttcggaccaatcgggggtcatctgggattccagtca

SEQ ID NO: 40851 - DNA, 33 bp, synthetic construct
  source 1..33: mol_type = other DNA
gttgccggattgggacctggcgcactgtctgct

SEQ ID NO: 40852 - DNA, 48 bp, synthetic construct
  source 1..48: mol_type = other DNA
ctcattctgatcggcgccggcaacgtgctgaactatgctatggactac

SEQ ID NO: 40853 - DNA, 30 bp, synthetic construct
  source 1..30: mol_type = other DNA
atgcaggtttcgaatcacatctccgttgct

SEQ ID NO: 40854 - DNA, 63 bp, synthetic construct
  source 1..63: mol_type = other DNA
cagatcgcaacaatcttcacctacacctccgagtctgcggggttggcgccgcaaatagctagc

SEQ ID NO: 40855 - DNA, 42 bp, synthetic construct
  source 1..42: mol_type = other DNA
acaacaatgttcggaccaatcggcggacacctgagcctggag

SEQ ID NO: 40856 - DNA, 54 bp, synthetic construct
  source 1..54: mol_type = other DNA
ttccacacaaccatctttggacctattggcggacatctgcccttacattcatac

SEQ ID NO: 40857 - DNA, 54 bp, synthetic construct
  source 1..54: mol_type = other DNA
tttaagaccacaattttcgggcctatcggcggacatctgccgctgcaagactat

SEQ ID NO: 40858 - DNA, 54 bp, synthetic construct
  source 1..54: mol_type = other DNA
ttcaagaccacaatctttgggcccatcggcggacacctgccaatacaaagttat

SEQ ID NO: 40859 - DNA, 54 bp, synthetic construct
  source 1..54: mol_type = other DNA
tttaacacaaccatcttcggccccattggcggacacctgggtttttattcatat

SEQ ID NO: 40860 - DNA, 45 bp, synthetic construct
  source 1..45: mol_type = other DNA
aagaccacactgtttggacccattggtggccatctcgggttcatc

SEQ ID NO: 40861 - DNA, 54 bp, synthetic construct
  source 1..54: mol_type = other DNA
ttccacaccacactgtttggacccatcggcgagcatctccctctgcacgactat

SEQ ID NO: 40862 - DNA, 48 bp, synthetic construct
  source 1..48: mol_type = other DNA
ttcaagaccacactctttgggcctctgggcggatctctgcctttcatg

SEQ ID NO: 40863 - DNA, 48 bp, synthetic construct
  source 1..48: mol_type = other DNA
ttcaagaccacactctttgggccccttggcggatctctgcctttcatg

SEQ ID NO: 40864 - DNA, 48 bp, synthetic construct
  source 1..48: mol_type = other DNA
ttcaagaccacactgtttgggcccattggcggtcatctgggaagcatc

SEQ ID NO: 40865 - DNA, 45 bp, synthetic construct
  source 1..45: mol_type = other DNA
aagaccacactctttggccctatcggcggacacctgggtttcttc

SEQ ID NO: 40866 - DNA, 48 bp, synthetic construct
  source 1..48: mol_type = other DNA
aagaccacactgttcggaccactcggcggtcatctggggtttcagagc

SEQ ID NO: 40867 - DNA, 51 bp, synthetic construct
  source 1..51: mol_type = other DNA
ttcaagactacaattttcggccctctgggaggctcccttccttttaccgac

SEQ ID NO: 40868 - DNA, 54 bp, synthetic construct
  source 1..54: mol_type = other DNA
ttcaagaccacactctttgggcctatcggcgagcatctgcccctgcaagactac

SEQ ID NO: 40869 - DNA, 51 bp, synthetic construct
  source 1..51: mol_type = other DNA
ttcaaaaccactctctttggcccactgggaggccacctggggttccagagc

SEQ ID NO: 40870 - DNA, 51 bp, synthetic construct
  source 1..51: mol_type = other DNA
atctcagtcgacgattctggaattgtagttaacaaattaaaccagaaggcg

SEQ ID NO: 40871 - DNA, 30 bp, synthetic construct
  source 1..30: mol_type = other DNA
atccccaaaagcaccatgtacaagaacgag

SEQ ID NO: 40872 - DNA, 51 bp, synthetic construct
  source 1..51: mol_type = other DNA
aagacaaccatgttcgggcccatcggcggacaccttagcttttcgtcccaa

SEQ ID NO: 40873 - DNA, 51 bp, synthetic construct
  source 1..51: mol_type = other DNA
tttcataccaccctcttcggcccaatcgggaagcatcttggagggcaatcc

SEQ ID NO: 40874 - DNA, 45 bp, synthetic construct
  source 1..45: mol_type = other DNA
cccatgatgggcatgtccggactgttcaagagcggcatcgatcag

SEQ ID NO: 40875 - DNA, 48 bp, synthetic construct
  source 1..48: mol_type = other DNA
atcctgggccccatgcgagcactcgccggaatggctgatgatggttcc

SEQ ID NO: 40876 - DNA, 51 bp, synthetic construct
  source 1..51: mol_type = other DNA
ttcaaaacaaccctctttggcccaatcggaggccaccttgggctgtcaagt

SEQ ID NO: 40877 - DNA, 51 bp, synthetic construct
  source 1..51: mol_type = other DNA
tttaagaccacactgttcggcccaattggggggcacctcggattctcatcc

SEQ ID NO: 40878 - DNA, 45 bp, synthetic construct
  source 1..45: mol_type = other DNA
cccatgatgggcatgagcggcttgtttcaatcggccatggataca

SEQ ID NO: 40879 - DNA, 45 bp, synthetic construct
  source 1..45: mol_type = other DNA
ctggggccaatgcgggcaatggcggggatggctgatgatggaagc

SEQ ID NO: 40880 - DNA, 48 bp, synthetic construct
  source 1..48: mol_type = other DNA
ttcgagaccaacatcattggcgtcggcacacacattgccggaatcgaa

SEQ ID NO: 40881 - DNA, 54 bp, synthetic construct
  source 1..54: mol_type = other DNA
tttaagaccacactcttcgggcctatcggcggccacctgggagtggatagttac

SEQ ID NO: 40882 - DNA, 51 bp, synthetic construct
  source 1..51: mol_type = other DNA
tttgagaccaccctctttgggcccatcggcggtcatctgggctatgatata

SEQ ID NO: 40883 - DNA, 30 bp, synthetic construct
  source 1..30: mol_type = other DNA
aagttcctgaccatcgacgcctatgctggc

SEQ ID NO: 40884 - DNA, 30 bp, synthetic construct
  source 1..30: mol_type = other DNA
cagctcctggacacccggtctttcgctctg

SEQ ID NO: 40885 - DNA, 36 bp, synthetic construct
  source 1..36: mol_type = other DNA
gtgagcctgttcatcaagtcctacatggacatcttt

SEQ ID NO: 40886 - DNA, 171 bp, synthetic construct
  source 1..171: mol_type = other DNA
acgctcaatggggccttcatccatatagacgaatatttcaccctgggatttatccggtttcccgttaacgagcttattaccatcaccgcaaatgacgtccatcccccactctattacgtgctgctgaagataattaacaattcttccattatcaacgattccgtatttacg

SEQ ID NO: 40887 - DNA, 99 bp, synthetic construct
  source 1..99: mol_type = other DNA
caccagctcacacaagtccataacggctactggattgagcccctggatttctacgacatcatcgactgcctgagcttctacgccgtcaatctggatgtc

SEQ ID NO: 40888 - DNA, 39 bp, synthetic construct
  source 1..39: mol_type = other DNA
gtgtacctgatgtccgactttagcgtgtctagcacacag

SEQ ID NO: 40889 - DNA, 36 bp, synthetic construct
  source 1..36: mol_type = other DNA
atcttcatccaagggatcgcgtacaatagtgccatc

SEQ ID NO: 40890 - DNA, 48 bp, synthetic construct
  source 1..48: mol_type = other DNA
ctggccggaggcgctatcgaccacaactccgcaagcgtcgtcggattc

SEQ ID NO: 40891 - DNA, 33 bp, synthetic construct
  source 1..33: mol_type = other DNA
gttgccggactcggagctgacgcacttgcggcc

SEQ ID NO: 40892 - DNA, 51 bp, synthetic construct
  source 1..51: mol_type = other DNA
attctcaacctgatgggcgctggcaacactatcaaatatgcactcgattat

SEQ ID NO: 40893 - DNA, 36 bp, synthetic construct
  source 1..36: mol_type = other DNA
gtgatcgtggccggcacgactgctgttgctgtctac

SEQ ID NO: 40894 - DNA, 69 bp, synthetic construct
  source 1..69: mol_type = other DNA
cagatcgccaccgccttctcctacacaagtgcaagctctgccctggctcctgagatcgccgccgctacg

SEQ ID NO: 40895 - DNA, 45 bp, synthetic construct
  source 1..45: mol_type = other DNA
gtgaaggagattcggatcaccgacacaatcagtgtcctgcttctc

SEQ ID NO: 40896 - DNA, 30 bp, synthetic construct
  source 1..30: mol_type = other DNA
agcggccagtccatcgacatcatcttcaac

SEQ ID NO: 40897 - DNA, 123 bp, synthetic construct
  source 1..123: mol_type = other DNA
agtctgatcccatatcatccctatgcctttgcaatggcatctgggatcggcagcgcctctatgaacgctgccgccctggtccccctggtgcacatgtaccctgctatggcaacacagctggaa

SEQ ID NO: 40898 - DNA, 48 bp, synthetic construct
  source 1..48: mol_type = other DNA
ggcgtccccacatccgacattatcatcacctatgtctcccaaatcgag

SEQ ID NO: 40899 - DNA, 39 bp, synthetic construct
  source 1..39: mol_type = other DNA
gtgtacctgatgtctgacttctccgtctcgtcaacgcag

SEQ ID NO: 40900 - DNA, 33 bp, synthetic construct
  source 1..33: mol_type = other DNA
atttttattcaaggcgtagcctacaactcagcc

SEQ ID NO: 40901 - DNA, 45 bp, synthetic construct
  source 1..45: mol_type = other DNA
gccggcggagccatcgaccataacaccgcatcggtggtggccttc

SEQ ID NO: 40902 - DNA, 36 bp, synthetic construct
  source 1..36: mol_type = other DNA
ccaacgattagctcggatctctctctgaacgtggag

SEQ ID NO: 40903 - DNA, 54 bp, synthetic construct
  source 1..54: mol_type = other DNA
gtcctgggcgccagcaattctctcgagtccaacattcccctgttcatcacctct

SEQ ID NO: 40904 - DNA, 33 bp, synthetic construct
  source 1..33: mol_type = other DNA
actaagagctttactacggcgggatactatgaa

SEQ ID NO: 40905 - DNA, 39 bp, synthetic construct
  source 1..39: mol_type = other DNA
aaccagatcgccaacgctctgttcaatggaagcatgcag

SEQ ID NO: 40906 - DNA, 42 bp, synthetic construct
  source 1..42: mol_type = other DNA
ctctacattatcacgacgcctgagatcgccctgggaggctat

SEQ ID NO: 40907 - DNA, 39 bp, synthetic construct
  source 1..39: mol_type = other DNA
ctgaatcagctcgtcggcaattacgccaccggtatctat

SEQ ID NO: 40908 - DNA, 51 bp, synthetic construct
  source 1..51: mol_type = other DNA
acagatattatccaattaatttatggccacaaatacgatgccgctgctgag

SEQ ID NO: 40909 - DNA, 33 bp, synthetic construct
  source 1..33: mol_type = other DNA
gtagctggtctgggccctgatgcattggccgcc

SEQ ID NO: 40910 - DNA, 48 bp, synthetic construct
  source 1..48: mol_type = other DNA
ctggtgctgatgggcgccggcaagaccatgacatacgcttataggtac

SEQ ID NO: 40911 - DNA, 33 bp, synthetic construct
  source 1..33: mol_type = other DNA
gttatcgtcgctggcacggatgcagtggcggcc

SEQ ID NO: 40912 - DNA, 60 bp, synthetic construct
  source 1..60: mol_type = other DNA
atcagtagcatcttcgcgtataccagtgcttctgcctccctgggaccacagatagcatat

SEQ ID NO: 40913 - DNA, 33 bp, synthetic construct
  source 1..33: mol_type = other DNA
gtagccagcctcggcgaggtggcaatatccggg

SEQ ID NO: 40914 - DNA, 57 bp, synthetic construct
  source 1..57: mol_type = other DNA
ctgattaacaccctcttcggacaaattgaccaggacgtgtttgatactgctaacatc

SEQ ID NO: 40915 - DNA, 30 bp, synthetic construct
  source 1..30: mol_type = other DNA
agcaccttcggcacaatggcaatcgctgcc

SEQ ID NO: 40916 - DNA, 51 bp, synthetic construct
  source 1..51: mol_type = other DNA
ctgcagatctacgctctgtcccctgcgacggcggcgatgacatcggagatg

SEQ ID NO: 40917 - DNA, 30 bp, synthetic construct
  source 1..30: mol_type = other DNA
gtgaaccggaccggcagcttcgacaatctg

SEQ ID NO: 40918 - DNA, 51 bp, synthetic construct
  source 1..51: mol_type = other DNA
accggatatatattctacgtcaccaaggaggctactgtagtatatggatcc

SEQ ID NO: 40919 - DNA, 78 bp, synthetic construct
  source 1..78: mol_type = other DNA
agcaagggcctgacatctgggctcaccgatagttccgtggacctggcccaatacggattagtcatggacaccttcgat

SEQ ID NO: 40920 - DNA, 105 bp, synthetic construct
  source 1..105: mol_type = other DNA
ttctctagttgggagtccctcgggacagtcggccaggctctgatgttcctgataccgttctctcatcctatgatggccatggacaacctgatctttggcgatatg

SEQ ID NO: 40921 - DNA, 87 bp, synthetic construct
  source 1..87: mol_type = other DNA
agctccatcgatttttcttggggcagcgacactgccctgtacttcgagaaggtcgggggtacctccgacctgagtaccatgacaacc

SEQ ID NO: 40922 - DNA, 72 bp, synthetic construct
  source 1..72: mol_type = other DNA
atcagcctgcctgggtccggcatcggcatcaacacactgcttaacccgaaatgggaggccctcaccaacata

SEQ ID NO: 40923 - DNA, 105 bp, synthetic construct
  source 1..105: mol_type = other DNA
ggatacatgtcttctacctccggcgtccccattgtgaacctgatcaaggagggcactggcctcatcttcgtagtttttccaacaattttcaatatcatgggaccc

SEQ ID NO: 40924 - DNA, 30 bp, synthetic construct
  source 1..30: mol_type = other DNA
agcatcctgggcaccaaggctttctccgct

SEQ ID NO: 40925 - DNA, 54 bp, synthetic construct
  source 1..54: mol_type = other DNA
aacatcctcctgaccctgggcgcttcttctgtcattgacctggctcttgaatac

SEQ ID NO: 40926 - DNA, 30 bp, synthetic construct
  source 1..30: mol_type = other DNA
agccctgacggcttcaacctgggaatcagc

SEQ ID NO: 40927 - DNA, 36 bp, synthetic construct
  source 1..36: mol_type = other DNA
gcccatatcgctaataaccatgccgtagcttcttat

SEQ ID NO: 40928 - DNA, 54 bp, synthetic construct
  source 1..54: mol_type = other DNA
ctcagcctgctgttctgcctggccgaggacagcaagtcacttaccgatttggtc

SEQ ID NO: 40929 - DNA, 36 bp, synthetic construct
  source 1..36: mol_type = other DNA
gttgccggtctgggcccggacgcactgtctgcaatc

SEQ ID NO: 40930 - DNA, 54 bp, synthetic construct
  source 1..54: mol_type = other DNA
cccatcctcatctggattggggctggcaacgtgctgagctacgccatggactat

SEQ ID NO: 40931 - DNA, 36 bp, synthetic construct
  source 1..36: mol_type = other DNA
atccaggtcagcaaccacgtgtccgttgctgtgttc

SEQ ID NO: 40932 - DNA, 60 bp, synthetic construct
  source 1..60: mol_type = other DNA
atcgcaactatattttcttatagctctgagtccgctggcctgacgccgcaaatagcgagt

SEQ ID NO: 40933 - DNA, 36 bp, synthetic construct
  source 1..36: mol_type = other DNA
cccgacattggagagtcccttggcgtggatactgcc

SEQ ID NO: 40934 - DNA, 33 bp, synthetic construct
  source 1..33: mol_type = other DNA
ttctacggacgaaccgtcgagggcatgtcaagt

SEQ ID NO: 40935 - DNA, 60 bp, synthetic construct
  source 1..60: mol_type = other DNA
ttcagcaagtccgacggggtcgacatcggcgacgtgacccgggatgcctttctggatgga

SEQ ID NO: 40936 - DNA, 33 bp, synthetic construct
  source 1..33: mol_type = other DNA
ctggacggcaagccagagcacgtcgtgctcaac

SEQ ID NO: 40937 - DNA, 51 bp, synthetic construct
  source 1..51: mol_type = other DNA
acagacgccgtgttcactgtggattccgagaccgggctttatgcgcgtggt

SEQ ID NO: 40938 - DNA, 30 bp, synthetic construct
  source 1..30: mol_type = other DNA
atgatcgacgtgttgcactttagtgatccc

SEQ ID NO: 40939 - DNA, 57 bp, synthetic construct
  source 1..57: mol_type = other DNA
tccctgttcgccctctctacaaacatccaggagcacagcgctctgctgttcacctac

SEQ ID NO: 40940 - DNA, 54 bp, synthetic construct
  source 1..54: mol_type = other DNA
tttgccgagagccatgtgaacaatatcatccccttcatcaaccacgaaatcgct

SEQ ID NO: 40941 - DNA, 30 bp, synthetic construct
  source 1..30: mol_type = other DNA
ggcagcatcggctccgggatgaagctgaac

SEQ ID NO: 40942 - DNA, 54 bp, synthetic construct
  source 1..54: mol_type = other DNA
ttcccaaacgacaaccctaccatgctgtttaatatcattcccattgccaatctg

SEQ ID NO: 40943 - DNA, 33 bp, synthetic construct
  source 1..33: mol_type = other DNA
gtggccggtatcggatctgacgcattggccgct

SEQ ID NO: 40944 - DNA, 48 bp, synthetic construct
  source 1..48: mol_type = other DNA
ctgcagctgatgggagccggggataccatcggctacgctctcgactac

SEQ ID NO: 40945 - DNA, 36 bp, synthetic construct
  source 1..36: mol_type = other DNA
gtcatcaccgcgggcaccgatgccgtggctgtgtac

SEQ ID NO: 40946 - DNA, 63 bp, synthetic construct
  source 1..63: mol_type = other DNA
cagattgcgaccgccttctcctacacaaacgcctctgctggcctgtcatctcaaattgctact

SEQ ID NO: 40947 - DNA, 60 bp, synthetic construct
  source 1..60: mol_type = other DNA
gggtccggcgaagtaatatacgacaccaagatcctgggaatcgtcgtgaccaagaacagc

SEQ ID NO: 40948 - DNA, 36 bp, synthetic construct
  source 1..36: mol_type = other DNA
ccagacatcggcgagtctctcggcgtggacaccgct

SEQ ID NO: 40949 - DNA, 33 bp, synthetic construct
  source 1..33: mol_type = other DNA
ttctacggacgcactgttgaggggatgtccagc

SEQ ID NO: 40950 - DNA, 60 bp, synthetic construct
  source 1..60: mol_type = other DNA
ttctccggttctggcggcgtggacatcagcgacgtcacccgggatgcctttctggatggg

SEQ ID NO: 40951 - DNA, 39 bp, synthetic construct
  source 1..39: mol_type = other DNA
ctgcccgacatcgggtccagcttcggagtggatacaggc

SEQ ID NO: 40952 - DNA, 30 bp, synthetic construct
  source 1..30: mol_type = other DNA
tacgctgagatctgcctgggaatgagcagc

SEQ ID NO: 40953 - DNA, 63 bp, synthetic construct
  source 1..63: mol_type = other DNA
ctggcgtcaggtaccgacggaatcgatatagactccctcaccgcacctgtcttcctgtctggc

SEQ ID NO: 40954 - DNA, 33 bp, synthetic construct
  source 1..33: mol_type = other DNA
gttgctggattgggggctgaccctttggccgca

SEQ ID NO: 40955 - DNA, 51 bp, synthetic construct
  source 1..51: mol_type = other DNA
ctcattatagctatgggcggcaaggacgtgctgacccacgccgtggactac

SEQ ID NO: 40956 - DNA, 33 bp, synthetic construct
  source 1..33: mol_type = other DNA
gctgcggttgccggaactactgctgtagctgtg

SEQ ID NO: 40957 - DNA, 66 bp, synthetic construct
  source 1..66: mol_type = other DNA
tacctggctataatgttctcatattcttcttcttccgcctctctcgcacccctgatctccgagttc

SEQ ID NO: 40958 - DNA, 39 bp, synthetic construct
  source 1..39: mol_type = other DNA
ctgcccgacattggctcgtcatttggagtggacacaggg

SEQ ID NO: 40959 - DNA, 30 bp, synthetic construct
  source 1..30: mol_type = other DNA
tacgccgagatctgcctgggaatgagcagt

SEQ ID NO: 40960 - DNA, 66 bp, synthetic construct
  source 1..66: mol_type = other DNA
accatcgctagtggaactgacggcatcgatatcgactctgtcacatccgctcaatttctatctggc

SEQ ID NO: 40961 - DNA, 33 bp, synthetic construct
  source 1..33: mol_type = other DNA
gtggccggtcttggtcctgacgcattggccgct

SEQ ID NO: 40962 - DNA, 54 bp, synthetic construct
  source 1..54: mol_type = other DNA
cccatattgcaattcatgggcgctgggaacaccattcaatatgctatggactac

SEQ ID NO: 40963 - DNA, 36 bp, synthetic construct
  source 1..36: mol_type = other DNA
gttttggctgctgggacaactgccgttgctgtctac

SEQ ID NO: 40964 - DNA, 66 bp, synthetic construct
  source 1..66: mol_type = other DNA
gggcagattgccgccgtgttctcttacactcaagcgtctgctgggttagccagcgaaatcgctacc

SEQ ID NO: 40965 - DNA, 36 bp, synthetic construct
  source 1..36: mol_type = other DNA
gtggcgggccttggagctgacgctctcgcacttgca

SEQ ID NO: 40966 - DNA, 54 bp, synthetic construct
  source 1..54: mol_type = other DNA
cccatactgcaattcatgggcgccggggacacgatccaatatgcaatggattac

SEQ ID NO: 40967 - DNA, 36 bp, synthetic construct
  source 1..36: mol_type = other DNA
gtcctggccgctggaaccacagctgtggccgtctac

SEQ ID NO: 40968 - DNA, 63 bp, synthetic construct
  source 1..63: mol_type = other DNA
cagatcgccaccctctttagctacaccgaggcttctgccgctctctccccacaaatagcgaca

SEQ ID NO: 40969 - DNA, 33 bp, synthetic construct
  source 1..33: mol_type = other DNA
gtcgcaggccttgggcctgacgcacttgccgcc

SEQ ID NO: 40970 - DNA, 54 bp, synthetic construct
  source 1..54: mol_type = other DNA
cccattttgcaatttatgggcgccgggcacaccatccaatacgcaatggactac

SEQ ID NO: 40971 - DNA, 36 bp, synthetic construct
  source 1..36: mol_type = other DNA
gtcctggctgctggtacaaccgctgtggccgtttac

SEQ ID NO: 40972 - DNA, 63 bp, synthetic construct
  source 1..63: mol_type = other DNA
cccatcgccaccgtgttttcctacacgcaagcaagcgctggcctggcttctgagattgcaacc

SEQ ID NO: 40973 - DNA, 33 bp, synthetic construct
  source 1..33: mol_type = other DNA
gtagctggcctcggagcagacgctttggcggcc

SEQ ID NO: 40974 - DNA, 57 bp, synthetic construct
  source 1..57: mol_type = other DNA
gtgcccatcctggagttcatgggcgctggcaacaccatggactacgccatgagctat

SEQ ID NO: 40975 - DNA, 36 bp, synthetic construct
  source 1..36: mol_type = other DNA
gtgatggccgatggcaccacggctgtggcggtctac

SEQ ID NO: 40976 - DNA, 66 bp, synthetic construct
  source 1..66: mol_type = other DNA
cagatcgccacaatgttcgcttacacttctgctagcgcgtctctggcaccccaaatagcggatgcc

SEQ ID NO: 40977 - DNA, 33 bp, synthetic construct
  source 1..33: mol_type = other DNA
gtggcagggcttggcgctgacgctctcgccgca

SEQ ID NO: 40978 - DNA, 48 bp, synthetic construct
  source 1..48: mol_type = other DNA
ctggagatcatgggcgctggcgaaagcattagttacgcttcgtcctat

SEQ ID NO: 40979 - DNA, 36 bp, synthetic construct
  source 1..36: mol_type = other DNA
gtgatcgtggccggaacttcagccgttgcggtctat

SEQ ID NO: 40980 - DNA, 63 bp, synthetic construct
  source 1..63: mol_type = other DNA
cagatcgctactgctttttcgtacactagcgcttcttcctccctggcacccgagattgcaacc

SEQ ID NO: 40981 - DNA, 33 bp, synthetic construct
  source 1..33: mol_type = other DNA
gccgcatggctcgggggtagcgctgttgccggg

SEQ ID NO: 40982 - DNA, 54 bp, synthetic construct
  source 1..54: mol_type = other DNA
gacctgatggatctcttcggcgccgatgagtccgcaagcgaggctctggattac

SEQ ID NO: 40983 - DNA, 36 bp, synthetic construct
  source 1..36: mol_type = other DNA
atcggagtcggtggcgaggacgtggttggtacctac

SEQ ID NO: 40984 - DNA, 54 bp, synthetic construct
  source 1..54: mol_type = other DNA
gcttgggccttcaccgtgtccccggacctggaaccactccgaggcgatatggcc

SEQ ID NO: 40985 - DNA, 33 bp, synthetic construct
  source 1..33: mol_type = other DNA
ttcgccatcggcctgggatcaacccacccttac

SEQ ID NO: 40986 - DNA, 36 bp, synthetic construct
  source 1..36: mol_type = other DNA
gttgtcgacggcgatcctaatcaagtcgttttcaac

SEQ ID NO: 40987 - DNA, 54 bp, synthetic construct
  source 1..54: mol_type = other DNA
actgagtttgtgttcaccgtcgacgatacaaccgggttatactcacgggctcct

SEQ ID NO: 40988 - DNA, 39 bp, synthetic construct
  source 1..39: mol_type = other DNA
gtgcccgcaatcgccgctgagttcgccatgaacaacgtg

SEQ ID NO: 40989 - DNA, 33 bp, synthetic construct
  source 1..33: mol_type = other DNA
tatcactttcaatatgttcggggttggaacgct

SEQ ID NO: 40990 - DNA, 57 bp, synthetic construct
  source 1..57: mol_type = other DNA
gtcatgggaagcctggaactcgcaccccaatacgcttctatgatcgtaattgcacaa

SEQ ID NO: 40991 - DNA, 33 bp, synthetic construct
  source 1..33: mol_type = other DNA
gtggccggtctgggcgcggatgcattggccgcc

SEQ ID NO: 40992 - DNA, 54 bp, synthetic construct
  source 1..54: mol_type = other DNA
cccattctgcaatttatgggggccggcaacacaattcaatatgcactcgactac

SEQ ID NO: 40993 - DNA, 36 bp, synthetic construct
  source 1..36: mol_type = other DNA
gtgatggctgacggcacaaccgcggtggctgtctac

SEQ ID NO: 40994 - DNA, 63 bp, synthetic construct
  source 1..63: mol_type = other DNA
cagattgcctccatgtttgcctacacctctgctagtagcacactggctcctcaaatagcacac

SEQ ID NO: 40995 - DNA, 39 bp, synthetic construct
  source 1..39: mol_type = other DNA
tttcaccggggcctgatcgtgaacttcaacttcaatttt

SEQ ID NO: 40996 - DNA, 39 bp, synthetic construct
  source 1..39: mol_type = other DNA
gtctacctgatgtctgacttctctgtctcatcaactcag

SEQ ID NO: 40997 - DNA, 36 bp, synthetic construct
  source 1..36: mol_type = other DNA
attttcatccaaggagtagcttacaattccgctatc

SEQ ID NO: 40998 - DNA, 45 bp, synthetic construct
  source 1..45: mol_type = other DNA
gccggaggcgccattaatcacaactctgcatccgtcgtggctttc

SEQ ID NO: 40999 - DNA, 39 bp, synthetic construct
  source 1..39: mol_type = other DNA
gtgtacctgatgtccgacttttccgtgtcttcgacacag

SEQ ID NO: 41000 - DNA, 36 bp, synthetic construct
  source 1..36: mol_type = other DNA
atcttcattcaaggcgttggttacaactctgctatt

SEQ ID NO: 41001 - DNA, 48 bp, synthetic construct
  source 1..48: mol_type = other DNA
ctggcaggcggttccatcgaccacaatcatgcgagtgtagtagctttt

SEQ ID NO: 41002 - DNA, 36 bp, synthetic construct
  source 1..36: mol_type = other DNA
gtgagcggcctcggacccaacgctctgtctgcaatg

SEQ ID NO: 41003 - DNA, 54 bp, synthetic construct
  source 1..54: mol_type = other DNA
cccatcctgattttcatcggcgctgagaaggtgctgaactacgccatggactac

SEQ ID NO: 41004 - DNA, 39 bp, synthetic construct
  source 1..39: mol_type = other DNA
aagcgggcttcaaattctgtgtctggcggtgtctacgta

SEQ ID NO: 41005 - DNA, 63 bp, synthetic construct
  source 1..63: mol_type = other DNA
cctatagccacaatcttttcttatagtaacaagtccgccgagctgacccctctgatcgcaagt

SEQ ID NO: 41006 - DNA, 39 bp, synthetic construct
  source 1..39: mol_type = other DNA
gtgcccgctatcgcccgcgagttcgcaatgaacaacgtg

SEQ ID NO: 41007 - DNA, 33 bp, synthetic construct
  source 1..33: mol_type = other DNA
taccactttcaatacgttcgaggctgggatgct

SEQ ID NO: 41008 - DNA, 54 bp, synthetic construct
  source 1..54: mol_type = other DNA
atcatgggcaccctgcccctggcccacaagtacagcggcatgattctccaaagc

SEQ ID NO: 41009 - DNA, 33 bp, synthetic construct
  source 1..33: mol_type = other DNA
gcaggactgggaccaaacgccttgagcgctatc

SEQ ID NO: 41010 - DNA, 57 bp, synthetic construct
  source 1..57: mol_type = other DNA
aagcccattctgatcttcatcggcgctcggaacgtgctgagctacgccatggactat

SEQ ID NO: 41011 - DNA, 36 bp, synthetic construct
  source 1..36: mol_type = other DNA
atccaggtgtccaaccacgttagcgtcgctgtgttc

SEQ ID NO: 41012 - DNA, 63 bp, synthetic construct
  source 1..63: mol_type = other DNA
cacatcgccacaatattcagctattcaaacaagagtgttggactaacacccaaaatcacctct

SEQ ID NO: 41013 - DNA, 36 bp, synthetic construct
  source 1..36: mol_type = other DNA
cccgatatcagcattgacctggatgtgcctgttgac

SEQ ID NO: 41014 - DNA, 30 bp, synthetic construct
  source 1..30: mol_type = other DNA
tatttacaattagtcctgaagctgaataac

SEQ ID NO: 41015 - DNA, 51 bp, synthetic construct
  source 1..51: mol_type = other DNA
ttcgtcggctatgacgaaatccaagacgatatattgggcttgtgtcaatcg

SEQ ID NO: 41016 - DNA, 36 bp, synthetic construct
  source 1..36: mol_type = other DNA
gtagcagggctgggccctaacgcgttgagtgctatc

SEQ ID NO: 41017 - DNA, 54 bp, synthetic construct
  source 1..54: mol_type = other DNA
cccattctgatcttcgtcggggccggcgacgtgctatcctacgctatggattac

SEQ ID NO: 41018 - DNA, 33 bp, synthetic construct
  source 1..33: mol_type = other DNA
acccaggcatcgaacagcgtatctgtagttggg

SEQ ID NO: 41019 - DNA, 63 bp, synthetic construct
  source 1..63: mol_type = other DNA
cctatcgccaccatcttctcttactcaaataagtcagttggcttaacccctcaaattgcgagc

SEQ ID NO: 41020 - DNA, 39 bp, synthetic construct
  source 1..39: mol_type = other DNA
gtccccgcaatcgccaacgacttcgctatgaacaacgtg

SEQ ID NO: 41021 - DNA, 33 bp, synthetic construct
  source 1..33: mol_type = other DNA
taccattttcaatatgtcaggggatggaacgcc

SEQ ID NO: 41022 - DNA, 54 bp, synthetic construct
  source 1..54: mol_type = other DNA
gtgatgggcaacctgccactgagcacccaatatgctgatctgatagttcggagt

SEQ ID NO: 41023 - DNA, 39 bp, synthetic construct
  source 1..39: mol_type = other DNA
gtgcccgctatagcacaggattttgccatgaacaacgtg

SEQ ID NO: 41024 - DNA, 33 bp, synthetic construct
  source 1..33: mol_type = other DNA
tatcatttccaatatgtcaggggttggaacgca

SEQ ID NO: 41025 - DNA, 57 bp, synthetic construct
  source 1..57: mol_type = other DNA
tgggtcatgggaagcctcgagctggctcctcaatacgcaggcatgatcgtccaagcc

SEQ ID NO: 41026 - DNA, 39 bp, synthetic construct
  source 1..39: mol_type = other DNA
gtgcccgcaatcgccgctgagttcggcatgaacaacatt

SEQ ID NO: 41027 - DNA, 33 bp, synthetic construct
  source 1..33: mol_type = other DNA
taccacttccaatatgtcaggggatggaacgct

SEQ ID NO: 41028 - DNA, 57 bp, synthetic construct
  source 1..57: mol_type = other DNA
tggatcatgggcgacctgatcctttctagtcaatacgccaacctgattgtgcaatgc

SEQ ID NO: 41029 - DNA, 39 bp, synthetic construct
  source 1..39: mol_type = other DNA
gtccccgctatagctcaggaattcgccatgaacaacgtg

SEQ ID NO: 41030 - DNA, 33 bp, synthetic construct
  source 1..33: mol_type = other DNA
taccatttccaatacgttcgaggttgggacgca

SEQ ID NO: 41031 - DNA, 54 bp, synthetic construct
  source 1..54: mol_type = other DNA
gtcatgggcaacctggaactggggcctcaatatgctgccatggtggtgcaggct

SEQ ID NO: 41032 - DNA, 36 bp, synthetic construct
  source 1..36: mol_type = other DNA
gtggccggcctgggtccaagtgcacttagcgctatt

SEQ ID NO: 41033 - DNA, 57 bp, synthetic construct
  source 1..57: mol_type = other DNA
aagcccatcctgattttcgtcggcgccggggacgtgttatcatatgctatggattat

SEQ ID NO: 41034 - DNA, 30 bp, synthetic construct
  source 1..30: mol_type = other DNA
accagagcctccgactctgtatctgtcggg

SEQ ID NO: 41035 - DNA, 63 bp, synthetic construct
  source 1..63: mol_type = other DNA
cctatcgccacgatattctcttattccaacaagagcgttggcctcacaccccaaattgctagt

SEQ ID NO: 41036 - DNA, 39 bp, synthetic construct
  source 1..39: mol_type = other DNA
gtctacctgatgagcgacttttcggtttcttcgacacag

SEQ ID NO: 41037 - DNA, 36 bp, synthetic construct
  source 1..36: mol_type = other DNA
atctttatgcaaggtatcgcctataactctgcgatt

SEQ ID NO: 41038 - DNA, 45 bp, synthetic construct
  source 1..45: mol_type = other DNA
gcaggaggctccaccggacacaacagcgcctctgtggtcgctttc

SEQ ID NO: 41039 - DNA, 39 bp, synthetic construct
  source 1..39: mol_type = other DNA
gtccccgctatcgccaacgacttcgccatgaacaacgtg

SEQ ID NO: 41040 - DNA, 33 bp, synthetic construct
  source 1..33: mol_type = other DNA
taccactttcaatacgttaggggttggaacgcc

SEQ ID NO: 41041 - DNA, 54 bp, synthetic construct
  source 1..54: mol_type = other DNA
gtcatgggcaacctggcactcagcacccaatacgcggatctcatcgtgaagtct

SEQ ID NO: 41042 - DNA, 42 bp, synthetic construct
  source 1..42: mol_type = other DNA
cttcccgacatcggcgccgatttcggcgtagataccgcaacc

SEQ ID NO: 41043 - DNA, 30 bp, synthetic construct
  source 1..30: mol_type = other DNA
ttcggcgagatctgcatgggaatgagcagc

SEQ ID NO: 41044 - DNA, 63 bp, synthetic construct
  source 1..63: mol_type = other DNA
ttctctaagaccgatggcatcgacattcaggacgtttccgcctccgcttttgagaacggattt

SEQ ID NO: 41045 - DNA, 36 bp, synthetic construct
  source 1..36: mol_type = other DNA
gtgtacctgatgagcgacttctctgtgtcctcaacc

SEQ ID NO: 41046 - DNA, 36 bp, synthetic construct
  source 1..36: mol_type = other DNA
atttttatgcaaggaatagcctataactctgctatc

SEQ ID NO: 41047 - DNA, 45 bp, synthetic construct
  source 1..45: mol_type = other DNA
gccggcggcaccatcgaccataaccacgctagcgtcgtggcattt

SEQ ID NO: 41048 - DNA, 30 bp, synthetic construct
  source 1..30: mol_type = other DNA
agcgggcttggatctggtcctcttgccgct

SEQ ID NO: 41049 - DNA, 57 bp, synthetic construct
  source 1..57: mol_type = other DNA
cgggatctgctgatcctcttcggcgccagcgaagttatcgactttgctatggactac

SEQ ID NO: 41050 - DNA, 30 bp, synthetic construct
  source 1..30: mol_type = other DNA
ttcatcaccgccggcacaatggaggttgcc

SEQ ID NO: 41051 - DNA, 66 bp, synthetic construct
  source 1..66: mol_type = other DNA
tatcctatatcggagggctttaacttcatcaatggcaatccccaaatgatatccaggacagctgag

SEQ ID NO: 41052 - DNA, 36 bp, synthetic construct
  source 1..36: mol_type = other DNA
cccgctatcgccattgacttcggcatgaacaatgtg

SEQ ID NO: 41053 - DNA, 33 bp, synthetic construct
  source 1..33: mol_type = other DNA
tatcatttccaatacgttcgtggatggaacgcc

SEQ ID NO: 41054 - DNA, 54 bp, synthetic construct
  source 1..54: mol_type = other DNA
atcatgggcagcctccctctggccacaaaatacgcggggatggtggtccaagca

SEQ ID NO: 41055 - DNA, 39 bp, synthetic construct
  source 1..39: mol_type = other DNA
gtgcccgcaatcgcccaagaattcgccatgaacaacgtg

SEQ ID NO: 41056 - DNA, 33 bp, synthetic construct
  source 1..33: mol_type = other DNA
taccattttcaatatgttcgcggatgggacgca

SEQ ID NO: 41057 - DNA, 57 bp, synthetic construct
  source 1..57: mol_type = other DNA
gtgatgggcagcctgccgctggctactaaatacgccggaatggtcgttgtgacgcag

SEQ ID NO: 41058 - DNA, 33 bp, synthetic construct
  source 1..33: mol_type = other DNA
agcgggctgggaaacgtcgaggtgtcatctgtc

SEQ ID NO: 41059 - DNA, 57 bp, synthetic construct
  source 1..57: mol_type = other DNA
gacaagattctggctctgttctgcaccaaccagatctttgatgccagctattcctac

SEQ ID NO: 41060 - DNA, 33 bp, synthetic construct
  source 1..33: mol_type = other DNA
ctctacgagggcctgatctatataacagcttac

SEQ ID NO: 41061 - DNA, 57 bp, synthetic construct
  source 1..57: mol_type = other DNA
ttcctcagctacgtgctgtaccaaacgaaagacatgctggtcatcaaccagatctcc

SEQ ID NO: 41062 - DNA, 33 bp, synthetic construct
  source 1..33: mol_type = other DNA
gttgctggcttgggtgccgatgcactggccgcc

SEQ ID NO: 41063 - DNA, 57 bp, synthetic construct
  source 1..57: mol_type = other DNA
gtgcccattctgaagttcatgggggccggcgagaccatccaatatgcaatggactac

SEQ ID NO: 41064 - DNA, 36 bp, synthetic construct
  source 1..36: mol_type = other DNA
gtgattgctgccggaacaaccgcggtagcagtatac

SEQ ID NO: 41065 - DNA, 63 bp, synthetic construct
  source 1..63: mol_type = other DNA
cctatcgccacaatgttcagctacaccgaggcctcggcggcactgagcccccaaattgctcag

SEQ ID NO: 41066 - DNA, 39 bp, synthetic construct
  source 1..39: mol_type = other DNA
gtgcccgctatcgctcaagactttgccatgaacaacgtc

SEQ ID NO: 41067 - DNA, 33 bp, synthetic construct
  source 1..33: mol_type = other DNA
tatcactttcaatatgtccggggctgggacgca

SEQ ID NO: 41068 - DNA, 60 bp, synthetic construct
  source 1..60: mol_type = other DNA
tgggttatggggtccctcgagctggctccccaatatgcgtccatggtcgtacaagctata

SEQ ID NO: 41069 - DNA, 33 bp, synthetic construct
  source 1..33: mol_type = other DNA
gttgctggcctgggagcagatgcattggcggcc

SEQ ID NO: 41070 - DNA, 57 bp, synthetic construct
  source 1..57: mol_type = other DNA
gtgcccatcctggagttcatgggggccggcaacacgatacaatatgctctcgactac

SEQ ID NO: 41071 - DNA, 36 bp, synthetic construct
  source 1..36: mol_type = other DNA
gtgctggccgctggtacaaccgccgtggccgtatat

SEQ ID NO: 41072 - DNA, 63 bp, synthetic construct
  source 1..63: mol_type = other DNA
cagatcgccaccatgttctcttacactgaggccagcgccgctctctccccacaaatcgcacag

SEQ ID NO: 41073 - DNA, 126 bp, synthetic construct
  source 1..126: mol_type = other DNA
atgtaccctagccactactatttcaacccaatcaaggtgctgcccgagattctgtatcctctcatttccatttcttcggttagagtattctaccctctcaccggggacttcgttggctcgatcggg

SEQ ID NO: 41074 - DNA, 42 bp, synthetic construct
  source 1..42: mol_type = other DNA
ggcaagaacggcaactacctgcttaaggaagttaatgtgacc

SEQ ID NO: 41075 - DNA, 114 bp, synthetic construct
  source 1..114: mol_type = other DNA
tccaaaggcggccgggccgcttctctgggaatcaaggctcctttcaccttcaaccgcgtggagcaggcatttagttatttttttagcaccactatcgacgccatcggcattaag

SEQ ID NO: 41076 - DNA, 33 bp, synthetic construct
  source 1..33: mol_type = other DNA
gtgaagacagactgctggtatcaacaacggtcc

SEQ ID NO: 41077 - DNA, 285 bp, synthetic construct
  source 1..285: mol_type = other DNA
cagaagcccgtgttcgaggagaccaatatgctccctaacaccaatatcctggctgtgaagaagttttccaacgacattgtggacagactcaagaaggccgagcagcaggagttcactgagctgaagctgcaggtccccaacttcaaacggaacgataactggcccctgggcgtctatgctggggacgccatcgccaacacactccggaagcacggaatcatcaagcgcaagctcaaggtggttatcgttcctgacaaccagatgaataaatactattcgctccca

SEQ ID NO: 41078 - DNA, 39 bp, synthetic construct
  source 1..39: mol_type = other DNA
gtgcccgctatcgccaacgacttcgccatgaacaacgtg

SEQ ID NO: 41079 - DNA, 33 bp, synthetic construct
  source 1..33: mol_type = other DNA
taccatttccaatacgtccggggctggaacgcc

SEQ ID NO: 41080 - DNA, 57 bp, synthetic construct
  source 1..57: mol_type = other DNA
attatgggcaacctgcccctgagcacacaatacgcggacctcatagtgcagagccag

SEQ ID NO: 41081 - DNA, 39 bp, synthetic construct
  source 1..39: mol_type = other DNA
gtgcccagcattgctggcgacttcgccatgaacaacatc

SEQ ID NO: 41082 - DNA, 33 bp, synthetic construct
  source 1..33: mol_type = other DNA
taccactttcaatatgttaggggttggaacgca

SEQ ID NO: 41083 - DNA, 54 bp, synthetic construct
  source 1..54: mol_type = other DNA
gtcatgggcagtctgaagctctctagccaatatgcagatatgatcgtgcaatca

SEQ ID NO: 41084 - DNA, 33 bp, synthetic construct
  source 1..33: mol_type = other DNA
gtagctggtctcggagccgacgctctggccgca

SEQ ID NO: 41085 - DNA, 54 bp, synthetic construct
  source 1..54: mol_type = other DNA
atactgcaattcatgggggccggcgacaccatcggatacgctatggagtactct

SEQ ID NO: 41086 - DNA, 36 bp, synthetic construct
  source 1..36: mol_type = other DNA
gtgcttgccgctgggacaaccgctgtggctgtgtac

SEQ ID NO: 41087 - DNA, 63 bp, synthetic construct
  source 1..63: mol_type = other DNA
cagctggcagctatgttttcatacaccgaagcttccgctgccctgagccctgagattgcaact

SEQ ID NO: 41088 - DNA, 36 bp, synthetic construct
  source 1..36: mol_type = other DNA
atcagcattggcgaggacttcggcgttggaagtcat

SEQ ID NO: 41089 - DNA, 30 bp, synthetic construct
  source 1..30: mol_type = other DNA
tatttacaatccgttggaaagatgacagcc

SEQ ID NO: 41090 - DNA, 63 bp, synthetic construct
  source 1..63: mol_type = other DNA
gccgtcgtgatgggttcgatggacaacctcgggcccgataccctgggatctttcgtagccgct

SEQ ID NO: 41091 - DNA, 171 bp, synthetic construct
  source 1..171: mol_type = other DNA
actcttaaccactggatggatggcgcttttgaactcagttctagctaccagatggtttgcgataggctgaatatgaccatggaccagctgttcaataaactgtctatcgaaggcacgccagataacctcactctgttgcccaccctcgaaagaactgctgagataaatgcg

SEQ ID NO: 41092 - DNA, 42 bp, synthetic construct
  source 1..42: mol_type = other DNA
cccgaggtctgcgttactgtagctgaaaccctgcccatcggc

SEQ ID NO: 41093 - DNA, 36 bp, synthetic construct
  source 1..36: mol_type = other DNA
gtctacctgatgagcgacttctccgtgtctagtaca

SEQ ID NO: 41094 - DNA, 36 bp, synthetic construct
  source 1..36: mol_type = other DNA
atcttcatccaaggaatcgcctacaatagtgccatt

SEQ ID NO: 41095 - DNA, 45 bp, synthetic construct
  source 1..45: mol_type = other DNA
gccggaggctccatcgaccacaactctgctagcgtggtcgcattc

SEQ ID NO: 41096 - DNA, 39 bp, synthetic construct; identical to SEQ ID NO: 41039
  source 1..39: mol_type = other DNA

SEQ ID NO: 41097 - DNA, 33 bp, synthetic construct
  source 1..33: mol_type = other DNA
taccacttccaatatgtgaagggctggaacgcc

SEQ ID NO: 41098 - DNA, 54 bp, synthetic construct
  source 1..54: mol_type = other DNA
gtcatgggcagcctgccattgtcaacggaatatgcggggctcatcgtgcaaagc

SEQ ID NO: 41099 - DNA, 39 bp, synthetic construct
  source 1..39: mol_type = other DNA
tacgccgacaccattaacctggctaagagctatcacatc

SEQ ID NO: 41100 - DNA, 36 bp, synthetic construct
  source 1..36: mol_type = other DNA
gtcgtggacggcaatcccgcacaaactacgctgaac

SEQ ID NO: 41101 - DNA, 54 bp, synthetic construct
  source 1..54: mol_type = other DNA
accgagtttgtgttcaccatcgacgaaactacaggattatatgcccgtgcacct

SEQ ID NO: 41102 - DNA, 36 bp, synthetic construct
  source 1..36: mol_type = other DNA
attagcatcggcgaggacttcggagttgggagtcac

SEQ ID NO: 41103 - DNA, 30 bp, synthetic construct
  source 1..30: mol_type = other DNA
tacctgcaaagtgtcgggaagatgacagcc

SEQ ID NO: 41104 - DNA, 66 bp, synthetic construct
  source 1..66: mol_type = other DNA
gccatcgtcatggggagcatggacaacctcgggcccgataccctgggatcatttgttgccgtagcc

SEQ ID NO: 41105 - DNA, 33 bp, synthetic construct
  source 1..33: mol_type = other DNA
gtggctggccttggcgctgatgccctcgcggca

SEQ ID NO: 41106 - DNA, 54 bp, synthetic construct
  source 1..54: mol_type = other DNA
cccatacttcaatttatgggggccggcaacacgatacaatacgcactcgactac

SEQ ID NO: 41107 - DNA, 36 bp, synthetic construct
  source 1..36: mol_type = other DNA
gtgatggccgacggaaccacagctgtggctgtctac

SEQ ID NO: 41108 - DNA, 63 bp, synthetic construct
  source 1..63: mol_type = other DNA
cagatcgctgcaatgttcgcctacacctccgcgtcgtctagtctggctccccaaatagcccga

SEQ ID NO: 41109 - DNA, 33 bp, synthetic construct
  source 1..33: mol_type = other DNA
gtcgccggacttgggtctgatgcactggctgcc

SEQ ID NO: 41110 - DNA, 54 bp, synthetic construct
  source 1..54: mol_type = other DNA
cccatactgcaattcatgggggctggcaacacgatccaatacgcgatggactac

SEQ ID NO: 41111 - DNA, 42 bp, synthetic construct
  source 1..42: mol_type = other DNA
ctagtaatagctagcggtaccgacgctgtggctgcttataca

SEQ ID NO: 41112 - DNA, 66 bp, synthetic construct
  source 1..66: mol_type = other DNA
cagatcgctgccgtattctcctacacctccgcttcgagctcgctggcgcctcaaatcgcaagtgcc

SEQ ID NO: 41113 - DNA, 33 bp, synthetic construct
  source 1..33: mol_type = other DNA
gtcgctggattgggccctgaacctctggccgca

SEQ ID NO: 41114 - DNA, 45 bp, synthetic construct
  source 1..45: mol_type = other DNA
ctgctgatgatgggcgccgagagcgtgatcaactacgctatggac

SEQ ID NO: 41115 - DNA, 33 bp, synthetic construct
  source 1..33: mol_type = other DNA
acaatcgtgtccggacccgtttctgtggctgtg

SEQ ID NO: 41116 - DNA, 63 bp, synthetic construct
  source 1..63: mol_type = other DNA
cagatcgccttcatcttttcctatagtgaaaatagtgcccagctcgagcctctgattgccagt

SEQ ID NO: 41117 - DNA, 39 bp, synthetic construct
  source 1..39: mol_type = other DNA
ccctactatatggacgatttcgccgtgtcttctgctacc

SEQ ID NO: 41118 - DNA, 30 bp, synthetic construct
  source 1..30: mol_type = other DNA
gtgcagaacgtcgcctactattcgagtaca

SEQ ID NO: 41119 - DNA, 48 bp, synthetic construct
  source 1..48: mol_type = other DNA
ctggccaacggcaagatcacccacaatcagatttccgtgaacagcttc

SEQ ID NO: 41120 - DNA, 36 bp, synthetic construct
  source 1..36: mol_type = other DNA
gttgctggccttggtgccgaaccattggctgcactc

SEQ ID NO: 41121 - DNA, 48 bp, synthetic construct
  source 1..48: mol_type = other DNA
ctgatcatgatgggcgctacttccgtgattgactacgctatggagtat

SEQ ID NO: 41122 - DNA, 33 bp, synthetic construct
  source 1..33: mol_type = other DNA
acaatcgtttccggtccaatggccgtagctgta

SEQ ID NO: 41123 - DNA, 66 bp, synthetic construct
  source 1..66: mol_type = other DNA
cagatcgcttttatctttagttactccgaatccagcgccgacctggctccatccattgcaagtttc

SEQ ID NO: 41124 - DNA, 39 bp, synthetic construct
  source 1..39: mol_type = other DNA
gtgcccgctatagcgcaagaattcgtgatgaacaacgtc

SEQ ID NO: 41125 - DNA, 33 bp, synthetic construct
  source 1..33: mol_type = other DNA
taccatttccaatacgtccgcggctggaacgca

SEQ ID NO: 41126 - DNA, 57 bp, synthetic construct
  source 1..57: mol_type = other DNA
tgggtcatgggctcccttcaattagcccccgaatacgctgccatgatcgtgcaagct

SEQ ID NO: 41127 - DNA, 39 bp, synthetic construct
  source 1..39: mol_type = other DNA
ccctactatatcgacgatttcgccattagctccgcgaca

SEQ ID NO: 41128 - DNA, 48 bp, synthetic construct
  source 1..48: mol_type = other DNA
ctggccaacggcaagatcacccacaatcagttctctgtaaattctttt

SEQ ID NO: 41129 - DNA, 45 bp, synthetic construct
  source 1..45: mol_type = other DNA
ctgccctctatcgagcagagtttcaatctgacatctcgagaatcc

SEQ ID NO: 41130 - DNA, 39 bp, synthetic construct
  source 1..39: mol_type = other DNA
atagactccagtaacttcatttcctctctattgtcttcg

SEQ ID NO: 41131 - DNA, 33 bp, synthetic construct
  source 1..33: mol_type = other DNA
ctcgtgatccttagcatgggcctgaatgatcag

SEQ ID NO: 41132 - DNA, 30 bp, synthetic construct
  source 1..30: mol_type = other DNA
gcccggtatctgggagtcaatgattacggc

SEQ ID NO: 41133 - DNA, 36 bp, synthetic construct
  source 1..36: mol_type = other DNA
ctgaaccagcttgtcggagattacgccaccggtata

SEQ ID NO: 41134 - DNA, 48 bp, synthetic construct
  source 1..48: mol_type = other DNA
accgacataatacagctgatctatggccaggagtacaacatcgccgcc

SEQ ID NO: 41135 - DNA, 39 bp, synthetic construct
  source 1..39: mol_type = other DNA
gtgcccgctatcgctcaagagttcgccatgaacaacgtg

SEQ ID NO: 41136 - DNA, 33 bp, synthetic construct
  source 1..33: mol_type = other DNA
tatcacttccaatatgttcgaggctgggatgcc

SEQ ID NO: 41137 - DNA, 57 bp, synthetic construct
  source 1..57: mol_type = other DNA
gtgatgggtaacctggagctggctccccaatacgccagcatgatagttcagtctgtg

SEQ ID NO: 41138 - DNA, 39 bp, synthetic construct
  source 1..39: mol_type = other DNA
aacggcattatgaatgacttccacatcctgtctaccacc

SEQ ID NO: 41139 - DNA, 30 bp, synthetic construct
  source 1..30: mol_type = other DNA
tttgtccaatctgttgacaactactctgcc

SEQ ID NO: 41140 - DNA, 48 bp, synthetic construct
  source 1..48: mol_type = other DNA
ttcgccggcggaagcatcggccataaccacctgtccgtgtctgctttc

SEQ ID NO: 41141 - DNA, 45 bp, synthetic construct
  source 1..45: mol_type = other DNA
ctgccatccatcgagcagaccttcaacctgacaagcagagaatca

SEQ ID NO: 41142 - DNA, 39 bp, synthetic construct
  source 1..39: mol_type = other DNA
atcgactccaacaacttcgtgaatagcgtcctctctctg

SEQ ID NO: 41143 - DNA, 33 bp, synthetic construct
  source 1..33: mol_type = other DNA
ctggtcattataagcatgggcctcaacgaccag

SEQ ID NO: 41144 - DNA, 36 bp, synthetic construct
  source 1..36: mol_type = other DNA
ccctattacatggcagacttctccctttcctctgct

SEQ ID NO: 41145 - DNA, 48 bp, synthetic construct
  source 1..48: mol_type = other DNA
ctggccaatggcaatatcgctcacaaccagctgtccgtgaacagcttt

SEQ ID NO: 41146 - DNA, 66 bp, synthetic construct
  source 1..66: mol_type = other DNA
ctcaacccttggtacacaataccggagattaccacacaaggcctatatctaaccgataaacctatc

SEQ ID NO: 41147 - DNA, 90 bp, synthetic construct
  source 1..90: mol_type = other DNA
tttttccacgggcaaccccaactaggcctgatctacgccgctgagcctgccgtggctgtctatgagatggccgacaagcttctgtctcac

SEQ ID NO: 41148 - DNA, 42 bp, synthetic construct
  source 1..42: mol_type = other DNA
cttcccagcatcgagcagtccttcaacctgacatccagggaa

SEQ ID NO: 41149 - DNA, 42 bp, synthetic construct
  source 1..42: mol_type = other DNA
atcgactcttccaacttcataaattcgatcctgagccttaac

SEQ ID NO: 41150 - DNA, 33 bp, synthetic construct
  source 1..33: mol_type = other DNA
ctcgtgatcctgagcatgagcctgaatgaccaa

SEQ ID NO: 41151 - DNA, 36 bp, synthetic construct
  source 1..36: mol_type = other DNA
accggcatcatggccgacttccacgtttcaagtact

SEQ ID NO: 41152 - DNA, 36 bp, synthetic construct
  source 1..36: mol_type = other DNA
tttgtccaaaacgtcagctattactctgcaaccgag

SEQ ID NO: 41153 - DNA, 51 bp, synthetic construct
  source 1..51: mol_type = other DNA
ttcgctggaggcaatatcaatcacaatgcagtctctgtaaatgcttttgga

SEQ ID NO: 41154 - DNA, 36 bp, synthetic construct
  source 1..36: mol_type = other DNA
cccaacatgagcctggaactcggcatttccatcgag

SEQ ID NO: 41155 - DNA, 54 bp, synthetic construct
  source 1..54: mol_type = other DNA
tatatgggcaataactccctctatgagaacatcagcggctttacgcaatcgacg

SEQ ID NO: 41156 - DNA, 66 bp, synthetic construct
  source 1..66: mol_type = other DNA
ctgaacccagcctatcacatccccgagttcacaacccaagggctgtaccttacggacaagccaatc

SEQ ID NO: 41157 - DNA, 90 bp, synthetic construct
  source 1..90: mol_type = other DNA
ttctttcacgggcagccgcaattggcagccatctacgctgcaacaccgactgttgctgtgaacgagatggctaccaagctgttgggtcca

SEQ ID NO: 41158 - DNA, 36 bp, synthetic construct
  source 1..36: mol_type = other DNA
cccagcatcgcctccgagttcggcatgaacaacatt

SEQ ID NO: 41159 - DNA, 33 bp, synthetic construct
  source 1..33: mol_type = other DNA
tatcatttccaatacgtcaggggctggaacgcc

SEQ ID NO: 41160 - DNA, 54 bp, synthetic construct
  source 1..54: mol_type = other DNA
atcatgggcaacctggagctgtctagccaatatgccgggatgatcgtgcaatcc

SEQ ID NO: 41161 - DNA, 66 bp, synthetic construct
  source 1..66: mol_type = other DNA
ctgaaccccagctacccaatccctgagttcacaacgcaaggtttatacctgaccgacaagtccatt

SEQ ID NO: 41162 - DNA, 90 bp, synthetic construct
  source 1..90: mol_type = other DNA
ttcttccatagccaaccacaactagcggcaatctacgccgctaccccttctgtggccgccaacgcaatggccacggagttgcttggacca

SEQ ID NO: 41163 - DNA, 33 bp, synthetic construct
  source 1..33: mol_type = other DNA
gtcgcaggtcttggagctgacgccctggctgcc

SEQ ID NO: 41164 - DNA, 54 bp, synthetic construct
  source 1..54: mol_type = other DNA
cccatattgcaattcatgggcgctggcgacaccattggatacgccatggactat

SEQ ID NO: 41165 - DNA, 36 bp, synthetic construct
  source 1..36: mol_type = other DNA
gtgatggccgctggtacaactgcggttgctgtctac

SEQ ID NO: 41166 - DNA, 63 bp, synthetic construct
  source 1..63: mol_type = other DNA
cagattgccacaatgttcgcctacacctctgcgagttcagcactggctcccgagattgcaaag

SEQ ID NO: 41167 - DNA, 42 bp, synthetic construct
  source 1..42: mol_type = other DNA
ctgcccagcatcgagaataccttcaatctaacgtccagagaa

SEQ ID NO: 41168 - DNA, 39 bp, synthetic construct
  source 1..39: mol_type = other DNA
attgacagttctaacttcatcaagtccctgatgtctgtg

SEQ ID NO: 41169 - DNA, 33 bp, synthetic construct
  source 1..33: mol_type = other DNA
ctcgtaatcctatccatgggcctcaacgatcag

SEQ ID NO: 41170 - DNA, 33 bp, synthetic construct
  source 1..33: mol_type = other DNA
gtggcaggactgggacaggctgctatcgccggc

SEQ ID NO: 41171 - DNA, 57 bp, synthetic construct
  source 1..57: mol_type = other DNA
tctctgctcaagacctacggcgctagcgggcagagtctcacggaagccatcaagtac

SEQ ID NO: 41172 - DNA, 36 bp, synthetic construct
  source 1..36: mol_type = other DNA
tccagtgttggtggcgaatacggaatcgcagctttc

SEQ ID NO: 41173 - DNA, 63 bp, synthetic construct
  source 1..63: mol_type = other DNA
ctgagcatgattttcgcttacacgccagagacggcccctctcatccccgagatcaccaacttt

SEQ ID NO: 41174 - DNA, 39 bp, synthetic construct
  source 1..39: mol_type = other DNA
ctgagcatcggggaagagttcggggttggatcgcatgac

SEQ ID NO: 41175 - DNA, 30 bp, synthetic construct
  source 1..30: mol_type = other DNA
tatctacaaagcatcggagagctcagtgcg

SEQ ID NO: 41176 - DNA, 63 bp, synthetic construct
  source 1..63: mol_type = other DNA
agcgtgattatgggcacaaccgacaacttgggccccgagacctacggaactttcgtgactgtg

SEQ ID NO: 41177 - DNA, 39 bp, synthetic construct
  source 1..39: mol_type = other DNA
gtgcccgctattgcccaagagttcgtcatgaacaacgtg

SEQ ID NO: 41178 - DNA, 33 bp, synthetic construct
  source 1..33: mol_type = other DNA
tatcattttcaatatgttcgcggctgggatgcc

SEQ ID NO: 41179 - DNA, 57 bp, synthetic construct
  source 1..57: mol_type = other DNA
gtgatgggcaacctgcaactggagccccaatatgctgctatgatccaagcaatcgtt

SEQ ID NO: 41180 - DNA, 45 bp, synthetic construct
  source 1..45: mol_type = other DNA
ctgcccagcatcgagcagtctttccatctcacatctagagattca

SEQ ID NO: 41181 - DNA, 39 bp, synthetic construct
  source 1..39: mol_type = other DNA
atcgactctagtaatttcgtgaacagcctgctgtccttt

SEQ ID NO: 41182 - DNA, 36 bp, synthetic construct
  source 1..36: mol_type = other DNA
agcctcgtgatcctgtctatgggactgtccgaacag

SEQ ID NO: 41183 - DNA, 39 bp, synthetic construct
  source 1..39: mol_type = other DNA
ccctactacatgaacgacttcgcgattagctctgctact

SEQ ID NO: 41184 - DNA, 30 bp, synthetic construct; identical to SEQ ID NO: 39718
  source 1..30: mol_type = other DNA

SEQ ID NO: 41185 - DNA, 48 bp, synthetic construct
  source 1..48: mol_type = other DNA
ctcgccaacggcaacatcacccacaaccagctgtccgtgaatagcttc

SEQ ID NO: 41186 - DNA, 36 bp, synthetic construct
  source 1..36: mol_type = other DNA
gtgagcggcctgaacgcagacgctcttgctgcactc

SEQ ID NO: 41187 - DNA, 57 bp, synthetic construct
  source 1..57: mol_type = other DNA
aaggacctcatgatattctctggcgccagttctgtcgtgtcctactgcctggactac

SEQ ID NO: 41188 - DNA, 36 bp, synthetic construct
  source 1..36: mol_type = other DNA
atcagcacctccggagttaacgaggtcgctgctttc

SEQ ID NO: 41189 - DNA, 66 bp, synthetic construct
  source 1..66: mol_type = other DNA
taccccatctgcggcttctttaatagccaggccgccaacttcaccctggcaaaccgagctgctgag

SEQ ID NO: 41190 - DNA, 45 bp, synthetic construct
  source 1..45: mol_type = other DNA
ctgcccagcatcgagcagtccttccacctgacctctagagaatcc

SEQ ID NO: 41191 - DNA, 39 bp, synthetic construct
  source 1..39: mol_type = other DNA
atcgactccaacaacttcatgaatagcctcctgtctctg

SEQ ID NO: 41192 - DNA, 33 bp, synthetic construct
  source 1..33: mol_type = other DNA
ctggtcatcctctccatgggcctcaacgatcag

SEQ ID NO: 41193 - DNA, 66 bp, synthetic construct
  source 1..66: mol_type = other DNA
ttaaatccctcatataccattcctgagttcacaacccagggcctgtacctgaccgacaagacaatc

SEQ ID NO: 41194 - DNA, 90 bp, synthetic construct
  source 1..90: mol_type = other DNA
ttcttccacggacaaccgcaactagcagtgctttatggctcaacgccgtctgtcgctgtcaaccagatggccacaaccctgttgggacct

SEQ ID NO: 41195 - DNA, 33 bp, synthetic construct
  source 1..33: mol_type = other DNA
gtagctggactgggcgccgatgctcttgccgcc

SEQ ID NO: 41196 - DNA, 54 bp, synthetic construct
  source 1..54: mol_type = other DNA
cccattctccaattcatgggggccggagagaccatcggctacgctatggactac

SEQ ID NO: 41197 - DNA, 36 bp, synthetic construct
  source 1..36: mol_type = other DNA
gtcttggccgccggaaccacagccgtggctgtatat

SEQ ID NO: 41198 - DNA, 63 bp, synthetic construct
  source 1..63: mol_type = other DNA
caaatagcgacaatcttcgcttatacttcggcgagttctgcattggctcctcaaatcgcctct

SEQ ID NO: 41199 - DNA, 39 bp, synthetic construct; identical to SEQ ID NO: 41039
  source 1..39: mol_type = other DNA

SEQ ID NO: 41200 - DNA, 33 bp, synthetic construct
  source 1..33: mol_type = other DNA
taccatttccaatacgtccgaggatgggacgcg

SEQ ID NO: 41201 - DNA, 57 bp, synthetic construct
  source 1..57: mol_type = other DNA
tgggttatggggaacctgaccatgacaccccaatatgctgatatgatccttagggct

SEQ ID NO: 41202 - DNA, 42 bp, synthetic construct
  source 1..42: mol_type = other DNA
ctgccctactatatggccgacttctcctccgcatcaagtatt

SEQ ID NO: 41203 - DNA, 48 bp, synthetic construct
  source 1..48: mol_type = other DNA
ctggccaatggcaacatcacccacaatcagttttccgtaaattccttt

SEQ ID NO: 41204 - DNA, 36 bp, synthetic construct
  source 1..36: mol_type = other DNA
cccagcatcgcctccgagttcggcatgaacaatgtt

SEQ ID NO: 41205 - DNA, 33 bp, synthetic construct
  source 1..33: mol_type = other DNA
tatcacttccaatacgtcagaggttggaacgca

SEQ ID NO: 41206 - DNA, 54 bp, synthetic construct
  source 1..54: mol_type = other DNA
atcatgggctccctgaaactttctagccaatacgctggaatggtggttcaggct

SEQ ID NO: 41207 - DNA, 45 bp, synthetic construct
  source 1..45: mol_type = other DNA
ctgccctctatcgagcagagcttccacttaacatcccgagaaagc

SEQ ID NO: 41208 - DNA, 39 bp, synthetic construct
  source 1..39: mol_type = other DNA
attgacagttctaacttcaccaactccttcctgagcatc

SEQ ID NO: 41209 - DNA, 33 bp, synthetic construct
  source 1..33: mol_type = other DNA
ttggttattttaagcatgggcctcaacgaacag

SEQ ID NO: 41210 - DNA, 45 bp, synthetic construct
  source 1..45: mol_type = other DNA
ctgccttccatcgagcagagcttccatctgacatcgcgcgaaagc

SEQ ID NO: 41211 - DNA, 39 bp, synthetic construct
  source 1..39: mol_type = other DNA
attgacagctctaacttcattagttcactgctgtctctg

SEQ ID NO: 41212 - DNA, 33 bp, synthetic construct
  source 1..33: mol_type = other DNA
ctcgtgatcattagcatgggcctgaacgaccag

SEQ ID NO: 41213 - DNA, 66 bp, synthetic construct
  source 1..66: mol_type = other DNA
ctgaacccctcttattctattcccgagttcacaacccagggcatgtacctcaccgacaagtctatc

SEQ ID NO: 41214 - DNA, 90 bp, synthetic construct
  source 1..90: mol_type = other DNA
ttctttcacgggcaaccacaactagccgccatctacggcgccgcgccggcggtggcagtgaatgaaatggccaccgttctggttggaccc

SEQ ID NO: 41215 - DNA, 42 bp, synthetic construct
  source 1..42: mol_type = other DNA
ttgccttctatcgagcagtccttcaacctgactagcagggag

SEQ ID NO: 41216 - DNA, 39 bp, synthetic construct
  source 1..39: mol_type = other DNA
atcgacagctccaattttatcaattcgcttctttctttc

SEQ ID NO: 41217 - DNA, 33 bp, synthetic construct
  source 1..33: mol_type = other DNA
cttgtgatattaagcatgggcctgaataaccag

SEQ ID NO: 41218 - DNA, 39 bp, synthetic construct
  source 1..39: mol_type = other DNA
gtctacctgatgagcgacttctccgtgtctagtacacag

SEQ ID NO: 41219 - DNA, 33 bp, synthetic construct
  source 1..33: mol_type = other DNA
attttcattcaaggggtcgcctacaactctgct

SEQ ID NO: 41220 - DNA, 45 bp, synthetic construct
  source 1..45: mol_type = other DNA
gcaggtggcgccatcgatcacaactcagcatccgtagtcgctttc

SEQ ID NO: 41221 - DNA, 39 bp, synthetic construct
  source 1..39: mol_type = other DNA
tttttcgcccgatatggcccagcttacgagttcaacttt

SEQ ID NO: 41222 - DNA, 39 bp, synthetic construct
  source 1..39: mol_type = other DNA
gtgcccgcaatcgctagtgacttcgccatgaacaacgtt

SEQ ID NO: 41223 - DNA, 33 bp, synthetic construct
  source 1..33: mol_type = other DNA
tatcacttccaatacgttaggggctggaacgcc

SEQ ID NO: 41224 - DNA, 54 bp, synthetic construct
  source 1..54: mol_type = other DNA
attatgggcaacctcgagctgtctccccaatacgcatcgatgatcgttcaaagc

SEQ ID NO: 41225 - DNA, 39 bp, synthetic construct
  source 1..39: mol_type = other DNA
gtgcccgctattgcgcaagagtttgtgatgaacaacgtc

SEQ ID NO: 41226 - DNA, 33 bp, synthetic construct
  source 1..33: mol_type = other DNA
tatcatttccaatatgttcggggttgggacgca

SEQ ID NO: 41227 - DNA, 57 bp, synthetic construct
  source 1..57: mol_type = other DNA
gtcatgggcaacctgcaacttagccccgaatacgcaaatatgatagttcaagctgcc

SEQ ID NO: 41228 - DNA, 45 bp, synthetic construct
  source 1..45: mol_type = other DNA
ctgccttccatcgagcagagcttcaacctgacctctagggaaagc

SEQ ID NO: 41229 - DNA, 39 bp, synthetic construct
  source 1..39: mol_type = other DNA
atcgacagctctaactttataagttcgttgctgtccatg

SEQ ID NO: 41230 - DNA, 33 bp, synthetic construct
  source 1..33: mol_type = other DNA
ctcgtgatcctgtcaatgggcctcaacgatcag

SEQ ID NO: 41231 - DNA, 36 bp, synthetic construct
  source 1..36: mol_type = other DNA
ccctactatatggccgacttctctgtgtcctctgcc

SEQ ID NO: 41232 - DNA, 48 bp, synthetic construct
  source 1..48: mol_type = other DNA
ctggccaacggcaatatcacccacaaccagattagcgtcaattccttc

SEQ ID NO: 41233 - DNA, 45 bp, synthetic construct
  source 1..45: mol_type = other DNA
ctgcccagcatcgagcataccttccacataaccagcagggagtcc

SEQ ID NO: 41234 - DNA, 39 bp, synthetic construct
  source 1..39: mol_type = other DNA
atagactcctcaaacttcattagctccctcctgtctgtg

SEQ ID NO: 41235 - DNA, 33 bp, synthetic construct
  source 1..33: mol_type = other DNA
ctagtgattctgagcatgggcttcaacgatcag

SEQ ID NO: 41236 - DNA, 45 bp, synthetic construct
  source 1..45: mol_type = other DNA
ctgcccagtatcgagcagtccttccaacttacctctagggattcc

SEQ ID NO: 41237 - DNA, 42 bp, synthetic construct
  source 1..42: mol_type = other DNA
cgcatcgactccgataatttcattaactcgttattctctcca

SEQ ID NO: 41238 - DNA, 33 bp, synthetic construct
  source 1..33: mol_type = other DNA
ctcgtgatcctaagcatgggtcttaatgaccag

SEQ ID NO: 41239 - DNA, 36 bp, synthetic construct
  source 1..36: mol_type = other DNA
cccagcatcaccgagacactcaagctgtcaatggac

SEQ ID NO: 41240 - DNA, 30 bp, synthetic construct
  source 1..30: mol_type = other DNA
tatttgcaatatcatgaggactacgatccc

SEQ ID NO: 41241 - DNA, 60 bp, synthetic construct
  source 1..60: mol_type = other DNA
gtgttcggggacaccggcacatacgagggcaacctcctgcacctgatcatgactggagag

SEQ ID NO: 41242 - DNA, 45 bp, synthetic construct
  source 1..45: mol_type = other DNA
ctgccatccatcgagatggcctacaacctgacaacaagacagagc

SEQ ID NO: 41243 - DNA, 39 bp, synthetic construct
  source 1..39: mol_type = other DNA
attgattcttcggatttcattaactccctcacttccttg

SEQ ID NO: 41244 - DNA, 33 bp, synthetic construct
  source 1..33: mol_type = other DNA
ctcgtgatcctgagcatgggccttaacgatcag

SEQ ID NO: 41245 - DNA, 39 bp, synthetic construct
  source 1..39: mol_type = other DNA
gtgcccgctatcgcacaagatttcgcaatgaacaacgtg

SEQ ID NO: 41246 - DNA, 33 bp, synthetic construct
  source 1..33: mol_type = other DNA
taccattttcaatatgttcgcggttgggatgct

SEQ ID NO: 41247 - DNA, 54 bp, synthetic construct
  source 1..54: mol_type = other DNA
gtgatgggctcactcaagctcgacccccaatatgctgccatgatagtgcaagca

SEQ ID NO: 41248 - DNA, 36 bp, synthetic construct
  source 1..36: mol_type = other DNA
agcgagatcatgattgactttcaaataagctctaca

SEQ ID NO: 41249 - DNA, 36 bp, synthetic construct
  source 1..36: mol_type = other DNA
ctgtttgctcaatcggtcgcgtaccattctgcgacg

SEQ ID NO: 41250 - DNA, 51 bp, synthetic construct
  source 1..51: mol_type = other DNA
ttcgccggcggcaatgtcgcccacaacgcaattagcgctgccgcttttagt

SEQ ID NO: 41251 - DNA, 45 bp, synthetic construct
  source 1..45: mol_type = other DNA
ctgccttccatcgagcagagcttccacctgacctctagagaatct

SEQ ID NO: 41252 - DNA, 39 bp, synthetic construct
  source 1..39: mol_type = other DNA
attgacagttctaatttcatcaactccctgttctcactg

SEQ ID NO: 41253 - DNA, 36 bp, synthetic construct
  source 1..36: mol_type = other DNA
agcctggccatcctctccatgggcctgaacgatcag

SEQ ID NO: 41254 - DNA, 45 bp, synthetic construct
  source 1..45: mol_type = other DNA
ctgccctctatcgagcagagcttcaaccttacaagccgcgaatcc

SEQ ID NO: 41255 - DNA, 39 bp, synthetic construct
  source 1..39: mol_type = other DNA
atcgactcttccaattttataaactcactaaccagtctg

SEQ ID NO: 41256 - DNA, 36 bp, synthetic construct
  source 1..36: mol_type = other DNA
tccctggctattatctctatgggcctcaacgatcag

SEQ ID NO: 41257 - DNA, 39 bp, synthetic construct
  source 1..39: mol_type = other DNA
gtccccgctatagcccaggagtttgccatgaacaacgtg

SEQ ID NO: 41258 - DNA, 33 bp, synthetic construct
  source 1..33: mol_type = other DNA
taccatttccaatatgtcagaggctgggacgca

SEQ ID NO: 41259 - DNA, 57 bp, synthetic construct
  source 1..57: mol_type = other DNA
gtgatgggcagcctcgagcttgcaccacaatatgccaacatggtggcgcagcaaatt

SEQ ID NO: 41260 - DNA, 45 bp, synthetic construct
  source 1..45: mol_type = other DNA
ctgccttccatcgagcagagtttccacctgacctctagagaaagc

SEQ ID NO: 41261 - DNA, 39 bp, synthetic construct
  source 1..39: mol_type = other DNA
atcgactcttccaacttcataaactcgagcatcagtgtc

SEQ ID NO: 41262 - DNA, 33 bp, synthetic construct
  source 1..33: mol_type = other DNA
ctcgtgatcctgtctatgggccttaacgaccag

SEQ ID NO: 41263 - DNA, 36 bp, synthetic construct
  source 1..36: mol_type = other DNA
ccctactatatgaacgactttgctatctcgagcgcc

SEQ ID NO: 41264 - DNA, 30 bp, synthetic construct
  source 1..30: mol_type = other DNA
gtccagaacgtggcatactattcatcaact

SEQ ID NO: 41265 - DNA, 48 bp, synthetic construct
  source 1..48: mol_type = other DNA
ctggccaatggcaagatcacccacaaccagctctccgtgaacagcttc

SEQ ID NO: 41266 - DNA, 36 bp, synthetic construct
  source 1..36: mol_type = other DNA
gtggccggactcggtgctgacgccttagcgggcggt

SEQ ID NO: 41267 - DNA, 51 bp, synthetic construct
  source 1..51: mol_type = other DNA
atcctcattgccatgggggtcggcggtaccatctcctacgcactggagtat

SEQ ID NO: 41268 - DNA, 36 bp, synthetic construct
  source 1..36: mol_type = other DNA
gccacagtggctagcactgatgctgtagccgtgtac

SEQ ID NO: 41269 - DNA, 63 bp, synthetic construct
  source 1..63: mol_type = other DNA
cagatcgccggcgtgttcacctatgccggaacatcttcacggcttaccccttctctggttgct

SEQ ID NO: 41270 - DNA, 84 bp, synthetic construct
  source 1..84: mol_type = other DNA
atccctctctatggtttgagccaggccgctgtggaccagttcgcacaattgcgtgccgttatggcgggtagttttggaagcatt

SEQ ID NO: 41271 - DNA, 30 bp, synthetic construct
  source 1..30: mol_type = other DNA
ggttccctggtggccatcgaccagagctac

SEQ ID NO: 41272 - DNA, 105 bp, synthetic construct
  source 1..105: mol_type = other DNA
accggaactttcaactttttgcctgcttcggtagcctcatcgactgctagcggaatcctccctgccttcatacaaagtatcgtcggtggcgctcccaatttcaca

SEQ ID NO: 41273 - DNA, 117 bp, synthetic construct
  source 1..117: mol_type = other DNA
agcgtgttccaaaagctggggtttcccatcctgggcgaggtctccggcggacgggccgtgtctggggtcgctctgtggctctccacacctaatagctacactgtgctgttcaccaac

SEQ ID NO: 41274 - DNA, 36 bp, synthetic construct
  source 1..36: mol_type = other DNA
gccggcattatggctgacttccacatccctagcacc

SEQ ID NO: 41275 - DNA, 33 bp, synthetic construct
  source 1..33: mol_type = other DNA
ttcgcacaatcaatcgcaaactacgatgctacc

SEQ ID NO: 41276 - DNA, 48 bp, synthetic construct
  source 1..48: mol_type = other DNA
ttcgccggaggcaacgttggtcataactctatatcggtttccgctttc

SEQ ID NO: 41277 - DNA, 66 bp, synthetic construct
  source 1..66: mol_type = other DNA
ctgaaccccgcctactcgatccccgagttcactacccaaggtttatatttgactgaaaagtccatc

SEQ ID NO: 41278 - DNA, 90 bp, synthetic construct
  source 1..90: mol_type = other DNA
tttttccacgggcagcctcaacttgccgtgatctacggagccgagcctagcgtggccgtcaagcagatggccaccgctttggttggacct

SEQ ID NO: 41279 - DNA, 39 bp, synthetic construct
  source 1..39: mol_type = other DNA
gtgcccgctattgcacaagattttgccatgaacaacgtt

SEQ ID NO: 41280 - DNA, 33 bp, synthetic construct
  source 1..33: mol_type = other DNA
taccattttcaatacgttcgcggatgggatgcc

SEQ ID NO: 41281 - DNA, 57 bp, synthetic construct
  source 1..57: mol_type = other DNA
gtgatgggcagtctcaaactggacccccaatatgcggctatggtagtacaggcgatc

SEQ ID NO: 41282 - DNA, 36 bp, synthetic construct
  source 1..36: mol_type = other DNA
gctggcatcatggccgacttccatgtatcttcgacc

SEQ ID NO: 41283 - DNA, 33 bp, synthetic construct
  source 1..33: mol_type = other DNA
tttgtacaaacagtaacaagccacaacgctact

SEQ ID NO: 41284 - DNA, 48 bp, synthetic construct
  source 1..48: mol_type = other DNA
tttgccggaggcgctctggcacacaaccgagtctctgtggctgctttc

SEQ ID NO: 41285 - DNA, 36 bp, synthetic construct
  source 1..36: mol_type = other DNA
ctgcctagcatcgctaaggccttcaacctgaacaat

SEQ ID NO: 41286 - DNA, 30 bp, synthetic construct
  source 1..30: mol_type = other DNA
cacttgcaatacatcctgggctggaacagc

SEQ ID NO: 41287 - DNA, 54 bp, synthetic construct
  source 1..54: mol_type = other DNA
atcatgggcagcgtggagatcattcccaagtactatgggctgctttctctgagc

SEQ ID NO: 41288 - DNA, 36 bp, synthetic construct
  source 1..36: mol_type = other DNA
atcgcaggtctgggcgttgaccagctcgctgcaatc

SEQ ID NO: 41289 - DNA, 57 bp, synthetic construct
  source 1..57: mol_type = other DNA
gagctgatagtttgcgtcggtggtcgaggcattgctctggactacgccctcgaatac

SEQ ID NO: 41290 - DNA, 36 bp, synthetic construct
  source 1..36: mol_type = other DNA
ctggccgtctcaaccaccgatagtatcgctgtgttc

SEQ ID NO: 41291 - DNA, 60 bp, synthetic construct
  source 1..60: mol_type = other DNA
cagctggcctacttatttagttatggcgaatccgctcggctgcttgagcccacaatcacc

SEQ ID NO: 41292 - DNA, 39 bp, synthetic construct
  source 1..39: mol_type = other DNA
gtgcccagcatcgctgacgagttcgccatgaataacgtc

SEQ ID NO: 41293 - DNA, 33 bp, synthetic construct
  source 1..33: mol_type = other DNA
taccattttcaatatgttcggaactgggacgcg

SEQ ID NO: 41294 - DNA, 54 bp, synthetic construct
  source 1..54: mol_type = other DNA
atcatgggctctctcaaattgtcatccgaacacgccgacctgattgtgcaatgt

SEQ ID NO: 41295 - DNA, 39 bp, synthetic construct
  source 1..39: mol_type = other DNA
gtgcctgcaatagctcaggagttcgccatgaacaacgtg

SEQ ID NO: 41296 - DNA, 33 bp, synthetic construct
  source 1..33: mol_type = other DNA
taccactttcaatatgttaggggatggaacgcg

SEQ ID NO: 41297 - DNA, 57 bp, synthetic construct
  source 1..57: mol_type = other DNA
tgggtcatggggagcctcgagctggcaccccaatatgcatcgatgatcgtccaagcc

SEQ ID NO: 41298 - DNA, 36 bp, synthetic construct
  source 1..36: mol_type = other DNA
agcggcatcatggccgacttcaacatttcctctacc

SEQ ID NO: 41299 - DNA, 30 bp, synthetic construct
  source 1..30: mol_type = other DNA
ttcgtacaaaatgttgcttaccactctgcc

SEQ ID NO: 41300 - DNA, 48 bp, synthetic construct
  source 1..48: mol_type = other DNA
tttgccggtggcaatgtggcccgcaacgctgtgtctgtcgctgctttc

SEQ ID NO: 41301 - DNA, 36 bp, synthetic construct
  source 1..36: mol_type = other DNA
gtgtacctgatgcgggactttagtgttagctcaaca

SEQ ID NO: 41302 - DNA, 33 bp, synthetic construct
  source 1..33: mol_type = other DNA
ctgtttatccaaggggtagcctaccattctcca

SEQ ID NO: 41303 - DNA, 45 bp, synthetic construct
  source 1..45: mol_type = other DNA
gccggaggcaacattacccacaatcaggctagcgtgatcggattc

SEQ ID NO: 41304 - DNA, 39 bp, synthetic construct
  source 1..39: mol_type = other DNA
actgggatcatgggcgatttccaagtacacagtaccacc

SEQ ID NO: 41305 - DNA, 33 bp, synthetic construct
  source 1..33: mol_type = other DNA
tttgtccaaaatgttgggtactttagtgccaca

SEQ ID NO: 41306 - DNA, 54 bp, synthetic construct
  source 1..54: mol_type = other DNA
gctttcgccggcggaacaattaatcacaatacaattagcgtttccgcctttgga

SEQ ID NO: 41307 - DNA, 39 bp, synthetic construct
  source 1..39: mol_type = other DNA
actccagagatcgccgctgacttcggcatgaacaatgtg

SEQ ID NO: 41308 - DNA, 33 bp, synthetic construct
  source 1..33: mol_type = other DNA
tatcattttcaatacgtgaagggatgggacccg

SEQ ID NO: 41309 - DNA, 57 bp, synthetic construct
  source 1..57: mol_type = other DNA
tgggtcatggggagcctggcactaagttcgcaatactctgacatgatcgtcgaaagt

SEQ ID NO: 41310 - DNA, 66 bp, synthetic construct
  source 1..66: mol_type = other DNA
ttcaaccctgcctataccatccccgagtttacaacccagggcctctacctgactgaaaagagcatt

SEQ ID NO: 41311 - DNA, 90 bp, synthetic construct
  source 1..90: mol_type = other DNA
tttttccacggccagccacaacttgccgccatctactccgccaccccaagcgtggctgtgaacgagatggcaacggcgctggttggacca

SEQ ID NO: 41312 - DNA, 66 bp, synthetic construct
  source 1..66: mol_type = other DNA
ctcaaccctgcctacaccatccccgagttcacgacgcaaggcctataccttactgatcagagcatc

SEQ ID NO: 41313 - DNA, 93 bp, synthetic construct
  source 1..93: mol_type = other DNA
gcatttttccacggacagccgcaactcgcggctgtctatggaagttctccggccgtggccgtcgagcaaatggcaagtgctcttgttggaccc

SEQ ID NO: 41314 - DNA, 39 bp, synthetic construct
  source 1..39: mol_type = other DNA
gtgcccagcattgccggcgagttcgctatgaacaacatc

SEQ ID NO: 41315 - DNA, 33 bp, synthetic construct
  source 1..33: mol_type = other DNA
taccatttccaatacgttaggggttggaacgcc

SEQ ID NO: 41316 - DNA, 57 bp, synthetic construct
  source 1..57: mol_type = other DNA
attatgggtagtctcaaactgtctagtgaatacgctggcatgatagtacagcagtca

SEQ ID NO: 41317 - DNA, 33 bp, synthetic construct
  source 1..33: mol_type = other DNA
gtggctgggcttggtgccgacgccctggctgcg

SEQ ID NO: 41318 - DNA, 54 bp, synthetic construct
  source 1..54: mol_type = other DNA
cccatcctggagttcatgggcgccgggaacaccattagttatgcggcagaatac

SEQ ID NO: 41319 - DNA, 39 bp, synthetic construct
  source 1..39: mol_type = other DNA
gtcatcgccgcaaattcagatgcagtggccgtttacacc

SEQ ID NO: 41320 - DNA, 66 bp, synthetic construct
  source 1..66: mol_type = other DNA
cagattgcagccctcttctcttataccgacgccagcgctgcactggctccgcaaatagcaacggca

SEQ ID NO: 41321 - DNA, 66 bp, synthetic construct
  source 1..66: mol_type = other DNA
atcaaccctgcctacactatccccgagttcacaaccagcggcctgtatctcaccgacaagaacatc

SEQ ID NO: 41322 - DNA, 90 bp, synthetic construct
  source 1..90: mol_type = other DNA
ttcttccatagccaaccacaactggccgccatctacaacgcttcacccgctgtagctgtgaatcggatggctaccgtgcttgtcggccca

SEQ ID NO: 41323 - DNA, 45 bp, synthetic construct
  source 1..45: mol_type = other DNA
ctgcccagcatcgagcagagtttccacctcacctctagagaatcc

SEQ ID NO: 41324 - DNA, 39 bp, synthetic construct
  source 1..39: mol_type = other DNA
atcgactcttccaatttcttaaattcactactgagtctg

SEQ ID NO: 41325 - DNA, 33 bp, synthetic construct
  source 1..33: mol_type = other DNA
ctcgtcatcttaagcatgggcctgaacgaacaa

SEQ ID NO: 41326 - DNA, 33 bp, synthetic construct
  source 1..33: mol_type = other DNA
gctggcctgggtcctgatgctgctgcaccgcta

SEQ ID NO: 41327 - DNA, 51 bp, synthetic construct
  source 1..51: mol_type = other DNA
ctgaagctgatgggcgctagctccgtgctctactatgcctaccaagcaata

SEQ ID NO: 41328 - DNA, 33 bp, synthetic construct
  source 1..33: mol_type = other DNA
accctggtgagcggccccatcgccgtggccgtg

SEQ ID NO: 41329 - DNA, 63 bp, synthetic construct
  source 1..63: mol_type = other DNA
cagatcgcttttgtgttctcatactccgaatctagcgcacaacttgaacctctgatcacaagc

SEQ ID NO: 41330 - DNA, 36 bp, synthetic construct
  source 1..36: mol_type = other DNA
cccagcattgccaatgacttcggcatgaacaacatc

SEQ ID NO: 41331 - DNA, 33 bp, synthetic construct
  source 1..33: mol_type = other DNA
taccacttccaatatgtccgcggctggaacgcc

SEQ ID NO: 41332 - DNA, 54 bp, synthetic construct
  source 1..54: mol_type = other DNA
atgatggggagcctgaagctctcaagcgaatacgcagccctgatcgtgcaatcc

SEQ ID NO: 41333 - DNA, 36 bp, synthetic construct
  source 1..36: mol_type = other DNA
gccggcatcatgtccgacttccatgtgtcgtcgact

SEQ ID NO: 41334 - DNA, 48 bp, synthetic construct
  source 1..48: mol_type = other DNA
ttcgccggcggagtcatcgggtccaaccccatgagcgtctatgcattc

SEQ ID NO: 41335 - DNA, 36 bp, synthetic construct
  source 1..36: mol_type = other DNA
gctggcatcatggccgacttccacattagctctacc

SEQ ID NO: 41336 - DNA, 33 bp, synthetic construct
  source 1..33: mol_type = other DNA
ttcgcccaatctatttccaactacgatgctacc

SEQ ID NO: 41337 - DNA, 48 bp, synthetic construct
  source 1..48: mol_type = other DNA
ttcgccggaggcaacgtcgggcacaactacgtgtccgtgaacgcgttc

SEQ ID NO: 41338 - DNA, 36 bp, synthetic construct; identical to SEQ ID NO: 41335
  source 1..36: mol_type = other DNA

SEQ ID NO: 41339 - DNA, 33 bp, synthetic construct
  source 1..33: mol_type = other DNA
ttcgcacaaagcatctccaactacgatgctact

SEQ ID NO: 41340 - DNA, 45 bp, synthetic construct
  source 1..45: mol_type = other DNA
ttcgccggcggaaatgtcgggcacaaccatgtatctgtatctgcc

SEQ ID NO: 41341 - DNA, 39 bp, synthetic construct
  source 1..39: mol_type = other DNA
gtccccgctattgcccaagatttcgccatgaacaacgtg

SEQ ID NO: 41342 - DNA, 33 bp, synthetic construct
  source 1..33: mol_type = other DNA
tatcactttcaatatgttcgaggttggaacgca

SEQ ID NO: 41343 - DNA, 57 bp, synthetic construct
  source 1..57: mol_type = other DNA
atcatgggcaacctcgaactgagcacccaatacgcgggaatgatcatcattcaagcc

SEQ ID NO: 41344 - DNA, 66 bp, synthetic construct
  source 1..66: mol_type = other DNA
atcaaccctgcctataatatccccgagttcaccaccaagggcctgtacctcactgacaagagcatt

SEQ ID NO: 41345 - DNA, 90 bp, synthetic construct
  source 1..90: mol_type = other DNA
ttctttcacgggcaaccccaacttgctgtcatctacggcgcatctcctagcgtggccgtgaacgagatggcactgaccctggttggacct

SEQ ID NO: 41346 - DNA, 39 bp, synthetic construct
  source 1..39: mol_type = other DNA
gtccccgctatagcacaggactttgccatgaacaacgtg

SEQ ID NO: 41347 - DNA, 33 bp, synthetic construct
  source 1..33: mol_type = other DNA
taccatttccaatatgtccgcggttgggacgca

SEQ ID NO: 41348 - DNA, 54 bp, synthetic construct
  source 1..54: mol_type = other DNA
attatgggtagcctcgagctggcaccacaatacgcatcgatgatagtacaggct

SEQ ID NO: 41349 - DNA, 39 bp, synthetic construct
  source 1..39: mol_type = other DNA
gtctacctgatgagcgacttctctgtgacctccacacag

SEQ ID NO: 41350 - DNA, 33 bp, synthetic construct
  source 1..33: mol_type = other DNA
attttcatacaaggggtggcttataactcggcg

SEQ ID NO: 41351 - DNA, 48 bp, synthetic construct
  source 1..48: mol_type = other DNA
ctggccggcggaaccatcgaccacaataacgctagcgtggtcgcattc

SEQ ID NO: 41352 - DNA, 39 bp, synthetic construct
  source 1..39: mol_type = other DNA
gtctacctgatgaacgacttctctgtttctagcacacag

SEQ ID NO: 41353 - DNA, 36 bp, synthetic construct
  source 1..36: mol_type = other DNA
atttttatgcaagggatagcatacaattcagccatt

SEQ ID NO: 41354 - DNA, 48 bp, synthetic construct
  source 1..48: mol_type = other DNA
ctggccggaggcagcatcgaccacaacaccgcatccgtcgtggctttc

SEQ ID NO: 41355 - DNA, 36 bp, synthetic construct
  source 1..36: mol_type = other DNA
gacggcatcatggccgatttccatattcactctacc

SEQ ID NO: 41356 - DNA, 33 bp, synthetic construct
  source 1..33: mol_type = other DNA
ttcgttcaaagtataacataccacgatgcaacc

SEQ ID NO: 41357 - DNA, 48 bp, synthetic construct
  source 1..48: mol_type = other DNA
ttcgccggcggctacattgctcacaacgacctgtcgatcgcggcattc

SEQ ID NO: 41358 - DNA, 36 bp, synthetic construct
  source 1..36: mol_type = other DNA
gccggcatcatggctgacttccacgtgcattctacc

SEQ ID NO: 41359 - DNA, 36 bp, synthetic construct
  source 1..36: mol_type = other DNA
ctgttcgctcaatctgtttccaactacgatgctacc

SEQ ID NO: 41360 - DNA, 48 bp, synthetic construct
  source 1..48: mol_type = other DNA
ttcgccggcggaaacgttgggcataattacttaagcgttagcgcgttt

SEQ ID NO: 41361 - DNA, 33 bp, synthetic construct
  source 1..33: mol_type = other DNA
gtccccatcatggaggacttccacgtgacaagc

SEQ ID NO: 41362 - DNA, 33 bp, synthetic construct
  source 1..33: mol_type = other DNA
atttttgtgcaaggaatagctggacacgatgct

SEQ ID NO: 41363 - DNA, 48 bp, synthetic construct
  source 1..48: mol_type = other DNA
ctggccggcggagaagtcggacagaacctggtgtcagaagttgctttc

SEQ ID NO: 41364 - DNA, 240 bp, synthetic construct
  source 1..240: mol_type = other DNA
ctgacccacatgggcgacagctccgcatggccacgaataatggccagcgtggaatctggcaacgatatttacggagtgatgggcaactactatacacccgtttggggctacctattaagctttctggacatgatgatccaagccgtcggtgctgtgcctctgttcggtgactacttcgaaggcctgctccctcttgaaggcgtccgctcttaccggccctttgtgatcagccccgaaatg

SEQ ID NO: 41365 - DNA, 84 bp, synthetic construct
  source 1..84: mol_type = other DNA
gccaacggacagatcgatgacgcctttgtgttcctgaccgaccggcagggcacagacttcgggagcctctacgaagcagctact

SEQ ID NO: 41366 - DNA, 87 bp, synthetic construct
  source 1..87: mol_type = other DNA
tgcctgagctgtgcctactatggcctgatcgactacgatacatttacaagtctctccgtgtctttcgctgaagatctacctgtccac

SEQ ID NO: 41367 - DNA, 36 bp, synthetic construct
  source 1..36: mol_type = other DNA
ttcgccgtcgtgatcgacagcacccatccataccac

SEQ ID NO: 41368 - DNA, 36 bp, synthetic construct
  source 1..36: mol_type = other DNA
gtggttgacggcgatccgaaccaggttgtattcaac

SEQ ID NO: 41369 - DNA, 54 bp, synthetic construct
  source 1..54: mol_type = other DNA
accgagttcgtgtttactgtcgatgacacaaccggcctgtactctagagcacct

SEQ ID NO: 41370 - DNA, 93 bp, synthetic construct
  source 1..93: mol_type = other DNA
agcttctttaagggctggggcgccgatcccaacgctttcttcaccaccacactgttacaaagctcggattcgtacactaccctgacaagtttc

SEQ ID NO: 41371 - DNA, 75 bp, synthetic construct
  source 1..75: mol_type = other DNA
ctgaccctgcctggcgctagcgtcggcctggccgaactgtttaaccccgactggtcccttctctctcactttgaa

SEQ ID NO: 41372 - DNA, 111 bp, synthetic construct
  source 1..111: mol_type = other DNA
ctgggttacatgtccgtccaaagcggaaccgccgtgtccgagttggtaacacagggcaccggactggttttcattgtgtatccaacggtcttcaacgtgctcggccaatgg

SEQ ID NO: 41373 - DNA, 36 bp, synthetic construct
  source 1..36: mol_type = other DNA
gacgttgtgaacaactcatcccatcaccaactaatt

SEQ ID NO: 41374 - DNA, 36 bp, synthetic construct
  source 1..36: mol_type = other DNA
gccggcatcatggctgacttccatgtgtcctcaacc

SEQ ID NO: 41375 - DNA, 33 bp, synthetic construct
  source 1..33: mol_type = other DNA
ttcgtgcaaacggtaacaagccacaacgcaact

SEQ ID NO: 41376 - DNA, 48 bp, synthetic construct
  source 1..48: mol_type = other DNA
tttgccggcggcacactggcacacaatagggtctcagtcaccgctttc

SEQ ID NO: 41377 - DNA, 66 bp, synthetic construct
  source 1..66: mol_type = other DNA
atgaatcctgcctatagcattcccgagttcacaacccagggcctgtacctgactgacaagaacatc

SEQ ID NO: 41378 - DNA, 90 bp, synthetic construct
  source 1..90: mol_type = other DNA
ttctttcacggccagcctcaactggccgctatctacggagcaacccctgccgtcggcgtggagcagatggccaagattttgcttggaccc

SEQ ID NO: 41379 - DNA, 36 bp, synthetic construct
  source 1..36: mol_type = other DNA
cccagcatcgccgtggagttccacatgtccaacatt

SEQ ID NO: 41380 - DNA, 36 bp, synthetic construct
  source 1..36: mol_type = other DNA
taccatctgcaatacatcaagggcttcgactctcag

SEQ ID NO: 41381 - DNA, 54 bp, synthetic construct
  source 1..54: mol_type = other DNA
atcatgggcgacgtgcccataatccagcaatactaccctctgctcatccaaagc

SEQ ID NO: 41382 - DNA, 36 bp, synthetic construct
  source 1..36: mol_type = other DNA
gccggcattatgaccgacttccacatccatagcact

SEQ ID NO: 41383 - DNA, 33 bp, synthetic construct
  source 1..33: mol_type = other DNA
ttcgcccaatcgatagccaaccacgatgcaact

SEQ ID NO: 41384 - DNA, 48 bp, synthetic construct
  source 1..48: mol_type = other DNA
ttcgccggcggaaacatggggcacaacaatatcagcgtttcggcattc

SEQ ID NO: 41385 - DNA, 36 bp, synthetic construct
  source 1..36: mol_type = other DNA
gtgagctggctgggcgggtctgcggtcggcggactc

SEQ ID NO: 41386 - DNA, 57 bp, synthetic construct
  source 1..57: mol_type = other DNA
gggcccctgatggactgcttcggcgacccttccgcctctgatgctgccatcgcatac

SEQ ID NO: 41387 - DNA, 33 bp, synthetic construct
  source 1..33: mol_type = other DNA
gtcggagttgccggtgctgacactgttggggtc

SEQ ID NO: 41388 - DNA, 54 bp, synthetic construct
  source 1..54: mol_type = other DNA
gctatggtctttaccgccgccgatgatctgcaatatttacggaacaacatggtg

SEQ ID NO: 41389 - DNA, 39 bp, synthetic construct
  source 1..39: mol_type = other DNA
gtgcccagcatcgccaatgagttcgtcatgaacaacgtg

SEQ ID NO: 41390 - DNA, 33 bp, synthetic construct
  source 1..33: mol_type = other DNA
taccactttcaatacgtccggggctgggacgca

SEQ ID NO: 41391 - DNA, 54 bp, synthetic construct
  source 1..54: mol_type = other DNA
atgggcaacctggagctgaatcaccaatatgctaatatgatagtcgtgtcacag

SEQ ID NO: 41392 - DNA, 33 bp, synthetic construct
  source 1..33: mol_type = other DNA
gtggcaggactggggcaagcagccatcgccggc

SEQ ID NO: 41393 - DNA, 60 bp, synthetic construct
  source 1..60: mol_type = other DNA
gaacccctgctgagagcctacggggccagcggacagaacctcgctgagggcatcaagtat

SEQ ID NO: 41394 - DNA, 36 bp, synthetic construct
  source 1..36: mol_type = other DNA
agcaccatcggcggcgaatacgggatcgccagtttc

SEQ ID NO: 41395 - DNA, 63 bp, synthetic construct
  source 1..63: mol_type = other DNA
ctggctaccctgttcgcctacaccaaggagacagccgttctcgtgcccgagatcactagattt

SEQ ID NO: 41396 - DNA, 30 bp, synthetic construct
  source 1..30: mol_type = other DNA
agcggcctcggcaacatcgaggtgactgct

SEQ ID NO: 41397 - DNA, 57 bp, synthetic construct
  source 1..57: mol_type = other DNA
gacaagatcctgattctgttctgcaataaccaggtcttcgacgccagctactcctat

SEQ ID NO: 41398 - DNA, 33 bp, synthetic construct
  source 1..33: mol_type = other DNA
gtctatgagggcctgatttacatcaccgcttac

SEQ ID NO: 41399 - DNA, 57 bp, synthetic construct
  source 1..57: mol_type = other DNA
tttctgtccttcatgctttatcaaactaaggacctgatcgtgatcaaccagatcagc

SEQ ID NO: 41400 - DNA, 33 bp, synthetic construct
  source 1..33: mol_type = other DNA
cccctgatcgcacgcgagctcagcatgtccaac

SEQ ID NO: 41401 - DNA, 33 bp, synthetic construct
  source 1..33: mol_type = other DNA
cactttcaatacatcatggatagtgacggatta

SEQ ID NO: 41402 - DNA, 54 bp, synthetic construct
  source 1..54: mol_type = other DNA
attatgggcaacgtgcctatcgtccccgaatattacccactgctgatggaatcc

SEQ ID NO: 41403 - DNA, 33 bp, synthetic construct
  source 1..33: mol_type = other DNA
cccctgatcgctcgcgagctcgccatgtctaac

SEQ ID NO: 41404 - DNA, 30 bp, synthetic construct
  source 1..30: mol_type = other DNA
cactttcaatatattatgggactggatagc

SEQ ID NO: 41405 - DNA, 54 bp, synthetic construct
  source 1..54: mol_type = other DNA
attatgggcaacgtgcccatcgtccctgagaactacccactgctcatggcaagc

SEQ ID NO: 41406 - DNA, 36 bp, synthetic construct
  source 1..36: mol_type = other DNA
attgccggcctcaacgtggacagcctgatcgctatc

SEQ ID NO: 41407 - DNA, 51 bp, synthetic construct
  source 1..51: mol_type = other DNA
cagatcctgctgtcactcggggcagcctctgtcattgacctgagcatggaa

SEQ ID NO: 41408 - DNA, 33 bp, synthetic construct
  source 1..33: mol_type = other DNA
ctcatcctgagctccaacctggacgttgcaaca

SEQ ID NO: 41409 - DNA, 66 bp, synthetic construct
  source 1..66: mol_type = other DNA
cagttcgcctatatcttctcttataccgaaagcacccaggtcctcatcgagtccctcgtgtttttc

SEQ ID NO: 41410 - DNA, 36 bp, synthetic construct
  source 1..36: mol_type = other DNA
cccctgattagcaacgacctccacctgaccatcgag

SEQ ID NO: 41411 - DNA, 30 bp, synthetic construct
  source 1..30: mol_type = other DNA
cacctgcaatatgtactaggttacgattcc

SEQ ID NO: 41412 - DNA, 51 bp, synthetic construct
  source 1..51: mol_type = other DNA
ttcatcgggaatgaagtgataaatagctccaacgtctctggattgatcaag

SEQ ID NO: 41413 - DNA, 39 bp, synthetic construct
  source 1..39: mol_type = other DNA
atgatcgacatcgccttcatcctgaatcagatcgataac

SEQ ID NO: 41414 - DNA, 69 bp, synthetic construct
  source 1..69: mol_type = other DNA
attcagaacatccccgcaatgtttgccctgatcttcaaggacgctttcgatttcacaagcatattcgga

SEQ ID NO: 41415 - DNA, 78 bp, synthetic construct
  source 1..78: mol_type = other DNA
tctacaggcgtgccaatcaccagcgtagtctccggagctccctacgtacaaaacgctatcgcttctgtgttcggatgg

SEQ ID NO: 41416 - DNA, 36 bp, synthetic construct
  source 1..36: mol_type = other DNA
cccgctatcgccctggagttccacatgagcaacatt

SEQ ID NO: 41417 - DNA, 30 bp, synthetic construct
  source 1..30: mol_type = other DNA
catttccaatatcttgagggactgaacgct

SEQ ID NO: 41418 - DNA, 54 bp, synthetic construct
  source 1..54: mol_type = other DNA
gtcatgggcaatgtgcccatcgagccttccaactacaacctgctggtcacaagc

SEQ ID NO: 41419 - DNA, 36 bp, synthetic construct
  source 1..36: mol_type = other DNA
attgctggcctcggaactgagcctcttgccctggcg

SEQ ID NO: 41420 - DNA, 54 bp, synthetic construct
  source 1..54: mol_type = other DNA
cccatcatcgtcctcattggcgccagcgaagtgctgacctacgctgagtcctat

SEQ ID NO: 41421 - DNA, 33 bp, synthetic construct
  source 1..33: mol_type = other DNA
agcatcgtggccggcactgcaattgtcgcttcc

SEQ ID NO: 41422 - DNA, 63 bp, synthetic construct
  source 1..63: mol_type = other DNA
cagatcgcttaccttttcgcctatgggagcaactccggctctctcaataccctgatagtccaa

SEQ ID NO: 41423 - DNA, 36 bp, synthetic construct
  source 1..36: mol_type = other DNA
gtggccggtctgggctctgatgctctcgctgcaatc

SEQ ID NO: 41424 - DNA, 48 bp, synthetic construct
  source 1..48: mol_type = other DNA
ctcgagatcatgggcgctggtagcagcactcagctggctctggactac

SEQ ID NO: 41425 - DNA, 36 bp, synthetic construct
  source 1..36: mol_type = other DNA
gtgatcgttagcggcaacgtggctgtcgccacatac

SEQ ID NO: 41426 - DNA, 57 bp, synthetic construct
  source 1..57: mol_type = other DNA
atctccattatcttcgcctatgggtctaccgcaagcctggcccctcgaatagctagc

SEQ ID NO: 41427 - DNA, 126 bp, synthetic construct
  source 1..126: mol_type = other DNA
gggaccaacggaatctaccccatcgagattatgagcccactatttcaaggcctcatgccttatctgcccatgacatacgctatcctcctgctcaaggacgccgtgttcggcgtcatttggcctacc

SEQ ID NO: 41428 - DNA, 33 bp, synthetic construct
  source 1..33: mol_type = other DNA
gtgagctggcttggcggaaacgccgtcggcggc

SEQ ID NO: 41429 - DNA, 54 bp, synthetic construct
  source 1..54: mol_type = other DNA
cccctgatggactgcttcggcaaccctgctgcccgggatgaggcaatcgcttac

SEQ ID NO: 41430 - DNA, 33 bp, synthetic construct
  source 1..33: mol_type = other DNA
gtgggagtagctggggcagacaccgttggtgtg

SEQ ID NO: 41431 - DNA, 54 bp, synthetic construct
  source 1..54: mol_type = other DNA
gctatggtttttacggccgccgacgacctgcactacctccgggataacatgttc

SEQ ID NO: 41432 - DNA, 33 bp, synthetic construct
  source 1..33: mol_type = other DNA
gtggcaggcttgggtcaggccgctattgctggg

SEQ ID NO: 41433 - DNA, 57 bp, synthetic construct
  source 1..57: mol_type = other DNA
gagcccgtgctcaagacctacggggccagcggccagagtctgaccgaggccttgaaa

SEQ ID NO: 41434 - DNA, 36 bp, synthetic construct
  source 1..36: mol_type = other DNA
agcagcgttggcggcgaatatggcattgctgcattc

SEQ ID NO: 41435 - DNA, 63 bp, synthetic construct
  source 1..63: mol_type = other DNA
ctgagcatgatcttcgcctacacacccgagaccgctccactcatccctgagatcacctccttt

SEQ ID NO: 41436 - DNA, 36 bp, synthetic construct
  source 1..36: mol_type = other DNA
gtggcaggactgggtgcagatgctctagcggccgtg

SEQ ID NO: 41437 - DNA, 48 bp, synthetic construct
  source 1..48: mol_type = other DNA
ctgaacctgatgggagcagggtccagcacccagcttggcatcgagtac

SEQ ID NO: 41438 - DNA, 36 bp, synthetic construct
  source 1..36: mol_type = other DNA
acgattgcggccggaacaactgctgtggccgtttac

SEQ ID NO: 41439 - DNA, 66 bp, synthetic construct
  source 1..66: mol_type = other DNA
tatatcgccctcctcttcgcgtattccgatcaatccgctagtctggccccaatgatatcaatgtca

SEQ ID NO: 41440 - DNA, 36 bp, synthetic construct
  source 1..36: mol_type = other DNA
gtcgctggcctgggtgccgatgcggcagcagcgctt

SEQ ID NO: 41441 - DNA, 54 bp, synthetic construct
  source 1..54: mol_type = other DNA
cccattttgcaattcatgggggctggcgacactattcaatatgccatggattac

SEQ ID NO: 41442 - DNA, 36 bp, synthetic construct
  source 1..36: mol_type = other DNA
gtcatcgctgccggtacaaccgctgtggccgtgtac

SEQ ID NO: 41443 - DNA, 66 bp, synthetic construct
  source 1..66: mol_type = other DNA
tcccagattgccggcatgttctcttacacccaagccagtgccggaatggctagcgagatcgctacc

SEQ ID NO: 41444 - DNA, 36 bp, synthetic construct
  source 1..36: mol_type = other DNA
gtgagcggactgtccgccgacgcactgactgctatc

SEQ ID NO: 41445 - DNA, 60 bp, synthetic construct
  source 1..60: mol_type = other DNA
gatgacctgattgtgctggttggcggcgagtctgtcctgcctttgtgccgggcatacatc

SEQ ID NO: 41446 - DNA, 33 bp, synthetic construct
  source 1..33: mol_type = other DNA
ttcaccgccggcgttggcgagattgccagctac

SEQ ID NO: 41447 - DNA, 66 bp, synthetic construct
  source 1..66: mol_type = other DNA
caccagttttgcggcattttctccctgacactgagcgacaccaacgtgatcgatagagctgctgaa

SEQ ID NO: 41448 - DNA, 36 bp, synthetic construct
  source 1..36: mol_type = other DNA
gtagctgggctgggcgccgaacctgccgcaccgttg

SEQ ID NO: 41449 - DNA, 48 bp, synthetic construct
  source 1..48: mol_type = other DNA
ctgaagctgatgggggccagctccgtgctcgactatggcatgcagtac

SEQ ID NO: 41450 - DNA, 33 bp, synthetic construct
  source 1..33: mol_type = other DNA
accctggtgagcggccccgtggccgtggccgtg

SEQ ID NO: 41451 - DNA, 63 bp, synthetic construct
  source 1..63: mol_type = other DNA
cagatcgctttcgtcttctcttattccgaatctagcgcccacctggaacccctgatagcaagt

SEQ ID NO: 41452 - DNA, 30 bp, synthetic construct
  source 1..30: mol_type = other DNA
tcccagctgagccccgaggccttctttgct

SEQ ID NO: 41453 - DNA, 54 bp, synthetic construct
  source 1..54: mol_type = other DNA
gacatcctgaacaagatgggcgtgaccaaaagcatcgatctcgccatcacctac

SEQ ID NO: 41454 - DNA, 48 bp, synthetic construct
  source 1..48: mol_type = other DNA
tacggcttcgccctgttctccatcaccggggctgagacaagcgtgttt

SEQ ID NO: 41455 - DNA, 93 bp, synthetic construct
  source 1..93: mol_type = other DNA
aattcctttacatttggatggggcaccaaccccgctgcattcttcactgccaacgtcggggagagctctgatctcgccggcatcgattacctg

SEQ ID NO: 41456 - DNA, 72 bp, synthetic construct
  source 1..72: mol_type = other DNA
acccttcctgggttccacctcggcctggtgactctgctcaaccccaactggggcatgctgctggacattgac

SEQ ID NO: 41457 - DNA, 105 bp, synthetic construct
  source 1..105: mol_type = other DNA
ggctacatgagcgtgacaagttccatccctattaccgagctcattactgaaggcacctctctgatctttgtcgtgctgcctgaagtattcgaagtgatgggtccc

SEQ ID NO: 41458 - DNA, 36 bp, synthetic construct
  source 1..36: mol_type = other DNA
gtggctgggatcggcgttaatggtttggctttagca

SEQ ID NO: 41459 - DNA, 57 bp, synthetic construct
  source 1..57: mol_type = other DNA
cggcccattttggtctacatgggggccggcagcaccatcggatatgctctggagtac

SEQ ID NO: 41460 - DNA, 36 bp, synthetic construct
  source 1..36: mol_type = other DNA
accatagtttccgggacagacgccgttgctgtctac

SEQ ID NO: 41461 - DNA, 63 bp, synthetic construct
  source 1..63: mol_type = other DNA
attgtgatgctgttctcctatgcggattcaagtgtcagcctgtccgactccctcatcgatttc

SEQ ID NO: 41462 - DNA, 39 bp, synthetic construct
  source 1..39: mol_type = other DNA
gtgcccagcctagctcaagatttttccatgtctaacatc

SEQ ID NO: 41463 - DNA, 36 bp, synthetic construct
  source 1..36: mol_type = other DNA
taccaccttcaatacatcagggggttcgattcgcaa

SEQ ID NO: 41464 - DNA, 54 bp, synthetic construct
  source 1..54: mol_type = other DNA
atcatgggcaacgtgcctattatccccgagtattaccacctgctcactgcaagc

SEQ ID NO: 41465 - DNA, 36 bp, synthetic construct
  source 1..36: mol_type = other DNA
cccagcattggcgtggacctgaacctctccatcgag

SEQ ID NO: 41466 - DNA, 33 bp, synthetic construct
  source 1..33: mol_type = other DNA
tacctgcaatacgtattgggttatgactcttac

SEQ ID NO: 41467 - DNA, 54 bp, synthetic construct
  source 1..54: mol_type = other DNA
attttcgggaccagcgagcggatcggcgatgacatcgcctcctttctgatctcc

SEQ ID NO: 41468 - DNA, 243 bp, synthetic construct
  source 1..243: mol_type = other DNA
ttcacctatcccttcgacatcgagcactggggcgtcatactacaaaacacagagtcaggcaatggcctgttcgggcttaccggttacttctatacgcctgtttggggctacatcctggggttcgaggatattatcctcaacctgctccctggcattacctatggagagcgcttcaccgacctgctcgagattgagggcatggcctttccctactacactgccacaacaaccacccctgctttc

SEQ ID NO: 41469 - DNA, 72 bp, synthetic construct
  source 1..72: mol_type = other DNA
ctcgacgggacgctcatgaatgctttctcgtttatcttcggccgcacatccgaatatgacctactgcttaca

SEQ ID NO: 41470 - DNA, 108 bp, synthetic construct
  source 1..108: mol_type = other DNA
aactccctgagcctgctgactactgctagtgaatacctgcacctctgcgacccccaaaccgtgatctcctggatgcacgctctcgagggcccagtcttcgggattcca

SEQ ID NO: 41471 - DNA, 33 bp, synthetic construct
  source 1..33: mol_type = other DNA
cccgctatcgccgaggagttcggcatgaacaac

SEQ ID NO: 41472 - DNA, 30 bp, synthetic construct
  source 1..30: mol_type = other DNA
cacttccaatacgtaatgggatgggatgcc

SEQ ID NO: 41473 - DNA, 54 bp, synthetic construct
  source 1..54: mol_type = other DNA
atcatgggcagccggaaactgagcagccaatacgccgacatgattgtgcaatct

SEQ ID NO: 41474 - DNA, 30 bp, synthetic construct
  source 1..30: mol_type = other DNA
atcatgccctacgacaacagctgggatagg

SEQ ID NO: 41475 - DNA, 33 bp, synthetic construct
  source 1..33: mol_type = other DNA
atccagtgcacagatccatcgagtgatctgatt

SEQ ID NO: 41476 - DNA, 48 bp, synthetic construct
  source 1..48: mol_type = other DNA
accagctgcctgttcaccatcgagaacggcgtctatactgtaaccgag

SEQ ID NO: 41477 - DNA, 39 bp, synthetic construct
  source 1..39: mol_type = other DNA
gtgcccgcgatagctagcgaattcggcatgaacaacgtg

SEQ ID NO: 41478 - DNA, 33 bp, synthetic construct
  source 1..33: mol_type = other DNA
taccattttcaatatgttcgcggctgggatgcc

SEQ ID NO: 41479 - DNA, 54 bp, synthetic construct
  source 1..54: mol_type = other DNA
gtcatgggcagcctgcccctgtctaccgaatacgctaacctcatcgtgcaaagt

SEQ ID NO: 41480 - DNA, 36 bp, synthetic construct
  source 1..36: mol_type = other DNA
atcgccgggattggcgctaacgctatcgctgcaacc

SEQ ID NO: 41481 - DNA, 57 bp, synthetic construct
  source 1..57: mol_type = other DNA
cggcccatgctggaaataatgcaagctggtgacgctatggaatacgcgatgacctat

SEQ ID NO: 41482 - DNA, 42 bp, synthetic construct
  source 1..42: mol_type = other DNA
cttacaatggttgccggaacaatggcggttggagcctacact

SEQ ID NO: 41483 - DNA, 63 bp, synthetic construct
  source 1..63: mol_type = other DNA
gagtacatcagcctgctgttcacctactcccctgagtctatcgctatgcggcccatgctcatt

SEQ ID NO: 41484 - DNA, 36 bp, synthetic construct
  source 1..36: mol_type = other DNA
cctactatcgaggtggacctgaacctcaatgtggaa

SEQ ID NO: 41485 - DNA, 30 bp, synthetic construct
  source 1..30: mol_type = other DNA
ctgcagaacgcactcggctacgactcacgc

SEQ ID NO: 41486 - DNA, 54 bp, synthetic construct
  source 1..54: mol_type = other DNA
gtgctgggcgccagcaacaccctcaacaagaatatccactccttcctgacatcc

SEQ ID NO: 41487 - DNA, 36 bp, synthetic construct
  source 1..36: mol_type = other DNA
gtggtcggccttggacccgagcctctggtagctatg

SEQ ID NO: 41488 - DNA, 48 bp, synthetic construct
  source 1..48: mol_type = other DNA
ctgatcctgcttggagccgggaccagcctcaaatatgggatggactac

SEQ ID NO: 41489 - DNA, 36 bp, synthetic construct
  source 1..36: mol_type = other DNA
ctcaaggtcgcaggccacactgctgtagctgtggtg

SEQ ID NO: 41490 - DNA, 63 bp, synthetic construct
  source 1..63: mol_type = other DNA
gagatcgcccatatcttttcctataataaccagaacgccatcctgaagccctatatcgcaagt

SEQ ID NO: 41491 - DNA, 30 bp, synthetic construct
  source 1..30: mol_type = other DNA
atcgctggcctgggcgagtctgctattgcc

SEQ ID NO: 41492 - DNA, 51 bp, synthetic construct
  source 1..51: mol_type = other DNA
tacctgagtatttacactcacgacgaacagacaaaaatcgaggccataacc

SEQ ID NO: 41493 - DNA, 33 bp, synthetic construct
  source 1..33: mol_type = other DNA
gccgacatcgctggcgatctggggttgagcatc

SEQ ID NO: 41494 - DNA, 66 bp, synthetic construct
  source 1..66: mol_type = other DNA
cagctggcctacctgttcatgatcgtgtccgagaacccacaactgactgctggcattagccacaac

SEQ ID NO: 41495 - DNA, 36 bp, synthetic construct
  source 1..36: mol_type = other DNA
attagccagatcaacatccacgcctcctttgctgtg

SEQ ID NO: 41496 - DNA, 57 bp, synthetic construct
  source 1..57: mol_type = other DNA
cagggcctgctttacgacgtgaaccagagcgagtcctacctcctggtctgggattac

SEQ ID NO: 41497 - DNA, 30 bp, synthetic construct
  source 1..30: mol_type = other DNA
atcgtgaccatgggcgagattggaccaatc

SEQ ID NO: 41498 - DNA, 48 bp, synthetic construct
  source 1..48: mol_type = other DNA
caggcctacaactttttttctatctccggccgggctacagagatcaat

SEQ ID NO: 41499 - DNA, 33 bp, synthetic construct
  source 1..33: mol_type = other DNA
cccagcatcgccaaggagttcggcatgaataac

SEQ ID NO: 41500 - DNA, 36 bp, synthetic construct
  source 1..36: mol_type = other DNA
tactacttccaatacgtgaagggcttctttaattca

SEQ ID NO: 41501 - DNA, 51 bp, synthetic construct
  source 1..51: mol_type = other DNA
atggggaaccttaacctgagcactatttacgccaatatgatcctgaaggcg

SEQ ID NO: 41502 - DNA, 30 bp, synthetic construct
  source 1..30: mol_type = other DNA
gtgaacggcctgggaaccacagccattatc

SEQ ID NO: 41503 - DNA, 57 bp, synthetic construct
  source 1..57: mol_type = other DNA
gagcccatctgcgtgatggccgggattggcgagtataccgacatgatcttcgcttac

SEQ ID NO: 41504 - DNA, 57 bp, synthetic construct
  source 1..57: mol_type = other DNA
aaccccatcattggaattttttcgactgagaacgtggtgctggacgaagtcaggaat

SEQ ID NO: 41505 - DNA, 36 bp, synthetic construct
  source 1..36: mol_type = other DNA
cccaagataagtagtaatctgaatttctctgctgag

SEQ ID NO: 41506 - DNA, 30 bp, synthetic construct
  source 1..30: mol_type = other DNA
cacctgcaatatgttcttaacatcaaggag

SEQ ID NO: 41507 - DNA, 54 bp, synthetic construct
  source 1..54: mol_type = other DNA
gtgggcaaccagcggctggggcccgataagctggactcccttctcgtccaaagc

SEQ ID NO: 41508 - DNA, 36 bp, synthetic construct
  source 1..36: mol_type = other DNA
gtgagcagcctgggagccgacgctctagctgctggt

SEQ ID NO: 41509 - DNA, 57 bp, synthetic construct
  source 1..57: mol_type = other DNA
aaggacatcctgctcgccattggcgccagcaccacaatcggttacgccatggattac

SEQ ID NO: 41510 - DNA, 36 bp, synthetic construct
  source 1..36: mol_type = other DNA
accgtggtggccacaactgacgctgtcgctgtgtac

SEQ ID NO: 41511 - DNA, 66 bp, synthetic construct
  source 1..66: mol_type = other DNA
gggcagatcgtgtccctcttcgtctacgctggcactagcgcccggctggaatctcagctggtttca

SEQ ID NO: 41512 - DNA, 30 bp, synthetic construct
  source 1..30: mol_type = other DNA
gtgagcggtctgggcacagccgcaatcatt

SEQ ID NO: 41513 - DNA, 57 bp, synthetic construct
  source 1..57: mol_type = other DNA
gaacccatttgcgtgatggccggcatcagcgagtacaccgacatgatcttcgcttat

SEQ ID NO: 41514 - DNA, 33 bp, synthetic construct
  source 1..33: mol_type = other DNA
ctgcacctctacgcctcccccatagcggtctca

SEQ ID NO: 41515 - DNA, 57 bp, synthetic construct
  source 1..57: mol_type = other DNA
ggccccatcgtcggtctctttagttccgaatacgtgattctggaggaggtcaagaac

SEQ ID NO: 41516 - DNA, 30 bp, synthetic construct
  source 1..30: mol_type = other DNA
ggtggtctgggtgctggagcacttgcggcc

SEQ ID NO: 41517 - DNA, 45 bp, synthetic construct
  source 1..45: mol_type = other DNA
ctaatacaaatgggggctggcgaagtgattgaggacgcccttaac

SEQ ID NO: 41518 - DNA, 36 bp, synthetic construct
  source 1..36: mol_type = other DNA
acactgctctccggcaccattgccatcgctagctac

SEQ ID NO: 41519 - DNA, 66 bp, synthetic construct
  source 1..66: mol_type = other DNA
gagcccctgagtcacatcttcgcctactccgccaatagtgcagtgctgtccctccggattaccgaa

SEQ ID NO: 41520 - DNA, 33 bp, synthetic construct
  source 1..33: mol_type = other DNA
gtcgctggacttggtcccgcacctctcgctgcc

SEQ ID NO: 41521 - DNA, 48 bp, synthetic construct
  source 1..48: mol_type = other DNA
ctcaaaatcatgggcgctagcgatgtgctgaaatatgccatggactac

SEQ ID NO: 41522 - DNA, 36 bp, synthetic construct
  source 1..36: mol_type = other DNA
acattggtcagcggcagtaccgccgtagctgtgtac

SEQ ID NO: 41523 - DNA, 63 bp, synthetic construct
  source 1..63: mol_type = other DNA
caggtggcctttatcttctcttattccgaagcctcatcccacctggagcccctgattgcttcc

SEQ ID NO: 41524 - DNA, 36 bp, synthetic construct
  source 1..36: mol_type = other DNA
gtgagtggactgggtgctgatgcccttgctctgggg

SEQ ID NO: 41525 - DNA, 54 bp, synthetic construct
  source 1..54: mol_type = other DNA
aaggacatcctcttgggaatgggcgctggtagcacgattgactacgctatggat

SEQ ID NO: 41526 - DNA, 36 bp, synthetic construct
  source 1..36: mol_type = other DNA
gtggtcgtcgcctctaccgacgccgttgctgtgtac

SEQ ID NO: 41527 - DNA, 63 bp, synthetic construct
  source 1..63: mol_type = other DNA
cagatcgtctccgttttcgcctacaccgggacatccacaagactcgctcctcaactgatcgct

SEQ ID NO: 41528 - DNA, 33 bp, synthetic construct
  source 1..33: mol_type = other DNA
gtgagcggactgggtgctgacgcacttgctggg

SEQ ID NO: 41529 - DNA, 54 bp, synthetic construct
  source 1..54: mol_type = other DNA
aaggacatcctgctcgggatgggagccggcagcaccatcgattacgctatggat

SEQ ID NO: 41530 - DNA, 36 bp, synthetic construct
  source 1..36: mol_type = other DNA
gttgtggtggctaacactgacgccgtcgccgtgtac

SEQ ID NO: 41531 - DNA, 63 bp, synthetic construct
  source 1..63: mol_type = other DNA
cagatagttagtgtcttcgcctacaccgggacttccacaagactcacgccgcaattgatagcc

SEQ ID NO: 41532 - DNA, 33 bp, synthetic construct
  source 1..33: mol_type = other DNA
gccggccttggaccaggacctttggctgcaatc

SEQ ID NO: 41533 - DNA, 48 bp, synthetic construct
  source 1..48: mol_type = other DNA
ctgaaggtcatgggcgccagcgaagtcatgggttacgctatggactat

SEQ ID NO: 41534 - DNA, 36 bp, synthetic construct
  source 1..36: mol_type = other DNA
acactggtcagcggctctaccgctgtggccgtttac

SEQ ID NO: 41535 - DNA, 63 bp, synthetic construct
  source 1..63: mol_type = other DNA
caggtggcctatatcttttcctatagtgaagcaagtgcccaccttgagcctctgatcgcttct

SEQ ID NO: 41536 - DNA, 36 bp, synthetic construct
  source 1..36: mol_type = other DNA
cccagcatcgcctctgagttccacatgtccaacatc

SEQ ID NO: 41537 - DNA, 36 bp, synthetic construct
  source 1..36: mol_type = other DNA
tatcatctgcaatacataaagggcttcgattcacag

SEQ ID NO: 41538 - DNA, 54 bp, synthetic construct
  source 1..54: mol_type = other DNA
atcatgggcgacgtccctatcgtggagcagtattaccccctgctcatttcatcc

SEQ ID NO: 41539 - DNA, 36 bp, synthetic construct
  source 1..36: mol_type = other DNA
gtgtccggccttgggactgaggctggatcagcagtg

SEQ ID NO: 41540 - DNA, 57 bp, synthetic construct
  source 1..57: mol_type = other DNA
cggcccgcaatcggattcatgggcgccgacgatgttgctggagaggccgaagcttac

SEQ ID NO: 41541 - DNA, 30 bp, synthetic construct
  source 1..30: mol_type = other DNA
atcatggccggcggcacatcagctgtaatg

SEQ ID NO: 41542 - DNA, 66 bp, synthetic construct
  source 1..66: mol_type = other DNA
gatcccctgatgagcgtgatgaccatcgaggagtccatgcgcgagatgcggcctgacttcgtcaag

SEQ ID NO: 41543 - DNA, 33 bp, synthetic construct
  source 1..33: mol_type = other DNA
gtggcagggttgggtcaggcagctatcgccggt

SEQ ID NO: 41544 - DNA, 48 bp, synthetic construct
  source 1..48: mol_type = other DNA
ctgaagatctacggggccagcgaccagtccctgattgagggcatcaag

SEQ ID NO: 41545 - DNA, 39 bp, synthetic construct
  source 1..39: mol_type = other DNA
attagcacctgcggaggcgaatatggcattgctgctttc

SEQ ID NO: 41546 - DNA, 63 bp, synthetic construct
  source 1..63: mol_type = other DNA
ctgtccctcatctttgcttacacccctgagactgccagcctgatccccgagatcaccaacttc

SEQ ID NO: 41547 - DNA, 36 bp, synthetic construct
  source 1..36: mol_type = other DNA
gtggccggcttggggcaggctgctataggggccgcg

SEQ ID NO: 41548 - DNA, 54 bp, synthetic construct
  source 1..54: mol_type = other DNA
cccctgctcaaaacctacggcgctagcgggcagtctctggttgaggccatgaag

SEQ ID NO: 41549 - DNA, 36 bp, synthetic construct
  source 1..36: mol_type = other DNA
agctccattggcggcgaatatggaatcgctgctttc

SEQ ID NO: 41550 - DNA, 63 bp, synthetic construct
  source 1..63: mol_type = other DNA
ctggccctgatcttcgcatacactcctgacaccgctccactcatccccgagatcaccaacttc

SEQ ID NO: 41551 - DNA, 39 bp, synthetic construct
  source 1..39: mol_type = other DNA
gccctgcctaccatcgctctggacttcaatatgagcaac

SEQ ID NO: 41552 - DNA, 30 bp, synthetic construct
  source 1..30: mol_type = other DNA
cacttccaatatctgaacggcctcaatccc

SEQ ID NO: 41553 - DNA, 51 bp, synthetic construct
  source 1..51: mol_type = other DNA
atgggcaatgtgccgattattccctctaattaccacctgttggtacaaagc

SEQ ID NO: 41554 - DNA, 75 bp, synthetic construct
  source 1..75: mol_type = other DNA
gggagcaaccccaacctgttcttcactgagaccctcctgcattccacgagctcgatctcgggacttggcgacatc

SEQ ID NO: 41555 - DNA, 75 bp, synthetic construct
  source 1..75: mol_type = other DNA
gtgacgctgcccggggcatctattggatactctgctctgttcaaccccaagtggtactccatctgcgatcctcac

SEQ ID NO: 41556 - DNA, 105 bp, synthetic construct
  source 1..105: mol_type = other DNA
ggttatatgagcttcgttcaagacgtccctctgcggtatctggtgaccgagggcaccggtctgatcttcgttgccttcccttccatctttaacgagatgggagtg

SEQ ID NO: 41557 - DNA, 36 bp, synthetic construct
  source 1..36: mol_type = other DNA
atgtacgacatgaacagcttcaccctgatcttcgat

SEQ ID NO: 41558 - DNA, 33 bp, synthetic construct
  source 1..33: mol_type = other DNA
ctggttatgagcatgggagacatgggacctatc

SEQ ID NO: 41559 - DNA, 51 bp, synthetic construct
  source 1..51: mol_type = other DNA
tacatcttcgacctgtttggcatcacggaaatgagcactgaaatcttctgg

SEQ ID NO: 41560 - DNA, 30 bp, synthetic construct
  source 1..30: mol_type = other DNA
agcgggctgggcgctaatcaattggctgcc

SEQ ID NO: 41561 - DNA, 45 bp, synthetic construct
  source 1..45: mol_type = other DNA
ctgatcttcatcggggccggcaacaccatatcatattctctcgat

SEQ ID NO: 41562 - DNA, 36 bp, synthetic construct
  source 1..36: mol_type = other DNA
gcctacatcgggactactgacgcggttgccgtatac

SEQ ID NO: 41563 - DNA, 66 bp, synthetic construct
  source 1..66: mol_type = other DNA
ccccagatcgtggccatcttcacatacggcggaacaagccagcggctgaacgggtccctcattgcc

SEQ ID NO: 41564 - DNA, 36 bp, synthetic construct
  source 1..36: mol_type = other DNA
gtggccgggctcgggtccaacgctttggcggccgcg

SEQ ID NO: 41565 - DNA, 54 bp, synthetic construct
  source 1..54: mol_type = other DNA
gagatcctgctgctcatgggtgccgggtccagtcttcaaatggggcttgactac

SEQ ID NO: 41566 - DNA, 36 bp, synthetic construct
  source 1..36: mol_type = other DNA
acactggtggctggcaccactgccgtggctgtttac

SEQ ID NO: 41567 - DNA, 63 bp, synthetic construct
  source 1..63: mol_type = other DNA
tatattgctcttcttttcgcatacacggaccagagcgccatgctggcacccctcattagtgag

SEQ ID NO: 41568 - DNA, 30 bp, synthetic construct
  source 1..30: mol_type = other DNA
agcggactgggcccaaacgctctgtctgcc

SEQ ID NO: 41569 - DNA, 48 bp, synthetic construct
  source 1..48: mol_type = other DNA
ctgatcttcctgaacgttggaggcgccctcaattacgctctggacttt

SEQ ID NO: 41570 - DNA, 36 bp, synthetic construct
  source 1..36: mol_type = other DNA
ctgcaggtgtcttcaaccatgttcttcgctgtctcg

SEQ ID NO: 41571 - DNA, 63 bp, synthetic construct
  source 1..63: mol_type = other DNA
cagatcgcctccctcttcacttacaactctacgaatgctatgctccggccccaaatctctcag

SEQ ID NO: 41572 - DNA, 30 bp, synthetic construct
  source 1..30: mol_type = other DNA
tccggcttgggaagtcaaccacttgctagc

SEQ ID NO: 41573 - DNA, 48 bp, synthetic construct
  source 1..48: mol_type = other DNA
ctgtacttcatgggggcctcgtctgtgatgaagacggcaacagactat

SEQ ID NO: 41574 - DNA, 30 bp, synthetic construct
  source 1..30: mol_type = other DNA
accctgctgagcggccccgtggccgtggcc

SEQ ID NO: 41575 - DNA, 69 bp, synthetic construct
  source 1..69: mol_type = other DNA
taccagatcgccgacatcttcgcttatacacaagcaactagcaacctgaagcccgctatagcggctgac

SEQ ID NO: 41576 - DNA, 30 bp, synthetic construct
  source 1..30: mol_type = other DNA
agcggcctcggacctaaggctttggccgct

SEQ ID NO: 41577 - DNA, 45 bp, synthetic construct
  source 1..45: mol_type = other DNA
ctgattatgatcggcgctaaggaggccctggattacgctctcgat

SEQ ID NO: 41578 - DNA, 36 bp, synthetic construct
  source 1..36: mol_type = other DNA
gtcgtgcttggtggtcatgccgctgttgccgtatac

SEQ ID NO: 41579 - DNA, 63 bp, synthetic construct
  source 1..63: mol_type = other DNA
aatatcgcgtcgatattcacatactctagcgcatctgcctcactggctcccaagatcagcgcc

SEQ ID NO: 41580 - DNA, 36 bp, synthetic construct
  source 1..36: mol_type = other DNA
ccctctatcgcctccgagttccacatgagcaacatc

SEQ ID NO: 41581 - DNA, 36 bp, synthetic construct
  source 1..36: mol_type = other DNA
taccacttacaatacattaagggcttcgactcacag

SEQ ID NO: 41582 - DNA, 57 bp, synthetic construct
  source 1..57: mol_type = other DNA
gtgatgggcgacgtgcctatcgtcgagcagtactaccccctgctgatctcctcatcg

SEQ ID NO: 41583 - DNA, 33 bp, synthetic construct
  source 1..33: mol_type = other DNA
gtggcaggcctcggtgctgagccattggccgcg

SEQ ID NO: 41584 - DNA, 48 bp, synthetic construct
  source 1..48: mol_type = other DNA
ctgaacatgatgggcgcgtcgtctgtgatcaattatgccatggagtac

SEQ ID NO: 41585 - DNA, 36 bp, synthetic construct
  source 1..36: mol_type = other DNA
accatagtatccgggccagtagcggtagcagctgtg

SEQ ID NO: 41586 - DNA, 66 bp, synthetic construct
  source 1..66: mol_type = other DNA
aaccagatcgcctttatatttagctattctgagaacagtgctcagctggagccactgatcgcaagt

SEQ ID NO: 41587 - DNA, 36 bp, synthetic construct
  source 1..36: mol_type = other DNA
gtgagcggcttaaatacggacagccttgctgctctg

SEQ ID NO: 41588 - DNA, 54 bp, synthetic construct
  source 1..54: mol_type = other DNA
gacctcgtgatcctgctgggcgcctcccgggtcagctcttactgccttaactac

SEQ ID NO: 41589 - DNA, 36 bp, synthetic construct
  source 1..36: mol_type = other DNA
atcaccacaagcggcgtggacgagattgcttccttc

SEQ ID NO: 41590 - DNA, 66 bp, synthetic construct
  source 1..66: mol_type = other DNA
catccgctatgcgaacttttcaactttcaaactggaaatctcaccctgatcaacaggagctctgag

SEQ ID NO: 41591 - DNA, 33 bp, synthetic construct
  source 1..33: mol_type = other DNA
gttgctggcctcgggcctgaacctctggccgcc

SEQ ID NO: 41592 - DNA, 45 bp, synthetic construct
  source 1..45: mol_type = other DNA
ctgaacatgatgggcgccagctccgtgatcaaatacgcaatggac

SEQ ID NO: 41593 - DNA, 33 bp, synthetic construct
  source 1..33: mol_type = other DNA
actatcgtatccggtcccatttctgtagctgtg

SEQ ID NO: 41594 - DNA, 63 bp, synthetic construct
  source 1..63: mol_type = other DNA
cagatcgctttcatcttctcttattctgaaaacagcgcccaactggagcctctgatcgcatct

SEQ ID NO: 41595 - DNA, 36 bp, synthetic construct
  source 1..36: mol_type = other DNA
ccacttatttctggcgaactcaacctgtccattgag

SEQ ID NO: 41596 - DNA, 33 bp, synthetic construct
  source 1..33: mol_type = other DNA
cacctgcaatatgttttgtcatatgactacgga

SEQ ID NO: 41597 - DNA, 51 bp, synthetic construct
  source 1..51: mol_type = other DNA
ataggcaaccaagaaatcggagggaacaatattcctgaactgatcctttcc

SEQ ID NO: 41598 - DNA, 36 bp, synthetic construct
  source 1..36: mol_type = other DNA
gtgagtggactcggtgccgacgcattagccggtgcc

SEQ ID NO: 41599 - DNA, 54 bp, synthetic construct
  source 1..54: mol_type = other DNA
aaggatatcctgctggccatgggcgccggcgccaccattgactatgctatggac

SEQ ID NO: 41600 - DNA, 36 bp, synthetic construct
  source 1..36: mol_type = other DNA
gtggttgtggccagcactgatgcggtcgccgtctac

SEQ ID NO: 41601 - DNA, 63 bp, synthetic construct
  source 1..63: mol_type = other DNA
cagattgtatccatcttcgcctacgctgggacctccacacgactcgagccacaactggtagca

SEQ ID NO: 41602 - DNA, 33 bp, synthetic construct
  source 1..33: mol_type = other DNA
gtgagcggcctgggggctgacgcattggccggc

SEQ ID NO: 41603 - DNA, 48 bp, synthetic construct
  source 1..48: mol_type = other DNA
ctgaacgtgatgggcgctgggcagaccatcggatatgctacggaatac

SEQ ID NO: 41604 - DNA, 36 bp, synthetic construct
  source 1..36: mol_type = other DNA
gtatacgtcggaagcaccgactcggtcgctgtatac

SEQ ID NO: 41605 - DNA, 69 bp, synthetic construct
  source 1..69: mol_type = other DNA
ggggacatcgcctccatcttcgcttctagcggcagctctgcacggatcgctcccgagctgacttccttc

SEQ ID NO: 41606 - DNA, 33 bp, synthetic construct
  source 1..33: mol_type = other DNA
gtggctggcctgggcgcagacgctcttgctgcg

SEQ ID NO: 41607 - DNA, 48 bp, synthetic construct
  source 1..48: mol_type = other DNA
ctcaaggccatgggggctggcgacaccatccaatatgcgcttgattac

SEQ ID NO: 41608 - DNA, 36 bp, synthetic construct
  source 1..36: mol_type = other DNA
gtcatcgcaagcggaacaacggctgtagctgtgtac

SEQ ID NO: 41609 - DNA, 60 bp, synthetic construct
  source 1..60: mol_type = other DNA
attgccgctctgttctcttacacgtcagctagcgtggaactcgctcctgagatcgctaag

SEQ ID NO: 41610 - DNA, 36 bp, synthetic construct
  source 1..36: mol_type = other DNA
gtgagtggcctcggagctgacggcgccgctggcctc

SEQ ID NO: 41611 - DNA, 45 bp, synthetic construct
  source 1..45: mol_type = other DNA
ctcatcctgatgggcgttggccggaccattaactacgcaatggac

SEQ ID NO: 41612 - DNA, 36 bp, synthetic construct
  source 1..36: mol_type = other DNA
gcctacgtcggatccaccgatagcgtcgctgtgtac

SEQ ID NO: 41613 - DNA, 69 bp, synthetic construct
  source 1..69: mol_type = other DNA
cccgagatcaccaccatattctcttactccgccgcctcggttaggatagctcctgagctgacaagtttt

SEQ ID NO: 41614 - DNA, 33 bp, synthetic construct
  source 1..33: mol_type = other DNA
gtagcaggactgggacaggccgctattgctggg

SEQ ID NO: 41615 - DNA, 57 bp, synthetic construct
  source 1..57: mol_type = other DNA
gaacctctgctccgggcctacggagctagcggccaagcacttgtggagggactgaag

SEQ ID NO: 41616 - DNA, 36 bp, synthetic construct
  source 1..36: mol_type = other DNA
agcgctatcggaggcgaatacggaattgcagcattc

SEQ ID NO: 41617 - DNA, 63 bp, synthetic construct
  source 1..63: mol_type = other DNA
ctggccctgatcttcgcttacacccctgatacggcacctctcatccccgagatcactaacttc

SEQ ID NO: 41618 - DNA, 36 bp, synthetic construct
  source 1..36: mol_type = other DNA
cccagcatcgccgctgagttccacatgtccaacatc

SEQ ID NO: 41619 - DNA, 36 bp, synthetic construct
  source 1..36: mol_type = other DNA
taccatctccaatatatcaagggactcgactctcag

SEQ ID NO: 41620 - DNA, 54 bp, synthetic construct
  source 1..54: mol_type = other DNA
gtcatgggcgacgtgcctatcgtcgaggaatattaccctctgctgatttcctcc

SEQ ID NO: 41621 - DNA, 30 bp, synthetic construct
  source 1..30: mol_type = other DNA
gctggactgggacctgaacctcttgcggcc

SEQ ID NO: 41622 - DNA, 51 bp, synthetic construct
  source 1..51: mol_type = other DNA
ctgctgattatgatgggagctgaatcagtgatcggatatgccaccgagtac

SEQ ID NO: 41623 - DNA, 30 bp, synthetic construct
  source 1..30: mol_type = other DNA
accatcgtgagcggccccgtggccgtggcc

SEQ ID NO: 41624 - DNA, 63 bp, synthetic construct
  source 1..63: mol_type = other DNA
cagatcgccttcatattttcatatagcgagaacagcgcccagctggcacaagctatcgccggt

SEQ ID NO: 41625 - DNA, 39 bp, synthetic construct
  source 1..39: mol_type = other DNA
gtgagtggcctgggtgccgtgtcatcaagtgcagttgcc

SEQ ID NO: 41626 - DNA, 54 bp, synthetic construct
  source 1..54: mol_type = other DNA
cggcccctgatcctgatcatgggcgccgaatccattgtggacgagtgcctgctc

SEQ ID NO: 41627 - DNA, 63 bp, synthetic construct
  source 1..63: mol_type = other DNA
gaacccctcatatccatattgacatacgaggatagcatgagggagctcaggcctcagttcgtg

SEQ ID NO: 41628 - DNA, 36 bp, synthetic construct
  source 1..36: mol_type = other DNA
cccagcatcgctaaggccttcggcatgaacaatgtg

SEQ ID NO: 41629 - DNA, 36 bp, synthetic construct
  source 1..36: mol_type = other DNA
taccatttacaatacattatgggcatgaactcacag

SEQ ID NO: 41630 - DNA, 54 bp, synthetic construct
  source 1..54: mol_type = other DNA
attatgggcaacgtggccatcgagccccagtattaccctctgctgctccaatct

SEQ ID NO: 41631 - DNA, 36 bp, synthetic construct
  source 1..36: mol_type = other DNA
gtggctggcctgggatcagaccctcctgctctggcc

SEQ ID NO: 41632 - DNA, 54 bp, synthetic construct
  source 1..54: mol_type = other DNA
cagatcctcaccattatgggcgctggctctgtgctgacatacgccaagccttat

SEQ ID NO: 41633 - DNA, 33 bp, synthetic construct
  source 1..33: mol_type = other DNA
atcaccgtggcaaatacaaccgtcgtggccgcg

SEQ ID NO: 41634 - DNA, 66 bp, synthetic construct
  source 1..66: mol_type = other DNA
caggtggcgttcatctttagttatagttcaacctctgagaatctcggtaacctgatcaccgagctt

SEQ ID NO: 41635 - DNA, 36 bp, synthetic construct
  source 1..36: mol_type = other DNA
gtgagtggactgggtgcagacgctgcggcattgggg

SEQ ID NO: 41636 - DNA, 48 bp, synthetic construct
  source 1..48: mol_type = other DNA
ctgaacgctatgggcgtcggccagaccatcagctatgcaacggactat

SEQ ID NO: 41637 - DNA, 36 bp, synthetic construct
  source 1..36: mol_type = other DNA
gccttcctgtcttcgacggattcagttgctgtgtac

SEQ ID NO: 41638 - DNA, 69 bp, synthetic construct
  source 1..69: mol_type = other DNA
ggcgacatcgcttccgtttttgcatcttccgggagctcggttcggattctgggagagctgaccagcttt

SEQ ID NO: 41639 - DNA, 36 bp, synthetic construct
  source 1..36: mol_type = other DNA
gtctcagggttgggcgctgatgcactcgctggagtg

SEQ ID NO: 41640 - DNA, 51 bp, synthetic construct
  source 1..51: mol_type = other DNA
atacttaactccatgggcgctgggtctactattggctatgctactgactac

SEQ ID NO: 41641 - DNA, 36 bp, synthetic construct
  source 1..36: mol_type = other DNA
gcctacgtcggtagcacagactccgtcgctgtgtac

SEQ ID NO: 41642 - DNA, 69 bp, synthetic construct
  source 1..69: mol_type = other DNA
ggcgacattgcccacgtctttgcctctagcgggtcctcggtccgcattgctagtgaattaactagcttc

SEQ ID NO: 41643 - DNA, 36 bp, synthetic construct
  source 1..36: mol_type = other DNA
gttgcaggccttggcgctgaacctcttgctgcactg

SEQ ID NO: 41644 - DNA, 51 bp, synthetic construct
  source 1..51: mol_type = other DNA
atgttggaactgatgggcgccagctctgtcatcaactacgccatggactat

SEQ ID NO: 41645 - DNA, 36 bp, synthetic construct
  source 1..36: mol_type = other DNA
accatagtatctggtccaacgtcggttgttgtcgcc

SEQ ID NO: 41646 - DNA, 63 bp, synthetic construct
  source 1..63: mol_type = other DNA
cagattgccatcatcttttcttactcacaatccagcgccgacttggcacccctgatagcatct

SEQ ID NO: 41647 - DNA, 33 bp, synthetic construct
  source 1..33: mol_type = other DNA
gtgagcggtctcggcgctgacgcacttgctgga

SEQ ID NO: 41648 - DNA, 51 bp, synthetic construct
  source 1..51: mol_type = other DNA
atcctcaacgctatgggcgccgggcagaccattggctatgcaacagattat

SEQ ID NO: 41649 - DNA, 36 bp, synthetic construct
  source 1..36: mol_type = other DNA
gcctatgtcgggtcaaccgactccgtggctgtctat

SEQ ID NO: 41650 - DNA, 69 bp, synthetic construct
  source 1..69: mol_type = other DNA
ggggacatcgcctctgtatttacctcatccgggtctagtgcccggattgcttccgagctgacagcattc

SEQ ID NO: 41651 - DNA, 36 bp, synthetic construct
  source 1..36: mol_type = other DNA
gtgagcggactgggcgctgacgcacttgctggtatc

SEQ ID NO: 41652 - DNA, 54 bp, synthetic construct
  source 1..54: mol_type = other DNA
cccatcctgaacgccatgggcgccgggagcaccatttattatgcaacagactat

SEQ ID NO: 41653 - DNA, 39 bp, synthetic construct
  source 1..39: mol_type = other DNA
gcctacgttggtagtgcagactccgtcgctgtttactcc

SEQ ID NO: 41654 - DNA, 69 bp, synthetic construct
  source 1..69: mol_type = other DNA
ggcgacatcgctagtattttcgcaagctctgggtcctctgtccgaattgcccctgagctgacatccttt

SEQ ID NO: 41655 - DNA, 33 bp, synthetic construct
  source 1..33: mol_type = other DNA
agcggcctgaactccgacgcattggctgctctg

SEQ ID NO: 41656 - DNA, 54 bp, synthetic construct
  source 1..54: mol_type = other DNA
gacattgtgatcctgctcggggccggctccgtgtcgagttactgcctgagttac

SEQ ID NO: 41657 - DNA, 36 bp, synthetic construct
  source 1..36: mol_type = other DNA
atggtcaccgccggggtcggggaagtggctagcttc

SEQ ID NO: 41658 - DNA, 66 bp, synthetic construct
  source 1..66: mol_type = other DNA
taccccatttgcgagatcttcaacgtctatacaaccaatgtggccctggtggaacggtcctttgag

SEQ ID NO: 41659 - DNA, 39 bp, synthetic construct
  source 1..39: mol_type = other DNA
ccaacgatctcctctgacctgcacctgagcgttaaaagc

SEQ ID NO: 41660 - DNA, 30 bp, synthetic construct
  source 1..30: mol_type = other DNA
ctgcagcacgccatcggcttcgatgctcgc

SEQ ID NO: 41661 - DNA, 54 bp, synthetic construct
  source 1..54: mol_type = other DNA
gttctgggctccagtaacgccctcgagaagaacataccctcgctcatattctcc

SEQ ID NO: 41662 - DNA, 33 bp, synthetic construct
  source 1..33: mol_type = other DNA
atcaccgggttggggattaacgctattactggg

SEQ ID NO: 41663 - DNA, 51 bp, synthetic construct
  source 1..51: mol_type = other DNA
ctcgacatttatggcgggagctatctgattaacaaagaggcaatctcttac

SEQ ID NO: 41664 - DNA, 33 bp, synthetic construct
  source 1..33: mol_type = other DNA
ctcattggaggcgagctggggatcagcatctac

SEQ ID NO: 41665 - DNA, 66 bp, synthetic construct
  source 1..66: mol_type = other DNA
cagatcgccagcatcttcatgatcacaaccaactatcctcctctgactgagggcattagtcagtat

SEQ ID NO: 41666 - DNA, 36 bp, synthetic construct
  source 1..36: mol_type = other DNA
gtctctggactgggcgctgatgcactagcgggtgta

SEQ ID NO: 41667 - DNA, 51 bp, synthetic construct
  source 1..51: mol_type = other DNA
atcctcaatagcatgggagcaggcagcacaattggatatgccactgactac

SEQ ID NO: 41668 - DNA, 36 bp, synthetic construct
  source 1..36: mol_type = other DNA
gcctacgtcgggagtaccgactccgtggctgtctac

SEQ ID NO: 41669 - DNA, 69 bp, synthetic construct
  source 1..69: mol_type = other DNA
ggcgacatcgcccacgtgtttgcatcctcgggctccagtgttcggatcgcccctgaattaaccagcttc

SEQ ID NO: 41670 - DNA, 36 bp, synthetic construct
  source 1..36: mol_type = other DNA
gtcagtggcttaggtgctgacggggcggctggcttg

SEQ ID NO: 41671 - DNA, 54 bp, synthetic construct
  source 1..54: mol_type = other DNA
cccatcctgaatgccatgggcgctgggcagaccattaactatgcgacagactat

SEQ ID NO: 41672 - DNA, 36 bp, synthetic construct
  source 1..36: mol_type = other DNA
acctacgtcggctccactgactcggtggctgtgtat

SEQ ID NO: 41673 - DNA, 69 bp, synthetic construct
  source 1..69: mol_type = other DNA
ggcgacattgctgggatcttcgcctcttccggatcaagtacacgcatcctgcccgaactgaccagtttt

SEQ ID NO: 41674 - DNA, 30 bp, synthetic construct
  source 1..30: mol_type = other DNA
gctggcttggggccagatcctcttgccgca

SEQ ID NO: 41675 - DNA, 48 bp, synthetic construct
  source 1..48: mol_type = other DNA
ctgatcatgatgggcgcctcctctgtgctgagctacgctatggagtac

SEQ ID NO: 41676 - DNA, 33 bp, synthetic construct
  source 1..33: mol_type = other DNA
actatcgtatctgggcctaccgccgtcgctgtg

SEQ ID NO: 41677 - DNA, 63 bp, synthetic construct
  source 1..63: mol_type = other DNA
caaatcgcctttatcttctcgtatagcgaatcgtcagcggagctggcccctctgattgcttcc

SEQ ID NO: 41678 - DNA, 36 bp, synthetic construct
  source 1..36: mol_type = other DNA
cctacaatctcttctgatctgagcttagatgttgag

SEQ ID NO: 41679 - DNA, 54 bp, synthetic construct
  source 1..54: mol_type = other DNA
attctgggcacttccaacaccctcgagtccaatatccccctgttcatcacatcc

SEQ ID NO: 41680 - DNA, 36 bp, synthetic construct
  source 1..36: mol_type = other DNA
gtgagcgggttgggtgctgacggtcttgcactcgcc

SEQ ID NO: 41681 - DNA, 51 bp, synthetic construct
  source 1..51: mol_type = other DNA
atcctcaaagctatgggagccggacagacaattggctatgccacggactat

SEQ ID NO: 41682 - DNA, 36 bp, synthetic construct
  source 1..36: mol_type = other DNA
gcctatgtcggttccacggactcagtggctgtctac

SEQ ID NO: 41683 - DNA, 69 bp, synthetic construct
  source 1..69: mol_type = other DNA
ggggacattgcctccgtgttcgcttctagcggcagcagtgtccggatcgcctctgagctgacctccttt

SEQ ID NO: 41684 - DNA, 36 bp, synthetic construct
  source 1..36: mol_type = other DNA
cctacaattgccgctgagttccacatgaacaacatc

SEQ ID NO: 41685 - DNA, 36 bp, synthetic construct
  source 1..36: mol_type = other DNA
taccatctacaatacatcaagggcatggactctcag

SEQ ID NO: 41686 - DNA, 54 bp, synthetic construct
  source 1..54: mol_type = other DNA
gtgatgggcgacgtccccatcgtggagcagtactaccccctgctcatttcaagc

SEQ ID NO: 41687 - DNA, 30 bp, synthetic construct
  source 1..30: mol_type = other DNA
gcaggtctgggtgctgaaccacttgctgcc

SEQ ID NO: 41688 - DNA, 48 bp, synthetic construct
  source 1..48: mol_type = other DNA
ctgaacatgatgggggccggaagcgtgatcggctacgctatggactac

SEQ ID NO: 41689 - DNA, 33 bp, synthetic construct
  source 1..33: mol_type = other DNA
acgatcgtgtctggcccggtagccgttgcggtc

SEQ ID NO: 41690 - DNA, 63 bp, synthetic construct
  source 1..63: mol_type = other DNA
cagatcgcttttatctttagttatagcaagtctagtgccgacctggcccctatgattgcatca

SEQ ID NO: 41691 - DNA, 39 bp, synthetic construct
  source 1..39: mol_type = other DNA
tccgagaccttcgcggacagatacggcgtttctcctagc

SEQ ID NO: 41692 - DNA, 45 bp, synthetic construct
  source 1..45: mol_type = other DNA
ggctccttctataccaacgtctattcttatggcgaacatgatgct

SEQ ID NO: 41693 - DNA, 36 bp, synthetic construct
  source 1..36: mol_type = other DNA
gtttcaggcctcggagccgatgccctaggaggcgtg

SEQ ID NO: 41694 - DNA, 54 bp, synthetic construct
  source 1..54: mol_type = other DNA
cccatcctgaacgtgatgggcgccggccacaccattgaatacgcaatggactac

SEQ ID NO: 41695 - DNA, 36 bp, synthetic construct
  source 1..36: mol_type = other DNA
accgtggtcgggagtacagactccgtggccgtttac

SEQ ID NO: 41696 - DNA, 69 bp, synthetic construct
  source 1..69: mol_type = other DNA
gccgacattacatctatcttcacgtccgctggctcgtcggttcgtatagctagtcagctgacttccttc

SEQ ID NO: 41697 - DNA, 225 bp, synthetic construct
  source 1..225: mol_type = other DNA
caaatcgtgtcaacggtcaacgacctgatcaataacattaacgatcagatcgtcggagttctggactgggctgacaaaatcaccggcggcagatttcatcgccaactgagtagtgccaaggaggataagaacatcacgaatgcactgaactccgcactcacctatgtccaagattacctccatcttgggagcaacgacgacgtagtcaatttaacgacctcaacc

SEQ ID NO: 41698 - DNA, 33 bp, synthetic construct
  source 1..33: mol_type = other DNA
gtggctggccttggcaccgaacctttggccgca

SEQ ID NO: 41699 - DNA, 48 bp, synthetic construct
  source 1..48: mol_type = other DNA
ctgaagctcatgggcgctgagtccgtgctgagctacgccatggactat

SEQ ID NO: 41700 - DNA, 33 bp, synthetic construct
  source 1..33: mol_type = other DNA
accatcgtgagcggccccaccgccgtggccgtg

SEQ ID NO: 41701 - DNA, 63 bp, synthetic construct
  source 1..63: mol_type = other DNA
cagatcgcctttatcttctcctactccgagggaagcgcccaactcgagcctctgatcgcttca

SEQ ID NO: 41702 - DNA, 33 bp, synthetic construct
  source 1..33: mol_type = other DNA
gtatccgggctgggagcagatgccctgtccggc

SEQ ID NO: 41703 - DNA, 54 bp, synthetic construct
  source 1..54: mol_type = other DNA
cccattctgaacgccatgggagccggccagacaatcggttacgctactgactat

SEQ ID NO: 41704 - DNA, 36 bp, synthetic construct
  source 1..36: mol_type = other DNA
acctttgtcgggtccacggattcagtggcagtctac

SEQ ID NO: 41705 - DNA, 69 bp, synthetic construct
  source 1..69: mol_type = other DNA
agcgacatcgcatccatttttacatcctcacccggctctgctcggatcgccagcgagctgacatcattt

SEQ ID NO: 41706 - DNA, 33 bp, synthetic construct
  source 1..33: mol_type = other DNA
gtgagcggccttggggctgacgcattggccggc

SEQ ID NO: 41707 - DNA, 48 bp, synthetic construct
  source 1..48: mol_type = other DNA
ctgaacaccatgggggccggcaagaccatcggctatgctactgactac

SEQ ID NO: 41708 - DNA, 36 bp, synthetic construct
  source 1..36: mol_type = other DNA
gccttcgtcggttcgacggactccgtcgctgtgtac

SEQ ID NO: 41709 - DNA, 69 bp, synthetic construct
  source 1..69: mol_type = other DNA
ggggacatcacctctgttttcgcgagcaatgggagctcagtccggattgctcccgagctgacaagtttc

SEQ ID NO: 41710 - DNA, 36 bp, synthetic construct
  source 1..36: mol_type = other DNA
cccgacattgccatcgaactgaacttctctgctgag

SEQ ID NO: 41711 - DNA, 33 bp, synthetic construct
  source 1..33: mol_type = other DNA
ctgcacctccaatacattctggacgtggaggaa

SEQ ID NO: 41712 - DNA, 57 bp, synthetic construct
  source 1..57: mol_type = other DNA
atcggcgaccatcagctggggcccgagtacatcgatcacctgagcatccaaagtttt

SEQ ID NO: 41713 - DNA, 33 bp, synthetic construct
  source 1..33: mol_type = other DNA
gctggactgggcgctgatgctgcggcacctctt

SEQ ID NO: 41714 - DNA, 48 bp, synthetic construct
  source 1..48: mol_type = other DNA
atgctgatcatgatgggcgccagctccgtgattaactacgctatggac

SEQ ID NO: 41715 - DNA, 33 bp, synthetic construct
  source 1..33: mol_type = other DNA
accattgtctcgggtccagtgtcggtcgctgtg

SEQ ID NO: 41716 - DNA, 63 bp, synthetic construct
  source 1..63: mol_type = other DNA
cagattgccctggccttctcttactccgagagctcgtcgcaactggcacctctgatcgctaac

SEQ ID NO: 41717 - DNA, 36 bp, synthetic construct
  source 1..36: mol_type = other DNA
gtgagcggcctgggtgcagatgcccttggggccgca

SEQ ID NO: 41718 - DNA, 51 bp, synthetic construct
  source 1..51: mol_type = other DNA
atcatgaatgccatgggggctggtcagacaattggatatgccaccgactac

SEQ ID NO: 41719 - DNA, 36 bp, synthetic construct
  source 1..36: mol_type = other DNA
acctttgttggtagtacagactcggtggccgtctat

SEQ ID NO: 41720 - DNA, 69 bp, synthetic construct
  source 1..69: mol_type = other DNA
ggcgacatcgcaagcgtgttcgcctctggaggcagctcatcccggattgcttccgagctgaccagcttc

SEQ ID NO: 41721 - DNA, 81 bp, synthetic construct
  source 1..81: mol_type = other DNA
atccccctatacggactatcccctactgcggtcgaccagttcgcccaacttcgggccgtaatggccggctcatttggctcc

SEQ ID NO: 41722 - DNA, 30 bp, synthetic construct
  source 1..30: mol_type = other DNA
ggaagcctggtgcccatcgaccagtcctac

SEQ ID NO: 41723 - DNA, 102 bp, synthetic construct
  source 1..102: mol_type = other DNA
gggacctttaatttccttcccgctagtgccgcctctacatccgcatccgggattctccctgccttcatccaaagtatcttcggcggttctcctaacttcact

SEQ ID NO: 41724 - DNA, 108 bp, synthetic construct
  source 1..108: mol_type = other DNA
cagaagatcgggttccccatcttcggcgaggtctcaggtggacgggctatccgaggcctcgccctgtggctgaccacccctaactctctgtccattctcttcacaaac

SEQ ID NO: 41725 - DNA, 33 bp, synthetic construct
  source 1..33: mol_type = other DNA
gctggactgggacctcaccctctagccgcaccg

SEQ ID NO: 41726 - DNA, 45 bp, synthetic construct
  source 1..45: mol_type = other DNA
ctcctgctgatgggggccggcgaggtcataaacgaaaccatggcc

SEQ ID NO: 41727 - DNA, 36 bp, synthetic construct
  source 1..36: mol_type = other DNA
acaatcctgagcggtaccattgcggttgccgcgtac

SEQ ID NO: 41728 - DNA, 60 bp, synthetic construct
  source 1..60: mol_type = other DNA
ctgtccttcatcttttcctactctagcgacagtagcattctcgctcccaaggtagttgag

SEQ ID NO: 41729 - DNA, 39 bp, synthetic construct
  source 1..39: mol_type = other DNA
cccgacatcgctgccgagctgaacttctttgccgagagt

SEQ ID NO: 41730 - DNA, 33 bp, synthetic construct
  source 1..33: mol_type = other DNA
ctgcatttacaatatgtactgaacgtcgaagag

SEQ ID NO: 41731 - DNA, 54 bp, synthetic construct
  source 1..54: mol_type = other DNA
atcggcaaccagcagctggggcccgatcacattgaccatctgttcgtgcaatcc

SEQ ID NO: 41732 - DNA, 33 bp, synthetic construct
  source 1..33: mol_type = other DNA
gtcgctggactgggcacagaaccacttgccgct

SEQ ID NO: 41733 - DNA, 45 bp, synthetic construct
  source 1..45: mol_type = other DNA
ctggagctgatgggcgccgaaaccgtgctcaactacgctatggac

SEQ ID NO: 41734 - DNA, 33 bp, synthetic construct
  source 1..33: mol_type = other DNA
acaatagtcagcggaccaattgcggtggctgtt

SEQ ID NO: 41735 - DNA, 63 bp, synthetic construct
  source 1..63: mol_type = other DNA
cagatcgccttcatattctcgtactccgagggttctgcgcaattagagcccttaatttcaagt

SEQ ID NO: 41736 - DNA, 165 bp, synthetic construct
  source 1..165: mol_type = other DNA
atcggcggcatttccaacgctgtggacacctatgcaccagaccacagcggggatggacagttccaccaagatatatacgactactttcaaaatgttggcaacatcaacgaaattgagtcccagggctctgccgtcgtgacaattgtggacgagatcttccaagac

SEQ ID NO: 41737 - DNA, 33 bp, synthetic construct
  source 1..33: mol_type = other DNA
gtggcagggctgggagcagatgcattggcgggc

SEQ ID NO: 41738 - DNA, 54 bp, synthetic construct
  source 1..54: mol_type = other DNA
cctgtgctgattatcatgggcgccgcacacaccctgccttacgctcatgagtat

SEQ ID NO: 41739 - DNA, 39 bp, synthetic construct
  source 1..39: mol_type = other DNA
ctggccattgtcgctggtaccgacgcggtagctgtgtac

SEQ ID NO: 41740 - DNA, 69 bp, synthetic construct
  source 1..69: mol_type = other DNA
ccccagatcgtctatgtgttttcatattccgataactctgcccacttggctgcccctgcgatgcccgcc

SEQ ID NO: 41741 - DNA, 30 bp, synthetic construct
  source 1..30: mol_type = other DNA
gctggactgggccctgatcctttggccgca

SEQ ID NO: 41742 - DNA, 48 bp, synthetic construct
  source 1..48: mol_type = other DNA
ctgatgatgatgggagcatcatcggtcatcgactacgccatggagtat

SEQ ID NO: 41743 - DNA, 36 bp, synthetic construct
  source 1..36: mol_type = other DNA
accatcgtgtctggaccaacatccgtgtctgtagct

SEQ ID NO: 41744 - DNA, 63 bp, synthetic construct
  source 1..63: mol_type = other DNA
atcgccctgattttctcctatagccaatcgtccgccaagctggcgccaggaatcctgatcgca

SEQ ID NO: 41745 - DNA, 81 bp, synthetic construct
  source 1..81: mol_type = other DNA
atccctctttacgggctgtcgccggccgctgtggatcagtttgcgcaactacgtgccgtcatggccggcagcttcgggagc

SEQ ID NO: 41746 - DNA, 108 bp, synthetic construct
  source 1..108: mol_type = other DNA
actggcaccttcaattttttacctgcgagtgctgcatcgacgtccgctagtggcatacttcccgcattcatccaatcgattatcggcggagctcccaacttccctatt

SEQ ID NO: 41747 - DNA, 111 bp, synthetic construct
  source 1..111: mol_type = other DNA
ttccagaagatcgggttccccatcctcggggaagtttcagggggccgaccaatatccggccttgcactgtggctgacaacccctaactctctctccgttctcttcaccaac

SEQ ID NO: 41748 - DNA, 30 bp, synthetic construct
  source 1..30: mol_type = other DNA
gctggccttggggcagaacctcttgccgcc

SEQ ID NO: 41749 - DNA, 48 bp, synthetic construct
  source 1..48: mol_type = other DNA
ctggtgctgatgggcgccagctccgtcctcgactacgctatggagtat

SEQ ID NO: 41750 - DNA, 33 bp, synthetic construct
  source 1..33: mol_type = other DNA
acaattgtctctggccctacttctgttgccgtc

SEQ ID NO: 41751 - DNA, 66 bp, synthetic construct
  source 1..66: mol_type = other DNA
cagatcgcgctgattttctcctactccgagaactccgctagactcgcgcctttgcttgctataggc

SEQ ID NO: 41752 - DNA, 33 bp, synthetic construct
  source 1..33: mol_type = other DNA
gtgagtggacttggggctgacgcacttgccggc

SEQ ID NO: 41753 - DNA, 51 bp, synthetic construct
  source 1..51: mol_type = other DNA
attttgaacgcgatgggggctggacagactatcggctacgcaactgattat

SEQ ID NO: 41754 - DNA, 36 bp, synthetic construct
  source 1..36: mol_type = other DNA
gcctacgttgggagcactgattccgtggctgtctat

SEQ ID NO: 41755 - DNA, 69 bp, synthetic construct
  source 1..69: mol_type = other DNA
ggggacatagcgtctgtttttgcctctactggctcctctgttcggatcgcacccgagctgacagctttt

SEQ ID NO: 41756 - DNA, 36 bp, synthetic construct
  source 1..36: mol_type = other DNA
attagcggcctgggtgcagatgcgctcgctggcatt

SEQ ID NO: 41757 - DNA, 54 bp, synthetic construct
  source 1..54: mol_type = other DNA
accattctgaagaccatgggcgccgggcagacaatcagctacgctatggactac

SEQ ID NO: 41758 - DNA, 36 bp, synthetic construct
  source 1..36: mol_type = other DNA
accttcgtcgggagcacagactccgtggctgtctac

SEQ ID NO: 41759 - DNA, 69 bp, synthetic construct
  source 1..69: mol_type = other DNA
ggcgacattgcatcgatattcacctccaccgggactagcgttcgaattgctcccgagctgacaagtttc

SEQ ID NO: 41760 - DNA, 33 bp, synthetic construct
  source 1..33: mol_type = other DNA
ctggaaccagctgcggtcggatatagcttctcc

SEQ ID NO: 41761 - DNA, 57 bp, synthetic construct
  source 1..57: mol_type = other DNA
cggattatcgtgcacggggccgatagtgctctgggacccggcgattttaccgacccg

SEQ ID NO: 41762 - DNA, 123 bp, synthetic construct
  source 1..123: mol_type = other DNA
gccggctttacttccaacgcccacacgctgcccgacgcatctctggtctccgggatcactgctcctgatctgggactcttcgccaaagttttcaccggcttcgagatgttccctgcaaccctg

SEQ ID NO: 41763 - DNA, 30 bp, synthetic construct
  source 1..30: mol_type = other DNA
gcaggactgggccctgatcctttggctgcc

SEQ ID NO: 41764 - DNA, 48 bp, synthetic construct
  source 1..48: mol_type = other DNA
ctgatgctcatgggcgcaagctctgttatcggctacgctacggactac

SEQ ID NO: 41765 - DNA, 30 bp, synthetic construct
  source 1..30: mol_type = other DNA
acgatagtcagcggaccagtggctgttgcc

SEQ ID NO: 41766 - DNA, 63 bp, synthetic construct
  source 1..63: mol_type = other DNA
cagatcgccgtaatcttttcgtattctgagtcaagcgcgaagttggcaccagccattgctgga

SEQ ID NO: 41767 - DNA, 36 bp, synthetic construct
  source 1..36: mol_type = other DNA
gtgtctgggctgggagccgatgcggcagcaggcctc

SEQ ID NO: 41768 - DNA, 54 bp, synthetic construct
  source 1..54: mol_type = other DNA
cccattctgaacgtgatgggcgctgggcagaccatcaattatgcgaccgattac

SEQ ID NO: 41769 - DNA, 36 bp, synthetic construct
  source 1..36: mol_type = other DNA
gtctatgttggaagcaccgactcggtcgcggtttat

SEQ ID NO: 41770 - DNA, 69 bp, synthetic construct
  source 1..69: mol_type = other DNA
tccgatattgctagtgtattcacgtcgagtggctctagcgctcggatctctgccgagctgacaagtttc

SEQ ID NO: 41771 - DNA, 30 bp, synthetic construct
  source 1..30: mol_type = other DNA
tcaggcgtcggtccaaatgcacttgccgct

SEQ ID NO: 41772 - DNA, 51 bp, synthetic construct
  source 1..51: mol_type = other DNA
atgtttctcatgatgggcgctgagaaggtcatcgaagagacgatggcctac

SEQ ID NO: 41773 - DNA, 33 bp, synthetic construct
  source 1..33: mol_type = other DNA
tccctgcttagcgggacggtagccgttgcggcg

SEQ ID NO: 41774 - DNA, 60 bp, synthetic construct
  source 1..60: mol_type = other DNA
ctgtcatggatgttctccttctcacaaaattctagtatcctggctcctcctattgctgac

SEQ ID NO: 41775 - DNA, 36 bp, synthetic construct
  source 1..36: mol_type = other DNA
gttgccggactgggtgcagaaccattggctgctctg

SEQ ID NO: 41776 - DNA, 54 bp, synthetic construct
  source 1..54: mol_type = other DNA
cccatgttcaatatgatgggggcgtcgtcggttatcaactacgccatggactac

SEQ ID NO: 41777 - DNA, 33 bp, synthetic construct
  source 1..33: mol_type = other DNA
acaattgtctctggtcccgtttctgtggctgtg

SEQ ID NO: 41778 - DNA, 63 bp, synthetic construct
  source 1..63: mol_type = other DNA
cagatcgcatttatcttctcctactccgaaaatagcgcacagttggagcctttgattgctagt

SEQ ID NO: 41779 - DNA, 33 bp, synthetic construct
  source 1..33: mol_type = other DNA
gtgagcggcctaggtgctgatgcacttgccgga

SEQ ID NO: 41780 - DNA, 48 bp, synthetic construct
  source 1..48: mol_type = other DNA
ctgaatgccatgggagccggcgagaccatcggttacgcaaccaactac

SEQ ID NO: 41781 - DNA, 36 bp, synthetic construct
  source 1..36: mol_type = other DNA
gcctacctgggtagtacagactcagttgctgtctat

SEQ ID NO: 41782 - DNA, 69 bp, synthetic construct
  source 1..69: mol_type = other DNA
ggggacattgctctgatatttgcatcatcgggctccagcgtcaggatcgccggagagctcactagtttt

SEQ ID NO: 41783 - DNA, 36 bp, synthetic construct
  source 1..36: mol_type = other DNA
cccagtatagcgagcgagttccacatgtccaacatc

SEQ ID NO: 41784 - DNA, 36 bp, synthetic construct
  source 1..36: mol_type = other DNA
tatcacctacaatatataaagggcttcgactcacag

SEQ ID NO: 41785 - DNA, 54 bp, synthetic construct
  source 1..54: mol_type = other DNA
gtcatgggcaacgtgcccattagcgaagaagtgtaccctcttctaatttctagt

SEQ ID NO: 41786 - DNA, 36 bp, synthetic construct
  source 1..36: mol_type = other DNA
gttgccggcataaactctgacgcacttgctgctctg

SEQ ID NO: 41787 - DNA, 54 bp, synthetic construct
  source 1..54: mol_type = other DNA
gacctcattgtgctgctgggcgccagcggggtcatcacctattgcctgtcctac

SEQ ID NO: 41788 - DNA, 33 bp, synthetic construct
  source 1..33: mol_type = other DNA
atgatcaccgctggcgtcaacgaggtggcttca

SEQ ID NO: 41789 - DNA, 66 bp, synthetic construct
  source 1..66: mol_type = other DNA
caccagatctgcggcatgttcaattactcttccggcaatctggagctggtcaaccgagcagctgaa

SEQ ID NO: 41790 - DNA, 45 bp, synthetic construct
  source 1..45: mol_type = other DNA
acatacaacatgctgaccttcatccccaaccctaccattgttcac

SEQ ID NO: 41791 - DNA, 36 bp, synthetic construct
  source 1..36: mol_type = other DNA
gttgccggactgggcgctgaattggcggcagccccc

SEQ ID NO: 41792 - DNA, 57 bp, synthetic construct
  source 1..57: mol_type = other DNA
gagccactgctgaagattatgggggcagtctcggttatcgactacgctatggattat

SEQ ID NO: 41793 - DNA, 33 bp, synthetic construct
  source 1..33: mol_type = other DNA
accatagttagtggaccagtagcagttgctgtg

SEQ ID NO: 41794 - DNA, 63 bp, synthetic construct
  source 1..63: mol_type = other DNA
caaatcgcctttatctttagctactccgagaatagcgcacagcttgaacccctgattgcaagc

SEQ ID NO: 41795 - DNA, 33 bp, synthetic construct
  source 1..33: mol_type = other DNA
gtgagtgcccttggcgccgatgcacttgctggg

SEQ ID NO: 41796 - DNA, 51 bp, synthetic construct
  source 1..51: mol_type = other DNA
aagatcttgctcattatgggcgccggacagactatcgactttgccatggat

SEQ ID NO: 41797 - DNA, 36 bp, synthetic construct
  source 1..36: mol_type = other DNA
acattcattagtggtacagactccgtcgctgtgtac

SEQ ID NO: 41798 - DNA, 66 bp, synthetic construct
  source 1..66: mol_type = other DNA
cagatcgcctccctctttagctattctgcaaacagcgcacggctgagtggccagttgaccgacttc

SEQ ID NO: 41799 - DNA, 33 bp, synthetic construct
  source 1..33: mol_type = other DNA
gtgtccggactgggtgcagatgcacttgccggg

SEQ ID NO: 41800 - DNA, 51 bp, synthetic construct
  source 1..51: mol_type = other DNA
atccttaacgcaatgggagctgggaagaccatcggttacgcgacagactac

SEQ ID NO: 41801 - DNA, 36 bp, synthetic construct
  source 1..36: mol_type = other DNA
accttcgtcggatcaacagactccgtcgctgtgtac

SEQ ID NO: 41802 - DNA, 69 bp, synthetic construct
  source 1..69: mol_type = other DNA
ggcgacatcgctagcgtctttgcctcctccgggtcttcggttaggatcgcacccgagctgaccagtttc

SEQ ID NO: 41803 - DNA, 30 bp, synthetic construct
  source 1..30: mol_type = other DNA
agcggcttgggtccagatgctcttgccgca

SEQ ID NO: 41804 - DNA, 48 bp, synthetic construct
  source 1..48: mol_type = other DNA
ctgctcgtcatgggggccggcgagatcattgacctcaccatgacatac

SEQ ID NO: 41805 - DNA, 36 bp, synthetic construct
  source 1..36: mol_type = other DNA
acaatgctgtctggcaccgtggcggtggcggcttac

SEQ ID NO: 41806 - DNA, 66 bp, synthetic construct
  source 1..66: mol_type = other DNA
gagcccctgagttacattttctcttattctgccgacgcggctgtactgagcgcgcgcgtcatcgac

SEQ ID NO: 41807 - DNA, 36 bp, synthetic construct
  source 1..36: mol_type = other DNA
gtggccggcatcaacgccaatgctttagccgccctc

SEQ ID NO: 41808 - DNA, 54 bp, synthetic construct
  source 1..54: mol_type = other DNA
gaccttgtcatcctgctcggggccggctccgttagcacttattgcctgtcttac

SEQ ID NO: 41809 - DNA, 36 bp, synthetic construct
  source 1..36: mol_type = other DNA
atcgtgaccgctggagtcgccgaagtggctgcattc

SEQ ID NO: 41810 - DNA, 66 bp, synthetic construct
  source 1..66: mol_type = other DNA
taccccttatgtgatttattcaatttccaagctggaaaccctgctctggtcaaccgtagcgcagaa

SEQ ID NO: 41811 - DNA, 36 bp, synthetic construct
  source 1..36: mol_type = other DNA
gtcgctggactgggcgccgaaccactagcggccgcg

SEQ ID NO: 41812 - DNA, 54 bp, synthetic construct
  source 1..54: mol_type = other DNA
cctctgctgatcagcatgggcgccgcctccgtgattgactacgctatggagtat

SEQ ID NO: 41813 - DNA, 33 bp, synthetic construct
  source 1..33: mol_type = other DNA
actatagtatctggaccagtggccgtcgctgtc

SEQ ID NO: 41814 - DNA, 63 bp, synthetic construct
  source 1..63: mol_type = other DNA
caaatcgcttttatcttctcgtatagcgagaacagcgccgacctcgcccctaggatcgcttcc

SEQ ID NO: 41815 - DNA, 33 bp, synthetic construct
  source 1..33: mol_type = other DNA
gtaagtggtttgggggctgacgcacttgccggc

SEQ ID NO: 41816 - DNA, 51 bp, synthetic construct
  source 1..51: mol_type = other DNA
atccttaacgccatgggagccggctctaccatcggttatgcaaccgattac

SEQ ID NO: 41817 - DNA, 36 bp, synthetic construct
  source 1..36: mol_type = other DNA
gcctacgtcgggtccacggacagtgtcgctgtgtat

SEQ ID NO: 41818 - DNA, 69 bp, synthetic construct
  source 1..69: mol_type = other DNA
ggcgacctggctagcatctttgcaagttccgggtcaagcgtccgcatagcccacgaactgaccggattc

SEQ ID NO: 41819 - DNA, 48 bp, synthetic construct
  source 1..48: mol_type = other DNA
cccagcgaggccatccggttcgtggacaacaaggctttttcctgcatg

SEQ ID NO: 41820 - DNA, 132 bp, synthetic construct
  source 1..132: mol_type = other DNA
ggccgctgcgcgtactactgtcccacacggagcatcgaagtaataattcaagacgaaggttactgtgtcggctgcaaggtttgcgaggacgtctgccctaccggtgccctgaaagacggagagtactacgac

SEQ ID NO: 41821 - DNA, 78 bp, synthetic construct
  source 1..78: mol_type = other DNA
gacgatttcaagatcaaacggtccattaaggatgacacgctgtattctaatgtcgagggcagtatcgtgtcttgtctg

SEQ ID NO: 41822 - DNA, 126 bp, synthetic construct
  source 1..126: mol_type = other DNA
cccgttagctccctgaccgagtctgaggacaataagctgtttggctattgcgtctcttgtggaaaatgtgtcaacgagtgcaaggaggacgcccggaactttcaagttatatcttgggatggagag

SEQ ID NO: 41823 - DNA, 63 bp, synthetic construct
  source 1..63: mol_type = other DNA
gagctgtgccccgaagacgctatcaccctccaacgtggtgccattaacgtggacctggataag

SEQ ID NO: 41824 - DNA, 51 bp, synthetic construct
  source 1..51: mol_type = other DNA
attcactgcccaaaagacgccatccccaaaaccacctctgtgaaatacgaa

SEQ ID NO: 41825 - DNA, 36 bp, synthetic construct
  source 1..36: mol_type = other DNA
gtgtccggtctcggggcagatgcactaggcggcgct

SEQ ID NO: 41826 - DNA, 48 bp, synthetic construct
  source 1..48: mol_type = other DNA
ctgaacgccatgggagccggccagaccatcggttatgccgcggactac

SEQ ID NO: 41827 - DNA, 36 bp, synthetic construct
  source 1..36: mol_type = other DNA
accttcgtcgggagtaccgattcggtggctgtgtac

SEQ ID NO: 41828 - DNA, 69 bp, synthetic construct
  source 1..69: mol_type = other DNA
ggcgacatcgcctctgtctttgctagcggtggcagcagcgttcgcttaagtcaggagctctcctcattt

SEQ ID NO: 41829 - DNA, 36 bp, synthetic construct
  source 1..36: mol_type = other DNA
gtgagcggcatcaacgccgacgcattggctgatctg

SEQ ID NO: 41830 - DNA, 54 bp, synthetic construct
  source 1..54: mol_type = other DNA
gacctggttatccttcttggggccggctccgtctctacctattgcctgagctac

SEQ ID NO: 41831 - DNA, 36 bp, synthetic construct
  source 1..36: mol_type = other DNA
atcgtgaccgccggtgtcgctgaagtggcagctttc

SEQ ID NO: 41832 - DNA, 66 bp, synthetic construct
  source 1..66: mol_type = other DNA
taccccttatgcgatttattcaacatccaggctggttcccctgcactcgtatcacggtccgccgaa

SEQ ID NO: 41833 - DNA, 39 bp, synthetic construct
  source 1..39: mol_type = other DNA
ccctctatgagctccaacctgcacctggacttcgagatg

SEQ ID NO: 41834 - DNA, 33 bp, synthetic construct
  source 1..33: mol_type = other DNA
tacctgcaatacgtgctgggttatgactcaagg

SEQ ID NO: 41835 - DNA, 51 bp, synthetic construct
  source 1..51: mol_type = other DNA
tttatgggcagtgccaacacctacgacgggaacgtcagcgctttcctgctc

SEQ ID NO: 41836 - DNA, 36 bp, synthetic construct
  source 1..36: mol_type = other DNA
gtgagcggactgggcgcagatgctcttgctggagtg

SEQ ID NO: 41837 - DNA, 54 bp, synthetic construct
  source 1..54: mol_type = other DNA
cccattctggagatcatgggagccggccagacaatcggatacgcgacggactac

SEQ ID NO: 41838 - DNA, 36 bp, synthetic construct
  source 1..36: mol_type = other DNA
gcctttgttggttccaccgattccgtggctgtctac

SEQ ID NO: 41839 - DNA, 69 bp, synthetic construct
  source 1..69: mol_type = other DNA
gctgacatagcaagtatttttgcctcaagcgggtcttccgttcggatcgcaggcgaactgaccgctttc

SEQ ID NO: 41840 - DNA, 33 bp, synthetic construct
  source 1..33: mol_type = other DNA
agcggcatcaacgccgacgctttggctgcactg

SEQ ID NO: 41841 - DNA, 57 bp, synthetic construct
  source 1..57: mol_type = other DNA
gaggacatcgtggtgctgctcggcgccagcgatgtccggtcttactgcctgtcctac

SEQ ID NO: 41842 - DNA, 36 bp, synthetic construct
  source 1..36: mol_type = other DNA
atcctgactgccggagttggcgaagtcgctgcattc

SEQ ID NO: 41843 - DNA, 66 bp, synthetic construct
  source 1..66: mol_type = other DNA
taccccttatgtgaaatctttaactttcaagccgggaatcctgcactcgtgcaccgttcggctgaa

SEQ ID NO: 41844 - DNA, 39 bp, synthetic construct
  source 1..39: mol_type = other DNA
atccccagcattgccgctgaatatggaatgtccaacatc

SEQ ID NO: 41845 - DNA, 36 bp, synthetic construct
  source 1..36: mol_type = other DNA
taccatcttcaatacatcaagggattcgactcgcag

SEQ ID NO: 41846 - DNA, 57 bp, synthetic construct
  source 1..57: mol_type = other DNA
gtgatgggcaacgtccccatgatcgagcagtattaccctctgtccttaagctcgata

SEQ ID NO: 41847 - DNA, 33 bp, synthetic construct
  source 1..33: mol_type = other DNA
gtggcagggcttggcaccattagcatcgctgga

SEQ ID NO: 41848 - DNA, 48 bp, synthetic construct
  source 1..48: mol_type = other DNA
ctgaacctgtttaccgcaagtcccgaagtctacaaggaagctatcgac

SEQ ID NO: 41849 - DNA, 36 bp, synthetic construct
  source 1..36: mol_type = other DNA
aacatagttggcggcgacctgggggttagcatctac

SEQ ID NO: 41850 - DNA, 66 bp, synthetic construct
  source 1..66: mol_type = other DNA
cagatcagctacgtgttcctcctgaccaacgatgacccagctttgctacaaggtatctccacattc

SEQ ID NO: 41851 - DNA, 33 bp, synthetic construct
  source 1..33: mol_type = other DNA
gtggctggcttgggggccgatgcattggcggcc

SEQ ID NO: 41852 - DNA, 48 bp, synthetic construct
  source 1..48: mol_type = other DNA
ctcatcgccatgggagctggtagtaccctgaagtactccctggactat

SEQ ID NO: 41853 - DNA, 36 bp, synthetic construct
  source 1..36: mol_type = other DNA
gtggctgtctctgggacaaccgccgttgctgtctac

SEQ ID NO: 41854 - DNA, 69 bp, synthetic construct
  source 1..69: mol_type = other DNA
aaccagatcgcaagcgtctttagttattccgcgtcttcggccggcatggcctccgacattgccacggcc

SEQ ID NO: 41855 - DNA, 36 bp, synthetic construct
  source 1..36: mol_type = other DNA
cctacgattgccaatgagttccacatgagcaacatc

SEQ ID NO: 41856 - DNA, 36 bp, synthetic construct
  source 1..36: mol_type = other DNA
taccacctacaatacataaagggcttcgactctcag

SEQ ID NO: 41857 - DNA, 54 bp, synthetic construct
  source 1..54: mol_type = other DNA
gtgatgggcaacgtccccatcgtcgagcagtactatcctctcctgatcaactcc

SEQ ID NO: 41858 - DNA, 36 bp, synthetic construct
  source 1..36: mol_type = other DNA
tgctctggactcggtggcgaagcattggctgccctg

SEQ ID NO: 41859 - DNA, 57 bp, synthetic construct
  source 1..57: mol_type = other DNA
cccgtggtggattggatgggaagcggcggttccgtctctggcgaagcatgggagtac

SEQ ID NO: 41860 - DNA, 33 bp, synthetic construct
  source 1..33: mol_type = other DNA
gtcaaagtcggcggtcctgatggatctgctctg

SEQ ID NO: 41861 - DNA, 57 bp, synthetic construct
  source 1..57: mol_type = other DNA
ttcgccgctgttttcgcttctggggatagcgcatacctgcgggctgatcttgctagg

SEQ ID NO: 41862 - DNA, 36 bp, synthetic construct
  source 1..36: mol_type = other DNA
ccaacaatcgccagcgacttccacctaaccgctgag

SEQ ID NO: 41863 - DNA, 51 bp, synthetic construct
  source 1..51: mol_type = other DNA
ctgggcacaagtaatacgctcgaggggaacccacttctgttccttgcatcc

SEQ ID NO: 41864 - DNA, 33 bp, synthetic construct
  source 1..33: mol_type = other DNA
gtggccggcttggggacaactgccatcgccggc

SEQ ID NO: 41865 - DNA, 48 bp, synthetic construct
  source 1..48: mol_type = other DNA
ctgaacaagttcgataccacacccaaagtttacggggcagccatcgac

SEQ ID NO: 41866 - DNA, 36 bp, synthetic construct
  source 1..36: mol_type = other DNA
aacattctcggcggtgacctggccatcagcatctac

SEQ ID NO: 41867 - DNA, 66 bp, synthetic construct
  source 1..66: mol_type = other DNA
cagattgcctacgtgttcctgctcgccaataacgaccccgctctcatacaaggaatcagcaccttt

SEQ ID NO: 41868 - DNA, 30 bp, synthetic construct
  source 1..30: mol_type = other DNA
gtgggactgggacaggcagctatcgctggc

SEQ ID NO: 41869 - DNA, 51 bp, synthetic construct
  source 1..51: mol_type = other DNA
ctgattctgttgggggcctccggggcttccctgaacgagggactgaagtac

SEQ ID NO: 41870 - DNA, 30 bp, synthetic construct
  source 1..30: mol_type = other DNA
attatcggtggcgactacggagttgctgtg

SEQ ID NO: 41871 - DNA, 60 bp, synthetic construct
  source 1..60: mol_type = other DNA
ctggcatccatcctcgccttcacacccgagaccagccacctgatcggcggaattgctggc

SEQ ID NO: 41872 - DNA, 33 bp, synthetic construct
  source 1..33: mol_type = other DNA
gctggactgggcccagaggcccttcttgcatca

SEQ ID NO: 41873 - DNA, 45 bp, synthetic construct
  source 1..45: mol_type = other DNA
ctcctgatgatgggcgccggagaggttatcgactacgctttgtct

SEQ ID NO: 41874 - DNA, 36 bp, synthetic construct
  source 1..36: mol_type = other DNA
accctcctgagtggtacagtggccgtagctgcatat

SEQ ID NO: 41875 - DNA, 66 bp, synthetic construct
  source 1..66: mol_type = other DNA
gagcctctgtccttcatcttctcttactcggctagctctgctgtgctgtctgatagagtcgtagaa

SEQ ID NO: 41876 - DNA, 30 bp, synthetic construct
  source 1..30: mol_type = other DNA
atcgacggacttggcactagcgccattatc

SEQ ID NO: 41877 - DNA, 54 bp, synthetic construct
  source 1..54: mol_type = other DNA
cccatctgcctgatggccggcattcctgagtacaccaacatgatcttcgcttac

SEQ ID NO: 41878 - DNA, 33 bp, synthetic construct
  source 1..33: mol_type = other DNA
ctgcacatttatgcatccccaatagcggccttt

SEQ ID NO: 41879 - DNA, 57 bp, synthetic construct
  source 1..57: mol_type = other DNA
aaccccatcattagtatcttctcgaccgaatacgtggtcatgaatgaagaacgggtc

SEQ ID NO: 41880 - DNA, 36 bp, synthetic construct
  source 1..36: mol_type = other DNA
cccacaatcgccaccgagttccacatgagcaacatt

SEQ ID NO: 41881 - DNA, 36 bp, synthetic construct
  source 1..36: mol_type = other DNA
taccacttacaatatatagacggcttcgatagtcag

SEQ ID NO: 41882 - DNA, 54 bp, synthetic construct
  source 1..54: mol_type = other DNA
gtgatgggcaacgtccccatcgtggaggagtattaccctctcctgatgagttca

SEQ ID NO: 41883 - DNA, 36 bp, synthetic construct
  source 1..36: mol_type = other DNA
cccagcatcgctgccgagttccacatgtccaacatc

SEQ ID NO: 41884 - DNA, 36 bp, synthetic construct
  source 1..36: mol_type = other DNA
tatcacttacaatatatcaagggcttcgactctcaa

SEQ ID NO: 41885 - DNA, 54 bp, synthetic construct
  source 1..54: mol_type = other DNA
gtcatgggcgacgtgcctattatcgagcagtattaccctatgctggtgcaatcc

SEQ ID NO: 41886 - DNA, 153 bp, synthetic construct
  source 1..153: mol_type = other DNA
gattgggcctccgaaacggtgacagtttcttcaagtctcctgggcaacgctacaagcgcagactctggtactgggctggacgtggccggcaagaagttcttcaccgaaattgattcaaacggtaacactgtcgccgtggatgattggcatgtt

SEQ ID NO: 41887 - DNA, 69 bp, synthetic construct
  source 1..69: mol_type = other DNA
tgggaccggttcgggacaaccgagtatagcatcctgggcgtcaagactgcctacgatgtgtcacctgaa

SEQ ID NO: 41888 - DNA, 36 bp, synthetic construct
  source 1..36: mol_type = other DNA
gtggctggtctgggtgctgacgcgctggccgccgcc

SEQ ID NO: 41889 - DNA, 48 bp, synthetic construct
  source 1..48: mol_type = other DNA
ctggagctgatgggcgctggctccaccatcgactatgccctcaactac

SEQ ID NO: 41890 - DNA, 36 bp, synthetic construct
  source 1..36: mol_type = other DNA
gtcactgtggctgggactaccgcggttgctgtttac

SEQ ID NO: 41891 - DNA, 63 bp, synthetic construct
  source 1..63: mol_type = other DNA
cagattgccgctatgtttagctacacatccgcctctgctgagctggcgccgcaaatcgcgacc

SEQ ID NO: 41892 - DNA, 36 bp, synthetic construct
  source 1..36: mol_type = other DNA
gtctttttttctgggaccgaggacctgtccaacgtg

SEQ ID NO: 41893 - DNA, 30 bp, synthetic construct
  source 1..30: mol_type = other DNA
gtttgggatggagaccagacattggttacc

SEQ ID NO: 41894 - DNA, 54 bp, synthetic construct
  source 1..54: mol_type = other DNA
actgggctgtttttcgtgatcgacagcaatgcgctttactcccggcgtgatgtt

SEQ ID NO: 41895 - DNA, 33 bp, synthetic construct
  source 1..33: mol_type = other DNA
gtcgcagggctgggctcagacgcattggctgcc

SEQ ID NO: 41896 - DNA, 54 bp, synthetic construct
  source 1..54: mol_type = other DNA
cagctgctcgtaatgatgggggccggcgatacgatccaatacgcactcgactat

SEQ ID NO: 41897 - DNA, 36 bp, synthetic construct
  source 1..36: mol_type = other DNA
gtctgggcatcaggaaccgacgcggtggccgtgtat

SEQ ID NO: 41898 - DNA, 66 bp, synthetic construct
  source 1..66: mol_type = other DNA
cagattgccaccctcttctcctacacatctagtagcgctgctctggctcccgagatcgcaactgcc

SEQ ID NO: 41899 - DNA, 36 bp, synthetic construct
  source 1..36: mol_type = other DNA
gtggccggcatcggtgccgatgcattggctgctgca

SEQ ID NO: 41900 - DNA, 48 bp, synthetic construct
  source 1..48: mol_type = other DNA
ctggagatgatgggcgctggcgacagcctgaaatacgcattagattac

SEQ ID NO: 41901 - DNA, 36 bp, synthetic construct
  source 1..36: mol_type = other DNA
gtggtggtcgctggcaccactgccgttgctgtttac

SEQ ID NO: 41902 - DNA, 63 bp, synthetic construct
  source 1..63: mol_type = other DNA
cagattgccgccgtcttctcctacacatctgcgtcttctgacctgggtccacaaatcgccacc

SEQ ID NO: 41903 - DNA, 30 bp, synthetic construct
  source 1..30: mol_type = other DNA
gccggattgggacccgatgcattggctgcc

SEQ ID NO: 41904 - DNA, 48 bp, synthetic construct
  source 1..48: mol_type = other DNA
ctcctgaccatgggcgccggcgacatcattgacgagaccatgacatac

SEQ ID NO: 41905 - DNA, 36 bp, synthetic construct
  source 1..36: mol_type = other DNA
acaatgctgagcggcaccatcgctgttgcggcctat

SEQ ID NO: 41906 - DNA, 66 bp, synthetic construct
  source 1..66: mol_type = other DNA
gagcctctgtcttatatcttctcttatagtgcaaacgctgccatcctgtccgctagggtggtcgaa

SEQ ID NO: 41907 - DNA, 51 bp, synthetic construct
  source 1..51: mol_type = other DNA
ctcaagagctacggcgctacgggacaaaccctgaatgaggccatcgcatat

SEQ ID NO: 41908 - DNA, 33 bp, synthetic construct
  source 1..33: mol_type = other DNA
agcctcgtcggcggtgactacgggatcgcaaca

SEQ ID NO: 41909 - DNA, 69 bp, synthetic construct
  source 1..69: mol_type = other DNA
ccactggccactatcttcgcatacacccctgagacagccaacctggtgccaggcatagcccaatactac

SEQ ID NO: 41910 - DNA, 90 bp, synthetic construct
  source 1..90: mol_type = other DNA
aattctttcaccttcaactggggcagcgaccccgctgcctactttgtgcacaacgtcggtggctccgacaacctgagtaacatctggaac

SEQ ID NO: 41911 - DNA, 90 bp, synthetic construct
  source 1..90: mol_type = other DNA
atctctcacaagagcattaatcagggcatcggggtcgcctccaagattctgatccccaaccctaactggaacgctctgctcgacgtgaac

SEQ ID NO: 41912 - DNA, 105 bp, synthetic construct
  source 1..105: mol_type = other DNA
ggttacatgtcggctacatctgggacccctctcgccgagatcgtatcggaaggcaccggcctgattttcgtcgtgttccccaagatcttcgacctgatgggattt

SEQ ID NO: 41913 - DNA, 78 bp, synthetic construct
  source 1..78: mol_type = other DNA
cctctctacgggctgagcgcagcggctgttgatcagtttgctgccttgcgggcagtgatggccggaaacttcggttct

SEQ ID NO: 41914 - DNA, 99 bp, synthetic construct
  source 1..99: mol_type = other DNA
ggcaccttcaacttctttccgggacaagacgggatcatgactggggctattcctgggtttattcaaacaattaccatgggaagcagtttcttcaatgcg

SEQ ID NO: 41915 - DNA, 111 bp, synthetic construct
  source 1..111: mol_type = other DNA
cagaagattggcttccctatcctggggaccgtggagaacggaaaggccgtctccggcatcgcttggttactttccactcccaataagatctccatggagattacagaattt

SEQ ID NO: 41916 - DNA, 33 bp, synthetic construct
  source 1..33: mol_type = other DNA
gtggcaggactggggcaggaagccattgctgga

SEQ ID NO: 41917 - DNA, 57 bp, synthetic construct
  source 1..57: mol_type = other DNA
atgatcctctcttcctatggcgcaagcgggcagacactggttgaggccgatgcttac

SEQ ID NO: 41918 - DNA, 33 bp, synthetic construct
  source 1..33: mol_type = other DNA
acccaggttggaggcgactacgctatcgctacc

SEQ ID NO: 41919 - DNA, 66 bp, synthetic construct
  source 1..66: mol_type = other DNA
ccactggccaccatgttcgcctacacacccgagaccgcaaacctcattcctggcatcgctgagtat

SEQ ID NO: 41920 - DNA, 78 bp, synthetic construct
  source 1..78: mol_type = other DNA
ccgctctatgggttatcctctgccgctgtcgaccagtttgccgccctaagggcagtcatggctgggagttttggctcc

SEQ ID NO: 41921 - DNA, 30 bp, synthetic construct
  source 1..30: mol_type = other DNA
ggcaacctggtgcccatcgacaatagctac

SEQ ID NO: 41922 - DNA, 96 bp, synthetic construct
  source 1..96: mol_type = other DNA
ggcacattcaatttcctccctaattctcaaggagtactgactggtgctatccccggctttatccaaagcatcaccatgggatctgccaacttctcc

SEQ ID NO: 41923 - DNA, 111 bp, synthetic construct
  source 1..111: mol_type = other DNA
cagaagatcgggtttcccatcctcggcaccgtggagaacggcaaagccgtctctggagtggcttggttcctgtccacccctaacaagattagcatggaggctacagaattc

SEQ ID NO: 41924 - DNA, 57 bp, synthetic construct
  source 1..57: mol_type = other DNA
cccctgctccggtcctatggggctagcggccagaccctgaacgaggccatctcttac

SEQ ID NO: 41925 - DNA, 33 bp, synthetic construct
  source 1..33: mol_type = other DNA
gccatgatcggcggcgattacggaattgctacg

SEQ ID NO: 41926 - DNA, 66 bp, synthetic construct
  source 1..66: mol_type = other DNA
cccctggccactattttcgcttacacacctgaaaccgccaacctggtgccaggaattgccgagtac

SEQ ID NO: 41927 - DNA, 33 bp, synthetic construct
  source 1..33: mol_type = other DNA
agcggcatcaacgccgatgctctcgctgcactg

SEQ ID NO: 41928 - DNA, 54 bp, synthetic construct
  source 1..54: mol_type = other DNA
gacctcgtggtccttctgggcgccagctctgtgaagtcctactgcctgagttac

SEQ ID NO: 41929 - DNA, 33 bp, synthetic construct
  source 1..33: mol_type = other DNA
atgaagaccgccggagtatcggaagtggcaagt

SEQ ID NO: 41930 - DNA, 66 bp, synthetic construct
  source 1..66: mol_type = other DNA
taccccatctgcggcctcttcaactttcaaacatcaaatcctgccctggtcgagcgggctgcagag

SEQ ID NO: 41931 - DNA, 33 bp, synthetic construct
  source 1..33: mol_type = other DNA
gtggcagggttgggtcaggcagccattgccgga

SEQ ID NO: 41932 - DNA, 57 bp, synthetic construct
  source 1..57: mol_type = other DNA
gagcccatgctgcgggcatacggagctagcggccaatccttagccgaaggaatcaaa

SEQ ID NO: 41933 - DNA, 36 bp, synthetic construct
  source 1..36: mol_type = other DNA
agcaccattggtggcgaatacggcatagctgctttc

SEQ ID NO: 41934 - DNA, 66 bp, synthetic construct
  source 1..66: mol_type = other DNA
cagctgagcaccctgttcgcctacacacccgagacctccattctcatccctgagatcactagattt

SEQ ID NO: 41935 - DNA, 240 bp, synthetic construct
  source 1..240: mol_type = other DNA
gtcacacacatgggcgatactagcgcttggccccggattatggcgagcgtagaatctgggaatgacatctacggagtgatgggcaactactacaccccggtctggggctacctgctgtccttcctggacatgttaatacaagccgttggagccgtccctcttttcggcgactacttcgagggcctgctcccactcgaaggggtccgttcatataggccatttgtcatttcgccggaaatg

SEQ ID NO: 41936 - DNA, 84 bp, synthetic construct
  source 1..84: mol_type = other DNA
atgaacggccagatcgacgacgctttcgtgttcctcactgatcggcaggagaccgactttagctccttatatggagtggcgaca

SEQ ID NO: 41937 - DNA, 84 bp, synthetic construct
  source 1..84: mol_type = other DNA
tgcctctcctgcgcctattacggcctgatcgactgtgatacattcacctctctgtcggtcagcttcgctgaggaccttcctgtc

SEQ ID NO: 41938 - DNA, 36 bp, synthetic construct
  source 1..36: mol_type = other DNA
cccagcatcgccaccgagttccacatgtccaacatt

SEQ ID NO: 41939 - DNA, 36 bp, synthetic construct
  source 1..36: mol_type = other DNA
taccacttacaatacataaagggattcgactcacag

SEQ ID NO: 41940 - DNA, 54 bp, synthetic construct
  source 1..54: mol_type = other DNA
atcatgggcgacgtgcccatcattgagcagtattaccctctcctgatccaatcc

SEQ ID NO: 41941 - DNA, 75 bp, synthetic construct
  source 1..75: mol_type = other DNA
accaacgggctgacctccggcatcagcggaagctcgactgatctgagcgaatatggattgactatggatcctctg

SEQ ID NO: 41942 - DNA, 105 bp, synthetic construct
  source 1..105: mol_type = other DNA
ttctcttcctgggagtccctgccgctgattgggcagatcggactgttcgccattccgttctcacatcctatgatggctatggacaacctgatgtttgggaacatc

SEQ ID NO: 41943 - DNA, 30 bp, synthetic construct
  source 1..30: mol_type = other DNA
gtcgtggccaactctgcggaccgtagtact

SEQ ID NO: 41944 - DNA, 30 bp, synthetic construct
  source 1..30: mol_type = other DNA
gccaaggagatctttaatagcggctacgtg

SEQ ID NO: 41945 - DNA, 48 bp, synthetic construct
  source 1..48: mol_type = other DNA
accaacctgatgttcgggatggacggactcgagatcagcggtggcgtg

SEQ ID NO: 41946 - DNA, 30 bp, synthetic construct
  source 1..30: mol_type = other DNA
gtggctggtctcggtcaaaccgcgatcgcc

SEQ ID NO: 41947 - DNA, 57 bp, synthetic construct
  source 1..57: mol_type = other DNA
cccctgctcaagagctacggtgccaccggacagacactgaacgaggctgtggcttat

SEQ ID NO: 41948 - DNA, 36 bp, synthetic construct
  source 1..36: mol_type = other DNA
agcctggtcggcggagactacgggatcgcaaccttc

SEQ ID NO: 41949 - DNA, 69 bp, synthetic construct
  source 1..69: mol_type = other DNA
cccctggccaccatcttcgcttacacacctgaaactgccaacctggtgcctggcatagctcagtaccag

SEQ ID NO: 41950 - DNA, 30 bp, synthetic construct
  source 1..30: mol_type = other DNA
gctggcctgggaccagatgctttggctgcc

SEQ ID NO: 41951 - DNA, 54 bp, synthetic construct
  source 1..54: mol_type = other DNA
cctctgcttctgaccatgggggccggcgagattatcgacctgactatgacatac

SEQ ID NO: 41952 - DNA, 36 bp, synthetic construct
  source 1..36: mol_type = other DNA
accactctgagcggcacaatcgctgtggctgcatac

SEQ ID NO: 41953 - DNA, 66 bp, synthetic construct
  source 1..66: mol_type = other DNA
gagcccctgtcttacattttttcctatagcactgatagtgcagtcctgagtcagcgggtagttgac

SEQ ID NO: 41954 - DNA, 33 bp, synthetic construct
  source 1..33: mol_type = other DNA
agcgggataaatagtgatgctcttgctgcactg

SEQ ID NO: 41955 - DNA, 57 bp, synthetic construct
  source 1..57: mol_type = other DNA
gaggacctgatcgtgctcctgggcgccagttctgtccggtcctactgcctgagctac

SEQ ID NO: 41956 - DNA, 33 bp, synthetic construct
  source 1..33: mol_type = other DNA
atccacaccgctggcgtcagcgaggtggcttca

SEQ ID NO: 41957 - DNA, 63 bp, synthetic construct
  source 1..63: mol_type = other DNA
cccatctgcgacgtgtttaacttccaagcgggcaatcctgaactggtcgagcgagctgctgag

SEQ ID NO: 41958 - DNA, 33 bp, synthetic construct
  source 1..33: mol_type = other DNA
gtgagcggactgggtgctgatgccttagcgggg

SEQ ID NO: 41959 - DNA, 48 bp, synthetic construct
  source 1..48: mol_type = other DNA
ctgaacgccatgggagccggccagaccatcggttacgctacggactat

SEQ ID NO: 41960 - DNA, 36 bp, synthetic construct
  source 1..36: mol_type = other DNA
gcctacgttggatcgactgactccgtcgctgtgtat

SEQ ID NO: 41961 - DNA, 66 bp, synthetic construct
  source 1..66: mol_type = other DNA
ggcgacatcgcatctgtatttgcgtcatccgggtccagcattcggatagcgcaagaattgacatcc

SEQ ID NO: 41962 - DNA, 30 bp, synthetic construct
  source 1..30: mol_type = other DNA
gtggctagcctgggagaggccgcaatcagt

SEQ ID NO: 41963 - DNA, 57 bp, synthetic construct
  source 1..57: mol_type = other DNA
ctgattggcatcctgttcggtcaaattgaagcagacgtctgggcaaacgctgatgtg

SEQ ID NO: 41964 - DNA, 33 bp, synthetic construct
  source 1..33: mol_type = other DNA
agcacattcggcaccatggctgccgcgatcgca

SEQ ID NO: 41965 - DNA, 51 bp, synthetic construct
  source 1..51: mol_type = other DNA
ctcgggatctacaatttgtcggcgcaaacggctgcaatgactactgagatg

SEQ ID NO: 41966 - DNA, 36 bp, synthetic construct
  source 1..36: mol_type = other DNA
gtggccggcatcaacgccgatgctcttgctgcactg

SEQ ID NO: 41967 - DNA, 54 bp, synthetic construct
  source 1..54: mol_type = other DNA
gacctgatcgtgttcctcggagccaatagcgttaagtcctattgcctgtcttac

SEQ ID NO: 41968 - DNA, 33 bp, synthetic construct
  source 1..33: mol_type = other DNA
atgatgacagcgggggtttcagaggtggcttct

SEQ ID NO: 41969 - DNA, 66 bp, synthetic construct
  source 1..66: mol_type = other DNA
taccccatctgcgaaattttcaactttcaagccggcaacctggcactggtggagagatcagcagag

SEQ ID NO: 41970 - DNA, 30 bp, synthetic construct
  source 1..30: mol_type = other DNA
gtggcaagcctgggagaggccgctatctct

SEQ ID NO: 41971 - DNA, 54 bp, synthetic construct
  source 1..54: mol_type = other DNA
atcgggctgctgttcggtcaaattgaggccgatgtttggaataacgctgatatg

SEQ ID NO: 41972 - DNA, 33 bp, synthetic construct
  source 1..33: mol_type = other DNA
agcaccttcggcacaatggcaatcgcggcaaac

SEQ ID NO: 41973 - DNA, 51 bp, synthetic construct
  source 1..51: mol_type = other DNA
cttggtatctacaatctgtccgcccacactactgcaatggtaacagagatg

SEQ ID NO: 41974 - DNA, 33 bp, synthetic construct
  source 1..33: mol_type = other DNA
agcggcatcaacgccgatgctttggctgcactg

SEQ ID NO: 41975 - DNA, 54 bp, synthetic construct
  source 1..54: mol_type = other DNA
gaccttgttgtgctgctcggcgcctcttccgtcaagctttattccgttagttgc

SEQ ID NO: 41976 - DNA, 36 bp, synthetic construct
  source 1..36: mol_type = other DNA
atgacgacagcaggggttggggaggtagccagtttt

SEQ ID NO: 41977 - DNA, 66 bp, synthetic construct
  source 1..66: mol_type = other DNA
taccccatctgcggcctgttcaatttccaaaccgcaaatcctgctctcgtggaaagagcagcagag

SEQ ID NO: 41978 - DNA, 33 bp, synthetic construct
  source 1..33: mol_type = other DNA
gtcgccggcctgggatctaacgcacttgctgct

SEQ ID NO: 41979 - DNA, 48 bp, synthetic construct
  source 1..48: mol_type = other DNA
ctgctgatcatgggcgccggcgaggtcataactgagacaatgacctac

SEQ ID NO: 41980 - DNA, 36 bp, synthetic construct
  source 1..36: mol_type = other DNA
accctcctgagcggcaccgtggccgtcgccgcttac

SEQ ID NO: 41981 - DNA, 66 bp, synthetic construct
  source 1..66: mol_type = other DNA
gagcccctgtcctttattttttcctattctaacgatgccgctgtgcttagccaacgggttgttgac

SEQ ID NO: 41982 - DNA, 57 bp, synthetic construct
  source 1..57: mol_type = other DNA
cccctgctccggagctacggagccaccgggcagacactgaacgaaggcatcgcttac

SEQ ID NO: 41983 - DNA, 30 bp, synthetic construct
  source 1..30: mol_type = other DNA
ctggtcggaggcgactacggaatcgctgtg

SEQ ID NO: 41984 - DNA, 63 bp, synthetic construct
  source 1..63: mol_type = other DNA
cctctcagcaccattttcgcctacactcccgaaacagcaaacctcgtccccgggatcgctcag

SEQ ID NO: 41985 - DNA, 33 bp, synthetic construct
  source 1..33: mol_type = other DNA
gtgtcaggactcggggctgacgcattggccggt

SEQ ID NO: 41986 - DNA, 54 bp, synthetic construct
  source 1..54: mol_type = other DNA
cccattctgcggataatgggggccggccagaccatcagctatgctatcgactac

SEQ ID NO: 41987 - DNA, 36 bp, synthetic construct
  source 1..36: mol_type = other DNA
gtctacgttggctctaccgactcggtagcagtgtat

SEQ ID NO: 41988 - DNA, 69 bp, synthetic construct
  source 1..69: mol_type = other DNA
tccgatatcgcaagcgttttcgccacgagcggaagctcagctcggatcagcgcggaattaaccagcttc

SEQ ID NO: 41989 - DNA, 33 bp, synthetic construct
  source 1..33: mol_type = other DNA
gtggccggacttggacaagccgctattgccggc

SEQ ID NO: 41990 - DNA, 48 bp, synthetic construct
  source 1..48: mol_type = other DNA
ctcaaggcctacggggctagcggccaatccctggtggaaggaatccga

SEQ ID NO: 41991 - DNA, 36 bp, synthetic construct
  source 1..36: mol_type = other DNA
agctccgttggcggcgaatacgggatcgctgcattc

SEQ ID NO: 41992 - DNA, 63 bp, synthetic construct
  source 1..63: mol_type = other DNA
ctggccatgatcttcgcatacactcctgagaccgctccactgattcccgagatcaccaacttc

SEQ ID NO: 41993 - DNA, 33 bp, synthetic construct
  source 1..33: mol_type = other DNA
gtggcaggactgggccaggcagccatagctggg

SEQ ID NO: 41994 - DNA, 60 bp, synthetic construct
  source 1..60: mol_type = other DNA
gaaccactgctgcgggcttacggggccagcggacagaacttagctgagggcatcaagtac

SEQ ID NO: 41995 - DNA, 36 bp, synthetic construct
  source 1..36: mol_type = other DNA
agcaccattggcggagaatacgggatcgccagtttc

SEQ ID NO: 41996 - DNA, 63 bp, synthetic construct
  source 1..63: mol_type = other DNA
ctggctaccctctttgcctacaccaaggagactagcgtcctggtgcccgagatcacaaggttc

SEQ ID NO: 41997 - DNA, 33 bp, synthetic construct
  source 1..33: mol_type = other DNA
gtagcaggcttgggccaggctgccattgccggg

SEQ ID NO: 41998 - DNA, 60 bp, synthetic construct
  source 1..60: mol_type = other DNA
gagccccttctccggacctacggcgctagcggacagaacctggccgaaggcctgaagtat

SEQ ID NO: 41999 - DNA, 36 bp, synthetic construct
  source 1..36: mol_type = other DNA
agcaccattggcggagaatatgggatagcttccttc

SEQ ID NO: 42000 - DNA, 66 bp, synthetic construct
  source 1..66: mol_type = other DNA
cagctcgctactctgttcgcctacaccgaggaaaccgccgtgcttgttcctgagattacaaggttt

SEQ ID NO: 42001 - DNA, 33 bp, synthetic construct
  source 1..33: mol_type = other DNA
gtggcaggattgggccaggcagcaatcgctggg

SEQ ID NO: 42002 - DNA, 57 bp, synthetic construct
  source 1..57: mol_type = other DNA
cccctgctgaaaggttatggggccagcgggcagagtctcgtggaaggaatcaagtac

SEQ ID NO: 42003 - DNA, 36 bp, synthetic construct
  source 1..36: mol_type = other DNA
tccagcatcggcggcgaatacggaattgctgctttc

SEQ ID NO: 42004 - DNA, 63 bp, synthetic construct
  source 1..63: mol_type = other DNA
ctggccatgattttcgcttacacccccgataccgctgcactggtgcccgagatcactagcttc

SEQ ID NO: 42005 - DNA, 51 bp, synthetic construct
  source 1..51: mol_type = other DNA
ctcaagagttatggcgccactggacaaacccttaaggaggggatcgcatat

SEQ ID NO: 42006 - DNA, 30 bp, synthetic construct
  source 1..30: mol_type = other DNA
cttgttggcggcgactacggaatcgcagtt

SEQ ID NO: 42007 - DNA, 69 bp, synthetic construct
  source 1..69: mol_type = other DNA
ccactggccacaattttcgcctacactcccgagaccgctaacctggtgcctggcatcgcacaagcctat

SEQ ID NO: 42008 - DNA, 33 bp, synthetic construct
  source 1..33: mol_type = other DNA
gtggcaggactgggccaagccgccatcgccgga

SEQ ID NO: 42009 - DNA, 57 bp, synthetic construct
  source 1..57: mol_type = other DNA
cccctgctgatcagctacggggcctccggccaatcacttgctgagggactcaagtac

SEQ ID NO: 42010 - DNA, 36 bp, synthetic construct
  source 1..36: mol_type = other DNA
tccagcatcggcggcgaatacgggattgctgctttc

SEQ ID NO: 42011 - DNA, 63 bp, synthetic construct
  source 1..63: mol_type = other DNA
cctctcgccacccttttcgcttacacacccgaaaccagctccctggtgcctgaaatcgcactg

SEQ ID NO: 42012 - DNA, 81 bp, synthetic construct
  source 1..81: mol_type = other DNA
attccgctctttggcctatcacctggaggcatcgaccagttcgctcaactgcgagccgtaatggctggcagcttcggctcc

SEQ ID NO: 42013 - DNA, 102 bp, synthetic construct
  source 1..102: mol_type = other DNA
gtcggcagctttaacttcctgccaaattcctacggtgccctgcctggggccatccctggctttattcaaagtattatcgctgggagcgcagacgactcattt

SEQ ID NO: 42014 - DNA, 111 bp, synthetic construct
  source 1..111: mol_type = other DNA
cagaagatcggattccccattttcggcgaggtggtcaacgggaagagtgtttccggagtggccttttacctgtctacgccgaactcggttgggatgtttgtgaccgaaacg

SEQ ID NO: 42015 - DNA, 36 bp, synthetic construct
  source 1..36: mol_type = other DNA
cctacaattgctgccgagttccacatgagcaacatc

SEQ ID NO: 42016 - DNA, 33 bp, synthetic construct
  source 1..33: mol_type = other DNA
ttccatctgcaatatatcaagggctttgactcc

SEQ ID NO: 42017 - DNA, 54 bp, synthetic construct
  source 1..54: mol_type = other DNA
gtgatgggcgacgtccccattgttaaggaatattaccctctgctgatcacatcc

SEQ ID NO: 42018 - DNA, 33 bp, synthetic construct
  source 1..33: mol_type = other DNA
tctggactgaacgccgacgcccttgctgctctg

SEQ ID NO: 42019 - DNA, 57 bp, synthetic construct
  source 1..57: mol_type = other DNA
gaggacatcgtgattctgctgggggcgtcgtcggttaagacctactgcctctcttat

SEQ ID NO: 42020 - DNA, 36 bp, synthetic construct
  source 1..36: mol_type = other DNA
atggtgaccgccggcgttggcgaagtcgctagtttc

SEQ ID NO: 42021 - DNA, 66 bp, synthetic construct
  source 1..66: mol_type = other DNA
cagcccatctgcggcgccttcaatttccaagccaatgaccctgtgctggtcaacagatcagctgag

SEQ ID NO: 42022 - DNA, 57 bp, synthetic construct
  source 1..57: mol_type = other DNA
ccactcctcaagtcctacggcgcagctggacagaccctgaacgaggcagtggcttat

SEQ ID NO: 42023 - DNA, 33 bp, synthetic construct
  source 1..33: mol_type = other DNA
agccaggttggaggcgactacgggatagctaca

SEQ ID NO: 42024 - DNA, 66 bp, synthetic construct
  source 1..66: mol_type = other DNA
cccctggccaccatcttcgcatacacacctgagaccgccggtcttgtgcccggcattgctgagtac

SEQ ID NO: 42025 - DNA, 33 bp, synthetic construct
  source 1..33: mol_type = other DNA
attggctccatcggcactagtgccatcgtttgc

SEQ ID NO: 42026 - DNA, 51 bp, synthetic construct
  source 1..51: mol_type = other DNA
ggcatttgcttcgctgtcaacctggatggctatgctgacctcatttttgcc

SEQ ID NO: 42027 - DNA, 30 bp, synthetic construct
  source 1..30: mol_type = other DNA
cacgtatacgcgacacccgttgctgcattc

SEQ ID NO: 42028 - DNA, 57 bp, synthetic construct
  source 1..57: mol_type = other DNA
atcgagatcctgtcattttttagctccgatcaaattatatacgaggaggtccgcaat

SEQ ID NO: 42029 - DNA, 30 bp, synthetic construct
  source 1..30: mol_type = other DNA
gtggccagtcttggagaggcagctatctct

SEQ ID NO: 42030 - DNA, 57 bp, synthetic construct
  source 1..57: mol_type = other DNA
ctgatcggcatcctcttcggacaaatcgaagctgacgtctgggccaacgctgatgtg

SEQ ID NO: 42031 - DNA, 30 bp, synthetic construct
  source 1..30: mol_type = other DNA
agcaccttcggcacaatggcaatcgccgct

SEQ ID NO: 42032 - DNA, 51 bp, synthetic construct
  source 1..51: mol_type = other DNA
ctcgggatctataacttgtcaccacaaacggaggccatggccgctgagatg

SEQ ID NO: 42033 - DNA, 84 bp, synthetic construct
  source 1..84: mol_type = other DNA
atccccctttacgggctgtctcctgccgccgttgacaatttcgccgctttaagagctgtgatggcggggtctttcgggagctcc

SEQ ID NO: 42034 - DNA, 30 bp, synthetic construct; identical to SEQ ID NO: 41921
  source 1..30: mol_type = other DNA

SEQ ID NO: 42035 - DNA, 96 bp, synthetic construct
  source 1..96: mol_type = other DNA
ggaaccttcaatttcctgcccggcactgacggcattatgaccggcgccatccctgggtttattcaatcaattgctgcgggggcagcgaatttcacc

SEQ ID NO: 42036 - DNA, 111 bp, synthetic construct
  source 1..111: mol_type = other DNA
cagaagatcggcttccccattctggggcagatcgagaatggcaaggcagtgaacggggctgcctggcttctgtccacccctaacaacatcggaatgttcgcattcgaaacc

SEQ ID NO: 42037 - DNA, 36 bp, synthetic construct
  source 1..36: mol_type = other DNA
gtggccggaatcaattcgaatgctcttgctgcactg

SEQ ID NO: 42038 - DNA, 54 bp, synthetic construct
  source 1..54: mol_type = other DNA
gacctggtcatcctgctcggcgctggtggcgttcggacttattgccttagctac

SEQ ID NO: 42039 - DNA, 36 bp, synthetic construct
  source 1..36: mol_type = other DNA
atcgtgactgctggcgtggaggaagtcgcagcattc

SEQ ID NO: 42040 - DNA, 66 bp, synthetic construct
  source 1..66: mol_type = other DNA
taccccctatgtggcttgttcaattttcaagcgggcaattccgcccttgtgatccggtcttctgag

SEQ ID NO: 42041 - DNA, 30 bp, synthetic construct
  source 1..30: mol_type = other DNA
tctggactgggacctgacgctcttgccgca

SEQ ID NO: 42042 - DNA, 45 bp, synthetic construct
  source 1..45: mol_type = other DNA
cttctcctgatgggcgccggcgagattatcgacctgaccatgaca

SEQ ID NO: 42043 - DNA, 36 bp, synthetic construct
  source 1..36: mol_type = other DNA
accatgctgagcggcacaatcgccgttgctgcatac

SEQ ID NO: 42044 - DNA, 63 bp, synthetic construct
  source 1..63: mol_type = other DNA
cccctgtcctacattttttcttatagtgcagatgccgctgtgctttctgcacgcgtagtggac

SEQ ID NO: 42045 - DNA, 33 bp, synthetic construct
  source 1..33: mol_type = other DNA
gtggcaggattgggccagtcagctatcgctggg

SEQ ID NO: 42046 - DNA, 51 bp, synthetic construct
  source 1..51: mol_type = other DNA
ctggtgtcttacggcgcctcggggcaaagccttacggaggccattaaatat

SEQ ID NO: 42047 - DNA, 36 bp, synthetic construct
  source 1..36: mol_type = other DNA
tccagcatcggcggcgaatacggaattgcagctttc

SEQ ID NO: 42048 - DNA, 63 bp, synthetic construct
  source 1..63: mol_type = other DNA
ctgagcctgatcttcgcctacacacctgagaccgtcggcctcgtgcccgagattactaggttt

SEQ ID NO: 42049 - DNA, 81 bp, synthetic construct
  source 1..81: mol_type = other DNA
atccccttatatgggctctctgaggccgccgtggataacttcgctgccctccgggctgtgatggcagggagctttggaagt

SEQ ID NO: 42050 - DNA, 96 bp, synthetic construct
  source 1..96: mol_type = other DNA
gggaccttcaacttcctgcctgggccagacggcctgctgactggggccatccctggctttatacaaagcatatacatgggagctgcagacttctcc

SEQ ID NO: 42051 - DNA, 111 bp, synthetic construct
  source 1..111: mol_type = other DNA
cagaaaattgggtttccaatcctcgggaaaattgagaacggcaaggccgtttccggaatagcctggctgctgtcgacgccgaacaacgttgggatgttcactactgaacct

SEQ ID NO: 42052 - DNA, 33 bp, synthetic construct
  source 1..33: mol_type = other DNA
gtggccggactgggacaggcagctatcgccggc

SEQ ID NO: 42053 - DNA, 57 bp, synthetic construct
  source 1..57: mol_type = other DNA
cccctgctggtggcttatggggccagcggccagtccctcgaggaagcaatgaagtac

SEQ ID NO: 42054 - DNA, 36 bp, synthetic construct
  source 1..36: mol_type = other DNA
tcttctatatcgggagaatacggcatcgctgctttc

SEQ ID NO: 42055 - DNA, 63 bp, synthetic construct
  source 1..63: mol_type = other DNA
ctggccactctgttcgcctacacccctgagacagctgcactcattcccgagatcaccaggttt

SEQ ID NO: 42056 - DNA, 81 bp, synthetic construct
  source 1..81: mol_type = other DNA
atccctctctatggactgagcccagccgccgtcgaccaattcgctcaacttagagctgtcatggctgggtcctttggtagt

SEQ ID NO: 42057 - DNA, 105 bp, synthetic construct
  source 1..105: mol_type = other DNA
accggcacgttcaacttcctgcctgcgactgcggcgtctactaccgcctccggcatcctgcctggctttatacaatcgatcatcggtggaagtccaaatttcgct

SEQ ID NO: 42058 - DNA, 111 bp, synthetic construct
  source 1..111: mol_type = other DNA
ttccaaaagctcggctttcccattttggggcaggtatcgggtggccggccgatatctggcctcgctctgtggctgacaacacctaattctctttccgtgctgttcactaat

SEQ ID NO: 42059 - DNA, 45 bp, synthetic construct
  source 1..45: mol_type = other DNA
gtcaaaaagctgaatattacgggtacagtctcgattgtgctcatg

SEQ ID NO: 42060 - DNA, 30 bp, synthetic construct
  source 1..30: mol_type = other DNA
tctggccaagtttttgagtccctgagcttt

SEQ ID NO: 42061 - DNA, 120 bp, synthetic construct
  source 1..120: mol_type = other DNA
acctccctgcccctgcacccttacgccctcgctatggcttctggaatcggctccgctagcatgaacgccgctgccatcgcacccctgctcaacattttcccaagcatgtctcacgagatt

SEQ ID NO: 42062 - DNA, 48 bp, synthetic construct
  source 1..48: mol_type = other DNA
ttcctccctaccgccggctacatcctgccctttgtgaacgctgtcgac

SEQ ID NO: 42063 - DNA, 81 bp, synthetic construct
  source 1..81: mol_type = other DNA
atccccctttacggggtctcgcccggatcttatgatagcttcgctgccctgcgggccgtgatggccggatcattcggctct

SEQ ID NO: 42064 - DNA, 30 bp, synthetic construct
  source 1..30: mol_type = other DNA
ggcaacatcgtgcccattgacggaagctac

SEQ ID NO: 42065 - DNA, 99 bp, synthetic construct
  source 1..99: mol_type = other DNA
gtggggacgttcagcattctgcctggccaagatggcctcctggctgggattatccctaagtttatacaacaagctacagtcggaatgccagatttctac

SEQ ID NO: 42066 - DNA, 105 bp, synthetic construct
  source 1..105: mol_type = other DNA
cagaagatcggcttccccatcctgggacacctggataagggcaaagccgtggacgggatcgcctggctgcttagcacccctaagctccacatgttcataagcgag

SEQ ID NO: 42067 - DNA, 36 bp, synthetic construct
  source 1..36: mol_type = other DNA
cccagcattgccaccgagttccacatgtccaacatc

SEQ ID NO: 42068 - DNA, 36 bp, synthetic construct
  source 1..36: mol_type = other DNA
taccatttgcaatatataaagggctttgactctcag

SEQ ID NO: 42069 - DNA, 54 bp, synthetic construct
  source 1..54: mol_type = other DNA
gtgatgggcgacgtccccataatccaacaatactaccctctcctgatccaatcc

SEQ ID NO: 42070 - DNA, 36 bp, synthetic construct
  source 1..36: mol_type = other DNA
cccgacatcgctgccgatctgaacttctctgctgag

SEQ ID NO: 42071 - DNA, 33 bp, synthetic construct
  source 1..33: mol_type = other DNA
ctgcatcttcaatacatactggacgttgaagag

SEQ ID NO: 42072 - DNA, 54 bp, synthetic construct
  source 1..54: mol_type = other DNA
atcggcggacagcagctggggctggaccacattggccacctcttcatccaaagc

SEQ ID NO: 42073 - DNA, 78 bp, synthetic construct
  source 1..78: mol_type = other DNA
cccctctatggcgtcgctcctggcgctatcgacaacttcgcacaagttagagccgtaatggccggatctttcggtagc

SEQ ID NO: 42074 - DNA, 96 bp, synthetic construct
  source 1..96: mol_type = other DNA
gggaccttttctattctcaacgggaccgacgggctgttcgccggcatcattcccaagtttatccaacaagccacgactggcgtctacgacttcatc

SEQ ID NO: 42075 - DNA, 105 bp, synthetic construct
  source 1..105: mol_type = other DNA
cagaagattggcatcccaattttcgggcacatcgacgccggcaagcccgtggacggaatcgcttggcttttatcaacacctaaatggtacatgtttgtgaccgaa

SEQ ID NO: 42076 - DNA, 84 bp, synthetic construct
  source 1..84: mol_type = other DNA
atccccctctatggcttgagttcgggggcagtcgaccagtttgctcaattgagagcagtgatggctggcagttttggaagtatc

SEQ ID NO: 42077 - DNA, 99 bp, synthetic construct
  source 1..99: mol_type = other DNA
gggaccttcaacttcatccccggggcttctggcgctctacccgggatcattcccggattcatccaaggtctagtgacaggcagtccttccttccctgat

SEQ ID NO: 42078 - DNA, 117 bp, synthetic construct
  source 1..117: mol_type = other DNA
tctatgttccaaaaacttggctggcccattctgggaaaagtcgagggcggtcgggccgtgtccggcgccgctctgtacctctccacgccgaatcaactttctctgatctacacaaat

SEQ ID NO: 42079 - DNA, 36 bp, synthetic construct
  source 1..36: mol_type = other DNA
gttgcagggcttggccaagccgccgcgggcgctatc

SEQ ID NO: 42080 - DNA, 48 bp, synthetic construct
  source 1..48: mol_type = other DNA
ctgaaggcctacggtgcatctggtcaatccttggtggagggactcaaa

SEQ ID NO: 42081 - DNA, 36 bp, synthetic construct
  source 1..36: mol_type = other DNA
tcctccgttgggggcgaatacggaatcgctgctttc

SEQ ID NO: 42082 - DNA, 63 bp, synthetic construct
  source 1..63: mol_type = other DNA
ctcagcatgatgttcgcttacacacccgagaccgcccctctgattcccgagatcaccaacttt

SEQ ID NO: 42083 - DNA, 81 bp, synthetic construct
  source 1..81: mol_type = other DNA
attccactctacgggcttgcacccggcgccatagacagcttcgcacaactccgggctgtgatggccggttctttcgggagc

SEQ ID NO: 42084 - DNA, 30 bp, synthetic construct
  source 1..30: mol_type = other DNA
ggcaacctggtgccaatcgacgggagttac

SEQ ID NO: 42085 - DNA, 99 bp, synthetic construct
  source 1..99: mol_type = other DNA
gttggcacctttagcgttctcccgggaactgatgggtttctggccggaatcatccccaagttaattcaacaaattacagtcgggtccgtgaactggtac

SEQ ID NO: 42086 - DNA, 117 bp, synthetic construct
  source 1..117: mol_type = other DNA
aatgtattccaaaaggtcggcgtccccatcctgggccatatccaaaacggcaaacctgtggacggcattgcctggctcctgagcacaccaaacctgaccatgatagagtttgaaacg

SEQ ID NO: 42087 - DNA, 33 bp, synthetic construct
  source 1..33: mol_type = other DNA
agcggacttggccccgaagttctggctgccatc

SEQ ID NO: 42088 - DNA, 48 bp, synthetic construct
  source 1..48: mol_type = other DNA
ctgatgtttttcggcgccggcgaagtgattgactacgctatctctgct

SEQ ID NO: 42089 - DNA, 36 bp, synthetic construct
  source 1..36: mol_type = other DNA
tccagcatcggaggcattatcgtcggggcagcagtg

SEQ ID NO: 42090 - DNA, 57 bp, synthetic construct
  source 1..57: mol_type = other DNA
gctgagctgttcgcctatggcgagtcaagtcaaaacattaatgagtacattacccac

SEQ ID NO: 42091 - DNA, 33 bp, synthetic construct
  source 1..33: mol_type = other DNA
attgcaggcctggggcaagcagcaatcgctgga

SEQ ID NO: 42092 - DNA, 54 bp, synthetic construct
  source 1..54: mol_type = other DNA
cccctgctcaaggcctacggcgctagcggacagtccctggttgaaggcatcaaa

SEQ ID NO: 42093 - DNA, 36 bp, synthetic construct
  source 1..36: mol_type = other DNA
agcatggtcggtggagaatacgggattgctgctttc

SEQ ID NO: 42094 - DNA, 63 bp, synthetic construct
  source 1..63: mol_type = other DNA
ctgagcctcatcttcgcctacacccctgagaccgccgctctgatccccgagattacatccttt

SEQ ID NO: 42095 - DNA, 81 bp, synthetic construct
  source 1..81: mol_type = other DNA
atcccactttacggcgtgtcagctgcatcaatcgaccagttcgcacaactcagggccgtgatggccggctcttttggttcc

SEQ ID NO: 42096 - DNA, 30 bp, synthetic construct
  source 1..30: mol_type = other DNA
ggcaacgtgattcccatcgacgggagttac

SEQ ID NO: 42097 - DNA, 96 bp, synthetic construct
  source 1..96: mol_type = other DNA
ggaacattcagtatactctccggtaccgatgggctgttcgccggcattatccccaagttcatacaattagcgactaccggcgtttacgactttagc

SEQ ID NO: 42098 - DNA, 108 bp, synthetic construct
  source 1..108: mol_type = other DNA
cagaagatcggcgtgcccattcttggccacattgacaaggggaaacctgtcgacgggatcgcctggctgctgagcacaccaaagctggagatgtttatcaccgaaatc

SEQ ID NO: 42099 - DNA, 33 bp, synthetic construct
  source 1..33: mol_type = other DNA
ggcggcattggagccaacgctgccttagccgcc

SEQ ID NO: 42100 - DNA, 45 bp, synthetic construct
  source 1..45: mol_type = other DNA
ctgctcaagatgggggccggcgaagtgattaacgatgctgcaacc

SEQ ID NO: 42101 - DNA, 36 bp, synthetic construct
  source 1..36: mol_type = other DNA
accctgctgtccggcacaatcgccgttgctagctac

SEQ ID NO: 42102 - DNA, 66 bp, synthetic construct
  source 1..66: mol_type = other DNA
gagcctctgtcccacatctttgcttactccgcaaacagtgctatcctatcgcaacgtataaccgag

SEQ ID NO: 42103 - DNA, 33 bp, synthetic construct
  source 1..33: mol_type = other DNA
gtggcaggcctgggagctgatgcacttgccgcc

SEQ ID NO: 42104 - DNA, 45 bp, synthetic construct
  source 1..45: mol_type = other DNA
ctgtacacaatgggcgccggggaagtaattaacgacgctttcacc

SEQ ID NO: 42105 - DNA, 33 bp, synthetic construct
  source 1..33: mol_type = other DNA
accatcctgagcggccccatcgccgtggccagc

SEQ ID NO: 42106 - DNA, 66 bp, synthetic construct
  source 1..66: mol_type = other DNA
gagccactgtcccacatcttcgcctattctagcaacaatccttacttagttcaacgcatagctgag

SEQ ID NO: 42107 - DNA, 30 bp, synthetic construct
  source 1..30: mol_type = other DNA
tcccagctgagcatgttcgacgctcttgcc

SEQ ID NO: 42108 - DNA, 54 bp, synthetic construct
  source 1..54: mol_type = other DNA
gacctgctgaacctgatgaacatcgtgaacaatcagatttacatcctcgactac

SEQ ID NO: 42109 - DNA, 51 bp, synthetic construct
  source 1..51: mol_type = other DNA
gaggaagtatacgcctcctttcttatcttcaacatggatacctccatcttc

SEQ ID NO: 42110 - DNA, 33 bp, synthetic construct
  source 1..33: mol_type = other DNA
tgctcatcacttggcgagacagcactggccgct

SEQ ID NO: 42111 - DNA, 54 bp, synthetic construct
  source 1..54: mol_type = other DNA
cccatactgcaattagtcgggggggacgatacctacgccgaagggagcgattat

SEQ ID NO: 42112 - DNA, 63 bp, synthetic construct
  source 1..63: mol_type = other DNA
tgggccgttattctgttcacctacgacgacagcacaatcggcatgcggggcgatatgatccac

SEQ ID NO: 42113 - DNA, 36 bp, synthetic construct
  source 1..36: mol_type = other DNA
gtcgttggtttaggtcaggctgcagcggcaggcatc

SEQ ID NO: 42114 - DNA, 57 bp, synthetic construct
  source 1..57: mol_type = other DNA
cccctgatcaagacctacggtgctagcggccagtccctcgccgaaggactgaagtat

SEQ ID NO: 42115 - DNA, 36 bp, synthetic construct
  source 1..36: mol_type = other DNA
tccagcatcgccggcgaatacggaatcgccgccttc

SEQ ID NO: 42116 - DNA, 63 bp, synthetic construct
  source 1..63: mol_type = other DNA
ctgagcctgattttcgcctacactcctgagaccgccaatctcgtgcccgagatcaccaacttt

SEQ ID NO: 42117 - DNA, 30 bp, synthetic construct
  source 1..30: mol_type = other DNA
tgctcttccctgggcgttgacgctatgagc

SEQ ID NO: 42118 - DNA, 57 bp, synthetic construct
  source 1..57: mol_type = other DNA
gacagcctgatcattgccatgggcgctgaagacgtgctcgaggagtgccgggattac

SEQ ID NO: 42119 - DNA, 33 bp, synthetic construct
  source 1..33: mol_type = other DNA
ctgcgctgcggagggacagagggcttggctgtc

SEQ ID NO: 42120 - DNA, 57 bp, synthetic construct
  source 1..57: mol_type = other DNA
ctgcgggtttacacccatagttctagtatctccgagtaccacgacgagatggtgcat

SEQ ID NO: 42121 - DNA, 36 bp, synthetic construct
  source 1..36: mol_type = other DNA
gtcagcggcctggggtccgtcgcaagttcagccgtt

SEQ ID NO: 42122 - DNA, 57 bp, synthetic construct
  source 1..57: mol_type = other DNA
gaacccgctattgtcctgatgggcgccgaggacgtgctgaccgagagcatcgaatac

SEQ ID NO: 42123 - DNA, 66 bp, synthetic construct
  source 1..66: mol_type = other DNA
gaacctctgattacaatcctgaccctcgaggacagcatggtcccccttcgcgaggatctcgtttgg

SEQ ID NO: 42124 - DNA, 36 bp, synthetic construct
  source 1..36: mol_type = other DNA
tgcgctgggttgggcaccgctgcaatgtctgctgtg

SEQ ID NO: 42125 - DNA, 57 bp, synthetic construct
  source 1..57: mol_type = other DNA
gggcccgtcctggacttcgtgaacaatggtggcgacacctcactttgcgaggcgtac

SEQ ID NO: 42126 - DNA, 36 bp, synthetic construct
  source 1..36: mol_type = other DNA
gtgatgaggacaggcggcgaggaaggcatggttctg

SEQ ID NO: 42127 - DNA, 66 bp, synthetic construct
  source 1..66: mol_type = other DNA
gatcccctgacctgggtcttcacctactcgggcgacatggccgatctccacgacaagctggctgaa

SEQ ID NO: 42128 - DNA, 36 bp, synthetic construct
  source 1..36: mol_type = other DNA
ccttctattgccaccgagttcggcatgagcaacatc

SEQ ID NO: 42129 - DNA, 36 bp, synthetic construct
  source 1..36: mol_type = other DNA
taccacctgcaatacattaagggtttcgattcccag

SEQ ID NO: 42130 - DNA, 54 bp, synthetic construct
  source 1..54: mol_type = other DNA
gtcatgggcgacgtgcccatcatcgagcagtactatcctctcctaattagtagt

SEQ ID NO: 42131 - DNA, 36 bp, synthetic construct
  source 1..36: mol_type = other DNA
gttagcgggcttggagcagacgcattggctggagtg

SEQ ID NO: 42132 - DNA, 54 bp, synthetic construct
  source 1..54: mol_type = other DNA
cccattctgaacgccatgggcgctggacagaccatcggttatgccacggactat

SEQ ID NO: 42133 - DNA, 36 bp, synthetic construct
  source 1..36: mol_type = other DNA
gcctatcttggctccacggactccgtcgctgtgtac

SEQ ID NO: 42134 - DNA, 69 bp, synthetic construct
  source 1..69: mol_type = other DNA
ggcgacgtggcttccgtatttgcatcctcggggagcagcgttcggatcgcatccgagctgaccagtttc

SEQ ID NO: 42135 - DNA, 33 bp, synthetic construct
  source 1..33: mol_type = other DNA
gtggccgggctgggacaggcagcaattgccggt

SEQ ID NO: 42136 - DNA, 57 bp, synthetic construct
  source 1..57: mol_type = other DNA
cccctgctcgaaacctatggcgccaatgaccagagcctggtggaggctatcaactac

SEQ ID NO: 42137 - DNA, 36 bp, synthetic construct
  source 1..36: mol_type = other DNA
tccagcattggaggcgaatacgggattgctgcattc

SEQ ID NO: 42138 - DNA, 63 bp, synthetic construct
  source 1..63: mol_type = other DNA
ctgagcatgatcttcgcctacactcccgagacagctcctctaataccggaaattaccaacttt

SEQ ID NO: 42139 - DNA, 33 bp, synthetic construct
  source 1..33: mol_type = other DNA
gtggctggcttgggacaagccgctatagccggt

SEQ ID NO: 42140 - DNA, 48 bp, synthetic construct
  source 1..48: mol_type = other DNA
ctgaaagcctacggcgctagcgggcagtctctcgtggagggaatcaag

SEQ ID NO: 42141 - DNA, 39 bp, synthetic construct
  source 1..39: mol_type = other DNA
atcgctagcgtcggcggcgaatatggaatcgcagctttc

SEQ ID NO: 42142 - DNA, 57 bp, synthetic construct
  source 1..57: mol_type = other DNA
agcctgatcttcgcctacacacctgagacagctcctctcatccccgagattaccaac

SEQ ID NO: 42143 - DNA, 81 bp, synthetic construct
  source 1..81: mol_type = other DNA
atcccactttacggcctggcccccggagccattgactcatttgcccaattgcgtgccgttatggccgggagttttggctct

SEQ ID NO: 42144 - DNA, 30 bp, synthetic construct
  source 1..30: mol_type = other DNA
ggcaacctggtgcccatcgacgggtcttac

SEQ ID NO: 42145 - DNA, 99 bp, synthetic construct
  source 1..99: mol_type = other DNA
gtcggcacctttagcatcctgcccgggacagacggcctcctggctggaatcatcccaaagttcattcaacaagcaactatgggcatgcctgactttagc

SEQ ID NO: 42146 - DNA, 108 bp, synthetic construct
  source 1..108: mol_type = other DNA
tttcagaagatcggagtccccattctcggccacatcgataaaggcaaacctgtggacggcattgcctggctgcttagcaccccatcacttcaaaactttatcactgaa

SEQ ID NO: 42147 - DNA, 39 bp, synthetic construct
  source 1..39: mol_type = other DNA
atcccaactattgctgccgagtaccacatgagcaacatc

SEQ ID NO: 42148 - DNA, 36 bp, synthetic construct
  source 1..36: mol_type = other DNA
taccatcttcaatacataaagggtttcgattctcaa

SEQ ID NO: 42149 - DNA, 54 bp, synthetic construct
  source 1..54: mol_type = other DNA
atcatgggcgacgtgcctatcattgagcagtactatcccctgctcatccaaagt

SEQ ID NO: 42150 - DNA, 36 bp, synthetic construct
  source 1..36: mol_type = other DNA
gttgccggcataaatgccgatgcacttgctgctctg

SEQ ID NO: 42151 - DNA, 54 bp, synthetic construct
  source 1..54: mol_type = other DNA
gacctggtggtgctccttggcgccgggtccgtcaagacctattgcctgagctat

SEQ ID NO: 42152 - DNA, 36 bp, synthetic construct
  source 1..36: mol_type = other DNA
atgactactgctggagtctcggaggttgcctcattc

SEQ ID NO: 42153 - DNA, 66 bp, synthetic construct
  source 1..66: mol_type = other DNA
taccccatctgcgacgtctttaatttccaagccggaaaccctgccctcgtgaacaggtcagctgag

SEQ ID NO: 42154 - DNA, 81 bp, synthetic construct
  source 1..81: mol_type = other DNA
attcccttatacggattagcccctggagctatagacagcttcgcccaattaagggcggtcatggccggtagctttggctcc

SEQ ID NO: 42155 - DNA, 30 bp, synthetic construct
  source 1..30: mol_type = other DNA
ggcaacctggtgcccatcgacgggtcatac

SEQ ID NO: 42156 - DNA, 99 bp, synthetic construct
  source 1..99: mol_type = other DNA
gtgggcacattttctattctgcctgggacagatgggttcctcgccgggattatcccaaagttcatccaacaaatcatggccggaactcccaacttggcc

SEQ ID NO: 42157 - DNA, 108 bp, synthetic construct
  source 1..108: mol_type = other DNA
ttccagaagattggcgtcccaatcctcgggcatatgcaacaaggaaagcccgtggacggaatcgcctggcttctgtccacacctagccttcaacattttatcaccgaa

SEQ ID NO: 42158 - DNA, 36 bp, synthetic construct
  source 1..36: mol_type = other DNA
gtgtcaggccttggagctgatgcactagccggtgcg

SEQ ID NO: 42159 - DNA, 51 bp, synthetic construct
  source 1..51: mol_type = other DNA
cccattctgaacatcatgggcgcagcccaaacgattgaatacgccactgat

SEQ ID NO: 42160 - DNA, 36 bp, synthetic construct
  source 1..36: mol_type = other DNA
gcctacgttggatccaccgactctgtcgctgtctat

SEQ ID NO: 42161 - DNA, 69 bp, synthetic construct
  source 1..69: mol_type = other DNA
ggggacatcgcttccatcttcacttccactgggtccagcatgcggatcgcctctgagctgaccggattc

SEQ ID NO: 42162 - DNA, 81 bp, synthetic construct
  source 1..81: mol_type = other DNA
attcctctatacggaatcgatccccgcgcaatcgattcctttgccgcgcttagagccgttatggccggctcctttgggtcc

SEQ ID NO: 42163 - DNA, 93 bp, synthetic construct
  source 1..93: mol_type = other DNA
accttctcatttcttagggggtctaacggcgattttggaggaattctgcctagattcattgaacaatgcgtagccggacgacctgactttgcc

SEQ ID NO: 42164 - DNA, 111 bp, synthetic construct
  source 1..111: mol_type = other DNA
ttccagaagatcggatttcctattctgggccacactgtgaacgggaaggctgtggacggcgtcgcctggctgctgacaacaccaaacctcagcatgacaataacagagttc

SEQ ID NO: 42165 - DNA, 45 bp, synthetic construct
  source 1..45: mol_type = other DNA
gacgctgccttcaccggaagcgagcccgcaagttctggagatacc

SEQ ID NO: 42166 - DNA, 96 bp, synthetic construct
  source 1..96: mol_type = other DNA
tccctggccttcgggtctactggtggaattattggcaatctggattttgtgttcatgaacggcttggatgaaggccagagcgactactcctatgtt

SEQ ID NO: 42167 - DNA, 57 bp, synthetic construct
  source 1..57: mol_type = other DNA
cactgggtttggagtggaggctttgagtccatcgggctgactgtcctggacttcgct

SEQ ID NO: 42168 - DNA, 36 bp, synthetic construct
  source 1..36: mol_type = other DNA
aacggaggcagcgggctgttcgccaatggacaagcc

SEQ ID NO: 42169 - DNA, 60 bp, synthetic construct
  source 1..60: mol_type = other DNA
ttcgccgagagcaagtacaccggcggcacagttggcctactctttggtggtaccgatctg

SEQ ID NO: 42170 - DNA, 81 bp, synthetic construct
  source 1..81: mol_type = other DNA
attcctctctacggactggcccctggggccatcgactccttcgcgcaactaagggccgtgatggctgggtcctttggctcc

SEQ ID NO: 42171 - DNA, 30 bp, synthetic construct
  source 1..30: mol_type = other DNA
ggcaacctggtgcccatcgacggaagctac

SEQ ID NO: 42172 - DNA, 99 bp, synthetic construct
  source 1..99: mol_type = other DNA
gggacattttcaatattacaaggaaccgacgggctgctcgccgggatcattcctaagtttatacaacaagctacgatgggcactcccgacttctacgcc

SEQ ID NO: 42173 - DNA, 108 bp, synthetic construct
  source 1..108: mol_type = other DNA
cagaagatcggcttccctatcctgggccacctcgagaaggggaaagccgtggacggaatcgcatggctgctgacaactcccaacctcaccatgttcactgaattcatt

SEQ ID NO: 42174 - DNA, 36 bp, synthetic construct
  source 1..36: mol_type = other DNA
gtggcaggactcgggcaagccataggagcagcagct

SEQ ID NO: 42175 - DNA, 60 bp, synthetic construct
  source 1..60: mol_type = other DNA
gagcccctgctgattgcctatggggccagtggacagtccctcgctgagggcatcaagtac

SEQ ID NO: 42176 - DNA, 36 bp, synthetic construct
  source 1..36: mol_type = other DNA
agcagtgttggaggggaatatgggatagctgctttc

SEQ ID NO: 42177 - DNA, 63 bp, synthetic construct
  source 1..63: mol_type = other DNA
ctgagcatgatcttcgcttacacccctgagacagccccactcatccccgagattaccaacttt

SEQ ID NO: 42178 - DNA, 36 bp, synthetic construct
  source 1..36: mol_type = other DNA
cccagcatcgcctctgaatacggcatgtccaacatc

SEQ ID NO: 42179 - DNA, 36 bp, synthetic construct
  source 1..36: mol_type = other DNA
taccacctacaatatataaagggcttcgactctcag

SEQ ID NO: 42180 - DNA, 54 bp, synthetic construct
  source 1..54: mol_type = other DNA
gtcatgggcaacgtgcccattatcgagcagtattaccctctcctaatctcctca

SEQ ID NO: 42181 - DNA, 36 bp, synthetic construct
  source 1..36: mol_type = other DNA
gtgagcgggatcggagccgacgcacttggaggcgct

SEQ ID NO: 42182 - DNA, 57 bp, synthetic construct
  source 1..57: mol_type = other DNA
aaggacatcctgattttcatgggcgccagccagaccctgaactacgctatggattac

SEQ ID NO: 42183 - DNA, 36 bp, synthetic construct
  source 1..36: mol_type = other DNA
gccttcatctcttctaccgatagtgtagctgtctac

SEQ ID NO: 42184 - DNA, 63 bp, synthetic construct
  source 1..63: mol_type = other DNA
cagattgcgtctgtattctcttactcctccgggagcgctcggatctcagctgagttgactgcc

SEQ ID NO: 42185 - DNA, 78 bp, synthetic construct
  source 1..78: mol_type = other DNA
cccttatatggactgtctcctggggcaatcgacaacctcgcgcaacttcgagctgtgatggccggaagctttggtagc

SEQ ID NO: 42186 - DNA, 30 bp, synthetic construct
  source 1..30: mol_type = other DNA
gggaacctggtgcccatcgacggctcttac

SEQ ID NO: 42187 - DNA, 96 bp, synthetic construct
  source 1..96: mol_type = other DNA
gggacttttagtttcttacaaggtactgacggccttttcacggggatcctgcccaagtttattcaacttgctaccaccggggtctatgatgtgacg

SEQ ID NO: 42188 - DNA, 108 bp, synthetic construct
  source 1..108: mol_type = other DNA
cagaagatcggctttccaatcttcggccatatacaagacgggaagcctgtcgacggaatcgcctggctcctgagcacacccaaatggtacatgttcgagacatttgtc

SEQ ID NO: 42189 - DNA, 39 bp, synthetic construct
  source 1..39: mol_type = other DNA
gagtacagcctgggcatcgacaccgtgaacattgttggc

SEQ ID NO: 42190 - DNA, 54 bp, synthetic construct
  source 1..54: mol_type = other DNA
aacatcgtgaacctgttcgccaacgagaataccgtggttgaacctggagtcatt

SEQ ID NO: 42191 - DNA, 30 bp, synthetic construct
  source 1..30: mol_type = other DNA
ctcctgattaacggcgagatccagttggga

SEQ ID NO: 42192 - DNA, 36 bp, synthetic construct; identical to SEQ ID NO: 41618
  source 1..36: mol_type = other DNA

SEQ ID NO: 42193 - DNA, 36 bp, synthetic construct
  source 1..36: mol_type = other DNA
taccacttgcaatatattaaggggttcgactcacag

SEQ ID NO: 42194 - DNA, 51 bp, synthetic construct
  source 1..51: mol_type = other DNA
atgggtaacgtgcccattatcgaacagtattaccctcttctcatcacttcc

SEQ ID NO: 42195 - DNA, 33 bp, synthetic construct
  source 1..33: mol_type = other DNA
gtggcaggcttgggacaggcggctattgccggc

SEQ ID NO: 42196 - DNA, 51 bp, synthetic construct
  source 1..51: mol_type = other DNA
ctcaaagcttatggcgccagcggacagagcctggcggaagccatcaagtat

SEQ ID NO: 42197 - DNA, 36 bp, synthetic construct
  source 1..36: mol_type = other DNA
agctctgtcgggggcgaatatgggatcgcagctttc

SEQ ID NO: 42198 - DNA, 63 bp, synthetic construct
  source 1..63: mol_type = other DNA
ctgagcctgctcttcgcctacacacccgagacagcttccctggtgcctgagatcaccaacttt

SEQ ID NO: 42199 - DNA, 33 bp, synthetic construct
  source 1..33: mol_type = other DNA
gccttcctgagcccctatccatactcaagcatt

SEQ ID NO: 42200 - DNA, 33 bp, synthetic construct
  source 1..33: mol_type = other DNA
gtgagtggactgggcgcagatgccttggctggg

SEQ ID NO: 42201 - DNA, 51 bp, synthetic construct
  source 1..51: mol_type = other DNA
atcttgaacgctatgggtgccggccagaccattggttacgcgacggattat

SEQ ID NO: 42202 - DNA, 36 bp, synthetic construct
  source 1..36: mol_type = other DNA
gcctacgtcggaagtacagattctgtagctgtctat

SEQ ID NO: 42203 - DNA, 69 bp, synthetic construct
  source 1..69: mol_type = other DNA
ggggacatcgctagtatctttgcatcctcgggatcatctgtccgaatcgccggagagctgacaagcttc

SEQ ID NO: 42204 - DNA, 36 bp, synthetic construct
  source 1..36: mol_type = other DNA
cccagcatctcttccaacctgcacctcgacttcgag

SEQ ID NO: 42205 - DNA, 30 bp, synthetic construct
  source 1..30: mol_type = other DNA
tacctgcaatacgttatgggctatgatgct

SEQ ID NO: 42206 - DNA, 54 bp, synthetic construct
  source 1..54: mol_type = other DNA
actgttggccccactaacacattcatggacaatcctagctccatcgttttgccc

SEQ ID NO: 42207 - DNA, 33 bp, synthetic construct
  source 1..33: mol_type = other DNA
attaccggcatcggcaaagctgcaatcgcggga

SEQ ID NO: 42208 - DNA, 51 bp, synthetic construct
  source 1..51: mol_type = other DNA
tacctgagcactttcaatatagatgagaacgcctttaaccaaagcatgatg

SEQ ID NO: 42209 - DNA, 33 bp, synthetic construct
  source 1..33: mol_type = other DNA
tccagcattggcggaaactacggaaccgctatc

SEQ ID NO: 42210 - DNA, 69 bp, synthetic construct
  source 1..69: mol_type = other DNA
gagcccctgagcttcacattcgcctacaccgtcgagacttccgacctcctgaacggccttgtggagttt

SEQ ID NO: 42211 - DNA, 84 bp, synthetic construct
  source 1..84: mol_type = other DNA
atccctctctacggcctggctcccggggccattgaccagtttgcacaagttcgggctgttatggccgggtcatttgggtcaatc

SEQ ID NO: 42212 - DNA, 30 bp, synthetic construct
  source 1..30: mol_type = other DNA
ggcaacctgacacctatcgacggaagctac

SEQ ID NO: 42213 - DNA, 96 bp, synthetic construct
  source 1..96: mol_type = other DNA
gggacattcagcatcctcaacggaaccgacgggctgtttgctggcattatccccaagttcatccaaaacgcgaccatgggcgtttatgatttttcc

SEQ ID NO: 42214 - DNA, 111 bp, synthetic construct
  source 1..111: mol_type = other DNA
ttccagaaaattggcgtgcccatcctgggccacattgacaaggggaaacctgtcgacgggatcgcctggctgctgagcaccccaaagctccacatgttcataactgaattt

SEQ ID NO: 42215 - DNA, 36 bp, synthetic construct
  source 1..36: mol_type = other DNA
cccagcatggcctccgatctgcacctgaacgtggac

SEQ ID NO: 42216 - DNA, 30 bp, synthetic construct
  source 1..30: mol_type = other DNA
tacctacaacatgtgctcggctatgatgcc

SEQ ID NO: 42217 - DNA, 54 bp, synthetic construct
  source 1..54: mol_type = other DNA
gtgctggggagtaattccaccctggacaacaacgcctctagtttcatcctctct

SEQ ID NO: 42218 - DNA, 36 bp, synthetic construct
  source 1..36: mol_type = other DNA
gtgagcggcatcaactccaatgcattggctgctctg

SEQ ID NO: 42219 - DNA, 54 bp, synthetic construct
  source 1..54: mol_type = other DNA
gacctcgtcatcttcctgggagccggcggcgtctcgacgtattgcctgagctac

SEQ ID NO: 42220 - DNA, 36 bp, synthetic construct
  source 1..36: mol_type = other DNA
ataacaacggcgggagtcggggaagtagctgcattc

SEQ ID NO: 42221 - DNA, 66 bp, synthetic construct
  source 1..66: mol_type = other DNA
taccctctctgcgagttcttcaacttccaagctggtaacccagccctggtgcatagaagcgtagaa

SEQ ID NO: 42222 - DNA, 30 bp, synthetic construct
  source 1..30: mol_type = other DNA
gtggccagccttggggaggcagcaatctcc

SEQ ID NO: 42223 - DNA, 54 bp, synthetic construct
  source 1..54: mol_type = other DNA
attggcatcctgttcggccaaattgacgctgaagtttggcataacgccgatgtg

SEQ ID NO: 42224 - DNA, 30 bp, synthetic construct
  source 1..30: mol_type = other DNA
agcacattcggcaccatggcaatcgctgcc

SEQ ID NO: 42225 - DNA, 51 bp, synthetic construct
  source 1..51: mol_type = other DNA
ctgggaatctacaatcttagcgcccagaccgccgctatggctaccgagatg

SEQ ID NO: 42226 - DNA, 78 bp, synthetic construct
  source 1..78: mol_type = other DNA
cccctttatgggctcgcacctggagcgatcgattctttcgctcaactccgcgccgttatggccggttcctttggatct

SEQ ID NO: 42227 - DNA, 99 bp, synthetic construct
  source 1..99: mol_type = other DNA
ggcacattctctatcctcaacggcagcgacggtctgctggctggaattatccccaagttcatccaattggccactaaaggcaccgacgacttttcctac

SEQ ID NO: 42228 - DNA, 108 bp, synthetic construct
  source 1..108: mol_type = other DNA
cagaagattggcgtgcccatcctgggccacatcaacaagggaaaacctgtggacggaatcgcctggctgctctccacaccaaagctgagcatgttcgtcacggagacc

SEQ ID NO: 42229 - DNA, 30 bp, synthetic construct
  source 1..30: mol_type = other DNA
atgctggccgagggcggcatgcccgctaac

SEQ ID NO: 42230 - DNA, 54 bp, synthetic construct
  source 1..54: mol_type = other DNA
gggattatcgtgaacgatccgtcaacttacgtcacaatgggcaatcttctggca

SEQ ID NO: 42231 - DNA, 120 bp, synthetic construct
  source 1..120: mol_type = other DNA
ggcttcggcaccggcaatccactgatgcccagtatccccgcgcaatttatctccgtgaatttcgactttagcctgttcggtggtttcctgcggggcttcgcacaactattctctaacatc

SEQ ID NO: 42232 - DNA, 30 bp, synthetic construct
  source 1..30: mol_type = other DNA
agccagatgaacgccgagtccttcttcgcc

SEQ ID NO: 42233 - DNA, 48 bp, synthetic construct
  source 1..48: mol_type = other DNA
ctgatctacatgggcgctacctcttcaatggacatttcaatgcaatac

SEQ ID NO: 42234 - DNA, 48 bp, synthetic construct
  source 1..48: mol_type = other DNA
tacgggttcgctctgtttagcgtgaccggcgcctctacatccatcttc

SEQ ID NO: 42235 - DNA, 36 bp, synthetic construct
  source 1..36: mol_type = other DNA
cctacagtggccgctgagttccacatgagcaacatc

SEQ ID NO: 42236 - DNA, 36 bp, synthetic construct
  source 1..36: mol_type = other DNA
taccatctccaatacatcaagggcttcgatagccag

SEQ ID NO: 42237 - DNA, 54 bp, synthetic construct
  source 1..54: mol_type = other DNA
gttatgggcaacgtggccatcgtgtctgacgtctaccccctcctgatttcctcg

SEQ ID NO: 42238 - DNA, 39 bp, synthetic construct
  source 1..39: mol_type = other DNA
ccagccatatccgctgatctccacctggacgtggagatg

SEQ ID NO: 42239 - DNA, 36 bp, synthetic construct
  source 1..36: mol_type = other DNA
gactatttacaacatatcctgggctacgatgcacgg

SEQ ID NO: 42240 - DNA, 54 bp, synthetic construct
  source 1..54: mol_type = other DNA
ttcatgggcagcgctgacaccttcgccaacaacgccatgccctttatgatgagc

SEQ ID NO: 42241 - DNA, 30 bp, synthetic construct
  source 1..30: mol_type = other DNA
gtggcttctcttggcgaggccgctattagc

SEQ ID NO: 42242 - DNA, 57 bp, synthetic construct
  source 1..57: mol_type = other DNA
ctgatcggcatcctctttggccaaatcgaagccgacgtttgggcgaacgccgatatg

SEQ ID NO: 42243 - DNA, 30 bp, synthetic construct
  source 1..30: mol_type = other DNA
agcacattcggcaccatggctatcgctgcc

SEQ ID NO: 42244 - DNA, 54 bp, synthetic construct
  source 1..54: mol_type = other DNA
attctcggaatctacaacctgtctgcacaaaccgctgtgatggcaagcgagatg

SEQ ID NO: 42245 - DNA, 30 bp, synthetic construct
  source 1..30: mol_type = other DNA
gcctacctgggcccctatataccgtactcg

SEQ ID NO: 42246 - DNA, 30 bp, synthetic construct
  source 1..30: mol_type = other DNA
agcatctttgacgccaacgccttctacgcc

SEQ ID NO: 42247 - DNA, 57 bp, synthetic construct
  source 1..57: mol_type = other DNA
gatgacatgatcggcgccatgcggattaccaatagcgtcaacttagtgaagctctac

SEQ ID NO: 42248 - DNA, 48 bp, synthetic construct
  source 1..48: mol_type = other DNA
agcatcttttacgcttttcaaatatttggcatgaacgaggctgttacc

SEQ ID NO: 42249 - DNA, 33 bp, synthetic construct
  source 1..33: mol_type = other DNA
gtggccagccttggcgaagcagccatctctggc

SEQ ID NO: 42250 - DNA, 57 bp, synthetic construct
  source 1..57: mol_type = other DNA
ctgattgggatgctgtttgggcaaatcgagatggatgtctggcataacgctgaagtc

SEQ ID NO: 42251 - DNA, 33 bp, synthetic construct
  source 1..33: mol_type = other DNA
agcaccttcggcaccatggcaatcgctgctaac

SEQ ID NO: 42252 - DNA, 51 bp, synthetic construct
  source 1..51: mol_type = other DNA
ctgaacatctacgatctttctgcccaaacggctgaaatgacaacagagatg

SEQ ID NO: 42253 - DNA, 30 bp, synthetic construct
  source 1..30: mol_type = other DNA
gtggccagccttggagaggcagctatctca

SEQ ID NO: 42254 - DNA, 54 bp, synthetic construct
  source 1..54: mol_type = other DNA
atcgggctgctgttcggtcaaatagaggctgacgtctggcataacgccgatatg

SEQ ID NO: 42255 - DNA, 33 bp, synthetic construct
  source 1..33: mol_type = other DNA
agcacattcggcaccatgatagcggcggccgct

SEQ ID NO: 42256 - DNA, 54 bp, synthetic construct
  source 1..54: mol_type = other DNA
atcctggggatttacaaccttagcgcacagaccgccacaatggcttccgagatg

SEQ ID NO: 42257 - DNA, 30 bp, synthetic construct
  source 1..30: mol_type = other DNA
gtggcctctctgggcgaggctgcaatcagc

SEQ ID NO: 42258 - DNA, 57 bp, synthetic construct
  source 1..57: mol_type = other DNA
ctcatcggcgtcctgttcggccaaatcgaagccgatgtttggcacaacgctgacatc

SEQ ID NO: 42259 - DNA, 33 bp, synthetic construct
  source 1..33: mol_type = other DNA
agcacattcggcaccatggctgcaattgccgca

SEQ ID NO: 42260 - DNA, 51 bp, synthetic construct
  source 1..51: mol_type = other DNA
ctgggaatctacaatctgagcgaccaaactgctgttatggcatcagagatg

SEQ ID NO: 42261 - DNA, 33 bp, synthetic construct
  source 1..33: mol_type = other DNA
gtggccagcctaggggaggcggccatctctgga

SEQ ID NO: 42262 - DNA, 57 bp, synthetic construct
  source 1..57: mol_type = other DNA
cttatcaccgtattatttggacaaatagaggctgacgtctggaacaccgccaacatg

SEQ ID NO: 42263 - DNA, 33 bp, synthetic construct
  source 1..33: mol_type = other DNA
agcaccttcggcacaatggccatcgccgccgca

SEQ ID NO: 42264 - DNA, 51 bp, synthetic construct
  source 1..51: mol_type = other DNA
ctggatatctacggactgtctgcaaaaacggcacaaatggcgttcgagatg

SEQ ID NO: 42265 - DNA, 57 bp, synthetic construct
  source 1..57: mol_type = other DNA
ggggacatcctcaaactgttcatcggcgccaagcaggtcccctacgtgtacatctat

SEQ ID NO: 42266 - DNA, 48 bp, synthetic construct
  source 1..48: mol_type = other DNA
ctgtcctacttcaccaaccaggccaacgtgatcagcgaggtcagatct

SEQ ID NO: 42267 - DNA, 33 bp, synthetic construct
  source 1..33: mol_type = other DNA
gtggcaagcctgggcgaagcagccatctccggg

SEQ ID NO: 42268 - DNA, 57 bp, synthetic construct
  source 1..57: mol_type = other DNA
ttcatcagcgtcctgttcggtcaaattgaggccgatgtctggaacaatgctgatatc

SEQ ID NO: 42269 - DNA, 30 bp, synthetic construct; identical to SEQ ID NO: 42224
  source 1..30: mol_type = other DNA

SEQ ID NO: 42270 - DNA, 51 bp, synthetic construct
  source 1..51: mol_type = other DNA
ctcggaatctataacctgagcgcacagacggctcagatgacaacagagatg

SEQ ID NO: 42271 - DNA, 42 bp, synthetic construct
  source 1..42: mol_type = other DNA
aattattacgggaaactgatcatcagtaattctaagctgatt

SEQ ID NO: 42272 - DNA, 57 bp, synthetic construct
  source 1..57: mol_type = other DNA
ggcaagatgaccatcaagaactgcattatcaacaacaatgtcggcaagaaaagcgtg

SEQ ID NO: 42273 - DNA, 240 bp, synthetic construct
  source 1..240: mol_type = other DNA
ttcaccggcgccatcggcaattacggcaaactgacagtgaagaacagcaagctcaacaataactacgtgaaatacgatgggggcgctattaccaactacgagtccaaggtcactctcctgaaatgcgcaatcaataacaaccaggcaatgacggctgggggcgctatctgcaatgtggcatccctgaccatttctcactgtaccctgtataagaataagagtcctcaaggaggagccata

SEQ ID NO: 42274 - DNA, 114 bp, synthetic construct
  source 1..114: mol_type = other DNA
gaccacgggaagatcacaattaagaactccaagctgaaattcaacaagcccggtggcaaaggcacaatcaagatcgagagcggcaaggtgaccattatcaagaccaccatcaaa

SEQ ID NO: 42275 - DNA, 30 bp, synthetic construct
  source 1..30: mol_type = other DNA
gtagcctcactgggcgaggctgcaatcagc

SEQ ID NO: 42276 - DNA, 57 bp, synthetic construct
  source 1..57: mol_type = other DNA
ctcatcgggaccctgttcggccacattgaggccgacgtttggcacaacgctgaactc

SEQ ID NO: 42277 - DNA, 33 bp, synthetic construct
  source 1..33: mol_type = other DNA
agcaccttcggcacaatggcaatagcagcagcg

SEQ ID NO: 42278 - DNA, 51 bp, synthetic construct
  source 1..51: mol_type = other DNA
ctcggaatatacaatctgagcgcccaaacggcgcaaatggccaccgagatg

SEQ ID NO: 42279 - DNA, 69 bp, synthetic construct
  source 1..69: mol_type = other DNA
accaaatggggagccatggccggcgccgctatccctaacccctatcttgcatccttcgtacaaaaagga

SEQ ID NO: 42280 - DNA, 108 bp, synthetic construct
  source 1..108: mol_type = other DNA
ttccctctcggcgtgccctacgggtcacagcaaagcttactgggaatgttcggatcggcaatagcaccggtcttcaagcccctgggctttgggacatggcaagctgcc

SEQ ID NO: 42281 - DNA, 75 bp, synthetic construct
  source 1..75: mol_type = other DNA
ggcaccctgggcggactcgaagaggatgacgaggaaggaataacttcgcttgtccgggacgttttcacacctttg

SEQ ID NO: 42282 - DNA, 33 bp, synthetic construct
  source 1..33: mol_type = other DNA
gtggctagcctgggcgaggtggccataagtgga

SEQ ID NO: 42283 - DNA, 57 bp, synthetic construct
  source 1..57: mol_type = other DNA
ctgatcgggctcctgttcggccaaatagagagcgatgtctgggctattgctgagatg

SEQ ID NO: 42284 - DNA, 33 bp, synthetic construct
  source 1..33: mol_type = other DNA
agcacattcggcaccatggcgatagccgcaaat

SEQ ID NO: 42285 - DNA, 54 bp, synthetic construct
  source 1..54: mol_type = other DNA
atcatcggcatctacaacctgagccccgagaccgccgcaatggcttccgaaatg

SEQ ID NO: 42286 - DNA, 30 bp, synthetic construct
  source 1..30: mol_type = other DNA
tcccagctgagccccgacgccttctttgcc

SEQ ID NO: 42287 - DNA, 54 bp, synthetic construct
  source 1..54: mol_type = other DNA
gatatcttaagccttatgaacgtcaccacatccgtggacctggccattgactac

SEQ ID NO: 42288 - DNA, 48 bp, synthetic construct
  source 1..48: mol_type = other DNA
tacgggttcgccctgttctccgtcaccggcgtggagacaagcgtgttt

SEQ ID NO: 42289 - DNA, 93 bp, synthetic construct
  source 1..93: mol_type = other DNA
tccagcctgaattttaactggggcaccaactctgccctctacttcctcgagaacgtcggcggatcaagtaatctgtccaacatgaccaacttt

SEQ ID NO: 42290 - DNA, 72 bp, synthetic construct
  source 1..72: mol_type = other DNA
accctgcccggggccaacatcggcattaacactctccttaagcctgactggcagatgctcctgaacgtcaat

SEQ ID NO: 42291 - DNA, 48 bp, synthetic construct
  source 1..48: mol_type = other DNA
ggctacatgtcttatactagcgggacacccatgaccaagctggttagc

SEQ ID NO: 42292 - DNA, 36 bp, synthetic construct
  source 1..36: mol_type = other DNA
atggtggccagcctgggcgaagcagctatctctggc

SEQ ID NO: 42293 - DNA, 57 bp, synthetic construct
  source 1..57: mol_type = other DNA
attatcgggctgctctttgggcaaattgaagccgacgtttgggcaaatgctaacgtg

SEQ ID NO: 42294 - DNA, 33 bp, synthetic construct
  source 1..33: mol_type = other DNA
agcaccttcggcacaatggccatcgctgcaaac

SEQ ID NO: 42295 - DNA, 51 bp, synthetic construct
  source 1..51: mol_type = other DNA
ctgggcatgtacgggctcagcacacacacaacttccatgacggccgagatg

SEQ ID NO: 42296 - DNA, 30 bp, synthetic construct
  source 1..30: mol_type = other DNA
gtggcatccctgggcgaggctgcgatcagc

SEQ ID NO: 42297 - DNA, 57 bp, synthetic construct
  source 1..57: mol_type = other DNA
ctgattggcgtcctgttcggacaaatagaagccgatgtctggcacaacgctgacatg

SEQ ID NO: 42298 - DNA, 30 bp, synthetic construct
  source 1..30: mol_type = other DNA
agcacattcggaaccatggcaatcgccgcc

SEQ ID NO: 42299 - DNA, 51 bp, synthetic construct
  source 1..51: mol_type = other DNA
ctgggcatttacaacctgagtgccgaaaccgcgcgaatgacaactgagatg

SEQ ID NO: 42300 - DNA, 33 bp, synthetic construct
  source 1..33: mol_type = other DNA
gtggctagcctcggcgaagcagctatcagtggt

SEQ ID NO: 42301 - DNA, 57 bp, synthetic construct
  source 1..57: mol_type = other DNA
atgattggcatcctgttcggccacatcgaggccgacgtctggaacaatgctgacatc

SEQ ID NO: 42302 - DNA, 33 bp, synthetic construct
  source 1..33: mol_type = other DNA
agcaccttcggcacaatggcaatcgctgcgaat

SEQ ID NO: 42303 - DNA, 51 bp, synthetic construct
  source 1..51: mol_type = other DNA
ctggacatttaccaattgagcgaacaaacggcggcaatgacaaccgagatg

SEQ ID NO: 42304 - DNA, 30 bp, synthetic construct
  source 1..30: mol_type = other DNA
gttgccagcttgggagaggcagctatctca

SEQ ID NO: 42305 - DNA, 57 bp, synthetic construct
  source 1..57: mol_type = other DNA
ctgattgggctgctcttcggccacatcgaggcagacgtctgggccaacgctgatgtg

SEQ ID NO: 42306 - DNA, 30 bp, synthetic construct; identical to SEQ ID NO: 42224
  source 1..30: mol_type = other DNA

SEQ ID NO: 42307 - DNA, 54 bp, synthetic construct
  source 1..54: mol_type = other DNA
gtgctcgggatctacaacctgagcgccaagaccgctgccatgaccaccgagatg

SEQ ID NO: 42308 - DNA, 36 bp, synthetic construct
  source 1..36: mol_type = other DNA
cagtttgaggagggcgacgatctggccggtatcttc

SEQ ID NO: 42309 - DNA, 51 bp, synthetic construct
  source 1..51: mol_type = other DNA
gactggatcttcggcaccttctatggggaggaaatggagccgtactcccga

SEQ ID NO: 42310 - DNA, 33 bp, synthetic construct
  source 1..33: mol_type = other DNA
tctggcatcaacggcgatgcacttgctgctctg

SEQ ID NO: 42311 - DNA, 54 bp, synthetic construct
  source 1..54: mol_type = other DNA
gatatggtcattctgctcggcgcctctgatgtgtcatcgtattgcctgtcctac

SEQ ID NO: 42312 - DNA, 33 bp, synthetic construct
  source 1..33: mol_type = other DNA
atgcagaccagcggcatagccgaggtagcatct

SEQ ID NO: 42313 - DNA, 69 bp, synthetic construct
  source 1..69: mol_type = other DNA
caccctatctgcgaggtcttcaatgtgcaggctgccaatccttcattagtggcagcatctgagtctcgg

SEQ ID NO: 42314 - DNA, 54 bp, synthetic construct
  source 1..54: mol_type = other DNA
cccaacgacgccattgtggctaagcacctggagcttaaaatccagcatcctgaa

SEQ ID NO: 42315 - DNA, 60 bp, synthetic construct
  source 1..60: mol_type = other DNA
cagggtatcctggagttcgtacctgattcaaagattaccctcgaaggcctttgcgtagaa

SEQ ID NO: 42316 - DNA, 33 bp, synthetic construct
  source 1..33: mol_type = other DNA
aaggaatgcaaatatggtgctcggaaattcgcc

SEQ ID NO: 42317 - DNA, 30 bp, synthetic construct
  source 1..30: mol_type = other DNA
gtggccagccttggcgaagcagctatctca

SEQ ID NO: 42318 - DNA, 57 bp, synthetic construct
  source 1..57: mol_type = other DNA
ctgatcgggaccctgttcggacaaatagaggccgatgtttggcaaaacgctgaaatg

SEQ ID NO: 42319 - DNA, 30 bp, synthetic construct
  source 1..30: mol_type = other DNA
agcacattcggcaccatggcaatcgccgct

SEQ ID NO: 42320 - DNA, 51 bp, synthetic construct
  source 1..51: mol_type = other DNA
ctgggaatctacaacctgtcctctgaaacagcggcgatgacaactgagatg

SEQ ID NO: 42321 - DNA, 33 bp, synthetic construct
  source 1..33: mol_type = other DNA
gctggactgggtgccgatgctttagcggcagcg

SEQ ID NO: 42322 - DNA, 48 bp, synthetic construct
  source 1..48: mol_type = other DNA
ctgattatcatgggcgctagctccgttctcgaccacgccctggaatac

SEQ ID NO: 42323 - DNA, 33 bp, synthetic construct
  source 1..33: mol_type = other DNA
accatcatcagcggccccgtggccgtggccgtg

SEQ ID NO: 42324 - DNA, 63 bp, synthetic construct
  source 1..63: mol_type = other DNA
cagatcgcttatatatttagttactcaaagtctagcgctcagttagaaccgttaatctcaaat

SEQ ID NO: 42325 - DNA, 30 bp, synthetic construct
  source 1..30: mol_type = other DNA
gttgccagcctaggcgaagccgcaatctct

SEQ ID NO: 42326 - DNA, 57 bp, synthetic construct
  source 1..57: mol_type = other DNA
ctgatcagcgtgctgtttggtcaaatcgaagccgacgtctggcacaacgctgatatc

SEQ ID NO: 42327 - DNA, 33 bp, synthetic construct
  source 1..33: mol_type = other DNA
agcaccttcggcaccatggctatagctgcgaat

SEQ ID NO: 42328 - DNA, 51 bp, synthetic construct
  source 1..51: mol_type = other DNA
cttggcatctataacttgagtgcacagacagcacagatggcgacggagatg

SEQ ID NO: 42329 - DNA, 36 bp, synthetic construct
  source 1..36: mol_type = other DNA
gtggcgtccctcggcgaggttatatcaagcggcgcc

SEQ ID NO: 42330 - DNA, 57 bp, synthetic construct
  source 1..57: mol_type = other DNA
ctgatcggcatcctctttggccaaattgaaagcgatgtctgggcgaacgccgatatc

SEQ ID NO: 42331 - DNA, 33 bp, synthetic construct
  source 1..33: mol_type = other DNA
agcaccttcggcacaatggccatcgctgctaac

SEQ ID NO: 42332 - DNA, 54 bp, synthetic construct
  source 1..54: mol_type = other DNA
attctggacatctatcaactgtcggaccagactgctgccatggcaagcgagatg

SEQ ID NO: 42333 - DNA, 105 bp, synthetic construct
  source 1..105: mol_type = other DNA
gggaactatgtgataacagcagagtacaatggcgttaaagccagcaactacattaacgtcctgccaacactcgaggcaaaggacctgtccatgaagtacagagat

SEQ ID NO: 42334 - DNA, 189 bp, synthetic construct
  source 1..189: mol_type = other DNA
ctggacggtaccggcgacgctctgacaaacgccaatgtcaaccttaatatcaacggcgtgttatacacgcgtattagtgacgacgaaggcattgcccggcttaacatcaacctcatgcccggacaatacatcatcacaagctcctacaacactctgaacatctctaacaagatctctattacgagctcc

SEQ ID NO: 42335 - DNA, 30 bp, synthetic construct
  source 1..30: mol_type = other DNA
atgggggacgtgttcgccaagtttcctggc

SEQ ID NO: 42336 - DNA, 39 bp, synthetic construct
  source 1..39: mol_type = other DNA
tccaagctgtctctgatcctcaacaatccaagcgttctc

SEQ ID NO: 42337 - DNA, 36 bp, synthetic construct
  source 1..36: mol_type = other DNA
attacactgggaattacctctctggggctgaataac

SEQ ID NO: 42338 - DNA, 144 bp, synthetic construct
  source 1..144: mol_type = other DNA
atgtccttcatcggcgacgacatttggtacgccaagatcctgtcaaaccagcctttggtcaactttctgagcttccgctattacgaatggtcctctcgcctgctgatcgattgcattaccgtgatcctcgctaaggagaactat

SEQ ID NO: 42339 - DNA, 120 bp, synthetic construct
  source 1..120: mol_type = other DNA
agccctggcaacgacaagcgggtcatcgctgagaccgccaggttctacgtggaatacgccaattttggaattatcgagaagctgtatctcggcactatccccacaatcgggattctgctc

SEQ ID NO: 42340 - DNA, 153 bp, synthetic construct
  source 1..153: mol_type = other DNA
atcgacatcacaagcatccccaactacctcaatatcgagctgatgcacaaccccatcgtagtgtctgctttttccacggtggactctatcactaagtccatgccactgataaacgataccatccacctctttacctacaagggccttcctaat

SEQ ID NO: 42341 - DNA, 30 bp, synthetic construct
  source 1..30: mol_type = other DNA
agccccaccgtgttcgccagcggcagccgg

SEQ ID NO: 42342 - DNA, 30 bp, synthetic construct
  source 1..30: mol_type = other DNA
agcatctactccgctgacgccttctacgcc

SEQ ID NO: 42343 - DNA, 54 bp, synthetic construct
  source 1..54: mol_type = other DNA
aacctgctgcacgtgatgaagattaccaagagcgtgcagatcgtcaaactctac

SEQ ID NO: 42344 - DNA, 48 bp, synthetic construct
  source 1..48: mol_type = other DNA
tatatctacaacgccttccacatttacggcatggagtctgctgtgaca

SEQ ID NO: 42345 - DNA, 33 bp, synthetic construct
  source 1..33: mol_type = other DNA
atcgccaactactcctatgacgcaattgctgcg

SEQ ID NO: 42346 - DNA, 48 bp, synthetic construct
  source 1..48: mol_type = other DNA
ctgctccttattggggccggcgaagtgatcgaggatgctctgaactac

SEQ ID NO: 42347 - DNA, 36 bp, synthetic construct
  source 1..36: mol_type = other DNA
gagatcctgagcggcgctattgcggtggccgcttat

SEQ ID NO: 42348 - DNA, 57 bp, synthetic construct
  source 1..57: mol_type = other DNA
cccatttccaccctgttcgcacctgctaattcggcgctgagcatcaagatcatctct

SEQ ID NO: 42349 - DNA, 30 bp, synthetic construct
  source 1..30: mol_type = other DNA
gtggcctccttgggcgaggctgcaatctca

SEQ ID NO: 42350 - DNA, 57 bp, synthetic construct
  source 1..57: mol_type = other DNA
ctgatcggcatcctcttcgggcacattgaggccgaggtttgggcgaacgctgatgtg

SEQ ID NO: 42351 - DNA, 30 bp, synthetic construct; identical to SEQ ID NO: 42224
  source 1..30: mol_type = other DNA

SEQ ID NO: 42352 - DNA, 54 bp, synthetic construct
  source 1..54: mol_type = other DNA
attctggggatctataaccttagtgctcagaccgctgtgatggcaggcgaaatg

SEQ ID NO: 42353 - DNA, 45 bp, synthetic construct
  source 1..45: mol_type = other DNA
ctgcctagcatcgagcagtccttcaacctgacctcccgggaatct

SEQ ID NO: 42354 - DNA, 39 bp, synthetic construct
  source 1..39: mol_type = other DNA
atcgacagtagtagctttatttctagcctcacatcatta

SEQ ID NO: 42355 - DNA, 36 bp, synthetic construct
  source 1..36: mol_type = other DNA
tccttagtaatcttaagcatgggactctctgaccag

SEQ ID NO: 42356 - DNA, 30 bp, synthetic construct
  source 1..30: mol_type = other DNA
agccagatggactccaagtctttcttcgca

SEQ ID NO: 42357 - DNA, 54 bp, synthetic construct
  source 1..54: mol_type = other DNA
gacctgctcatcatgattaaggctgactcctgcctggatctgagcatggcctat

SEQ ID NO: 42358 - DNA, 33 bp, synthetic construct
  source 1..33: mol_type = other DNA
ctgatcgaacagctgggccagattggggtactg

SEQ ID NO: 42359 - DNA, 51 bp, synthetic construct
  source 1..51: mol_type = other DNA
gattacggcttcgcgttgttctccgtcaccggggcccctgagagcgtgttt

SEQ ID NO: 42360 - DNA, 45 bp, synthetic construct
  source 1..45: mol_type = other DNA
acccggaagatttacctcacaaagaacataatcatcgtgctgatg

SEQ ID NO: 42361 - DNA, 123 bp, synthetic construct
  source 1..123: mol_type = other DNA
accgccctcccactgcacccttacgcactcgccatggcttccggcattggctccgcctccatgaacgctgctgcccttagtcccctgcttagcatctacccctctagcattagcgacgacatt

SEQ ID NO: 42362 - DNA, 48 bp, synthetic construct
  source 1..48: mol_type = other DNA
atggtgcccagctcccactacattgtgcctttcgtcaaggccatcgac

SEQ ID NO: 42363 - DNA, 93 bp, synthetic construct
  source 1..93: mol_type = other DNA
tccttcacaaaggcttggggcgccaaccccgatctgtacttcgccaacaacgtactgcatagcacagactctatgaccggcatctttaccatc

SEQ ID NO: 42364 - DNA, 75 bp, synthetic construct
  source 1..75: mol_type = other DNA
ctgacactgcctggcgcttctctggggtacagccagatcttcacccctgactggtccgccctgaccaacctcaac

SEQ ID NO: 42365 - DNA, 105 bp, synthetic construct
  source 1..105: mol_type = other DNA
ttcatggcactgaccagcggcatcccatttaacgagctcgtgactgaaggcaccggcctggccttcgtggtcttccctcaagtgttcaatatcatgggtccttgg

SEQ ID NO: 42366 - DNA, 240 bp, synthetic construct
  source 1..240: mol_type = other DNA
ctcacacaccttggcgatacctccgcctggccacggattatggcctccgtggagtctggcaacgacatctacggcgtcatggggaattactacactcccgtctggggctatatcctgagcttcctggacctgatgatccagaccgccggcgctgtccctctgtttggcgattacttcgagggcctcctgcctctggaaggagtccggtcctataggcccttcgtgattagtcctgagatg

SEQ ID NO: 42367 - DNA, 78 bp, synthetic construct
  source 1..78: mol_type = other DNA
agcggccagatcgacgatgcattcattttcctgaccgaccggcagacagccgacttttcctctctctacggtgccgcc

SEQ ID NO: 42368 - DNA, 69 bp, synthetic construct
  source 1..69: mol_type = other DNA
agttgcgcctactacggcctgatcgactatgacaccttcatgtctctgagcgtgtcctttgctgaagac

SEQ ID NO: 42369 - DNA, 246 bp, synthetic construct
  source 1..246: mol_type = other DNA
ctcaattacggctatgacgtgcaccactgggctattatcatggctaacgcctcttccggcaatggcctatacggtctaaccggctatttctacacccctgtctggggctatatcctcgggtttatgaacctgatacaacaggcatgcctgacactgggagagacagccttccgggtgcccgaagcccttggcttcgagggctacgacggctggatcagcgcaaacacgacgtcaatgacctatacc

SEQ ID NO: 42370 - DNA, 93 bp, synthetic construct
  source 1..93: mol_type = other DNA
cagacgatggacggcaccctgtcctactgcttcacctttctgaccgctcgggccggcggagatggcagccaatgggacgccatcgctggaatg

SEQ ID NO: 42371 - DNA, 72 bp, synthetic construct
  source 1..72: mol_type = other DNA
ctcactctggcctgtgattccaatctcatcgccgttaccactgtggtgtcctggagtgacgcggcagctcca

SEQ ID NO: 42372 - DNA, 30 bp, synthetic construct
  source 1..30: mol_type = other DNA
atgctgagccagattggcatgcccatcaac

SEQ ID NO: 42373 - DNA, 54 bp, synthetic construct
  source 1..54: mol_type = other DNA
ggcatcattgtgaagaacagcgccaatatcctgaccctggggaacctcacaagc

SEQ ID NO: 42374 - DNA, 123 bp, synthetic construct
  source 1..123: mol_type = other DNA
ggcttcggagtggactccaccatcctgatgcccaagatcccttctgaggtcatcagcctcaagcttgacaccactgtgttttttgcctttcttacggggtttcacgagctctttacctacaac

SEQ ID NO: 42375 - DNA, 45 bp, synthetic construct
  source 1..45: mol_type = other DNA
ctgaagctgatcgtgcccgagagctccatcctccctacccacatc

SEQ ID NO: 42376 - DNA, 30 bp, synthetic construct
  source 1..30: mol_type = other DNA
aagcagttcgccccacctagtaccctgatc

SEQ ID NO: 42377 - DNA, 45 bp, synthetic construct
  source 1..45: mol_type = other DNA
attggcctgttcaccaaggaccccatcgtgctgcgggaaacacag

SEQ ID NO: 42378 - DNA, 93 bp, synthetic construct
  source 1..93: mol_type = other DNA
actggaatttcaatcgaggactctctgttcgagtccatgagtgctctcaccgggagtggcataaccatataccaggatgtcgagattttgcca

SEQ ID NO: 42379 - DNA, 99 bp, synthetic construct
  source 1..99: mol_type = other DNA
gggatgcccatcttcgactctgtctgtaacaccttcacaatcattagcaccggcggaatgtccatcaagaacgccaacatcggcttctatcaaaatgat

SEQ ID NO: 42380 - DNA, 99 bp, synthetic construct
  source 1..99: mol_type = other DNA
tccgacatcgtgcctatcgagattctgttcaccgtagtgtccgctgtcacaacaaccggcgctagcgtacaatctagtaccgtcatggggaattggcct

SEQ ID NO: 42381 - DNA, 99 bp, synthetic construct
  source 1..99: mol_type = other DNA
tacggtcatgaccccattgaaggactctttttcaccatgtccctccaaggcaatgttggtttagaaatcggccacgtcacaagcgcccttcaacctcag

SEQ ID NO: 42382 - DNA, 30 bp, synthetic construct
  source 1..30: mol_type = other DNA
atgttggctgacgctgggatgccagctaca

SEQ ID NO: 42383 - DNA, 54 bp, synthetic construct
  source 1..54: mol_type = other DNA
ggcatcattgtcgccgaccccgctaacttagttgggctcggtacccttacaagc

SEQ ID NO: 42384 - DNA, 126 bp, synthetic construct
  source 1..126: mol_type = other DNA
ggcttcggcgtcggcggcgatatctttatgcctgctatcccaaaggagattatcagcttctcattcgacactaccgtcctcttcggattcgcctccggattcggagaacttttctctaccaaccct

SEQ ID NO: 42385 - DNA, 84 bp, synthetic construct
  source 1..84: mol_type = other DNA
gtcagcctatacgggcttagcccaaccgccattgaccagttcgcccaactccgctctgtgatggcagggtcctttggctccatc

SEQ ID NO: 42386 - DNA, 30 bp, synthetic construct
  source 1..30: mol_type = other DNA
gggtccctgccaccgatttccggcgattac

SEQ ID NO: 42387 - DNA, 99 bp, synthetic construct
  source 1..99: mol_type = other DNA
ggggccttcaacttcctccctagcgccggaagctctgaaccagcaggaaagattccagctttcatctactccctgacctccgggcaaccgaactttggc

SEQ ID NO: 42388 - DNA, 120 bp, synthetic construct
  source 1..120: mol_type = other DNA
gggatattccaatcggcaggcttccccattctcggcgaggtgtcgcaagggcaagccatttccggaatcgcctactacctgaccactcctacgagtatatcggtcctttttactgatacg

SEQ ID NO: 42389 - DNA, 57 bp, synthetic construct
  source 1..57: mol_type = other DNA
gggatcatcattaagaaccagtccaccttcgtgacaatgggcctcagcaacagtctg

SEQ ID NO: 42390 - DNA, 117 bp, synthetic construct
  source 1..117: mol_type = other DNA
gggttcggggtcggggagatcggcatgcccacactgcctacgcaaattatctccaccaactttgacaccacactgttctgcgggtttatacaagggttcaagggcctctttagcaac

SEQ ID NO: 42391 - DNA, 45 bp, synthetic construct
  source 1..45: mol_type = other DNA
atgaagaaattcaacctcggcggcaatgtttctattgtcatcatg

SEQ ID NO: 42392 - DNA, 33 bp, synthetic construct
  source 1..33: mol_type = other DNA
agcggccaggccctcaagttgctgttcgacgtc

SEQ ID NO: 42393 - DNA, 123 bp, synthetic construct
  source 1..123: mol_type = other DNA
agtacctccctgccctttcacccttacgcccttgctatggcaagcggagttgggtctgcctccatgaacgccgctgccctcgcacccctcacggccatctttcctgacatgaaggacaccatc

SEQ ID NO: 42394 - DNA, 48 bp, synthetic construct
  source 1..48: mol_type = other DNA
tggtgccctctgagccccatcattgtcacctacgtgaacaatgtggag

SEQ ID NO: 42395 - DNA, 84 bp, synthetic construct
  source 1..84: mol_type = other DNA
gtgagcctcttcggactgtcacctaccgccgtcgaccagttcgctcaattacgttctgtgatggcaggcagttttggaagcatc

SEQ ID NO: 42396 - DNA, 102 bp, synthetic construct
  source 1..102: mol_type = other DNA
gtcggcagctttaattttctccctaccgccgcaagttcagcacctgcggggcggatacccgggttcatttactcgctcatgacggggcagcctaacttctca

SEQ ID NO: 42397 - DNA, 120 bp, synthetic construct
  source 1..120: mol_type = other DNA
ggactcttccaaagcctcgggtttcctatcctgggcgaggttagccagggtcaggctatttctgggatcgcctactacctctccacacctagtagcatctctgtgttcttccttaccgat

SEQ ID NO: 42398 - DNA, 51 bp, synthetic construct
  source 1..51: mol_type = other DNA
gccagcaacctgatctccacggacgccctgagtgcaattaacatcgatgca

SEQ ID NO: 42399 - DNA, 63 bp, synthetic construct
  source 1..63: mol_type = other DNA
cgggagcccattatctacgctctgggggcccggggcagcctctatgacctttgtgaagattac

SEQ ID NO: 42400 - DNA, 30 bp, synthetic construct
  source 1..30: mol_type = other DNA
atggacctggctggcagcgatggagtagcc

SEQ ID NO: 42401 - DNA, 57 bp, synthetic construct
  source 1..57: mol_type = other DNA
ctggccagcctcttcgccgctgagaacgcagatgtgctggacttgggtgtccgcggt

SEQ ID NO: 42402 - DNA, 33 bp, synthetic construct
  source 1..33: mol_type = other DNA
gtagctggactgggcgcagatgctcttgccgga

SEQ ID NO: 42403 - DNA, 51 bp, synthetic construct
  source 1..51: mol_type = other DNA
gtgctgactatcatgggagccgcccataccctgccttacgcccacgagtat

SEQ ID NO: 42404 - DNA, 39 bp, synthetic construct
  source 1..39: mol_type = other DNA
ctggccatcgtggccggtaccgatgcggtcgctgtctac

SEQ ID NO: 42405 - DNA, 69 bp, synthetic construct
  source 1..69: mol_type = other DNA
ccccagatcgtctacgtgttctcctactctgacaactcagcccaccttgctgccccgatggcggctttc

SEQ ID NO: 42406 - DNA, 54 bp, synthetic construct
  source 1..54: mol_type = other DNA
ggcataattatctctcatcccacaaacatcgtcggactcagccacctgacttcc

SEQ ID NO: 42407 - DNA, 126 bp, synthetic construct
  source 1..126: mol_type = other DNA
acaggcttcggcgtacactcggcgatcaacatgcctatgatcccctctgagttcgtgactctgaacttcgacaccagcgctaccttcgccttcatctccggcttcaaggaactctttgggaatctg

SEQ ID NO: 42408 - DNA, 36 bp, synthetic construct
  source 1..36: mol_type = other DNA
gccagtcagctaacgagcgacgccttctacgcaatc

SEQ ID NO: 42409 - DNA, 57 bp, synthetic construct
  source 1..57: mol_type = other DNA
gataacatcttcgtgctgctcaaggtcgaggagtccatggaccttgccctgatctat

SEQ ID NO: 42410 - DNA, 33 bp, synthetic construct
  source 1..33: mol_type = other DNA
ctgattgaggagctcggcaagacgggaatcctg

SEQ ID NO: 42411 - DNA, 39 bp, synthetic construct
  source 1..39: mol_type = other DNA
tacaagtccttcaacatcatgaatatggagctgtcagtg

SEQ ID NO: 42412 - DNA, 36 bp, synthetic construct
  source 1..36: mol_type = other DNA
atctctggcctcggacccgattctctggctgctatt

SEQ ID NO: 42413 - DNA, 51 bp, synthetic construct
  source 1..51: mol_type = other DNA
atcctgatcttcctcggcgccggtggcgtgatttcctatgcaagttcttac

SEQ ID NO: 42414 - DNA, 33 bp, synthetic construct
  source 1..33: mol_type = other DNA
gtgatcattgggggtaacatggctgtcggagcc

SEQ ID NO: 42415 - DNA, 57 bp, synthetic construct
  source 1..57: mol_type = other DNA
aaccttgcatccttcttcgcttccgacgccaccaatgacatgaacatctacatcatt

SEQ ID NO: 42416 - DNA, 33 bp, synthetic construct
  source 1..33: mol_type = other DNA
gtgggctacatgggcactaacgctttggccgca

SEQ ID NO: 42417 - DNA, 60 bp, synthetic construct
  source 1..60: mol_type = other DNA
aaggaggtgctggggatcttcggcgtcaccgactccctgtacaattacgcctcggattat

SEQ ID NO: 42418 - DNA, 33 bp, synthetic construct
  source 1..33: mol_type = other DNA
ctggtcgtcggagggtcactcgcacttgccgcc

SEQ ID NO: 42419 - DNA, 48 bp, synthetic construct
  source 1..48: mol_type = other DNA
atggccctgctattgacgtcagatcccatcctgatcaataacatcagc

SEQ ID NO: 42420 - DNA, 39 bp, synthetic construct
  source 1..39: mol_type = other DNA
gacaatctgttcgccatgcccatccacaactggaccttt

SEQ ID NO: 42421 - DNA, 39 bp, synthetic construct
  source 1..39: mol_type = other DNA
attcggtactcaagcctgggagcagttgggattccaggc

SEQ ID NO: 42422 - DNA, 144 bp, synthetic construct
  source 1..144: mol_type = other DNA
ttctactataaatacttcgagggcaaaactgctaccgaggaccctaatctgctgtacacacttatgcaagcagccctggaacccggcaaggacaccatctacaagtgcaccttcacaagcaacaaggccaacggaagaggggga

SEQ ID NO: 42423 - DNA, 285 bp, synthetic construct
  source 1..285: mol_type = other DNA
tacaagctcgctctgaaaaagagtgccgtcaagaagtctgctaaaaagctggtgctcaaggcaaagctgaagaaaggcaccaaagtcgccaaggggaagacagttgtgtttaaattcaagggcaagaagtataaggccaagaccaacaagaagggcgtggccaaggtcatcatcaaaaagagcgtgcttaagaagctcaaggttggaaaaaagattacctacaaagctgcctacaaagccttctccggaaaggttatcgctaagaagacagtcaaagtaaagaaa

SEQ ID NO: 42424 - DNA, 93 bp, synthetic construct
  source 1..93: mol_type = other DNA
agcttcaccaaggcctggggcgccaaccccgacctgtactttagtaacaacgtgctgcacgctactgactccatgtctggcctgttcaccatc

SEQ ID NO: 42425 - DNA, 72 bp, synthetic construct
  source 1..72: mol_type = other DNA
ctgaccctgcctggcgccagcacggggtacacgcaaattttcacccctgattggaatgcgctcctcaacctc

SEQ ID NO: 42426 - DNA, 108 bp, synthetic construct
  source 1..108: mol_type = other DNA
ggatttatgaccgctactagcggcatccctttcaatgaactggtgaccgaaggcacaggcctggccttcgtggttttcccgcaagtttttaacaccatgggttctgtg

SEQ ID NO: 42427 - DNA, 33 bp, synthetic construct
  source 1..33: mol_type = other DNA
gccagcctctccaaggaggcttattacgcacta

SEQ ID NO: 42428 - DNA, 51 bp, synthetic construct
  source 1..51: mol_type = other DNA
atccttcaaatgatgaagatcacgcacaatatcggcctggtcctcacctac

SEQ ID NO: 42429 - DNA, 36 bp, synthetic construct
  source 1..36: mol_type = other DNA
ttgacccaagagcttggacctaagggcatcctcctg

SEQ ID NO: 42430 - DNA, 51 bp, synthetic construct
  source 1..51: mol_type = other DNA
tacaatatctttcacaccttcaagatcatcaacatgaacgccagcgtaacc

SEQ ID NO: 42431 - DNA, 36 bp, synthetic construct
  source 1..36: mol_type = other DNA
atcagcggccttgggtctgagccactggtagctctt

SEQ ID NO: 42432 - DNA, 54 bp, synthetic construct
  source 1..54: mol_type = other DNA
cccatgctagtttttttgggcgctgggaccagcctgaaatatgctatggactat

SEQ ID NO: 42433 - DNA, 33 bp, synthetic construct
  source 1..33: mol_type = other DNA
ctgaaggcaggcggccacaccgctgttgccgcc

SEQ ID NO: 42434 - DNA, 63 bp, synthetic construct
  source 1..63: mol_type = other DNA
caaattgcctacatgttctcttacaactcccaaaatgctgtgttgcaaccacatatctcactg

SEQ ID NO: 42435 - DNA, 42 bp, synthetic construct
  source 1..42: mol_type = other DNA
tccgacactcttcaagattccttcgaggtcggtagtagcagc

SEQ ID NO: 42436 - DNA, 42 bp, synthetic construct
  source 1..42: mol_type = other DNA
ggctctttctacaagaatatctacgatttctccaacaccgag

SEQ ID NO: 42437 - DNA, 30 bp, synthetic construct
  source 1..30: mol_type = other DNA
gtgatcagcgacaagaccctgggagagttc

SEQ ID NO: 42438 - DNA, 57 bp, synthetic construct
  source 1..57: mol_type = other DNA
aagcagctgacaatcaaagttaacaacaagaactacgccaaaactacaggatcggat

SEQ ID NO: 42439 - DNA, 45 bp, synthetic construct
  source 1..45: mol_type = other DNA
aacgaatttgagaaaaccatcaaggtgctgatacaacaatttacc

SEQ ID NO: 42440 - DNA, 96 bp, synthetic construct
  source 1..96: mol_type = other DNA
cggatttacctgaaggggtccgccgacgtgatcagttacaaaaccctcacaatcagcgtcggcgacaaagtctttgtaaaaaagaccaactctgag

SEQ ID NO: 42441 - DNA, 51 bp, synthetic construct
  source 1..51: mol_type = other DNA
gccgttaaatacagtggcaacgagatcagtaaaaagatcaaatgcattaag

SEQ ID NO: 42442 - DNA, 171 bp, synthetic construct
  source 1..171: mol_type = other DNA
gagagggccctcaacaccaagctggtcaagaagaataagtacaactactggcctaagaccgtaactgcctccctgaagggcaagtcctacacctaccccgaagttcgtgacatccagaatactgagtatacatgcgggccaaccagctctagcgtttgtagtcagcaagcc

SEQ ID NO: 42443 - DNA, 171 bp, synthetic construct
  source 1..171: mol_type = other DNA
aagaagtactcatctgaaaaatacttccaaacgaaaggccacgtcactaatggcatcaatgtcgaggtgctcaaaaaggtgctctccaagaacaactttaaggccagttatttctactcaatgaatacggctgtgaagcagttgaaaaaaggcggtagcgcacttatcgca

SEQ ID NO: 42444 - DNA, 99 bp, synthetic construct
  source 1..99: mol_type = other DNA
agcaagaatgtgaagaagcaggtcgggaattattacaagtccatgggcaccaactgggtcgggcagaacgttaatgagcggattcccgacatcggaaag

SEQ ID NO: 42445 - DNA, 282 bp, synthetic construct
  source 1..282: mol_type = other DNA
tacctgaagaaggacagccaggaagtgaaggtagtatacgaaaatgggaagatcaagcgggagaagacccagagcatttctatcgtatatgattttgacctcctgagttccgactactttacctacggcgaggacaacctgattgagatcatccttcctgacaccatgaacaataagctgctgaccgtcgagatcaatggcacaaaatatgcgtttaaacggcctgcctacgctgggaacaacttcatcgaaatcaacatttccaaactacaagccgggcag

SEQ ID NO: 42446 - DNA, 84 bp, synthetic construct
  source 1..84: mol_type = other DNA
atcaatctatacggtttgagttctgtggccgtcgaccagttcgcctccttgcgagcagttctcgctggaaactttggaagcatc

SEQ ID NO: 42447 - DNA, 30 bp, synthetic construct
  source 1..30: mol_type = other DNA
ggcgcaatcgccgccaaaagcgctcagtac

SEQ ID NO: 42448 - DNA, 108 bp, synthetic construct
  source 1..108: mol_type = other DNA
gtgggcgctttcaacatccttccttccccgtccactcctggcgtgtctgccgggaagatccccgctttcattcaatcggtagccgccggaacccctacattcgacaat

SEQ ID NO: 42449 - DNA, 111 bp, synthetic construct
  source 1..111: mol_type = other DNA
caaaagttgggattccccattctcgggaccatcgagaacggtcgagcgatcaatggggtggcctacatgctcaccgcaccgacaagccttgatatggttattacggaccca

SEQ ID NO: 42450 - DNA, 33 bp, synthetic construct
  source 1..33: mol_type = other DNA
agccagatgaacgccgagtcctttttcgctatc

SEQ ID NO: 42451 - DNA, 57 bp, synthetic construct
  source 1..57: mol_type = other DNA
gacattctgacattcatcggggctactagtagcatggatctgtccatgcaatattat

SEQ ID NO: 42452 - DNA, 51 bp, synthetic construct
  source 1..51: mol_type = other DNA
gactacggcttcgctttgttttccatcacttccgccccaatttctgttttc

SEQ ID NO: 42453 - DNA, 48 bp, synthetic construct
  source 1..48: mol_type = other DNA
atcagcaacatgcagacctacacactgaatttcgtgaacaggcctatg

SEQ ID NO: 42454 - DNA, 54 bp, synthetic construct
  source 1..54: mol_type = other DNA
gttggaggcctccctatccttaagtctagcctgcggtactccctgaaaccagcc

SEQ ID NO: 42455 - DNA, 261 bp, synthetic construct
  source 1..261: mol_type = other DNA
aggagtctgaacgaactcgccatttcatccaatacgaacccttttgctacgcttcaaaacagagccgatttcacactgaacgtgctcaacctcctgaatcaaatttctggggacttcggcatcctccacggcaagatgatcgcgagttcaatgccgggttctcctcttgggccccgaatgatggttgggaaactcattgcctggcgttccgaggtgacagttacacctactctcctgggtcaaatgattgtggacttcggt

SEQ ID NO: 42456 - DNA, 33 bp, synthetic construct
  source 1..33: mol_type = other DNA
aacttcctgagcccttatataccttatagtcct

SEQ ID NO: 42457 - DNA, 33 bp, synthetic construct
  source 1..33: mol_type = other DNA
atggagtttttcctccaaacgtatcccggtttg

SEQ ID NO: 42458 - DNA, 39 bp, synthetic construct
  source 1..39: mol_type = other DNA
aatagcctgtccaccctgcttaagaaccagacactgctg

SEQ ID NO: 42459 - DNA, 33 bp, synthetic construct
  source 1..33: mol_type = other DNA
accatcgccttcaacaacattggcgttggttac

SEQ ID NO: 42460 - DNA, 33 bp, synthetic construct
  source 1..33: mol_type = other DNA
gtagctgggctggggtctgacgctttggccgca

SEQ ID NO: 42461 - DNA, 54 bp, synthetic construct
  source 1..54: mol_type = other DNA
cccattctgatcgcacgcggcgctggcaagaccatgagctacgcctatcgatac

SEQ ID NO: 42462 - DNA, 36 bp, synthetic construct
  source 1..36: mol_type = other DNA
gtgatggtcagcggaactgacgctgttgctgcttac

SEQ ID NO: 42463 - DNA, 63 bp, synthetic construct
  source 1..63: mol_type = other DNA
cagatcgccagcatcttctcctacacgagtgccagtgcctctctggggccacagatcgcctat

SEQ ID NO: 42464 - DNA, 33 bp, synthetic construct
  source 1..33: mol_type = other DNA
gtggcaggacttggccaagccgctattgccggg

SEQ ID NO: 42465 - DNA, 60 bp, synthetic construct
  source 1..60: mol_type = other DNA
gagccactgctgcggacctacggagcttcagggcaatccttggccgaaggcatcaagtat

SEQ ID NO: 42466 - DNA, 36 bp, synthetic construct
  source 1..36: mol_type = other DNA
agcaccatcggcggcgaatacgggattgcagctttc

SEQ ID NO: 42467 - DNA, 63 bp, synthetic construct
  source 1..63: mol_type = other DNA
ctgagcactatcttcgcttacacccctgagacagccccattggtgcccgagattaccagattt

SEQ ID NO: 42468 - DNA, 30 bp, synthetic construct
  source 1..30: mol_type = other DNA
aacttcctgagcccctacatcccttactct

SEQ ID NO: 42469 - DNA, 30 bp, synthetic construct
  source 1..30: mol_type = other DNA
agccagatgaaccccgagtccttctttgcc

SEQ ID NO: 42470 - DNA, 48 bp, synthetic construct
  source 1..48: mol_type = other DNA
ctggaatatatgggcgccacctcttccatggagctgagcatgcagtac

SEQ ID NO: 42471 - DNA, 48 bp, synthetic construct
  source 1..48: mol_type = other DNA
tacgggttcgccctgttctctgtgacgggtgcacctgaaagcgtcttt

SEQ ID NO: 42472 - DNA, 36 bp, synthetic construct
  source 1..36: mol_type = other DNA
atggagtttttcctcaagacctacccgggattaatg

SEQ ID NO: 42473 - DNA, 39 bp, synthetic construct
  source 1..39: mol_type = other DNA
aacagcatctccaccctgctcaagaaccagacattgctg

SEQ ID NO: 42474 - DNA, 39 bp, synthetic construct
  source 1..39: mol_type = other DNA
accctggccttcggcaacgttggagtcgggtttcctcag

SEQ ID NO: 42475 - DNA, 39 bp, synthetic construct
  source 1..39: mol_type = other DNA
tacttcacctacgagggcgcagctgccatgaagagctat

SEQ ID NO: 42476 - DNA, 54 bp, synthetic construct
  source 1..54: mol_type = other DNA
cccctggtctactcatataccgagacggacgttggcgataacatcttcgatttt

SEQ ID NO: 42477 - DNA, 66 bp, synthetic construct
  source 1..66: mol_type = other DNA
gctctgatcctgttcatggtcaaccatgcctccctcgaggaaagcacccctttcgtggttgtttgg

SEQ ID NO: 42478 - DNA, 30 bp, synthetic construct
  source 1..30: mol_type = other DNA
tcccagatgaacgctgagagcttcttcgcc

SEQ ID NO: 42479 - DNA, 51 bp, synthetic construct
  source 1..51: mol_type = other DNA
ctggaatacatgggcgcaacttcgtcaatggagctgagcatgcagtaccaa

SEQ ID NO: 42480 - DNA, 51 bp, synthetic construct
  source 1..51: mol_type = other DNA
gactacggtttcgctctgttctccatcacctctgcccctgaaagcgtcttt

SEQ ID NO: 42481 - DNA, 39 bp, synthetic construct
  source 1..39: mol_type = other DNA
atcacctttcaagggggggtggcaaccaagagctacact

SEQ ID NO: 42482 - DNA, 54 bp, synthetic construct
  source 1..54: mol_type = other DNA
atcctgtactctttcacggaggacgccgtggccgacaccgcttttgacttcatt

SEQ ID NO: 42483 - DNA, 69 bp, synthetic construct
  source 1..69: mol_type = other DNA
gaggaactgatctggttctttgtgaaccacagttccctcgaggagtctagctacgttggggtctggact

SEQ ID NO: 42484 - DNA, 72 bp, synthetic construct
  source 1..72: mol_type = other DNA
atcatcgactctttcgaagtgaacatgtttgatgcctctaccattaagaccgcagtcatgggagcataccca

SEQ ID NO: 42485 - DNA, 39 bp, synthetic construct
  source 1..39: mol_type = other DNA
tacggcctgcggaacgtcatggccaaccacgtggtagcc

SEQ ID NO: 42486 - DNA, 252 bp, synthetic construct
  source 1..252: mol_type = other DNA
atcatggagcagacagcaatgatagagaccggcgatgctagcggagcctttgaaagaatgcacctccttaccctcgcgtatcagggccttaacgccaataatctggtttttgatattgtcaaggaaaatggaaacggaaccgtcgggacggttattcaatccctagtcggccgagccattgaggacaatgtcataagggtggccaaaaagatgccatccggctacaacatgtatgagccagtagattgggca

SEQ ID NO: 42487 - DNA, 75 bp, synthetic construct
  source 1..75: mol_type = other DNA
agcacagtgctgtactacaacgacatgctcgaatatgaaacagggctgcccggcgttgattatggaaggactgag

SEQ ID NO: 42488 - DNA, 48 bp, synthetic construct
  source 1..48: mol_type = other DNA
cccgggaccttccacggaaaccacgtcgtgacacggcatgctaagggc

SEQ ID NO: 42489 - DNA, 75 bp, synthetic construct
  source 1..75: mol_type = other DNA
tacgggaccatcgataacctgcggaaccccatccctaatgtcgctaaggtggccggcgagatcaaagacaagatc

SEQ ID NO: 42490 - DNA, 30 bp, synthetic construct
  source 1..30: mol_type = other DNA
agccagatgaacgccgagtcctttttcgcc

SEQ ID NO: 42491 - DNA, 60 bp, synthetic construct
  source 1..60: mol_type = other DNA
gaagacatcctgacctacatcggcgccacatctagcatggagctgtcctctcaaatatac

SEQ ID NO: 42492 - DNA, 45 bp, synthetic construct
  source 1..45: mol_type = other DNA
ggcttcgccctgtttagcgtgaccggggttcccgagtccatcttc

SEQ ID NO: 42493 - DNA, 54 bp, synthetic construct
  source 1..54: mol_type = other DNA
gggattatcgtggcggatccctctgcgatcgtcaggatgggctccttgatcacc

SEQ ID NO: 42494 - DNA, 120 bp, synthetic construct
  source 1..120: mol_type = other DNA
tgtggtttcggcgccggcaacatcctgatgccctctctgccaagccacattgtttccgccaacttcgacctgtccctcttctgcggcttcattcggggcttcccacaactatttagcaat

SEQ ID NO: 42495 - DNA, 30 bp, synthetic construct
  source 1..30: mol_type = other DNA
agccagatgaacgccgactccttctttgcc

SEQ ID NO: 42496 - DNA, 51 bp, synthetic construct
  source 1..51: mol_type = other DNA
attctgacctatatgggggccaccagctctatggcacttagcatgcaatat

SEQ ID NO: 42497 - DNA, 51 bp, synthetic construct
  source 1..51: mol_type = other DNA
gactacgccttcgctctgttttccgtgaccggggtgcctgagtctatcttc

SEQ ID NO: 42498 - DNA, 30 bp, synthetic construct
  source 1..30: mol_type = other DNA
agccagatgaacgccgagtccttctttgcc

SEQ ID NO: 42499 - DNA, 57 bp, synthetic construct
  source 1..57: mol_type = other DNA
gacatcctgacatacatgggggctacgtcctcgatggagctgtcaatgcaataccta

SEQ ID NO: 42500 - DNA, 48 bp, synthetic construct
  source 1..48: mol_type = other DNA
tacggcttcgctctgttctccgttaccggtgcccctgagagcgtgttt

SEQ ID NO: 42501 - DNA, 30 bp, synthetic construct
  source 1..30: mol_type = other DNA
atggaattttacctggagaccttccccggc

SEQ ID NO: 42502 - DNA, 39 bp, synthetic construct
  source 1..39: mol_type = other DNA
ggcagcatcactacccttctgaagtcccagacactgctg

SEQ ID NO: 42503 - DNA, 33 bp, synthetic construct
  source 1..33: mol_type = other DNA
acaaccgtgctgggcaatgccggagtcaactac

SEQ ID NO: 42504 - DNA, 30 bp, synthetic construct
  source 1..30: mol_type = other DNA
atgctggtcgagggcggaatgcctgctact

SEQ ID NO: 42505 - DNA, 54 bp, synthetic construct
  source 1..54: mol_type = other DNA
ggtatcgtagtgtctgattcttccaccctggtggctatgggcaacctgctggca

SEQ ID NO: 42506 - DNA, 117 bp, synthetic construct
  source 1..117: mol_type = other DNA
ggcttcgggaccggcaacccacttatgccctctattcccgcacaagttatatctgttaacttcgacatgtccctgttcggcggattcctccgcgggtttgggcaactgtttagcaac

SEQ ID NO: 42507 - DNA, 30 bp, synthetic construct
  source 1..30: mol_type = other DNA
ctgctgagcgagaccggaatgccagctacg

SEQ ID NO: 42508 - DNA, 54 bp, synthetic construct
  source 1..54: mol_type = other DNA
ggcatcattgagacagaccccgaaaccctgctgactctcggcaatgtgttgagt

SEQ ID NO: 42509 - DNA, 120 bp, synthetic construct
  source 1..120: mol_type = other DNA
ggcttcggcgccggcaatgagctcatgcctaccatgcccgagcacgcaattactaccacatttgacctgtccctgtttggcggcttcgctcggggattcggagagctattttccaacatc

SEQ ID NO: 42510 - DNA, 60 bp, synthetic construct
  source 1..60: mol_type = other DNA
aacatcattgtattggatagcactaccctgactaccatgggcgatttattccaaccattc

SEQ ID NO: 42511 - DNA, 117 bp, synthetic construct
  source 1..117: mol_type = other DNA
gggttcggcaccggcgaccctctgatgccaaccctacctacggaattcatatcttttgagttcgacctctccctgtttggcggtttcctgcggggatttgagcaattgttttctaac

SEQ ID NO: 42512 - DNA, 30 bp, synthetic construct
  source 1..30: mol_type = other DNA
atgctggctgagggcggcatgtcaacaagc

SEQ ID NO: 42513 - DNA, 54 bp, synthetic construct
  source 1..54: mol_type = other DNA
ggcatcatcattgacgacctctctaccctcgtgtctatgggtcacctgttgtcc

SEQ ID NO: 42514 - DNA, 117 bp, synthetic construct
  source 1..117: mol_type = other DNA
gggttcgggactggcaacgagctgatgcctagtatcagccccgagatcattacaaccaacatcgacacctccctcttcctgggcttcgttcggggatttcagggtctattctctaac

SEQ ID NO: 42515 - DNA, 54 bp, synthetic construct
  source 1..54: mol_type = other DNA
ggcattatcgtgtccaacctcacaaccgtcgtggccctggggaatatggccagc

SEQ ID NO: 42516 - DNA, 117 bp, synthetic construct
  source 1..117: mol_type = other DNA
ggcttcacatctccggacgcggccctgccaactatccctaagacctggattagcttcaatctgaacttcagcgtgttcggcggatttctgtccggctttggggagttgcttagccgg

SEQ ID NO: 42517 - DNA, 30 bp, synthetic construct
  source 1..30: mol_type = other DNA
atgcttgccgatggtggcatgcctgctact

SEQ ID NO: 42518 - DNA, 54 bp, synthetic construct
  source 1..54: mol_type = other DNA
ggcattatcgtcgccgacccctctaccttcgtggctctggggagcatgacatcc

SEQ ID NO: 42519 - DNA, 120 bp, synthetic construct
  source 1..120: mol_type = other DNA
gtgggatacggcacaggtaacccaatcatgcctaccatgccctcccaattcataagcttcaacttcgacttttccctgttcggggccttctacactggctttggagagttgttcaagaac

SEQ ID NO: 42520 - DNA, 33 bp, synthetic construct
  source 1..33: mol_type = other DNA
aacttctttagcccttactatagcccgagcatc

SEQ ID NO: 42521 - DNA, 39 bp, synthetic construct
  source 1..39: mol_type = other DNA
gtcggagatgacattatcgacgatgttggtggatctaag

SEQ ID NO: 42522 - DNA, 39 bp, synthetic construct
  source 1..39: mol_type = other DNA
gccacatatttcgacaccgtctacgatttcgctctgagc

SEQ ID NO: 42523 - DNA, 57 bp, synthetic construct
  source 1..57: mol_type = other DNA
gggataatcattggcaacagtagcaccttagttgggatgggaaacaatatctctagt

SEQ ID NO: 42524 - DNA, 117 bp, synthetic construct
  source 1..117: mol_type = other DNA
gggttcggaaccggcaacgctctcatgccttccatccccacacacttcatttccttcaacttcgatgtttctctcgtcggggcctttactaaggggttctctcaactatttagcaac

SEQ ID NO: 42525 - DNA, 30 bp, synthetic construct
  source 1..30: mol_type = other DNA
atgcttgccgatgggggcatgcccgcgagc

SEQ ID NO: 42526 - DNA, 54 bp, synthetic construct
  source 1..54: mol_type = other DNA
ggcatcatcatttcgaatcctagtacatacgtgtctatgggcacacttgctcag

SEQ ID NO: 42527 - DNA, 120 bp, synthetic construct
  source 1..120: mol_type = other DNA
gggttcggggttggagatgctctgatgcccacaatccctgcccacccaatcacaaccaacatggataccagcctgttttgcggatttacccggggctttggtcaattgttcaccaacatt

SEQ ID NO: 42528 - DNA, 54 bp, synthetic construct
  source 1..54: mol_type = other DNA
gggatcatagtctccaaccccatgaatattgtgtctctgggcaacatcagttcc

SEQ ID NO: 42529 - DNA, 117 bp, synthetic construct
  source 1..117: mol_type = other DNA
ggcttcactgttcctgacgtcgccctgcctactattccaaagaccttcatctcctttaacttggactttagcgttttcggcggcttcgtgcaaggattcggcgaactgttcgagaat

SEQ ID NO: 42530 - DNA, 30 bp, synthetic construct
  source 1..30: mol_type = other DNA
atcctgagcgctgagggcatgcctgtgaac

SEQ ID NO: 42531 - DNA, 54 bp, synthetic construct
  source 1..54: mol_type = other DNA
atcgtcgtgtccaatctcctgaccatcgtatccctgggcaacctgacaagtccc

SEQ ID NO: 42532 - DNA, 120 bp, synthetic construct
  source 1..120: mol_type = other DNA
atgggcttcaccgaccccaatgtggccatgccatccatccctagccaatgggtgtcttttaacatgaacttctctctgttcggtggcttcctgcacggctttggagagctgctcaacaac

SEQ ID NO: 42533 - DNA, 54 bp, synthetic construct
  source 1..54: mol_type = other DNA
ggcattatcgtcgccgaccctagcaccttcgtgactatggggtctctgttgagt

SEQ ID NO: 42534 - DNA, 117 bp, synthetic construct
  source 1..117: mol_type = other DNA
ggcttcggagccggcgacatgctcatgcccgctatccccgcccaatttatttctgccgacttcgacctgagcctcttcgctggctttatgaagggctttggccaattgttctccaat

SEQ ID NO: 42535 - DNA, 54 bp, synthetic construct
  source 1..54: mol_type = other DNA
ggcatcgtcgtgtctgacccaagcaccgttgtctctttgggcaacatggcatcc

SEQ ID NO: 42536 - DNA, 117 bp, synthetic construct
  source 1..117: mol_type = other DNA
ggtttcactacacccgataccgctctccctgccatcccaaaaacctggatcagcttcaacctggacttcagcgtgttcggcggcttcatttccggattcggcgaactgttcaagaat

SEQ ID NO: 42537 - DNA, 54 bp, synthetic construct
  source 1..54: mol_type = other DNA
ggcatcattgtagccgaccctagcacatacgtgaccatgggtagccttatggcg

SEQ ID NO: 42538 - DNA, 117 bp, synthetic construct
  source 1..117: mol_type = other DNA
gggttcggagccggcgacgtcctgatgcccgtggtgcctaccgagttcttttccacaaacatcgattattctctgttcggaggcttcatcaagggcttcggacaacttttttctaat

SEQ ID NO: 42539 - DNA, 54 bp, synthetic construct
  source 1..54: mol_type = other DNA
gggattatcgtggcggacccttcaaccttcgtctccatgggagctctgaccact

SEQ ID NO: 42540 - DNA, 117 bp, synthetic construct
  source 1..117: mol_type = other DNA
ggctacggcgccggcgacatgctgatgcctgctgtgcctgcgcaatttattaccacaagcttcgacctctccctggtcgccgggttcaccaaggggtttggtcaactattctctaac

SEQ ID NO: 42541 - DNA, 54 bp, synthetic construct
  source 1..54: mol_type = other DNA
ggcattatcgtggccgaccctagcaccttcgtcaccctgggcgctatgacatct

SEQ ID NO: 42542 - DNA, 117 bp, synthetic construct
  source 1..117: mol_type = other DNA
gggttcggcgctggcgacccgttaatgccctctgtacctgctgaattcatttcattctcctttgataccagcctggtcggcggattcatctctggattcggcgaactcttcacaaat

SEQ ID NO: 42543 - DNA, 30 bp, synthetic construct
  source 1..30: mol_type = other DNA
atgctggctgagggtggaatgccggctacg

SEQ ID NO: 42544 - DNA, 54 bp, synthetic construct
  source 1..54: mol_type = other DNA
ggcatcattgtggctgaccctgccacgctggttggcatggggtccatcctgtcc

SEQ ID NO: 42545 - DNA, 117 bp, synthetic construct
  source 1..117: mol_type = other DNA
ggcttcggagccggcgatcccattatgcctgcaatacctgctgaatttgtatcgttctcctttgacacctctgtggtcggggccttcgccaccggctttacgcaactctttagtaac

SEQ ID NO: 42546 - DNA, 33 bp, synthetic construct
  source 1..33: mol_type = other DNA
gagatcctgggcattagcaatagcgaggaatct

SEQ ID NO: 42547 - DNA, 57 bp, synthetic construct
  source 1..57: mol_type = other DNA
gaaattatcgagtcccatccaacaaccctcgtgactctgggcaacctctcaaatttc

SEQ ID NO: 42548 - DNA, 117 bp, synthetic construct
  source 1..117: mol_type = other DNA
gggttcggcgccggcaacgagatcatgcctacactgccaaacaatcccatcaccacttccttcgacctgtccatcattggcgagttcaccaaggggttcggagaactcttctcgaac

SEQ ID NO: 42549 - DNA, 57 bp, synthetic construct
  source 1..57: mol_type = other DNA
gggattatcgtctccgatccatctaccttcgtgtctatgggagctgccgcactgaca

SEQ ID NO: 42550 - DNA, 120 bp, synthetic construct
  source 1..120: mol_type = other DNA
gctggttacgggaccggcgacatcctgatgcccgctgtgcctgctcaattcatcaccacttccttcgatctgagcctcttcgccgcctgctttaacggctttggcacgctgttcaacaat

SEQ ID NO: 42551 - DNA, 30 bp, synthetic construct
  source 1..30: mol_type = other DNA
ggcgccttggcaaatgtcggactggttgct

SEQ ID NO: 42552 - DNA, 45 bp, synthetic construct
  source 1..45: mol_type = other DNA
tacctgttctccgtgtcggacccgtcccatatccctattgtcatg

SEQ ID NO: 42553 - DNA, 36 bp, synthetic construct
  source 1..36: mol_type = other DNA
gctgccatcggcaccgattgggacctgagcaagtac

SEQ ID NO: 42554 - DNA, 30 bp, synthetic construct
  source 1..30: mol_type = other DNA
tttctgaccgagcagggcttcgacatcgtg

SEQ ID NO: 42555 - DNA, 54 bp, synthetic construct
  source 1..54: mol_type = other DNA
gggatcattgtggatgacccgtcaaccctcgtctccatgggcagtctgatggca

SEQ ID NO: 42556 - DNA, 117 bp, synthetic construct
  source 1..117: mol_type = other DNA
gggtttgggaaaggcgacatgctgatgcctgctgtgcccgcccactttatcacaacctcctttgacctgagcctcttcgctggattcatgaaggggtttggacaactgttctctaac

SEQ ID NO: 42557 - DNA, 30 bp, synthetic construct
  source 1..30: mol_type = other DNA
atgctgagccagaccggaatgcctgcaacc

SEQ ID NO: 42558 - DNA, 54 bp, synthetic construct
  source 1..54: mol_type = other DNA
ggcatcattgaggcccatcctactacctacctgacactggggaacctcttcacc

SEQ ID NO: 42559 - DNA, 120 bp, synthetic construct
  source 1..120: mol_type = other DNA
ggattcggggccggcaacgagatgatgcccagcctccctgaacacgctatcacaaccacctttgacctgtctctgttcggcggcttcgcacgcgggttcggagagctattctccgacatc

SEQ ID NO: 42560 - DNA, 30 bp, synthetic construct
  source 1..30: mol_type = other DNA
atgttggctgacggcggcatgcctgctagt

SEQ ID NO: 42561 - DNA, 54 bp, synthetic construct
  source 1..54: mol_type = other DNA
gggattatcacctctgatccctcgactttcgtgactatgggctctctgctctac

SEQ ID NO: 42562 - DNA, 120 bp, synthetic construct
  source 1..120: mol_type = other DNA
gggttcggcgccggcgacatgctgatgccctctatcccaaagcaaattataaccctgaacatggacacaaccttagttggggggttcagccggggctttgggcaactattttccaacatc

SEQ ID NO: 42563 - DNA, 54 bp, synthetic construct
  source 1..54: mol_type = other DNA
gggatcatcgtctctgacccgtcgacgattgtccggatgggctctcttttgacc

SEQ ID NO: 42564 - DNA, 117 bp, synthetic construct
  source 1..117: mol_type = other DNA
gggttcggcaccggcaatgccctaatgccctcattccctgagcacatcattagtgtcaacttcgacgtgtctctgttcctgggcttcatcaagggctttggtcaattattctccaat

SEQ ID NO: 42565 - DNA, 30 bp, synthetic construct
  source 1..30: mol_type = other DNA
atgctctcccaaggaggcatgcccgcgagc

SEQ ID NO: 42566 - DNA, 54 bp, synthetic construct
  source 1..54: mol_type = other DNA
ggcgtcattgtggcaaaccctgccactataatcgggatgggaacgatatcttcc

SEQ ID NO: 42567 - DNA, 117 bp, synthetic construct
  source 1..117: mol_type = other DNA
ggctttggggctggcgaccccacaatgcctgcattgaccagccaggtcatcagcttcaacttcgacatgtccgtcttcggcggtttcctgtccggtttttctgagctgttctctaat

SEQ ID NO: 42568 - DNA, 30 bp, synthetic construct
  source 1..30: mol_type = other DNA
agccagatgaaccccgagtcctttttcgcc

SEQ ID NO: 42569 - DNA, 57 bp, synthetic construct
  source 1..57: mol_type = other DNA
gacatcctgacctttgtcggagctgatagctccatggacctgcaaagtcagatgtac

SEQ ID NO: 42570 - DNA, 48 bp, synthetic construct
  source 1..48: mol_type = other DNA
tacgggttcgccctcttctctgttaccggcgttcctgagagcgtcttt

SEQ ID NO: 42571 - DNA, 39 bp, synthetic construct
  source 1..39: mol_type = other DNA
gtgtacctgatgtccgactttagtgttagctctacacag

SEQ ID NO: 42572 - DNA, 36 bp, synthetic construct
  source 1..36: mol_type = other DNA
atcttcatgcaaggcattgcatacaatagtgccatc

SEQ ID NO: 42573 - DNA, 90 bp, synthetic construct
  source 1..90: mol_type = other DNA
ctcgccggcggtagcagcatccagtccaatttcaccgactctacctactttacatgctaccacgcttatttcgacaaccacctgtaccag

SEQ ID NO: 42574 - DNA, 54 bp, synthetic construct
  source 1..54: mol_type = other DNA
gggatcatcgtttcggatccaagcaccatagtcagcatgggctctctgatgaca

SEQ ID NO: 42575 - DNA, 117 bp, synthetic construct
  source 1..117: mol_type = other DNA
gggttcggagccggcgatatcctcatgcctgcttttcctaagcacatcgtgtcggcaaatttcgacatgtccctgttctgcggcttcatcaaggggtttggacaactcttttctaac

SEQ ID NO: 42576 - DNA, 45 bp, synthetic construct
  source 1..45: mol_type = other DNA
gtgcgggagattaagatcaccgacaacatcagcttccttctgctg

SEQ ID NO: 42577 - DNA, 33 bp, synthetic construct
  source 1..33: mol_type = other DNA
agcggcggctcaatctacatgattttcaacgtg

SEQ ID NO: 42578 - DNA, 126 bp, synthetic construct
  source 1..126: mol_type = other DNA
gtcagcctcctgcccctgcacccttatgcctacgctatggcctccggagttggctccgctagcatgaacgcagccggcctcgtgccacttgtgaacctgtacccctctatggcgactcaattagag

SEQ ID NO: 42579 - DNA, 51 bp, synthetic construct
  source 1..51: mol_type = other DNA
cctggtgtccctacggccaacttcgtgacccattatgctagccaggtggac

SEQ ID NO: 42580 - DNA, 30 bp, synthetic construct
  source 1..30: mol_type = other DNA
atgttggctgacggcggcatgccagctaca

SEQ ID NO: 42581 - DNA, 57 bp, synthetic construct
  source 1..57: mol_type = other DNA
ggcattatcgtggccgacccttccaccttcgtcggaatggggtctctgatggctccc

SEQ ID NO: 42582 - DNA, 117 bp, synthetic construct
  source 1..117: mol_type = other DNA
ggctttggggctggcgatatgctgatgcccactctgccatcaactgttatcaccaccaactttgatttgtcgttgttcggaggtttcgccaagggcttttctcaactgttttccaat

SEQ ID NO: 42583 - DNA, 36 bp, synthetic construct
  source 1..36: mol_type = other DNA
accacatcgctaggatctaatgtggcctctgctatc

SEQ ID NO: 42584 - DNA, 57 bp, synthetic construct
  source 1..57: mol_type = other DNA
gaccccgtgatcaccctgatgggcgccggggacattcggagcgagtgcaacgattac

SEQ ID NO: 42585 - DNA, 30 bp, synthetic construct
  source 1..30: mol_type = other DNA
attatgggggccggaactatcggcgtaatg

SEQ ID NO: 42586 - DNA, 66 bp, synthetic construct
  source 1..66: mol_type = other DNA
gaacccctgatgtccctgttcacatatagtgactctatgttggagcagaaagatatgctcgtttgg

SEQ ID NO: 42587 - DNA, 150 bp, synthetic construct
  source 1..150: mol_type = other DNA
ctcccaattatacaagatgatatctactttgccaagcacgccagcgagatcttcctgctcaacggcaataacttcctgctttatagggtgacccactggacttcccggatcatcacggagtttttcctgcccctgctggctaagaaccca

SEQ ID NO: 42588 - DNA, 30 bp, synthetic construct
  source 1..30: mol_type = other DNA
ctgatgagcgccggcttcatctccaccacc

SEQ ID NO: 42589 - DNA, 123 bp, synthetic construct
  source 1..123: mol_type = other DNA
aaccccgggaatcaggagcgattcgccgtggaactggctgcctacggcggcgacctctttaattccctgagtctgttcaacaaaatcgacatcgcatccacctcaatactgtgcatgacactt

SEQ ID NO: 42590 - DNA, 66 bp, synthetic construct
  source 1..66: mol_type = other DNA
ttcaacatccacggcgagatcttttcaatattcacacctgctgggctcctgtcctctactatcacc

SEQ ID NO: 42591 - DNA, 54 bp, synthetic construct
  source 1..54: mol_type = other DNA
acacccagcgtgatgatcaccggctaccctttcgtcgacgctctgggaagatgg

SEQ ID NO: 42592 - DNA, 156 bp, synthetic construct
  source 1..156: mol_type = other DNA
ctcccaagcatcgaggatgacctgatctactcctctttcctgaaccagaactccgacatcagctcttacatcaataactattacctgcctcacattcacggttggtcctcaaggtacttcaccgacctcctgacacccattatggccacttacact

SEQ ID NO: 42593 - DNA, 114 bp, synthetic construct
  source 1..114: mol_type = other DNA
aaccccggcaatgactaccggtaccactacgagatcgccaactgggtcggcaactactccgaggtgaccctgattaacaagatcgacctcgctaccacaagcctctatgtgatg

SEQ ID NO: 42594 - DNA, 72 bp, synthetic construct
  source 1..72: mol_type = other DNA
ttcgacggctttaacgctcttagcttagcccaaaactttgctcccaacggtttgataagtcatggtctggat

SEQ ID NO: 42595 - DNA, 51 bp, synthetic construct
  source 1..51: mol_type = other DNA
gcaccaagcgcccagatctggtactttccgcttcataagtaccccggaagg

SEQ ID NO: 42596 - DNA, 33 bp, synthetic construct
  source 1..33: mol_type = other DNA
gtggcggggcttggaggcgacgcacttgccgcc

SEQ ID NO: 42597 - DNA, 54 bp, synthetic construct
  source 1..54: mol_type = other DNA
cccattctgaagttcatgggcgccggaagcaccatcggttatgccatgaactac

SEQ ID NO: 42598 - DNA, 36 bp, synthetic construct
  source 1..36: mol_type = other DNA
gtcatagcttctggaaccgatgctgctgtcgttgct

SEQ ID NO: 42599 - DNA, 69 bp, synthetic construct
  source 1..69: mol_type = other DNA
cagatcgcagccatgttctcctacaccgaggccagcgccgtgctggctcccgaaattgctactgcgatt

SEQ ID NO: 42600 - DNA, 36 bp, synthetic construct
  source 1..36: mol_type = other DNA
ggtttcgctagaggagccacaggcatcggaatgctg

SEQ ID NO: 42601 - DNA, 30 bp, synthetic construct
  source 1..30: mol_type = other DNA
ctggagggccccgggtactcgttccgcaat

SEQ ID NO: 42602 - DNA, 48 bp, synthetic construct
  source 1..48: mol_type = other DNA
gccgctaccctcaagaactcttttcaagccacggcactggcctctatc

SEQ ID NO: 42603 - DNA, 84 bp, synthetic construct
  source 1..84: mol_type = other DNA
ggcgatgccatcggagcattcgaacggatgcacctgctgggtctggcctaccaaggaatgaatgccgacaaccttgtgttggga

SEQ ID NO: 42604 - DNA, 72 bp, synthetic construct
  source 1..72: mol_type = other DNA
gatataatgaccgacacgattgccaaagccagcgacgacggcataatcagtgtcgaaaaagatctcaacgga

SEQ ID NO: 42605 - DNA, 36 bp, synthetic construct
  source 1..36: mol_type = other DNA
cagaccgacgatctggccaagtggaacgcttacgtg

SEQ ID NO: 42606 - DNA, 45 bp, synthetic construct
  source 1..45: mol_type = other DNA
cccctgaagaacagcgcgatccagaacatgatctacgacatcaaa

SEQ ID NO: 42607 - DNA, 123 bp, synthetic construct
  source 1..123: mol_type = other DNA
atcggaggcaagagcgtgttcatccccgggcgcgaactcgacctgcctatcgtcgagaatgccgagctgatcggcgagaagatccgcaaaatactgcaagtaaatgaggatgacgatacgact

SEQ ID NO: 42608 - DNA, 108 bp, synthetic construct
  source 1..108: mol_type = other DNA
ggggctgcccgggcggcacaagccgtcgcaagtacagttctctactacaacgacatgctggaatatgaaacaggcctgcccggtgtcgattatggaaggactgaggga

SEQ ID NO: 42609 - DNA, 93 bp, synthetic construct
  source 1..93: mol_type = other DNA
ttttcccactccatctacggtggaggcggccccggaaccttccatggaaaccacgtcgtgaccagacacgccaagggtactgctattccttgt

SEQ ID NO: 42610 - DNA, 144 bp, synthetic construct
  source 1..144: mol_type = other DNA
gccatgtgcctggacgctgggacccagatgttctctgtgaagaggacatccgccctcattggcaccgtttacggcactatcgacaatctccggaaccctatccccaatgtggctaacgtcgcgggagaaatcaaagacaacctg

SEQ ID NO: 42611 - DNA, 33 bp, synthetic construct
  source 1..33: mol_type = other DNA
atgggcgccaacctcaagaccatgctggatgtg

SEQ ID NO: 42612 - DNA, 72 bp, synthetic construct
  source 1..72: mol_type = other DNA
ctcgagggcccagggtactctcttaggaacatcaaagctaatgacttcgtcgccgcaaccctcaagaacaca

SEQ ID NO: 42613 - DNA, 54 bp, synthetic construct
  source 1..54: mol_type = other DNA
gcaagcatcttcgaacaaacagcgatgttcgagatgggcgatgctgttggtgcc

SEQ ID NO: 42614 - DNA, 264 bp, synthetic construct
  source 1..264: mol_type = other DNA
caggggctgaacgctgacaacatggtgctcgggctggtacaagataacgctaaggagggcaccgttggttccatagtacaagacacaattgccaaggccgaagccgacggagtcatcgctgttgagaaggaactgaccggatataatatgtatgccactagcgacgccgccaagtggaacgcctacgctgcggccggatgcaccgctgctatcatggtcaatgtcggggcggctagggccgcccaaggcattccctctaccatc

SEQ ID NO: 42615 - DNA, 39 bp, synthetic construct
  source 1..39: mol_type = other DNA
gtgcccgctatcgccaatgacttcgccatgaacaacgtg

SEQ ID NO: 42616 - DNA, 33 bp, synthetic construct
  source 1..33: mol_type = other DNA
taccatttccaatatgtccgaggctggaacgca

SEQ ID NO: 42617 - DNA, 96 bp, synthetic construct
  source 1..96: mol_type = other DNA
atggggaacctcgccctgtcgacccaatatgcggacctgatcgtgaagtcgagccaaatcagcgtcaacttctgcttcattggctggaacaagatt

SEQ ID NO: 42618 - DNA, 156 bp, synthetic construct
  source 1..156: mol_type = other DNA
ctgcctttccaacgactcaacgtggctgctgactactctgtctccaccatgcaaactggcgccgctacaatccaggccatcattgactcctatgacgtgaacatgttcgatgccagcaccatcaagaccgccgtgatgggggcatacccaagatcc

SEQ ID NO: 42619 - DNA, 42 bp, synthetic construct
  source 1..42: mol_type = other DNA
ggctatgggctgcgcaacgtcatggccaatcacgtggttgct

SEQ ID NO: 42620 - DNA, 267 bp, synthetic construct
  source 1..267: mol_type = other DNA
ctgtcttccatcatggaacagactgccatgattgagaccggcgacgcaactggcgcctttgagcggatgcacctgctgaccctggcttatcaaggcctaaacgccgacaacctcgtcttcgacctagtaaaagaaaacgggaagggcaccgttggcactgtgattcagagcttagttggcagagcgatcgaggataatgtgatccaggtcgctaagaagatgagcagtggatattccatgtacgaacctgtggattgggcattgtgg

SEQ ID NO: 42621 - DNA, 78 bp, synthetic construct
  source 1..78: mol_type = other DNA
agcacagtgctgtactataacgatatgctcgaatatgaaacgggactgccaggggtcgactatggaaggacagaaggc

SEQ ID NO: 42622 - DNA, 63 bp, synthetic construct
  source 1..63: mol_type = other DNA
ggccctggaactttccacggaaaccacgtcgtgacacgacacgccaaaggtaccgctattccc

SEQ ID NO: 42623 - DNA, 45 bp, synthetic construct
  source 1..45: mol_type = other DNA
atgtgcctggatgccgggacacagatgttcagcgtacaacgcgtc

SEQ ID NO: 42624 - DNA, 78 bp, synthetic construct
  source 1..78: mol_type = other DNA
gtctacggaactattgataacctgcggaaccccatccctaatgtcgctaaggtggccggcgaaatcaaggacaatctg

SEQ ID NO: 42625 - DNA, 240 bp, synthetic construct
  source 1..240: mol_type = other DNA
gagaaggggctcaagaatgctgccatgggaggcaagagtacctacatccccggacgcgagctcgatctcgatatcatcgaaaatagcgacatcatcgctgagaagattaggcggattctgagagtcaacgaggacgacgatacaaccgtggacattatcaacaacggccagcagcttctggtccaactaccatacgagcggctgaaggtcgccgccgactattctgtgtccactttgcag

SEQ ID NO: 42626 - DNA, 93 bp, synthetic construct
  source 1..93: mol_type = other DNA
caggccatcattgattcctttgaaatcaacatgttcgacgccagcacaatcaaaaccgctgtcatgggcgcataccctcggactgtggatctc

SEQ ID NO: 42627 - DNA, 63 bp, synthetic construct
  source 1..63: mol_type = other DNA
ggctacgggctgcggaatgtcatggccaaccacgtggtggctatcaccaacaagcagacgctc

SEQ ID NO: 42628 - DNA, 168 bp, synthetic construct
  source 1..168: mol_type = other DNA
gccctaagttctattatggagcagaccgccatgttcgagaccggcgacgcaacaggcgctttcgagcggatgcacctgcttaccctggcgtttcaaggtttgaatgctaacaacctcgtgtttgacctggtcaaggaaaacggcaagggcacggttggtaccgtgatt

SEQ ID NO: 42629 - DNA, 81 bp, synthetic construct
  source 1..81: mol_type = other DNA
ggccgggccattgaggataatgtgattagagtggcaaaaaagatgcccagcggttataacatgtacgacccggtcgactgg

SEQ ID NO: 42630 - DNA, 195 bp, synthetic construct
  source 1..195: mol_type = other DNA
gccagcaccgtgctgtactacaacgacatgctggaatacgagaccggattacccggagtggactacggccgcaccgagggcgtcggcgtcggcttctccttcttctcccatagtatttatggcggtggaggccctggaactttccacgggaaccacgtggtcaccaggcacgctaaggggacagccattccttgc

SEQ ID NO: 42631 - DNA, 147 bp, synthetic construct
  source 1..147: mol_type = other DNA
gccgctatgtgcctggatgccggaacccagatgttctccgtggagaggactagcgccctcatagggacagtttatggcaccatcgacaacctgcggaaccctattcccaatgtcgccaaggtcgctggcgaggtcaaggacatcctc

SEQ ID NO: 42632 - DNA, 225 bp, synthetic construct
  source 1..225: mol_type = other DNA
tcccctctgaagaacagcgccattcgcgagatgatctatgacatcaagcggtctgctgctgtgaatctggcgggaatcgagaaggggcttaagggagcagccatgggaggcaagagtacctacatccccggccgggagctcgatctcccaattctggagaacgccgagattattgctcaaaaggttaaaaagatcctgaaggtcaacgaggacgacgatacaacg

SEQ ID NO: 42633 - DNA, 132 bp, synthetic construct
  source 1..132: mol_type = other DNA
atccgctccgtggtggagcgcgccatagaggacaaagtcatcaaggtggccaaaaggatgccatcgggttataacatgtatgagcctgtggattgggccaggtggaacggttacgcggcagctggtcttatt

SEQ ID NO: 42634 - DNA, 111 bp, synthetic construct
  source 1..111: mol_type = other DNA
gttggggcagccagagcggcgcagggcgtcgcttctacggtgctttactacaacgacatccttgaatatgaaactggtttgcccggcgttgattacgggcggaccgaggga

SEQ ID NO: 42635 - DNA, 249 bp, synthetic construct
  source 1..249: mol_type = other DNA
ttcttctctcactccatctacggcggcggaggacccggcacctttcacggcaaccacgtggtgactcgccatgctaaggggacagctattccttgtgcttccgccgccatgtgcctggacgccggcacccagatgttcagcgtcgaacggaccagcgcactcataggtaccgtttatgggaccatcgacaatctgcggaaccccatcccaaacgtggccaaagtggcctgggagatcaaggataagata

SEQ ID NO: 42636 - DNA, 42 bp, synthetic construct
  source 1..42: mol_type = other DNA
gagcacgaatccgggctgcccggagtcgattacggaagagca

SEQ ID NO: 42637 - DNA, 72 bp, synthetic construct
  source 1..72: mol_type = other DNA
accattccccaaattacctttgaggagttcggcatgttgtactctattcctgagtggcacgttgggtttgac

SEQ ID NO: 42638 - DNA, 48 bp, synthetic construct
  source 1..48: mol_type = other DNA
ctcttcggcaccatgggcgacagcttttacctgcccgttcacctttcc

SEQ ID NO: 42639 - DNA, 54 bp, synthetic construct
  source 1..54: mol_type = other DNA
accatcagcgatctcgaggtttattccttcgactctctgcgataccccattgct

SEQ ID NO: 42640 - DNA, 147 bp, synthetic construct
  source 1..147: mol_type = other DNA
gacgctttcatctatagcaacgacaaccaggattacgggcagttcctcaaccgggtcaaggatggcgtgctgattggaatcagggccgcaacactgggcatggccatccacaatgtcattacctacgggtcccatgtgcccaatact

SEQ ID NO: 42641 - DNA, 96 bp, synthetic construct
  source 1..96: mol_type = other DNA
ctgaactccgccgactataacgctgcccaaaaatttctctacgacgagcgagtatcgttcaacgacattgataatatcatcgctgccgatgatagc

SEQ ID NO: 42642 - DNA, 36 bp, synthetic construct
  source 1..36: mol_type = other DNA
atggagttctttctgaagacatatcccggtcttatg

SEQ ID NO: 42643 - DNA, 39 bp, synthetic construct
  source 1..39: mol_type = other DNA
gacagcctgacaaccctgctcaagaaccagactctgctg

SEQ ID NO: 42644 - DNA, 39 bp, synthetic construct
  source 1..39: mol_type = other DNA
accctggccttcggcaacatcggaattgggttcatcgag

SEQ ID NO: 42645 - DNA, 33 bp, synthetic construct
  source 1..33: mol_type = other DNA
tttctgccctacatccaagccatcttcggactg

SEQ ID NO: 42646 - DNA, 33 bp, synthetic construct
  source 1..33: mol_type = other DNA
aacgccatatcattcattccgtactctgagtat

SEQ ID NO: 42647 - DNA, 33 bp, synthetic construct
  source 1..33: mol_type = other DNA
cggatgatcagcttcgtgccgtactccgaatcg

SEQ ID NO: 42648 - DNA, 30 bp, synthetic construct
  source 1..30: mol_type = other DNA
gcctacttgcaaccgtacatacctaattct

SEQ ID NO: 42649 - DNA, 30 bp, synthetic construct
  source 1..30: mol_type = other DNA
atgtccttgatttattctataacctctacc

SEQ ID NO: 42650 - DNA, 51 bp, synthetic construct
  source 1..51: mol_type = other DNA
gttggcggacttccaatcctgaagtctagcctgcggtacagcctgaagcca

SEQ ID NO: 42651 - DNA, 261 bp, synthetic construct
  source 1..261: mol_type = other DNA
cggagcctcaatgaactggcgatttcgtccaacacgagtatattctctactctggagtctagggcaaatttcactatgcatgtgctcaacctgctgaatcagatttcgggcaatttcggactgctccatggaaaaatgattgctagtgctatgcccggctctgatctgggccctcggatgattgttggaaaactcatcgcatggcggacggaagttaccgtcactccgaccttgctgggccaaatgctggtcgactttggc

SEQ ID NO: 42652 - DNA, 96 bp, synthetic construct
  source 1..96: mol_type = other DNA
ggacagatttccgagcccaacaatcctgggatgggcgaagttagtttcatgttcctgctcaagatcatccggtctggcatgctgatcagtaacgac

SEQ ID NO: 42653 - DNA, 36 bp, synthetic construct
  source 1..36: mol_type = other DNA
cttagcggcggtaacgtggtcgtggcggtggccgtg

SEQ ID NO: 42654 - DNA, 87 bp, synthetic construct
  source 1..87: mol_type = other DNA
gcccgggccatcacaagcgggcaatataacctggcctatgatcgcgttagcaccctgattatcctctataacgctaacgaggctatt

SEQ ID NO: 42655 - DNA, 51 bp, synthetic construct
  source 1..51: mol_type = other DNA
gtagggggcgttcctcttctcaaatccagcctgaggtactctctcaaaccc

SEQ ID NO: 42656 - DNA, 261 bp, synthetic construct
  source 1..261: mol_type = other DNA
cgatctcttaacgagttggccattagtagtaacacaaatatgttctcaactctcgagagcagggccaactttaccatgcacgtgctcaatctgctgaaccaaattagtggcaatttcggtatcctgcatggcaaaatgattgcttctagcatgcccgggagcgaccttggccctcgaatgctggtcggcaaactcattgcatggcgcaccgaggtaacggtgaccccgacccttctggggcagatgttggtcgattttggc

SEQ ID NO: 42657 - DNA, 33 bp, synthetic construct
  source 1..33: mol_type = other DNA
aacagcactgtcggcgagccagttctgtctgtg

SEQ ID NO: 42658 - DNA, 30 bp, synthetic construct
  source 1..30: mol_type = other DNA
gagatcggactggaccaggcagtggttcca

SEQ ID NO: 42659 - DNA, 90 bp, synthetic construct
  source 1..90: mol_type = other DNA
ggcatggtggacttttccgggttcttcgccgcttctatcttcgaggtgcccgagttttacatgcctttcgtgaactacagctttaacccc

SEQ ID NO: 42660 - DNA, 45 bp, synthetic construct
  source 1..45: mol_type = other DNA
gccaccctgtccctggtgcacggcgacataagcatcagcataagt

SEQ ID NO: 42661 - DNA, 36 bp, synthetic construct
  source 1..36: mol_type = other DNA
ggtttttcacggggagccacaggtatcggaatgctc

SEQ ID NO: 42662 - DNA, 36 bp, synthetic construct
  source 1..36: mol_type = other DNA
cggcagacgattgcatccaacatcggagagacagtg

SEQ ID NO: 42663 - DNA, 36 bp, synthetic construct
  source 1..36: mol_type = other DNA
agcaacctgatcggtgctgttgccctgtccgcaatt

SEQ ID NO: 42664 - DNA, 60 bp, synthetic construct
  source 1..60: mol_type = other DNA
gggcccattattggcatcctgtgcccaagcgcccagatccagcctatcgtctttcaatac

SEQ ID NO: 42665 - DNA, 48 bp, synthetic construct
  source 1..48: mol_type = other DNA
ctgatgttataccaagtgaacaaccctagcgacattccaatcgttctg

SEQ ID NO: 42666 - DNA, 30 bp, synthetic construct
  source 1..30: mol_type = other DNA
cacgtgatcgctccctacattccttatgcc

SEQ ID NO: 42667 - DNA, 105 bp, synthetic construct
  source 1..105: mol_type = other DNA
gtggaggaccctaaggaacccgagcgggtctacaaccctattcacatcaaatatcagcccaattcttacacatgtggcccaacctccctgtcgatgtgttcgcag

SEQ ID NO: 42668 - DNA, 72 bp, synthetic construct
  source 1..72: mol_type = other DNA
gacgagaccagcatcaacgctttcgctaatgcctgctacactgatagctctggcactagccctaccaacctc

SEQ ID NO: 42669 - DNA, 48 bp, synthetic construct
  source 1..48: mol_type = other DNA
cctcggaacgtcgacggagttagcgaggccatcgaaaatggaaagcct

SEQ ID NO: 42670 - DNA, 102 bp, synthetic construct
  source 1..102: mol_type = other DNA
atcgtgatctacgagtggaacgacgactactattatatagcagatcctacaaaggggttggggagatgctcgcatagcatgattgacaacgccatgagaggg

SEQ ID NO: 42671 - DNA, 33 bp, synthetic construct
  source 1..33: mol_type = other DNA
gggtactcccaatgggacatcgatgccacaagc

SEQ ID NO: 42672 - DNA, 51 bp, synthetic construct
  source 1..51: mol_type = other DNA
acgaacctcttctttgaggtcaatgatgcagcagaatacagctatacggaa

SEQ ID NO: 42673 - DNA, 30 bp, synthetic construct
  source 1..30: mol_type = other DNA
aagtacattagcttcatcccctattccgag

SEQ ID NO: 42674 - DNA, 54 bp, synthetic construct
  source 1..54: mol_type = other DNA
agtgtcggcggcgtgcccctgctgaagtctagcctccggtactcccttaaccct

SEQ ID NO: 42675 - DNA, 261 bp, synthetic construct
  source 1..261: mol_type = other DNA
cgctccctgaatgagctggctatcagtagcagcacagatccattttccacactcgaaagcagagcgaacttcaccatgcacgtcctgaatctgctcaaccaaattagcggcaactttgggctgctgcatgggaagatgctagcgtcggctatgcctggatcagaattgggacctaggatgctcgtcgggaaactgattgcttggcggaccgaggtcacagtgacgccaacactgcttggacaaatgcttgtcgacttcggg

SEQ ID NO: 42676 - DNA, 30 bp, synthetic construct
  source 1..30: mol_type = other DNA
acaatcaccatgggacccattggacctgtg

SEQ ID NO: 42677 - DNA, 48 bp, synthetic construct
  source 1..48: mol_type = other DNA
gccttctccgtgttttctataacgggaatgcagaccgagatctactgg

SEQ ID NO: 42678 - DNA, 81 bp, synthetic construct
  source 1..81: mol_type = other DNA
attagccccgaggcactgtcctccctatacgcctggtccgtcgggagtatcgatattgctgggtctggcgtcaatggttgg

SEQ ID NO: 42679 - DNA, 63 bp, synthetic construct
  source 1..63: mol_type = other DNA
gggtacagtgccggcttcgatctgagtgacggcgcaaccgtgtttagcgacttcgtatcttcc

SEQ ID NO: 42680 - DNA, 69 bp, synthetic construct
  source 1..69: mol_type = other DNA
accctgcccggagctggggacggcgtggcctactatttcgagttccgcctttcggacgtcgatggtcag

SEQ ID NO: 42681 - DNA, 90 bp, synthetic construct
  source 1..90: mol_type = other DNA
gcctacacatccatgggcggcgacattagcggcggagctggattagtcttcattaccctgcctcatatcttcggtggcatgggaatgggt

SEQ ID NO: 42682 - DNA, 39 bp, synthetic construct
  source 1..39: mol_type = other DNA
tacggccccctggactttatccaaatcgccggaaagaac

SEQ ID NO: 42683 - DNA, 48 bp, synthetic construct
  source 1..48: mol_type = other DNA
ttcggtcaatctccgatcttccccttcacctccctgaaccttcctctg

SEQ ID NO: 42684 - DNA, 60 bp, synthetic construct
  source 1..60: mol_type = other DNA
cccgagattctgggcggtggatactccatgatgagcctcatacaagtctcgatccctcct

SEQ ID NO: 42685 - DNA, 60 bp, synthetic construct
  source 1..60: mol_type = other DNA
ggataccttgttggagctgatatggcagaccccgacctcttcgggtcatttactgcgtct

SEQ ID NO: 42686 - DNA, 72 bp, synthetic construct
  source 1..72: mol_type = other DNA
atgcagcccggctccatggacggcgtgatgtactatctgtcctttgacaccgatcggctatcattctcgttt

SEQ ID NO: 42687 - DNA, 90 bp, synthetic construct
  source 1..90: mol_type = other DNA
gcttattcacatttctcgggcgacatcgagggcggcgcatccctcgtttttataaccctgccttacattttcgccgatatgcctggcgga

SEQ ID NO: 42688 - DNA, 39 bp, synthetic construct
  source 1..39: mol_type = other DNA
tacggccccttgagcttcgtggagatcgccggaaagaac

SEQ ID NO: 42689 - DNA, 30 bp, synthetic construct; identical to SEQ ID NO: 42568
  source 1..30: mol_type = other DNA

SEQ ID NO: 42690 - DNA, 51 bp, synthetic construct
  source 1..51: mol_type = other DNA
ctgatctacatgggcgcgacctcgtcaatggacctgtcaatgtattaccag

SEQ ID NO: 42691 - DNA, 51 bp, synthetic construct
  source 1..51: mol_type = other DNA
tacggcttcgctctgttctccgtgaccggcgcctctgaatcagtcttctat

SEQ ID NO: 42692 - DNA, 36 bp, synthetic construct
  source 1..36: mol_type = other DNA
tcccagctgcaaagtagcctccacttctctgctgag

SEQ ID NO: 42693 - DNA, 39 bp, synthetic construct
  source 1..39: mol_type = other DNA
acctacctggagcaggaacggggtctggctcttttgtcc

SEQ ID NO: 42694 - DNA, 45 bp, synthetic construct
  source 1..45: mol_type = other DNA
gacatctgcgacgtcagcatttacgatgccaacttcgtgaagggc

SEQ ID NO: 42695 - DNA, 39 bp, synthetic construct
  source 1..39: mol_type = other DNA
agcaccctgctgtactttaacgacaatctcgagttcgcc

SEQ ID NO: 42696 - DNA, 57 bp, synthetic construct
  source 1..57: mol_type = other DNA
ccaggtctggactacggacgggccgagggcgtggctgttggctttagcttcttctct

SEQ ID NO: 42697 - DNA, 30 bp, synthetic construct
  source 1..30: mol_type = other DNA
aagatgatctccttcataccctactctgag

SEQ ID NO: 42698 - DNA, 33 bp, synthetic construct
  source 1..33: mol_type = other DNA
ttcatcttaggttccaattatctagcggtcgtg

SEQ ID NO: 42699 - DNA, 60 bp, synthetic construct
  source 1..60: mol_type = other DNA
gacttttttacacaaatgctgtgtcaagccccggagctccagcccctagtcaaccaatac

SEQ ID NO: 42700 - DNA, 51 bp, synthetic construct
  source 1..51: mol_type = other DNA
tcactgttcattttcaatgtcaatgaccctaacaccatacccgtggtactg

SEQ ID NO: 42701 - DNA, 39 bp, synthetic construct
  source 1..39: mol_type = other DNA
gtaccggacagctttctcaagaacaccttgctggttgat

SEQ ID NO: 42702 - DNA, 129 bp, synthetic construct
  source 1..129: mol_type = other DNA
attaagccaggggttgggttgaacatggcagctgctgcacaaagctccaacgtgaccatcaaccagacaatgaccggaactatcctgaacatggtccccgacaatcctctgaacgccctggcaaatggt

SEQ ID NO: 42703 - DNA, 33 bp, synthetic construct
  source 1..33: mol_type = other DNA
gctcaggcctacggcatcgaccttggcaccacc

SEQ ID NO: 42704 - DNA, 45 bp, synthetic construct
  source 1..45: mol_type = other DNA
atcgaggctgccatgcccggctctgtgcctgatggctatgttgtt

SEQ ID NO: 42705 - DNA, 42 bp, synthetic construct
  source 1..42: mol_type = other DNA
aaccttggcattccatgccgcggaatcatgggagacgggacc

SEQ ID NO: 42706 - DNA, 81 bp, synthetic construct
  source 1..81: mol_type = other DNA
tccgggtctgggcgctccggaacagcattagccctgaaggaagtcattggagacagcctcgagggcttctgttcatccgaa

SEQ ID NO: 42707 - DNA, 39 bp, synthetic construct
  source 1..39: mol_type = other DNA
gtaccggatagttttttcaagaacattatccttgtggat

SEQ ID NO: 42708 - DNA, 129 bp, synthetic construct
  source 1..129: mol_type = other DNA
atcaagccaggcgtcgggctgaacatggctgtgacgtcccaagcgggcaacgtgacccttaaccaaactatgaccgacaccattctcaacatggtgcccgacaatcctctgaactcccttgctagtggc

SEQ ID NO: 42709 - DNA, 33 bp, synthetic construct
  source 1..33: mol_type = other DNA
gctcaggcctacggaatggacctcggaacctca

SEQ ID NO: 42710 - DNA, 33 bp, synthetic construct
  source 1..33: mol_type = other DNA
aacacgacggttggcgagccagtgctttctgtc

SEQ ID NO: 42711 - DNA, 30 bp, synthetic construct
  source 1..30: mol_type = other DNA
gagatcggcctggatcaggctgtggtaccc

SEQ ID NO: 42712 - DNA, 90 bp, synthetic construct
  source 1..90: mol_type = other DNA
gggatggtggacttctctggcttctttgccgcgagcttgttcgagattcccgatttctacatgcctttcatcaattactccttcaaccct

SEQ ID NO: 42713 - DNA, 48 bp, synthetic construct
  source 1..48: mol_type = other DNA
gccaccctgagtatcgttcaaggcgacctctcttcctccgtctcgata

SEQ ID NO: 42714 - DNA, 90 bp, synthetic construct
  source 1..90: mol_type = other DNA
ttcttcaagggctggggatctaaccccaacgccttcttcaatggctcccttcttcaagtatcggaatcccctatgggcctcctgactttc

SEQ ID NO: 42715 - DNA, 72 bp, synthetic construct
  source 1..72: mol_type = other DNA
atgctgcccggggccggaatcgggctgcaagaactgttctcccccgaatgggaatcgcttagcaactttggg

SEQ ID NO: 42716 - DNA, 108 bp, synthetic construct
  source 1..108: mol_type = other DNA
ggatacatgtcgttacaaaccggaacgccagtggagcagctcgtgacacagggcgccggcctgatcttcgtggtctaccctactgctttcaatgctttgggatcttgg

SEQ ID NO: 42717 - DNA, 30 bp, synthetic construct
  source 1..30: mol_type = other DNA
gttccagatagcttcttcaagaacatcatt

SEQ ID NO: 42718 - DNA, 129 bp, synthetic construct
  source 1..129: mol_type = other DNA
atcaagcccggagccggcctgaacatggtcgccgccgctcaaagctccaacgtgaccctgaaccagactatgaccgacactgtgctcaatatggtgcctgacaacccactgaacgccctgtctaacgga

SEQ ID NO: 42719 - DNA, 30 bp, synthetic construct
  source 1..30: mol_type = other DNA
gctcaggcctacggcatggaccttggtgta

SEQ ID NO: 42720 - DNA, 36 bp, synthetic construct
  source 1..36: mol_type = other DNA
aacaccactgtcggggaaccagttctgtcatctgtt

SEQ ID NO: 42721 - DNA, 30 bp, synthetic construct
  source 1..30: mol_type = other DNA
gagatcggcctggaccaggctgtgattcct

SEQ ID NO: 42722 - DNA, 90 bp, synthetic construct
  source 1..90: mol_type = other DNA
ggcatggtcgatttctccgggttctacgccgcttctctgtttgagatccccgacttctacatgcctttcgtgaattacagcttcaacccc

SEQ ID NO: 42723 - DNA, 45 bp, synthetic construct
  source 1..45: mol_type = other DNA
gccaccctgagcatagcacaaggggacctctctgtgtccatctcc

SEQ ID NO: 42724 - DNA, 48 bp, synthetic construct
  source 1..48: mol_type = other DNA
tccatcgacgccgcggtttccgacgccgtgcctgaagtgtactatgag

SEQ ID NO: 42725 - DNA, 42 bp, synthetic construct
  source 1..42: mol_type = other DNA
aacctgggtatcccttgccgcggaataatgggagaaggcact

SEQ ID NO: 42726 - DNA, 78 bp, synthetic construct
  source 1..78: mol_type = other DNA
agcggcagcggccggtccgggaccgccctggtcctcaaggaagtgatcggtgactctctgaacggattttgctcggaa

SEQ ID NO: 42727 - DNA, 42 bp, synthetic construct
  source 1..42: mol_type = other DNA
atcagcattcttttcggtcccgcttacgcatcgtccacaacc

SEQ ID NO: 42728 - DNA, 39 bp, synthetic construct
  source 1..39: mol_type = other DNA
cgctattatagtgattatgattacccttccaaccaaccc

SEQ ID NO: 42729 - DNA, 33 bp, synthetic construct
  source 1..33: mol_type = other DNA
tacttcctcgagtctctggggtgcagttatgcc

SEQ ID NO: 42730 - DNA, 33 bp, synthetic construct
  source 1..33: mol_type = other DNA
gacatcttccaaaatttaggcggaggcatcggc

SEQ ID NO: 42731 - DNA, 30 bp, synthetic construct
  source 1..30: mol_type = other DNA
atccgcagcattaagcggagaatccggaga

SEQ ID NO: 42732 - DNA, 42 bp, synthetic construct
  source 1..42: mol_type = other DNA
aacagcggccactatagcgattacgactaccctcccaaccag

SEQ ID NO: 42733 - DNA, 30 bp, synthetic construct
  source 1..30: mol_type = other DNA
gtggatgacccctacatcaagaacaccatt

SEQ ID NO: 42734 - DNA, 132 bp, synthetic construct
  source 1..132: mol_type = other DNA
attaagcctggaatgggtctcaacctggtagcaacaggccaaagcacttccgtgacgatcaaccagacaatgaccgacaccattctgaacgtgatccccgagaaccccttcacctctctggcaagcggagat

SEQ ID NO: 42735 - DNA, 33 bp, synthetic construct
  source 1..33: mol_type = other DNA
gcccaggcatacggcatcgacctggggacaagt

SEQ ID NO: 42736 - DNA, 39 bp, synthetic construct
  source 1..39: mol_type = other DNA
gtcgagaacaatttcattgaggacgtgatcctgatggac

SEQ ID NO: 42737 - DNA, 132 bp, synthetic construct
  source 1..132: mol_type = other DNA
atcaagcccggcgtcgggatcaatatcgccgccataagccaaacgtctaatgtgaccctgaatcagacaatgaccgacctcgtccttaacatcatccccgagaatcccctgaacgcgctggcttcaagcgag

SEQ ID NO: 42738 - DNA, 36 bp, synthetic construct
  source 1..36: mol_type = other DNA
gctcagtgttgcggcatggacctgggaaccagtgcc

SEQ ID NO: 42739 - DNA, 33 bp, synthetic construct
  source 1..33: mol_type = other DNA
ttagtgtttacaagcgtcggcttacctgtggaa

SEQ ID NO: 42740 - DNA, 81 bp, synthetic construct
  source 1..81: mol_type = other DNA
ttcggggactggtctcttctcgaggatggactggaactgataatgccagagccaggcgaagacagcaccaacacaaactac

SEQ ID NO: 42741 - DNA, 33 bp, synthetic construct
  source 1..33: mol_type = other DNA
gtggcagggaccgacgggggaataagcgtcgga

SEQ ID NO: 42742 - DNA, 30 bp, synthetic construct
  source 1..30: mol_type = other DNA
gtgaacatcagcgacctgaaggataccgag

SEQ ID NO: 42743 - DNA, 39 bp, synthetic construct
  source 1..39: mol_type = other DNA
aataccatcgtggacggcgctcctgctctgtcaaacagc

SEQ ID NO: 42744 - DNA, 30 bp, synthetic construct
  source 1..30: mol_type = other DNA
gtgaagaaccccttcatcaagaatacactt

SEQ ID NO: 42745 - DNA, 126 bp, synthetic construct
  source 1..126: mol_type = other DNA
attaagcctggagccggcctcaatatggttgggctcgcgcaagcaaatgtgactaccaacaccactattacggacaccgtccttaattttatacccgagaaccctttttctagtctagctaacggc

SEQ ID NO: 42746 - DNA, 30 bp, synthetic construct
  source 1..30: mol_type = other DNA
gctcaggcctacggcatggacttgggtctc

SEQ ID NO: 42747 - DNA, 42 bp, synthetic construct
  source 1..42: mol_type = other DNA
agcaccacccttcaagacgcgttcggagtcggaactgcagag

SEQ ID NO: 42748 - DNA, 42 bp, synthetic construct
  source 1..42: mol_type = other DNA
ggctccttctatcaaaactgtggcggctttagcaaggacgac

SEQ ID NO: 42749 - DNA, 30 bp, synthetic construct
  source 1..30: mol_type = other DNA
tctggcagcgacgggatcgtggattccttc

SEQ ID NO: 42750 - DNA, 42 bp, synthetic construct
  source 1..42: mol_type = other DNA
atgctgcggtcctggaacgattacgagttcgtgtatagcgaa

SEQ ID NO: 42751 - DNA, 96 bp, synthetic construct
  source 1..96: mol_type = other DNA
tatatcctttacgaaaccacagccggatccggctccgagctgatgtccattttccggagtctcgctgactttgttcaatacgacatcgtcaagatc

SEQ ID NO: 42752 - DNA, 297 bp, synthetic construct
  source 1..297: mol_type = other DNA
ttcacttacgccatgaaccaatacgtttgggaggatcaggaatggtcttacgtgtcgagattctcctacggccagcttatcgtggaaggcaacggcgctaccctcgttgggaatggtgactataacttcatgtacattgggtcggaagcaaacgtgaactttctcaatgtgaatatcaaacacttcaaccactgtttcattaaccatgggaccctgatgtgcgagaagtgtttctttagcgataaccgggcctacaagttcgacgtcaagataagcgggagcgggacaattgtgcat

SEQ ID NO: 42753 - DNA, 57 bp, synthetic construct
  source 1..57: mol_type = other DNA
tacaacacagtgtacttcgattggtgctcatttaataacaacaccgccgagtattgg

SEQ ID NO: 42754 - DNA, 171 bp, synthetic construct
  source 1..171: mol_type = other DNA
caccaatttttccctctgtttgagcaatcctatataagtcagtacacctattttagcctggtcaatagcacagccttctccaccaatcggaccatggagattaacgtctcgaactcggaagagttgcttgatgcgttcctctacatcaataatttccctgatgccaataac

SEQ ID NO: 42755 - DNA, 129 bp, synthetic construct
  source 1..129: mol_type = other DNA
atcaatatgaagtctgggagctacaccgtgtccgttaacgactactctcgtgttcggacatacgactggcgcgctaaggcctataaccccggcatcctttcgtccgctgtgattaaggagcggtatctg

SEQ ID NO: 42756 - DNA, 102 bp, synthetic construct
  source 1..102: mol_type = other DNA
acaatcaacggcaacggcgcccacatcattctgagcggcaacgacctgaacgacgactatcactttgctaatatcggaaaatacgggtaccttaccctgaat

SEQ ID NO: 42757 - DNA, 39 bp, synthetic construct
  source 1..39: mol_type = other DNA
atccccagcatcgccgctgagttccacatgtccaacatc

SEQ ID NO: 42758 - DNA, 36 bp, synthetic construct
  source 1..36: mol_type = other DNA
taccatctgcaatacattaagggcttcgactctcag

SEQ ID NO: 42759 - DNA, 75 bp, synthetic construct
  source 1..75: mol_type = other DNA
atgggcgacgtgcctattattcaacaatattatcctctgcttctggagtccaacctgatcgctagcctgatccac

SEQ ID NO: 42760 - DNA, 78 bp, synthetic construct
  source 1..78: mol_type = other DNA
ggagcactagctggatgggtcggtggtttccttggcgagggccttcttagttccttaatctgtgacggcgtgattgga

SEQ ID NO: 42761 - DNA, 144 bp, synthetic construct
  source 1..144: mol_type = other DNA
acctccgtaaattctaacatcgtggtcaacaaggtttccacatcccttactgtgaacgacatcaacattacatatagtgattctgcaaaccttatcatcacactgaaggaccggaacaacgccgtgctcaagggcaaggatatt

SEQ ID NO: 42762 - DNA, 57 bp, synthetic construct
  source 1..57: mol_type = other DNA
ctcaacggcaaagactacgtggtcaagaccgggaatgatggaaaggccacacttcct

SEQ ID NO: 42763 - DNA, 267 bp, synthetic construct
  source 1..267: mol_type = other DNA
gccagtagtgtttcgtctgacgtggtcgtcgacaagctggctactgccctcaccgcgggaaatattaacatcacatacggcgactccgccaacctcatcatcacccttaaggatgccaagggcaatgctctgtctggcaaagtgatcctgatcaacattaccgataagatctattctgccacaaccgacaataacggcgaagtgaccctccctattgacatcctgcccggcaaatacgcttccaagatcgagtttggcgaggatgag

SEQ ID NO: 42764 - DNA, 51 bp, synthetic construct
  source 1..51: mol_type = other DNA
atgcagaataaggacaacctgtttaacggcatttacaccgatgtatttgtt

SEQ ID NO: 42765 - DNA, 258 bp, synthetic construct
  source 1..258: mol_type = other DNA
ctgaacgggctggaagtcacctacaacgggaccgagaattacccctctgccatcggatatctcaacctgaccgtatcgcaagtgaacgtgacagtgtccaatgagaccggagagggcaaggtcggagatgagattgaggtggagttcactgtgactgcgagcgacgagtccgaaatcaatgaaggcaaacttacggttacggttaaaggcaccgagtacagcgctgaggtcaaggacgggaaagcaacattcaccttc

SEQ ID NO: 42766 - DNA, 126 bp, synthetic construct
  source 1..126: mol_type = other DNA
aacatcaatctcgaggccggcaaatatgtcattaccgcgtatcatccattcaataaccagacccactccaacaacattaccgtgctgagccgggtcatcgataacgacgacctagtaaagtattat

SEQ ID NO: 42767 - DNA, 123 bp, synthetic construct
  source 1..123: mol_type = other DNA
gggagccaatatgtcgtgacaattttgggcgccgacggcaaagtagttggagccggagaaaacgtgaccttcaacatcaacggggtcatgtacacccggcaaactaacgaatcaggacaggct

SEQ ID NO: 42768 - DNA, 216 bp, synthetic construct
  source 1..216: mol_type = other DNA
acaatcactgccatgtacaatgactgtcgagtgtctaatagcatcgaggtgctccctgtgctgttcgccgaagatctggtcaagaaatatggaatttcagaccagtttaaggcactgctcgtggacgggcagggcaaccccttcccaaaccagaacattacatttaacatcaacggggtcttttatcaacgcactaccaacgacgagggatacgcg

SEQ ID NO: 42769 - DNA, 57 bp, synthetic construct
  source 1..57: mol_type = other DNA
atcattacatctagcttcaacggcaccaatatttccaacaagatcaccatcgtggat

SEQ ID NO: 42770 - DNA, 36 bp, synthetic construct
  source 1..36: mol_type = other DNA
gtgagtgccctgggtgctgacggtttggctttggct

SEQ ID NO: 42771 - DNA, 48 bp, synthetic construct
  source 1..48: mol_type = other DNA
atcctgattgccatgggcgtcgggaacaccatcaatttcgctatggtg

SEQ ID NO: 42772 - DNA, 36 bp, synthetic construct
  source 1..36: mol_type = other DNA
acctacgtggcttcaactgatgccgtcgctgtgtat

SEQ ID NO: 42773 - DNA, 63 bp, synthetic construct
  source 1..63: mol_type = other DNA
gagatcgtttatctcttcgcatatgctggaacatccatccgactggcacctcaacttgtggcc

SEQ ID NO: 42774 - DNA, 33 bp, synthetic construct
  source 1..33: mol_type = other DNA
atgacattttttcttcaaggttttccgtttaca

SEQ ID NO: 42775 - DNA, 33 bp, synthetic construct
  source 1..33: mol_type = other DNA
agcctggaaaccctgctcaccaatcactctttg

SEQ ID NO: 42776 - DNA, 36 bp, synthetic construct
  source 1..36: mol_type = other DNA
agcaccatcctgctcgggctgacaggcgttggattc

SEQ ID NO: 42777 - DNA, 51 bp, synthetic construct
  source 1..51: mol_type = other DNA
ctgatctacctccaagcattcatcctcaatagtcaagtctgtgttgtgaag

SEQ ID NO: 42778 - DNA, 42 bp, synthetic construct
  source 1..42: mol_type = other DNA
atcatcagcattctgttcggcgaggcctaccacaatagcata

SEQ ID NO: 42779 - DNA, 45 bp, synthetic construct
  source 1..45: mol_type = other DNA
ctgccatccatcgagcagagcttcaatttaacctcacgggaatct

SEQ ID NO: 42780 - DNA, 36 bp, synthetic construct
  source 1..36: mol_type = other DNA
tccctggttatcctttcaatgggcctgaacgatcag

SEQ ID NO: 42781 - DNA, 39 bp, synthetic construct
  source 1..39: mol_type = other DNA
gtgagcgaccccttcatcaaggataccattctggcaaac

SEQ ID NO: 42782 - DNA, 126 bp, synthetic construct
  source 1..126: mol_type = other DNA
attcagcctggcgccggactgaacatggctgctagccagacatctattgcctccaataccaccatcaccgagacaatcctcgacatgatccccgataacccattctacgctctggcaaacggagac

SEQ ID NO: 42783 - DNA, 36 bp, synthetic construct
  source 1..36: mol_type = other DNA
gcagctcaggcctacggcatcgatctgggaacgagt

SEQ ID NO: 42784 - DNA, 33 bp, synthetic construct
  source 1..33: mol_type = other DNA
gtatttaactccgttggattgcctgcggatccg

SEQ ID NO: 42785 - DNA, 39 bp, synthetic construct
  source 1..39: mol_type = other DNA
gtcaaagaccccttcatcaaggatatcgtgctgatcgac

SEQ ID NO: 42786 - DNA, 129 bp, synthetic construct
  source 1..129: mol_type = other DNA
attaagcccggggagggcttaaacatggctggccttgctcaagccaatctaacgacagcccaaagcatggccgacaccgtgatcaatatcatccccgacaaccctattaactccctggcttctggagat

SEQ ID NO: 42787 - DNA, 36 bp, synthetic construct
  source 1..36: mol_type = other DNA
gccgcgcaagcttatggcatcgacttgggtaccagt

SEQ ID NO: 42788 - DNA, 30 bp, synthetic construct
  source 1..30: mol_type = other DNA
gtgaccgaccccttcatcaagaacattgtc

SEQ ID NO: 42789 - DNA, 132 bp, synthetic construct
  source 1..132: mol_type = other DNA
atacaacccggcatcggcctcaacatggcggccaacagcacagccagtagccaggtggctgtcaatcagaccgtggccgacaccctgctgaatatcatacccgataaccccataaactccttggccaatgga

SEQ ID NO: 42790 - DNA, 33 bp, synthetic construct
  source 1..33: mol_type = other DNA
accgctcaagccttcggcatcgatcttggactg

SEQ ID NO: 42791 - DNA, 234 bp, synthetic construct
  source 1..234: mol_type = other DNA
attttttatcttgacaacgataccgggtactactcggagtactttaatgacacagaagatctcatcttcaccatataccggaactttaccgataatggcatcctctattcaaagggctacaacttcaaaaacttgaaggagatcgctgaggttttcccactgatgctcaacaactcctattccctcgacattgacatcacgaaaaacctctatgtcaacgacatcgatagctcc

SEQ ID NO: 42792 - DNA, 153 bp, synthetic construct
  source 1..153: mol_type = other DNA
gagtcctgcctggaacccgtgatgaaatacgcaaaacaggatggcctcgagaacattaaaaccaaggtgctgacaatcaaccttaagaagggcatgaccatcgattgcaaaaacacaatcaagccggactctcttgactctatgtattcaatg

SEQ ID NO: 42793 - DNA, 33 bp, synthetic construct
  source 1..33: mol_type = other DNA
gtcgacaaccccttcattaagaatgtgatcctg

SEQ ID NO: 42794 - DNA, 129 bp, synthetic construct
  source 1..129: mol_type = other DNA
ttcaagcccggactggggctgaacatggccagcgtggcccagtcctctagcgtcgtgatgaaccagactatgaccgataccatcctcaatataattccggataatcctattaactccctggctaacggc

SEQ ID NO: 42795 - DNA, 33 bp, synthetic construct
  source 1..33: mol_type = other DNA
gctcaggcctatggcatggaccttggtacatca

SEQ ID NO: 42796 - DNA, 42 bp, synthetic construct
  source 1..42: mol_type = other DNA
tttgtatcggaccagtttattaaagacgtgatcctcctgaac

SEQ ID NO: 42797 - DNA, 126 bp, synthetic construct
  source 1..126: mol_type = other DNA
attaagcctggcgctgggctcaatatggtcggggtggctcaggccaacgtcaccaccaacgccagcgcatcgaacacggtactgaacatgattccggataatcccttcaactccctggccaatgga

SEQ ID NO: 42798 - DNA, 30 bp, synthetic construct
  source 1..30: mol_type = other DNA
gctcaggcctatggcatggacttgggtctg

SEQ ID NO: 42799 - DNA, 30 bp, synthetic construct
  source 1..30: mol_type = other DNA
gtattcacttcggttggacttcctgttgac

SEQ ID NO: 42800 - DNA, 30 bp, synthetic construct
  source 1..30: mol_type = other DNA
gtgagcgactccttcatcaagcagatcatc

SEQ ID NO: 42801 - DNA, 132 bp, synthetic construct
  source 1..132: mol_type = other DNA
atcaagcctggcgtcggcctgaacttagcgggcgtagccacttccgctaacgtgaccgtgaaccagacggttccggatgctatcctgaacatgattcccgacaatcccattgctagcctagcgacagggact

SEQ ID NO: 42802 - DNA, 33 bp, synthetic construct
  source 1..33: mol_type = other DNA
gcggcacaagcatacggcatggacctgggaatc

SEQ ID NO: 42803 - DNA, 30 bp, synthetic construct
  source 1..30: mol_type = other DNA
gtgttttcgagtgttggtctacctgtagat

SEQ ID NO: 42804 - DNA, 39 bp, synthetic construct
  source 1..39: mol_type = other DNA
gtgaccgaccccttcatcaagaacatcattctgatggat

SEQ ID NO: 42805 - DNA, 132 bp, synthetic construct
  source 1..132: mol_type = other DNA
ataaagccaggcgtcggtctgcacatggcctcactcatcgaacagagcaacgtgaccgtcaatcagacaatgacggacacactcctgaacatgattcccgagaaccctatcaattctcttgcaagcggagac

SEQ ID NO: 42806 - DNA, 36 bp, synthetic construct
  source 1..36: mol_type = other DNA
gcagctcaggcctacggcatcgacctgacaaccagc

SEQ ID NO: 42807 - DNA, 39 bp, synthetic construct
  source 1..39: mol_type = other DNA
gtccacgaccacttcattaagaacatcgtgctgatggac

SEQ ID NO: 42808 - DNA, 129 bp, synthetic construct
  source 1..129: mol_type = other DNA
ctgaagccaggcctcggactgaatatggccgctgccgctcaaacctccaacgtgacaatcaatcagaccatgaccgacaccatcctgaacattatccctgagaaccctctgaacgctctggcaaacgga

SEQ ID NO: 42809 - DNA, 33 bp, synthetic construct
  source 1..33: mol_type = other DNA
gcccaggcttacgggatcgatctgggcacaagc

SEQ ID NO: 42810 - DNA, 33 bp, synthetic construct
  source 1..33: mol_type = other DNA
gtgaccgaccccttcatcaagaacattgtgctc

SEQ ID NO: 42811 - DNA, 129 bp, synthetic construct
  source 1..129: mol_type = other DNA
atccagcccggggccggcctgaacatggtctccaacgccaccacaagcaacgtggctctgaatcagaccactgccgatacactcctgaacatcatccctgacaatccaattaactctctcgctaacggc

SEQ ID NO: 42812 - DNA, 33 bp, synthetic construct
  source 1..33: mol_type = other DNA
actgcccaagcctttggcatcgaccttggtctg

SEQ ID NO: 42813 - DNA, 39 bp, synthetic construct
  source 1..39: mol_type = other DNA
gtgagcgaccacttcattaagaacatcatcctgatcgat

SEQ ID NO: 42814 - DNA, 129 bp, synthetic construct
  source 1..129: mol_type = other DNA
attcagcccggagccggcctgaatatggtggcttccgccgacgtggccaacgtgaccctgaatcagactatgaccgatacaatcctgaacatggtccctgacaacccgttctcgtcactcgcttctgga

SEQ ID NO: 42815 - DNA, 30 bp, synthetic construct
  source 1..30: mol_type = other DNA
gctcaggcctacggcatggacctgaccatg

SEQ ID NO: 42816 - DNA, 39 bp, synthetic construct
  source 1..39: mol_type = other DNA
gtggacaaccacttcatcaaggacgtcattctgatggac

SEQ ID NO: 42817 - DNA, 132 bp, synthetic construct
  source 1..132: mol_type = other DNA
ttcaagcccggggttggcgtcaacctaagcgcaataacacaaaccagtaacgtcactctgaatcagacaatgacagagctggtgctcgacatcatccccgagaatccactgaacgcactcgcaagtagcgaa

SEQ ID NO: 42818 - DNA, 36 bp, synthetic construct
  source 1..36: mol_type = other DNA
gcccagtactgcgggatggacctgggcacttctgct

SEQ ID NO: 42819 - DNA, 33 bp, synthetic construct
  source 1..33: mol_type = other DNA
acactcgtattcacgtccattggaatccctctg

SEQ ID NO: 42820 - DNA, 54 bp, synthetic construct
  source 1..54: mol_type = other DNA
gtcggtggcattcctatcctgaaaccaagcatccggtacctcctgaagccagcc

SEQ ID NO: 42821 - DNA, 261 bp, synthetic construct
  source 1..261: mol_type = other DNA
aggtcccttggggagttcactataacaagttctacgtctccaatatacacattacaaagtcgggccgacttcaccctccacgtcctgaacctgctggactttatagggggaaatttcgggatcacacatggaaagctgctggcgtccaccatcccgggctccgatctcgggccgcggatgatggtcgggaagctgatcgcctggaggacggaagtgaccgtgacccccacgttgattgggcaaatggtgaccgacttcggg

SEQ ID NO: 42822 - DNA, 78 bp, synthetic construct
  source 1..78: mol_type = other DNA
cagctgatgttcgagatgccaactgtttctcttatccttcctggcgtcgacattccgggatcgcctctgtacattccc

SEQ ID NO: 42823 - DNA, 39 bp, synthetic construct
  source 1..39: mol_type = other DNA
gtcgacaaccacttcatcatcgacattgtgctgatggac

SEQ ID NO: 42824 - DNA, 132 bp, synthetic construct
  source 1..132: mol_type = other DNA
ttcaagccaggcgtcggggtcaacttcacggcaatcacacaaactagcaatgtgacattgaaccaaacaatgaccgacctcgtgctcgatatcatccccgagaaccctctcaacgcactggcttcgacggag

SEQ ID NO: 42825 - DNA, 39 bp, synthetic construct
  source 1..39: mol_type = other DNA
gcggcccaatattgcgggatggacttgggcacaagtgcc

SEQ ID NO: 42826 - DNA, 36 bp, synthetic construct
  source 1..36: mol_type = other DNA
accctcgtttttacgagcgttggtatccctctggaa

SEQ ID NO: 42827 - DNA, 39 bp, synthetic construct
  source 1..39: mol_type = other DNA
gtcgacaactacttcattgagaacgtgatcctgatggat

SEQ ID NO: 42828 - DNA, 132 bp, synthetic construct
  source 1..132: mol_type = other DNA
tttaaacccggcgtcggggtcaacctatccgcaatcaatcagacaagtcacgtcactctaaatcagacgatgaccgacctcgttctgaacatcatccccgagaacccactgaacgcactggccagtagtgag

SEQ ID NO: 42829 - DNA, 42 bp, synthetic construct
  source 1..42: mol_type = other DNA
gcagctcagtactgcgggatggatttagccaccggcgccagc

SEQ ID NO: 42830 - DNA, 36 bp, synthetic construct
  source 1..36: mol_type = other DNA
accttggtcttttcgtccgtcgggataccacttgag

SEQ ID NO: 42831 - DNA, 33 bp, synthetic construct
  source 1..33: mol_type = other DNA
gtgaccgaccccttcattaaggatatcgttctc

SEQ ID NO: 42832 - DNA, 129 bp, synthetic construct
  source 1..129: mol_type = other DNA
atccagcccggtgccggcctgcacatgtctgacatcggcggtgccagtaacctgacaatgaatcagaccatgaccgatactattctcaacctggtgcccgacaacccattttcgtcgctggcgactggg

SEQ ID NO: 42833 - DNA, 36 bp, synthetic construct
  source 1..36: mol_type = other DNA
gcccaggcctacggcatcgatactggtggatcgctg

SEQ ID NO: 42834 - DNA, 33 bp, synthetic construct
  source 1..33: mol_type = other DNA
aatacgacagccggtgctgacattctgagcatc

SEQ ID NO: 42835 - DNA, 30 bp, synthetic construct
  source 1..30: mol_type = other DNA
gagatcggcctggatcttacggcggtcccc

SEQ ID NO: 42836 - DNA, 87 bp, synthetic construct
  source 1..87: mol_type = other DNA
ggcatggtcgacttcgccccggtttggtccgctcacctgatcgagatgcctcatttctacatgccctttgtgcactacaacctcaac

SEQ ID NO: 42837 - DNA, 48 bp, synthetic construct
  source 1..48: mol_type = other DNA
gctgccctgtctttcgcatacggcgacctaagtatcagcgtgtccggt

SEQ ID NO: 42838 - DNA, 39 bp, synthetic construct
  source 1..39: mol_type = other DNA
atcaccgaccccttcattaaggatatcgtgctgatgaac

SEQ ID NO: 42839 - DNA, 132 bp, synthetic construct
  source 1..132: mol_type = other DNA
gtccagcctggcgccggcctgcacatggccgggattgccgacacggccaacgtgaccgctaaccagaccatgactgacacaattctcaacatggttcctgataaccctttctcgtcgttggcttctggggat

SEQ ID NO: 42840 - DNA, 33 bp, synthetic construct
  source 1..33: mol_type = other DNA
gcccaggcatatggcatcgacttaggcacgagc

SEQ ID NO: 42841 - DNA, 33 bp, synthetic construct
  source 1..33: mol_type = other DNA
aataccacggccggtgctgacattctgagcatc

SEQ ID NO: 42842 - DNA, 30 bp, synthetic construct
  source 1..30: mol_type = other DNA
gagatcggtctggacctggtgacagttcca

SEQ ID NO: 42843 - DNA, 87 bp, synthetic construct
  source 1..87: mol_type = other DNA
ggcatggtggacttcgcgcctgtttggtcggctcacctgatcgaggtccctaagttctacctgccttttatgaactacaacctgaat

SEQ ID NO: 42844 - DNA, 45 bp, synthetic construct
  source 1..45: mol_type = other DNA
gccgctctgtccttcgtatacggggacctgagcatctccatttca

SEQ ID NO: 42845 - DNA, 39 bp, synthetic construct
  source 1..39: mol_type = other DNA
gtgaccgacagctacatcaaaaagatcatcctgatggat

SEQ ID NO: 42846 - DNA, 132 bp, synthetic construct
  source 1..132: mol_type = other DNA
atacagccaggagcgggccttaacatggctggcgttgcacaaagctccaacgttaccgtgaaccagactatgacggacacagtcctgagcctggtccctgacaacccctttagttctctagctacgggggac

SEQ ID NO: 42847 - DNA, 33 bp, synthetic construct
  source 1..33: mol_type = other DNA
gcccaggcatacggcatcgatcttgggacatct

SEQ ID NO: 42848 - DNA, 39 bp, synthetic construct
  source 1..39: mol_type = other DNA
gtgaaagatcccttcattaagaacaccatcctgatggac

SEQ ID NO: 42849 - DNA, 132 bp, synthetic construct
  source 1..132: mol_type = other DNA
ctccagcccggactggggctcacctttactaattccgagtccgttaacaacgccaccatcaatcagacacttgccgacactctgctgagtactatccctgagaacgtgatcgagtcactggcaaagggtgaa

SEQ ID NO: 42850 - DNA, 33 bp, synthetic construct
  source 1..33: mol_type = other DNA
accgtgatggcatcagttggtctgcctctcgcc

SEQ ID NO: 42851 - DNA, 78 bp, synthetic construct
  source 1..78: mol_type = other DNA
cagctgatgttcgagacacctaccgtctccctgatcctccctggcgtggacatacctgggtcgccaatctacattccc

SEQ ID NO: 42852 - DNA, 57 bp, synthetic construct
  source 1..57: mol_type = other DNA
tccgtcggcggcattccactcctgaagcccagcatccggtaccttctgaaacctgcc

SEQ ID NO: 42853 - DNA, 264 bp, synthetic construct
  source 1..264: mol_type = other DNA
cggagcatcggcgaactcaccgtgtcttctgccatcgatcccttctacacactcaagaaccgcgctgacttcactctccacgtgctgaacctgctggacttcctgggcggcaatttcggggccacccacgggcagattctggcctcctccatccccggatcagagcttgggcctaggatgatggttggcaaacttatcgcttggagaagcgaggtgaccgtcactccaacactgattggacagatggtagcggattacggaaaa

SEQ ID NO: 42854 - DNA, 33 bp, synthetic construct
  source 1..33: mol_type = other DNA
aacacgacggctggcgctgacattctgagcatc

SEQ ID NO: 42855 - DNA, 30 bp, synthetic construct
  source 1..30: mol_type = other DNA
gagatcggtctcgacctgaccgtggttccg

SEQ ID NO: 42856 - DNA, 87 bp, synthetic construct
  source 1..87: mol_type = other DNA
ggcatggtggacttcgcgcctgtctggagcgctcacgtgatcgagatccctaagttttacctgcccattatgcactacgatctcaac

SEQ ID NO: 42857 - DNA, 48 bp, synthetic construct
  source 1..48: mol_type = other DNA
gccgccctgagtctcgcttacggggacctgagcatttccatctctggc

SEQ ID NO: 42858 - DNA, 33 bp, synthetic construct
  source 1..33: mol_type = other DNA
aacacaaccgccggcgctgacattctgagcatc

SEQ ID NO: 42859 - DNA, 30 bp, synthetic construct
  source 1..30: mol_type = other DNA
agcatcggtctggacctggaggtggtacca

SEQ ID NO: 42860 - DNA, 87 bp, synthetic construct
  source 1..87: mol_type = other DNA
ggcatggtggacttcgccccggcgatggcagcccacgtcgtggaggtccccaagttctacctccctttcgtgaactacaacctgaat

SEQ ID NO: 42861 - DNA, 45 bp, synthetic construct
  source 1..45: mol_type = other DNA
gccgctctctcccttgtctacggagacctttctatttctatctcc

SEQ ID NO: 42862 - DNA, 33 bp, synthetic construct
  source 1..33: mol_type = other DNA
gtgcacaaccccttcattaaggacgtcatcctc

SEQ ID NO: 42863 - DNA, 129 bp, synthetic construct
  source 1..129: mol_type = other DNA
atcaagcctgggctgggattggacatgagtcatgtggcccagaccgccgacgtcgccattaatcagacaatggctgataccgtgctgaacatcgttcctgacaaccctttcaattccctcgctaacggc

SEQ ID NO: 42864 - DNA, 33 bp, synthetic construct
  source 1..33: mol_type = other DNA
gcacaggcctacggcatcgacttgggtacttcc

SEQ ID NO: 42865 - DNA, 39 bp, synthetic construct
  source 1..39: mol_type = other DNA
gtcacagacaccttcattaaggacatcgtgctgatgaac

SEQ ID NO: 42866 - DNA, 105 bp, synthetic construct
  source 1..105: mol_type = other DNA
atccagcccggcctgggactcaacatgggtggaatcaccgagacagccaacctgaccgtgaaccagaccatgactgacaccatcctgaatatcattcctgacaac

SEQ ID NO: 42867 - DNA, 33 bp, synthetic construct
  source 1..33: mol_type = other DNA
gcccaggcctacggcatcgatctgggtacttcc

SEQ ID NO: 42868 - DNA, 39 bp, synthetic construct
  source 1..39: mol_type = other DNA
gtgaccgatccctacattaagaacatcgtcctgatggac

SEQ ID NO: 42869 - DNA, 132 bp, synthetic construct
  source 1..132: mol_type = other DNA
ctgcagcccggggccggactgcacatgaccggcatcgccgaggcaagcaacgtgactatcaatcagaccatgaccgacacaattctgggcatgataccagacaaccctttctcctctctggcttctggagac

SEQ ID NO: 42870 - DNA, 33 bp, synthetic construct
  source 1..33: mol_type = other DNA
gcccaggcctacggcatcgatttgggcacaagc

SEQ ID NO: 42871 - DNA, 57 bp, synthetic construct
  source 1..57: mol_type = other DNA
tatgttaagggcattcccctgttcacccctagcctccggtacaaactgatcgctgcc

SEQ ID NO: 42872 - DNA, 261 bp, synthetic construct
  source 1..261: mol_type = other DNA
agaagcgttaacgagatgctgataaccacctctacaaacccgttctacacattacaatcaagggcagactttactattcacgtcctggatcttctcaacgccctctctggcaacctgggcctcatgcatggcggctttatcctcaagtccattcctggctccgattacggccctcgcatgatggttggcaagttgatttcttggcggtccggggtaaccataacccccaccatcattgggccaatgctgatcgacttcggt

SEQ ID NO: 42873 - DNA, 51 bp, synthetic construct
  source 1..51: mol_type = other DNA
tatattggcatgatccaaaatgtgttcaccacaaatctatcggctgagtcc

SEQ ID NO: 42874 - DNA, 45 bp, synthetic construct
  source 1..45: mol_type = other DNA
ttcacactgcctgaggccgaagggcaaagaggagctcactccacc

SEQ ID NO: 42875 - DNA, 288 bp, synthetic construct
  source 1..288: mol_type = other DNA
cggggcgaactcctttctggcaacgccgatgtctctagcatcctatcttcattagccgagtccgggttcgcactggacaccgcttattccgcttactacacatctgagtcctttgtgtacattatcgacaagttcacactcttcgaaatcatcgccctgttttgcgagttcgtgaagtccatcttcctcggagccaaccctgacgtgctgctgacctctattagtgctcagtacaccatccactatggcggtggcatcctgcccttctactttttcttctaccttggt

SEQ ID NO: 42876 - DNA, 30 bp, synthetic construct
  source 1..30: mol_type = other DNA
agccagctgaacatggaggctaccttcgcc

SEQ ID NO: 42877 - DNA, 48 bp, synthetic construct
  source 1..48: mol_type = other DNA
atctatctgatgcaaatagatgagaacgtggacattattctggcttac

SEQ ID NO: 42878 - DNA, 30 bp, synthetic construct
  source 1..30: mol_type = other DNA
ttcctcacggttggtcaggtcggattggtc

SEQ ID NO: 42879 - DNA, 48 bp, synthetic construct
  source 1..48: mol_type = other DNA
ctgatatacgcctcatttcaaattattaacatggagacgccgatcttt

SEQ ID NO: 42880 - DNA, 54 bp, synthetic construct
  source 1..54: mol_type = other DNA
tccgtcggcggcgtgcctatcctgaagcccagcattcgctacctcctgaaacct

SEQ ID NO: 42881 - DNA, 261 bp, synthetic construct
  source 1..261: mol_type = other DNA
agatcaatccacgagttgactatctccaatgccattgacccattttacactctcaaatcccgcgccgattttaccctccacgtgctggatctgctggatatcatcggtggcaactttggcgtgacacacggaaaattgctcgcaagtgcaattccgggaagcgaacttgggccacggatgatgattggcaaactgatcgcctggcgcactgaggtgacaatcaccccaacactgatcgggcagatggtggcggactttggc

SEQ ID NO: 42882 - DNA, 39 bp, synthetic construct
  source 1..39: mol_type = other DNA
attcacgaccccttcatcaaggatgtgctgctgatgaat

SEQ ID NO: 42883 - DNA, 129 bp, synthetic construct
  source 1..129: mol_type = other DNA
atccagcccgggaccggactcactctgaccgacgtggcaccttccaacgtcacaatcaaccaatctatgacaaataccctgctcaacgccatccccgacaatccaattaacagcctggcttctggagat

SEQ ID NO: 42884 - DNA, 33 bp, synthetic construct
  source 1..33: mol_type = other DNA
gcccaagtatacggagtagacctggggacaagc

SEQ ID NO: 42885 - DNA, 66 bp, synthetic construct
  source 1..66: mol_type = other DNA
ctgaaccctgcctaccatatacctgaatttacaactcccggcctctatctgaccgacaagccaatt

SEQ ID NO: 42886 - DNA, 93 bp, synthetic construct
  source 1..93: mol_type = other DNA
gccttctttcacggacagccccaactagctgccatgaacgccgcaacacccactgtcgctgtgcacgagatggcaaccaaacttcttggccca

SEQ ID NO: 42887 - DNA, 33 bp, synthetic construct
  source 1..33: mol_type = other DNA
gttgcaggactgggcgcggatgctcttgccgcc

SEQ ID NO: 42888 - DNA, 48 bp, synthetic construct
  source 1..48: mol_type = other DNA
ctggagatcatgggggctggcgactctattagctacgccgctagttac

SEQ ID NO: 42889 - DNA, 36 bp, synthetic construct
  source 1..36: mol_type = other DNA
gtgatcgtcgctggcactagcgctgtagctgtatac

SEQ ID NO: 42890 - DNA, 63 bp, synthetic construct
  source 1..63: mol_type = other DNA
cagattgcgactgttttctcttacacctccgcaagcagtagtcttgcaccgcaaatcgctaca

SEQ ID NO: 42891 - DNA, 33 bp, synthetic construct
  source 1..33: mol_type = other DNA
ttcctgatcgggagcttcaatttggccgccatt

SEQ ID NO: 42892 - DNA, 75 bp, synthetic construct
  source 1..75: mol_type = other DNA
gaccctattgtcggacttctgtgctccgccaacatggaggtgtctagtcaacttttccctctggtcaaggacttt

SEQ ID NO: 42893 - DNA, 51 bp, synthetic construct
  source 1..51: mol_type = other DNA
ctcttcctcttctccattaacgaccccgcttacatccctgttgccactgat

SEQ ID NO: 42894 - DNA, 30 bp, synthetic construct
  source 1..30: mol_type = other DNA
atgtccgtgatctactctaccctgacaagc

SEQ ID NO: 42895 - DNA, 54 bp, synthetic construct
  source 1..54: mol_type = other DNA
tccgtcggcggcatccccctgattaagccaagcatccggtacctcctgaaaccc

SEQ ID NO: 42896 - DNA, 261 bp, synthetic construct
  source 1..261: mol_type = other DNA
agatcactgggagaaatgacgattacctctagcacatctcccttttacacccttcaaagccgagcagatttcactctccacgtgctgaatctgctggactttatcggtggaaacttcgggctcacgcatggccacatgctggctagctcaattcccgggagcgacctgggaccgagaatgatggttggcaagttgatcgcttggcgcaccgaggtcactgtgacccccacgctcattgggcagatggtggtcgattttggg

SEQ ID NO: 42897 - DNA, 54 bp, synthetic construct
  source 1..54: mol_type = other DNA
atgtccttcatctactctaagctgaccagctttctgaacatcatcaacgatgag

SEQ ID NO: 42898 - DNA, 57 bp, synthetic construct
  source 1..57: mol_type = other DNA
agcgttggcggtatccccatcctgaagccttccattcggtacctcctgaaaccagcg

SEQ ID NO: 42899 - DNA, 264 bp, synthetic construct
  source 1..264: mol_type = other DNA
aggtccatccacgaactgacagtttcgagcgccatcgaccccttttatacgctcaagtccagagctgacttcacactgcatgtgctgaacctgctcgacattattggcggtaacttcggcaccacccacggccagctcatcgcttccaccattcccggctccgagctggggccacgcatgatggtcgggaagctgatcgcctggcggaccgaggtcactgtcactcctacactgatcgggcagatggtggccgatttcggtaag

SEQ ID NO: 42900 - DNA, 51 bp, synthetic construct
  source 1..51: mol_type = other DNA
atgagcgccatctactctaaagttagctcgttccttaacttcgtctgcgac

SEQ ID NO: 42901 - DNA, 51 bp, synthetic construct
  source 1..51: mol_type = other DNA
gtgggcggcattccaattttgaaaccgtccctccggtatctgctgaagcct

SEQ ID NO: 42902 - DNA, 264 bp, synthetic construct
  source 1..264: mol_type = other DNA
tatcggagcatcaacgagtacactatatcttctgccattgaccctttctacaccctccggagccgcgctgactttaccctccatgtgctgaacctgctggacggaatcggtggcaatttcgggctgacacacggcaagctgctggcatctgccataccgggatcagagacagggccaaggatgatggtcggccggctgatttcctggcggactgaagtgaccgtgacaccctctctcatcgggcagatggtggtcgattttgga

SEQ ID NO: 42903 - DNA, 36 bp, synthetic construct
  source 1..36: mol_type = other DNA
tccacgttaacgtcgttgatcaacaagatctctgac

SEQ ID NO: 42904 - DNA, 54 bp, synthetic construct
  source 1..54: mol_type = other DNA
tccgtcggtggcattccacttctgaagcccagcatccggtacctcctgaaacca

SEQ ID NO: 42905 - DNA, 261 bp, synthetic construct
  source 1..261: mol_type = other DNA
aggtctctcggggagatgacgataactagtagcacatctcctatctattcgcttcaaagccgagcagacttcacgctgcatgtacttaacctgcttgattttatcggcggaaactttggcctcacccacggcaagatgctcgcaagcagcatccctggttctgacctcggcccacggatgatggtcgggaagcttatcgcctggcgcaccgaggtaaccgtgacacctaccctgatcggccagatggttgtcgacttcgga

SEQ ID NO: 42906 - DNA, 54 bp, synthetic construct
  source 1..54: mol_type = other DNA
atgtctttcatttactccaagctgaccagcctgctgaatatcatcaacgacgag

SEQ ID NO: 42907 - DNA, 57 bp, synthetic construct
  source 1..57: mol_type = other DNA
tccgtcggtggcatcccaatcctgaaacccagcattcggtacctcctgaagcctgcg

SEQ ID NO: 42908 - DNA, 264 bp, synthetic construct
  source 1..264: mol_type = other DNA
cgcagcattaatgaactgacagtctcctctgccatcgacccattctacacccttaaatcccgggccgacttcacactccacgtgctgaacctcctggacatcattggcggcaacttcggcgctactcacgggcagatcctggcctctagcatccccggttccgagctgggacccagaatgatggtcggcaagctgattgcatggaggaccgaggtgactatcacccctaccctcatcggccagatggtcgctgatttcggaaag

SEQ ID NO: 42909 - DNA, 51 bp, synthetic construct
  source 1..51: mol_type = other DNA
atgagcctgatctactctactttgacgagtataatcaacaagatttctgat

SEQ ID NO: 42910 - DNA, 51 bp, synthetic construct
  source 1..51: mol_type = other DNA
gttgggggcatacccctgcttaaacctagcatcaggtacctcctgaagcca

SEQ ID NO: 42911 - DNA, 261 bp, synthetic construct
  source 1..261: mol_type = other DNA
aggagcctgggagagctgacgattaccagctccacaaaccctttctacactttacaatcaagggccgactttactctgcacgttctcgaccttctcgattttatcggaggcaacttcggattgactcatggcaagctcctcgcgtctgctatccccggttccgagcttggcccaagaatgatggttggcaagctcatagcatggcggaccgaagtgactgtgaccccaaccctcatcggccaaatggtcgtcgatttcggg

SEQ ID NO: 42912 - DNA, 51 bp, synthetic construct
  source 1..51: mol_type = other DNA
atgtctgtcatatatagcactcttacatctctcatcaaccggatttccgac

SEQ ID NO: 42913 - DNA, 57 bp, synthetic construct
  source 1..57: mol_type = other DNA
agcgttggcggtatcccactgctcaagccttccattcggtaccttctgaaacctgcc

SEQ ID NO: 42914 - DNA, 261 bp, synthetic construct
  source 1..261: mol_type = other DNA
cgctcccttggcgagatgacaatcacctcctctacttcacccatctactcattacaaagcagggccgactttacgctgcacgtgcttaatctgctcgattttattggaggcaactttgggatgacacacggtcacatgctggcgagctctattcccggctccgacctgggcccccgcatgatggttggcaagctcatcgcgtggcggacggaagtcacagttaccccaacactgatcggccaaatggtcgtggatttcggt

SEQ ID NO: 42915 - DNA, 51 bp, synthetic construct
  source 1..51: mol_type = other DNA
gtagggggcatccctctgttgaagccatccattcggtaccttcttaaaccc

SEQ ID NO: 42916 - DNA, 261 bp, synthetic construct
  source 1..261: mol_type = other DNA
cgatcactcggagagctgaccatcacgtcttccactagccccatttacacgttgcaatccagggccgacttcactctccatgtgctgaacctgctcgacttcattgggggaaatttcggcctgactcacggacatatgctggcatcaagcatccctggttccgatcttggccctcgcatgatggtcgggaagttgatcgcctggcggaccgaagtcacggtgacaccaacgctgatcggccagatggtggtcgacttcggg

SEQ ID NO: 42917 - DNA, 78 bp, synthetic construct
  source 1..78: mol_type = other DNA
ttcaacgtcattaccatcgacggacacggcagcaagatcacacccgtgaacgggttcaacaattcctttgattgggcc

SEQ ID NO: 42918 - DNA, 120 bp, synthetic construct
  source 1..120: mol_type = other DNA
aacgtcttcatcgtgtccaacctcgtgctggagggctacgagacacccgtctacaatagcggcatctgtatctttaataacgtgaccttcaaggacaacaacgggaccccttgtggaatt

SEQ ID NO: 42919 - DNA, 45 bp, synthetic construct
  source 1..45: mol_type = other DNA
taccactgtgtctgtaacaactgcaccttcacacggtatcaagcc

SEQ ID NO: 42920 - DNA, 60 bp, synthetic construct
  source 1..60: mol_type = other DNA
tacaacgagggcggcctgatcctgaataacgtcagctttaaggacctcttcgtgaacaac

SEQ ID NO: 42921 - DNA, 75 bp, synthetic construct
  source 1..75: mol_type = other DNA
gagtacatcttcgactattgcaaagactactttagctacaaggtggacttcctgggcgagaagatcgatattatt

SEQ ID NO: 42922 - DNA, 141 bp, synthetic construct
  source 1..141: mol_type = other DNA
cggatatattcccttaaaaacatcagcgcaatctacgatatcttccccgtgctgcttaaaggcaactatgacgtgaatgcttctctgtccaagaacctgtatatatcaaatcaggtggattatgacaacgctctgaattat

SEQ ID NO: 42923 - DNA, 78 bp, synthetic construct
  source 1..78: mol_type = other DNA
gacagcttcaacaaggtctatgagtttatcaagaccttcggctactccggatacgttttgaaggtgctgaacatcaat

SEQ ID NO: 42924 - DNA, 195 bp, synthetic construct
  source 1..195: mol_type = other DNA
aacggcaacggctctctgatcaatggcttttccgccaaatccgacgagaacaagtggctgtatatttactcgaccaacagcattgtcaccatcaacaacctgatgatcactgagttcaaccaagctatatacaacctgggatgcgcttgtatcctcaacaacgtgacactcgacaataacaagatggactactac

SEQ ID NO: 42925 - DNA, 45 bp, synthetic construct
  source 1..45: mol_type = other DNA
ctgccctctatcgagcagaccctccacctgacaagcagggaatct

SEQ ID NO: 42926 - DNA, 36 bp, synthetic construct
  source 1..36: mol_type = other DNA
gacagctctaacttcatcaactcgctattctccatg

SEQ ID NO: 42927 - DNA, 39 bp, synthetic construct
  source 1..39: mol_type = other DNA
agcctggtcatattatccatgggccttaacgaccaattg

SEQ ID NO: 42928 - DNA, 72 bp, synthetic construct
  source 1..72: mol_type = other DNA
ctgagcctctcttgggtgctggtcctgagcacaaagcagaaccacatgaaagagggccaagctagacaactg

SEQ ID NO: 42929 - DNA, 51 bp, synthetic construct
  source 1..51: mol_type = other DNA
gtcagaggcattccactgttgaaacccagcattcgctacctgctcaagcca

SEQ ID NO: 42930 - DNA, 261 bp, synthetic construct
  source 1..261: mol_type = other DNA
cgcagtctcggggagatgaccataaccgcttccacttctcccatttactccctgcaaagccgggctgatttcacactgcatgtccttaacctgcttgactttatcgggggaaactttggcattacacacggccagctgctcgcgagctctatacctgggtcagatctgggaccaagaatgatggtcggaaagctgatagcatggcgatctgaggttaccatcacgcctaccttgatcggccaaatggtcatcgatttcggc

SEQ ID NO: 42931 - DNA, 33 bp, synthetic construct
  source 1..33: mol_type = other DNA
atgtccgtgatctactctaccctgacaagcatt

SEQ ID NO: 42932 - DNA, 51 bp, synthetic construct
  source 1..51: mol_type = other DNA
gtgggaggaatccctttgctgaagccctctatccggtatctccttaaacca

SEQ ID NO: 42933 - DNA, 261 bp, synthetic construct
  source 1..261: mol_type = other DNA
cggagcctgggagaaatgacgattacctcatctacgtcacccctctactcactccaatctagagcggacttcactctccacgtgttgaacctgctggatttcatcggcgaaaacttcggcctgacgcacgggcacatgctcgcgagtagcattcctggaagtgacctggggccacgcatgatggtcgggaagctgatttcctggcgcacggaggtgacagtcactcctacgctgatagggcagatggtggtggattttggc

SEQ ID NO: 42934 - DNA, 42 bp, synthetic construct
  source 1..42: mol_type = other DNA
atgtccgtgatctatagcaccctgacaagtctgattaacaag

SEQ ID NO: 42935 - DNA, 51 bp, synthetic construct
  source 1..51: mol_type = other DNA
gtcggcggcattcctttgctgaaacccagtatccggtacctgctgaaacca

SEQ ID NO: 42936 - DNA, 261 bp, synthetic construct
  source 1..261: mol_type = other DNA
cggtccctgggggagatgaccattacgagttctacgtcacctctctattcactgcaatctcgagccgatttcaccctccacgtgttgaatctccttgacttcatcgggggcaacttcggactcactcatgggcatatgcttgcgagtagcatccccggatccgacctcgggccccggatgatggtcgggaaactcatttcctggcggaccgaagtgaccgtgacaccaacccttatcggccagatggtcgtcgatttcggt

SEQ ID NO: 42937 - DNA, 30 bp, synthetic construct
  source 1..30: mol_type = other DNA
accctgatcaagtccttttttagacgaagg

SEQ ID NO: 42938 - DNA, 63 bp, synthetic construct
  source 1..63: mol_type = other DNA
atcggcgacacaaccctcctgggccttctggacatggatttcgggaaccctgaaaacccatct

SEQ ID NO: 42939 - DNA, 30 bp, synthetic construct
  source 1..30: mol_type = other DNA
accgccgggacaagcggaggcatcaacatt

SEQ ID NO: 42940 - DNA, 30 bp, synthetic construct
  source 1..30: mol_type = other DNA
gtggaccttggaagcatgtcctctgcaacc

SEQ ID NO: 42941 - DNA, 42 bp, synthetic construct
  source 1..42: mol_type = other DNA
cacctgatcgtggacggagaacctgctctatctccaagcgag

SEQ ID NO: 42942 - DNA, 45 bp, synthetic construct
  source 1..45: mol_type = other DNA
attaagctgttcaatatcaccaacccacaatacatccaaatcgtc

SEQ ID NO: 42943 - DNA, 39 bp, synthetic construct
  source 1..39: mol_type = other DNA
atgagcgtgatctactccacactgacctctgtcatcaac

SEQ ID NO: 42944 - DNA, 57 bp, synthetic construct
  source 1..57: mol_type = other DNA
gtgcggggcattcctctgcttaagcccagcatccggtacctcctgaaaccagctttc

SEQ ID NO: 42945 - DNA, 261 bp, synthetic construct
  source 1..261: mol_type = other DNA
aggagcctcggagaaatgactatcacaagcagcacgagccccctatatagtttacaatctcgcgccgacttcacacttcatgttttgaatctcctggacttcattggagggaacttcggcctgacgcatggacacatgctggcctcctccatccctggctccgatctcgggccccggatgatggttgggaaactaatagcctggagaactgaagtgacagtgacccccacccttattggacaaatggtcgtggatttcggt

SEQ ID NO: 42946 - DNA, 39 bp, synthetic construct
  source 1..39: mol_type = other DNA
gacgccatcttcggcatgcccattcacaactggaccttt

SEQ ID NO: 42947 - DNA, 42 bp, synthetic construct
  source 1..42: mol_type = other DNA
atccggtactcaagcttgggagccgtgcctattcctggcccg

SEQ ID NO: 42948 - DNA, 51 bp, synthetic construct
  source 1..51: mol_type = other DNA
atgtccgttatctactccaccctcacttccgtgatcaaccgaatcagcgac

SEQ ID NO: 42949 - DNA, 57 bp, synthetic construct
  source 1..57: mol_type = other DNA
gtgcggggcatcccccttctcaaaccaagcattcggtacctgctgaagcctgcattg

SEQ ID NO: 42950 - DNA, 261 bp, synthetic construct
  source 1..261: mol_type = other DNA
agatctctgggagaaatgacaattaccagctccacgtcacccctgtatagtttacaatctcgggcggactttactatgcacgttctcaatttgctcgacttcattggcggcaatttcggccttacacacgggcatatgttggcgagtagcattcctgggtccgacctggggcctcggatgatggtcgggaaactgattgcttggcgaacagaagtcactgtgacccctacgcttattggccagatggtcgtggacttcggt

SEQ ID NO: 42951 - DNA, 54 bp, synthetic construct
  source 1..54: mol_type = other DNA
gtcggcggcattccaatcctgaagccttccatccggtacctgctcaaaccagcc

SEQ ID NO: 42952 - DNA, 261 bp, synthetic construct
  source 1..261: mol_type = other DNA
cgttcagtcaaagaattctccatcacaaccgccacctcccccctctccaccttacaaaacagagccgattttacactgcatgttctgaaccttcttgactttctcgggggcaattttggactgacccacggcaaactgcttgcaagcgctatcccggggtctgagttggggccacggatgatggtcggaaagcttatcgcctggcgatccgaggtcaccataactccaaccctgatcggacagatggttattgactttggt

SEQ ID NO: 42953 - DNA, 54 bp, synthetic construct
  source 1..54: mol_type = other DNA
atgtccttcatctactctaagctgaccagcatcatcaatctcattaacgacgag

SEQ ID NO: 42954 - DNA, 57 bp, synthetic construct
  source 1..57: mol_type = other DNA
tccgttggcggcatccccatcctgaaaccaagcattcggtacctcctgaagcctgcc

SEQ ID NO: 42955 - DNA, 264 bp, synthetic construct
  source 1..264: mol_type = other DNA
cggtccgtaaatgagctgaccgtcagcaaggccatcgaccctttctatacactgaagagtcgagctgattttactctgcacgtgctgaacctcctcgacgtgattggcggcaactttgggaccactcacggccagatcctggcgagttccatacccggctccgaacttggaccacgcatgatggtcggaaagctgatatcttggaggacagaggtgacaattaccccaaccctgatcgggcagatggtcgctgactttggaaaa

SEQ ID NO: 42956 - DNA, 54 bp, synthetic construct
  source 1..54: mol_type = other DNA
atgtctgtgatatactctacactgaccagtctgattaacaaggtgtccgatgag

SEQ ID NO: 42957 - DNA, 54 bp, synthetic construct
  source 1..54: mol_type = other DNA
tccgtcggcgggattccactgctgaagcccagcatccggtacctgctcaaacct

SEQ ID NO: 42958 - DNA, 261 bp, synthetic construct
  source 1..261: mol_type = other DNA
cggtccctgggcgaactgactataacttcgtctacatccccgatttactccttacaaacccgcgccgattttacgcttcacgtgcttaatctcctcgatttcattggtggaaattttggagttacacacggacatatgctggcatcatcgatccctggtagcgacttgggcccacggatgatggtcggcaaactgattgcctggcgaactgaagtcacaattacccctactctgatcggtcagatggtggtggatttcggt

SEQ ID NO: 42959 - DNA, 51 bp, synthetic construct
  source 1..51: mol_type = other DNA
atgtctattatttactccaccctcacctccgtcatcaacaagatcagcgac

SEQ ID NO: 42960 - DNA, 57 bp, synthetic construct
  source 1..57: mol_type = other DNA
agcgtcggcggcatccccctgctcaagccttccattcggtacctgcttaaaccagcc

SEQ ID NO: 42961 - DNA, 261 bp, synthetic construct
  source 1..261: mol_type = other DNA
aggtctttgggagaaatgaccatcacgagcagcactagccccatatattccttacaatcccgagccgactttacattgcacgtgctcaacctgctggactttattggaggcaacttcggcattacacatggaaagcttctggcgtcatctatccccgggtccgacctcggaccacgaatgatggttggcaagctgattgcatggagaacggaagttacggtcacacccacgctgattggccagatggtggtggacttcggc

SEQ ID NO: 42962 - DNA, 33 bp, synthetic construct
  source 1..33: mol_type = other DNA
agactgcttaagagctttaaagacagagtttcc

SEQ ID NO: 42963 - DNA, 36 bp, synthetic construct
  source 1..36: mol_type = other DNA
cgcttgctgaagagtttccgcgatagagttagccgg

SEQ ID NO: 42964 - DNA, 33 bp, synthetic construct
  source 1..33: mol_type = other DNA
agactgctgaagagctttcgtgatagagtcagc

SEQ ID NO: 42965 - DNA, 39 bp, synthetic construct
  source 1..39: mol_type = other DNA
agctacctgacctccgtgatcaaccggatttctgacgag

SEQ ID NO: 42966 - DNA, 57 bp, synthetic construct
  source 1..57: mol_type = other DNA
agtgtcggcggcatcccacttctgaaacccagcattcggtacctcctgaagcctgcc

SEQ ID NO: 42967 - DNA, 261 bp, synthetic construct
  source 1..261: mol_type = other DNA
cgcagcctgggagagatgaccataacaagcagcacatctccactctatactctccaatcccgagccgacttcacactgcatgtgctgaatctgctggatttcatcggcggcaatttcggtgtcactcatgggcagatgctcgccggcgcgattccggggagcgacctcgggcctcggatgatggttggaaagctgatcgcttggagaaccgaagtgaccgtcacaccaaccctgattggccagatggtggcggactttggc

SEQ ID NO: 42968 - DNA, 36 bp, synthetic construct
  source 1..36: mol_type = other DNA
atgaccttcttcctcgaggcattccccgggctactg

SEQ ID NO: 42969 - DNA, 36 bp, synthetic construct
  source 1..36: mol_type = other DNA
gccgtggagaccctgctgacaaaccctagcttgctc

SEQ ID NO: 42970 - DNA, 36 bp, synthetic construct
  source 1..36: mol_type = other DNA
agctacgggttgggcgtgactggcgttggattcgac

SEQ ID NO: 42971 - DNA, 33 bp, synthetic construct
  source 1..33: mol_type = other DNA
acccggctgctggacagcttcaagggcaaaatc

SEQ ID NO: 42972 - DNA, 123 bp, synthetic construct
  source 1..123: mol_type = other DNA
ttccccgttagcatccagctgaatacaacatatacatctacggccactaccaacctttgggaggtgctgtcaaatatcgtgataacaagcatcagcaacccgatcgaactagtcagtaatggg

SEQ ID NO: 42973 - DNA, 33 bp, synthetic construct
  source 1..33: mol_type = other DNA
tgcagcctcttcggcatcagtagcgacatttct

SEQ ID NO: 42974 - DNA, 120 bp, synthetic construct
  source 1..120: mol_type = other DNA
gacaatatcaccgcgcgaaccggaggcgctatttacgtcgagggcagctttgacacatccctgatccacaacaccaagttcaccaataacaaggccttcactgataaccccgattacggc

SEQ ID NO: 42975 - DNA, 72 bp, synthetic construct
  source 1..72: mol_type = other DNA
gtggagggaaacgcttcttccattcacatcttcaatagtgactttatcaataacacagccaaaactcatggg

SEQ ID NO: 42976 - DNA, 144 bp, synthetic construct
  source 1..144: mol_type = other DNA
ttcatggctaatgacgagctgaacacattcgacggttgcatcttttacaacaactacgcaccctacggcggcgccgtcgccctgggaaacaccgactacctcgtgatttccgaaagcaacttcactaaccacatcggagctgat

SEQ ID NO: 42977 - DNA, 138 bp, synthetic construct
  source 1..138: mol_type = other DNA
aacctgaccaacgctaatatcgtggacagtctgttcgagaataattctgctcgggccggcattgccgtggaagaggacgcaactaacaactttttcgattccgtcacattcgtttcaaatatagcgcaaacacatggg

SEQ ID NO: 42978 - DNA, 57 bp, synthetic construct
  source 1..57: mol_type = other DNA
gagtacaataccttcgacggctgcatcttctacaacaactacgccccatatggcgga

SEQ ID NO: 42979 - DNA, 54 bp, synthetic construct
  source 1..54: mol_type = other DNA
aatacatatacggtcatcgacaaaagcaagttcgattccaactacgctccttac

SEQ ID NO: 42980 - DNA, 36 bp, synthetic construct
  source 1..36: mol_type = other DNA
atgacattctttctcgagacgtttcctgggttactg

SEQ ID NO: 42981 - DNA, 39 bp, synthetic construct
  source 1..39: mol_type = other DNA
tctagcgtggagaccctgctcacaaacccttccctgctg

SEQ ID NO: 42982 - DNA, 36 bp, synthetic construct
  source 1..36: mol_type = other DNA
ctgatgttcggcaccatgggcatcgggtttgacaag

SEQ ID NO: 42983 - DNA, 48 bp, synthetic construct
  source 1..48: mol_type = other DNA
cctctgcactacgtgtccgaatatcccaagtattacacctacggtgcc

SEQ ID NO: 42984 - DNA, 36 bp, synthetic construct
  source 1..36: mol_type = other DNA
gtgcagatcatgaacggcttcggattgccagctgcc

SEQ ID NO: 42985 - DNA, 33 bp, synthetic construct
  source 1..33: mol_type = other DNA
ctcctgagcgagttcccatttaactacgacact

SEQ ID NO: 42986 - DNA, 33 bp, synthetic construct
  source 1..33: mol_type = other DNA
aacaccaccgttggcgagccagtactgtctgta

SEQ ID NO: 42987 - DNA, 30 bp, synthetic construct
  source 1..30: mol_type = other DNA
gaaatcggcctgaacctggaagtaattccc

SEQ ID NO: 42988 - DNA, 90 bp, synthetic construct
  source 1..90: mol_type = other DNA
ggcatggtggacttcagcgggttcctggctgccaacatcttcgaggtccctgagttttacatgcccattgtgaactacgacttcaatgcc

SEQ ID NO: 42989 - DNA, 45 bp, synthetic construct
  source 1..45: mol_type = other DNA
gcaacgttaagcataatccaggggaatctgtcggtttcaatttcc

SEQ ID NO: 42990 - DNA, 36 bp, synthetic construct
  source 1..36: mol_type = other DNA
atgacctttttcctcgagacgttcccggggctcctg

SEQ ID NO: 42991 - DNA, 39 bp, synthetic construct
  source 1..39: mol_type = other DNA
agcgccctggagacactgcttaccaacgcttctctcctc

SEQ ID NO: 42992 - DNA, 36 bp, synthetic construct
  source 1..36: mol_type = other DNA
ttcgccctgggagtcgttggggtcggattcgacaag

SEQ ID NO: 42993 - DNA, 30 bp, synthetic construct
  source 1..30: mol_type = other DNA
tcccggctgctgaagagcttccaaaataga

SEQ ID NO: 42994 - DNA, 36 bp, synthetic construct
  source 1..36: mol_type = other DNA
atgaccttctttctcgagacattccctggactgctc

SEQ ID NO: 42995 - DNA, 36 bp, synthetic construct
  source 1..36: mol_type = other DNA
gccgtggagacacttctcaccaaccctagcctgctg

SEQ ID NO: 42996 - DNA, 36 bp, synthetic construct
  source 1..36: mol_type = other DNA
tacgctctgggagtagtcggcgttgggttcgataag

SEQ ID NO: 42997 - DNA, 39 bp, synthetic construct
  source 1..39: mol_type = other DNA
atcctgagccctgctgccaccggctacgagttcgatgaa

SEQ ID NO: 42998 - DNA, 54 bp, synthetic construct
  source 1..54: mol_type = other DNA
gggatcattgtgcatggcaccgatagcgctctagcgccgggcgatttgtcggat

SEQ ID NO: 42999 - DNA, 123 bp, synthetic construct
  source 1..123: mol_type = other DNA
gccgggattggcagcgacgtcggaacgatccccgacggcgacctgctgaccgggctgaccgagcctgacttcggactcttcggcaaggtttttactgattttgagatgtttccctctagtatg

SEQ ID NO: 43000 - DNA, 36 bp, synthetic construct
  source 1..36: mol_type = other DNA
cgcctgctcaaaagctttcgagatcgcgtggtctca

SEQ ID NO: 43001 - DNA, 93 bp, synthetic construct
  source 1..93: mol_type = other DNA
atcagggtgcccggcaccgagaacgtcagtagcaacctgggctttctcgaactccttaattctatgggtggcggtgccttcaagaggttctcc

SEQ ID NO: 43002 - DNA, 48 bp, synthetic construct
  source 1..48: mol_type = other DNA
gtgacagcctttaagagcctggtcaccttctccacggcacaagtcgcg

SEQ ID NO: 43003 - DNA, 54 bp, synthetic construct
  source 1..54: mol_type = other DNA
gtgaacaaggagggcttcagcctgtttgtgcaaaagtatatctcctacaccaca

SEQ ID NO: 43004 - DNA, 57 bp, synthetic construct
  source 1..57: mol_type = other DNA
agcgttggcggcatcccccttctcaaaccttccattcggtacctgctgaagccagcc

SEQ ID NO: 43005 - DNA, 261 bp, synthetic construct
  source 1..261: mol_type = other DNA
cgctctcttggagagatgaccattactagctccacatccccattctacacgctgcaaagcagagcagacttcacccttcacgtgctcaaccttctggactttattggcggcaattttgggctcacccacggacaccttctcgcgtcttcgatacctggctccgatctgggcccgaggatgatggtcggcaagctgattgcctggcgcaccgaagttactgtgacccctaccctcattggacagatggtcgttgactttggt

SEQ ID NO: 43006 - DNA, 51 bp, synthetic construct
  source 1..51: mol_type = other DNA
cagggcctgaatgctgataacttggtttatgatatggttaaggagaatgca

SEQ ID NO: 43007 - DNA, 30 bp, synthetic construct
  source 1..30: mol_type = other DNA
aacaccgatgacgccgccaagtggaatgcc

SEQ ID NO: 43008 - DNA, 30 bp, synthetic construct
  source 1..30: mol_type = other DNA
ctgctgaagtccttccaaaatcggtctagg

SEQ ID NO: 43009 - DNA, 36 bp, synthetic construct
  source 1..36: mol_type = other DNA
ccaacgatctcctctgacctgagcctcaacgtggag

SEQ ID NO: 43010 - DNA, 48 bp, synthetic construct
  source 1..48: mol_type = other DNA
aagaacaaaaagcatcctgtgcttcaaaacgcgctcggctacgatgcc

SEQ ID NO: 43011 - DNA, 51 bp, synthetic construct
  source 1..51: mol_type = other DNA
atcctggggaccagtaacaccctcgagagcaacatcccactgttcattata

SEQ ID NO: 43012 - DNA, 69 bp, synthetic construct
  source 1..69: mol_type = other DNA
ctgggcctcgggtctagcggattcgccaccctggcctcctccgtggctaagagttcccaatccctcggg

SEQ ID NO: 43013 - DNA, 54 bp, synthetic construct
  source 1..54: mol_type = other DNA
gccaatatcggcatgaacctgaacattgcacaagcgatactgctcgctaatctg

SEQ ID NO: 43014 - DNA, 36 bp, synthetic construct
  source 1..36: mol_type = other DNA
atgacatttttcctcgagacttttcctggacttctg

SEQ ID NO: 43015 - DNA, 36 bp, synthetic construct
  source 1..36: mol_type = other DNA
gccgtggagacactgcttaccaacccatcactcctg

SEQ ID NO: 43016 - DNA, 36 bp, synthetic construct
  source 1..36: mol_type = other DNA
tacgctttgggagtggtcggagttgggtttgacaag

SEQ ID NO: 43017 - DNA, 42 bp, synthetic construct
  source 1..42: mol_type = other DNA
tacgtcgacaaccacttcatcaaggatttcattctgatgaac

SEQ ID NO: 43018 - DNA, 129 bp, synthetic construct
  source 1..129: mol_type = other DNA
atccggcccggcgttgggctaaacattcccgcttctgaaagtgtatccaattcgacgtctatgacactgagcaacctcatcctgaacatcttccctgagaatcccctgaatgctctcaccaacggagag

SEQ ID NO: 43019 - DNA, 36 bp, synthetic construct
  source 1..36: mol_type = other DNA
gcacaggcctacggcatcgacttcggagctacagca

SEQ ID NO: 43020 - DNA, 36 bp, synthetic construct
  source 1..36: mol_type = other DNA
tccatgatcctgagcatggttggacttcccattgcc

SEQ ID NO: 43021 - DNA, 36 bp, synthetic construct
  source 1..36: mol_type = other DNA
atgaccttcttcctcgaggcctttcctggactgctc

SEQ ID NO: 43022 - DNA, 39 bp, synthetic construct
  source 1..39: mol_type = other DNA
tccagcgtggagaccctgcttacaaacccttctcttttg

SEQ ID NO: 43023 - DNA, 36 bp, synthetic construct
  source 1..36: mol_type = other DNA
tacattttcaactcgataggcgtcggctttgacaag

SEQ ID NO: 43024 - DNA, 36 bp, synthetic construct
  source 1..36: mol_type = other DNA
atgacctttttcctcgagacattccctggactcctg

SEQ ID NO: 43025 - DNA, 36 bp, synthetic construct
  source 1..36: mol_type = other DNA
gccgtggagaccctgctgacaaaccctagcctcctt

SEQ ID NO: 43026 - DNA, 36 bp, synthetic construct
  source 1..36: mol_type = other DNA
tacgccctgggcgtggttggagtcggtttcgacaag

SEQ ID NO: 43027 - DNA, 39 bp, synthetic construct
  source 1..39: mol_type = other DNA
gtggctcccattcggagctccctgaacatctctgctgag

SEQ ID NO: 43028 - DNA, 36 bp, synthetic construct
  source 1..36: mol_type = other DNA
acctatctagcggatgagcgcggactgacaatcgtg

SEQ ID NO: 43029 - DNA, 51 bp, synthetic construct
  source 1..51: mol_type = other DNA
cttttcctgtttaacattaccaatcctagtgacatccccatcgtgacggag

SEQ ID NO: 43030 - DNA, 96 bp, synthetic construct
  source 1..96: mol_type = other DNA
ctcaatatccacttcgtggacgctctgttcgagaacatgtccgcctggaccggcagcgggatgacatttttcgtgaacgtggaggtcctgccttat

SEQ ID NO: 43031 - DNA, 99 bp, synthetic construct
  source 1..99: mol_type = other DNA
ggactgcccgtgtttgacgctgtgaacctggccttcacctctatctcgaccggtggaatgagcattaagaacctcaacgtcgggttttatcaaaataac

SEQ ID NO: 43032 - DNA, 105 bp, synthetic construct
  source 1..105: mol_type = other DNA
aactctggaattgtgcccatggacattctgttccatgtggtctccgcggtgaccactaccggctccaatatcagcaccgcccaaacaataagtacatggcacgga

SEQ ID NO: 43033 - DNA, 51 bp, synthetic construct
  source 1..51: mol_type = other DNA
tggacacggccaattgagtgcatcatccgatgtggcttccaccataagcaa

SEQ ID NO: 43034 - DNA, 39 bp, synthetic construct
  source 1..39: mol_type = other DNA
gtggacgaccccttcatcaagaacttcattctgatggat

SEQ ID NO: 43035 - DNA, 129 bp, synthetic construct
  source 1..129: mol_type = other DNA
gtccagcccggcgctgggctgaacctccctgcgtccgaaaccgtgcctaactccgtgaacatgacgctgaccgacaccattctgaatatcttccccgagaacccagtgcacgccctgatcaacggagac

SEQ ID NO: 43036 - DNA, 30 bp, synthetic construct
  source 1..30: mol_type = other DNA
gcccaggcttacggcatcgacttcggactg

SEQ ID NO: 43037 - DNA, 36 bp, synthetic construct
  source 1..36: mol_type = other DNA
agcatgattctctccatcgtcgggcttcctatcggc

SEQ ID NO: 43038 - DNA, 42 bp, synthetic construct
  source 1..42: mol_type = other DNA
tacgtcaacgaccccttcattaaggatttcatcctcatggac

SEQ ID NO: 43039 - DNA, 129 bp, synthetic construct
  source 1..129: mol_type = other DNA
atccggcccggggccgggctgaacattcctgcttccgactccgtgtcttcatcggtgtcaatgaccctgagcgatctcatcctgaacatcttccccgagaaccctctcaacgctctgacaaatggagaa

SEQ ID NO: 43040 - DNA, 33 bp, synthetic construct
  source 1..33: mol_type = other DNA
gcccaggcttacggcatcgacttcggaactacc

SEQ ID NO: 43041 - DNA, 36 bp, synthetic construct
  source 1..36: mol_type = other DNA
agcatgatcctctccattatcggcctgcctatagcc

SEQ ID NO: 43042 - DNA, 36 bp, synthetic construct
  source 1..36: mol_type = other DNA
atgacattctttctcgagacttttcctggcttgctg

SEQ ID NO: 43043 - DNA, 36 bp, synthetic construct
  source 1..36: mol_type = other DNA
gcagtggagaccctcctgagcaacccctctcttctg

SEQ ID NO: 43044 - DNA, 33 bp, synthetic construct
  source 1..33: mol_type = other DNA
gtgttcggagtcacaggcgtcgggttcgagaag

SEQ ID NO: 43045 - DNA, 36 bp, synthetic construct
  source 1..36: mol_type = other DNA
atgaccttctttctcgagacttttcccggtttgctg

SEQ ID NO: 43046 - DNA, 39 bp, synthetic construct
  source 1..39: mol_type = other DNA
tctagcgtggagacactgcttaccaaccctagtttgctg

SEQ ID NO: 43047 - DNA, 36 bp, synthetic construct
  source 1..36: mol_type = other DNA
ctgatgtttgggaccatcggagtcggcttcaacgtg

SEQ ID NO: 43048 - DNA, 126 bp, synthetic construct
  source 1..126: mol_type = other DNA
tttcccgtctcaatccacctgagctccattagtaatattaccccaccttccggcttcgaggagatagttagtaacatgctgcttaagatttttagtaatccccttaaggcccttgtggaaggagag

SEQ ID NO: 43049 - DNA, 30 bp, synthetic construct
  source 1..30: mol_type = other DNA
tgccacaccctgggcatcagcgtttcccta

SEQ ID NO: 43050 - DNA, 33 bp, synthetic construct
  source 1..33: mol_type = other DNA
tgctctctgttcggcattagctcggacatttct

SEQ ID NO: 43051 - DNA, 36 bp, synthetic construct
  source 1..36: mol_type = other DNA
atgacctttttcctcgagacgttccctggtctcctc

SEQ ID NO: 43052 - DNA, 39 bp, synthetic construct
  source 1..39: mol_type = other DNA
agctccgtggagacactgctcaccaacccatctctgctg

SEQ ID NO: 43053 - DNA, 36 bp, synthetic construct
  source 1..36: mol_type = other DNA
gtcctgttcaaggtggctggcgtcggttttgacaaa

SEQ ID NO: 43054 - DNA, 36 bp, synthetic construct
  source 1..36: mol_type = other DNA
atgaccttcttcctcgagacatttccgggcctcctg

SEQ ID NO: 43055 - DNA, 39 bp, synthetic construct
  source 1..39: mol_type = other DNA
tctagcctggagaccctcctcacaaacccttccctgttg

SEQ ID NO: 43056 - DNA, 36 bp, synthetic construct
  source 1..36: mol_type = other DNA
gtggtgctgggcaccgttggggtcggattcgacaaa

SEQ ID NO: 43057 - DNA, 126 bp, synthetic construct
  source 1..126: mol_type = other DNA
ttccctgtctcaatgcacttaacacaagctggaaaggtgacagctcccggcggactcggcgaagtgatctccaatatgctgctgaacatattcactaatccactgcaaagtttaagccaaggagac

SEQ ID NO: 43058 - DNA, 33 bp, synthetic construct
  source 1..33: mol_type = other DNA
gtgtgccacaccctgggcatctctgtggatctg

SEQ ID NO: 43059 - DNA, 33 bp, synthetic construct
  source 1..33: mol_type = other DNA
tgcagcctgttcggcatccctgccgacatctca

SEQ ID NO: 43060 - DNA, 183 bp, synthetic construct
  source 1..183: mol_type = other DNA
atcttcgaggcaaacaccgcctacaacggcaagggtggcgccattttcaccaacatgtttgacgccgacgtgaacaacgccactttcaacggcaaccgggctggcgacggagcaaccattagcgacgacggcggcgccatctatatcaagaacaagaacaacgtcacgtttaagttctgcatc

SEQ ID NO: 43061 - DNA, 33 bp, synthetic construct
  source 1..33: mol_type = other DNA
atgaccttcttcctggaggcttttccgggagga

SEQ ID NO: 43062 - DNA, 39 bp, synthetic construct
  source 1..39: mol_type = other DNA
tccagcgtggagacactgcttaccaacccttctcttctc

SEQ ID NO: 43063 - DNA, 33 bp, synthetic construct
  source 1..33: mol_type = other DNA
agcattatccttaagaccgcaggagttggcttc

SEQ ID NO: 43064 - DNA, 132 bp, synthetic construct
  source 1..132: mol_type = other DNA
tttcccgttagcgtacccctgactgcgagcgtcgatccgtcttcctctggcgcccctctggctatcggaagcgttttctctaagatacttaccgacatgatctccaatccggtgacggctctcattgaagga

SEQ ID NO: 43065 - DNA, 33 bp, synthetic construct
  source 1..33: mol_type = other DNA
acatgtcactcgatgggcattgccatcaacttc

SEQ ID NO: 43066 - DNA, 33 bp, synthetic construct
  source 1..33: mol_type = other DNA
tgttccctgtttggcatcagccaggacatttct

SEQ ID NO: 43067 - DNA, 30 bp, synthetic construct
  source 1..30: mol_type = other DNA
atgacatttttcctggagacgttcccgggg

SEQ ID NO: 43068 - DNA, 36 bp, synthetic construct
  source 1..36: mol_type = other DNA
ggcagcctggagacacttctcaccaaccatagtctg

SEQ ID NO: 43069 - DNA, 39 bp, synthetic construct
  source 1..39: mol_type = other DNA
gacagcaccggcctgatggggctcaccggagttggattc

SEQ ID NO: 43070 - DNA, 99 bp, synthetic construct
  source 1..99: mol_type = other DNA
atgaacgggaaggattttaccgtgaagaccggaaacgacggcaaggccgctctgcccatcgacctcctgcctggcaaatacgtagcaaagatcaagttc

SEQ ID NO: 43071 - DNA, 246 bp, synthetic construct
  source 1..246: mol_type = other DNA
aatatctacctgtctttctcggtttcctccaatgtcgttgtgaataagctggccaccgggctgacagtcaatgacatcaacattgtttacggcgattctgccaacctgattatcagcctcaaggaccggaacaacgctgtcctgaagggaaaggacatctccgtaaatctcaacggcaagaacctcaccgttaaaaccgggaacgacggccaggtgaccctgcccattgacctcctccctggtaaa

SEQ ID NO: 43072 - DNA, 300 bp, synthetic construct
  source 1..300: mol_type = other DNA
accagcaagattaagtttagcgaggacaacatttatctggcctcttccgtgtcctccaatgtggtcgtgaataagctggccaccgccctcactgctggcgacattaatatcacatacggagacagcgccaacctcatcatcaccctcaaggacggcaatgcaaacgctctgtctggcaagatcatcatgatcaacattaacgataaggactacttcactacgactgataacaacggcgaggccgctctgcccatcgacctgctccctggcaaatacgccgctaagatcgagttcggagaa

SEQ ID NO: 43073 - DNA, 252 bp, synthetic construct
  source 1..252: mol_type = other DNA
atgtccctggcaatggtctacgactcaaactactgggctatcgtgataaggaacattaatgccggcggcggattatacgattaccaaggctactattatactcctgtctggggctacattctgggactcgccaacgcattccaaaatcttttcctggggctgggcgagtctgcggttagggttgaggacatcttttgcttcgaagacagcggccaccagaccacagccactgtgacttaccttgccttcaac

SEQ ID NO: 43074 - DNA, 105 bp, synthetic construct
  source 1..105: mol_type = other DNA
atcattgacggaaacatcgccgacgcttttaggttcatctctgatcgcacggggtcctcctccgggagtggcagctcctccgtgctgagcttcgtgattggacga

SEQ ID NO: 43075 - DNA, 87 bp, synthetic construct
  source 1..87: mol_type = other DNA
gccgtgtccaccggatggatcgaggtctctagtctggcccacttcttcgacgtctggaacgctggcggcacatggagcgtttggaat

SEQ ID NO: 43076 - DNA, 30 bp, synthetic construct
  source 1..30: mol_type = other DNA
agccggctgctgaagagttttcaaaacaga

SEQ ID NO: 43077 - DNA, 33 bp, synthetic construct
  source 1..33: mol_type = other DNA
atgaccttcttcctggagacagggtttgggcct

SEQ ID NO: 43078 - DNA, 36 bp, synthetic construct
  source 1..36: mol_type = other DNA
gccgtggagacactcctgacgaatccgtcccttctg

SEQ ID NO: 43079 - DNA, 36 bp, synthetic construct
  source 1..36: mol_type = other DNA
ttcgccctgggagtcgtcggcgtcggatttgacaag

SEQ ID NO: 43080 - DNA, 36 bp, synthetic construct
  source 1..36: mol_type = other DNA
atgacctttttcctcgagacattccctggactgctg

SEQ ID NO: 43081 - DNA, 36 bp, synthetic construct
  source 1..36: mol_type = other DNA
gccatcgagacactcctgaccaacccttctttgctg

SEQ ID NO: 43082 - DNA, 36 bp, synthetic construct
  source 1..36: mol_type = other DNA
ttcgccagcgggctgatcggggtcggtttcgacaag

SEQ ID NO: 43083 - DNA, 63 bp, synthetic construct
  source 1..63: mol_type = other DNA
ggcaatccccggtctgggatcgccgtgtacatgagctatctgatcttcgagatgtccctcaac

SEQ ID NO: 43084 - DNA, 36 bp, synthetic construct
  source 1..36: mol_type = other DNA
gatagcatggaggactacattctgaccatcagtggc

SEQ ID NO: 43085 - DNA, 42 bp, synthetic construct
  source 1..42: mol_type = other DNA
caagatgaggaggactctctagttcaatacggcgttctgatg

SEQ ID NO: 43086 - DNA, 36 bp, synthetic construct
  source 1..36: mol_type = other DNA
atgacctttttcctcaagtccttccctggactgctc

SEQ ID NO: 43087 - DNA, 39 bp, synthetic construct
  source 1..39: mol_type = other DNA
tctagcatcgagacactgctcaccaacccctctctcctg

SEQ ID NO: 43088 - DNA, 30 bp, synthetic construct
  source 1..30: mol_type = other DNA
gtgatcctgggacttgtcggggtcggctac

SEQ ID NO: 43089 - DNA, 39 bp, synthetic construct
  source 1..39: mol_type = other DNA
gagggcattgtctcgggattttgcgaccctagcttcaca

SEQ ID NO: 43090 - DNA, 30 bp, synthetic construct
  source 1..30: mol_type = other DNA
ctgcggggcggctccgagatcattgactgc

SEQ ID NO: 43091 - DNA, 45 bp, synthetic construct
  source 1..45: mol_type = other DNA
aacagcggcaccatccccgtgttcggcattatcggaggtggtacg

SEQ ID NO: 43092 - DNA, 78 bp, synthetic construct
  source 1..78: mol_type = other DNA
agcggcagcggaagatcgggcccatgcatggccgtgaagcaggtcatcggggagagcttaggtggcttctgttctgag

SEQ ID NO: 43093 - DNA, 42 bp, synthetic construct
  source 1..42: mol_type = other DNA
atggaagagattgtcagtggcttctgtgatccttccttcaca

SEQ ID NO: 43094 - DNA, 30 bp, synthetic construct
  source 1..30: mol_type = other DNA
ctgagaggcggctccgagatcattgactgc

SEQ ID NO: 43095 - DNA, 45 bp, synthetic construct
  source 1..45: mol_type = other DNA
aacagcgagatcatccccgtgataggcattatggaaggaggaaca

SEQ ID NO: 43096 - DNA, 78 bp, synthetic construct
  source 1..78: mol_type = other DNA
agtggcagcggcagatccggacctagcatggcagtaaagcaggttatcggagactctctgggcggattttgctcggag

SEQ ID NO: 43097 - DNA, 63 bp, synthetic construct
  source 1..63: mol_type = other DNA
gccaaccccgactggggcagcgtggcttcctctgtggtgccccaaattcattgggaaaaggat

SEQ ID NO: 43098 - DNA, 81 bp, synthetic construct
  source 1..81: mol_type = other DNA
gccacaatcaacatcgctggtacacccgtgaccgacgtacaggatattgctcacgctcttatccctgtcgccggccagtat

SEQ ID NO: 43099 - DNA, 33 bp, synthetic construct
  source 1..33: mol_type = other DNA
aacgtgacagaccccttcattaaggacaccatc

SEQ ID NO: 43100 - DNA, 132 bp, synthetic construct
  source 1..132: mol_type = other DNA
attaatccgggagatggcctgaacatggtcgggactcagtacacaaccaacctgaccgagaacatcacattgaccgatacgatcctgaatatgattccacaaaatcctatttcttctttagccaatggagaa

SEQ ID NO: 43101 - DNA, 33 bp, synthetic construct
  source 1..33: mol_type = other DNA
gcgacccaagcatatggccttgatcttggactc

SEQ ID NO: 43102 - DNA, 33 bp, synthetic construct
  source 1..33: mol_type = other DNA
atgctcttcgtctccgttggactgcctttggac

SEQ ID NO: 43103 - DNA, 252 bp, synthetic construct
  source 1..252: mol_type = other DNA
aaaattcatactgcttcgaaagaagtcccgtcatgggacggaaaccatttccaaggctatcgcactattggctctgtcctggattttgcttggaacgatggcaacaccgtgttcaatgtagatttcgataataagcccatcaacgagagctacatcctctatacttcaagtttcgcccacaatccaccatacgggtactttgctcaagcgtttggcgtgttcctggccaaattgttcgatctcaacgcaatc

SEQ ID NO: 43104 - DNA, 195 bp, synthetic construct
  source 1..195: mol_type = other DNA
ctgtacagcgtgcctacctactataattcgtttcggattgaccacgccctcaagtctaacatcaacatgacaaaccagatctccttcatgacaacccacctccctgaaaccatgttcactttaatccaaatacccaagtccattggcatccatttcaataccctgttcatctattccttccatccttatgagtac

SEQ ID NO: 43105 - DNA, 48 bp, synthetic construct
  source 1..48: mol_type = other DNA
tggacacctgttggtgacttcaaggagatcttgggagctgtccaaaga

SEQ ID NO: 43106 - DNA, 57 bp, synthetic construct
  source 1..57: mol_type = other DNA
atcaacgataccagcctggtgacactccttgacctggaggaacggaccaacaactat

SEQ ID NO: 43107 - DNA, 30 bp, synthetic construct
  source 1..30: mol_type = other DNA
gtggagatcggcagctttgacaacttccac

SEQ ID NO: 43108 - DNA, 96 bp, synthetic construct
  source 1..96: mol_type = other DNA
tccagctgcatcgtggatcacatgaacttcatcaaggtcaatgataccaatagttctttcgtcgctcctgatattgtggacggtgctctgatggat

SEQ ID NO: 43109 - DNA, 126 bp, synthetic construct
  source 1..126: mol_type = other DNA
tttccaatctctatcaccctgacaaacgctagctctgtctctgcacctggcggcctgaatcagatcctctctaacctcctgctcaatatcttcctgaacccgctctatagcctttccgaaggaaac

SEQ ID NO: 43110 - DNA, 33 bp, synthetic construct
  source 1..33: mol_type = other DNA
gtgtgccataccttgggcatccctgtcgacgtc

SEQ ID NO: 43111 - DNA, 33 bp, synthetic construct
  source 1..33: mol_type = other DNA
tgcagcctgttcgggattccctctgacatcagc

SEQ ID NO: 43112 - DNA, 48 bp, synthetic construct
  source 1..48: mol_type = other DNA
ctgcagattttcaatatcgtcaaccctcatcatgtggaggtggttacg

SEQ ID NO: 43113 - DNA, 144 bp, synthetic construct
  source 1..144: mol_type = other DNA
agcactctgaacatcaacaacaccgagacaaactacgggaccaccacaaatattaacgtgacatacgaaggagccgagggcatcaccgctaagctcaacgacgagctgatcatcttcaagggcaacaccattccaatccctatc

SEQ ID NO: 43114 - DNA, 159 bp, synthetic construct
  source 1..159: mol_type = other DNA
tacactttaaccgtgaccacaatccccgacaagaatcataatagtattaccaagacagctaccattaccatcaacaaggtcgactctactatcaaggccaacaacattacctatacctacgagtccaccgggaccactactgtgaatgggaccggatat

SEQ ID NO: 43115 - DNA, 99 bp, synthetic construct
  source 1..99: mol_type = other DNA
ttcaccgccaccatcgaaaaggggaacctcaaaatcgagaataacaccattaccgtgtacaaccagaagcccggcacatataagctgactatcacaacc

SEQ ID NO: 43116 - DNA, 42 bp, synthetic construct
  source 1..42: mol_type = other DNA
accaacatcatggtgacagtgaacaaaatcgagacgaagata

SEQ ID NO: 43117 - DNA, 87 bp, synthetic construct
  source 1..87: mol_type = other DNA
accatcactctgaaggacaacaagaacaagcccatcaccggcgccaagatcaaaattaatacccagaagacttacacaaccaacaag

SEQ ID NO: 43118 - DNA, 255 bp, synthetic construct
  source 1..255: mol_type = other DNA
aagatcacgtatacgggcaatgagacccacaaggccacgcaaaagacgaccaagattatcattaagaaggctacacccaagattaatgccaagaataagaccttcaagagcaacaataagaacaaaaagtaccaggtgtccctgaaggacaaccaacgcaagcctatgaagaaagctcagatccagctcaagatcggaaagaccacctacaagacaaccactaacaacaagggcaccgccactttcaagatcaaa

SEQ ID NO: 43119 - DNA, 30 bp, synthetic construct
  source 1..30: mol_type = other DNA
actaagaccacaaacgccctgatcaagtac

SEQ ID NO: 43120 - DNA, 240 bp, synthetic construct
  source 1..240: mol_type = other DNA
accaagaagatcaaactgaccgtgaagactacgtttcaaaccatttcctacggatctaagaaccatcagatggtcaagaagattcagaaggccctgaagaataacggctattatacgactgcctatggccactatctcaagatcgacgggatctaccacatttggacgcagcaagctgtcaagcagtaccagaaagacaagaagctgaagatcaccggacgcgtggacgaaaaaactgcc

SEQ ID NO: 43121 - DNA, 66 bp, synthetic construct
  source 1..66: mol_type = other DNA
attgggaatccccggtccggcatcgccgtgtatatgagctacctgatcttcgagatgggactgaac

SEQ ID NO: 43122 - DNA, 36 bp, synthetic construct
  source 1..36: mol_type = other DNA
agctacctccaagctgacctccacttctctgctgag

SEQ ID NO: 43123 - DNA, 39 bp, synthetic construct
  source 1..39: mol_type = other DNA
acttacttggcacaagaacgcgggttggcggcggtcgga

SEQ ID NO: 43124 - DNA, 126 bp, synthetic construct
  source 1..126: mol_type = other DNA
taccccgtggacctccatttgtcgagtgtttccaacgctaccgcccccggcggcctcgaggacatagtatccaacatgctcctgaacgtgtttagtaatcctatcaagtctctgtctgaaggagag

SEQ ID NO: 43125 - DNA, 30 bp, synthetic construct
  source 1..30: mol_type = other DNA
agcgagtccggtctgggcatcttcactcag

SEQ ID NO: 43126 - DNA, 33 bp, synthetic construct
  source 1..33: mol_type = other DNA
gtgtgccacaccgtcggcatatcagttagcctg

SEQ ID NO: 43127 - DNA, 33 bp, synthetic construct
  source 1..33: mol_type = other DNA
tgcagcctcttcggcattactcctgatattagc

SEQ ID NO: 43128 - DNA, 30 bp, synthetic construct
  source 1..30: mol_type = other DNA
ttccagactcctatctcttccggagtttct

SEQ ID NO: 43129 - DNA, 66 bp, synthetic construct
  source 1..66: mol_type = other DNA
atcgggaacccccggagcggcatcgccgtgtacatgtcctacctgatttctgagatgaacctcaat

SEQ ID NO: 43130 - DNA, 36 bp, synthetic construct
  source 1..36: mol_type = other DNA
atgacattcttcctcgagacgttccccggattactg

SEQ ID NO: 43131 - DNA, 36 bp, synthetic construct
  source 1..36: mol_type = other DNA
agctccgtggagacactgctcaccaacccttctttg

SEQ ID NO: 43132 - DNA, 39 bp, synthetic construct
  source 1..39: mol_type = other DNA
gacagcaccgagatcctcggattagtcggtgtcggattc

SEQ ID NO: 43133 - DNA, 33 bp, synthetic construct
  source 1..33: mol_type = other DNA
acgtttcaaacaccaatctcctctggagtttcc

SEQ ID NO: 43134 - DNA, 66 bp, synthetic construct
  source 1..66: mol_type = other DNA
atcgggaacccccggtccggcatcgccgtgtacatgagctatctcatttctgagatgaccctgaat

SEQ ID NO: 43135 - DNA, 30 bp, synthetic construct
  source 1..30: mol_type = other DNA
ttccagactccgatctcctctggagttagc

SEQ ID NO: 43136 - DNA, 66 bp, synthetic construct
  source 1..66: mol_type = other DNA
atcggcaatccccggagcgggattgccgtgtacatgtcttatctgatctccgagatgaacctgaac

SEQ ID NO: 43137 - DNA, 36 bp, synthetic construct
  source 1..36: mol_type = other DNA
cagtttgaggaaggcgatgacctggccggaatcttt

SEQ ID NO: 43138 - DNA, 51 bp, synthetic construct
  source 1..51: mol_type = other DNA
gactgggttttcggaaccttttacggggaggaaatggaaccctattcccag

SEQ ID NO: 43139 - DNA, 264 bp, synthetic construct
  source 1..264: mol_type = other DNA
atgtacattaccggaagcgagttttctcaaaacaaggctaagaacggaggagctgcctatatcaaggacgttagcatgactatcgacggctccgagttcattgccaacgaggccaagaatgatggtggcgctatctggtccaacaagaactccaggatcatcaagaactctaagttcattgagaacaaggcactgaacgaagctggagccatctaccggggcacactcgagaagcttcagctgacaaacaacaccttcattgac

SEQ ID NO: 43140 - DNA, 30 bp, synthetic construct
  source 1..30: mol_type = other DNA
caggaccagatgaccggctacctgttcgcc

SEQ ID NO: 43141 - DNA, 33 bp, synthetic construct
  source 1..33: mol_type = other DNA
ctgcaggtggacggcggtctggattacagcgag

SEQ ID NO: 43142 - DNA, 42 bp, synthetic construct
  source 1..42: mol_type = other DNA
caaaaccagcaagacagcctggtggaatactcagtgctcctc

SEQ ID NO: 43143 - DNA, 30 bp, synthetic construct
  source 1..30: mol_type = other DNA
atcactggcggaggctcaaacgtttccttt

SEQ ID NO: 43144 - DNA, 66 bp, synthetic construct
  source 1..66: mol_type = other DNA
attgggaacccccggtctggcatcgccgtgtatatgtcctatttgatatcggaaatgaacctcaac

SEQ ID NO: 43145 - DNA, 42 bp, synthetic construct
  source 1..42: mol_type = other DNA
aaggaaattaaaatcaccgagactatcagcgtgttgctcctg

SEQ ID NO: 43146 - DNA, 30 bp, synthetic construct
  source 1..30: mol_type = other DNA
ggccaggctatcagttcgattttccaagta

SEQ ID NO: 43147 - DNA, 126 bp, synthetic construct
  source 1..126: mol_type = other DNA
gccagcctgatccctatgcatccctacgcctacgccatggcttctggggtcggaagtgcctccatgaacgcagctgctctcgccccactgatgcacatgttcccctctatggcgacacatttggaa

SEQ ID NO: 43148 - DNA, 51 bp, synthetic construct
  source 1..51: mol_type = other DNA
cctggggttcccacttccgactttctcgtacattatgttagtcagatcgat

SEQ ID NO: 43149 - DNA, 126 bp, synthetic construct
  source 1..126: mol_type = other DNA
tttccactgtctgttcaattgaagaatataagccatgctgccgtgccaagtggtttcaatgaaatcatagtgaacatgctgctcaaaattttcgagaaccccctctacgcgggcgcgttggggcag

SEQ ID NO: 43150 - DNA, 33 bp, synthetic construct
  source 1..33: mol_type = other DNA
gtgtgccacaccctgggtatcgtcgtcgatctg

SEQ ID NO: 43151 - DNA, 33 bp, synthetic construct
  source 1..33: mol_type = other DNA
tgctctctgttcggaattccctccgacatttca

SEQ ID NO: 43152 - DNA, 30 bp, synthetic construct
  source 1..30: mol_type = other DNA
aacttcctgctcaccaaggtgtctcctgag

SEQ ID NO: 43153 - DNA, 66 bp, synthetic construct
  source 1..66: mol_type = other DNA
atcggcaacccccggtctgggattgccgtgtatatgagctatctgatatctgaaatgtcaatcaat

SEQ ID NO: 43154 - DNA, 66 bp, synthetic construct
  source 1..66: mol_type = other DNA
atcgggaacccccggagcggaattgccgtgtatatgtcctacctgatcttcgagatgggactgaat

SEQ ID NO: 43155 - DNA, 126 bp, synthetic construct
  source 1..126: mol_type = other DNA
ttccctatatcaatcaccctgaccgacgcctcctctgtctccccacctggggggttaagcgacgtgctgaccaacatgctgttgaatatcttcgctaaccccctgctctctctgacaaacggtgac

SEQ ID NO: 43156 - DNA, 33 bp, synthetic construct
  source 1..33: mol_type = other DNA
gtgtgccacaccctgggcatcgggattgacctg

SEQ ID NO: 43157 - DNA, 33 bp, synthetic construct
  source 1..33: mol_type = other DNA
tgcgccctgttcggcatccctaacgatgttgct

SEQ ID NO: 43158 - DNA, 42 bp, synthetic construct
  source 1..42: mol_type = other DNA
aaggaaataaaaatcaccgataccatctcgattttgctgctc

SEQ ID NO: 43159 - DNA, 33 bp, synthetic construct
  source 1..33: mol_type = other DNA
ggccaggccatcagctccgtatttcaagtaata

SEQ ID NO: 43160 - DNA, 126 bp, synthetic construct
  source 1..126: mol_type = other DNA
gcttccatcattcccatgcacccatacgcctatgccatggctagcggggtcggaagcgcatctatgaacgcagcagctctggcccctctgatgcatatgttcccttcgatggcgacacaacttgag

SEQ ID NO: 43161 - DNA, 48 bp, synthetic construct
  source 1..48: mol_type = other DNA
ggcgtgcctactgctgatttcttagttcgctatgttagccaggttgac

SEQ ID NO: 43162 - DNA, 33 bp, synthetic construct
  source 1..33: mol_type = other DNA
cacatctccgctgacttcaccgttggacctctg

SEQ ID NO: 43163 - DNA, 30 bp, synthetic construct
  source 1..30: mol_type = other DNA
atccccggcgtctacgttggattctacggg

SEQ ID NO: 43164 - DNA, 33 bp, synthetic construct
  source 1..33: mol_type = other DNA
agctttctgctcaccttcctttccgagctgcca

SEQ ID NO: 43165 - DNA, 63 bp, synthetic construct
  source 1..63: mol_type = other DNA
gggaacccccggagcggcatcgccgtctatatgtcttacctgatcttcgagatgtccgtgaat

SEQ ID NO: 43166 - DNA, 180 bp, synthetic construct
  source 1..180: mol_type = other DNA
gagtctatcgggctgatgagctccttcctgaaggccggcggcttctccctcggaaccaatagttcggaagtcggaacaatcatcgtacaaaatcttcccgtgaacgtgcaggacatgatccagcctcacattggccggatcaacgctgggatatcgcaactgtttagccttctcctgaat

SEQ ID NO: 43167 - DNA, 30 bp, synthetic construct
  source 1..30: mol_type = other DNA
ggtgtcctcctgggcttcatctctcctgag

SEQ ID NO: 43168 - DNA, 30 bp, synthetic construct
  source 1..30: mol_type = other DNA
ttccagactcctattagctccggaatctcc

SEQ ID NO: 43169 - DNA, 66 bp, synthetic construct
  source 1..66: mol_type = other DNA
attgggaatccccggagcggcatcgccgtgtacatgtcctatctggtcgagcagatgaccctgaac

SEQ ID NO: 43170 - DNA, 30 bp, synthetic construct
  source 1..30: mol_type = other DNA
ttccagactcccatttcctctggaacaacg

SEQ ID NO: 43171 - DNA, 66 bp, synthetic construct
  source 1..66: mol_type = other DNA
attggcaacccccggagcgggatcgccgtgtatatgtcctacctcatcttcgagatgggactgaac

SEQ ID NO: 43172 - DNA, 30 bp, synthetic construct
  source 1..30: mol_type = other DNA
agcttcctgctgggctttctctctcctgag

SEQ ID NO: 43173 - DNA, 30 bp, synthetic construct
  source 1..30: mol_type = other DNA
ttccagacacctattagctctggaatctcc

SEQ ID NO: 43174 - DNA, 66 bp, synthetic construct
  source 1..66: mol_type = other DNA
attgggaacccccggtctggcatcgccgtgtacatgtcctatctagtgtctgaaatgaccctgaat

SEQ ID NO: 43175 - DNA, 33 bp, synthetic construct
  source 1..33: mol_type = other DNA
atgaccttcttcctgaaggggtttcccggcgcg

SEQ ID NO: 43176 - DNA, 39 bp, synthetic construct
  source 1..39: mol_type = other DNA
agctccatcgagacactgctgaccaaccagactctgctg

SEQ ID NO: 43177 - DNA, 33 bp, synthetic construct
  source 1..33: mol_type = other DNA
acctacctgatgggtggaaccggcgttggattc

SEQ ID NO: 43178 - DNA, 51 bp, synthetic construct
  source 1..51: mol_type = other DNA
cttgtgcaagtgccgacccgccggatcgacgtcgccgcggaatactctacc

SEQ ID NO: 43179 - DNA, 186 bp, synthetic construct
  source 1..186: mol_type = other DNA
tccgctagtgctctggtccaatctgtaatcgacatctgcgatgtatccatatacgacgccaacttcgtcaaagccgccgtgcttggaaggtatccgcaatccgttgattacaaggggtctaacattgcaaccatgcttgacatcccacaaaaactagagggcgccggatatggactcaggaacgtc

SEQ ID NO: 43180 - DNA, 48 bp, synthetic construct
  source 1..48: mol_type = other DNA
atgttcgagatggccgacgctctggggagtttcgaacgactccatctc

SEQ ID NO: 43181 - DNA, 63 bp, synthetic construct
  source 1..63: mol_type = other DNA
tatcagggactgaatgcaaacaatcttgtatacgagctagttaaagagaacgcagcagagggc

SEQ ID NO: 43182 - DNA, 102 bp, synthetic construct
  source 1..102: mol_type = other DNA
gtgggctccatagtccaggccactatcgcgcgggccgaagccgacggcgtgatcgccccccaagaacaactgaccgacttcgctatttacaacaccgatgat

SEQ ID NO: 43183 - DNA, 129 bp, synthetic construct
  source 1..129: mol_type = other DNA
ggtatcccctccaccctcctgtacttcaacgacaacctggagttcgccactggtcttcctggactggactacggacgggccgagggcgtcgccgttgggttcagcttctttagtcattctatctatggc

SEQ ID NO: 43184 - DNA, 30 bp, synthetic construct
  source 1..30: mol_type = other DNA
ttcaacggcaatcatgtggtcaccagacac

SEQ ID NO: 43185 - DNA, 84 bp, synthetic construct
  source 1..84: mol_type = other DNA
caactatttagtcctgaagctacctctggattgattaaggaagtgtattcacaaattgatgagttccgggagcccatcaaagcc

SEQ ID NO: 43186 - DNA, 66 bp, synthetic construct
  source 1..66: mol_type = other DNA
atcggcaatccccggagcgggattgccgtgtacatgtcttatctgatctccgacatgaccctcaac

SEQ ID NO: 43187 - DNA, 30 bp, synthetic construct
  source 1..30: mol_type = other DNA
ggcttcctgctgaattacatatcccctgag

SEQ ID NO: 43188 - DNA, 30 bp, synthetic construct
  source 1..30: mol_type = other DNA
ctgcagacaccgatttcttccggaatcagc

SEQ ID NO: 43189 - DNA, 63 bp, synthetic construct
  source 1..63: mol_type = other DNA
atcgggaacccccggtccggcattgccgtgtacatgagctacctcatctctgagttcaccatc

SEQ ID NO: 43190 - DNA, 57 bp, synthetic construct
  source 1..57: mol_type = other DNA
atgcacattggcatcctggagatcaagatctccgacaccgtatcgatattgctgctg

SEQ ID NO: 43191 - DNA, 30 bp, synthetic construct
  source 1..30: mol_type = other DNA
ggccagagcatcgagaacattttcgacgtc

SEQ ID NO: 43192 - DNA, 126 bp, synthetic construct
  source 1..126: mol_type = other DNA
gccagtctgatcccaatgcatccttacgcctacgctatggcatctggcgtcggtagcgcctctatgaacgctgccgccctggcacctctgatgcacctctacccttccatggctaccgaccttgaa

SEQ ID NO: 43193 - DNA, 48 bp, synthetic construct
  source 1..48: mol_type = other DNA
ggcgtgccaacggcatcattcattagccactacgtttctcaaattgat

SEQ ID NO: 43194 - DNA, 66 bp, synthetic construct
  source 1..66: mol_type = other DNA
attggcaatccccggtccgggatcgccgtgtacatgagttatttgattagcaaaatgtctctgaac

SEQ ID NO: 43195 - DNA, 123 bp, synthetic construct
  source 1..123: mol_type = other DNA
ttccccgtcactattcacctgacgggcgcgagcacacaagccgcaccgggtggtatcggggagataatgcacgacataatcataaccgcattttctaatcctgtggaactggtggcacaaggg

SEQ ID NO: 43196 - DNA, 36 bp, synthetic construct
  source 1..36: mol_type = other DNA
gtctgccacaccatcggcattagcgtaccgttacat

SEQ ID NO: 43197 - DNA, 33 bp, synthetic construct
  source 1..33: mol_type = other DNA
tgctctatgttcggcatcagttcggatgtttct

SEQ ID NO: 43198 - DNA, 42 bp, synthetic construct
  source 1..42: mol_type = other DNA
aaagagatcaagattacagacacagtcagcatcctcctgctt

SEQ ID NO: 43199 - DNA, 33 bp, synthetic construct
  source 1..33: mol_type = other DNA
agtggccagagtatttcatccatcttccaagta

SEQ ID NO: 43200 - DNA, 126 bp, synthetic construct
  source 1..126: mol_type = other DNA
gcctccgtgatccccatgcatccctatgcctacgcaatggccagcggcgtcgggtctgctagcatgaacgctgctgccctggcaccactgatgcacatgttcccttcgatggccacaaagcttgag

SEQ ID NO: 43201 - DNA, 48 bp, synthetic construct
  source 1..48: mol_type = other DNA
ggcatgcctactgcggactttgtatcacactacgtatctcaaatcgac

SEQ ID NO: 43202 - DNA, 30 bp, synthetic construct
  source 1..30: mol_type = other DNA
ggctttctcctgagcttcctgagtccagag

SEQ ID NO: 43203 - DNA, 30 bp, synthetic construct
  source 1..30: mol_type = other DNA
ctgcagactcctatttcttccggaatcagc

SEQ ID NO: 43204 - DNA, 66 bp, synthetic construct
  source 1..66: mol_type = other DNA
atcggcaacccccggtccgggatcgccgtgtatatgagctacctgatatcggaatttacactgagc

SEQ ID NO: 43205 - DNA, 63 bp, synthetic construct
  source 1..63: mol_type = other DNA
atcggcaacccacggtctgggatcgccgtgtacatgtcatatctgatatcacaattcacactg

SEQ ID NO: 43206 - DNA, 30 bp, synthetic construct
  source 1..30: mol_type = other DNA
gccttcctgctgaactacatctctgctgag

SEQ ID NO: 43207 - DNA, 63 bp, synthetic construct
  source 1..63: mol_type = other DNA
atcggcaacccccggagcggcatcgccgtgtacatgtcctatctcatttctgagttcacactg

SEQ ID NO: 43208 - DNA, 87 bp, synthetic construct
  source 1..87: mol_type = other DNA
ccctttctgggcattaccaagatgggaatcactgccaatatgactctcatggagaccgctacaagcatgttcgtggacaactacgaa

SEQ ID NO: 43209 - DNA, 30 bp, synthetic construct
  source 1..30: mol_type = other DNA
ctcgtttcgatggtcgagctgcagatcgga

SEQ ID NO: 43210 - DNA, 87 bp, synthetic construct
  source 1..87: mol_type = other DNA
ttccccatcatgattacatcttccatgggcaagaacagcgcagccaccatcttcgagggcatcatcttcatgtgggacactggagcc

SEQ ID NO: 43211 - DNA, 30 bp, synthetic construct
  source 1..30: mol_type = other DNA
gccttcctgatgaactacatttccgctgag

SEQ ID NO: 43212 - DNA, 63 bp, synthetic construct
  source 1..63: mol_type = other DNA
atcgggaacccccggtccggcatcgccgtgtacatgtcttacctgatttctgagttcacactg

SEQ ID NO: 43213 - DNA, 42 bp, synthetic construct
  source 1..42: mol_type = other DNA
aaggagttcaaaatcaccgacgacatctctattctgctgatg

SEQ ID NO: 43214 - DNA, 36 bp, synthetic construct
  source 1..36: mol_type = other DNA
tcgggacaggctatcaactcaatttttgtaattcaa

SEQ ID NO: 43215 - DNA, 126 bp, synthetic construct
  source 1..126: mol_type = other DNA
atttcaggcctgcctattcatccctacgccttcgccatggcttctggaatcggctctgcatccatgaacgccgccgctctcgctccactgatgcacatgtatcccgcaatgcagacattgacggcg

SEQ ID NO: 43216 - DNA, 48 bp, synthetic construct
  source 1..48: mol_type = other DNA
ggcgtcccaacaagcgacttcatgattcactacgtgtccaacatcgag

SEQ ID NO: 43217 - DNA, 222 bp, synthetic construct
  source 1..222: mol_type = other DNA
atggcctatacctcaattatcgattggatcacaggagtatatagccaacatggctgggccgatcccatccaagccaatccttattatcctttcggtgacgcctataatttgccttatgacctcggaatgaagctgtggaacattatcggcggagccatcgcctggctcctggacctgctgttccctggcaatgacgtctccacatggctggtttgcgatatg

SEQ ID NO: 43218 - DNA, 39 bp, synthetic construct
  source 1..39: mol_type = other DNA
cccctgagccctcggtggttcgtcgtgaactacgatgcc

SEQ ID NO: 43219 - DNA, 60 bp, synthetic construct
  source 1..60: mol_type = other DNA
ctggctggcagtctgaacattggcgacatcgtgatggcccagaccaagcacttctggtac

SEQ ID NO: 43220 - DNA, 84 bp, synthetic construct
  source 1..84: mol_type = other DNA
ggcggctggaacctgccctttatggagtggacttacttcctgggggacggaatcgccagctttcatcaaaacttcatgtggtgg

SEQ ID NO: 43221 - DNA, 126 bp, synthetic construct
  source 1..126: mol_type = other DNA
ttccctctcaatatctacctgagttcggcatcggtcgccagtgctctgggcggcctcggcgaaatcatgcgggacatgattctgaatatattttcaaatcccatcaagtctcttgccgagggcgag

SEQ ID NO: 43222 - DNA, 30 bp, synthetic construct
  source 1..30: mol_type = other DNA
tgctacaccctgggcatccccgtacctttc

SEQ ID NO: 43223 - DNA, 33 bp, synthetic construct
  source 1..33: mol_type = other DNA
tgcagcctcttcggcatttctcaagacataagc

SEQ ID NO: 43224 - DNA, 105 bp, synthetic construct
  source 1..105: mol_type = other DNA
cagctgtctttctcctcgtcgaccctcctgggattcattggcatccccgagaatctcctgatggaagggatcggtgtcaactccctgaccgacacaatccctacc

SEQ ID NO: 43225 - DNA, 42 bp, synthetic construct
  source 1..42: mol_type = other DNA
tggggtggcggctggcttatgaatatgggggccatcgacttc

SEQ ID NO: 43226 - DNA, 51 bp, synthetic construct
  source 1..51: mol_type = other DNA
gcctcacccgctatcaacggcgtcgccggcctgttctacggcaatccaggt

SEQ ID NO: 43227 - DNA, 42 bp, synthetic construct
  source 1..42: mol_type = other DNA
attgagatcgacctgaccgataatatccagatcgttttgctg

SEQ ID NO: 43228 - DNA, 33 bp, synthetic construct
  source 1..33: mol_type = other DNA
tccggccaatctatggatgacatcttcaacgtg

SEQ ID NO: 43229 - DNA, 126 bp, synthetic construct
  source 1..126: mol_type = other DNA
attagcgtgctccctatccatccttatgcttttagcatggcctctggcatcggtagcgcatccatgaacgccgcatccctggctagcatctctcacgtctacccatccatggccaccgagtttgaa

SEQ ID NO: 43230 - DNA, 51 bp, synthetic construct
  source 1..51: mol_type = other DNA
cctgttgtgcccacaagcaacttcgtcatgcactacgtgtcccaaataaat

SEQ ID NO: 43231 - DNA, 30 bp, synthetic construct
  source 1..30: mol_type = other DNA
ccctacttactccaatttacgtctagcgag

SEQ ID NO: 43232 - DNA, 66 bp, synthetic construct
  source 1..66: mol_type = other DNA
ataggcaacccccggagcgggattgccgtgttcatctcctacattatcaatgacttcaccatcttt

SEQ ID NO: 43233 - DNA, 42 bp, synthetic construct
  source 1..42: mol_type = other DNA
cccagctccgctatacaagtcggggataagcagataatcttc

SEQ ID NO: 43234 - DNA, 54 bp, synthetic construct
  source 1..54: mol_type = other DNA
gtggatgtctgcccacctaaaaccctggagctgaacgacagcgccaagatgccc

SEQ ID NO: 43235 - DNA, 39 bp, synthetic construct
  source 1..39: mol_type = other DNA
atcggcattcccggagtgatcgaacctgcatcaagagag

SEQ ID NO: 43236 - DNA, 33 bp, synthetic construct
  source 1..33: mol_type = other DNA
atcacactgcccgccgttggggagagcattacc

SEQ ID NO: 43237 - DNA, 126 bp, synthetic construct
  source 1..126: mol_type = other DNA
tttccagtgacaatgcacctatccgccgcatccactgccaccacccctggcggtctcggcgagattgtcagcaacctgctgctcaatatatttcaaaatcccatcaagtccctggctgaaggtgag

SEQ ID NO: 43238 - DNA, 30 bp, synthetic construct
  source 1..30: mol_type = other DNA
tgcaacaccatcggcattcacgtggctttc

SEQ ID NO: 43239 - DNA, 33 bp, synthetic construct
  source 1..33: mol_type = other DNA
tgcagcctgttcgggatctctcccgacatctcc

SEQ ID NO: 43240 - DNA, 57 bp, synthetic construct
  source 1..57: mol_type = other DNA
atgagcattggcgtgattgagatcaagctgaccgaaacaatccagatcttcctcctg

SEQ ID NO: 43241 - DNA, 30 bp, synthetic construct
  source 1..30: mol_type = other DNA
ggccagagcctgcacaacatctacaatgtt

SEQ ID NO: 43242 - DNA, 126 bp, synthetic construct
  source 1..126: mol_type = other DNA
gcttccgtgctgcccatccacccatacgctttcgccatggccagcgggatcggcagcgccagcatgaacgccgcctccctggcatctatttctcacctgttccctgctatggcgactgatttggaa

SEQ ID NO: 43243 - DNA, 48 bp, synthetic construct
  source 1..48: mol_type = other DNA
ggcgtcccaacaagcggtttcatctcacactacgtatcccaagtcaat

SEQ ID NO: 43244 - DNA, 51 bp, synthetic construct
  source 1..51: mol_type = other DNA
agcctgttcggctctctcttttctttttcatcggggatcgaggaggcctgc

SEQ ID NO: 43245 - DNA, 30 bp, synthetic construct
  source 1..30: mol_type = other DNA
ctgagcggcggaaccggaatcgtggatcgg

SEQ ID NO: 43246 - DNA, 42 bp, synthetic construct
  source 1..42: mol_type = other DNA
gactggggcattccctgcaccggaatcctcggagagtccacc

SEQ ID NO: 43247 - DNA, 78 bp, synthetic construct
  source 1..78: mol_type = other DNA
agcggttccgggagaagcggcaccgctatggccgtcaaggaaatcattggcgattcgcttactgggttctgttccgaa

SEQ ID NO: 43248 - DNA, 126 bp, synthetic construct
  source 1..126: mol_type = other DNA
tttccagtcaccatgcacctgacggctgcgagcacagcagccgcgcctcaagacctgggcaaggtcatgtcggacatgatactggctgtgttcaccaacccaatcgagttgttagctgctgggaca

SEQ ID NO: 43249 - DNA, 33 bp, synthetic construct
  source 1..33: mol_type = other DNA
gtgtgccacaccatgggcatctccacacctctg

SEQ ID NO: 43250 - DNA, 33 bp, synthetic construct
  source 1..33: mol_type = other DNA
tgcagcctgttcggcatctctcctgacgtttct

SEQ ID NO: 43251 - DNA, 36 bp, synthetic construct
  source 1..36: mol_type = other DNA
cagttcgaggaaggagacgatctggctggcatcttt

SEQ ID NO: 43252 - DNA, 51 bp, synthetic construct
  source 1..51: mol_type = other DNA
gactgggttttcgggaccttctatggcgaggaaatggaaccttattcgcaa

SEQ ID NO: 43253 - DNA, 66 bp, synthetic construct
  source 1..66: mol_type = other DNA
attgggaacccccggagcggcatcgccgtgtatatgtcttacctgatctcccaaatgacactcaat

SEQ ID NO: 43254 - DNA, 33 bp, synthetic construct
  source 1..33: mol_type = other DNA
accttcaacaataacctggggagcacggacacg

SEQ ID NO: 43255 - DNA, 111 bp, synthetic construct
  source 1..111: mol_type = other DNA
cattttaccggggactcttgccggacagcggtcatttctgacctgggtagcatttcggctggctggcccgtgttcggcctgccttctgttttaaccgacgccagcgccctg

SEQ ID NO: 43256 - DNA, 30 bp, synthetic construct
  source 1..30: mol_type = other DNA
tccagcttctttatcaagattaccactgcc

SEQ ID NO: 43257 - DNA, 66 bp, synthetic construct
  source 1..66: mol_type = other DNA
attggcaacccccggagcgggatcgccgtgtatatcacacacttcctccaagaatttaccttctac

SEQ ID NO: 43258 - DNA, 126 bp, synthetic construct
  source 1..126: mol_type = other DNA
tttcccgtgtccatccacctgagcgcggcgagcacggctgttagccctggcggcctggctgacatcctgggagagatgctcctcaagatcttctctaacccaattaagtccctgtccgaaggtgaa

SEQ ID NO: 43259 - DNA, 33 bp, synthetic construct
  source 1..33: mol_type = other DNA
gcctgccacaccatgggcatccccgtgcatttc

SEQ ID NO: 43260 - DNA, 36 bp, synthetic construct
  source 1..36: mol_type = other DNA
acctgctccctgttcggcattagccaggacatcagc

SEQ ID NO: 43261 - DNA, 51 bp, synthetic construct
  source 1..51: mol_type = other DNA
cctaccagcgctattgaggttacaccaaatagtatcatccactgcgacact

SEQ ID NO: 43262 - DNA, 30 bp, synthetic construct
  source 1..30: mol_type = other DNA
aaggtggaggagttcgaagtcgtggatggc

SEQ ID NO: 43263 - DNA, 51 bp, synthetic construct
  source 1..51: mol_type = other DNA
ggcgactttatttctgccaactccgcaagcctgactgtagccatcccaagt

SEQ ID NO: 43264 - DNA, 69 bp, synthetic construct
  source 1..69: mol_type = other DNA
cccacagaggccatccgggtggtgaccaagactggcatgagctgccctgctctggtcgaaactgattcc

SEQ ID NO: 43265 - DNA, 42 bp, synthetic construct
  source 1..42: mol_type = other DNA
cttaaggtcgaccaatacgaagtgaccatcgatggggagccg

SEQ ID NO: 43266 - DNA, 39 bp, synthetic construct
  source 1..39: mol_type = other DNA
gaggcctgcccctacgacatgatccacaagaccgacaac

SEQ ID NO: 43267 - DNA, 126 bp, synthetic construct
  source 1..126: mol_type = other DNA
ttccctgtgtctatccacctatccggagtagcgaacgccactgccgccccaaccggaatcgctgaagtaatgagcgacatgattaagacaatcttcaccaatcccatcgttctgctgtctcaagga

SEQ ID NO: 43268 - DNA, 36 bp, synthetic construct
  source 1..36: mol_type = other DNA
gtgtgccacaccatgggcatcagcgttcctcttccc

SEQ ID NO: 43269 - DNA, 33 bp, synthetic construct
  source 1..33: mol_type = other DNA
tgcagcctgttcggcattgcacaagacatcagt

SEQ ID NO: 43270 - DNA, 30 bp, synthetic construct
  source 1..30: mol_type = other DNA
gtggccttcaccgacgctctggagtacatc

SEQ ID NO: 43271 - DNA, 66 bp, synthetic construct
  source 1..66: mol_type = other DNA
tcctgcggaatcatctctgggatcgctgacgccttcggcatggacgacccgtcgataggtagtctg

SEQ ID NO: 43272 - DNA, 105 bp, synthetic construct
  source 1..105: mol_type = other DNA
gtgtttggcctgagcggcgagtctcggaccattggagacctgggcgacctaactggagggtggcctgggcttggtatccctgctgtgctgagtgatgcttctgct

SEQ ID NO: 43273 - DNA, 30 bp, synthetic construct
  source 1..30: mol_type = other DNA
atgatcctgctgaaagtgtatccctctaca

SEQ ID NO: 43274 - DNA, 123 bp, synthetic construct
  source 1..123: mol_type = other DNA
tttccagtgacaatccacctctccggcgcgtcaaccgccgctgcacccggaggtctgggcgaagttatgtcaaacatgattttggaggtcttttccaatcccattcatctgttggccgaaggc

SEQ ID NO: 43275 - DNA, 33 bp, synthetic construct
  source 1..33: mol_type = other DNA
gtgtgccacaccatgggcatcaccgtccctatt

SEQ ID NO: 43276 - DNA, 33 bp, synthetic construct
  source 1..33: mol_type = other DNA
tgcagcctcttcggcatcggagccgatgtatct

SEQ ID NO: 43277 - DNA, 39 bp, synthetic construct
  source 1..39: mol_type = other DNA
gccggcatcatggctgacttccacgtgtcctcaaccacc

SEQ ID NO: 43278 - DNA, 36 bp, synthetic construct
  source 1..36: mol_type = other DNA
ctgtttgtgcaaacggtaactagccacaacgctaca

SEQ ID NO: 43279 - DNA, 78 bp, synthetic construct
  source 1..78: mol_type = other DNA
aagaccaaccactggtgcaaccgaatttgccgttgcggaggcgttaatgactgcttctgtagaaggggaacaagcagc

SEQ ID NO: 43280 - DNA, 126 bp, synthetic construct
  source 1..126: mol_type = other DNA
tttcccgtttctattcacctgagcggggctgccaacgcaaccgccgctccaaccggcatcgccgaagtaatgtctgacatgattaagacaatattcactaaccctattgacctcatctccgaaggc

SEQ ID NO: 43281 - DNA, 33 bp, synthetic construct
  source 1..33: mol_type = other DNA
gtgtgccacaccatcggcattagcgttcctctg

SEQ ID NO: 43282 - DNA, 33 bp, synthetic construct
  source 1..33: mol_type = other DNA
tgctctctcttcggaattagccccgacatctcc

SEQ ID NO: 43283 - DNA, 126 bp, synthetic construct
  source 1..126: mol_type = other DNA
ttcccagtgaccgtgcacttatcgcaagcctctaccgccacggctcccaatgccctgggcgacgtcatctcggacatgatcctcaacatattctcgaatcctatccactctctggtcgaggctaac

SEQ ID NO: 43284 - DNA, 33 bp, synthetic construct
  source 1..33: mol_type = other DNA
acctgccacacactgggcatcagcgtccctctg

SEQ ID NO: 43285 - DNA, 33 bp, synthetic construct
  source 1..33: mol_type = other DNA
tgcagcatgttcggcattagccaagacatctcc

SEQ ID NO: 43286 - DNA, 126 bp, synthetic construct
  source 1..126: mol_type = other DNA
ttccccgtcaccattcacctcacaaccgctagcaccgcaaccgcgcctggagctctacaagacgtcatcatgggcatgatcctgaagatcttttcaaacccaattaagtccctggctgaaggagaa

SEQ ID NO: 43287 - DNA, 33 bp, synthetic construct
  source 1..33: mol_type = other DNA
acatgccacaccatcggcatttccgttcctctg

SEQ ID NO: 43288 - DNA, 33 bp, synthetic construct
  source 1..33: mol_type = other DNA
tgcagcctgttcggcatcaaccaggacatctct

SEQ ID NO: 43289 - DNA, 126 bp, synthetic construct
  source 1..126: mol_type = other DNA
ttcccagtctcgatacacctctctagcgcttccgcggctgtatcccctggaggactgggcgacattctgggcggcatgctgctgaaaatcttttccaaccccatcaaatctctctctgaaggtgag

SEQ ID NO: 43290 - DNA, 33 bp, synthetic construct; identical to SEQ ID NO: 43259
  source 1..33: mol_type = other DNA

SEQ ID NO: 43291 - DNA, 36 bp, synthetic construct
  source 1..36: mol_type = other DNA
acctgctctctgttcggcatatctcaagacatcagc

SEQ ID NO: 43292 - DNA, 42 bp, synthetic construct
  source 1..42: mol_type = other DNA
atcggtttggaggacgtgctgagcgctctcgccatgtctaac

SEQ ID NO: 43293 - DNA, 33 bp, synthetic construct
  source 1..33: mol_type = other DNA
gccttcggcgctaacgtgtcactgctcatttcc

SEQ ID NO: 43294 - DNA, 30 bp, synthetic construct
  source 1..30: mol_type = other DNA
tacgcaaacgccggtatcactgcatccgtc

SEQ ID NO: 43295 - DNA, 123 bp, synthetic construct
  source 1..123: mol_type = other DNA
ttccctgtgactatacacctgagtggcagcaacacagccaatgcacccggcaacattgcggacctcatgagcaacatgatactgacttccgtatctaatccgatccaattgcttagtgaaggc

SEQ ID NO: 43296 - DNA, 30 bp, synthetic construct
  source 1..30: mol_type = other DNA
tgccacaccctgggcgtttcgctaagtctc

SEQ ID NO: 43297 - DNA, 36 bp, synthetic construct
  source 1..36: mol_type = other DNA
gccagcagcctgttcgggatttctagtgacttgtct

SEQ ID NO: 43298 - DNA, 30 bp, synthetic construct
  source 1..30: mol_type = other DNA
atgacattctttatcaagacctaccctggc

SEQ ID NO: 43299 - DNA, 33 bp, synthetic construct
  source 1..33: mol_type = other DNA
gcgagcatcctgctgaataaccctacaattctg

SEQ ID NO: 43300 - DNA, 108 bp, synthetic construct
  source 1..108: mol_type = other DNA
attggctcctatcctatatcttttggcgacgtctactctaccctgtggcaccacctcaagggggatatcgagaactacagctacgacaacgtcgtctggaatcaaagg

SEQ ID NO: 43301 - DNA, 78 bp, synthetic construct
  source 1..78: mol_type = other DNA
atgctgaccgctgaccccaactccgcttctagcgtgtacacatggagcgtcggctccatcgggatgaccacttgggaa

SEQ ID NO: 43302 - DNA, 123 bp, synthetic construct
  source 1..123: mol_type = other DNA
tttcccgttaccattcacctgagtgatgcctcaactgctgcggcacctggcgggctcggcgaagtgatgagtaacatgattctgggcatcttttccaatcctattggactgatttctgaaggt

SEQ ID NO: 43303 - DNA, 36 bp, synthetic construct
  source 1..36: mol_type = other DNA
gtgtgccacaccatgggcatcagtgtccctttgccc

SEQ ID NO: 43304 - DNA, 33 bp, synthetic construct
  source 1..33: mol_type = other DNA
tgcagcctcttcggtatccctgctgacgtttct

SEQ ID NO: 43305 - DNA, 66 bp, synthetic construct
  source 1..66: mol_type = other DNA
atcaataacccccggagcgccatctccgtctacgtgaacgacttgatccaaaacatcaccctcaac

SEQ ID NO: 43306 - DNA, 30 bp, synthetic construct
  source 1..30: mol_type = other DNA
atgacctacttcctggacctttttccgggc

SEQ ID NO: 43307 - DNA, 36 bp, synthetic construct
  source 1..36: mol_type = other DNA
tgcgagagcaccctgctgactaacccaacactcctc

SEQ ID NO: 43308 - DNA, 195 bp, synthetic construct
  source 1..195: mol_type = other DNA
atggagaggtccgagctgaagggcaacaccattaacgctgagacaaaggagatccctaagggcgaaatctacgagctgctcgtcctcatgcccctggacgatttcaagaacgccacttacgccaagcacgtgaatgaaaacgggaaggacaagatcatcaagaacctgaacgacagcattggaggaagaaacttc

SEQ ID NO: 43309 - DNA, 39 bp, synthetic construct
  source 1..39: mol_type = other DNA
acccagcttcaagctgatctacacttctcggagagtgcg

SEQ ID NO: 43310 - DNA, 36 bp, synthetic construct
  source 1..36: mol_type = other DNA
acctacctggagcaggaacgcggattggctcttctg

SEQ ID NO: 43311 - DNA, 126 bp, synthetic construct
  source 1..126: mol_type = other DNA
ttccctgtcggcatgcacctgaccgccgctagcaacgtctccgcccctagcgggctggaggagattctcaccaacatcctcacaaccatattctctaatccaatcaagtctctgaccgaaggagag

SEQ ID NO: 43312 - DNA, 30 bp, synthetic construct
  source 1..30: mol_type = other DNA
tgcaacaccctgggcattcacatctctctg

SEQ ID NO: 43313 - DNA, 33 bp, synthetic construct
  source 1..33: mol_type = other DNA
tgctctatgttcggcattggcaacgacatcgca

SEQ ID NO: 43314 - DNA, 72 bp, synthetic construct
  source 1..72: mol_type = other DNA
gccgtggacgtttcctcacttgtatccctgtcgaatctgagcggcatgactggcaacacctctgacctgaat

SEQ ID NO: 43315 - DNA, 54 bp, synthetic construct
  source 1..54: mol_type = other DNA
gccgggatcggagcgaacatcagcatcgcccaagcaattctgattgctggactg

SEQ ID NO: 43316 - DNA, 39 bp, synthetic construct
  source 1..39: mol_type = other DNA
ctgaagcagctcgctcccgatgctccttctagctctgtg

SEQ ID NO: 43317 - DNA, 45 bp, synthetic construct
  source 1..45: mol_type = other DNA
ttcggcagcgacgcacctatcgttaagaccttcaacatgcacttc

SEQ ID NO: 43318 - DNA, 66 bp, synthetic construct
  source 1..66: mol_type = other DNA
accacaggcctctcttcctggatgggcgccgggatcagcaacctgatgggcagtaatccacctgag

SEQ ID NO: 43319 - DNA, 33 bp, synthetic construct; identical to SEQ ID NO: 39053
  source 1..33: mol_type = other DNA

SEQ ID NO: 43320 - DNA, 36 bp, synthetic construct
  source 1..36: mol_type = other DNA
atgacctttttcctcgaagctttccctggtctgctg

SEQ ID NO: 43321 - DNA, 39 bp, synthetic construct
  source 1..39: mol_type = other DNA
agctccgtggagacactgctcaccaacccatctctcctt

SEQ ID NO: 43322 - DNA, 33 bp, synthetic construct
  source 1..33: mol_type = other DNA
atcttcggcgtcgtcggggtcggattcgacaag

SEQ ID NO: 43323 - DNA, 39 bp, synthetic construct
  source 1..39: mol_type = other DNA
acccaacttcaatcatctctgcactttgctgaagagtca

SEQ ID NO: 43324 - DNA, 39 bp, synthetic construct
  source 1..39: mol_type = other DNA
acctacctggaacaagagagaggactggcacttttgggc

SEQ ID NO: 43325 - DNA, 39 bp, synthetic construct
  source 1..39: mol_type = other DNA
agcgaaatccaggcctccctgaacattaccacgatagaa

SEQ ID NO: 43326 - DNA, 36 bp, synthetic construct
  source 1..36: mol_type = other DNA
acctacctgacaaaggagcgcggactcacaatggtg

SEQ ID NO: 43327 - DNA, 126 bp, synthetic construct
  source 1..126: mol_type = other DNA
tacccagtgtccatccacctgaacgccgctggcaatgtcaccgcccctggcggcatcggtgacgtggtcggagatatgatcctcaagattttctctaatcccctgaactccctgatggaaggagaa

SEQ ID NO: 43328 - DNA, 30 bp, synthetic construct
  source 1..30: mol_type = other DNA
agtcagagcggcctgtccatcttctctcag

SEQ ID NO: 43329 - DNA, 33 bp, synthetic construct
  source 1..33: mol_type = other DNA
acatgccacaccatcggcatctcggtatccatt

SEQ ID NO: 43330 - DNA, 36 bp, synthetic construct
  source 1..36: mol_type = other DNA
acctgctctctgttcggcattagccaggacatcagc

SEQ ID NO: 43331 - DNA, 39 bp, synthetic construct
  source 1..39: mol_type = other DNA
tcccaacttcaatcaagtctccacttctcattcgccgat

SEQ ID NO: 43332 - DNA, 36 bp, synthetic construct
  source 1..36: mol_type = other DNA
acttacctagaacaagagaggggcatggcactactg

SEQ ID NO: 43333 - DNA, 45 bp, synthetic construct
  source 1..45: mol_type = other DNA
cctgctctgcccgtgatggtcgacgagctcgggaccacagaggcg

SEQ ID NO: 43334 - DNA, 33 bp, synthetic construct
  source 1..33: mol_type = other DNA
tatatctacgaggacatgttcggcatgagcgaa

SEQ ID NO: 43335 - DNA, 57 bp, synthetic construct
  source 1..57: mol_type = other DNA
agcgtgccgtactcgtcggccgatagcgcggtgaccgaggccgattccggcaacatc

SEQ ID NO: 43336 - DNA, 108 bp, synthetic construct
  source 1..108: mol_type = other DNA
tccctggcattcagcggcgacattttcggaatcattggcaatctcgacaaggctctgagcgagaacatcgagtacaacgtgatccctgacggttccactgtccctgag

SEQ ID NO: 43337 - DNA, 51 bp, synthetic construct
  source 1..51: mol_type = other DNA
gtatggggaggtggcctgttcgatcaatatcttaccgttctcgacttcgct

SEQ ID NO: 43338 - DNA, 30 bp, synthetic construct
  source 1..30: mol_type = other DNA
gggagcggattggctgctgacggaatcgcc

SEQ ID NO: 43339 - DNA, 45 bp, synthetic construct
  source 1..45: mol_type = other DNA
cccgctctggccgacatggtggacgagctcgacacgacggagtca

SEQ ID NO: 43340 - DNA, 33 bp, synthetic construct
  source 1..33: mol_type = other DNA
tatatctacgaggggactttcggctttggagcc

SEQ ID NO: 43341 - DNA, 33 bp, synthetic construct
  source 1..33: mol_type = other DNA
accgaatacgcgacgagcatgggcactagtgcc

SEQ ID NO: 43342 - DNA, 33 bp, synthetic construct
  source 1..33: mol_type = other DNA
ctttatgccgtagaggtggacttagttggggtc

SEQ ID NO: 43343 - DNA, 36 bp, synthetic construct
  source 1..36: mol_type = other DNA
agccagctccaaagttcgctgcatttttccgcggga

SEQ ID NO: 43344 - DNA, 39 bp, synthetic construct
  source 1..39: mol_type = other DNA
acctacctggagcaggaacggggcctcgctttgttgagc

SEQ ID NO: 43345 - DNA, 123 bp, synthetic construct
  source 1..123: mol_type = other DNA
tggcctgcgactgtgactttcgtttccgtctacgctcctttttactccgacgaagcttatgaaatcgtcgagatgatcgtgtctaagctgatctgcaaccccgtcgatgcctttgctggagcc

SEQ ID NO: 43346 - DNA, 33 bp, synthetic construct
  source 1..33: mol_type = other DNA
agcgagaacggcctggacatcttcactgagact

SEQ ID NO: 43347 - DNA, 30 bp, synthetic construct
  source 1..30: mol_type = other DNA
gccaacaccctgggcattagcatccctctg

SEQ ID NO: 43348 - DNA, 36 bp, synthetic construct
  source 1..36: mol_type = other DNA
gcttgcagcatgctcggcgttcccggggatgcggct

SEQ ID NO: 43349 - DNA, 36 bp, synthetic construct
  source 1..36: mol_type = other DNA
tcccaccttcaagctagcctgcacttctctgctgag

SEQ ID NO: 43350 - DNA, 36 bp, synthetic construct
  source 1..36: mol_type = other DNA
acctacctggaacaggagcgaggtcttgctctcttg

SEQ ID NO: 43351 - DNA, 33 bp, synthetic construct
  source 1..33: mol_type = other DNA
agcgacaagatcctcaactacaccacacccatt

SEQ ID NO: 43352 - DNA, 66 bp, synthetic construct
  source 1..66: mol_type = other DNA
atcaacaaccctcggtctgccattagcgtgtacatctccaacatcctgcccaacattgagttcatg

SEQ ID NO: 43353 - DNA, 39 bp, synthetic construct
  source 1..39: mol_type = other DNA
atcagcgagatccagtcttccctgaacattaacgctgag

SEQ ID NO: 43354 - DNA, 36 bp, synthetic construct
  source 1..36: mol_type = other DNA
acctacctggccaaggagcgaggccttgctctcatc

SEQ ID NO: 43355 - DNA, 297 bp, synthetic construct
  source 1..297: mol_type = other DNA
atgatcgcctccggcgaatataagggcactaataacaccgagctcacaatcgacaagaaccttactatcatgaaatacggcgacggcgaggccatattcgacgctgaatctcagcgccggatctggaccgttcaagctacgagcattaatattaccggcctgacttttaagaacggcaagacctccggtaacgggggggccatctacttcaagaactctctgaccaacagcaacatcaacgcaaccttcatcaacaacaatgccaacgataacggcggcgcagttaggatcaacggc

SEQ ID NO: 43356 - DNA, 54 bp, synthetic construct
  source 1..54: mol_type = other DNA
atcagcggcaccttcattaataacacagccaaccacgccggagctgtagattgt

SEQ ID NO: 43357 - DNA, 126 bp, synthetic construct
  source 1..126: mol_type = other DNA
ttcatcaataataccgcccggagctacggcggcgcaattgacttctatcacctgtccggcaacattagtggaacattcattaacaactctgccatcaacaacgttggtggtgctatctacatttac

SEQ ID NO: 43358 - DNA, 39 bp, synthetic construct
  source 1..39: mol_type = other DNA
gtgtccgagattcaggccagcctgaacatcaatgctgaa

SEQ ID NO: 43359 - DNA, 36 bp, synthetic construct
  source 1..36: mol_type = other DNA
acatacctgaccaacgagcgcggcctgactatggtg

SEQ ID NO: 43360 - DNA, 42 bp, synthetic construct
  source 1..42: mol_type = other DNA
cctaccagcgccatcgacgtcaccccaaacgctattatccac

SEQ ID NO: 43361 - DNA, 36 bp, synthetic construct
  source 1..36: mol_type = other DNA
gactttattgctgctaatagcgcttctctgactgtg

SEQ ID NO: 43362 - DNA, 78 bp, synthetic construct
  source 1..78: mol_type = other DNA
ggcacttgtccgacttctgcgattgaggtgacacccaactccatcatccactgcgacacctgtggagaagaacctaag

SEQ ID NO: 43363 - DNA, 51 bp, synthetic construct
  source 1..51: mol_type = other DNA
cctcagggagcactcaaggttgaggattatgaagtcacggagggcgtgacc

SEQ ID NO: 43364 - DNA, 42 bp, synthetic construct
  source 1..42: mol_type = other DNA
ccccaggaaaccatcaaggtgacaggcgagaagctgaaagag

SEQ ID NO: 43365 - DNA, 57 bp, synthetic construct
  source 1..57: mol_type = other DNA
cccgtcgatgtgatcggcattcccggcgttaaggagcctgtggaatgcgacttggat

SEQ ID NO: 43366 - DNA, 51 bp, synthetic construct
  source 1..51: mol_type = other DNA
cctgtcagcgccatcaccctggaagaggttggctctcccgtaacggtgccc

SEQ ID NO: 43367 - DNA, 45 bp, synthetic construct
  source 1..45: mol_type = other DNA
ttcatcgccgagaaaattcccgtgaagcggagcaaggaaatcaaa

SEQ ID NO: 43368 - DNA, 66 bp, synthetic construct
  source 1..66: mol_type = other DNA
gaggcttgccccggcgacttcattgccgctaattctgcgtccctgaccgtggcaatcccttctgtg

SEQ ID NO: 43369 - DNA, 48 bp, synthetic construct
  source 1..48: mol_type = other DNA
gccctggaaatcgatgtggaatggggagagggagcacctgtagatgcc

SEQ ID NO: 43370 - DNA, 87 bp, synthetic construct
  source 1..87: mol_type = other DNA
aacaagtgtccaactgaagccatccgggtggtgaccaagaccggcatgtcctgtcctgccctggtcgagactgacgctgaacctagt

SEQ ID NO: 43371 - DNA, 72 bp, synthetic construct
  source 1..72: mol_type = other DNA
tccgtttgtagtaacgacgcgttgaaggtagagcaatatgaggtcaccatagatggagaaccagtgacccga

SEQ ID NO: 43372 - DNA, 87 bp, synthetic construct
  source 1..87: mol_type = other DNA
tccttcaaccctagcaaatgcgatcaatgcggcgattgtatcgacgcctgcccatacgacatgctgcacaaaaccgataaccctaag

SEQ ID NO: 43373 - DNA, 75 bp, synthetic construct
  source 1..75: mol_type = other DNA
gggacctgccccacaagcgctattgacgtgacccctgaagccatcatccactgcgacacttgtggcggggaaccc

SEQ ID NO: 43374 - DNA, 36 bp, synthetic construct
  source 1..36: mol_type = other DNA
ctgaaggtggaggaatacgagatcgccgatggtatt

SEQ ID NO: 43375 - DNA, 30 bp, synthetic construct
  source 1..30: mol_type = other DNA
accatcaaggtgacaggcgccaaactgaag

SEQ ID NO: 43376 - DNA, 42 bp, synthetic construct
  source 1..42: mol_type = other DNA
gtcaacgctatcaccctcgaggaggttggtagtccaattact

SEQ ID NO: 43377 - DNA, 39 bp, synthetic construct
  source 1..39: mol_type = other DNA
tacatcagcgagaaggtgcccattaaaaggtccaaggaa

SEQ ID NO: 43378 - DNA, 60 bp, synthetic construct
  source 1..60: mol_type = other DNA
gcttgccccggcgacttcatcgccgccaactccgcttctctgaccgtggccattcctagc

SEQ ID NO: 43379 - DNA, 75 bp, synthetic construct
  source 1..75: mol_type = other DNA
ccaactgaggccatccgggtcgtgaccaagaccggcatgagctgccctgctctggtcgagacagatgctgaacct

SEQ ID NO: 43380 - DNA, 54 bp, synthetic construct
  source 1..54: mol_type = other DNA
agcaacgacgccctgaaggtggaacaatatgaggtgaccatcggagatgaagcc

SEQ ID NO: 43381 - DNA, 63 bp, synthetic construct
  source 1..63: mol_type = other DNA
gatcaatgcggtgactgcatcgaagcctgtccctacgacatgctgcacaagaccgacaacccc

SEQ ID NO: 43382 - DNA, 180 bp, synthetic construct
  source 1..180: mol_type = other DNA
actatcttcgccaatatcttcttttcctcaagcaatatcgtgcttggcaatggaatggacttgaatcaaacgctcgtggtcctgacccacaagctgcccgtcgagctgcagggctttgtcaacccgtacctaagttctattagcggcagcctggagaacgtggtgtcttacgtacttcac

SEQ ID NO: 43383 - DNA, 123 bp, synthetic construct
  source 1..123: mol_type = other DNA
tggccttctaccgtgactttcgtgacacctttggactccagtgatattgacgacgcctacaaactcgtggagtccctggtggctaagctgatctgcaaccccgttgatgcatttgctgaaact

SEQ ID NO: 43384 - DNA, 30 bp, synthetic construct
  source 1..30: mol_type = other DNA
gcctacaccctgggcatcgggattccactg

SEQ ID NO: 43385 - DNA, 33 bp, synthetic construct
  source 1..33: mol_type = other DNA
tgctccctgcttgggatttctggcgacatcgcc

SEQ ID NO: 43386 - DNA, 48 bp, synthetic construct
  source 1..48: mol_type = other DNA
acctgccctacaagcgctatcgaggtgactcccaacgccatcatccac

SEQ ID NO: 43387 - DNA, 30 bp, synthetic construct
  source 1..30: mol_type = other DNA
ctgaaggtggaagactacgagatcacagat

SEQ ID NO: 43388 - DNA, 51 bp, synthetic construct
  source 1..51: mol_type = other DNA
ggggactttatttctgctaatagcgctagtttaactgtggcaataccttcc

SEQ ID NO: 43389 - DNA, 33 bp, synthetic construct
  source 1..33: mol_type = other DNA
atccgggtcgtgaccaagaccttgggcacaatg

SEQ ID NO: 43390 - DNA, 45 bp, synthetic construct
  source 1..45: mol_type = other DNA
acttgccctacctccgccatcaacgtgacacccgagagcatcatt

SEQ ID NO: 43391 - DNA, 51 bp, synthetic construct
  source 1..51: mol_type = other DNA
ggtgactttatttctgcaaactccagtagtcttaccgttgccatcccatct

SEQ ID NO: 43392 - DNA, 123 bp, synthetic construct
  source 1..123: mol_type = other DNA
gcctccatcgtgctgaaccagaacgtcgtgctgaatgcttttagcgtagtatcggtcaggagctctgttcaaggggtctctcgctttgacgccctcttcaagaacatcctgatctacaacaac

SEQ ID NO: 43393 - DNA, 30 bp, synthetic construct
  source 1..30: mol_type = other DNA
agcaatcattcgtatatccactactggatg

SEQ ID NO: 43394 - DNA, 60 bp, synthetic construct
  source 1..60: mol_type = other DNA
ggcgcttgtcccacatccgccattgatgtgacccctagcaccatcatccactgcgacacc

SEQ ID NO: 43395 - DNA, 39 bp, synthetic construct
  source 1..39: mol_type = other DNA
aacgccatcacactggaggaggttggctctcccattacc

SEQ ID NO: 43396 - DNA, 66 bp, synthetic construct
  source 1..66: mol_type = other DNA
gaggcttgccccggcgacttcattgccgctaactccgcatctttgaccgtggccattccttctgta

SEQ ID NO: 43397 - DNA, 36 bp, synthetic construct
  source 1..36: mol_type = other DNA
cccacagaggccatccgggtggtcaccaagactggg

SEQ ID NO: 43398 - DNA, 39 bp, synthetic construct
  source 1..39: mol_type = other DNA
gaagcctgcccctacgacatgctgcacaagagcgagaac

SEQ ID NO: 43399 - DNA, 75 bp, synthetic construct
  source 1..75: mol_type = other DNA
ggcacctgtcccacaagcgctattgatgtgacccctaacgccatcatccactgcgacacttgcggagaagaaccc

SEQ ID NO: 43400 - DNA, 36 bp, synthetic construct
  source 1..36: mol_type = other DNA
caggaaaccctcaaagtgacaggcgagaagctgaag

SEQ ID NO: 43401 - DNA, 36 bp, synthetic construct
  source 1..36: mol_type = other DNA
atcggcattcctggagtggtcgaacctgctgagtat

SEQ ID NO: 43402 - DNA, 42 bp, synthetic construct
  source 1..42: mol_type = other DNA
gtcaacgccattaccctcgacgaagttgggtcgcctatcacc

SEQ ID NO: 43403 - DNA, 57 bp, synthetic construct
  source 1..57: mol_type = other DNA
cccggcgacttcatctctgccaactccgctaccctaaccgttgccattccttctgtg

SEQ ID NO: 43404 - DNA, 57 bp, synthetic construct
  source 1..57: mol_type = other DNA
aagtgtcccacggaagcgatccgggtcgtgactaaaaccggcatgctgtgtcctgcc

SEQ ID NO: 43405 - DNA, 57 bp, synthetic construct
  source 1..57: mol_type = other DNA
agcatgtgctccaacgacgccctgaaggtggaacaatacgaacttaccatcgatggc

SEQ ID NO: 43406 - DNA, 63 bp, synthetic construct
  source 1..63: mol_type = other DNA
gaccaatgcggggactgcatcgaggcttgtccctacgacatgctgcacaagagcgacaacccc

SEQ ID NO: 43407 - DNA, 51 bp, synthetic construct
  source 1..51: mol_type = other DNA
ggaacctgccccacatctgccatcgacgtcacccctaatgcgattatccac

SEQ ID NO: 43408 - DNA, 51 bp, synthetic construct
  source 1..51: mol_type = other DNA
ggcgacttcataagtgcaaacagcgcatcactcactgtcgctatcccttct

SEQ ID NO: 43409 - DNA, 30 bp, synthetic construct
  source 1..30: mol_type = other DNA
ccgactgaggccatcagggtagtatcgaag

SEQ ID NO: 43410 - DNA, 30 bp, synthetic construct
  source 1..30: mol_type = other DNA
ctcaaggtcgagaaatacgaactgaccatc

SEQ ID NO: 43411 - DNA, 60 bp, synthetic construct
  source 1..60: mol_type = other DNA
ggcacatgtccgacatccgcgatcgaggtgactcctaacgctatcattcactgcgatacc

SEQ ID NO: 43412 - DNA, 36 bp, synthetic construct
  source 1..36: mol_type = other DNA
ctgaaggtggaacaatatgagatcgctgacggtatc

SEQ ID NO: 43413 - DNA, 39 bp, synthetic construct
  source 1..39: mol_type = other DNA
agcgccatcacactggaggaagttggttcacccgtcact

SEQ ID NO: 43414 - DNA, 51 bp, synthetic construct
  source 1..51: mol_type = other DNA
ggagacttcattgccgcaaacggcgccagtttgaccgtcgcgatcccctcc

SEQ ID NO: 43415 - DNA, 69 bp, synthetic construct
  source 1..69: mol_type = other DNA
cccacagaggctatccgggtcgtgaccaagaccggcatgagctgccctgccctggttgagactgatgca

SEQ ID NO: 43416 - DNA, 57 bp, synthetic construct
  source 1..57: mol_type = other DNA
agcaacgacgccctgaaggtcgagcaatatgaaattaccatcgatggagaaccagtg

SEQ ID NO: 43417 - DNA, 33 bp, synthetic construct
  source 1..33: mol_type = other DNA
atcgaggcctgcccctacgacatgattcacaag

SEQ ID NO: 43418 - DNA, 45 bp, synthetic construct
  source 1..45: mol_type = other DNA
atccacttcttttgggagtacattcccgaggccatcaacttcaac

SEQ ID NO: 43419 - DNA, 54 bp, synthetic construct
  source 1..54: mol_type = other DNA
accaacactcagaccgggttgcactctattgggaccaccacactgacaaacctc

SEQ ID NO: 43420 - DNA, 66 bp, synthetic construct
  source 1..66: mol_type = other DNA
cccctgacaatgttctccggggaggaacagatctacctcctgatcgacaacggtgcccagattggc

SEQ ID NO: 43421 - DNA, 51 bp, synthetic construct
  source 1..51: mol_type = other DNA
ggtacatgccccacatccgctattgaggtaactcctgaaagtatcatccac

SEQ ID NO: 43422 - DNA, 36 bp, synthetic construct
  source 1..36: mol_type = other DNA
aacgccatcaccctcgaggaagttggatcaccagtg

SEQ ID NO: 43423 - DNA, 54 bp, synthetic construct
  source 1..54: mol_type = other DNA
cccggcgactttatagctgccaatagcgcctctctgaccgtggccattccttcc

SEQ ID NO: 43424 - DNA, 57 bp, synthetic construct
  source 1..57: mol_type = other DNA
ccgacgcaagctatccgggtcgtgaccaagactggcatgagctgccctgctcttgtg

SEQ ID NO: 43425 - DNA, 69 bp, synthetic construct
  source 1..69: mol_type = other DNA
agcatgtgctccaacgatgctctgaaggtggagcaatacgaaataaccattgacggagaaccagtcgcc

SEQ ID NO: 43426 - DNA, 48 bp, synthetic construct
  source 1..48: mol_type = other DNA
gactgtatcgaggcctgcccctacgatatgctgcacgagaccgacaac

SEQ ID NO: 43427 - DNA, 39 bp, synthetic construct
  source 1..39: mol_type = other DNA
ggcttcgttcggggtgccagcgggattggaacaatctcc

SEQ ID NO: 43428 - DNA, 90 bp, synthetic construct
  source 1..90: mol_type = other DNA
gaggatggattcagcatgctgagccaagccgttgctggcgtgatcctgaactattacctgacctccttcatctgcgacgccgtcattggg

SEQ ID NO: 43429 - DNA, 111 bp, synthetic construct
  source 1..111: mol_type = other DNA
agcttcccactcggagtcaaatatggctccgccgaatctatcctgggcatggttgggagttttatcgcccccatcttcgcaccgctgggctttggaacatggcaggcggcc

SEQ ID NO: 43430 - DNA, 78 bp, synthetic construct
  source 1..78: mol_type = other DNA
gggaccctgggcggcgtggacgctgatgacaagtccggagtcactcacctgatccaagacgcattcacacctctgagt

SEQ ID NO: 43431 - DNA, 33 bp, synthetic construct
  source 1..33: mol_type = other DNA
tatcatctccaatacatccgaggttgggacgtt

SEQ ID NO: 43432 - DNA, 54 bp, synthetic construct
  source 1..54: mol_type = other DNA
ttcatgggcaacgtggagattatccccaagtactatggactcttggctctttca

SEQ ID NO: 43433 - DNA, 48 bp, synthetic construct
  source 1..48: mol_type = other DNA
ggcgaaatgcaggtttacctgattagccacatcgagctgcctatcacc

SEQ ID NO: 43434 - DNA, 33 bp, synthetic construct
  source 1..33: mol_type = other DNA
acagaatatgcgaccagcatgggaacttcagcc

SEQ ID NO: 43435 - DNA, 33 bp, synthetic construct
  source 1..33: mol_type = other DNA
ctctacgccgtggagaccgacctcgttagcgct

SEQ ID NO: 43436 - DNA, 42 bp, synthetic construct
  source 1..42: mol_type = other DNA
ctgtactccaactaccagagcattcttgctatcaccaaagcc

SEQ ID NO: 43437 - DNA, 36 bp, synthetic construct
  source 1..36: mol_type = other DNA
agcaccatcgccctggaccagttcggcgttaagaac

SEQ ID NO: 43438 - DNA, 36 bp, synthetic construct
  source 1..36: mol_type = other DNA
gggttcgctcgaggtgccagcggaattggcactatc

SEQ ID NO: 43439 - DNA, 45 bp, synthetic construct
  source 1..45: mol_type = other DNA
aatatgcaggtctatctgatatcatacgtgaacctgtctttgacc

SEQ ID NO: 43440 - DNA, 39 bp, synthetic construct
  source 1..39: mol_type = other DNA
aatgagcttgtaaataccgacttcgaagtgaacgctatc

SEQ ID NO: 43441 - DNA, 42 bp, synthetic construct
  source 1..42: mol_type = other DNA
aacgctttcatcaacattaagaacctcgaagcctacctgcca

SEQ ID NO: 43442 - DNA, 111 bp, synthetic construct
  source 1..111: mol_type = other DNA
attggaagttatccaatctcatttggcgacgtctatagcacactgtggcaccacctgaagggggatattgaaaactattcctatgacaatgtcgtttggaatcagcgaatg

SEQ ID NO: 43443 - DNA, 81 bp, synthetic construct
  source 1..81: mol_type = other DNA
atgatgctgactgccgacccgaatagcgcctcttccgtctatacgtggagcgttggaagtatcgggatgacgacatgggag

SEQ ID NO: 43444 - DNA, 39 bp, synthetic construct
  source 1..39: mol_type = other DNA
ggcttctcccggggatacacgggtatcgggatgcttagc

SEQ ID NO: 43445 - DNA, 36 bp, synthetic construct
  source 1..36: mol_type = other DNA
tacctcaccgagaagaccggcagtgccatggtgctg

SEQ ID NO: 43446 - DNA, 33 bp, synthetic construct
  source 1..33: mol_type = other DNA
ctgatcaccatggagtacttcaacggaacacca

SEQ ID NO: 43447 - DNA, 42 bp, synthetic construct
  source 1..42: mol_type = other DNA
gttggtttccaaagagggagtagcggaataggcactatcgca

SEQ ID NO: 43448 - DNA, 42 bp, synthetic construct
  source 1..42: mol_type = other DNA
gtcgggttcgcccggggctccagcggtatcggaacgatcgca

SEQ ID NO: 43449 - DNA, 42 bp, synthetic construct
  source 1..42: mol_type = other DNA
gtcgggttcgttagaggcagcagcggaatcggcacgatcgcc

SEQ ID NO: 43450 - DNA, 42 bp, synthetic construct
  source 1..42: mol_type = other DNA
gtaggtttcgctagaggatcttccgggatcggcacaattgcc

SEQ ID NO: 43451 - DNA, 75 bp, synthetic construct
  source 1..75: mol_type = other DNA
gaaccagggcaaaaggaactgagcctcgagaagaccacaaagctgaacgagctgcacgagctgtacactggtgcg

SEQ ID NO: 43452 - DNA, 189 bp, synthetic construct
  source 1..189: mol_type = other DNA
gcttctcccaacgagatggccctcgagaataagattgagaacggcaaatctaatagtgaagtggagatgatcgatatcatcaatcctgccaccaaggactggaagagctaccatcaaaagtccattaagagtaacatcgacaagtataaccggacaatggcagtgtactccaacgagagcaagaacgtc

SEQ ID NO: 43453 - DNA, 66 bp, synthetic construct
  source 1..66: mol_type = other DNA
agccagaacgaggctattaagatcgtgaacgataatgacgcccgcatcctgtccaagatcaagttc

SEQ ID NO: 43454 - DNA, 30 bp, synthetic construct
  source 1..30: mol_type = other DNA
cccgtgctggtgagccggctgcaggccggc

SEQ ID NO: 43455 - DNA, 84 bp, synthetic construct
  source 1..84: mol_type = other DNA
atcgtggatatttactctaacctgaacgagagcggggaaaacttttcttccaataataccaaccccgacatcagtggatgtacc

SEQ ID NO: 43456 - DNA, 240 bp, synthetic construct
  source 1..240: mol_type = other DNA
attatgagatacgaggaaaacggcgaggtggactctgagtactctaagtccaagatgaacgtccacggcaacgtgacaaacccccaagaaaattccaagaaatttagttccaatgtcctggagatgatcaaggggagcatcatgaacggatatgacgaaaaggaaaccttcgagatgctgaagaactacggtgtcaagttatccaactacgagaggcagatcaatctcggggatttggac

SEQ ID NO: 43457 - DNA, 120 bp, synthetic construct
  source 1..120: mol_type = other DNA
gagacgccccaagacaaagttaatttcatcctcaacaacatggataatattgtcctgactatccctaccacaaatgcgccggactggatggttaatgaaatctcctctacttacgagaat

SEQ ID NO: 43458 - DNA, 42 bp, synthetic construct
  source 1..42: mol_type = other DNA
gtaggattcgctcgagggtccagcggaattggtactatcgcc

SEQ ID NO: 43459 - DNA, 36 bp, synthetic construct
  source 1..36: mol_type = other DNA
atggtggccgagtctctcctgaacacaggagatacc

SEQ ID NO: 43460 - DNA, 105 bp, synthetic construct
  source 1..105: mol_type = other DNA
cagttcacatttggcgccaccatcggaggattcatcggagctcccactaacttcttcctgagcgggatcagcctcgagatgattcaccctgactccaccatcccc

SEQ ID NO: 43461 - DNA, 42 bp, synthetic construct
  source 1..42: mol_type = other DNA
tggggcggtggctggctttatcaacttggagccttggacttc

SEQ ID NO: 43462 - DNA, 51 bp, synthetic construct
  source 1..51: mol_type = other DNA
gccgcacccgctataaatggagccacagggctcctatacggaaatccaagc

SEQ ID NO: 43463 - DNA, 30 bp, synthetic construct
  source 1..30: mol_type = other DNA
accgagaacaggcacggcagcttcgatacc

SEQ ID NO: 43464 - DNA, 51 bp, synthetic construct
  source 1..51: mol_type = other DNA
accggcgacattttcactgtgacgaagaacgcaacggttatttatggcccg

SEQ ID NO: 43465 - DNA, 33 bp, synthetic construct
  source 1..33: mol_type = other DNA
atggtggccgagtcactcctgaacacaggtgac

SEQ ID NO: 43466 - DNA, 102 bp, synthetic construct
  source 1..102: mol_type = other DNA
ttcgcattcggcgagacaatcagtggatttatcggggccccaacaaactttttcctggctggaataggcgttgatatgctgcatcccgataccggcattccc

SEQ ID NO: 43467 - DNA, 42 bp, synthetic construct
  source 1..42: mol_type = other DNA
tggggtggtggctggctgtatcaactgggggctctggatttt

SEQ ID NO: 43468 - DNA, 51 bp, synthetic construct
  source 1..51: mol_type = other DNA
gcgactcccgccattggcggagtagctggcctcatctgcggaaatcctgag

SEQ ID NO: 43469 - DNA, 33 bp, synthetic construct
  source 1..33: mol_type = other DNA
cgcatcaggaagtctcgccggaacaggagaagc

SEQ ID NO: 43470 - DNA, 51 bp, synthetic construct
  source 1..51: mol_type = other DNA
aaagtctacggcgtacctcactgggccatttctattatcggaggtatcatc

SEQ ID NO: 43471 - DNA, 120 bp, synthetic construct
  source 1..120: mol_type = other DNA
gccatctatagtgaagaccatcaggactattctagcttttggacatccgtgttcgccggggtcacgcaaggaatggacatgactgctttcggcgaggattacgtggactacagaagagtg

SEQ ID NO: 43472 - DNA, 129 bp, synthetic construct
  source 1..129: mol_type = other DNA
ctggagcctggcctgggcctcaattttgccggagtggaatacgggaataaggcaactatgaaccagacattcgccgacaccatgctgaacatcattcccgagaaccttatcgagtccatggctgatggc

SEQ ID NO: 43473 - DNA, 30 bp, synthetic construct
  source 1..30: mol_type = other DNA
caggccttcggcatccactttggacctcag

SEQ ID NO: 43474 - DNA, 45 bp, synthetic construct
  source 1..45: mol_type = other DNA
tcccagcccgctgcccctacaatgagcgccgtgctcaacctgaat

SEQ ID NO: 43475 - DNA, 39 bp, synthetic construct
  source 1..39: mol_type = other DNA
atggccagcgctggtacctgggaggccctgttcgaacga

SEQ ID NO: 43476 - DNA, 42 bp, synthetic construct
  source 1..42: mol_type = other DNA
attggcatcgacgaagtgatcgaggccctgaagctctctaac

SEQ ID NO: 43477 - DNA, 30 bp, synthetic construct
  source 1..30: mol_type = other DNA
gccttcggcgcccgggtgagccccatcatc

SEQ ID NO: 43478 - DNA, 30 bp, synthetic construct
  source 1..30: mol_type = other DNA
tacgcaaacgccggtatcactgcttctctg

SEQ ID NO: 43479 - DNA, 114 bp, synthetic construct
  source 1..114: mol_type = other DNA
atctccagcggagggatcatacctatcaacgaggccatcgcctcgttaatctctgcaattcagaagggcggacacgatctggacacaactgagctgtacatattccaatctagg

SEQ ID NO: 43480 - DNA, 39 bp, synthetic construct
  source 1..39: mol_type = other DNA
atgggcatcagtatttctgccctgagcgacttctccaac

SEQ ID NO: 43481 - DNA, 69 bp, synthetic construct
  source 1..69: mol_type = other DNA
tccctggagaaggacaatctcacaaacgtgatgtggtggctatacggaagcttcgccaacatcacatgg

SEQ ID NO: 43482 - DNA, 96 bp, synthetic construct
  source 1..96: mol_type = other DNA
ttcgccttcggttccgacatcaatggcctcattgggtcccctacaaacttctttctgcaagggattggcctggatgacctgaacgggacaatcccc

SEQ ID NO: 43483 - DNA, 42 bp, synthetic construct
  source 1..42: mol_type = other DNA
tggggcggtggctggctcatgcaaatgggtgccttggacttt

SEQ ID NO: 43484 - DNA, 51 bp, synthetic construct
  source 1..51: mol_type = other DNA
gctgtgccaagtgttggagaggtggccggacttatcgccgggaatgcaaat

SEQ ID NO: 43485 - DNA, 96 bp, synthetic construct
  source 1..96: mol_type = other DNA
ttcgccttcgggtccgatgtgaacggcctcatcggctctcctaccaattttttcctgcaaggcattagcctggacgacctgaacggaacaatccca

SEQ ID NO: 43486 - DNA, 42 bp, synthetic construct
  source 1..42: mol_type = other DNA
tggggcggtggctggctgatgcaaatgggggcactggacttc

SEQ ID NO: 43487 - DNA, 54 bp, synthetic construct
  source 1..54: mol_type = other DNA
ttcgcagtgcccgctatcggtggcactgccgggctgttatatgggaaccctgac

SEQ ID NO: 43488 - DNA, 45 bp, synthetic construct
  source 1..45: mol_type = other DNA
ccgagccaggtctttattcccctgtttatgaagatattcggaggc

SEQ ID NO: 43489 - DNA, 96 bp, synthetic construct
  source 1..96: mol_type = other DNA
ttcgcttttggaaccgatatcaacgggctgatcggcgctcctaccaatttcttccttcaaggcattgggctggacgacctcaacggcacaattcca

SEQ ID NO: 43490 - DNA, 42 bp, synthetic construct
  source 1..42: mol_type = other DNA
tggggtggcggctggctgatgcaaatgggtgcactggacttc

SEQ ID NO: 43491 - DNA, 51 bp, synthetic construct
  source 1..51: mol_type = other DNA
gccgtgcccgctatcggcggtgtcgcgggcctcattgctgggaacccttat

SEQ ID NO: 43492 - DNA, 96 bp, synthetic construct
  source 1..96: mol_type = other DNA
tttgctttcggaagcgacattaacggccttatcggcgcccctacaaatttcttcctgcaagggataggcctggacgatctcaacgggaccattcct

SEQ ID NO: 43493 - DNA, 42 bp, synthetic construct
  source 1..42: mol_type = other DNA
tggggcggtggctggcttatgcaaatgggcgcactggacttc

SEQ ID NO: 43494 - DNA, 54 bp, synthetic construct
  source 1..54: mol_type = other DNA
ttcgccgtgcctgctatcggcggaaccgcagggctgctctatggaaaccctaat

SEQ ID NO: 43495 - DNA, 102 bp, synthetic construct
  source 1..102: mol_type = other DNA
cagtttgcatttggggagccctctctctacggattcattggctccccgactaattttctcctcaagggcattggtctgaatgaccttaccgggagcattcca

SEQ ID NO: 43496 - DNA, 42 bp, synthetic construct
  source 1..42: mol_type = other DNA
tggggtggcggctggttgatgcaaatgaacgctctggacttt

SEQ ID NO: 43497 - DNA, 54 bp, synthetic construct
  source 1..54: mol_type = other DNA
ttcgctgtgcccgcaatcggcggaaccgctggtctgctctatggcaatcctggc

SEQ ID NO: 43498 - DNA, 96 bp, synthetic construct
  source 1..96: mol_type = other DNA
tttgctttcggtaacgatatcaatgggctgatcggcgcccctaccaacttcttcctccaaggcatcgccctggacgacctgaacggcacaattcct

SEQ ID NO: 43499 - DNA, 42 bp, synthetic construct
  source 1..42: mol_type = other DNA
tggggcggtggctggctcatgcaaatgggagccttggacttc

SEQ ID NO: 43500 - DNA, 51 bp, synthetic construct
  source 1..51: mol_type = other DNA
gctgtgccgagcgtcggaggggtcgcaggtctcatcgctggcaaccctaac

SEQ ID NO: 43501 - DNA, 30 bp, synthetic construct
  source 1..30: mol_type = other DNA
atgatcagcatgctgttagacacaggtgat

SEQ ID NO: 43502 - DNA, 102 bp, synthetic construct
  source 1..102: mol_type = other DNA
caagtggccttcgccccttctagcatagccggcttcatcggtgcccccacaaatttcttcctggaaggcattggtatcaactccctcaccgggaccattcca

SEQ ID NO: 43503 - DNA, 42 bp, synthetic construct
  source 1..42: mol_type = other DNA
tggggtggcggctggctcatgaacatgggggctatcgacttt

SEQ ID NO: 43504 - DNA, 51 bp, synthetic construct
  source 1..51: mol_type = other DNA
gcatctcccgcgataaacggcgtggccggacttttctacggcaatccctct

SEQ ID NO: 43505 - DNA, 48 bp, synthetic construct
  source 1..48: mol_type = other DNA
cggctgaacggcgagtattttagcttcatagattccttgttgggactg

SEQ ID NO: 43506 - DNA, 33 bp, synthetic construct
  source 1..33: mol_type = other DNA
ggctactcctctgacgtactcggagtcggatca

SEQ ID NO: 43507 - DNA, 30 bp, synthetic construct
  source 1..30: mol_type = other DNA
ccctacagccgggagaccggcctgaccgac

SEQ ID NO: 43508 - DNA, 210 bp, synthetic construct
  source 1..210: mol_type = other DNA
atgatggcatatagcagcatcatcgactgggtgactgccacctggggcacccctctgatggaacggggtttttaccccttcgacgattacaatctgccataccacatatctatggcgctgtggaacattatcggcggcgctattgcctggctcattaacctgcttttccccggcaattccctgtccgagtggctcatctctccttacacc

SEQ ID NO: 43509 - DNA, 39 bp, synthetic construct
  source 1..39: mol_type = other DNA
ccattatcgtcaaggtggttcgttgtcaactacgatgcc

SEQ ID NO: 43510 - DNA, 57 bp, synthetic construct
  source 1..57: mol_type = other DNA
ctggctggctccatgaatattggcgacatcgtgaacgcccagtccgagatctggttc

SEQ ID NO: 43511 - DNA, 75 bp, synthetic construct
  source 1..75: mol_type = other DNA
ggaggctggaccatccccttcgtctccctggactacttcctcgggcctgacgccgtcgataactgcctgtactgg

SEQ ID NO: 43512 - DNA, 96 bp, synthetic construct
  source 1..96: mol_type = other DNA
ttcgctttcgggtcagacatcaatggcctgatcgggtcacctacaaacttcttcctgcaaggaatcgggctcgatgacctgaacggaaccattccc

SEQ ID NO: 43513 - DNA, 42 bp, synthetic construct
  source 1..42: mol_type = other DNA
tggggcggtggctggcttatgcaaatgggggctctggacttc

SEQ ID NO: 43514 - DNA, 54 bp, synthetic construct
  source 1..54: mol_type = other DNA
ttcgctgtccctgcggtcggtggagcggcaggcctcattgccggaaatcctaac

SEQ ID NO: 43515 - DNA, 42 bp, synthetic construct
  source 1..42: mol_type = other DNA
attggtatcgacgaagtgatcgaggccctcaagctgagcaac

SEQ ID NO: 43516 - DNA, 96 bp, synthetic construct
  source 1..96: mol_type = other DNA
ttcgccttcggctccgacatcaatgggctgatcggaagcccaacaaacttttttctacaaggcattgggctggatgacctcaacggcacaattcct

SEQ ID NO: 43517 - DNA, 42 bp, synthetic construct
  source 1..42: mol_type = other DNA
tggggcggcggttggttgatgcaaatgggggctctcgacttt

SEQ ID NO: 43518 - DNA, 51 bp, synthetic construct
  source 1..51: mol_type = other DNA
gccgtgccctctatcgggggcgtggctggactgttatacgggaacccgggt

SEQ ID NO: 43519 - DNA, 96 bp, synthetic construct
  source 1..96: mol_type = other DNA
ttcgctttcgggtctgacatcaatggcctgatcggagccccttccaacttcttcctacaaggaattgggctcgacgatctgaacggcactatccct

SEQ ID NO: 43520 - DNA, 42 bp, synthetic construct
  source 1..42: mol_type = other DNA
tggggcggcggttggctcatgcaaatgggtgctctggacttc

SEQ ID NO: 43521 - DNA, 54 bp, synthetic construct
  source 1..54: mol_type = other DNA
ttcgccgtccctgctgttggtggagtggccgggctgatagctggaaaccctgag

SEQ ID NO: 43522 - DNA, 96 bp, synthetic construct
  source 1..96: mol_type = other DNA
ttcgccttcgggaacgatatctacggcctcatcgggagccctaccaatttctttctacaaggaataggactggacgacctgaacggcacaattccc

SEQ ID NO: 43523 - DNA, 42 bp, synthetic construct
  source 1..42: mol_type = other DNA
tggggcggtggctggctcatgcaaatgggggctctcgatttc

SEQ ID NO: 43524 - DNA, 54 bp, synthetic construct
  source 1..54: mol_type = other DNA
tttgccgtgcctgctatcggtggagcagccggactgttcaccggcaaccctaat

SEQ ID NO: 43525 - DNA, 102 bp, synthetic construct
  source 1..102: mol_type = other DNA
agtataagtttcggcgagccctctctatatggattcatcggaagcccgtccaacctgttcctcaaggggattggcatttccgatcttacgggttccattcct

SEQ ID NO: 43526 - DNA, 42 bp, synthetic construct
  source 1..42: mol_type = other DNA
tggggcggcggctggcttatgcaaatcaacgctctcgacttc

SEQ ID NO: 43527 - DNA, 54 bp, synthetic construct
  source 1..54: mol_type = other DNA
ttcgcagtgcctgccatcaacggggccgctggcctcctatatggaaaccctagc

SEQ ID NO: 43528 - DNA, 96 bp, synthetic construct
  source 1..96: mol_type = other DNA
ttcgcgtttgggagtgacgtttatggtttaatcgggtcaccaaccaacttctttctcaagggcattgctctggacgatctcaccgagacaatcccc

SEQ ID NO: 43529 - DNA, 42 bp, synthetic construct
  source 1..42: mol_type = other DNA
tggggcggtggctggctaatgcaaatgggtgctctcgacttc

SEQ ID NO: 43530 - DNA, 54 bp, synthetic construct
  source 1..54: mol_type = other DNA
ttcgccacacctctcatcggcgaggctagcgggctgctttacgggaaccctaac

SEQ ID NO: 43531 - DNA, 96 bp, synthetic construct
  source 1..96: mol_type = other DNA
ttcgcttttggatctgacatctacggcctgatcggaagtcctacaaacttctttctccaaggtatcgccctcgatgacctgaatggcaccattccc

SEQ ID NO: 43532 - DNA, 42 bp, synthetic construct
  source 1..42: mol_type = other DNA
tggggcggcggttggctgatgcaaatgggggctctcgacttc

SEQ ID NO: 43533 - DNA, 51 bp, synthetic construct
  source 1..51: mol_type = other DNA
gctattccttctatcggaggggtggccgggctgatagctggcaatcccaac

SEQ ID NO: 43534 - DNA, 99 bp, synthetic construct
  source 1..99: mol_type = other DNA
ctcgccttcggcgaaccatctttatacgggtttatcgggacgcctagccacttttttcttcaaggcatcggccttgaggacttgaccggttctattccc

SEQ ID NO: 43535 - DNA, 42 bp, synthetic construct
  source 1..42: mol_type = other DNA
tggggtggcggctggctcatgcaaatgaatgccctggacttt

SEQ ID NO: 43536 - DNA, 54 bp, synthetic construct
  source 1..54: mol_type = other DNA
ttcgcagtccctgccatcggcggcaccgctggactgctctacgggaatccaggg

SEQ ID NO: 43537 - DNA, 102 bp, synthetic construct
  source 1..102: mol_type = other DNA
tcctttgctttcggcgacacatctctgcatggacttatcgccgctcctgcaaatttcctcatgatgggcatcgggatcgatgacgtgaccggtaccattccc

SEQ ID NO: 43538 - DNA, 42 bp, synthetic construct
  source 1..42: mol_type = other DNA
tggggcggtggatggttaatgcaaatgggcgcactggacttt

SEQ ID NO: 43539 - DNA, 51 bp, synthetic construct
  source 1..51: mol_type = other DNA
gctagccccgccattaacgaggcggctggcctcgtctttggcaatccgagc

SEQ ID NO: 43540 - DNA, 96 bp, synthetic construct
  source 1..96: mol_type = other DNA
ttcgccttcggctccgacattatggggatcatcggctctcccaccaatttttttcttcaaggaattgggctggacgatctcaacggaacaattcct

SEQ ID NO: 43541 - DNA, 45 bp, synthetic construct
  source 1..45: mol_type = other DNA
gtctggggagggggttggctcatgcaaatgggtgccctcgatttc

SEQ ID NO: 43542 - DNA, 51 bp, synthetic construct
  source 1..51: mol_type = other DNA
gctgtgccatccatcggggaagtgtctggccttattgctggtaaccccgaa

SEQ ID NO: 43543 - DNA, 99 bp, synthetic construct
  source 1..99: mol_type = other DNA
ttcgccttcggcgagcctagcctctacggctttatcggaagtccatccaacttcttcctgcaaggcattggactggacgacctgaccgggtctatcccc

SEQ ID NO: 43544 - DNA, 42 bp, synthetic construct
  source 1..42: mol_type = other DNA
tggggtggcggctggctcatgcaaatgaatgccctcgacttc

SEQ ID NO: 43545 - DNA, 54 bp, synthetic construct
  source 1..54: mol_type = other DNA
ttcgcagtgcccgctattggcggaaccgccggcctgatatacggtaaccctgag

SEQ ID NO: 43546 - DNA, 96 bp, synthetic construct
  source 1..96: mol_type = other DNA
tttgctttcggcgacgatatcaacggactcatcggggcccctgccaatttctttcttcaaggcatagggctggaggaccttaccggcacaattccg

SEQ ID NO: 43547 - DNA, 42 bp, synthetic construct
  source 1..42: mol_type = other DNA
tggggtggcggctggcttatgcaaatgggggcactggacttc

SEQ ID NO: 43548 - DNA, 51 bp, synthetic construct
  source 1..51: mol_type = other DNA
gctgtccctgcggttggcggggtcgctggactgattgcggggaatccgaat

SEQ ID NO: 43549 - DNA, 96 bp, synthetic construct
  source 1..96: mol_type = other DNA
ttcgccttcggcaccgacgtcagcgggctgattggctcccctacaaacttctttctgcaaggcatggctctggatgacctttctgggagcataccc

SEQ ID NO: 43550 - DNA, 42 bp, synthetic construct
  source 1..42: mol_type = other DNA
tggggcggcggatggctgatgcaaatgggagcactggacttt

SEQ ID NO: 43551 - DNA, 54 bp, synthetic construct
  source 1..54: mol_type = other DNA
ttcgctgtgcctgccatcaacggagccgctgggctgattgccggcaatcctaac

SEQ ID NO: 43552 - DNA, 96 bp, synthetic construct
  source 1..96: mol_type = other DNA
attagcagttttacatccgcctggggctctgacaccactagcttcttcgtgaataacgtcggcggctcctctaacctgacgtcgagtgttggcatt

SEQ ID NO: 43553 - DNA, 69 bp, synthetic construct
  source 1..69: mol_type = other DNA
tccctgcccggaagcttttcgggcattagtaccctgttcacacctaactggaacgccctctacgacatc

SEQ ID NO: 43554 - DNA, 105 bp, synthetic construct
  source 1..105: mol_type = other DNA
ggttacatgtcgctgatgtcctctgtgcccattaacgagctcatcacctccggaccctcactgatcttcgtcgtatttcctcaaatctttaatgtcatgggaccc

SEQ ID NO: 43555 - DNA, 96 bp, synthetic construct
  source 1..96: mol_type = other DNA
ttcgcctttggaagcgacatccacggcctcatcgggtcccctaccaacttcttcctgcaaggaatcggtctcgatgacctgaagggcacaatcccc

SEQ ID NO: 43556 - DNA, 42 bp, synthetic construct
  source 1..42: mol_type = other DNA
tggggcggtggttggcttatgcaaatgggtgctctggacttt

SEQ ID NO: 43557 - DNA, 54 bp, synthetic construct
  source 1..54: mol_type = other DNA
ttcgcagtgcctgctgtcggcggagtggccggactgttttacggcaatcctaac

SEQ ID NO: 43558 - DNA, 96 bp, synthetic construct
  source 1..96: mol_type = other DNA
ttcgccttcggctccgacatgtggggcctgatcgggagccctaccaatttctttctccaaggaatagctctggacgatcttaacggtacaattcct

SEQ ID NO: 43559 - DNA, 42 bp, synthetic construct
  source 1..42: mol_type = other DNA
tggggcgagggctggctaatgcaaatgggtgcactggacttt

SEQ ID NO: 43560 - DNA, 54 bp, synthetic construct
  source 1..54: mol_type = other DNA
ttcgccgtacctgccgtcggcggcgtcgctgggctgatcgctggaaatgctaac

SEQ ID NO: 43561 - DNA, 99 bp, synthetic construct
  source 1..99: mol_type = other DNA
ttcgcctttggcgagccttctatttacggcttcatcgggagccccagcaactttttcctgcggggaatcggcctcgactccctgaccgggagtattccc

SEQ ID NO: 43562 - DNA, 42 bp, synthetic construct
  source 1..42: mol_type = other DNA
tggggtggcggctggctcatgcaaatcaacgccctggacttc

SEQ ID NO: 43563 - DNA, 48 bp, synthetic construct
  source 1..48: mol_type = other DNA
gccgtgcctgctattggcggcacagcaggactgatctacggaaacccc

SEQ ID NO: 43564 - DNA, 99 bp, synthetic construct
  source 1..99: mol_type = other DNA
cagttcgcatttggttccgatatttccggacttatcggggcccctacccacttcttcctccaaggcattgctctggacgacctgaacgggacaatccct

SEQ ID NO: 43565 - DNA, 42 bp, synthetic construct
  source 1..42: mol_type = other DNA
tggggtggtggctggctaatgcaaatgggggctctggacttc

SEQ ID NO: 43566 - DNA, 51 bp, synthetic construct
  source 1..51: mol_type = other DNA
gctgtcccttcaattgggggtgtcgctggcctgatagcgggtaaccctgga

SEQ ID NO: 43567 - DNA, 45 bp, synthetic construct
  source 1..45: mol_type = other DNA
cccagccaagtgtttattcctctgttcatgaagattttcggaatg

SEQ ID NO: 43568 - DNA, 102 bp, synthetic construct
  source 1..102: mol_type = other DNA
ccatttgcattcggcgacgtcagcatcaacgggctcatcgctcaacctgcccacttcttcctatctggtatcggcatcgaggacctcaccggcaccattcca

SEQ ID NO: 43569 - DNA, 42 bp, synthetic construct
  source 1..42: mol_type = other DNA
tggggcggtggctggctcatgcaaatgggcgctctggacttc

SEQ ID NO: 43570 - DNA, 51 bp, synthetic construct
  source 1..51: mol_type = other DNA
gcgagtcccgctgtcggaggcgtcgccggcctgatctacggaaacccaggg

SEQ ID NO: 43571 - DNA, 102 bp, synthetic construct
  source 1..102: mol_type = other DNA
cccttcgccttcggcgatgtcagcatttccggattaatcgccgagcctgcgcacttctttatgaccggaattggagtcaacgacttgacgggtagtatccct

SEQ ID NO: 43572 - DNA, 42 bp, synthetic construct
  source 1..42: mol_type = other DNA
tggggtggcggttggttgatgcaaatgggggctctggacttt

SEQ ID NO: 43573 - DNA, 54 bp, synthetic construct
  source 1..54: mol_type = other DNA
tttgctagccccgcgatcaacggcgcagccggacttctcttcggcaatcctggg

SEQ ID NO: 43574 - DNA, 30 bp, synthetic construct
  source 1..30: mol_type = other DNA
cagctggccagctctacaccaatcgattcc

SEQ ID NO: 43575 - DNA, 69 bp, synthetic construct
  source 1..69: mol_type = other DNA
ctcggcggtgacatcagcaatgctctgccgatagcatcgattgccagcgcaaactccgctcctttgtcc

SEQ ID NO: 43576 - DNA, 51 bp, synthetic construct
  source 1..51: mol_type = other DNA
gtcggcattgggaccacgagcatagcccaatccatattgatggccggactt

SEQ ID NO: 43577 - DNA, 39 bp, synthetic construct
  source 1..39: mol_type = other DNA
ctgagcgagtactacacccctcggaagacccagcaaata

SEQ ID NO: 43578 - DNA, 30 bp, synthetic construct
  source 1..30: mol_type = other DNA
gagagcgtcgacatcgtggatctgtctaca

SEQ ID NO: 43579 - DNA, 39 bp, synthetic construct
  source 1..39: mol_type = other DNA
accgatatcaatgtgcccttcgagcacgacaacaaccac

SEQ ID NO: 43580 - DNA, 45 bp, synthetic construct
  source 1..45: mol_type = other DNA
atgatcagcgttaacgagcccgaggccaacatggactacatgatg

SEQ ID NO: 43581 - DNA, 48 bp, synthetic construct
  source 1..48: mol_type = other DNA
ggcaacatgcaagtttacttaattagccagatcaatctggctttgact

SEQ ID NO: 43582 - DNA, 102 bp, synthetic construct
  source 1..102: mol_type = other DNA
caaatcgccttcgctcctgaatccctctcggggattattggcataccccaatcattacttatggagggaattggcgttgactcccttaccggcacgataccc

SEQ ID NO: 43583 - DNA, 42 bp, synthetic construct
  source 1..42: mol_type = other DNA
tggggcggcggatggcttatgaacatgggtgccatcgacttt

SEQ ID NO: 43584 - DNA, 51 bp, synthetic construct
  source 1..51: mol_type = other DNA
gcttccccggccatcaacggagttgccggcctcttctatgggaaccctaac

SEQ ID NO: 43585 - DNA, 45 bp, synthetic construct
  source 1..45: mol_type = other DNA
ggcaacatgcaggtctatcttattagctatatcaagttgcctctc

SEQ ID NO: 43586 - DNA, 102 bp, synthetic construct
  source 1..102: mol_type = other DNA
caaatcgcctttgcgcccgagtcctacgccggcatcataggcataccacaaaacctcttcatggaaggcatcggggtagactcactgaccgggactatccct

SEQ ID NO: 43587 - DNA, 39 bp, synthetic construct
  source 1..39: mol_type = other DNA
tggggcggcggatggctgatgaacatgggagctatcgac

SEQ ID NO: 43588 - DNA, 51 bp, synthetic construct
  source 1..51: mol_type = other DNA
gcatgtcctgctatcaatggagttgcaggactgttctacggcaatcccaac

SEQ ID NO: 43589 - DNA, 30 bp, synthetic construct
  source 1..30: mol_type = other DNA
cagctggccacaagcgctcccatcgatagc

SEQ ID NO: 43590 - DNA, 63 bp, synthetic construct
  source 1..63: mol_type = other DNA
ctcggcgtgcacatcagcaacgccctgcccattgccggaaaaatagatagcacagcattatcc

SEQ ID NO: 43591 - DNA, 51 bp, synthetic construct
  source 1..51: mol_type = other DNA
gtcggaattggaacaactagcatagcccagtccatacttatcgctgggctg

SEQ ID NO: 43592 - DNA, 36 bp, synthetic construct
  source 1..36: mol_type = other DNA
atcgccgggattggcgcaaacgcaatcgctgctacc

SEQ ID NO: 43593 - DNA, 48 bp, synthetic construct
  source 1..48: mol_type = other DNA
ctggagatcatgcaagcgggagacgccatggaatatgcaatgacctat

SEQ ID NO: 43594 - DNA, 39 bp, synthetic construct
  source 1..39: mol_type = other DNA
ctgaccatggtcgccggcacaatggcagttggcgcgtat

SEQ ID NO: 43595 - DNA, 63 bp, synthetic construct
  source 1..63: mol_type = other DNA
gagtacatctctctgctgtttacttattcgcctgagtccattgccatgcggcctatgctcatc

SEQ ID NO: 43596 - DNA, 102 bp, synthetic construct
  source 1..102: mol_type = other DNA
cagctctcctttgcaacaacctccatctttggactcatcggcgtaccgcaaaatctctttctggagggtatcggagtggactcactcaccggctctattccg

SEQ ID NO: 43597 - DNA, 42 bp, synthetic construct
  source 1..42: mol_type = other DNA
tggggcggcggttggctcatgaacatgggtgccgtggacttc

SEQ ID NO: 43598 - DNA, 51 bp, synthetic construct
  source 1..51: mol_type = other DNA
gcttcacctgctatcaatggaatcgcagggttgttctacggcaaccccgag

SEQ ID NO: 43599 - DNA, 81 bp, synthetic construct
  source 1..81: mol_type = other DNA
ctcacaaccattacggaagtttcgtctgtgtcactggtgctgcctggcgttgaggtacctggttccccatttttcattccg

SEQ ID NO: 43600 - DNA, 48 bp, synthetic construct
  source 1..48: mol_type = other DNA
acaatcatcgtgaagattgccagccagttcatgacctacctgatggcc

SEQ ID NO: 43601 - DNA, 33 bp, synthetic construct
  source 1..33: mol_type = other DNA
accatgctggccgatggtggcatgccagcatcc

SEQ ID NO: 43602 - DNA, 54 bp, synthetic construct
  source 1..54: mol_type = other DNA
ggcatcattatctcggacccatcgacatacgtgtccatggggacattggctcag

SEQ ID NO: 43603 - DNA, 120 bp, synthetic construct
  source 1..120: mol_type = other DNA
ggcttcggcgtcggcgatgccctgatgcctacaatcccggctcacccaatcactacaaacatggacacaagcctgttttgcgggttcacccggggcttcggccaattattcaccaacatc

SEQ ID NO: 43604 - DNA, 69 bp, synthetic construct
  source 1..69: mol_type = other DNA
tgcttcgtgtccattctgaatagcaacaacgacgacatcaagctgttcaacctcaaccggtactgtatg

SEQ ID NO: 43605 - DNA, 36 bp, synthetic construct
  source 1..36: mol_type = other DNA
gtgcagatcatggacggattcggattgccagcggcc

SEQ ID NO: 43606 - DNA, 33 bp, synthetic construct
  source 1..33: mol_type = other DNA
ctgctgagcgccgagcccttcaactacaacacc

SEQ ID NO: 43607 - DNA, 51 bp, synthetic construct
  source 1..51: mol_type = other DNA
ggaaatatgcaggtctacctcatctcttacatcaacttggcactcacaagg

SEQ ID NO: 43608 - DNA, 36 bp, synthetic construct
  source 1..36: mol_type = other DNA
gtgcagatcaccaacggcttcggtctctctgctgcc

SEQ ID NO: 43609 - DNA, 33 bp, synthetic construct
  source 1..33: mol_type = other DNA
ctgctgagcgacgcacctttcaactacaacaca

SEQ ID NO: 43610 - DNA, 276 bp, synthetic construct
  source 1..276: mol_type = other DNA
atggagaacaacacaatcattaggatgtaccgcgggattcactcgagctaccctcataactacattatcgggaacaagatttacgacattaatggcttcgatgagaacaatggcgttggcggcgactacggaatctacggcggcaacgacaccctgatcgccaacaactctatctataacgctgacgtgattggagccggcatcctggttggctcaaactctgatgtttacggcaattatatacaaataaatagcagcggggacggaatcagaata

SEQ ID NO: 43611 - DNA, 102 bp, synthetic construct
  source 1..102: mol_type = other DNA
ccattcgcttttggggatgtatctatcaacggccttatcgcccaacccgcacatttcttcctctccggcatctgcattaatgacctgactggttccatacct

SEQ ID NO: 43612 - DNA, 42 bp, synthetic construct
  source 1..42: mol_type = other DNA
tggggcggtggttggctcatgcaaatgggggcgttggacttc

SEQ ID NO: 43613 - DNA, 51 bp, synthetic construct
  source 1..51: mol_type = other DNA
gcatcaccgctgatcaatgaggctagcggcctggtcttcggaaacccaggt

SEQ ID NO: 43614 - DNA, 36 bp, synthetic construct
  source 1..36: mol_type = other DNA
gtgcagatcaccaacggattcggattgtcggccgcc

SEQ ID NO: 43615 - DNA, 33 bp, synthetic construct
  source 1..33: mol_type = other DNA
ctcctgagcgacgctccgttcaattacaacaca

SEQ ID NO: 43616 - DNA, 36 bp, synthetic construct
  source 1..36: mol_type = other DNA
gtgcagatcaccaacggattcggattaagcgccgct

SEQ ID NO: 43617 - DNA, 33 bp, synthetic construct; identical to SEQ ID NO: 43606
  source 1..33: mol_type = other DNA

SEQ ID NO: 43618 - DNA, 42 bp, synthetic construct
  source 1..42: mol_type = other DNA
gttaatgaccccttcattaaggacttcatcctcatggataac

SEQ ID NO: 43619 - DNA, 129 bp, synthetic construct
  source 1..129: mol_type = other DNA
atcaggcccggcgcggggctcaacattcctgcctccgactcggtgtcatctagcgtctccatgaccctgtctgatctgatcctgaacatcttccccgagaatccgctgaacgctctgacaaacggagag

SEQ ID NO: 43620 - DNA, 36 bp, synthetic construct
  source 1..36: mol_type = other DNA
gctcaggcctacggcatcgacttcggagctacagcc

SEQ ID NO: 43621 - DNA, 36 bp, synthetic construct
  source 1..36: mol_type = other DNA
tccatgatcctgagcctagtcggattgcctttggct

SEQ ID NO: 43622 - DNA, 33 bp, synthetic construct
  source 1..33: mol_type = other DNA
accaacgtgatgaagcagcagctgatccctgac

SEQ ID NO: 43623 - DNA, 129 bp, synthetic construct
  source 1..129: mol_type = other DNA
aagtactacgctacacctaagctgctccactccctgatcgccatcaaatatttcgagtcgtcgcaacaattcaactacattgtgaataaccctacaatgatcttcacttttttccaatcgatattcttc

SEQ ID NO: 43624 - DNA, 30 bp, synthetic construct
  source 1..30: mol_type = other DNA
cagcacgccaccacaatgggctcaactgcc

SEQ ID NO: 43625 - DNA, 30 bp, synthetic construct
  source 1..30: mol_type = other DNA
ctttacgctagtcagctgcacctcgaaagc

SEQ ID NO: 43626 - DNA, 42 bp, synthetic construct
  source 1..42: mol_type = other DNA
attggtatcgacgaagttattgaggccctgaagctctctaac

SEQ ID NO: 43627 - DNA, 30 bp, synthetic construct
  source 1..30: mol_type = other DNA
tactcccgagctggcattacacctagcatc

SEQ ID NO: 43628 - DNA, 45 bp, synthetic construct
  source 1..45: mol_type = other DNA
cacgggatgaagggcctggagtttatcgcgagcaaccctaacacc

SEQ ID NO: 43629 - DNA, 72 bp, synthetic construct
  source 1..72: mol_type = other DNA
acttaccttagcgaccctctcaccatcgccgactggggcgtccacctgctaccgatatcgcattctgcttac

SEQ ID NO: 43630 - DNA, 54 bp, synthetic construct
  source 1..54: mol_type = other DNA
atcttcatgattgggcccatcgccaacaatttcatcggttcatcattccaatac

SEQ ID NO: 43631 - DNA, 102 bp, synthetic construct
  source 1..102: mol_type = other DNA
gacatcgtccatacacaaagttcttctctgcacatgattttcggactgcctttggaagccgtctactacgacaccctctacctatggcccgcattggaaaac

SEQ ID NO: 43632 - DNA, 69 bp, synthetic construct
  source 1..69: mol_type = other DNA
cttctgatccgggcctacatatggcagaacatcctcgggcctattagctactacaattccccttacctg

SEQ ID NO: 43633 - DNA, 42 bp, synthetic construct
  source 1..42: mol_type = other DNA
attggaattgatgaagttctcgaggacctgaagcagagtaac

SEQ ID NO: 43634 - DNA, 30 bp, synthetic construct
  source 1..30: mol_type = other DNA
gctttcggcgccaccattagccccatcgtg

SEQ ID NO: 43635 - DNA, 33 bp, synthetic construct
  source 1..33: mol_type = other DNA
tacagcaacgctggagttaccgcctctatctcc

SEQ ID NO: 43636 - DNA, 51 bp, synthetic construct
  source 1..51: mol_type = other DNA
ttcagactctccggcgattataccaacttctttgacgctctgcgcggactt

SEQ ID NO: 43637 - DNA, 30 bp, synthetic construct
  source 1..30: mol_type = other DNA
cagttagcttcatcgtctcctatcgattct

SEQ ID NO: 43638 - DNA, 69 bp, synthetic construct
  source 1..69: mol_type = other DNA
ctcggcggcgatatcagcaacgccctgcccatcgcctctattacctccgctaagtcgacagcccttagc

SEQ ID NO: 43639 - DNA, 51 bp, synthetic construct
  source 1..51: mol_type = other DNA
gtcggaatagggactacctccatagcccagtccatactgatggccggtctg

SEQ ID NO: 43640 - DNA, 69 bp, synthetic construct
  source 1..69: mol_type = other DNA
tacgccaacatccccgcaatgttcgtgctgatcttccaagatgcgttcgattttcaatcaattgctggg

SEQ ID NO: 43641 - DNA, 78 bp, synthetic construct
  source 1..78: mol_type = other DNA
agcacaggagtcgcccgggacgccgctgtgtctggtgctccttatgtacaaaatgcaatctccaccgtcttcggttgg

SEQ ID NO: 43642 - DNA, 81 bp, synthetic construct
  source 1..81: mol_type = other DNA
atgggctacgggggctattattatggctccaatgatatcgataagccaagtgacatgtacggcattggcaaggacagcaat

SEQ ID NO: 43643 - DNA, 45 bp, synthetic construct
  source 1..45: mol_type = other DNA
cacggcatggggaacatcgacttcgtggccagcaatcccaataac

SEQ ID NO: 43644 - DNA, 72 bp, synthetic construct
  source 1..72: mol_type = other DNA
ctgccgcctgtggaacccattacgctcgagaacatcggcatatacctccttccgattagtcattctgcttac

SEQ ID NO: 43645 - DNA, 45 bp, synthetic construct
  source 1..45: mol_type = other DNA
accttcatggacgccggggctcccatgtttgttggatacagcttc

SEQ ID NO: 43646 - DNA, 108 bp, synthetic construct
  source 1..108: mol_type = other DNA
tattacgacatcatttacccactgagccagaacctccacatgtgggttggataccccatcgaggccgtcgatgacggcatcctgtacatggctcctgcccttgagaat

SEQ ID NO: 43647 - DNA, 69 bp, synthetic construct
  source 1..69: mol_type = other DNA
ctgattgttcgtcactacctctggaagaccattctgaacacatcctcttattataatagctccaacctg

SEQ ID NO: 43648 - DNA, 45 bp, synthetic construct
  source 1..45: mol_type = other DNA
cccagccaagtgttcattcctctgttcatgaagattttcggaatg

SEQ ID NO: 43649 - DNA, 39 bp, synthetic construct
  source 1..39: mol_type = other DNA
tacgccacataccaaactctgtataacatccccaataac

SEQ ID NO: 43650 - DNA, 36 bp, synthetic construct
  source 1..36: mol_type = other DNA
atcatgagcctaatgcaattcactaattcaagcgga

SEQ ID NO: 43651 - DNA, 36 bp, synthetic construct
  source 1..36: mol_type = other DNA
agcaccatggaggacacactggtgtccatcgctggc

SEQ ID NO: 43652 - DNA, 33 bp, synthetic construct
  source 1..33: mol_type = other DNA
aaggacgagatcctgagcctggcacatggagaa

SEQ ID NO: 43653 - DNA, 42 bp, synthetic construct
  source 1..42: mol_type = other DNA
caggatcagcaggacgcgctcattgaatatgcggtcctgatc

SEQ ID NO: 43654 - DNA, 39 bp, synthetic construct
  source 1..39: mol_type = other DNA
ctgaacgggatcgaggaggagttcggcgctggaaaactg

SEQ ID NO: 43655 - DNA, 33 bp, synthetic construct
  source 1..33: mol_type = other DNA
gactacctggtcgatatgggcgagtcaatggcg

SEQ ID NO: 43656 - DNA, 57 bp, synthetic construct
  source 1..57: mol_type = other DNA
gacatctacgatcccgacctgtccaacaataacgcgtcgaactcgacattcattccc

SEQ ID NO: 43657 - DNA, 195 bp, synthetic construct
  source 1..195: mol_type = other DNA
tactggaacgtgaccgttgtcaaccacggccccgatgctgccgtgaacgtcgtggtggacgatatcatccctaaggagctggtggacgtggtggttattagcaagtccgccggtatcttcgatagcgacgccggggtttggactggattcagtcttgcatctggtgctaatgcaaccctgatcatccggactaag

SEQ ID NO: 43658 - DNA, 216 bp, synthetic construct
  source 1..216: mol_type = other DNA
tacggcgcacacaagggcgacgtcatctcttgggtcatagtcgtcgtcaatcacgggcccgatgccgctgtgaacgtggtcgtgaatgacgtgatccctaaggaactgaccaacgtaaccgtgtccatcatcaccgacggagtgtttgagaacaacgtctggagtggcttcgacctaaatagtggcgagttcgccgtcctgattttcgacaccacc

SEQ ID NO: 43659 - DNA, 30 bp, synthetic construct
  source 1..30: mol_type = other DNA
ctgggcagcaaggcttctgagtccaaagcc

SEQ ID NO: 43660 - DNA, 33 bp, synthetic construct
  source 1..33: mol_type = other DNA
accgagtacagcaccaagatgggatctactgct

SEQ ID NO: 43661 - DNA, 30 bp, synthetic construct
  source 1..30: mol_type = other DNA
ctatacgcgattcagatcaaccttcaatcg

SEQ ID NO: 43662 - DNA, 33 bp, synthetic construct
  source 1..33: mol_type = other DNA
gtgattcagctctatttcaacgtcagcatctac

SEQ ID NO: 43663 - DNA, 36 bp, synthetic construct
  source 1..36: mol_type = other DNA
acctacttgagacaggttaccatgatggacccagag

SEQ ID NO: 43664 - DNA, 87 bp, synthetic construct
  source 1..87: mol_type = other DNA
atgaagctggatatcgtggacgctatttacttcacattcgagaccattgccaccatcggatacggtgacatcgtccccgtgactaac

SEQ ID NO: 43665 - DNA, 57 bp, synthetic construct
  source 1..57: mol_type = other DNA
ctgaccgggacttccgccggaacacacaccatcttcggagtttccaatactcttagc

SEQ ID NO: 43666 - DNA, 51 bp, synthetic construct
  source 1..51: mol_type = other DNA
gtgggcatggggagtacaagcatagcccaaagtatccttctgatgggtctg

SEQ ID NO: 43667 - DNA, 42 bp, synthetic construct
  source 1..42: mol_type = other DNA
ttccggctgtccggggactactctggattcatcgaggctctt

SEQ ID NO: 43668 - DNA, 171 bp, synthetic construct
  source 1..171: mol_type = other DNA
gtgatgggaggcattaatactgcggtcgacacctacgctccggaatattcgggcaatgagcagtttcaccaagatgtctacgattacttccaaaaggtcggcaacatcgatgaaataaaggcccaggactcagtcatcgtgaatacagcggatatcattatccaaaacgcg

SEQ ID NO: 43669 - DNA, 30 bp, synthetic construct
  source 1..30: mol_type = other DNA
cagatcgcctccgcctccccggctaacagc

SEQ ID NO: 43670 - DNA, 57 bp, synthetic construct
  source 1..57: mol_type = other DNA
ctggctaactctcctgtacaagcagccgccatctccggcatttcgaaacccttgtcc

SEQ ID NO: 43671 - DNA, 51 bp, synthetic construct
  source 1..51: mol_type = other DNA
gttggaattggcaccaataacgtagctcacgccatcctggtcatggggctt

SEQ ID NO: 43672 - DNA, 72 bp, synthetic construct
  source 1..72: mol_type = other DNA
aaatactgggacgagatttccgcatttctttcgaaagtcgggcaatgggtctacgacaacgtcatcaaacca

SEQ ID NO: 43673 - DNA, 42 bp, synthetic construct
  source 1..42: mol_type = other DNA
gtcgacttctttgtcggcctatgggaaagtatcaaggaaatt

SEQ ID NO: 43674 - DNA, 63 bp, synthetic construct
  source 1..63: mol_type = other DNA
cacgggatcgaccagttcgtccgtccattcacacaacccgttttgatgggaagcagcaaggga

SEQ ID NO: 43675 - DNA, 183 bp, synthetic construct
  source 1..183: mol_type = other DNA
cggttgagccttggcatcgacgtgttcaccattttcgtcgccatggatccatcaccaacaaccaccagcatctatcactcccacctgtacaagtctattttcggcgagattctgggtgccctcctcatttacatccctgctggaatccacaccggatcaagtctgggcacctatacaccatcc

SEQ ID NO: 43676 - DNA, 249 bp, synthetic construct
  source 1..249: mol_type = other DNA
agcttctacgggagtacaccggatagctacgagcttaccatcgaaaatgctgaggatatcgacctgtctaattacaccatcctgaactccagggaggacggaaaccggacagtggtcgagatttccaacgagtacaacgagatgggcctgctcaatcaattagcagagacactcaagggcaaatgcgactggtactctctgtctatgaacgcctactcctacttcgagaacgggcgcatggttttcaac

SEQ ID NO: 43677 - DNA, 33 bp, synthetic construct
  source 1..33: mol_type = other DNA
ttcaccaacaagtccctcctgccttctccatca

SEQ ID NO: 43678 - DNA, 54 bp, synthetic construct
  source 1..54: mol_type = other DNA
ttcctcggcggaatccccctgtttagtggtatccttaaagggaaggcagctggc

SEQ ID NO: 43679 - DNA, 252 bp, synthetic construct
  source 1..252: mol_type = other DNA
gtgaaatcaatcgaatggcagcactggactctgaatcctatcgagctgatttcctaccgggcagcgttcacactgaacattctggacaaggtcatacctatccaaacaaccactcacgggaatttgttttattcgactataaccggatactttacccatacggaccctaggattctcgttggacaagctgtcttgagccaaactaaaagcataactagcaccatcttgggcccaagcctgctggactttggt

SEQ ID NO: 43680 - DNA, 30 bp, synthetic construct
  source 1..30: mol_type = other DNA
cagatcgccacatctagtagtttcgatagc

SEQ ID NO: 43681 - DNA, 54 bp, synthetic construct
  source 1..54: mol_type = other DNA
acaggaaccaccgacgggactaacaccctgttcggcgtgtccaatgctctttct

SEQ ID NO: 43682 - DNA, 51 bp, synthetic construct
  source 1..51: mol_type = other DNA
gtggggatggggtccgactctatagcccaaagtattctcttgatgggcttg

SEQ ID NO: 43683 - DNA, 30 bp, synthetic construct
  source 1..30: mol_type = other DNA
cagatcggcagcgttcccgagcctaactct

SEQ ID NO: 43684 - DNA, 48 bp, synthetic construct
  source 1..48: mol_type = other DNA
atgggcttcacaagccacacctacatgaccaaccccactgacttgggg

SEQ ID NO: 43685 - DNA, 54 bp, synthetic construct
  source 1..54: mol_type = other DNA
gccaacattggggccggctacaccatcgcccaagcaatcctcctggccaatctc

SEQ ID NO: 43686 - DNA, 90 bp, synthetic construct
  source 1..90: mol_type = other DNA
ggcagcttcgagcggcttcacctcctggggctggcgtaccagggtcttaacgccgacaacctcgtatacgatttagtcaaggataatgcc

SEQ ID NO: 43687 - DNA, 120 bp, synthetic construct
  source 1..120: mol_type = other DNA
tccgtggtccaggccaccatcgctcgggccgaggctgacagcatcatcgctcccgaggagcagctgacagacttcgctatttacaataccgacgatgcagccaagtggaacgcttacact

SEQ ID NO: 43688 - DNA, 78 bp, synthetic construct
  source 1..78: mol_type = other DNA
ggcatccctagcacactcctgtactttaacgacaatctggagttcgccaccggacttcccggcctggattatggtcgc

SEQ ID NO: 43689 - DNA, 207 bp, synthetic construct
  source 1..207: mol_type = other DNA
atggccgactacgtctccattcgggattggatcaactaccctgacccaatgagcaacgagttctatcccttcggcgatgcctacaatctgccatacgatatctccctgaagctatgggacattatcggcggaacactcgcttggctgctggacctgctgtttcctgggaacacggtctctgaatggcttgtttgcgacggaacatcc

SEQ ID NO: 43690 - DNA, 39 bp, synthetic construct
  source 1..39: mol_type = other DNA
cccctgagcaaccggtggttcgtggtggactacggtact

SEQ ID NO: 43691 - DNA, 60 bp, synthetic construct
  source 1..60: mol_type = other DNA
ctggccggcaccttcaacatcaacgagctcgtggcggcccaatatgacaatgtctggttc

SEQ ID NO: 43692 - DNA, 51 bp, synthetic construct
  source 1..51: mol_type = other DNA
ggcggctggacactccccttcatcgacttgaacgcatgggatctctggtgg

SEQ ID NO: 43693 - DNA, 153 bp, synthetic construct
  source 1..153: mol_type = other DNA
tttagcagcggcttcggggacgccgaggaatactaccacgtggctgagcggttccttagcggcaaattctcgtattccgaactgggcacagacctgccaccactgaccgtcctgttgctgatcccacctaagctgttttcctactcccctgaa

SEQ ID NO: 43694 - DNA, 117 bp, synthetic construct
  source 1..117: mol_type = other DNA
cctactcacgcctttggcgagattcccttcatcacactgcccgaccgggccgcaagtgattccgccctgggttggctctacggacttctgaattgggcaccaagtgattccgcttca

SEQ ID NO: 43695 - DNA, 33 bp, synthetic construct
  source 1..33: mol_type = other DNA
atgaccttctttctggagccatttggagggact

SEQ ID NO: 43696 - DNA, 39 bp, synthetic construct
  source 1..39: mol_type = other DNA
gccgtggagacactgctgagcaacccatcattgctcacc

SEQ ID NO: 43697 - DNA, 33 bp, synthetic construct
  source 1..33: mol_type = other DNA
accgaatacgccacatctctggggtcttccgcc

SEQ ID NO: 43698 - DNA, 30 bp, synthetic construct
  source 1..30: mol_type = other DNA
ctatacgcctccgaagtcaaccttaccgaa

SEQ ID NO: 43699 - DNA, 51 bp, synthetic construct
  source 1..51: mol_type = other DNA
ggcatcgggggctatcacctcatgcccattaagaactccgcgacgctgacc

SEQ ID NO: 43700 - DNA, 48 bp, synthetic construct
  source 1..48: mol_type = other DNA
tgcataggcaccgtggacatcagccaggccatcctgatttctggactc

SEQ ID NO: 43701 - DNA, 48 bp, synthetic construct
  source 1..48: mol_type = other DNA
accagcctggtggaaggcaatttctccgagtctcgggagtttgcttcc

SEQ ID NO: 43702 - DNA, 45 bp, synthetic construct
  source 1..45: mol_type = other DNA
agcggcctcccgcaaatggtggatgacttcgggaccaacgaagcc

SEQ ID NO: 43703 - DNA, 33 bp, synthetic construct
  source 1..33: mol_type = other DNA
tatatctatcaagacaagtttggcttctcaact

SEQ ID NO: 43704 - DNA, 36 bp, synthetic construct
  source 1..36: mol_type = other DNA
acaagcatcgccgacgatttcggcacctctgaatcc

SEQ ID NO: 43705 - DNA, 33 bp, synthetic construct
  source 1..33: mol_type = other DNA
ccattcctgctcgaggctgccgggttgtcagaa

SEQ ID NO: 43706 - DNA, 54 bp, synthetic construct
  source 1..54: mol_type = other DNA
ttcgccgtcaagagctatcaacctttacctgtggctaacgcatcagctcttaca

SEQ ID NO: 43707 - DNA, 51 bp, synthetic construct
  source 1..51: mol_type = other DNA
gtcggcatcggcactctggacatatcgcaagcgatactgatcgccgggctc

SEQ ID NO: 43708 - DNA, 45 bp, synthetic construct
  source 1..45: mol_type = other DNA
agcgggctacctcaaatggtggaggacttcggcaccaacgaaagt

SEQ ID NO: 43709 - DNA, 33 bp, synthetic construct
  source 1..33: mol_type = other DNA
tacatataccaggaaaagtttggattttcaaca

SEQ ID NO: 43710 - DNA, 36 bp, synthetic construct
  source 1..36: mol_type = other DNA
accagtattactgatgatttcggcacttctgaaagc

SEQ ID NO: 43711 - DNA, 33 bp, synthetic construct
  source 1..33: mol_type = other DNA
cccttcctgctggatgcagctggactctctgac

SEQ ID NO: 43712 - DNA, 60 bp, synthetic construct
  source 1..60: mol_type = other DNA
gtgggcaacgagacattcaatgctaccgtcgtgaacgggaccgccatcatcaacatcacc

SEQ ID NO: 43713 - DNA, 33 bp, synthetic construct
  source 1..33: mol_type = other DNA
cacgaggtggaggtcatatatagtggagatgcg

SEQ ID NO: 43714 - DNA, 36 bp, synthetic construct
  source 1..36: mol_type = other DNA
gtgaacggcaccgccgtggtgacagtcactgttcca

SEQ ID NO: 43715 - DNA, 42 bp, synthetic construct
  source 1..42: mol_type = other DNA
ggcatgaattacaccgccaagatcgacgatggaaaggcaaca

SEQ ID NO: 43716 - DNA, 30 bp, synthetic construct
  source 1..30: mol_type = other DNA
gaatacgcaagcagcatgggctctagtgcc

SEQ ID NO: 43717 - DNA, 30 bp, synthetic construct
  source 1..30: mol_type = other DNA
ttatacgctgtggaggtggatctcgttgac

SEQ ID NO: 43718 - DNA, 33 bp, synthetic construct
  source 1..33: mol_type = other DNA
ttcaagtccaggcccctgctgccttttccaagc

SEQ ID NO: 43719 - DNA, 51 bp, synthetic construct
  source 1..51: mol_type = other DNA
aacctcgggggaatccctttgttctcgggatacctcaaatccaaggctgcc

SEQ ID NO: 43720 - DNA, 249 bp, synthetic construct
  source 1..249: mol_type = other DNA
aggtccatcgagtggcagcactggacactgaatcccctggaactaattagctatcgggcagctttcacactcaacgtcctcgatcggattacttaccatcaagctattaccggcggcaatttactctactcaacactgaccgggtactttacatccaccgaccctcgggtgctggtcggcgaagccgtgcttctcaagcatcactcgatcacatctaccatcttcggtcctgtcttgctggattttggt

SEQ ID NO: 43721 - DNA, 33 bp, synthetic construct
  source 1..33: mol_type = other DNA
gaatatgcgacaagcatgggaagtacagctaca

SEQ ID NO: 43722 - DNA, 30 bp, synthetic construct
  source 1..30: mol_type = other DNA
ttatacgccgtggaggtcaaccttacaagc

SEQ ID NO: 43723 - DNA, 54 bp, synthetic construct
  source 1..54: mol_type = other DNA
cacctcggcggcatcccattattctcggcgaccctcaaggccaaagcagcttct

SEQ ID NO: 43724 - DNA, 252 bp, synthetic construct
  source 1..252: mol_type = other DNA
gtccaggctatcagttggcaacattggcatttgaatgcaatcgagctggtctcgtaccgggccgcctttaccctgaatgtgctggaacatgccattagaaaccagttttcaacggccggcaatctgttttactcaacactcaccggcttctttacacatatagatccccgcgtacttgtcgggcaggcaaccttggcaagggaccacagcatcacttcaacgatcttcggccctgccctgctggattttggg

SEQ ID NO: 43725 - DNA, 36 bp, synthetic construct
  source 1..36: mol_type = other DNA
accgccattagtgacgactttagtatctccgagagc

SEQ ID NO: 43726 - DNA, 33 bp, synthetic construct
  source 1..33: mol_type = other DNA
ccattcatgcttcaaacggcgggaatgagtgag

SEQ ID NO: 43727 - DNA, 36 bp, synthetic construct
  source 1..36: mol_type = other DNA
tacgaggccgacatcgctgaagttagtttcgatgag

SEQ ID NO: 43728 - DNA, 117 bp, synthetic construct
  source 1..117: mol_type = other DNA
ctcggcatggaccccgacatgggactggctctgggctctattagcttggtcggaggtcatggcaccgccggttccttcggacctgatctggtggacatctacggagtcgagaacgct

SEQ ID NO: 43729 - DNA, 36 bp, synthetic construct
  source 1..36: mol_type = other DNA
cactacgctgacgtggccgagttccactttgacgat

SEQ ID NO: 43730 - DNA, 120 bp, synthetic construct
  source 1..120: mol_type = other DNA
tacatgggcctggacccccggatcggcctgtgcctcgggtccatttctctgactggcggtcacggaacagctgccagctatggccagctcctggtggaggaatacggtctgacaagtgcg

SEQ ID NO: 43731 - DNA, 30 bp, synthetic construct
  source 1..30: mol_type = other DNA
gagatgaagctctggcaactctccgatctg

SEQ ID NO: 43732 - DNA, 90 bp, synthetic construct
  source 1..90: mol_type = other DNA
ttccggctgagcggcgactacgctgggttcgtcgaagcccttatgggactctttcaaaacccgggcgagtttgtgaacaacctgctcaat

SEQ ID NO: 43733 - DNA, 63 bp, synthetic construct
  source 1..63: mol_type = other DNA
aaccctgcctactccatccccgagttcacaacccaagggctttacttaaccgacaaaagcatt

SEQ ID NO: 43734 - DNA, 90 bp, synthetic construct
  source 1..90: mol_type = other DNA
tttttccacggccaaccacaactagccgcaatctatggcgctactccgagtgttggcgtatatgagatggccaagactctcgttggaccc

SEQ ID NO: 43735 - DNA, 36 bp, synthetic construct
  source 1..36: mol_type = other DNA
accgacatcgccgacgatttcggcattagcgaaagc

SEQ ID NO: 43736 - DNA, 33 bp, synthetic construct
  source 1..33: mol_type = other DNA
ccattcttactgcaaactgcggggatgagtgag

SEQ ID NO: 43737 - DNA, 45 bp, synthetic construct
  source 1..45: mol_type = other DNA
cagggcggagtgatcgtttctgccgtccccttctccatcaactac

SEQ ID NO: 43738 - DNA, 81 bp, synthetic construct
  source 1..81: mol_type = other DNA
ttccctgatcaaatcggactcgagcactactggaaatcaatcatcccaacatttttcaccaacggccaattttcacggtat

SEQ ID NO: 43739 - DNA, 30 bp, synthetic construct
  source 1..30: mol_type = other DNA
cagacccaggccttcaacctgaatgatggc

SEQ ID NO: 43740 - DNA, 60 bp, synthetic construct
  source 1..60: mol_type = other DNA
gagagcctgcacctgatcgaaaccggctttgtgattagttccttcaactgctacctctct

SEQ ID NO: 43741 - DNA, 60 bp, synthetic construct
  source 1..60: mol_type = other DNA
atgagcttcgctcacttctttctggacaagaagttcgccttcttggcacaaatggacccc

SEQ ID NO: 43742 - DNA, 30 bp, synthetic construct
  source 1..30: mol_type = other DNA
gagttcgccacctcccttggtagctctgca

SEQ ID NO: 43743 - DNA, 30 bp, synthetic construct
  source 1..30: mol_type = other DNA
ctctacgcggtggaggttaacctcaccacc

SEQ ID NO: 43744 - DNA, 36 bp, synthetic construct
  source 1..36: mol_type = other DNA
tcctactcaatcacggttcttggcactgatgctacc

SEQ ID NO: 43745 - DNA, 30 bp, synthetic construct
  source 1..30: mol_type = other DNA
ccctacgggatcgagctgggcatggaaacc

SEQ ID NO: 43746 - DNA, 33 bp, synthetic construct
  source 1..33: mol_type = other DNA
gcagaatatgctacatccctgggatcttctgcc

SEQ ID NO: 43747 - DNA, 30 bp, synthetic construct
  source 1..30: mol_type = other DNA
ctctacgccatcgaggtggacctgactgcc

SEQ ID NO: 43748 - DNA, 36 bp, synthetic construct
  source 1..36: mol_type = other DNA
acctacaaaatcaagaacctcgtgttccctagtccc

SEQ ID NO: 43749 - DNA, 51 bp, synthetic construct
  source 1..51: mol_type = other DNA
agcggcggcatcccactctttagtggctatctgaaggcacacgctgtaaca

SEQ ID NO: 43750 - DNA, 252 bp, synthetic construct
  source 1..252: mol_type = other DNA
gtaaagagtatagaatggcagcagtggaacctgaacccgttggaactgtttttctatagagccggctacaccctttctgtgtttgacgagctgttgaatttccaaggacaaacccatggaaccttgctgtactatagcatcatggggttctttgagtcacaagatcctcggataatcgttggaaccctggtgctggggtacaaacatagcgcgacaagcaccatttttggcccctcactgcttgacttcgga

SEQ ID NO: 43751 - DNA, 51 bp, synthetic construct
  source 1..51: mol_type = other DNA
gctgtctccggatacaatctgatgccggtgacaaacagcgccactctgacc

SEQ ID NO: 43752 - DNA, 48 bp, synthetic construct
  source 1..48: mol_type = other DNA
tgcatgggcaccgtggacataagccaagcaattttgattagcggactc

SEQ ID NO: 43753 - DNA, 36 bp, synthetic construct
  source 1..36: mol_type = other DNA
tacgaggccgacatcgctgaagtctcttttgatgaa

SEQ ID NO: 43754 - DNA, 117 bp, synthetic construct
  source 1..117: mol_type = other DNA
ctagggatggatccagagatgggccttgccctcggctctatctccctggtcggcggccacgggacagctggtagttttggacctgatctggtggacatttacggagtggagaacgcc

SEQ ID NO: 43755 - DNA, 42 bp, synthetic construct
  source 1..42: mol_type = other DNA
tgctccaatgtttatgacataaatttttgccggtggagctgt

SEQ ID NO: 43756 - DNA, 39 bp, synthetic construct
  source 1..39: mol_type = other DNA
ctgaataaccagttggcacaacagcagaacaccttcctg

SEQ ID NO: 43757 - DNA, 246 bp, synthetic construct
  source 1..246: mol_type = other DNA
ggggccatcttatcctccactgtggtctacgtcgactccgatgatgtggaccggctgttgcctgccgactctaattctattctggtcgctagcgacttgatacactcgattaagttcgacaaagacggagacattcaggtcgtgaaggctttcattaacctcaccaaaagtttttctgaggatgaggtgcttgacgccatctcctccatcgacctgaagcgcgagggcctggatagcatcctctat

SEQ ID NO: 43758 - DNA, 30 bp, synthetic construct
  source 1..30: mol_type = other DNA
agcgtcgtgatcggcgacttggtacctggc

SEQ ID NO: 43759 - DNA, 51 bp, synthetic construct
  source 1..51: mol_type = other DNA
ctggggttcggttccaacgctgccggaacactgacgtctaatagcctcgga

SEQ ID NO: 43760 - DNA, 54 bp, synthetic construct
  source 1..54: mol_type = other DNA
gctaacatcggcgccaactacaccattgcacaagctatcctgctcgccaatttg

SEQ ID NO: 43761 - DNA, 87 bp, synthetic construct
  source 1..87: mol_type = other DNA
atgcagctggatatcgtcgacgccatctacttcacatttgagaccattgctaccatcggctacggcgacattgtgcccgtgactaat

SEQ ID NO: 43762 - DNA, 51 bp, synthetic construct
  source 1..51: mol_type = other DNA
gcaatgggcggatataacctgatgcccgtggccaattccgagaccttgacg

SEQ ID NO: 43763 - DNA, 48 bp, synthetic construct
  source 1..48: mol_type = other DNA
tgcatggccaccctggacattagccaggctatccttatctctggactg

SEQ ID NO: 43764 - DNA, 30 bp, synthetic construct
  source 1..30: mol_type = other DNA
cagatcggcagcgctgccccaattgatagc

SEQ ID NO: 43765 - DNA, 51 bp, synthetic construct
  source 1..51: mol_type = other DNA
ggcatcaatggataccacttgatgcccgtagcaacaagtgaaacactcacc

SEQ ID NO: 43766 - DNA, 51 bp, synthetic construct
  source 1..51: mol_type = other DNA
gtgtctatagggacagtagatatcagccaggccattctgattagcggactg

SEQ ID NO: 43767 - DNA, 45 bp, synthetic construct
  source 1..45: mol_type = other DNA
cccagccaagtcttcatccctctgtttatcaagctgttcggcgga

SEQ ID NO: 43768 - DNA, 30 bp, synthetic construct
  source 1..30: mol_type = other DNA
gaatatgctacctccatgggtagctctgct

SEQ ID NO: 43769 - DNA, 30 bp, synthetic construct
  source 1..30: mol_type = other DNA
ctttacgcggtagaagttaatttagttgac

SEQ ID NO: 43770 - DNA, 45 bp, synthetic construct
  source 1..45: mol_type = other DNA
cctagcaaagtgttcatccccctgttcatgaagattttcggaatg

SEQ ID NO: 43771 - DNA, 36 bp, synthetic construct
  source 1..36: mol_type = other DNA
accgaatacgctacatctctgagtggagctgcatcc

SEQ ID NO: 43772 - DNA, 33 bp, synthetic construct
  source 1..33: mol_type = other DNA
ctatatgccgccgaggtggatctcacggctctt

SEQ ID NO: 43773 - DNA, 45 bp, synthetic construct
  source 1..45: mol_type = other DNA
cctagcagggtctttatccccctgtttatgaagctgttcgggggc

SEQ ID NO: 43774 - DNA, 105 bp, synthetic construct
  source 1..105: mol_type = other DNA
ttccctgtgtccgtcccactcaccgcttccgtggaccccagttccgtattctcaaagattttgacggatatgattagcaaccccgttaccgctctgatcgaaggc

SEQ ID NO: 43775 - DNA, 36 bp, synthetic construct
  source 1..36: mol_type = other DNA
acttgtcattcaatgggcatcgccattaacttcccc

SEQ ID NO: 43776 - DNA, 33 bp, synthetic construct
  source 1..33: mol_type = other DNA
tgcagcctgttcggtatcagtcaggacatttct

SEQ ID NO: 43777 - DNA, 54 bp, synthetic construct
  source 1..54: mol_type = other DNA
ccgggccaatccaccctgttcatcaagattaacagcaactgcgactacaacatg

SEQ ID NO: 43778 - DNA, 42 bp, synthetic construct
  source 1..42: mol_type = other DNA
ctggtggtctctagttcacaagcggagttcacccaccctttt

SEQ ID NO: 43779 - DNA, 300 bp, synthetic construct
  source 1..300: mol_type = other DNA
tctagggtcacaggcatgaccattttttccccaatgctccgcctgggccggatcgagcagtacagtacttcctccgtgaagatggtcctcaacaatatccagctcattgggcacaacggcaatgccagctactggggcgcagacggaaccgctttcgccgaaggctatatcacacttcctatgcaacttgtgctgttcttcggcctgcctttccccatgttctttggcattcttgttaatcaaaaggacaccgtggattacatgctgcctggcatcctgggctacggatttgactttggg

SEQ ID NO: 43780 - DNA, 30 bp, synthetic construct
  source 1..30: mol_type = other DNA
cagatcgcgtctgcgagccccgctaactcc

SEQ ID NO: 43781 - DNA, 57 bp, synthetic construct
  source 1..57: mol_type = other DNA
ctggccaactcccctgtgcccacaactgctctgagcggcatctctaagacactcagc

SEQ ID NO: 43782 - DNA, 51 bp, synthetic construct
  source 1..51: mol_type = other DNA
gttggaatcgggacggacaatgtagcccatgccattctgctcatgggcctg

SEQ ID NO: 43783 - DNA, 45 bp, synthetic construct
  source 1..45: mol_type = other DNA
cccagcaaggtctttataccactgttcatcaaaatgtttggcggc

SEQ ID NO: 43784 - DNA, 36 bp, synthetic construct
  source 1..36: mol_type = other DNA
accagcatctgcgacgatcttgctgtgtctgaatcc

SEQ ID NO: 43785 - DNA, 36 bp, synthetic construct
  source 1..36: mol_type = other DNA
cccttcctgaagcaggtggctggcatcagtgatggg

SEQ ID NO: 43786 - DNA, 36 bp, synthetic construct
  source 1..36: mol_type = other DNA
agctacaccatggatgttttgggagctgactctact

SEQ ID NO: 43787 - DNA, 30 bp, synthetic construct
  source 1..30: mol_type = other DNA
ccctacggcgaggccaccggcctgcacagc

SEQ ID NO: 43788 - DNA, 75 bp, synthetic construct
  source 1..75: mol_type = other DNA
aaccctggacaatcgatcctgatttacctgatcaacgagaactgcgacctcaatatgattctgatcgcccaaaat

SEQ ID NO: 43789 - DNA, 57 bp, synthetic construct
  source 1..57: mol_type = other DNA
gacatcgccctgctcgtcgtgtctagttcccaagccgaatttacccacccattcggg

SEQ ID NO: 43790 - DNA, 300 bp, synthetic construct
  source 1..300: mol_type = other DNA
gctcgggtgtccggcatgaccatcttctctcctatgctgcgcctcggaaggattgagcagtacagcacaagctccgtcaagatggtgctgaataacattcagctgatcgggcacaacggcaacgctagttattggggcgccgaaggcaccgcctttgccgagggatacatcacacttcctatgcaattagttctgttcttcggcctgcccttcccaatgttcttcggtatcctcgtgaaccagaaggataccgtggactacatgctgcctggaatcctcggatacggctttgactttggt

SEQ ID NO: 43791 - DNA, 42 bp, synthetic construct
  source 1..42: mol_type = other DNA
atgacctcaatatgttctgatctgaacgtggaagtctcatct

SEQ ID NO: 43792 - DNA, 36 bp, synthetic construct
  source 1..36: mol_type = other DNA
cccttcctgaagcaggtggccggtatcagcgattcc

SEQ ID NO: 43793 - DNA, 33 bp, synthetic construct
  source 1..33: mol_type = other DNA
tccttcagcatggacgtccttggagccgattct

SEQ ID NO: 43794 - DNA, 30 bp, synthetic construct
  source 1..30: mol_type = other DNA
ccatacggcgaagcaatcggtttgcacacc

SEQ ID NO: 43795 - DNA, 36 bp, synthetic construct
  source 1..36: mol_type = other DNA
ctgagctttggtcaacacgaattcacccatcctttc

SEQ ID NO: 43796 - DNA, 297 bp, synthetic construct
  source 1..297: mol_type = other DNA
agccggatcacaggcattgagatattctcgccaatgctgagaatatcaagattggaccagaactccctggcttccgtgaagctggtcctcgacaacacctggctgattgggcacgatcccgctgcaagttattggagcgcctctaccggattcgctgatggatatatatctttgccaatgagcttcatcctcatgttcgggttgccattcccactgttcttcgggatgctggtgacgaagaaggacgtgatcgattacatgctgcccggaacctttggctacgcctacgactttgga

SEQ ID NO: 43797 - DNA, 54 bp, synthetic construct
  source 1..54: mol_type = other DNA
ggcgtatatagtagttttatgatcgagctggaccgctctagcgccatttgccag

SEQ ID NO: 43798 - DNA, 96 bp, synthetic construct
  source 1..96: mol_type = other DNA
tataagtcttacgtgaacgatctcggcaaggaactcgagtccggcgaactgaactccctgaataagagctttgaggacatcagcgccaagttcgag

SEQ ID NO: 43799 - DNA, 33 bp, synthetic construct
  source 1..33: mol_type = other DNA
agcgtcgtgatcggcgacttggtcccattagga

SEQ ID NO: 43800 - DNA, 30 bp, synthetic construct
  source 1..30: mol_type = other DNA
gaatacgcgacttcaatgggctcttctgcc

SEQ ID NO: 43801 - DNA, 30 bp, synthetic construct
  source 1..30: mol_type = other DNA
ctctacgctgtcgaggtggacctgactggc

SEQ ID NO: 43802 - DNA, 30 bp, synthetic construct
  source 1..30: mol_type = other DNA
cagatcggatctctgtccgctgtggatagc

SEQ ID NO: 43803 - DNA, 54 bp, synthetic construct
  source 1..54: mol_type = other DNA
tttgccggcaacactttcgccacaatgcctgctgctaccgcgagcaagcttggg

SEQ ID NO: 43804 - DNA, 48 bp, synthetic construct
  source 1..48: mol_type = other DNA
ggcctcggaacaaccagcatcagccaggcgatactgatctctggactg

SEQ ID NO: 43805 - DNA, 87 bp, synthetic construct
  source 1..87: mol_type = other DNA
tctattatccggcccggctttgggaccagttccactatcacactcgtgatcaagattttctccaaggagtctctgagcctgagagac

SEQ ID NO: 43806 - DNA, 45 bp, synthetic construct
  source 1..45: mol_type = other DNA
cctaccaacgtgtttatccccctggccatgaaggtcttcggactg

SEQ ID NO: 43807 - DNA, 264 bp, synthetic construct
  source 1..264: mol_type = other DNA
gacgagtctttctataatctgatcggcgaagagatcagccgcgagtacctggtcgacctgatgatcaactattaccaattgaaaaagcaagttggggaaactaaggtcaccgatttcaatgaagggtccgagatccgcaacatcctcgaggccattgccgtggccgtttatgctttaatggaagaggagaacgagcttaccaagattggcttcatcgataccgctgatggcgactttctggatctccacggtcgcaatccgttc

SEQ ID NO: 43808 - DNA, 99 bp, synthetic construct
  source 1..99: mol_type = other DNA
gagcgggacaccggcactgaagcacaggggagcgtgacgttctccatcgccgaggcactcacatcggaaatgatcattccctccgacacggtcgtcgtg

SEQ ID NO: 43809 - DNA, 93 bp, synthetic construct
  source 1..93: mol_type = other DNA
acattcatcgataccatcattgatgccgagattttggactctgaaggcaacccattcaccgaactgtccgtgaatgacgacgagtgcatcaag

SEQ ID NO: 43810 - DNA, 45 bp, synthetic construct
  source 1..45: mol_type = other DNA
ccctcgcaagtttttatccccctgttcatgaagatctttggaggc

SEQ ID NO: 43811 - DNA, 36 bp, synthetic construct
  source 1..36: mol_type = other DNA
ccccagatcgcacaatatttcaacgtggacatcacc

SEQ ID NO: 43812 - DNA, 36 bp, synthetic construct
  source 1..36: mol_type = other DNA
gagttcctgaatagcctgaccaacatcttcggaacc

SEQ ID NO: 43813 - DNA, 51 bp, synthetic construct
  source 1..51: mol_type = other DNA
cctgctaacgtgttcatccccctgttcatgaaagtcttctccctcatttgt

SEQ ID NO: 43814 - DNA, 42 bp, synthetic construct
  source 1..42: mol_type = other DNA
tttgacctggacaagttccactatactttctccaaccctaac

SEQ ID NO: 43815 - DNA, 69 bp, synthetic construct
  source 1..69: mol_type = other DNA
atcacccctgcccatatgagcatttccgacttcggtcaaggtctcctgccgatcagtcactctgcatat

SEQ ID NO: 43816 - DNA, 45 bp, synthetic construct
  source 1..45: mol_type = other DNA
atgaccagctaccccgtacaaaatattttcgtcggaaataacttt

SEQ ID NO: 43817 - DNA, 96 bp, synthetic construct
  source 1..96: mol_type = other DNA
atgatggactttaacacatctaccaactactggtggagcctgcctatgttcggagtgatggaaggctccatcggtttttcgtttagcctggaaaac

SEQ ID NO: 43818 - DNA, 60 bp, synthetic construct
  source 1..60: mol_type = other DNA
ttcttccgacaaattctatggggccacctcggcatcaactccttctacaactccccctat

SEQ ID NO: 43819 - DNA, 30 bp, synthetic construct
  source 1..30: mol_type = other DNA
tcttcacaagcggagtttacccacccattc

SEQ ID NO: 43820 - DNA, 297 bp, synthetic construct
  source 1..297: mol_type = other DNA
cgggtcagcggcatgaccatcttttccccgctcctgcgcctcggccgaattgaacagtactccctgagctctatcaagacagtgctgaacaacatccagatgattggccactctgccaaagcctcctactggggcgctgagggcaccgccttcgctgaaggttatattaccctgcctatgcaactagtactctttttcggcctgccgtttccaatgttcttcggcatcctagtaaaccagaaggacacaatcgactacatgctgcctgggatcttcggatacgggttcgatttcggg

SEQ ID NO: 43821 - DNA, 33 bp, synthetic construct
  source 1..33: mol_type = other DNA
gaatacgcaactagcatgggtagtgccgcctct

SEQ ID NO: 43822 - DNA, 30 bp, synthetic construct
  source 1..30: mol_type = other DNA
ctttatgctgtggaagttaatttgactggc

SEQ ID NO: 43823 - DNA, 45 bp, synthetic construct
  source 1..45: mol_type = other DNA
cctagcaaagtgttcattcccctgttcatgaagatctttggaggc

SEQ ID NO: 43824 - DNA, 33 bp, synthetic construct
  source 1..33: mol_type = other DNA
cagatttctgaatacttcaacaccacaatcgct

SEQ ID NO: 43825 - DNA, 30 bp, synthetic construct
  source 1..30: mol_type = other DNA
ttcttgcaaaccgtctgccacatctacacc

SEQ ID NO: 43826 - DNA, 33 bp, synthetic construct
  source 1..33: mol_type = other DNA
accgaatatgcatcatccctgggaacctcagca

SEQ ID NO: 43827 - DNA, 30 bp, synthetic construct
  source 1..30: mol_type = other DNA
ctttatgccgttgagaccgatctaactgct

SEQ ID NO: 43828 - DNA, 45 bp, synthetic construct
  source 1..45: mol_type = other DNA
cccagcaaagtgttcatacctctgttcatgaagatctttggaggc

SEQ ID NO: 43829 - DNA, 33 bp, synthetic construct
  source 1..33: mol_type = other DNA
agctacagcatcaccgtgctgggcaccgacgcc

SEQ ID NO: 43830 - DNA, 30 bp, synthetic construct
  source 1..30: mol_type = other DNA
ccctacgggatcgagctgggcatggaaaca

SEQ ID NO: 43831 - DNA, 45 bp, synthetic construct
  source 1..45: mol_type = other DNA
cctagcaaagtgtttatacccctgttcatgaaaatcttcggcgga

SEQ ID NO: 43832 - DNA, 237 bp, synthetic construct
  source 1..237: mol_type = other DNA
tctatgatctatgacaccaactactgggctctggtcatccggaatatcgactccggcaacgggctttatggcctggacgggtacttctacacacctgtctggggctacctcctggctctgggcgaatggttcaacgacagttttctgaacctcggcgaaagcgccgtccgcgtatcggaaattgtctacttcgagaacggagatcaccagaccacagccatgattacctccgtagcg

SEQ ID NO: 43833 - DNA, 84 bp, synthetic construct
  source 1..84: mol_type = other DNA
atcagtgacggcacggtcggagagtgctttcgattcattactgatcggatgggcattagcttcggcgattcagctggttcacgg

SEQ ID NO: 43834 - DNA, 45 bp, synthetic construct
  source 1..45: mol_type = other DNA
cctagcaaagtattcatccccctgttcatgaagattttcgggggc

SEQ ID NO: 43835 - DNA, 33 bp, synthetic construct
  source 1..33: mol_type = other DNA
acagaatatgctaccactatggggagtactgcc

SEQ ID NO: 43836 - DNA, 30 bp, synthetic construct
  source 1..30: mol_type = other DNA
ctctacgctgtcgaagtgaacctcactgga

SEQ ID NO: 43837 - DNA, 36 bp, synthetic construct
  source 1..36: mol_type = other DNA
ccccagatcgcccaatattttaacatcggcatcaat

SEQ ID NO: 43838 - DNA, 33 bp, synthetic construct
  source 1..33: mol_type = other DNA
caattcttacaaaccatcacccacatcatcgac

SEQ ID NO: 43839 - DNA, 39 bp, synthetic construct
  source 1..39: mol_type = other DNA
ggcatgtttgggaccgacatcgccctgacaaacttcaat

SEQ ID NO: 43840 - DNA, 69 bp, synthetic construct
  source 1..69: mol_type = other DNA
ctgacgccatctagcatcagcgtggagattctgggccagagtctgctccctatctcccactctggatac

SEQ ID NO: 43841 - DNA, 54 bp, synthetic construct
  source 1..54: mol_type = other DNA
ccacctatgaccgcctaccccgtacaaatggtttatagcggcaacaacttccag

SEQ ID NO: 43842 - DNA, 96 bp, synthetic construct
  source 1..96: mol_type = other DNA
tatatcgacctcacatccaaggcctacatttggtggtctctgcccatcgagggcatcatgaagaacagcctgttcaccggcgtctacgccgagaat

SEQ ID NO: 43843 - DNA, 72 bp, synthetic construct
  source 1..72: mol_type = other DNA
aataccatagtctccaatctgctcctgtggaagactctggacctgccttcctactataattgcccctacctt

SEQ ID NO: 43844 - DNA, 51 bp, synthetic construct
  source 1..51: mol_type = other DNA
ggcattaacggcaaccagttgataccagtgtcaaatagcgccaccctgaca

SEQ ID NO: 43845 - DNA, 48 bp, synthetic construct
  source 1..48: mol_type = other DNA
tgcattgggaccgtggacatcagccaggccatactcatctctggactg

SEQ ID NO: 43846 - DNA, 36 bp, synthetic construct
  source 1..36: mol_type = other DNA
accggcatcgccgatgacttcggggtgtccgagtct

SEQ ID NO: 43847 - DNA, 36 bp, synthetic construct
  source 1..36: mol_type = other DNA
cccttcatgctggacgccgttggcatgagccctgag

SEQ ID NO: 43848 - DNA, 45 bp, synthetic construct
  source 1..45: mol_type = other DNA
cctagcaaagtatttatacccctgttcatgaagatctttggcggc

SEQ ID NO: 43849 - DNA, 33 bp, synthetic construct
  source 1..33: mol_type = other DNA
actgaatatgcgaccgcaatgggatcaacagcc

SEQ ID NO: 43850 - DNA, 30 bp, synthetic construct
  source 1..30: mol_type = other DNA
ctctacgctgtcgaagtgaatcttactgcc

SEQ ID NO: 43851 - DNA, 45 bp, synthetic construct
  source 1..45: mol_type = other DNA
cctagcaaagtgtttatacccctgttcatgaagatctttggcggc

SEQ ID NO: 43852 - DNA, 33 bp, synthetic construct
  source 1..33: mol_type = other DNA
cagatcgcaactgcggccccattaaacagcaat

SEQ ID NO: 43853 - DNA, 51 bp, synthetic construct
  source 1..51: mol_type = other DNA
ggcctcaatggatatcacctgattcccgccaagaattccgcttccctgaca

SEQ ID NO: 43854 - DNA, 51 bp, synthetic construct
  source 1..51: mol_type = other DNA
gtgtctataggcacagctgacatctcccaagcgattcttctgtccggactc

SEQ ID NO: 43855 - DNA, 51 bp, synthetic construct
  source 1..51: mol_type = other DNA
ggcattaacggcaaccacctgatcccggtggctaactctgctgccctgacc

SEQ ID NO: 43856 - DNA, 48 bp, synthetic construct
  source 1..48: mol_type = other DNA
tgcattggcaccgtggacatcagccaggccatcctgatatctggactg

SEQ ID NO: 43857 - DNA, 30 bp, synthetic construct
  source 1..30: mol_type = other DNA
gaatacgccaccgcactgggaagcacagcc

SEQ ID NO: 43858 - DNA, 30 bp, synthetic construct
  source 1..30: mol_type = other DNA
ctttacgctgtcgaagccgatctcgttgga

SEQ ID NO: 43859 - DNA, 30 bp, synthetic construct
  source 1..30: mol_type = other DNA
agcgtcgtgatcggcgaccttgttcctggc

SEQ ID NO: 43860 - DNA, 45 bp, synthetic construct
  source 1..45: mol_type = other DNA
cctagcaaagtgttcatccccctgttcatgaagatctttggaatg

SEQ ID NO: 43861 - DNA, 36 bp, synthetic construct
  source 1..36: mol_type = other DNA
accgaatacgcgacgaccatgagtacaacaggggct

SEQ ID NO: 43862 - DNA, 30 bp, synthetic construct
  source 1..30: mol_type = other DNA
ttatacgcggtcgaggtcaatttgactgcc

SEQ ID NO: 43863 - DNA, 36 bp, synthetic construct
  source 1..36: mol_type = other DNA
tcccagatcagcgagcacttcgccacctctattgct

SEQ ID NO: 43864 - DNA, 36 bp, synthetic construct
  source 1..36: mol_type = other DNA
tacttcctccaaaccgtcagccacgtgtacacctat

SEQ ID NO: 43865 - DNA, 45 bp, synthetic construct
  source 1..45: mol_type = other DNA
ccaagtcaagtgtttatacccctgttcatgcgcatctttggcgga

SEQ ID NO: 43866 - DNA, 33 bp, synthetic construct
  source 1..33: mol_type = other DNA
accgaatatgctacttctatgggctcaaccgca

SEQ ID NO: 43867 - DNA, 30 bp, synthetic construct
  source 1..30: mol_type = other DNA
ctttacgcggctgaagtgaacatgtctggc

SEQ ID NO: 43868 - DNA, 45 bp, synthetic construct
  source 1..45: mol_type = other DNA
cctagcaaggttttcatccctctgttcatgaagattttcggaggc

SEQ ID NO: 43869 - DNA, 57 bp, synthetic construct
  source 1..57: mol_type = other DNA
ttctacccaagcatgtccgccacctataagctgccctcttggaaccctgcttggagc

SEQ ID NO: 43870 - DNA, 33 bp, synthetic construct
  source 1..33: mol_type = other DNA
tttttcctaaattccctaggcatcccctactct

SEQ ID NO: 43871 - DNA, 33 bp, synthetic construct
  source 1..33: mol_type = other DNA
aatataatcgagaacataggcggtaacatctct

SEQ ID NO: 43872 - DNA, 45 bp, synthetic construct
  source 1..45: mol_type = other DNA
cccagccaagtattcattcctctgttcatgaagattttcgggggc

SEQ ID NO: 43873 - DNA, 30 bp, synthetic construct
  source 1..30: mol_type = other DNA
ttctttctgaagaacctgggcatcagctac

SEQ ID NO: 43874 - DNA, 33 bp, synthetic construct
  source 1..33: mol_type = other DNA
aacatcatggagaacatcggcggcaatatctcc

SEQ ID NO: 43875 - DNA, 45 bp, synthetic construct
  source 1..45: mol_type = other DNA
cccagccaagtcttcattcctctctttatgaagatctttggcggc

SEQ ID NO: 43876 - DNA, 33 bp, synthetic construct
  source 1..33: mol_type = other DNA
tcccagatctctgagtacttcaacaccagcatt

SEQ ID NO: 43877 - DNA, 36 bp, synthetic construct
  source 1..36: mol_type = other DNA
ctgtttcttcaagtagtctcacatgtctacacctat

SEQ ID NO: 43878 - DNA, 45 bp, synthetic construct
  source 1..45: mol_type = other DNA
cccagcaaggtcttcatcccactctttatgaaaatcttcggtggc

SEQ ID NO: 43879 - DNA, 45 bp, synthetic construct
  source 1..45: mol_type = other DNA
cctagcaaagtctttatacccctgttcatgaaaatcttcggtggc

SEQ ID NO: 43880 - DNA, 33 bp, synthetic construct
  source 1..33: mol_type = other DNA
tacttcctcaagaacctcggcctgagctatgtt

SEQ ID NO: 43881 - DNA, 33 bp, synthetic construct
  source 1..33: mol_type = other DNA
aatatcatcgagaacgttggtggcaacatcagt

SEQ ID NO: 43882 - DNA, 33 bp, synthetic construct
  source 1..33: mol_type = other DNA
cagatcgcctctgctagttctctgaatctaagc

SEQ ID NO: 43883 - DNA, 54 bp, synthetic construct
  source 1..54: mol_type = other DNA
ctgctcgacaacacaagcggcgtgaccatcttctctagttccaaggctcttagt

SEQ ID NO: 43884 - DNA, 51 bp, synthetic construct
  source 1..51: mol_type = other DNA
gtgggaatcgggaccgataacatcagccattcgatcctgctgatgggcctc

SEQ ID NO: 43885 - DNA, 36 bp, synthetic construct
  source 1..36: mol_type = other DNA
cccaagatcttcaaccctgacgtgaccagctacacc

SEQ ID NO: 43886 - DNA, 156 bp, synthetic construct
  source 1..156: mol_type = other DNA
tttgactggctggggttcggacctgccgcctcctactacctcctggctgatcagttcctcggcggtaactgggactacgacacctacggcatgaacctgccacctctcgtgatcccaatcctgatgctgattaagagcttgagtcaggactacaat

SEQ ID NO: 43887 - DNA, 81 bp, synthetic construct
  source 1..81: mol_type = other DNA
ctccacctggaggaagtgactgccgtgactgcataccttggcgggatgcaggcgtttgggttctccccttacggcacttac

SEQ ID NO: 43888 - DNA, 237 bp, synthetic construct
  source 1..237: mol_type = other DNA
ggaagcgacgtgaacttcaccgtctatgtcgacaagaccgaggattacatccgggagttcaaggggatcagcgagtactttctcctgtctaaagtctttaccaacggatgggtcatcggcgacggcggctgggacgagtccgctactaacgaggccatcgaagctattgccgccgagatggtctataacgagcacattgacgaggaatcccttaagttcatcctggacctgaagaag

SEQ ID NO: 43889 - DNA, 162 bp, synthetic construct
  source 1..162: mol_type = other DNA
tgtgtcgtcacctataaaggctccgacattttcgagatgggcgtactcgccgacggggactacattgtttgtccaaacggcgtggactactggcgacacggccatctggacaatatcgatgatgttgtcaaaaagaatgtttatctcgcgtcctccgatcct

SEQ ID NO: 43890 - DNA, 285 bp, synthetic construct
  source 1..285: mol_type = other DNA
cacgtcaagctcaacgagaatgggttcagtgacgacgtttatgtctctaacgaggatggcagcctagtgaatcagaccaattacatctatgccgattgcggcacatactatgcactgaataagacaatagtcagtaaagacgacattctcgaatacggtagtgactacatttacactgcgcaatttgtcaaccgggatggcgacgtgctggccaacaagatagtccaggttattgtcaacggcaagtcctacgaatacgttactgacaacgacgggttcatcaat

SEQ ID NO: 43891 - DNA, 249 bp, synthetic construct
  source 1..249: mol_type = other DNA
atcgtggtgaccaatcctatcaccggcgacgtagtcaagaacactatcaccgtcctcccaaactctgtcccgagcacggacagcaacgaatccgaggacgtcgggctcgtcaacgtggtggataagaaccaagtatctacgttcaagttcgacaagcagacaagccccgtgaagaacaactctgtaaacatcagcgtgtccgccatacaaatctcatccacactctgggagtttatcattgaactcctc

SEQ ID NO: 43892 - DNA, 30 bp, synthetic construct
  source 1..30: mol_type = other DNA
cccctgctcgccggtatctggattctgagc

SEQ ID NO: 43893 - DNA, 36 bp, synthetic construct
  source 1..36: mol_type = other DNA
tcccagatttctgagtacttcaacaccagcatcgcc

SEQ ID NO: 43894 - DNA, 36 bp, synthetic construct
  source 1..36: mol_type = other DNA
tactttttacaaacggtttcacacatctatacctac

SEQ ID NO: 43895 - DNA, 30 bp, synthetic construct
  source 1..30: mol_type = other DNA
tactatggagagctgcctgcacccaatctt

SEQ ID NO: 43896 - DNA, 51 bp, synthetic construct
  source 1..51: mol_type = other DNA
ctgggcggcatccctctgttctccgctacactgaaggcccaggccgccagc

SEQ ID NO: 43897 - DNA, 252 bp, synthetic construct
  source 1..252: mol_type = other DNA
gtgcaggtcattagttggcagcactggcacctcaatccaattgagctggtttcctaccgggcggcctttaccctgaacatactcgctgctgccatagagaagcagttctctaccatgggaaatctattctacgctaccctcactggctttttcacacatactgacccgcgggtcctggtcggcgttgcgaccataaacaggaaccattccattacctctacaatctttggccccgccttgctggattttggc

SEQ ID NO: 43898 - DNA, 189 bp, synthetic construct
  source 1..189: mol_type = other DNA
atcgccgtgttcgctaacatgttctttagctcgcaaaacctgtcactcacgtccggaattgacctcaatgctgccattgctacattgatacaagccttgccgatcgagctgcagggcctggtcaagccttatgtcggcactctcaccgaaggtatccatcaagcactaacctacgtgttcggctatgcc

SEQ ID NO: 43899 - DNA, 30 bp, synthetic construct
  source 1..30: mol_type = other DNA
gaatatgcaacgagcatgggttcctctgcc

SEQ ID NO: 43900 - DNA, 30 bp, synthetic construct
  source 1..30: mol_type = other DNA
ctatacgcttcggaagtgaacctcactgct

SEQ ID NO: 43901 - DNA, 57 bp, synthetic construct
  source 1..57: mol_type = other DNA
tattacctgggcttccctctgaaacccaatgccgtgctcaacatgaacaaggatgcc

SEQ ID NO: 43902 - DNA, 48 bp, synthetic construct
  source 1..48: mol_type = other DNA
cccagccaagtattctttcctctctttgtgcaactcttcggaggcggc

SEQ ID NO: 43903 - DNA, 57 bp, synthetic construct
  source 1..57: mol_type = other DNA
cggaaggtcgtgctgaaattcaacggcaagacatacgagaaaaccagcaacaagaat

SEQ ID NO: 43904 - DNA, 111 bp, synthetic construct
  source 1..111: mol_type = other DNA
ctccggatctaccttaaagattcttctaaaaaggctatttcacacaaaaagatgaccatcaagatagggtcccgcaagtacattaagaggacctcctccgagggtatcatc

SEQ ID NO: 43905 - DNA, 54 bp, synthetic construct
  source 1..54: mol_type = other DNA
aagagctacaaatactccgaggttagagacgtccagaacaccggctatacctgt

SEQ ID NO: 43906 - DNA, 45 bp, synthetic construct
  source 1..45: mol_type = other DNA
gagcggtacctggccaagctgagccagaccgacaggaagggaact

SEQ ID NO: 43907 - DNA, 30 bp, synthetic construct
  source 1..30: mol_type = other DNA
ggcgaagtctacacggaaaggaccacacag

SEQ ID NO: 43908 - DNA, 30 bp, synthetic construct
  source 1..30: mol_type = other DNA
gcctacgtcggtctataccacactggtaat

SEQ ID NO: 43909 - DNA, 36 bp, synthetic construct
  source 1..36: mol_type = other DNA
tcccagatcagcgagtacttcaacacctccattagc

SEQ ID NO: 43910 - DNA, 33 bp, synthetic construct
  source 1..33: mol_type = other DNA
ttcttacaagctgttagccagatctacacctat

SEQ ID NO: 43911 - DNA, 84 bp, synthetic construct
  source 1..84: mol_type = other DNA
tctctcggcaccgtgctgaagacaccatccgttagcattctgatccccggggtcgaggtgccgggcagccccatcttcattcca

SEQ ID NO: 43912 - DNA, 69 bp, synthetic construct
  source 1..69: mol_type = other DNA
taccacggcgacctgggactgagcatgttcgggctcaccgccctgttcaagacatttctgctccaacac

SEQ ID NO: 43913 - DNA, 75 bp, synthetic construct
  source 1..75: mol_type = other DNA
gtgtttcatcaagggttccaacgaacgctgttcctccatcactataacttttacacgcgttcatacatggacgtg

SEQ ID NO: 43914 - DNA, 36 bp, synthetic construct
  source 1..36: mol_type = other DNA
tctcagatttccgagtactttcacacttctatttcc

SEQ ID NO: 43915 - DNA, 36 bp, synthetic construct
  source 1..36: mol_type = other DNA
tatttcctacaaacagtgtcccaaatctacacctac

SEQ ID NO: 43916 - DNA, 54 bp, synthetic construct
  source 1..54: mol_type = other DNA
gacatgtttatccgaccattctttcaaataattctgatgggcagctcaaaggga

SEQ ID NO: 43917 - DNA, 183 bp, synthetic construct
  source 1..183: mol_type = other DNA
attcgcctcgtgttgaacctcccaatcaacagcaccttcatcgtcgtgaaccccagcatgacatccacctctatcatgcattcgcacgtctttaagagtatcttcggattcatcgcctcttccatcatccacaatattcctcatggaatccacgtcggcaactccctggagcattacatccca

SEQ ID NO: 43918 - DNA, 225 bp, synthetic construct
  source 1..225: mol_type = other DNA
ttcgcagttgcccaaacggcctattacgaggtcgacatcctgaatagtcacgatagcattaacctcgaggactacggcgtgatctccgtggtggatgagaacaaccggtctatctactatttgtctagtaaccataatgaaatgattctgttgaattctctggccaacaggctgcattctaaatgcgactcctttagcatcacatggaatgcttactcatatctt

SEQ ID NO: 43919 - DNA, 36 bp, synthetic construct
  source 1..36: mol_type = other DNA
tctcagatcagcgagtacttcaacacctccattgcc

SEQ ID NO: 43920 - DNA, 36 bp, synthetic construct
  source 1..36: mol_type = other DNA
tattttttgcaaacggtttcccacatctacacacac

SEQ ID NO: 43921 - DNA, 45 bp, synthetic construct
  source 1..45: mol_type = other DNA
ccgagtcaagtgttcattcctctgttcatgcaaatcttcggcggc

SEQ ID NO: 43922 - DNA, 45 bp, synthetic construct
  source 1..45: mol_type = other DNA
cccagccaagttttttttcctctgttcatgaagatctttggcggg

SEQ ID NO: 43923 - DNA, 36 bp, synthetic construct
  source 1..36: mol_type = other DNA
agccagatctccacatacttcaacacctctattgcc

SEQ ID NO: 43924 - DNA, 36 bp, synthetic construct
  source 1..36: mol_type = other DNA
tacttcttgcaaacagtttctcatatctacacatat

SEQ ID NO: 43925 - DNA, 45 bp, synthetic construct
  source 1..45: mol_type = other DNA
attccacaacccctgaccccggaatggggagcctttttcgctaac

SEQ ID NO: 43926 - DNA, 45 bp, synthetic construct
  source 1..45: mol_type = other DNA
ataccaactgctgtcaacggtgacttggcttctctcctggatctg

SEQ ID NO: 43927 - DNA, 33 bp, synthetic construct
  source 1..33: mol_type = other DNA
tctcagatcagcgagtacttcaacacctccatc

SEQ ID NO: 43928 - DNA, 36 bp, synthetic construct
  source 1..36: mol_type = other DNA
ctgtttttacaactggtttcacacatctatacctac

SEQ ID NO: 43929 - DNA, 33 bp, synthetic construct
  source 1..33: mol_type = other DNA
cagatcgccgaatacttcaacaccagcattgcc

SEQ ID NO: 43930 - DNA, 36 bp, synthetic construct
  source 1..36: mol_type = other DNA
ctgtttctacaagtcgtatctcatgtgtacacctat

SEQ ID NO: 43931 - DNA, 276 bp, synthetic construct
  source 1..276: mol_type = other DNA
ttccacgggctggagcagggggttgatttgaaaggcggaagtcaggccgaacttcagctgctgggaagtgtaaccccctctgaactcgaggacaccctggacgccaagctgaacaccaacaatattaaggtgactaacaacggcaataataaggtgacagtggagctcgagaataatataaactctagtacctttacatccgccatcaacggcaaggctaaagtaattggctacaacgagatcggacctgtcctgtccgaggaagctatgggtcag

SEQ ID NO: 43932 - DNA, 30 bp, synthetic construct
  source 1..30: mol_type = other DNA
atcctgatgcctgaggcaaccacattgagt

SEQ ID NO: 43933 - DNA, 45 bp, synthetic construct
  source 1..45: mol_type = other DNA
cctagcaaggtttttattcccctgtttttgcaaatcttcggaggc

SEQ ID NO: 43934 - DNA, 36 bp, synthetic construct
  source 1..36: mol_type = other DNA
tcccagatctctgagtacttcaacaccagcattgcc

SEQ ID NO: 43935 - DNA, 36 bp, synthetic construct
  source 1..36: mol_type = other DNA
tacttcctgcaatccgtatcgcatatctatacctac

SEQ ID NO: 43936 - DNA, 33 bp, synthetic construct
  source 1..33: mol_type = other DNA
cgcatccggaagagcaggcgcaatagaagaagc

SEQ ID NO: 43937 - DNA, 54 bp, synthetic construct
  source 1..54: mol_type = other DNA
aagctgagccagcctgctgcacctaccatgtccgccgtgctcaacctgaacatc

SEQ ID NO: 43938 - DNA, 39 bp, synthetic construct
  source 1..39: mol_type = other DNA
atggctggagctggcacctgggagggcctgttcgaacac

SEQ ID NO: 43939 - DNA, 45 bp, synthetic construct
  source 1..45: mol_type = other DNA
cccagccaagttttcatacctctgtttatgaagatctttggcggc

SEQ ID NO: 43940 - DNA, 36 bp, synthetic construct
  source 1..36: mol_type = other DNA
tcccagatcagcgagtacttcaacaccagcattagc

SEQ ID NO: 43941 - DNA, 33 bp, synthetic construct
  source 1..33: mol_type = other DNA
tactttcttcaaactgtatcacaaatccatacc

SEQ ID NO: 43942 - DNA, 39 bp, synthetic construct
  source 1..39: mol_type = other DNA
ccccaggtggcccactacttcaacatcaccattgaccag

SEQ ID NO: 43943 - DNA, 36 bp, synthetic construct
  source 1..36: mol_type = other DNA
tccgagttcctgcaatcggttacccacatcatcaac

SEQ ID NO: 43944 - DNA, 36 bp, synthetic construct
  source 1..36: mol_type = other DNA
tctcagattagtcagtacttctcgacgtccatcgcc

SEQ ID NO: 43945 - DNA, 36 bp, synthetic construct
  source 1..36: mol_type = other DNA
tacttcttacaaaccgtttcgcatatctacacatat

SEQ ID NO: 43946 - DNA, 33 bp, synthetic construct
  source 1..33: mol_type = other DNA
agcggcgaggcgatctacatgattttcaacgtg

SEQ ID NO: 43947 - DNA, 126 bp, synthetic construct
  source 1..126: mol_type = other DNA
gttagcctgctgcctctccatccttactccttcgctatggctagcggggttggcagcgcctccatgaacgccgccggcctcgtccccctagtgaacctgtacccaaatatgacaacccagcttgag

SEQ ID NO: 43948 - DNA, 51 bp, synthetic construct
  source 1..51: mol_type = other DNA
cccggcgtacctactgctgatttcgtgacgcattacgcgtcccaagttgac

SEQ ID NO: 43949 - DNA, 120 bp, synthetic construct
  source 1..120: mol_type = other DNA
attggggactacaagatcgatttcttccggtgctttagcgtagtttgggaccacctaacgggtaacgtcggcacctccgaggaggccaggctgcaggactacgtgatctggaacttgcgc

SEQ ID NO: 43950 - DNA, 72 bp, synthetic construct
  source 1..72: mol_type = other DNA
ctttggggcgacccaaactccctgtctgctatcctcgaatggcaagttggcagcataggcgggatctcatgg

SEQ ID NO: 43951 - DNA, 36 bp, synthetic construct
  source 1..36: mol_type = other DNA
taccaccttcaatacataaagggcttcgactctcag

SEQ ID NO: 43952 - DNA, 57 bp, synthetic construct
  source 1..57: mol_type = other DNA
ttcgtcatgggcgacgtgcctatcgtggagcagtactaccccctgttgatatcgtca

SEQ ID NO: 43953 - DNA, 78 bp, synthetic construct
  source 1..78: mol_type = other DNA
aagaccctgctcgacacaccgaccgtgtcgctgatcgtgcccggggtcgaggtgcccgggtctccaattttcatccct

SEQ ID NO: 43954 - DNA, 42 bp, synthetic construct
  source 1..42: mol_type = other DNA
atacctcaaccgctaacccctgaatggggagcttttttctca

SEQ ID NO: 43955 - DNA, 45 bp, synthetic construct
  source 1..45: mol_type = other DNA
atccccactgccgtgaacggcgacctggctagtctgctggaactc

SEQ ID NO: 43956 - DNA, 78 bp, synthetic construct
  source 1..78: mol_type = other DNA
aagaccctgatggacgctccgagcgtgtctctcgtcgtgcctggcgtcgaggtgcctgggagcccaatcttcattccc

SEQ ID NO: 43957 - DNA, 30 bp, synthetic construct
  source 1..30: mol_type = other DNA
cagatctccgactacttcaacatcagcatc

SEQ ID NO: 43958 - DNA, 36 bp, synthetic construct
  source 1..36: mol_type = other DNA
tactttttacaaaccgttagccacgtgtacacatat

SEQ ID NO: 43959 - DNA, 78 bp, synthetic construct
  source 1..78: mol_type = other DNA
aagacactcatggacgcccctactgtctcgctggtcgtacctggagtagaggtccccgggtctcccatcttcattcct

SEQ ID NO: 43960 - DNA, 78 bp, synthetic construct
  source 1..78: mol_type = other DNA
aagacactgatggacgcccctaccgtctcattggttgtaccgggtgtcgaagtgcccggctccccaatcttcattccc

SEQ ID NO: 43961 - DNA, 36 bp, synthetic construct
  source 1..36: mol_type = other DNA
ccccagatagctcaatatttcaatgtcgggatcgac

SEQ ID NO: 43962 - DNA, 36 bp, synthetic construct
  source 1..36: mol_type = other DNA
gagttcctacaaacagtcacccacatcgtcggcttg

SEQ ID NO: 43963 - DNA, 42 bp, synthetic construct
  source 1..42: mol_type = other DNA
tctcagactttgcaagatgcattcggagttggatctgcctca

SEQ ID NO: 43964 - DNA, 39 bp, synthetic construct
  source 1..39: mol_type = other DNA
tcttattatcaaaattgctgtggcttctccaagagcgac

SEQ ID NO: 43965 - DNA, 69 bp, synthetic construct
  source 1..69: mol_type = other DNA
acctcctgctctgattcgagtgccgatggcagcagcttccggacacaccggtcacgctcttgtatccag

SEQ ID NO: 43966 - DNA, 90 bp, synthetic construct
  source 1..90: mol_type = other DNA
ggccccgagacaaacggcctgaataggttcatctccggattttactggtttatctcccgatctgggctggagattaccctctactcaaca

SEQ ID NO: 43967 - DNA, 81 bp, synthetic construct
  source 1..81: mol_type = other DNA
ctggaacagttatttgtcactccgcaagccgcactgatcataccgggcgtggacgtgcccggctcccctatctacatccct

SEQ ID NO: 43968 - DNA, 30 bp, synthetic construct
  source 1..30: mol_type = other DNA
tccaacaagaacaccagcttcaatcacgat

SEQ ID NO: 43969 - DNA, 42 bp, synthetic construct
  source 1..42: mol_type = other DNA
attcctcaaccgttaagtcccgaatggggcgccttctttagc

SEQ ID NO: 43970 - DNA, 45 bp, synthetic construct
  source 1..45: mol_type = other DNA
attcccatcgccaccaatggcaaccttgagtctctcttcgaactg

SEQ ID NO: 43971 - DNA, 48 bp, synthetic construct
  source 1..48: mol_type = other DNA
atggccgacgggatcgcaaccctcattagcgctctgggccttacaccg

SEQ ID NO: 43972 - DNA, 36 bp, synthetic construct
  source 1..36: mol_type = other DNA
agccacatcgtggtggacctgaacaccgatgtcagc

SEQ ID NO: 43973 - DNA, 42 bp, synthetic construct
  source 1..42: mol_type = other DNA
ctgatcatcctggccatttttatttttacggcatcgatctgc

SEQ ID NO: 43974 - DNA, 51 bp, synthetic construct
  source 1..51: mol_type = other DNA
atggccgacgagattgcaacactgatcagcagtgtcggcctaactcacgaa

SEQ ID NO: 43975 - DNA, 48 bp, synthetic construct
  source 1..48: mol_type = other DNA
atggctgacgagattgccaccctgatcacgcaattgggactcagcaac

SEQ ID NO: 43976 - DNA, 51 bp, synthetic construct
  source 1..51: mol_type = other DNA
atggccgacgagattgctaccattatatctagcctcggcctgagcaatgag

SEQ ID NO: 43977 - DNA, 51 bp, synthetic construct
  source 1..51: mol_type = other DNA
atggctgaggacatagccacattaataagccaattgaacatcgacccccag

SEQ ID NO: 43978 - DNA, 48 bp, synthetic construct
  source 1..48: mol_type = other DNA
atggctaacgagattgccaccttaattagttctatgggactcacacag

SEQ ID NO: 43979 - DNA, 48 bp, synthetic construct
  source 1..48: mol_type = other DNA
atggccgacggcattgctacacttatatccgccttggggttgacacag

SEQ ID NO: 43980 - DNA, 48 bp, synthetic construct
  source 1..48: mol_type = other DNA
atggccgacgagatcgctagcctgctttcaagtctcggcctttctgac

SEQ ID NO: 43981 - DNA, 57 bp, synthetic construct
  source 1..57: mol_type = other DNA
ggcgtagaccagttcattcggcctttcacacaaccaattctgatgggcagtagcaag

SEQ ID NO: 43982 - DNA, 183 bp, synthetic construct
  source 1..183: mol_type = other DNA
ctgcggaacaacctcggcatcggctggaatacaatcctcgtcgccatgaacccaacctacacatctacctctatcctgcattcccacctgtacaagtccatcttcggcgtgatactaggtatcttcctgtcacacattcctgccggaattcatactgggtcaagcctgagcccctatacaccc

SEQ ID NO: 43983 - DNA, 231 bp, synthetic construct
  source 1..231: mol_type = other DNA
tccttctatggggccgctcccgactgctacgagctgactgtgtacaacggacatgatatcgacctggagaacaattatacggtcatcgatacgatcaaaaatgggaataaaaccatcatctatctgtccaatgagtacaatgaaatggaactcctgaatggcctcgccatacaattgaatggcaaatgcgattggtactccctgtcctggaatatctactcatatttgaac

SEQ ID NO: 43984 - DNA, 87 bp, synthetic construct
  source 1..87: mol_type = other DNA
cgggacgaaaccgatcccgaggggttcataagcaacctgttctggttcctggacacaatggggctcggactggacatgtatagtgtt

SEQ ID NO: 43985 - DNA, 48 bp, synthetic construct
  source 1..48: mol_type = other DNA
atggccgacgagattgctaccctgattagtagcctgggcatcacaccc

SEQ ID NO: 43986 - DNA, 48 bp, synthetic construct
  source 1..48: mol_type = other DNA
atggctgacgagctggcctccctcatcacaagcttcggctttacccag

SEQ ID NO: 43987 - DNA, 51 bp, synthetic construct
  source 1..51: mol_type = other DNA
atggcagacgagatcgccaccataataagttctctaggactctctaacgaa

SEQ ID NO: 43988 - DNA, 42 bp, synthetic construct
  source 1..42: mol_type = other DNA
gctcaaccgccggcacctacctgggacggagttctgagtctg

SEQ ID NO: 43989 - DNA, 42 bp, synthetic construct
  source 1..42: mol_type = other DNA
accatggcctccggtggcacatggcaggctctgttcgacctc

SEQ ID NO: 43990 - DNA, 33 bp, synthetic construct
  source 1..33: mol_type = other DNA
ggacctcagatcggaattgagcctctcttcacc

SEQ ID NO: 43991 - DNA, 48 bp, synthetic construct
  source 1..48: mol_type = other DNA
atggctgacggcatcgccaccctgattagctccgtcggattgacacag

SEQ ID NO: 43992 - DNA, 48 bp, synthetic construct
  source 1..48: mol_type = other DNA
atggctgacggcatcgccaccctgattagcagcgtcggtttaacacag

SEQ ID NO: 43993 - DNA, 48 bp, synthetic construct
  source 1..48: mol_type = other DNA
atggaggagtcaatcaccgggctaatatcctcctttggcttctctcca

SEQ ID NO: 43994 - DNA, 48 bp, synthetic construct
  source 1..48: mol_type = other DNA
atggccgacggcattgctactttaataagtagtgttggactcacacag

SEQ ID NO: 43995 - DNA, 48 bp, synthetic construct
  source 1..48: mol_type = other DNA
atggccgacgagctggctagcctgataactgccctaggactcacacag

SEQ ID NO: 43996 - DNA, 129 bp, synthetic construct
  source 1..129: mol_type = other DNA
aagtatacagtcagggtcctcgacgagaccggcaaggctgttggcgcgggggaaaacgttacattcaatattaacggagtgctgtacacccggaccactgattcgaacggttacgcggcgctgaacatt

SEQ ID NO: 43997 - DNA, 54 bp, synthetic construct
  source 1..54: mol_type = other DNA
ggcattatccggtctgaccccacaaccctggtgtccctggggaatctgttttca

SEQ ID NO: 43998 - DNA, 120 bp, synthetic construct
  source 1..120: mol_type = other DNA
ggcttcggcgctggcaatgagctgatgcccgcactccccaagcaagctatcaccaccacattcgacctgacgctgttcggaggcttcactcggggctttggagaacttttctccaacatt

SEQ ID NO: 43999 - DNA, 48 bp, synthetic construct
  source 1..48: mol_type = other DNA
atggctgacgagctcgcctccctgattaccagcatcggcttcacacag

SEQ ID NO: 44000 - DNA, 36 bp, synthetic construct
  source 1..36: mol_type = other DNA
cccaagatcttcaaccctgacgtgaccagctacaac

SEQ ID NO: 44001 - DNA, 45 bp, synthetic construct
  source 1..45: mol_type = other DNA
atctccgagcccattaaccctacctggggcggatttttttcaaat

SEQ ID NO: 44002 - DNA, 42 bp, synthetic construct
  source 1..42: mol_type = other DNA
cccctggccgctaatggaaacttggacgcactcttcgagatc

SEQ ID NO: 44003 - DNA, 36 bp, synthetic construct
  source 1..36: mol_type = other DNA
ccccagattgccgagtacttttctgtagacatcacc

SEQ ID NO: 44004 - DNA, 36 bp, synthetic construct
  source 1..36: mol_type = other DNA
gagttcctgaatagcctcaccaacattatcggaaca

SEQ ID NO: 44005 - DNA, 276 bp, synthetic construct
  source 1..276: mol_type = other DNA
ttcaacggcatcgagcagggcgtcgagttgaagggcggttccctggccgaactgcagctggccgactcaatctcacaatccgacctggagcagcagctaacgcaagaactccacaccaacaacatcaaggtgaccagcaacggggacaataaggtgacagtggagctggagaataatgtcaatagctcgaccttcactagcgccatcaacggcaaggccaagatcatttcttacaacgagattggacccgtactttctgaagaagccatgggtcag

SEQ ID NO: 44006 - DNA, 30 bp, synthetic construct
  source 1..30: mol_type = other DNA
atcattatgcctgaggccaccacactttcc

SEQ ID NO: 44007 - DNA, 45 bp, synthetic construct
  source 1..45: mol_type = other DNA
atcccccatccggcaaaccctacttggggcagcttcttttccaat

SEQ ID NO: 44008 - DNA, 45 bp, synthetic construct
  source 1..45: mol_type = other DNA
attcctcaagctgttaatggcaacctggcttcactcctggaattg

SEQ ID NO: 44009 - DNA, 36 bp, synthetic construct
  source 1..36: mol_type = other DNA
ccccagatcgcccaatacttcaacgtggacatcacc

SEQ ID NO: 44010 - DNA, 39 bp, synthetic construct
  source 1..39: mol_type = other DNA
tccgagtttttaaattccattacctctatcttcggaact

SEQ ID NO: 44011 - DNA, 45 bp, synthetic construct
  source 1..45: mol_type = other DNA
attccccaacctctctctcctacatggggcgccgtattcgctaac

SEQ ID NO: 44012 - DNA, 45 bp, synthetic construct
  source 1..45: mol_type = other DNA
atccccctggccgctaacggaagtctgggcgcacttcttgatctc

SEQ ID NO: 44013 - DNA, 42 bp, synthetic construct
  source 1..42: mol_type = other DNA
atccctcaaccattgtcccccaactggggccctttctttagc

SEQ ID NO: 44014 - DNA, 45 bp, synthetic construct
  source 1..45: mol_type = other DNA
attcccatcgccgctaacggcagcctggaatcccttctcgaactg

SEQ ID NO: 44015 - DNA, 36 bp, synthetic construct
  source 1..36: mol_type = other DNA
ccccagattgccgagtatttctccgtggacatcacc

SEQ ID NO: 44016 - DNA, 36 bp, synthetic construct
  source 1..36: mol_type = other DNA
gagtttctgaattctataacccaaatattcggaacc

SEQ ID NO: 44017 - DNA, 93 bp, synthetic construct
  source 1..93: mol_type = other DNA
aagagtttcacctttggatggggctcagatacagccgcatacttcgtacaaaatgttggggggtctgacaacctgagcaacatcaacaacttt

SEQ ID NO: 44018 - DNA, 69 bp, synthetic construct
  source 1..69: mol_type = other DNA
accctgcctggcgccattattgggatcaatgctctgatcaaccccaactggaacctgctcttcgacatc

SEQ ID NO: 44019 - DNA, 105 bp, synthetic construct
  source 1..105: mol_type = other DNA
cggggatacatgagcgccacctccggcacacccctggtggacctggtgtctgagggtactggtctgattttcgtcgtgttccctaagatcttctccctcatgggc

SEQ ID NO: 44020 - DNA, 288 bp, synthetic construct
  source 1..288: mol_type = other DNA
gtgccggcggccgatctcggcggcataccagctgactataaggccgaatacgtcgattcatctggactgccttactttagcgagatggactcctactacaacctgaggctcaccgagaactacatcaaccagggccacgtcggagacgaggtcgtgaacgacacagaatgggatatgcaccgctatgcacccacgggcgagggtatctcctacgagatgggcatcgtctacgtgaccagtttcctgcataacctgttcgggaatcaggccgtgaaggagaccgctttc

SEQ ID NO: 44021 - DNA, 36 bp, synthetic construct
  source 1..36: mol_type = other DNA
agccacaccttcgccggctttttcgacacggatgat

SEQ ID NO: 44022 - DNA, 180 bp, synthetic construct
  source 1..180: mol_type = other DNA
aagggaatctctggggtcctcggaatttttggatcagtgaccgggctgcttagtctgcaatccgcgtccgtggtggttggcggctttcccaacgtgctgattagcgtcgccgaaatgcagatgcctaacctcctgggtggcggaatgaccagcgccttcctggccaatacaaacggagtc

SEQ ID NO: 44023 - DNA, 45 bp, synthetic construct
  source 1..45: mol_type = other DNA
atccctcaacctcttacccctgaatggggatcattcttttcgaat

SEQ ID NO: 44024 - DNA, 45 bp, synthetic construct
  source 1..45: mol_type = other DNA
atccccattgccgctaatggcgacctggcaagtctgctcaacctc

SEQ ID NO: 44025 - DNA, 33 bp, synthetic construct
  source 1..33: mol_type = other DNA
ggaccgcagatgggaatcgagcctcttttcacc

SEQ ID NO: 44026 - DNA, 60 bp, synthetic construct
  source 1..60: mol_type = other DNA
gacgtgttcaaccctatcattcggcccatcacctacatctttctgatgggttccagcaag

SEQ ID NO: 44027 - DNA, 183 bp, synthetic construct
  source 1..183: mol_type = other DNA
agacttcagatgggaattaagctgaatacagttttctgttccatgtctaacatgatgagctccacctccatcctgcacactcacctgatcaagtctatcctgggcgccgccataactcaaatcataggccccataatccagagcgatatcaacactggcgtcggactttacgcatacgttcca

SEQ ID NO: 44028 - DNA, 57 bp, synthetic construct
  source 1..57: mol_type = other DNA
ggcattgaccagtttatccggccttttacacaacccatcctgatgggttccagcaag

SEQ ID NO: 44029 - DNA, 180 bp, synthetic construct
  source 1..180: mol_type = other DNA
cggaactccctcggcattggctggaataccatccttgtgattatgaaccctagcctgacaagtacttccatcctgcactctcacctgtataaggccatctttgggaccatcattggcatgttcctgtctcatattcccaccggaatacacaccggctcctctctgagcgcttacacccca

SEQ ID NO: 44030 - DNA, 228 bp, synthetic construct
  source 1..228: mol_type = other DNA
gccttctacggagcttctccggactcatatgagctcaacatctgcaatgcccacgatatcgacgctctggatcaatacgatactctgaacttgacggaggatgggaacaagaccactatctacatttccaatcaatacaatgagatggagctgctgaataacctggccatttccctcgacggcaaatgcgactggtactccctgtcttggaacatctatagctacttt

SEQ ID NO: 44031 - DNA, 108 bp, synthetic construct
  source 1..108: mol_type = other DNA
gccctgcgggctaaggcagccgccaacctgtacaactcttccttctgcaataacgttgcggacaactatggcggagctgtggctagccccgagctcaatatctgggac

SEQ ID NO: 44032 - DNA, 114 bp, synthetic construct
  source 1..114: mol_type = other DNA
gcctacgtttgcttttataacaacacaatcaagaagggggatcacaccaagatctacgtgaccagcaaatggtgcgcttacacgtacaacctggacgtttatacggagggcctc

SEQ ID NO: 44033 - DNA, 294 bp, synthetic construct
  source 1..294: mol_type = other DNA
aaccgccgggtgctcgttcaaatcatggtggactatttcaacgacaagtacccagactccgatatcaccgatttcaacgatggtagtcagataaggaatatcctggagtcctttgccgtggacatctaccacctcgagaagaatgacaccgacctgctgcgcgccgctttcctgagcacttcctacggacggtacctggacctgcatggagaagatatgaacacccctagggattacggctcaacaagctggggcgtcgtcctcttcaccatccccgaacccatcgattacaac

SEQ ID NO: 44034 - DNA, 90 bp, synthetic construct
  source 1..90: mol_type = other DNA
gaatccgttaatggcgtaattcaagttaccgagctgacctctgataacgagtccttcaaccggctgattcccgacgagaatactgttctg

SEQ ID NO: 44035 - DNA, 30 bp, synthetic construct
  source 1..30: mol_type = other DNA
ggcgaagtttataccgagagaaccacacag

SEQ ID NO: 44036 - DNA, 30 bp, synthetic construct
  source 1..30: mol_type = other DNA
gcctatgtcgggctttaccacaccgagaac

SEQ ID NO: 44037 - DNA, 39 bp, synthetic construct
  source 1..39: mol_type = other DNA
gaacagtccatcgagtgcagctacgacatcaacttcaat

SEQ ID NO: 44038 - DNA, 105 bp, synthetic construct
  source 1..105: mol_type = other DNA
tcatacgctatctctaacgatttctacatcgacgacctcctgagcaacaacggcgtgtcggtctcttctgatgattggaccaaccccgagcgggacattagcttt

SEQ ID NO: 44039 - DNA, 36 bp, synthetic construct
  source 1..36: mol_type = other DNA
cctaagatcttcaaccccgacgtgaccaactacacc

SEQ ID NO: 44040 - DNA, 48 bp, synthetic construct
  source 1..48: mol_type = other DNA
agcttccggtacctggactatctgatccggtccggcaacaagaacatt

SEQ ID NO: 44041 - DNA, 174 bp, synthetic construct
  source 1..174: mol_type = other DNA
gaagaactcaagtacaagaacgggattgacgtcgacgtggaggacatcgtgatcgacggcaagaaccacattatcgatgcctgcaataagaccaggatctttaatataaccgctaaaaacgtgaccatcaagaatttccttctgcgcgaaggcttttctcaagatggcggagcc

SEQ ID NO: 44042 - DNA, 51 bp, synthetic construct
  source 1..51: mol_type = other DNA
ctgggcggcatcccattgttttccgctacactgaaagctaaggcagccaca

SEQ ID NO: 44043 - DNA, 252 bp, synthetic construct
  source 1..252: mol_type = other DNA
gttcaggcgattagctggcagcactggagcctgaaccccattgaacttgtgtcttatagagccgccttcactctgaacgtgctgtcaaaggccatcgagaaccaatttaccaccatggggaacctcttttatacaactcttaccggtttcttcacccattccgatgcacgcgtattggtcggtcaagctaccattgggcgggtgcacagcattacttccacaatcttcggacccgcactcctggactttggc

SEQ ID NO: 44044 - DNA, 48 bp, synthetic construct
  source 1..48: mol_type = other DNA
ctgggcggtatccccctgtttagcgcgaccctcaaggcaaaggccgcc

SEQ ID NO: 44045 - DNA, 252 bp, synthetic construct
  source 1..252: mol_type = other DNA
gtgcaggcgatcagttggcaacactggagcctgaatcccatcgagctggtttcgtatagggcagcattcacactcaacatcctgagcaaagccattgagaaccagtttaccaccatgggaaatttgttttacaccacgctaaccggattcttcacccatagcgacgcgcgggtgctggttgggcaagcgacgattgggagagtgcacagcataacatctaccatctttgggccagcactgttggatttcggt

SEQ ID NO: 44046 - DNA, 114 bp, synthetic construct
  source 1..114: mol_type = other DNA
atcagctctggcggcatcattcccgtgaacgaggctctcggggccatggtctcctctatcgccaagggaggaacaaacctcgacactaccgagctgtacatatacaactcccgc

SEQ ID NO: 44047 - DNA, 36 bp, synthetic construct
  source 1..36: mol_type = other DNA
ggctccgccattcccttcgtggattccaattcaata

SEQ ID NO: 44048 - DNA, 69 bp, synthetic construct
  source 1..69: mol_type = other DNA
accatggccaaggataatctgacaaacgtgatgtggtggctctacgggagtttcgctgacatcacttgg

SEQ ID NO: 44049 - DNA, 45 bp, synthetic construct
  source 1..45: mol_type = other DNA
atccggcctatattacaaccgttcctgatgggatcttccaagggc

SEQ ID NO: 44050 - DNA, 180 bp, synthetic construct
  source 1..180: mol_type = other DNA
atccggctgtccatgaaccttcccctggacaccactctcgtgatcgtcgagccaaagatgacctccacaagcatcctccattctcacgtgctgaagagcatcttcggagctattgtggtcatgttcatccccaacatccctagcggcattcacgtcggcaattctctggccccttacatc

SEQ ID NO: 44051 - DNA, 228 bp, synthetic construct
  source 1..228: mol_type = other DNA
atcttcgctatcgccaatactgcctactacgaagtcaacatcctggagcctgaggattccatcgacctgaacaactatggcgtgatctccgtagtacattcgaccgatcgggatatctatcgccttaaccccgactataacgagatggtcctgttgaattcacttgatcgatcactgaaccagaagtgcagagcttacaccatttcttggaacgcctactcttacctg

SEQ ID NO: 44052 - DNA, 135 bp, synthetic construct
  source 1..135: mol_type = other DNA
aacagctccgaagttggcaccatcatagtccaaaacctgcctgtgaacgtgcaggacatgattcagcctcatatcggacggatcaacgccgggatctcccaattatttagtctcctgctgaactacatctttgaa

SEQ ID NO: 44053 - DNA, 207 bp, synthetic construct
  source 1..207: mol_type = other DNA
atgacatggctgggcaactactctaaaggcaccgggcccataagttatatgaacgtcttcgaggccctcgaaaacgacgcgatcgcggccgtcggcacttactttaatgatagcaacatcaattacaccgtggagatttacgtcaacgacgagcttaagctaactcaagagggaatcagcccttacgtcggctaccacactatcaag

SEQ ID NO: 44054 - DNA, 81 bp, synthetic construct
  source 1..81: mol_type = other DNA
gatatctttaaggcgatcatgactaccaacaatatgccgttcatagccacaaatgaaatgcgagtgcactacattgagaat

SEQ ID NO: 44055 - DNA, 99 bp, synthetic construct
  source 1..99: mol_type = other DNA
atcgacggcaagacctggaacgattgctataaggagcgcaaaattgcctgtctgaaagtatacactgtagccctgcccatctacactgaggaccttgtg

SEQ ID NO: 44056 - DNA, 90 bp, synthetic construct
  source 1..90: mol_type = other DNA
tccaagtttgaggccaacatcggcgaggctaacaagaccgtgaccttcgaaattaacggcgaacggtacacacggactagcgacgagaac

SEQ ID NO: 44057 - DNA, 87 bp, synthetic construct
  source 1..87: mol_type = other DNA
aattatacaatcaagaccacctacaacaacaccagcgtcgagaaccggatcacagtgctgcccactctgattgccgacaaccttgtg

SEQ ID NO: 44058 - DNA, 54 bp, synthetic construct
  source 1..54: mol_type = other DNA
tacatctctctgattaacggagagggcagccccatctccgggatcaacatcacc

SEQ ID NO: 44059 - DNA, 36 bp, synthetic construct
  source 1..36: mol_type = other DNA
aatggcgtgttctacaaccggctgaccaacgagaat

SEQ ID NO: 44060 - DNA, 66 bp, synthetic construct
  source 1..66: mol_type = other DNA
gagtacatcctgacggcaatcgatcctctgaccggccttcaaatgagttataacattactgtgaac

SEQ ID NO: 44061 - DNA, 63 bp, synthetic construct
  source 1..63: mol_type = other DNA
gagtacattatcacaagcgagtttgacgaaatgcggattagtaacaccataaccatcaaggac

SEQ ID NO: 44062 - DNA, 42 bp, synthetic construct
  source 1..42: mol_type = other DNA
atgaacccactgcacttcttcactttggggtttttccaagaa

SEQ ID NO: 44063 - DNA, 42 bp, synthetic construct
  source 1..42: mol_type = other DNA
atgaaccccatccacttctttaccctgggcttcctgcctgaa

SEQ ID NO: 44064 - DNA, 42 bp, synthetic construct
  source 1..42: mol_type = other DNA
atgaacctcatccacttttttaccctggggttcttccctgaa

SEQ ID NO: 44065 - DNA, 42 bp, synthetic construct
  source 1..42: mol_type = other DNA
atgtacagcatccccttctttaccctgggtttctatcccgag

SEQ ID NO: 44066 - DNA, 45 bp, synthetic construct
  source 1..45: mol_type = other DNA
atgaaccccatcgactttttcaccctgagctacttcggaaggtat

SEQ ID NO: 44067 - DNA, 42 bp, synthetic construct
  source 1..42: mol_type = other DNA
atgacaccaatacaattctacaccctgggttatttcgagcag

SEQ ID NO: 44068 - DNA, 45 bp, synthetic construct
  source 1..45: mol_type = other DNA
atgaaccccatccacttctttaccctgggctactaccaagaatat

SEQ ID NO: 44069 - DNA, 42 bp, synthetic construct
  source 1..42: mol_type = other DNA
atgaaccccatccacttctttaccctgggctacctgcaagag

SEQ ID NO: 44070 - DNA, 87 bp, synthetic construct
  source 1..87: mol_type = other DNA
tccagcctggaaacagttactaccaccccgtccgtgtctctggttatccccggcgtcgagatgcccggctcttccatttacgttcct

SEQ ID NO: 44071 - DNA, 42 bp, synthetic construct
  source 1..42: mol_type = other DNA
atgaaccttatccaattttttagccttggatactatcctgaa

SEQ ID NO: 44072 - DNA, 57 bp, synthetic construct
  source 1..57: mol_type = other DNA
ggcatcgaccagttcattcggccctttacccaaccgctactgatggggtcaagcaag

SEQ ID NO: 44073 - DNA, 183 bp, synthetic construct
  source 1..183: mol_type = other DNA
ctgaggaactctctcggtatcgactggaacaccattctcgtgatcatgaacccaagtgaaacctccactagcatcctgcactctcatctctacaagggcatctttggcatgatccttggcatgctcctgacctatatccctgcgggcatccacactggaagctccctgtctgcctatactccg

SEQ ID NO: 44074 - DNA, 231 bp, synthetic construct
  source 1..231: mol_type = other DNA
attgccttctatggtgcctgcccggactcctatgagcttgacgtcggctaccctcatgacctcgacgggctgaaccaatacgacgtgctgaaccttaccgaccacgagaataaaacaaccgtgtacctctccaaccaatacaatgaaatggaactgctgaataacctggcaatcgatctcaacggcaaatgtgattggtactcgctaagttggaatatttattcctatctg

SEQ ID NO: 44075 - DNA, 33 bp, synthetic construct
  source 1..33: mol_type = other DNA
caggtctatctaattagccaaattaagcttcca

SEQ ID NO: 44076 - DNA, 42 bp, synthetic construct
  source 1..42: mol_type = other DNA
atgaaccccatccactttttcacactgggctactatcctaaa

SEQ ID NO: 44077 - DNA, 51 bp, synthetic construct
  source 1..51: mol_type = other DNA
ggcaacatgcaggtttatctgataagttatattaatctcgccctgacaaga

SEQ ID NO: 44078 - DNA, 60 bp, synthetic construct
  source 1..60: mol_type = other DNA
atctacgagggcgcccaccggatttacctctggggctcttatttcatcaccctggaagcc

SEQ ID NO: 44079 - DNA, 57 bp, synthetic construct
  source 1..57: mol_type = other DNA
cagggttatggatacatcaacgtttaccctagcttggacttctccttccacgatctg

SEQ ID NO: 44080 - DNA, 105 bp, synthetic construct
  source 1..105: mol_type = other DNA
gtgcacgtcggcgatgtgctggggatagcggataggtacagttattcgatttacgtccctctgggattggttaacgcgttctccattcctctccgaggcaatgct

SEQ ID NO: 44081 - DNA, 69 bp, synthetic construct
  source 1..69: mol_type = other DNA
tccgccggcgcggatgctgattcaagctggatggacgatttccgagtttgggatctcaacgctctgctg

SEQ ID NO: 44082 - DNA, 51 bp, synthetic construct
  source 1..51: mol_type = other DNA
ggcaagaatcacatcatctatgcggggaataaaactcggatcttcaatgtg

SEQ ID NO: 44083 - DNA, 42 bp, synthetic construct
  source 1..42: mol_type = other DNA
atgaacccaattcaatattttaccatcggatataggccagag

SEQ ID NO: 44084 - DNA, 90 bp, synthetic construct
  source 1..90: mol_type = other DNA
ttcggggatggggaagagtctgttaatgatttcatcatgatctttgccgaggccgctggaatggacggcgacattacctggaacggagtg

SEQ ID NO: 44085 - DNA, 30 bp, synthetic construct
  source 1..30: mol_type = other DNA
cccgtgtttctggataccatcgacttcacg

SEQ ID NO: 44086 - DNA, 42 bp, synthetic construct
  source 1..42: mol_type = other DNA
atgaaccccatccacttcttcactctcgggtactatcctgag

SEQ ID NO: 44087 - DNA, 45 bp, synthetic construct
  source 1..45: mol_type = other DNA
atgaaccccatccacttctttaccctggggtttcttcaagaggag

SEQ ID NO: 44088 - DNA, 81 bp, synthetic construct
  source 1..81: mol_type = other DNA
atggccttctttaagaccatatacgacaacctcaattccattgtgtatatcttgcttaacgatgttatcatgatgtcctac

SEQ ID NO: 44089 - DNA, 36 bp, synthetic construct
  source 1..36: mol_type = other DNA
gggatcgtgaccacactgggtggcttcgagcttggc

SEQ ID NO: 44090 - DNA, 45 bp, synthetic construct
  source 1..45: mol_type = other DNA
atgaaccccatccacttctttaccctgggcgagttctccgagtac

SEQ ID NO: 44091 - DNA, 120 bp, synthetic construct
  source 1..120: mol_type = other DNA
atcggagccgtggacattccactgggggacaccgcacggaccttcctgcacgccattctgccgaccgtgttcgacggccctagcactccctggtaccctgatatcatcctgaacgctcgg

SEQ ID NO: 44092 - DNA, 54 bp, synthetic construct
  source 1..54: mol_type = other DNA
ggcagcggcattaccgggtccgtgctcatcctgggacaccagttcttcatcgag

SEQ ID NO: 44093 - DNA, 72 bp, synthetic construct
  source 1..72: mol_type = other DNA
tactttagcaacgacgatgcactgcgcgaaataacactgtggctcatgggcggcatgtggaatgcatcttgg

SEQ ID NO: 44094 - DNA, 36 bp, synthetic construct
  source 1..36: mol_type = other DNA
atctctgagcctgttggtggcattattcctccacac

SEQ ID NO: 44095 - DNA, 66 bp, synthetic construct
  source 1..66: mol_type = other DNA
gattccaagttctactaccggaacgtgactaggcgcgcagtttcgacgacctctttcctgagagac

SEQ ID NO: 44096 - DNA, 45 bp, synthetic construct
  source 1..45: mol_type = other DNA
gcctttagcttcttctctattacgggaatgcagaccgagatctac

SEQ ID NO: 44097 - DNA, 48 bp, synthetic construct
  source 1..48: mol_type = other DNA
ctcacgcaaccggtcagccccacattcggtgctgtcctcgcccttaac

SEQ ID NO: 44098 - DNA, 42 bp, synthetic construct
  source 1..42: mol_type = other DNA
cccatggtggctaacggttcctgggacgcattctttgatatc

SEQ ID NO: 44099 - DNA, 42 bp, synthetic construct
  source 1..42: mol_type = other DNA
atgaaccccatccacttcttcacgctcggttactttcaagaa

SEQ ID NO: 44100 - DNA, 39 bp, synthetic construct
  source 1..39: mol_type = other DNA
atcaccaaggccaatgacattagcatccacaaccttgat

SEQ ID NO: 44101 - DNA, 99 bp, synthetic construct
  source 1..99: mol_type = other DNA
ctgggcattaagaccaacatgatcagcgacttctctatcgggtacctcttcaagtccatgatcggcttcacccctggatttcagaaggggcgactgttc

SEQ ID NO: 44102 - DNA, 48 bp, synthetic construct
  source 1..48: mol_type = other DNA
accggcctctgtgccgaagctaataagttcgtgtctgtgaactatttt

SEQ ID NO: 44103 - DNA, 36 bp, synthetic construct
  source 1..36: mol_type = other DNA
attttccattctatagacatcgccaaccacaatcct

SEQ ID NO: 44104 - DNA, 36 bp, synthetic construct
  source 1..36: mol_type = other DNA
cccaagatcttccaccctgacgtgaccagctacaca

SEQ ID NO: 44105 - DNA, 48 bp, synthetic construct
  source 1..48: mol_type = other DNA
ctgggaggcatcccgctcttttccgcgaccctcaaagccaaagccgcc

SEQ ID NO: 44106 - DNA, 252 bp, synthetic construct
  source 1..252: mol_type = other DNA
gtccaggcgataagttggcaacattggtccctgaaccccattgaactcgtatcctaccgcgctgctttcaccctgaatattctgagccaagcgattgcgaatcagttcgccactatgggaaatctcttttatagcacactgacgggctttttcactcacactgatccacgagtactggtcggcatcgccacaataggacgcaatcactccatcacatcgacgatctttggccctgccctgctggacttcgga

SEQ ID NO: 44107 - DNA, 93 bp, synthetic construct
  source 1..93: mol_type = other DNA
aataacgacgataggagcgcttccgaggtggcccgcgggttcttgagcttcagcgatgacaccctgatgggccgatacgtttggaacatcgac

SEQ ID NO: 44108 - DNA, 42 bp, synthetic construct
  source 1..42: mol_type = other DNA
tacttcgacgccggggctgccttcggcggcgagttcatgcaa

SEQ ID NO: 44109 - DNA, 72 bp, synthetic construct
  source 1..72: mol_type = other DNA
tacatggcggacagtgcacagttaagtcaaatagtatcatggtctttcggcacaataaactacgcgacctgg

SEQ ID NO: 44110 - DNA, 42 bp, synthetic construct
  source 1..42: mol_type = other DNA
atgaaccccatccacttttttacactcggttattacccccag

SEQ ID NO: 44111 - DNA, 54 bp, synthetic construct
  source 1..54: mol_type = other DNA
aaccccatcatccaccctatcacctacctgttccttatgggctccagcaaagga

SEQ ID NO: 44112 - DNA, 189 bp, synthetic construct
  source 1..189: mol_type = other DNA
cggtaccagatgggcatcggcctgaacacaatctttatgactatcggcaagtctatttcttccacttctattctgcacacccacctgctgaagtccgtcttcggaaatttcattaccaacctcatcgggcccttcattggcaaggaaatcaacaccggaattggcctgtaccaatacatacctgaggtc

SEQ ID NO: 44113 - DNA, 294 bp, synthetic construct
  source 1..294: mol_type = other DNA
atcatcggcgccaacaccgagtattacgaagtgaacgtcgtgaaccctgctgataacatcgagctcaatgggttcccaattgagaacatcagccattcaaataataagaccacctacattatgaactccaactacaacgagatggagcttctgaacgacctcaagatgcccctgaataactcctgcgactattacactgtttcctggaacattgttagctatctggaacctaaccatccaatcaccaacattctaaccgagataatcaacctctacaagaacttctacacgtat

SEQ ID NO: 44114 - DNA, 36 bp, synthetic construct
  source 1..36: mol_type = other DNA
aagatccgccgaaagaaccggcggaacaagaggtac

SEQ ID NO: 44115 - DNA, 75 bp, synthetic construct
  source 1..75: mol_type = other DNA
gacctgcgggatatttctaacctcataacgacatctgaaatgcagaccttctacgacgcccagctgatgacaagc

SEQ ID NO: 44116 - DNA, 66 bp, synthetic construct
  source 1..66: mol_type = other DNA
aattactattacgaggtgcagctcgaggacggctttctgcccgtcttcaagcctacctacaacatc

SEQ ID NO: 44117 - DNA, 51 bp, synthetic construct
  source 1..51: mol_type = other DNA
atggtcgagatcgtctttaaagatattgaagtgccagagtactccttcaac

SEQ ID NO: 44118 - DNA, 126 bp, synthetic construct
  source 1..126: mol_type = other DNA
tttccagtctccatgcacctgcggaacgcttctgacgtatcagcacctaatggcctgagcgaagtcatttcatcaatgctgctgaagatattctcgaacccactgatcagcctctctcaaggagac

SEQ ID NO: 44119 - DNA, 33 bp, synthetic construct
  source 1..33: mol_type = other DNA
gtctgccacaccctcggcatctccgtggatctg

SEQ ID NO: 44120 - DNA, 33 bp, synthetic construct
  source 1..33: mol_type = other DNA
tgcagcctcttcgggattcccgcggacatatcc

SEQ ID NO: 44121 - DNA, 54 bp, synthetic construct
  source 1..54: mol_type = other DNA
gccgatagcttcaattctagttttagcccaatctttttccacggcattgacgac

SEQ ID NO: 44122 - DNA, 78 bp, synthetic construct
  source 1..78: mol_type = other DNA
cactttttatcgggttttctgcttaacgattggaccacattccccatctacggcggcctgatgttgttcgctgtggat

SEQ ID NO: 44123 - DNA, 78 bp, synthetic construct
  source 1..78: mol_type = other DNA
atgagcgtgtttgagtataactacatcaacctcctgctgggctacctgattgggacagacgtccagttcaccaccttt

SEQ ID NO: 44124 - DNA, 54 bp, synthetic construct
  source 1..54: mol_type = other DNA
attagcatccccggcgcctttctgatcgacgattcccactattacttcatgacg

SEQ ID NO: 44125 - DNA, 51 bp, synthetic construct
  source 1..51: mol_type = other DNA
ggtgccctcttcaccatcgaccccgacactagcgtgtacacccggtcggac

SEQ ID NO: 44126 - DNA, 33 bp, synthetic construct
  source 1..33: mol_type = other DNA
agcgttatccaagtatacttcgacgtgtccatc

SEQ ID NO: 44127 - DNA, 36 bp, synthetic construct
  source 1..36: mol_type = other DNA
acctacctgagccaggtgacactgatgaacccaaag

SEQ ID NO: 44128 - DNA, 45 bp, synthetic construct
  source 1..45: mol_type = other DNA
ttagtgcaaccggccagccctaccctggacgccgtgcttgtactt

SEQ ID NO: 44129 - DNA, 45 bp, synthetic construct
  source 1..45: mol_type = other DNA
attcccatggtggctaacggcagctgggatgccttctttgacatc

SEQ ID NO: 44130 - DNA, 87 bp, synthetic construct
  source 1..87: mol_type = other DNA
atgggcctgaacctcatcgattccatttattattccgttgtgacaatggccaccgttggctacggggactatataccagtaactggc

SEQ ID NO: 44131 - DNA, 33 bp, synthetic construct
  source 1..33: mol_type = other DNA
tgccccatgatcggactgagccctctcttcacc

SEQ ID NO: 44132 - DNA, 60 bp, synthetic construct
  source 1..60: mol_type = other DNA
atcctgaaccccattgtgcatcctatcacacatcagtttctaatgggctctagcaagggc

SEQ ID NO: 44133 - DNA, 186 bp, synthetic construct
  source 1..186: mol_type = other DNA
ttccgttacgagatgaacattgacctgaacacaatcttcatgtccatggagaacagcgtatcgtcaacttctatacttcacacccacctgctcaaatccatcctcggcgacgtgctgaccaacctcatcggccctttcatcgataacgaaataaacactggcgtcgggctttatgaatatattccc

SEQ ID NO: 44134 - DNA, 297 bp, synthetic construct
  source 1..297: mol_type = other DNA
gccttctttggcgcgaacactgagcactatgaggtggatctggccaaccctacggagaatgtgacacttaacgaattccctgtagagtctattacctacgaggataaccggaccgtgtacattatagatagcaattataacgagatggagctcctcaacgacctgaaggtgcctttcaataacacttgcaagtactacaccatcacctggaatactttctcctacctggaggacggcgattccaccactgagttcctcctggaactgaaggagaaggtcgacagcgttctgtttcac

SEQ ID NO: 44135 - DNA, 45 bp, synthetic construct
  source 1..45: mol_type = other DNA
ttaagtcaaccggcagacgccacttggggttccgttctcatgctg

SEQ ID NO: 44136 - DNA, 39 bp, synthetic construct
  source 1..39: mol_type = other DNA
atggccttcaacggcagctggcaggctctctttgacctg

SEQ ID NO: 44137 - DNA, 51 bp, synthetic construct
  source 1..51: mol_type = other DNA
attcgactgatcggcaatgctaacaacgctttttctttggcctaccacccc

SEQ ID NO: 44138 - DNA, 87 bp, synthetic construct
  source 1..87: mol_type = other DNA
ctgggcctcggacccattgatagcatctactacgccgtgatcacaatgaccaccgtcggttatggcgactacatccctgacactggc

SEQ ID NO: 44139 - DNA, 87 bp, synthetic construct
  source 1..87: mol_type = other DNA
ctcggcctgaacccgatagattcgatctattacgccgtgatcaccatgaccactgtcggatacggcgattacatccctgagacaggc

SEQ ID NO: 44140 - DNA, 42 bp, synthetic construct
  source 1..42: mol_type = other DNA
gctcagcctgccgctccgacatgggacgctgtgctttctctg

SEQ ID NO: 44141 - DNA, 39 bp, synthetic construct
  source 1..39: mol_type = other DNA
atggccagcaacggctcctggcaagcgttgttcgatctg

SEQ ID NO: 44142 - DNA, 90 bp, synthetic construct
  source 1..90: mol_type = other DNA
agttccctcgagaccattactacaactccgtctgtttctctcgtcattcccggggtcgagatgccaggtagctccatctacgttcctctc

SEQ ID NO: 44143 - DNA, 36 bp, synthetic construct
  source 1..36: mol_type = other DNA
atgaaccccgtggcgagtgacgacagcatcactgac

SEQ ID NO: 44144 - DNA, 30 bp, synthetic construct
  source 1..30: mol_type = other DNA
aagatcgacaacaccgacgactattcctcg

SEQ ID NO: 44145 - DNA, 132 bp, synthetic construct
  source 1..132: mol_type = other DNA
atgtggtatgccaagtggcagttgatcgaaggcggcgccctgccataccgggacttcaacttctcctacccaccactggccctcgctctcttcataattcccggcttggctagcggtacagcagagggtttt

SEQ ID NO: 44146 - DNA, 177 bp, synthetic construct
  source 1..177: mol_type = other DNA
ggcgtgcctatgtccggactttctgaggcctttctgagccaaacgggtcggtcgtttcaagcggaatctgtgcccggcaacatcacccacctcctcggcctgctggggatcagcgactacggggtcgccgagagcgcccacacctatatcataacccaggggccgttggctgggctg

SEQ ID NO: 44147 - DNA, 51 bp, synthetic construct
  source 1..51: mol_type = other DNA
attcgactcatcggcaacgccaacaatgcattctcactggcataccatccc

SEQ ID NO: 44148 - DNA, 45 bp, synthetic construct
  source 1..45: mol_type = other DNA
ctcacgcaacctgccgctcccacactggacgcattcctttcactc

SEQ ID NO: 44149 - DNA, 45 bp, synthetic construct
  source 1..45: mol_type = other DNA
atccccatggtggctaacggcacctgggatgcctttttcgacatt

SEQ ID NO: 44150 - DNA, 276 bp, synthetic construct
  source 1..276: mol_type = other DNA
gtgaacgggctggagcaaggtgtcgacctgaagggcggcagccaggccgagctgcagctgctcggatctgtgacacctaccgagttggagcaaacacttgacgccaaactcaacacaaacaacattaaggtgaccaataacgggaacaataaggtcaccgtcgagctggaaaataatataaacagcagtaccttcacatccgccattaacggaaaggctaaagttataagttacaacgagatcggccccgtgctgtctgaggaagctatgggtcag

SEQ ID NO: 44151 - DNA, 30 bp, synthetic construct
  source 1..30: mol_type = other DNA
ctgatcatgcccgaggctacaacccttagt

SEQ ID NO: 44152 - DNA, 87 bp, synthetic construct
  source 1..87: mol_type = other DNA
agctccctggagaccatcacaactaccccttcggtctcgctggtcattccgggcgtggagatgcctggttctagtatctacgttccc

SEQ ID NO: 44153 - DNA, 87 bp, synthetic construct
  source 1..87: mol_type = other DNA
agcagtctggagaacgtgttcacgacgcccagcgtctctatcgtgatccctggggtcgagatgcccggctcctccatttacgttccc

SEQ ID NO: 44154 - DNA, 114 bp, synthetic construct
  source 1..114: mol_type = other DNA
atgggcagctacaaaatttccttcgcccgggtctatgaagttatcctaatccacctgacaaatctcggcgacggactgaccagcctggacatgaaggtggtttggaacgaacgg

SEQ ID NO: 44155 - DNA, 78 bp, synthetic construct
  source 1..78: mol_type = other DNA
atgctgatctcttccgacgagaaaaccgccagcgcactgggctggacggtcgggactctcaacaaggctagttgggac

SEQ ID NO: 44156 - DNA, 36 bp, synthetic construct
  source 1..36: mol_type = other DNA
tccacaatggaggaaaccttggtatctatatctggc

SEQ ID NO: 44157 - DNA, 42 bp, synthetic construct
  source 1..42: mol_type = other DNA
caggacgaggaggactctctcgtccaatatggggttctgatg

SEQ ID NO: 44158 - DNA, 30 bp, synthetic construct
  source 1..30: mol_type = other DNA
ctggtcaacggaggctctggtatcggtttc

SEQ ID NO: 44159 - DNA, 90 bp, synthetic construct
  source 1..90: mol_type = other DNA
ctcaacattacctccatcgacaacatcatcaatttcataccaactgtaatcatggtcacactgagcagcacgcagttcatagattggacc

SEQ ID NO: 44160 - DNA, 84 bp, synthetic construct
  source 1..84: mol_type = other DNA
agcctggagaacgtgttcaccacaccatcggtctcaatagtcattcctggcgttgaagtgcccggctctcccatctacgtacca

SEQ ID NO: 44161 - DNA, 33 bp, synthetic construct
  source 1..33: mol_type = other DNA
gttgctggcctgggatctgacgcacttgccgct

SEQ ID NO: 44162 - DNA, 48 bp, synthetic construct
  source 1..48: mol_type = other DNA
ctggagctgatgggcgctgccaccgcaatgcagcaggcactcgattac

SEQ ID NO: 44163 - DNA, 33 bp, synthetic construct
  source 1..33: mol_type = other DNA
gtgctggtcgccggaaccatcgccgttgcaacc

SEQ ID NO: 44164 - DNA, 63 bp, synthetic construct
  source 1..63: mol_type = other DNA
cagatatccatggtttttgcttattcttcttccgcatctctggctccacggattgcccaacta

SEQ ID NO: 44165 - DNA, 42 bp, synthetic construct
  source 1..42: mol_type = other DNA
gtactttccaacatcattcctctcctgacccctatctacact

SEQ ID NO: 44166 - DNA, 84 bp, synthetic construct
  source 1..84: mol_type = other DNA
tccctgccctctgtgttcgagaccccagctgttagcatagttatccccggggtcgagatgccgggaagctcaatctacattcca

SEQ ID NO: 44167 - DNA, 84 bp, synthetic construct
  source 1..84: mol_type = other DNA
accctgccatccgtgttcgatagccctagcgtctccatcgtgatccccggggtcgacattcctggatcccaaatctacgttccc

SEQ ID NO: 44168 - DNA, 81 bp, synthetic construct
  source 1..81: mol_type = other DNA
ctccagaccgtgtttgatacacctagcgtatctattatcctgcctggcgtcgaaatgcccggctcaccaatctacgtccct

SEQ ID NO: 44169 - DNA, 84 bp, synthetic construct
  source 1..84: mol_type = other DNA
acattaccctccgttttcgatactcctgcggtctctattgtgatccctggcgtcgagatgcccgggagttccatctacgtaccg

SEQ ID NO: 44170 - DNA, 84 bp, synthetic construct
  source 1..84: mol_type = other DNA
tctctgcctagcgtgttcgatacgcctgccgtctccatcgttatccccggcgtcgagatgcccgggtccagcatctacattccc

SEQ ID NO: 44171 - DNA, 87 bp, synthetic construct
  source 1..87: mol_type = other DNA
atggggctgaacctcatcgactccatctattactctgtcatcacaatggccacggttggctacggcgactacattccctctactggg

SEQ ID NO: 44172 - DNA, 87 bp, synthetic construct
  source 1..87: mol_type = other DNA
atgaatctgaacatcttcgatagcatttactacaccatcattacaatcgccactgttggttacggggacattatccccatcactccc

SEQ ID NO: 44173 - DNA, 84 bp, synthetic construct
  source 1..84: mol_type = other DNA
accctgccatctgtgttcgagacacctagcgtgtccatcgtcatccctggcgtcgacatccccgggagtcagatttacgtacca

SEQ ID NO: 44174 - DNA, 84 bp, synthetic construct
  source 1..84: mol_type = other DNA
agcctgccatccgtgttcgagacccctgccgtgtccatcgtcatccccggcgttgaaatgcctgggagcagcatctacataccc

SEQ ID NO: 44175 - DNA, 87 bp, synthetic construct
  source 1..87: mol_type = other DNA
atggagctcgatatctatgattcgatctactatacaatcattaccctggccaccgttggctatggggacatcttccctattactcca

SEQ ID NO: 44176 - DNA, 276 bp, synthetic construct
  source 1..276: mol_type = other DNA
ttcaatgggttagagcagggagtcgatctcaagggaggtagccaggcggaactccagctgcttgggagcgttactcctaccgagctggaacagaccctggactccaagctcaacacaaataacatcaaggtcactaacaacggcaataagaaggtgacagtggagctggagaacaacgtgaacagttctacttttaccaatgctatttctggaaaagccaaagtgatttcctacaacgaaatcggacctgtgttgagcgaggaagcaatgggacag

SEQ ID NO: 44177 - DNA, 30 bp, synthetic construct
  source 1..30: mol_type = other DNA
atcattatgcctgaggccaccacattgagc

SEQ ID NO: 44178 - DNA, 87 bp, synthetic construct
  source 1..87: mol_type = other DNA
atgaagctgaacatttacgatagcatttactacaccatcatcacaatcgccaccgttggatatggggacatcatccccattactcca

SEQ ID NO: 44179 - DNA, 87 bp, synthetic construct
  source 1..87: mol_type = other DNA
tctatccctagcgtgttcgatacaccagctgttagcatcgtcattcccggggttgagatgcctggctcctccatctacattcctttc

SEQ ID NO: 44180 - DNA, 84 bp, synthetic construct
  source 1..84: mol_type = other DNA
accctgccttccgtgttcgagaccccaaccgtctcaatcgtcatccccggcgtcgacatccctggatcacaaatctacgttcca

SEQ ID NO: 44181 - DNA, 84 bp, synthetic construct
  source 1..84: mol_type = other DNA
accttacctactgtatttgacacgcctgctgtatccatcgtcatccctggcgtcgagatgccggggtcaagcatctacattccc

SEQ ID NO: 44182 - DNA, 87 bp, synthetic construct
  source 1..87: mol_type = other DNA
atgaacctgaatatctatgactcaatctactacactatcattaccatcgccaccgtcggttacggggatatcatccccattacacct

SEQ ID NO: 44183 - DNA, 123 bp, synthetic construct
  source 1..123: mol_type = other DNA
ataggagactaccatgtctcatttgccgacgtatatggttatgtctggaagcacatctctgggaatgtggacgcatccgatattaacgaggtcagggccgactacgccatctgggatctcagg

SEQ ID NO: 44184 - DNA, 78 bp, synthetic construct
  source 1..78: mol_type = other DNA
aagctcggggctgaccccgacaccctgagtgccatctacaactggagcgttggctcgattgacggaatctcttgggac

SEQ ID NO: 44185 - DNA, 78 bp, synthetic construct
  source 1..78: mol_type = other DNA
atccctcaaaagctcgagggcgccggttatggccttcggaacgtcaaagccaatgatttcgctgccgcaacactgaag

SEQ ID NO: 44186 - DNA, 114 bp, synthetic construct
  source 1..114: mol_type = other DNA
atgtttgaaatggcagatgccctcggctcattcgaacggctgcacctcctgggacttgcatatcaaggacttaatgccgacaacctggtctacgacatggtcaaggagaacgct

SEQ ID NO: 44187 - DNA, 117 bp, synthetic construct
  source 1..117: mol_type = other DNA
agcatagtgcaggccacgattgctcgggccgaggctgacggcgtgatcgcgccgcaagaccagctgacagacttcgccatctacaacactgatgacgccgccaagtggaatgcatac

SEQ ID NO: 44188 - DNA, 75 bp, synthetic construct
  source 1..75: mol_type = other DNA
cccagcaccctgctgtacttcaacgataatctcgagttcgcaactgggcttcctggacttgactacggaagagcc

SEQ ID NO: 44189 - DNA, 36 bp, synthetic construct
  source 1..36: mol_type = other DNA
tccttcttttctcattccatctacggtggaggcggc

SEQ ID NO: 44190 - DNA, 84 bp, synthetic construct
  source 1..84: mol_type = other DNA
acactgccgtctgtgtttgagaccccagccgtctctataatcattcccggcgttgagatgccgggaagctctatctacgttcca

SEQ ID NO: 44191 - DNA, 84 bp, synthetic construct
  source 1..84: mol_type = other DNA
acactgccaagcgtgttcgagaccccttccgtgtccatcgtcatccccggcgtcgagatgcccggaagttctatctacattccc

SEQ ID NO: 44192 - DNA, 66 bp, synthetic construct
  source 1..66: mol_type = other DNA
atcggcgacacaaccctcctggggctgcttgacatggatttcggcaaccccgagaatcctagctac

SEQ ID NO: 44193 - DNA, 30 bp, synthetic construct; identical to SEQ ID NO: 42939
  source 1..30: mol_type = other DNA

SEQ ID NO: 44194 - DNA, 33 bp, synthetic construct
  source 1..33: mol_type = other DNA
caggtcgacctgggctccatgagctctgcaacc

SEQ ID NO: 44195 - DNA, 90 bp, synthetic construct
  source 1..90: mol_type = other DNA
gtgctgcacggcgaggaggactggctggattcctttcggatggcctggctcatggtttttggaggcgatctggaactggggcatgttaca

SEQ ID NO: 44196 - DNA, 39 bp, synthetic construct
  source 1..39: mol_type = other DNA
ttcgcctacattgggatagttggcgacagcatgggaaac

SEQ ID NO: 44197 - DNA, 81 bp, synthetic construct
  source 1..81: mol_type = other DNA
ttcaccatgtccgcgtggaggaagggcacgtctgtgatggccgaacggtttgctgtctcaaaaattatccctgacgatgag

SEQ ID NO: 44198 - DNA, 45 bp, synthetic construct
  source 1..45: mol_type = other DNA
accctcaacctgatgggccggaatagacaggttatccctgtaact

SEQ ID NO: 44199 - DNA, 84 bp, synthetic construct
  source 1..84: mol_type = other DNA
acactgcctactgtgttcgagaccccttcggtttctatcgtgattcccggggttgacatccccggtagtcagatttatgttcca

SEQ ID NO: 44200 - DNA, 105 bp, synthetic construct
  source 1..105: mol_type = other DNA
ggcaatagatttatcggatctttccacaagatcctcggatcaatcggcgactacacaagcgagcccttcaatgtgaacatggcccgcactattatccgttcgtcc

SEQ ID NO: 44201 - DNA, 57 bp, synthetic construct
  source 1..57: mol_type = other DNA
cagtggcctctgatcttcaagatgtacagctataccttaccacaagcgatagctgtg

SEQ ID NO: 44202 - DNA, 72 bp, synthetic construct
  source 1..72: mol_type = other DNA
ggtgatgccaaccagccagcattatgggacgggaagttcctctggtttaccgtacacatgaccgatgctagt

SEQ ID NO: 44203 - DNA, 48 bp, synthetic construct
  source 1..48: mol_type = other DNA
gccggctggattgacatgaccgccatcttcgctccctacatgggatgg

SEQ ID NO: 44204 - DNA, 84 bp, synthetic construct
  source 1..84: mol_type = other DNA
agcctggagaccgccctcgagacaccaagtgtctctcttgtgattcctggcgtcgacatgcctggcctttccatctacgttccc

SEQ ID NO: 44205 - DNA, 30 bp, synthetic construct
  source 1..30: mol_type = other DNA
gaggagctgtccggtggcagcgaaaacgcc

SEQ ID NO: 44206 - DNA, 84 bp, synthetic construct
  source 1..84: mol_type = other DNA
actcttccaaccgtatttgagacccctagcgtctctatcgtgatccccggggtcgacatccccgggagtcagatatacgtaccc

SEQ ID NO: 44207 - DNA, 84 bp, synthetic construct
  source 1..84: mol_type = other DNA
agtttacaaactgtcttcgacacaccttccgttagcatagtgctaccgggcgtggagatccccggctctcctatctacgttcca

SEQ ID NO: 44208 - DNA, 87 bp, synthetic construct
  source 1..87: mol_type = other DNA
accctgtctggcgactacgcctcattccaagaagcagtgatggggctgttctccgacccacaaacctttctgaacaacctcatgaat

SEQ ID NO: 44209 - DNA, 57 bp, synthetic construct
  source 1..57: mol_type = other DNA
attctgaaccccatcatccggcctgtgacccacctcttcctgatgggcagctctaag

SEQ ID NO: 44210 - DNA, 192 bp, synthetic construct
  source 1..192: mol_type = other DNA
ttcaggcaacagatgggcatcaaactgaacacggtcttctgctctatgtccaacaccatgagttctacatccatcctgcacacccacctgctcaagtctataattggggcactcattagccaaatcatgggcccctttgttcaatctaacatcaataccggggtcgggctctactcttatgtgccttccttc

SEQ ID NO: 44211 - DNA, 294 bp, synthetic construct
  source 1..294: mol_type = other DNA
tcggttggggtagctggggctgagaccgactactatactgtggacgtcgttaatcctactgataatattgaccttggcgacataaatctgaaagtaatagagcaaaagaattataccgactccaataaaacaacgtactatattgaccataactacaacgagatggagctgattaacgacctcaaacaccccttgaagaactcttgcgaatattatacggtcacttggaacattttctcctatctggaagactaccccgagatcaaccgctactccttcattatactgaaacaa

SEQ ID NO: 44212 - DNA, 33 bp, synthetic construct
  source 1..33: mol_type = other DNA
accttcctgttgaacacagtcgtagaaagtccg

SEQ ID NO: 44213 - DNA, 30 bp, synthetic construct
  source 1..30: mol_type = other DNA
ttccagacacccattagctccggaatcacc

SEQ ID NO: 44214 - DNA, 66 bp, synthetic construct
  source 1..66: mol_type = other DNA
atcggcaaccctcggagcgggatcgccgtgtacatgtcctacctgattttcgagatgggaccaaat

SEQ ID NO: 44215 - DNA, 33 bp, synthetic construct
  source 1..33: mol_type = other DNA
tcccggattcagatctactttcacgtctcgttc

SEQ ID NO: 44216 - DNA, 36 bp, synthetic construct
  source 1..36: mol_type = other DNA
acctacctgagccgggtgacagaaatcaacggagag

SEQ ID NO: 44217 - DNA, 45 bp, synthetic construct
  source 1..45: mol_type = other DNA
cagggaggcgtgattgcctccaccgtacctttctctattaactac

SEQ ID NO: 44218 - DNA, 81 bp, synthetic construct
  source 1..81: mol_type = other DNA
ttccctaacgaaatcggcctcgaacattactggaagtccatcatcccaacattcttcacctcgggccagttctcaagatat

SEQ ID NO: 44219 - DNA, 60 bp, synthetic construct
  source 1..60: mol_type = other DNA
gagagcattgggctcatcgaaaccggcttcgccctgtactcctttaactgctactcatct

SEQ ID NO: 44220 - DNA, 60 bp, synthetic construct
  source 1..60: mol_type = other DNA
atgtccttctcttacttctacttcgacggcaagtttggcttcctgagccagctcgatcct

SEQ ID NO: 44221 - DNA, 33 bp, synthetic construct
  source 1..33: mol_type = other DNA
gtgatccagatttacttcaacgtcagcatctat

SEQ ID NO: 44222 - DNA, 36 bp, synthetic construct
  source 1..36: mol_type = other DNA
acctacctgagcgaagtgacacagatcaacggagag

SEQ ID NO: 44223 - DNA, 30 bp, synthetic construct
  source 1..30: mol_type = other DNA
ataatacagatctacttcaacgtttcgata

SEQ ID NO: 44224 - DNA, 36 bp, synthetic construct
  source 1..36: mol_type = other DNA
acatacctgagccaggtgacccagatcaacggagag

SEQ ID NO: 44225 - DNA, 30 bp, synthetic construct
  source 1..30: mol_type = other DNA
ctcgtaaagacagacataggttcatttaac

SEQ ID NO: 44226 - DNA, 102 bp, synthetic construct
  source 1..102: mol_type = other DNA
cggttcggtatcgaggcgaatgtgatcaacacctactccctggattaccttatcaactgcctcctggggctcagcaaagggattaccaagggccggcatttt

SEQ ID NO: 44227 - DNA, 51 bp, synthetic construct
  source 1..51: mol_type = other DNA
atcaccaacctctctctcatttctaacaaactgaccacttttccctacttc

SEQ ID NO: 44228 - DNA, 42 bp, synthetic construct
  source 1..42: mol_type = other DNA
gacatcctgtttgggagcatgaacatcttcaatcgatcaccc

SEQ ID NO: 44229 - DNA, 72 bp, synthetic construct
  source 1..72: mol_type = other DNA
tactttattcaagcttataaaacctccgtctcaatgggcctggacatgattgacctatcggtagttagccct

SEQ ID NO: 44230 - DNA, 30 bp, synthetic construct
  source 1..30: mol_type = other DNA
gtgatccagatctacttcaacgtcagcatc

SEQ ID NO: 44231 - DNA, 36 bp, synthetic construct
  source 1..36: mol_type = other DNA
acctacctggaccaggtgacacacctcgatgctcat

SEQ ID NO: 44232 - DNA, 78 bp, synthetic construct
  source 1..78: mol_type = other DNA
ccagacttcatggacattatccccgggtgctttctgttcaacctgcggctgcctctcgtgtcctcgggtttttcgatt

SEQ ID NO: 44233 - DNA, 36 bp, synthetic construct
  source 1..36: mol_type = other DNA
accggcatcatcattatcaagctgatggagctcatt

SEQ ID NO: 44234 - DNA, 36 bp, synthetic construct
  source 1..36: mol_type = other DNA
ctgaacgagcggaccattatgggccacctgatcacc

SEQ ID NO: 44235 - DNA, 36 bp, synthetic construct
  source 1..36: mol_type = other DNA
atgaaccctacattctttgacgtggagtacacagcc

SEQ ID NO: 44236 - DNA, 36 bp, synthetic construct
  source 1..36: mol_type = other DNA
ctgaacgatcggacagtgctgggccacgttatcacc

SEQ ID NO: 44237 - DNA, 33 bp, synthetic construct
  source 1..33: mol_type = other DNA
aatccggccttcctgaacctcgagtacacagca

SEQ ID NO: 44238 - DNA, 288 bp, synthetic construct
  source 1..288: mol_type = other DNA
gtcgtgctttcggtagataagtccgtggacgtgtcctacgtcgtggttggcgaccttgttaagtacatcatcattgtccacaatgacggactcagcgacgccaccgacgtcaaggtttgggatgtgctgcccgttggcgtgatgtatgtgtctggggccgacgcttacgacgaggccacacacaatgccacctggaccatcgctaagattgaggctggcaaatccgcctctgtcgtgctggtcgtgaacgaaacacatgaaggtaacatgatcaacagcgtcttcgca

SEQ ID NO: 44239 - DNA, 168 bp, synthetic construct
  source 1..168: mol_type = other DNA
gacagcgccttcgcttactgctgcgagaacactacggtggtcaacgggacctgtggcgtggtcattatctggaacctggagtactctggactcaccgacgctaatgaccagttcaagctgtccgccgtcgattttgccttcggccaaagtaacagtataagccatcgg

SEQ ID NO: 44240 - DNA, 39 bp, synthetic construct
  source 1..39: mol_type = other DNA
aataatccttcgaacgagaccttcaactttatcgtgaag

SEQ ID NO: 44241 - DNA, 36 bp, synthetic construct
  source 1..36: mol_type = other DNA
cccaagatcttcaaccctgacataacctcatacact

SEQ ID NO: 44242 - DNA, 48 bp, synthetic construct
  source 1..48: mol_type = other DNA
ggccacatgcaagtctacatgatctcccggattaacctgagcttgaca

SEQ ID NO: 44243 - DNA, 87 bp, synthetic construct
  source 1..87: mol_type = other DNA
atggatctggacctgatcgattcgatctactacgccgtgatcacaatggcagcagtcggttatggggacttctaccccactactgcc

SEQ ID NO: 44244 - DNA, 42 bp, synthetic construct
  source 1..42: mol_type = other DNA
agcctcagctgggacgtcggagcacaggtggataacacatgg

SEQ ID NO: 44245 - DNA, 33 bp, synthetic construct
  source 1..33: mol_type = other DNA
ggcagcctgtgccccattcatactgaactgcct

SEQ ID NO: 44246 - DNA, 36 bp, synthetic construct
  source 1..36: mol_type = other DNA
aacattaccggcggtgacatgaccctgacttacaac

SEQ ID NO: 44247 - DNA, 30 bp, synthetic construct
  source 1..30: mol_type = other DNA
gccgagctgtctggtggttcttccgacgcg

SEQ ID NO: 44248 - DNA, 93 bp, synthetic construct
  source 1..93: mol_type = other DNA
aataacgatgaccgtagtgcatctgaagttatgcgtggctttttgagcttttcggacgataccctgatgggcagatatgtctggaacatcgac

SEQ ID NO: 44249 - DNA, 42 bp, synthetic construct
  source 1..42: mol_type = other DNA
tactttgacgccggagcagcgttcggcggcgagttcatgcag

SEQ ID NO: 44250 - DNA, 75 bp, synthetic construct
  source 1..75: mol_type = other DNA
tacatggccgacacggcgcaactaagccagattgtctcttggagcttcggcacaattaactacgctacatgggaa

SEQ ID NO: 44251 - DNA, 36 bp, synthetic construct
  source 1..36: mol_type = other DNA
gagaagatcgtgaatcccactgccgccaactacacc

SEQ ID NO: 44252 - DNA, 75 bp, synthetic construct
  source 1..75: mol_type = other DNA
tactactttgtccaagcgtacaagacctctgtgtccatgggcctcgacatgatcgacctgagcgttgtatcgcca

SEQ ID NO: 44253 - DNA, 33 bp, synthetic construct
  source 1..33: mol_type = other DNA
cagatttccgagtacttcaacaccagcatcgcc

SEQ ID NO: 44254 - DNA, 36 bp, synthetic construct
  source 1..36: mol_type = other DNA
tacttcctgcaaactgtgtcccatgtctatacctac

SEQ ID NO: 44255 - DNA, 36 bp, synthetic construct
  source 1..36: mol_type = other DNA
cacaagatcattagcccaaccaacgtatcttactcc

SEQ ID NO: 44256 - DNA, 78 bp, synthetic construct
  source 1..78: mol_type = other DNA
atttgggagatgcctgacttcctgcctgccctcggcgacaagatcgccgctgagggctttgggaccgatgcaaacgct

SEQ ID NO: 44257 - DNA, 30 bp, synthetic construct
  source 1..30: mol_type = other DNA
accatgatgggcagcgagtcccctaacatg

SEQ ID NO: 44258 - DNA, 48 bp, synthetic construct
  source 1..48: mol_type = other DNA
gccggcgtgcccatcttctccaccatttccaccgtaataactgaacct

SEQ ID NO: 44259 - DNA, 39 bp, synthetic construct
  source 1..39: mol_type = other DNA
ttcgggatcgaccgggccattggtggctccgatatggga

SEQ ID NO: 44260 - DNA, 33 bp, synthetic construct
  source 1..33: mol_type = other DNA
tacatgattatagtgaaaaaggtcgacatctct

SEQ ID NO: 44261 - DNA, 69 bp, synthetic construct
  source 1..69: mol_type = other DNA
accatgaacgtgaacggcgtgcctgccaattcccgcgggctcattgtgatgatcagcgctctgcttggg

SEQ ID NO: 44262 - DNA, 33 bp, synthetic construct
  source 1..33: mol_type = other DNA
acccctcggcccgagggactcttcatcgctaac

SEQ ID NO: 44263 - DNA, 33 bp, synthetic construct
  source 1..33: mol_type = other DNA
tacatcaccgtgttccgtcaactcaacttcaat

SEQ ID NO: 44264 - DNA, 33 bp, synthetic construct
  source 1..33: mol_type = other DNA
aataagagcacaaacggcgagtctctttgggct

SEQ ID NO: 44265 - DNA, 72 bp, synthetic construct
  source 1..72: mol_type = other DNA
accattgacgtgttcggagtgcccgctaacgcccgcggtctgatcgtcatgatagcagcacttagtggcttg

SEQ ID NO: 44266 - DNA, 30 bp, synthetic construct
  source 1..30: mol_type = other DNA
acaccaaaggacggcatcatgattgctaac

SEQ ID NO: 44267 - DNA, 45 bp, synthetic construct
  source 1..45: mol_type = other DNA
agccagcccgctgcccctaccatgtccgccgtgctcaatctgaac

SEQ ID NO: 44268 - DNA, 39 bp, synthetic construct
  source 1..39: mol_type = other DNA
atggccagcgctggcacttgggaggcactgttcgaacac

SEQ ID NO: 44269 - DNA, 45 bp, synthetic construct
  source 1..45: mol_type = other DNA
ttcatcgtccggcttctggacgacactgggtcttatgttggagct

SEQ ID NO: 44270 - DNA, 168 bp, synthetic construct
  source 1..168: mol_type = other DNA
tacaccattaccacggaatacatggactgcatcgagtctaacgtggtgtccgtgatcagtatcctcaacgccgataatctgaccaagcaatacggagacaacagccagttcgtcgctaacctggtcgacgggcagggacatcctcacccaaaccagaacgttacattt

SEQ ID NO: 44271 - DNA, 48 bp, synthetic construct
  source 1..48: mol_type = other DNA
aacggcgtcacctaccgacgaactacagacaacaatggacaggctaag

SEQ ID NO: 44272 - DNA, 66 bp, synthetic construct
  source 1..66: mol_type = other DNA
gagtacataattacatcaacgtacaacgaccttagtatttccaataagattatcatcctctctcca

SEQ ID NO: 44273 - DNA, 42 bp, synthetic construct
  source 1..42: mol_type = other DNA
atcggcattgaccagatcgtttatgcattgtctgctgccaac

SEQ ID NO: 44274 - DNA, 30 bp, synthetic construct
  source 1..30: mol_type = other DNA
ttcgcctccgctggcattcctagcggaatc

SEQ ID NO: 44275 - DNA, 45 bp, synthetic construct
  source 1..45: mol_type = other DNA
cagggcggaatcctgaccgccgctgtcccatttagcatgcagtac

SEQ ID NO: 44276 - DNA, 81 bp, synthetic construct
  source 1..81: mol_type = other DNA
tttcctgctgatttttccctcgagagcgtttggaagggtatcctgcctaccttctacaccaacgggcaattcagtcgctac

SEQ ID NO: 44277 - DNA, 60 bp, synthetic construct
  source 1..60: mol_type = other DNA
cagagctggggcttcatcgagaccggctttgacatttacgccttcaactgctatctgagc

SEQ ID NO: 44278 - DNA, 60 bp, synthetic construct
  source 1..60: mol_type = other DNA
atgagcgtggaccactactttctgtccggcaagttcgccttcctggctaacatggatccc

SEQ ID NO: 44279 - DNA, 57 bp, synthetic construct
  source 1..57: mol_type = other DNA
acatataacacctccggctttaacttcaatatcagcaagttcaactacatcttcaag

SEQ ID NO: 44280 - DNA, 51 bp, synthetic construct
  source 1..51: mol_type = other DNA
atcatgcccttggacaagttcgatggggacatcagaattatgactgtcatg

SEQ ID NO: 44281 - DNA, 36 bp, synthetic construct
  source 1..36: mol_type = other DNA
agtcagatcagcgagtacttcaacaccagcattagc

SEQ ID NO: 44282 - DNA, 36 bp, synthetic construct
  source 1..36: mol_type = other DNA
tattttttgcaaactgttagccacatctacacctac

SEQ ID NO: 44283 - DNA, 36 bp, synthetic construct
  source 1..36: mol_type = other DNA
cccaagatcctgcaccctgacgtgaccagctacacc

SEQ ID NO: 44284 - DNA, 42 bp, synthetic construct
  source 1..42: mol_type = other DNA
aaccccacattcatgcaaacggggactagtagttcagacatt

SEQ ID NO: 44285 - DNA, 39 bp, synthetic construct
  source 1..39: mol_type = other DNA
ttagtctccgaacccgtcaacggtgccatcgctccttat

SEQ ID NO: 44286 - DNA, 111 bp, synthetic construct
  source 1..111: mol_type = other DNA
ggatacggtactatgaagatcccctttgccgagtgctactccatcttatgggatcacattaccggggatatcggggatactcagctggactacatagtggttaaggaacgc

SEQ ID NO: 44287 - DNA, 75 bp, synthetic construct
  source 1..75: mol_type = other DNA
aagctgaacgcagaccccgatagcctggctaagatctacgcttggaccgtcgggaccgtcagtgacgccaaatgg

SEQ ID NO: 44288 - DNA, 45 bp, synthetic construct
  source 1..45: mol_type = other DNA
atcattgtgattatcatgctgctgtacatcaagatccggaagaag

SEQ ID NO: 44289 - DNA, 39 bp, synthetic construct
  source 1..39: mol_type = other DNA
attacccggaaccatggcctgataatgcagcacaaaacc

SEQ ID NO: 44290 - DNA, 75 bp, synthetic construct
  source 1..75: mol_type = other DNA
caggaactggaatttacgccacaacttgtgttcaacatcttcttcggcgtcaagggtggaatgggtgcaattctc

SEQ ID NO: 44291 - DNA, 42 bp, synthetic construct
  source 1..42: mol_type = other DNA
accagcctggctaacgggaagttctactccgccaattacttt

SEQ ID NO: 44292 - DNA, 39 bp, synthetic construct
  source 1..39: mol_type = other DNA
gccaaatacctgtaccggatcaagttctataactctccc

SEQ ID NO: 44293 - DNA, 33 bp, synthetic construct
  source 1..33: mol_type = other DNA
atgatgatcaattttatccactacgacaacttc

SEQ ID NO: 44294 - DNA, 81 bp, synthetic construct
  source 1..81: mol_type = other DNA
cacctcttcgataatagtttcttggtaacaaacctgaacctgttcatctttaataacattgagattcgacccaacattata

SEQ ID NO: 44295 - DNA, 36 bp, synthetic construct
  source 1..36: mol_type = other DNA
atcaacgagcccgtcggcggcattatcccaccttac

SEQ ID NO: 44296 - DNA, 132 bp, synthetic construct
  source 1..132: mol_type = other DNA
atgtacgggacactcgatttgtccgccggaaaagtattcgatctgttctgggaccacctgtccggccgcacatatgacagaatccaggaaaatgatgactggttctctgatcggattctctgggagtatcgg

SEQ ID NO: 44297 - DNA, 36 bp, synthetic construct
  source 1..36: mol_type = other DNA
ctggggcttagcgttggtggcggttcaactggcgga

SEQ ID NO: 44298 - DNA, 75 bp, synthetic construct
  source 1..75: mol_type = other DNA
gtcacctccgattcggcggatctgcaaaccgtgtaccggtggcaggtcggatatctggctgatatccggatggat

SEQ ID NO: 44299 - DNA, 45 bp, synthetic construct
  source 1..45: mol_type = other DNA
gtgaggctgatcggtcgcgagggcttcagcctggtttacacaccc

SEQ ID NO: 44300 - DNA, 105 bp, synthetic construct
  source 1..105: mol_type = other DNA
ctcgggtcctatagaatgtctatgaccgaggcatattccgccctttgggattacatcgccggtagcgatagcgagtccaccgctgtggcggcgattcggcttcgc

SEQ ID NO: 44301 - DNA, 78 bp, synthetic construct
  source 1..78: mol_type = other DNA
atgctttccgctgaccccaactctgcctccactgtgtattcttggagcatcgggtccctcggcatgattgaggaatcc

SEQ ID NO: 44302 - DNA, 36 bp, synthetic construct
  source 1..36: mol_type = other DNA
agctttaattaccggttcgaggaccctctgaacccc

SEQ ID NO: 44303 - DNA, 54 bp, synthetic construct
  source 1..54: mol_type = other DNA
attggcggaatcccactgttcaatagcgtgctgaagtccaacgccaccacaaac

SEQ ID NO: 44304 - DNA, 240 bp, synthetic construct
  source 1..240: mol_type = other DNA
tctcagagcattgcgacgcaacactggaccctgaaccccctggagctggtcttttatcgagcagcattcaccctggaggtcttcgagaaaattatcccactcggagcctctacacatgggcatgtcctaagtttgatattcagttctggctcccctcggaccttcatcggcgagcacgtcctgcactatactgtctgtcttacttccacactgttcggccccgtgtaccttgactttggc

SEQ ID NO: 44305 - DNA, 36 bp, synthetic construct
  source 1..36: mol_type = other DNA
cccaagatcttccaccctgacgtgacaagctacacc

SEQ ID NO: 44306 - DNA, 117 bp, synthetic construct
  source 1..117: mol_type = other DNA
atcggacctacaatggtcctgagcccctgggatgctttcggcgacctgttctccgccctcggcaaggacgaaggcgtgatgacagctgccgagtctgccgtttttgtttcgcgattt

SEQ ID NO: 44307 - DNA, 42 bp, synthetic construct
  source 1..42: mol_type = other DNA
ttcggctttaccctcttcgggctcctccctttgcattctccc

SEQ ID NO: 44308 - DNA, 69 bp, synthetic construct
  source 1..69: mol_type = other DNA
gtcttcagcggggacagcgtgtcctccgtgctgctgtggctcttcgggtcgttctccgacatcgatatg

SEQ ID NO: 44309 - DNA, 90 bp, synthetic construct
  source 1..90: mol_type = other DNA
ttcggcgacggagaggagtcggtcaacgatttcatcatgatcttcgccgaggcagttggcatggacggtgacatctcctgggaaggagtc

SEQ ID NO: 44310 - DNA, 33 bp, synthetic construct
  source 1..33: mol_type = other DNA
aacgagcccattggcggcatcatccctccttac

SEQ ID NO: 44311 - DNA, 48 bp, synthetic construct
  source 1..48: mol_type = other DNA
gctgccgcaattatcatcgccggcgtcggcttcatgtttctgcggcgc

SEQ ID NO: 44312 - DNA, 54 bp, synthetic construct
  source 1..54: mol_type = other DNA
ctgaaccctatcgtgcatcctattacccacctcttcctgatgggcagtagcaag

SEQ ID NO: 44313 - DNA, 186 bp, synthetic construct
  source 1..186: mol_type = other DNA
cggtaccagatgggaatcgggctcaacaccattttcatgactatcggcaagagcatcagtagcacatccatcctgcacacccacctgctgaagtccattttcggcgaggtcattacgaacctgatgggacccttcatcgagtctgaaatcaataccggcgtcgggctctatgcctacatccctgag

SEQ ID NO: 44314 - DNA, 270 bp, synthetic construct
  source 1..270: mol_type = other DNA
atcctcggcgctaacaccgactattacgaagtcgacgtggccaaccctgccgacaacatcgagctgaaggggttccccatcgagaacgtgactcatagccacaacaagaccacctatatcatgaacagtaactacaacgagatggagctgctcaacgatcttaaaatcccactgaataactcctgcgactattacactgtgtcgtggaatattttctcttatctggagccagaccaccctattacaaacctttacgagtccctgaagaat

SEQ ID NO: 44315 - DNA, 72 bp, synthetic construct
  source 1..72: mol_type = other DNA
tatttcattcaagcatataaaacctctgtgtcaatgggcctggatatgatggatctttccgtcgtgtcaccc

SEQ ID NO: 44316 - DNA, 54 bp, synthetic construct
  source 1..54: mol_type = other DNA
ctgaaccccatcattcaccctatcacccacctgttcctcatgggctcaagcaag

SEQ ID NO: 44317 - DNA, 189 bp, synthetic construct
  source 1..189: mol_type = other DNA
ttccggtggcagatgggcattgggctgaatactatctttatggtcatgggcaagagcatcagctctacatccatcctgcacacccacctcctgaagtccattttcggcgaggtcattaccaacctcatcgggcccttcatcgggaacgagataaatacgggtgtcggtttataccaatacctacctgat

SEQ ID NO: 44318 - DNA, 270 bp, synthetic construct
  source 1..270: mol_type = other DNA
gtgatcggcgccaacaccgaatactacgaggtcgacgtcatgaacccctctgacaacatcgaactgaacaacttccctattgagaatgtgactcacgatggaaacaagacaacctatattatcaactcaaactataacgagatggagcttctcaacgacctcaagggccccctgaacaagaaatgtgactactacaccgtgtcctggaacacattctcctacctggagcctagccacccaattaacgagctctatcaaaagctgaagaat

SEQ ID NO: 44319 - DNA, 54 bp, synthetic construct
  source 1..54: mol_type = other DNA
ctgaaccccatcattcaccctatcacccacctcttcctgatgggaagctccaag

SEQ ID NO: 44320 - DNA, 183 bp, synthetic construct
  source 1..183: mol_type = other DNA
cggtaccagatgggcatcggactcaataccattttcatgaccatgggaaaaagcatctcctccactagcatcctgcacacacacctgctcaaatctatctttggagaggccatcacaaacctgatcggccctttcatcggatctgagatcaacaccggtgtcggcctttaccaatacatcccc

SEQ ID NO: 44321 - DNA, 270 bp, synthetic construct
  source 1..270: mol_type = other DNA
gtgatcggggcgaatactgactactacgaggttgaagtagtaaacccggctgacaatatcgaactcaatgattttcctattaagaacgtcacacacgacggcaacaagactgtctatattgtggacagtaactacaacgagatggagctgctgaacgacctcaagaagcctctgaacaatcgctgtgactactacaccgtgtcttggaacaccttctcgtaccttgagcccgaccacccaatcaccaatctgtattactccctgaagaat

SEQ ID NO: 44322 - DNA, 96 bp, synthetic construct
  source 1..96: mol_type = other DNA
atcttcctgagcgacgatgaggcttgggtcgaagccgttaacacggccaccgcgttcattggcctgatgaccggccagcattttccggtcgtagag

SEQ ID NO: 44323 - DNA, 63 bp, synthetic construct
  source 1..63: mol_type = other DNA
ctgttctttacggtttccgtgctccacgcttctgactctctgtccggcatcacgacgatcgtg

SEQ ID NO: 44324 - DNA, 72 bp, synthetic construct
  source 1..72: mol_type = other DNA
ctgactctccctggggccagcatcggctacacacaaatcttcacacctgattggagtgccctcacgaacctg

SEQ ID NO: 44325 - DNA, 105 bp, synthetic construct
  source 1..105: mol_type = other DNA
ttcatggctctgacaagcggcatcccatttaatgagctcgtgactgagggcaccggcctggccttcgtcgtcttccccaaagtgttcaacgtgatgggaccttgg

SEQ ID NO: 44326 - DNA, 57 bp, synthetic construct
  source 1..57: mol_type = other DNA
ggcatcgaccagttcatccggcccttcgcgcaacctatcctgatggggagtagcaag

SEQ ID NO: 44327 - DNA, 183 bp, synthetic construct
  source 1..183: mol_type = other DNA
ctgagatctaccctcggcctcgactggaacactattctcgtgatcatgaaccctagcatgacctccacatctatcctgcactctcacctgtataaggccatcttcggcataatcctgggcggtatcctcacatacataccggccggcatacataccggctcttcactgtccgcatatacaccc

SEQ ID NO: 44328 - DNA, 228 bp, synthetic construct
  source 1..228: mol_type = other DNA
gccttctacggcgcatgtcccgactcctatgaagtcaatatttataacacacacgatatcgacgctctgaatcaatatgataccctgaatctcactgagcatcagaacaagaccaccgtgtacttatctaatgagtacaacgagatggagctgcttaacaacctggccgtctctctcgacggcaaatgtgattggtactccctgagttggaatatatactcctacctg

SEQ ID NO: 44329 - DNA, 33 bp, synthetic construct
  source 1..33: mol_type = other DNA
tacatgatcatcgtgaagaaagtcgacatcagc

SEQ ID NO: 44330 - DNA, 30 bp, synthetic construct
  source 1..30: mol_type = other DNA
aacaagagcgcacacggcgaatctttgtgg

SEQ ID NO: 44331 - DNA, 69 bp, synthetic construct
  source 1..69: mol_type = other DNA
accatgaacgtgaatggagtgccagcgaactcccggggcctgatcgtcatgattagcgctctccttggc

SEQ ID NO: 44332 - DNA, 33 bp, synthetic construct
  source 1..33: mol_type = other DNA
acacccagacctgacggcctcctgatcgcaaac

SEQ ID NO: 44333 - DNA, 81 bp, synthetic construct
  source 1..81: mol_type = other DNA
ctgagtaatacctatcctactttcctggacgcagtattcgggctgaaggagccccagacactgtttggctccctgtttaaa

SEQ ID NO: 44334 - DNA, 42 bp, synthetic construct
  source 1..42: mol_type = other DNA
cgactcatcgggaccgatggcttctccctagtatacactcca

SEQ ID NO: 44335 - DNA, 36 bp, synthetic construct
  source 1..36: mol_type = other DNA
tatatgatcaccgtagagcacgtaaacgcagcagta

SEQ ID NO: 44336 - DNA, 30 bp, synthetic construct
  source 1..30: mol_type = other DNA
aagtccaccaacggcgagtcactgcttgct

SEQ ID NO: 44337 - DNA, 69 bp, synthetic construct
  source 1..69: mol_type = other DNA
accatggacattcacgggattcccgctaactcccggggcctgatcgtgatgatcagcgccatgcttggc

SEQ ID NO: 44338 - DNA, 81 bp, synthetic construct
  source 1..81: mol_type = other DNA
cccgagttcctggacgtgctgcctaattacatgttttttgggatgagccttcctctgaacgtgctcaatatcaacatacca

SEQ ID NO: 44339 - DNA, 39 bp, synthetic construct
  source 1..39: mol_type = other DNA
aacaccgtggaactgatccgcatcctgcttgagctcatc

SEQ ID NO: 44340 - DNA, 33 bp, synthetic construct
  source 1..33: mol_type = other DNA
ggcccgcaaatgggaatcgaccctcttttcacc

SEQ ID NO: 44341 - DNA, 33 bp, synthetic construct
  source 1..33: mol_type = other DNA
gcccctaagatgcagatcacacctctgttcacc

SEQ ID NO: 44342 - DNA, 33 bp, synthetic construct
  source 1..33: mol_type = other DNA
gggcctcagatgggcatcgagccccttttcact

SEQ ID NO: 44343 - DNA, 33 bp, synthetic construct
  source 1..33: mol_type = other DNA
ggcccacaaatggggatcgagcctctgttcact

SEQ ID NO: 44344 - DNA, 36 bp, synthetic construct
  source 1..36: mol_type = other DNA
ctggaccaactcgcccctaacgctccctctgttagc

SEQ ID NO: 44345 - DNA, 42 bp, synthetic construct
  source 1..42: mol_type = other DNA
tacagccccgacgcccctatcgtcaagaccttcaacatgtac

SEQ ID NO: 44346 - DNA, 63 bp, synthetic construct
  source 1..63: mol_type = other DNA
accggcctgtctaactggatgggggccggcattacaaacctgatcgggtccaatccatctgag

SEQ ID NO: 44347 - DNA, 33 bp, synthetic construct
  source 1..33: mol_type = other DNA
accacagccatgagcctgggcttcagtccaatc

SEQ ID NO: 44348 - DNA, 36 bp, synthetic construct
  source 1..36: mol_type = other DNA
ggccctatgatgaacgtgaccccaacattcactccc

SEQ ID NO: 44349 - DNA, 33 bp, synthetic construct
  source 1..33: mol_type = other DNA
ggaccccaagttggcatcagccctcttttcacg

SEQ ID NO: 44350 - DNA, 33 bp, synthetic construct
  source 1..33: mol_type = other DNA
tgccccatgatgggcctgaaccctctgttcact

SEQ ID NO: 44351 - DNA, 33 bp, synthetic construct
  source 1..33: mol_type = other DNA
gctccccaaatcggcatcgacccccttttcaca

SEQ ID NO: 44352 - DNA, 117 bp, synthetic construct
  source 1..117: mol_type = other DNA
gtgggccctaacggattcattaaccccgtcgaggcctactcttcgctgttttctgctatcggcaagtctggcgaaggcatgacatccaccgaggtgaccgtttattcgtcgagagca

SEQ ID NO: 44353 - DNA, 42 bp, synthetic construct
  source 1..42: mol_type = other DNA
tacggattcaccttcttcggactaatttccgcccactctcca

SEQ ID NO: 44354 - DNA, 69 bp, synthetic construct
  source 1..69: mol_type = other DNA
atatttgcggggaatgctgtgtccaatgccatgctgtggctgttcggatcatttgcacaaatatcaagg

SEQ ID NO: 44355 - DNA, 33 bp, synthetic construct
  source 1..33: mol_type = other DNA
ggccctcaaattggaatcgagcctctgttcact

SEQ ID NO: 44356 - DNA, 33 bp, synthetic construct
  source 1..33: mol_type = other DNA
ggaccccagatgggaatcgaacctctgttcacc

SEQ ID NO: 44357 - DNA, 30 bp, synthetic construct
  source 1..30: mol_type = other DNA
tacgtgtcacgcgacatcaacggacctaat

SEQ ID NO: 44358 - DNA, 75 bp, synthetic construct
  source 1..75: mol_type = other DNA
atgagccacgggttcaacctggactccgccctgaagatcttctttggcacggctggaaccctcggcgtgcatttc

SEQ ID NO: 44359 - DNA, 36 bp, synthetic construct
  source 1..36: mol_type = other DNA
gtccccaggagccacctggtgcatcagttcgttcgg

SEQ ID NO: 44360 - DNA, 33 bp, synthetic construct
  source 1..33: mol_type = other DNA
atcaagttcattaacttcactcaaggtagctcc

SEQ ID NO: 44361 - DNA, 63 bp, synthetic construct
  source 1..63: mol_type = other DNA
accaagtccctgattatcgattgcgccaacacctgggacctgtccactcaagcccagcacttt

SEQ ID NO: 44362 - DNA, 54 bp, synthetic construct
  source 1..54: mol_type = other DNA
gcctggatcatcagcgagcactacgacgtgaattacaaccgaagggataccatc

SEQ ID NO: 44363 - DNA, 171 bp, synthetic construct
  source 1..171: mol_type = other DNA
atgtcatacaagacctttttcaacaataattctgtcacctgttgggacctgaactggggaggagacgggggggccatttacgccaagggcaacgtagtggcccactattgcgatttcaacggcaactcagccacgcgcaacgctaacgatatttactgttccaacctttac

SEQ ID NO: 44364 - DNA, 33 bp, synthetic construct
  source 1..33: mol_type = other DNA
gggccacagatgggcatcgagcctctgttcacc

SEQ ID NO: 44365 - DNA, 33 bp, synthetic construct
  source 1..33: mol_type = other DNA
gccacacaagtcggtttcgagccccttttcacc

SEQ ID NO: 44366 - DNA, 51 bp, synthetic construct
  source 1..51: mol_type = other DNA
aacctcgccggtatcgaaaatggcctgaagaacgctgccatgggcggaaaa

SEQ ID NO: 44367 - DNA, 81 bp, synthetic construct
  source 1..81: mol_type = other DNA
ctcgacatcgtcgaaaacgctgatctcatcgccgataaaattaggaagatacttcgggtcaacgatgaggatgacacggtg

SEQ ID NO: 44368 - DNA, 60 bp, synthetic construct
  source 1..60: mol_type = other DNA
ctgccattcgagcggctgaacgtcgccgctgactactcggtctccacaatgcagactggg

SEQ ID NO: 44369 - DNA, 87 bp, synthetic construct
  source 1..87: mol_type = other DNA
atccaggccatcatcgattcattcgaggtcaacatgttcgacgccagcactattaagacatccgtgatgggcgcttacccaagaacc

SEQ ID NO: 44370 - DNA, 39 bp, synthetic construct
  source 1..39: mol_type = other DNA
tacggcctgcggaacgtcatggccaatcatgtggttgcc

SEQ ID NO: 44371 - DNA, 144 bp, synthetic construct
  source 1..144: mol_type = other DNA
tccagcatcatggagcagacagctatgattgagactggggatgctaccggcgccttcgaacggatgcacctgctcaccctggcctaccaagggctgaacgccgacaatctcgtgtttgatatcgtgaaggagaacggcaaaggg

SEQ ID NO: 44372 - DNA, 69 bp, synthetic construct
  source 1..69: mol_type = other DNA
cgggctattgaggacaacgtcatccgggtggccaaaaagatgcccagcggctataacatgtacgaacca

SEQ ID NO: 44373 - DNA, 45 bp, synthetic construct
  source 1..45: mol_type = other DNA
acagtgctctactataacgacatgctggaatacgagacaggactg

SEQ ID NO: 44374 - DNA, 108 bp, synthetic construct
  source 1..108: mol_type = other DNA
atcggagacctccacgtcggcttcttcaatagctatggcgtgatctttgcccatcttaccggagatgtgaccgacgataacgctgactacattatctgggaatggaga

SEQ ID NO: 44375 - DNA, 75 bp, synthetic construct
  source 1..75: mol_type = other DNA
ctatgggttgatcccgacaagctcgaagagatttaccggtggagcgtcggcaccatcgatggagccaaatgggac

SEQ ID NO: 44376 - DNA, 33 bp, synthetic construct
  source 1..33: mol_type = other DNA
gtgcccatgatgggcctgacacctgtgttcacc

SEQ ID NO: 44377 - DNA, 33 bp, synthetic construct
  source 1..33: mol_type = other DNA
gggccccagatcggcattgagcctctcttcacc

SEQ ID NO: 44378 - DNA, 33 bp, synthetic construct
  source 1..33: mol_type = other DNA
ggaccccagatgggcatcgagcctctgttcacc

SEQ ID NO: 44379 - DNA, 33 bp, synthetic construct
  source 1..33: mol_type = other DNA
ggaccgcaaatgggtatcgaccctctcttcacc

SEQ ID NO: 44380 - DNA, 33 bp, synthetic construct
  source 1..33: mol_type = other DNA
ggccccatgatgaacatcaatgctgtctttaca

SEQ ID NO: 44381 - DNA, 33 bp, synthetic construct
  source 1..33: mol_type = other DNA
gcccctatgatgggccttaagcccgtattctcc

SEQ ID NO: 44382 - DNA, 51 bp, synthetic construct
  source 1..51: mol_type = other DNA
gcggtttgccgctcctgttcatatggagaatatgaactagaccccgctaag

SEQ ID NO: 44383 - DNA, 36 bp, synthetic construct
  source 1..36: mol_type = other DNA
ctgtacttccctaaaagcactggaccaggcgatcgc

SEQ ID NO: 44384 - DNA, 36 bp, synthetic construct
  source 1..36: mol_type = other DNA
tactaccacattcgagagctgatcggggttaatgta

SEQ ID NO: 44385 - DNA, 48 bp, synthetic construct
  source 1..48: mol_type = other DNA
ctcggcggcatccccttgctgagcggccaccttaaggctagagcagcc

SEQ ID NO: 44386 - DNA, 252 bp, synthetic construct
  source 1..252: mol_type = other DNA
gtgaagtctattgaatggcagacatggacactgaaccctatcgaacttttgttctatcgggcgggatataccttgcaagtactgggcaacgccgtggtgctgcaaggcagcacgcacgggcagctgctgtataacacactgactggctttatgaaaagcacagatccacgggtcattgtcgggtctaccacactgggttacgctcattccacaaccagcatgatatttggtcccgcacttcttgatttcgga

SEQ ID NO: 44387 - DNA, 36 bp, synthetic construct
  source 1..36: mol_type = other DNA
cactaccacctgcataagctcatcggcgttgaccag

SEQ ID NO: 44388 - DNA, 51 bp, synthetic construct
  source 1..51: mol_type = other DNA
ctggggggaatcccactgttctctggttacctgaaagcaagggctgccact

SEQ ID NO: 44389 - DNA, 252 bp, synthetic construct
  source 1..252: mol_type = other DNA
gtgatctcaatcgaatggcagacctggtcctcaacacctatcgaacttctcttttaccgggcaggatataccttacaagtgctcgatcatgccgttttcttgcaaggcagcacccacgggcagctgctctacaacacactgatgggattcttcaaaagctctgatcctagggtcattgtcggctctaccaccttgggatatgcccattcaactaccagtaccatatttggaccagcactgcttgattttggg

SEQ ID NO: 44390 - DNA, 36 bp, synthetic construct
  source 1..36: mol_type = other DNA
cactaccatctgaacaagctgatcggtgtcaatggc

SEQ ID NO: 44391 - DNA, 51 bp, synthetic construct
  source 1..51: mol_type = other DNA
ctggggggcattccactcttttctggttacctcaaggctagggccgcaaca

SEQ ID NO: 44392 - DNA, 255 bp, synthetic construct
  source 1..255: mol_type = other DNA
gccgtgaagagtatcgagtggcagacctggtctaccactcctatcgagctgcttttttatcgagcgggctacactttgcaagtcctcgaccacgccgcctttatgcaaggcagtacccatggccagctgctgtataacacactcatggggtttttcaaaagctccgacccccgtgtcatagtcgggagcaccattctcggaaaggctcattcgactacatctaccatcttcggaccagctctgcttgattttggc

SEQ ID NO: 44393 - DNA, 36 bp, synthetic construct
  source 1..36: mol_type = other DNA
atctacgtgtctcgggacattaattcttcatcgttg

SEQ ID NO: 44394 - DNA, 78 bp, synthetic construct
  source 1..78: mol_type = other DNA
atcataagcccacctttcaatctggacaactccattaagatctttctcggaaccggtggcacactgggagtgcatttt

SEQ ID NO: 44395 - DNA, 42 bp, synthetic construct
  source 1..42: mol_type = other DNA
ccccggacacacatggcccacgtcttcgtgaccctgggttac

SEQ ID NO: 44396 - DNA, 42 bp, synthetic construct
  source 1..42: mol_type = other DNA
atcaacctgattagatacgtgaactttactcaagggtcctct

SEQ ID NO: 44397 - DNA, 36 bp, synthetic construct
  source 1..36: mol_type = other DNA
gtggtcgacaaggagaccggcgaagagagcatcgtg

SEQ ID NO: 44398 - DNA, 63 bp, synthetic construct
  source 1..63: mol_type = other DNA
atcaaggcagtctgccggagctgtagctatggcgaatatgatttagacccagccaaagcagaa

SEQ ID NO: 44399 - DNA, 57 bp, synthetic construct
  source 1..57: mol_type = other DNA
tgcccctgcaacgtgctgagcttccctaaggccacaggcccaggagatagaggtacc

SEQ ID NO: 44400 - DNA, 147 bp, synthetic construct
  source 1..147: mol_type = other DNA
ggcattaacgcttacgatatgacatttagcgaggcctggaacgtcttcatcgaccacctgcgcaacggccggcccgaacggatcgccggagaccacgagtcttacgtgacctggctcactgactacgtcgttgtatactccaatgct

SEQ ID NO: 44401 - DNA, 36 bp, synthetic construct
  source 1..36: mol_type = other DNA
tacggcgtctgcatcctgccctttgcatcgggcgat

SEQ ID NO: 44402 - DNA, 78 bp, synthetic construct
  source 1..78: mol_type = other DNA
cggttcaacgccagcgaggaggatctcaaaaccatctacgattggaccgttggttctgttggctctgtcacatgggac

SEQ ID NO: 44403 - DNA, 33 bp, synthetic construct
  source 1..33: mol_type = other DNA
ttcgtgacccgggacatcaactcccctaatctg

SEQ ID NO: 44404 - DNA, 78 bp, synthetic construct
  source 1..78: mol_type = other DNA
cacatctaccacggctttaatctgtccaacgctattgccattttcttcgggaagagcggcaccatcggagtgcatttg

SEQ ID NO: 44405 - DNA, 48 bp, synthetic construct
  source 1..48: mol_type = other DNA
gtgccccggtcccatctcgtccacaagttcgtggccctgagctacttt

SEQ ID NO: 44406 - DNA, 42 bp, synthetic construct
  source 1..42: mol_type = other DNA
atgaatctcattaaggttatcaatttctctaacggtcatccc

SEQ ID NO: 44407 - DNA, 147 bp, synthetic construct
  source 1..147: mol_type = other DNA
gggatcaatgcctacgacatgaccttctccgacgcttggagtgtcttcattgatcacctcaagaacggcaggcccgagcgggttgttggcgatcacgattcctacgtgacatggctgactgactatgtggtagtctactctaatgcc

SEQ ID NO: 44408 - DNA, 39 bp, synthetic construct
  source 1..39: mol_type = other DNA
gtctacgacgtttgtatcctgcccttcgcttctggagat

SEQ ID NO: 44409 - DNA, 81 bp, synthetic construct
  source 1..81: mol_type = other DNA
ctggtgaccgctcctagcgaatccctcgccgatgcatactcttggcgagtcggcgacctgggaagatcagcaggagggaat

SEQ ID NO: 44410 - DNA, 33 bp, synthetic construct
  source 1..33: mol_type = other DNA
gagtgccctaaatgcggtgctcaattcgacggg

SEQ ID NO: 44411 - DNA, 123 bp, synthetic construct
  source 1..123: mol_type = other DNA
aacgtcgtgacccacaaggacggaaccagtgatgtgtccgaggagactaaaacctgccccaactgcggcaagtccatccctgccaatagtgcccggtgtccaaactgcgggaagaagtttgag

SEQ ID NO: 44412 - DNA, 69 bp, synthetic construct
  source 1..69: mol_type = other DNA
ccaaagctgttctatcctagcatgagttccacctacatcctgccaagctggaacccagcctggtctatg

SEQ ID NO: 44413 - DNA, 33 bp, synthetic construct
  source 1..33: mol_type = other DNA
gagtgccccaaatgcggagcgcagttcgacgga

SEQ ID NO: 44414 - DNA, 102 bp, synthetic construct
  source 1..102: mol_type = other DNA
gggacatccgacgtgtctgaggagaccaaaacgtgccccaattgcggaaaagctattcccgcaaacagcacccggtgcccatattgtggcaagaagttcgaa

SEQ ID NO: 44415 - DNA, 126 bp, synthetic construct
  source 1..126: mol_type = other DNA
gcaggcgtgttcaacttctctagttccaagaacagcgacaatacagtgaccatcgggcacctgccaagcgaccacaacgctgccctgttcgtcgccgataagcagggactcttcaaggagaagatt

SEQ ID NO: 44416 - DNA, 39 bp, synthetic construct
  source 1..39: mol_type = other DNA
atgatgctcgagaacacagtttcgatgccttacgaagtg

SEQ ID NO: 44417 - DNA, 78 bp, synthetic construct
  source 1..78: mol_type = other DNA
cactatctgagcgagtaccttttcaacctcggatatctgctgcccatctacggaggctgggagatcttctacgttgac

SEQ ID NO: 44418 - DNA, 78 bp, synthetic construct
  source 1..78: mol_type = other DNA
ttcagcgactttgggtccatccccctgaacattctgttcggctacttcatcggaacagattatgccttcaccgctttc

SEQ ID NO: 44419 - DNA, 42 bp, synthetic construct
  source 1..42: mol_type = other DNA
gacgcccacggcacatttcccgagggctactacttctatatg

SEQ ID NO: 44420 - DNA, 30 bp, synthetic construct
  source 1..30: mol_type = other DNA
tacgccgacaagagctttgtgttcaacgat

SEQ ID NO: 44421 - DNA, 30 bp, synthetic construct
  source 1..30: mol_type = other DNA
tccgcggccgcctccacgaacgaatacgag

SEQ ID NO: 44422 - DNA, 60 bp, synthetic construct
  source 1..60: mol_type = other DNA
acctctgctcggaacggggccagctcctggttccaaataggggacattctgatccaaccc

SEQ ID NO: 44423 - DNA, 213 bp, synthetic construct
  source 1..213: mol_type = other DNA
acctatgtgctgcccgagcacgctaaggcccgtatacaaaccttcatgaatcctgaatctgatccccggggcgccggctacaacatagcacaatccaaactggcaattggatcaggccagctgttgggcatgggatacatgaagggcaatcagacacagctgggctacctgtacccaaagaccagtgactttatatttagcgtcatcggggag

SEQ ID NO: 44424 - DNA, 48 bp, synthetic construct
  source 1..48: mol_type = other DNA
ggcctgctgcccatcaccggagtgcctctcccctttgtctcatatgga

SEQ ID NO: 44425 - DNA, 39 bp, synthetic construct
  source 1..39: mol_type = other DNA
ctgtactttaataacagcttctccaccggctacaagctg

SEQ ID NO: 44426 - DNA, 78 bp, synthetic construct
  source 1..78: mol_type = other DNA
tggttctatagcggtatcctgctcgggaactggaataccttcgacatcttcggcggactgattatattcgaggtggat

SEQ ID NO: 44427 - DNA, 78 bp, synthetic construct
  source 1..78: mol_type = other DNA
ttcatcgagttccacaacgtcgtgctcgacatcctgttcggctacttcattgggaccaatgtggcgttcaccgcgttt

SEQ ID NO: 44428 - DNA, 54 bp, synthetic construct
  source 1..54: mol_type = other DNA
gtcgtgttcgatatcacgacttcctccaatattgacggcttctactactacatg

SEQ ID NO: 44429 - DNA, 57 bp, synthetic construct
  source 1..57: mol_type = other DNA
attctcaaccctatcatccggcccgtgacccagctgttcctgatgggcagtagcaag

SEQ ID NO: 44430 - DNA, 192 bp, synthetic construct
  source 1..192: mol_type = other DNA
tttcgggcccagatgggcattaagctgaacaccgttttctgcgctatgagcaatactatgacaactactagcattctccacacccacctgcttaaaagcatcctgggcgccatcataagccaaattatgggcccttttgttcaaagcaatatccatacctcggttggtctataccaatacgtcccgtcattt

SEQ ID NO: 44431 - DNA, 258 bp, synthetic construct
  source 1..258: mol_type = other DNA
gtgggaatggcaggggccgagaccgactactatacggtagatgtggtcaaccccgctgacaacattgatctcggcgacatcaatagcaaagtgatcgagaagaagaatcaccacgattcccacaccattacttaccatattgaccacaactacaacgagatggagctgatcaatgaccttaagatccctctggaccacagctgcgaatactacaccgtcacttggaacatctatagttacctgaacaacacagcttcc

SEQ ID NO: 44432 - DNA, 30 bp, synthetic construct
  source 1..30: mol_type = other DNA
gtgggccttggaccagatgctttggccgct

SEQ ID NO: 44433 - DNA, 54 bp, synthetic construct
  source 1..54: mol_type = other DNA
cccatcctgattatgatgggcgtcggccacaccatcaaatacgcgatggactat

SEQ ID NO: 44434 - DNA, 36 bp, synthetic construct
  source 1..36: mol_type = other DNA
ttctttgtgtccgacaccaacggagtggctgtctac

SEQ ID NO: 44435 - DNA, 63 bp, synthetic construct
  source 1..63: mol_type = other DNA
atcagtagtatcttttcctacaccgacgcctcctctcacctggcgccgcaaattagcctcatt

SEQ ID NO: 44436 - DNA, 36 bp, synthetic construct
  source 1..36: mol_type = other DNA
agctacatcgtgaatgacatgggcaccttcaacttt

SEQ ID NO: 44437 - DNA, 78 bp, synthetic construct
  source 1..78: mol_type = other DNA
tacatccaacaaagcatcgacatcgacaacgccatcgatattttcctgggtcatggcggaaccctgggagtgactttt

SEQ ID NO: 44438 - DNA, 51 bp, synthetic construct
  source 1..51: mol_type = other DNA
gtcgtgcccacttcccttgcaagcaactcattccgctacctgtcctatttt

SEQ ID NO: 44439 - DNA, 33 bp, synthetic construct
  source 1..33: mol_type = other DNA
atccagtacattgacttcccccatcaaaactct

SEQ ID NO: 44440 - DNA, 36 bp, synthetic construct
  source 1..36: mol_type = other DNA
gtggtggacaagacaaccggcgaagagagcatcgtc

SEQ ID NO: 44441 - DNA, 69 bp, synthetic construct
  source 1..69: mol_type = other DNA
attaaggccgtctgccgtagttgttcctatggcgaatatgacctcgatcccgctaaagcagccatcact

SEQ ID NO: 44442 - DNA, 45 bp, synthetic construct
  source 1..45: mol_type = other DNA
ccctgcaacgtgctgtccttccctaagagctccgggcccggcgat

SEQ ID NO: 44443 - DNA, 36 bp, synthetic construct
  source 1..36: mol_type = other DNA
cccaagatcttcaaccctgtgctggcggactacacc

SEQ ID NO: 44444 - DNA, 48 bp, synthetic construct
  source 1..48: mol_type = other DNA
ggcatctacatcatatcgtcggactccatcatgtattacaccacattc

SEQ ID NO: 44445 - DNA, 66 bp, synthetic construct
  source 1..66: mol_type = other DNA
atcaccgtcgggtccgctcaagtaaacatcagcgaggccggcaacctgttcttctcacacatgtgg

SEQ ID NO: 44446 - DNA, 30 bp, synthetic construct
  source 1..30: mol_type = other DNA
atgcacggcattgagaacgtgaacatccag

SEQ ID NO: 44447 - DNA, 39 bp, synthetic construct
  source 1..39: mol_type = other DNA
tttaccaagggctacgacttccacctgtggtactatgaa

SEQ ID NO: 44448 - DNA, 63 bp, synthetic construct
  source 1..63: mol_type = other DNA
ggcgccgatctcggacttcttctgctgagttttgggcaacacgaatttactcacccattcggg

SEQ ID NO: 44449 - DNA, 294 bp, synthetic construct
  source 1..294: mol_type = other DNA
aaaatttccggcatggagatattcagccccgtgctccggattagccggttggcccaaaatagcctctcttccctgaagctggtgctcgagaacacctacttgatcgggcacgaccctgcgagctcatactggagcaactcctcccggttcgccgatggatatatctccctgcccatgcaatttatactgatgttcggccttccctttccgttgttcttcgggttgctcgtgacaaggaaggataccatcgactatatgctgcctgggatcttcggatacgcttacgactttggc

SEQ ID NO: 44450 - DNA, 33 bp, synthetic construct
  source 1..33: mol_type = other DNA
cactaccacctgcataagctcatcggcgtagac

SEQ ID NO: 44451 - DNA, 51 bp, synthetic construct
  source 1..51: mol_type = other DNA
ctgggaggcatccctctgtttagtggttacctcaaggcacacgccgccgcc

SEQ ID NO: 44452 - DNA, 252 bp, synthetic construct
  source 1..252: mol_type = other DNA
gtgaaaagtatcgaatggcaaacctggaccagcactccgattgagctgctcttctatcgagcaggctacaccctccaagtgctcgaccatgccgtcttccttcaaggttcaactcacggccaactgctgtataacaccctcatggggtttttcaagagcagtgatccgagagtgattgttggatctactacactcggctacgcccattctacgaccagcaccatctttggtcccgcactgttggacttcggt

SEQ ID NO: 44453 - DNA, 36 bp, synthetic construct
  source 1..36: mol_type = other DNA
cccaagatcttcaatcctgtgctggccgactacaac

SEQ ID NO: 44454 - DNA, 30 bp, synthetic construct
  source 1..30: mol_type = other DNA
atggtggacctgatctccgcgggtgacacc

SEQ ID NO: 44455 - DNA, 105 bp, synthetic construct
  source 1..105: mol_type = other DNA
agctttgccttcggcgacacttccctgcacggcctgatcgctgcccctgcaaacttcctcatgatgggcattggaatcgacgatgtgacagggaccattccaacc

SEQ ID NO: 44456 - DNA, 45 bp, synthetic construct
  source 1..45: mol_type = other DNA
gtctgggggggcggatggctcatgcaaatgggggctctcgacttt

SEQ ID NO: 44457 - DNA, 141 bp, synthetic construct
  source 1..141: mol_type = other DNA
tcttaccggaacatccgaatttcctgctacaaacgcagctgtagaacagggttcaggaagagtttccccggttatagtacaaataacaagcactactgcaactgcggactgtgttgctgcaaccacatctcattcttttat

SEQ ID NO: 44458 - DNA, 48 bp, synthetic construct
  source 1..48: mol_type = other DNA
accaagcagtgcaagcacgagaactggaaaatcggacagggaagcaat

SEQ ID NO: 44459 - DNA, 51 bp, synthetic construct
  source 1..51: mol_type = other DNA
cccggcctgttctcttacgacacaatcgacggcataaaatacgaccgctat

SEQ ID NO: 44460 - DNA, 33 bp, synthetic construct
  source 1..33: mol_type = other DNA
gtgagtttcaacaagtaccctgaggttcgactg

SEQ ID NO: 44461 - DNA, 33 bp, synthetic construct
  source 1..33: mol_type = other DNA
aacatcctgtaccctgtttgggaaaatacgtca

SEQ ID NO: 44462 - DNA, 72 bp, synthetic construct
  source 1..72: mol_type = other DNA
aataacaacggatttattctcacaactgcaaccctttatcaattctacctgaacttcatgaagcaacactgg

SEQ ID NO: 44463 - DNA, 69 bp, synthetic construct
  source 1..69: mol_type = other DNA
atcaaccactatacatttaccattctcctgcatcactacaacttcttcacccattcctacctggatgtg

SEQ ID NO: 44464 - DNA, 42 bp, synthetic construct
  source 1..42: mol_type = other DNA
gagtattttaatgctgatcttagctccaattacctgttcgtg

SEQ ID NO: 44465 - DNA, 75 bp, synthetic construct
  source 1..75: mol_type = other DNA
tacctggtgcttttcctggccttagtctccctccccttcgaaggctatgccgaagctctcctgtttgtggttgac

SEQ ID NO: 44466 - DNA, 72 bp, synthetic construct
  source 1..72: mol_type = other DNA
ttcaccgacttcggcgaccccgctgtcaatcttgtggccggcaacctcataggtaccgattttaccgcattc

SEQ ID NO: 44467 - DNA, 45 bp, synthetic construct
  source 1..45: mol_type = other DNA
tggggcggggtcttctcggaagacatcgtgttctactattacctg

SEQ ID NO: 44468 - DNA, 36 bp, synthetic construct
  source 1..36: mol_type = other DNA
cccgtgctgagccaccacgagttcacccatcctctt

SEQ ID NO: 44469 - DNA, 300 bp, synthetic construct
  source 1..300: mol_type = other DNA
agccgcatcctgaatgcctcggttctgagccctctcctgaggatctctcggttggagcaatactcatactcctccctcaagactgtgctggtcaacacaaacttctggggccacgtgcaaggcagctgttactggggcagtaactgcctcggcggcagcgatggctatattaccctgcccatcaccctaatccaatcgttcggccttccttaccacatcttctacggcgtcctgattgtgaagaaggattacatcgactacatgctaccgggaatattcgctttcgcctatgatgcaggc

SEQ ID NO: 44470 - DNA, 36 bp, synthetic construct
  source 1..36: mol_type = other DNA
gacggcgtgcctatatccgaaattgaagcttaccct

SEQ ID NO: 44471 - DNA, 30 bp, synthetic construct
  source 1..30: mol_type = other DNA
atcgctattgaccgcacgctacctgaccgg

SEQ ID NO: 44472 - DNA, 54 bp, synthetic construct
  source 1..54: mol_type = other DNA
attgtggtcgataaggagacaggcaaggagagcatcgaggtggacaccgacaag

SEQ ID NO: 44473 - DNA, 99 bp, synthetic construct
  source 1..99: mol_type = other DNA
aaggccctgtgccggatctgtagctacggcgaatacgatattgatccggcaaaggctgtggtgaccggcaactctgtcattgatagtgacctctgtgtg

SEQ ID NO: 44474 - DNA, 45 bp, synthetic construct
  source 1..45: mol_type = other DNA
gccgctaaagtcaaaaaacccttcgagggtactatcgaagttgac

SEQ ID NO: 44475 - DNA, 78 bp, synthetic construct
  source 1..78: mol_type = other DNA
aagtgcaacgcactcgctttccccgtgtcaaccggccccggttcccggctggatcatatcgtcgctcaaacggattac

SEQ ID NO: 44476 - DNA, 57 bp, synthetic construct
  source 1..57: mol_type = other DNA
cctaacggcgccatcaccgtcaagcggaccgaggtggaccacactcccacaaactcc

SEQ ID NO: 44477 - DNA, 36 bp, synthetic construct
  source 1..36: mol_type = other DNA
tgcagcttcggcaacgtggactacgggaagaccacc

SEQ ID NO: 44478 - DNA, 54 bp, synthetic construct
  source 1..54: mol_type = other DNA
tacggcgccggcgtccccctggagtactcactcctgagcttccttgctaacgac

SEQ ID NO: 44479 - DNA, 84 bp, synthetic construct
  source 1..84: mol_type = other DNA
gacttcacgttctcgaacatgtacttgaatcaattgctcgggaatctgatcgagacccacggccagaacattgtgtcctgcttt

SEQ ID NO: 44480 - DNA, 57 bp, synthetic construct
  source 1..57: mol_type = other DNA
atgttcagcgtcaccggcggtacagtgcccgaaaagctggagtaccttcacgcatca

SEQ ID NO: 44481 - DNA, 33 bp, synthetic construct
  source 1..33: mol_type = other DNA
tctcagatctctgagtacttcaacaccagcatt

SEQ ID NO: 44482 - DNA, 33 bp, synthetic construct
  source 1..33: mol_type = other DNA
tatttcctccaaacggtctcccaaatatacacc

SEQ ID NO: 44483 - DNA, 147 bp, synthetic construct
  source 1..147: mol_type = other DNA
ggcatcaacgcctacgacatgactttctccgatgcttggagcgtcttcatcgaccacctgaagaacggtcggcccgagcgggtcgttggagaccacgatagctacgtgacatggctcaccgactacgtggttgtgtattcaaacgca

SEQ ID NO: 44484 - DNA, 39 bp, synthetic construct
  source 1..39: mol_type = other DNA
gtttatgatgtttgcatcctgccattcgcttctggagat

SEQ ID NO: 44485 - DNA, 78 bp, synthetic construct
  source 1..78: mol_type = other DNA
cggttcaacgcctccgaggaggatcttaagactatctacgactggaccgttggctcggttgggagtgtcgattgggac

SEQ ID NO: 44486 - DNA, 39 bp, synthetic construct
  source 1..39: mol_type = other DNA
gtggtggacaaggaaaccggcaaagagagcatcgtcatt

SEQ ID NO: 44487 - DNA, 57 bp, synthetic construct
  source 1..57: mol_type = other DNA
aaggccgtttgtcgaagctgttcctatggcgaatacgatttagacccagctaacgcc

SEQ ID NO: 44488 - DNA, 54 bp, synthetic construct
  source 1..54: mol_type = other DNA
gggtgcaacgccctggcattccctgtctcgagtggcccaggatctagaatggaa

SEQ ID NO: 44489 - DNA, 39 bp, synthetic construct
  source 1..39: mol_type = other DNA
gtggtcgacaaggagaccggccgggaaagcatcgtgatt

SEQ ID NO: 44490 - DNA, 48 bp, synthetic construct
  source 1..48: mol_type = other DNA
aaggctatctgtcgggcctgcaactacggcgaatatgatttagatcct

SEQ ID NO: 44491 - DNA, 54 bp, synthetic construct
  source 1..54: mol_type = other DNA
ggctgcaatgccctggcgttccccgttagttcggggccggggtctaggatggag

SEQ ID NO: 44492 - DNA, 69 bp, synthetic construct
  source 1..69: mol_type = other DNA
ctgaaccccagctttgtcggtcagaaggccatcaactccgctgtcaattccttcttttgtgatcgatgg

SEQ ID NO: 44493 - DNA, 69 bp, synthetic construct
  source 1..69: mol_type = other DNA
atcgactacctctctatttcgtatagtttccggtactatatgttcaccgagaagtcccacctggagaac

SEQ ID NO: 44494 - DNA, 36 bp, synthetic construct
  source 1..36: mol_type = other DNA
cacatctacaacatgagctataccgacatgcctggc

SEQ ID NO: 44495 - DNA, 45 bp, synthetic construct
  source 1..45: mol_type = other DNA
attgtggtcgatcaggctaccggcgccgagtccatcgttatcgac

SEQ ID NO: 44496 - DNA, 51 bp, synthetic construct
  source 1..51: mol_type = other DNA
aaggcaatctgccgggcctgcaactacggcgaatacgatttggatccaagc

SEQ ID NO: 44497 - DNA, 63 bp, synthetic construct
  source 1..63: mol_type = other DNA
gggtgcaacgctctggcctttcccgtgtcttccggccctgggtcccggatggaccacgttatc

SEQ ID NO: 44498 - DNA, 45 bp, synthetic construct
  source 1..45: mol_type = other DNA
ctgaccatcgacggcgtgcctattagcgagatcgatgcctatccc

SEQ ID NO: 44499 - DNA, 30 bp, synthetic construct
  source 1..30: mol_type = other DNA
attgtgatcgaccggacattgcctgatcgc

SEQ ID NO: 44500 - DNA, 54 bp, synthetic construct
  source 1..54: mol_type = other DNA
atcgtggtggacaaggagacaggcaaggagtccattgaggtcgataccagcaag

SEQ ID NO: 44501 - DNA, 105 bp, synthetic construct
  source 1..105: mol_type = other DNA
attaaggccctctgtagactgtgctcatacggcgaatacgacatcgatccctctaaagccgctgtgaagggcaactccgttatcgactctgagctttgcgtttat

SEQ ID NO: 44502 - DNA, 63 bp, synthetic construct
  source 1..63: mol_type = other DNA
ggtgtttgtccgactgacgcggcaaaagctaagaagcctttcgagggcaccattgaggtggac

SEQ ID NO: 44503 - DNA, 81 bp, synthetic construct
  source 1..81: mol_type = other DNA
tgcaagtgtaacgcgctggccttccctgtatcgactggtcccggttcccgcctggattatatcgtggctcaaccggactat

SEQ ID NO: 44504 - DNA, 63 bp, synthetic construct
  source 1..63: mol_type = other DNA
cccaacggcgccatcaccgtaaagcggaccgacgtggaccacacgcctaccaattccgctaca

SEQ ID NO: 44505 - DNA, 57 bp, synthetic construct
  source 1..57: mol_type = other DNA
gacctggccttcctggtgctcagcttcggccaacatgagtttactcatccctttggc

SEQ ID NO: 44506 - DNA, 294 bp, synthetic construct
  source 1..294: mol_type = other DNA
cggatcctctcgatggaagtattttcaccgctcctgagactgagccgcctggctcaaaattccctggcctccctgaagcttgtgattggaaatacaaggctcatcggccatgaccccgcgagcagctactggagcgactccaatggctttgccgatggatacattagcctgccgatgcaattcattctcatgttcggactgcccttccccctgttctttggtctgctcgtgactaagaaggatacaatcgactatatgctgcccgggatcttcggctatgcatatgactttggc

SEQ ID NO: 44507 - DNA, 33 bp, synthetic construct
  source 1..33: mol_type = other DNA
ttcagctacacccggcccgtgggcaccctgggc

SEQ ID NO: 44508 - DNA, 57 bp, synthetic construct
  source 1..57: mol_type = other DNA
ttcggcagcccctggacactgcacgaatacattgacatcatcgccaccaaggagtat

SEQ ID NO: 44509 - DNA, 45 bp, synthetic construct
  source 1..45: mol_type = other DNA
aagatcgactttttcaccgtgctggtctccgctcactctttgggt

SEQ ID NO: 44510 - DNA, 51 bp, synthetic construct
  source 1..51: mol_type = other DNA
tttatagcatctccgaaggcccacacactggtctactatggataccggcgg

SEQ ID NO: 44511 - DNA, 48 bp, synthetic construct
  source 1..48: mol_type = other DNA
ctgagctgggtcaacaagaatgtgacccacgtgtactccctgaacccc

SEQ ID NO: 44512 - DNA, 39 bp, synthetic construct
  source 1..39: mol_type = other DNA
gtggtggaccaggctaccggcgccgagagcattgtcatc

SEQ ID NO: 44513 - DNA, 36 bp, synthetic construct
  source 1..36: mol_type = other DNA
tgccgggcctgtaactatggcgaatatgagttggac

SEQ ID NO: 44514 - DNA, 57 bp, synthetic construct
  source 1..57: mol_type = other DNA
ggctgcaacgccctggctttccctgtgtcttccgggcctggatctcggatggaacac

SEQ ID NO: 44515 - DNA, 39 bp, synthetic construct
  source 1..39: mol_type = other DNA
atgctggagtacttcatgtggggcaacatgatcaacacc

SEQ ID NO: 44516 - DNA, 36 bp, synthetic construct
  source 1..36: mol_type = other DNA
ggagccatcaccacattggggggcttcgagcttggg

SEQ ID NO: 44517 - DNA, 81 bp, synthetic construct
  source 1..81: mol_type = other DNA
ctcaacgggaaagactatgtcgttaagactgggaatgatgggaaggctaccctgccggtggacttgatccctggcaaatat

SEQ ID NO: 44518 - DNA, 135 bp, synthetic construct
  source 1..135: mol_type = other DNA
gacagcgcaaacctgatcattgctctcatcgatgccaagagtaacgccctcgtgtccaaggacatttctgtcaacctgaacggaaaggcctacgtggttaagaccggcaatgacggcaaagccgctcttccaatc

SEQ ID NO: 44519 - DNA, 96 bp, synthetic construct
  source 1..96: mol_type = other DNA
agtgttaattctaacattgtagtaaataaggtgtctacatccctgaccttcaacgacatcaacatcgtctacggcgacctgtccaacctgctcttt

SEQ ID NO: 44520 - DNA, 33 bp, synthetic construct
  source 1..33: mol_type = other DNA
gtggccagtctgggcgaggtggctattagcgga

SEQ ID NO: 44521 - DNA, 60 bp, synthetic construct
  source 1..60: mol_type = other DNA
ttcctgatttccttcttcttcggacaaatagacagcgacgtgttcgatgtcctgtctatt

SEQ ID NO: 44522 - DNA, 30 bp, synthetic construct
  source 1..30: mol_type = other DNA
agcaccttcggcacaattgcaatcgctgcc

SEQ ID NO: 44523 - DNA, 45 bp, synthetic construct
  source 1..45: mol_type = other DNA
gctagctccatcgtggccgacatcagcatcatctctagaaactgc

SEQ ID NO: 44524 - DNA, 36 bp, synthetic construct
  source 1..36: mol_type = other DNA
gtggtcgacaacgaaaccggcaaggagagcatcgtg

SEQ ID NO: 44525 - DNA, 42 bp, synthetic construct
  source 1..42: mol_type = other DNA
gccatctgtagagcttgcaactacggcgaatacgatctggac

SEQ ID NO: 44526 - DNA, 45 bp, synthetic construct
  source 1..45: mol_type = other DNA
tgcaacgctctggccttccctgtgtcaagcggacctggaagtaga

SEQ ID NO: 44527 - DNA, 66 bp, synthetic construct
  source 1..66: mol_type = other DNA
atcaacccttcctataccatccccgagttcacaacgcaaggcttgtatctgaccgacaagagcatc

SEQ ID NO: 44528 - DNA, 90 bp, synthetic construct
  source 1..90: mol_type = other DNA
ttctttaacggccaaccccaactagctgtcatctacgggagcacaccttccgtggccgtgaatgagatggcaaccgctctcatgggaaca

SEQ ID NO: 44529 - DNA, 39 bp, synthetic construct
  source 1..39: mol_type = other DNA
ctgagctttggacaacatgaattcacccatccttttggc

SEQ ID NO: 44530 - DNA, 294 bp, synthetic construct
  source 1..294: mol_type = other DNA
aggatcactgggatggaagtgttcagtcctatgctccggatcagccgcctcgcccaaaactctgtctcctccctgaagctggtggtcgagaacacctggctgattggacacgaccctgcaagcagttactggagcaattcctctgggtttgccgacggatatatttccctgcctatgcaattcatacttatgttcggcctgcctttcccgctgttcttcgggctgctggtaactaagaaggacaccatcgactacatgctgcctggcatcttcggatatgcctacgattttggg

SEQ ID NO: 44531 - DNA, 39 bp, synthetic construct
  source 1..39: mol_type = other DNA
ctgagctttggtcaacacgagttcacccatccctttgga

SEQ ID NO: 44532 - DNA, 294 bp, synthetic construct
  source 1..294: mol_type = other DNA
cgcatctccggcatggaagtattttcccctgtcctgcgaatcagcagactggcagcaaactccttgtcctccctgaagctggtcgttggcaacacttggctgatcggacacgacccctcttcctcctactggtccaactcttccggcttcgccgacggatacatctccctgcctatgcaatttatcctgctgttcggactgcctttcccattgttcttcgggctcctggtgacccggaaggacacaatagattacatgctgccgggcatcttcggttatgcctatgactttggg

SEQ ID NO: 44533 - DNA, 45 bp, synthetic construct
  source 1..45: mol_type = other DNA
aagatgcaagtctatctaattagccagatcaaactgcctttgacc

SEQ ID NO: 44534 - DNA, 39 bp, synthetic construct
  source 1..39: mol_type = other DNA
gtggtcgacaaggagaccggcaaggaatctattgtgatc

SEQ ID NO: 44535 - DNA, 45 bp, synthetic construct
  source 1..45: mol_type = other DNA
ctgtgccgggcttgtagctatggcgaatacgacttagatcctgcc

SEQ ID NO: 44536 - DNA, 48 bp, synthetic construct
  source 1..48: mol_type = other DNA
ggctgcaacgccctggctttccctgtgtcctctggaccaggatctcgg

SEQ ID NO: 44537 - DNA, 33 bp, synthetic construct
  source 1..33: mol_type = other DNA
tttagctacacacaccccgtcggtaccttcgat

SEQ ID NO: 44538 - DNA, 57 bp, synthetic construct
  source 1..57: mol_type = other DNA
tacggcaacccctggacattaaccgaatatgttagaataattgccactagcgagtac

SEQ ID NO: 44539 - DNA, 45 bp, synthetic construct
  source 1..45: mol_type = other DNA
aagatcgacttcttcaccaaactggtgtcggctcatagccttgga

SEQ ID NO: 44540 - DNA, 54 bp, synthetic construct
  source 1..54: mol_type = other DNA
accatgatacagtccagccacgccgacaagctgatctactacggctatcggagg

SEQ ID NO: 44541 - DNA, 42 bp, synthetic construct
  source 1..42: mol_type = other DNA
ggatgggtcacaaagaacatcacgcccatctatagcctgtct

SEQ ID NO: 44542 - DNA, 36 bp, synthetic construct
  source 1..36: mol_type = other DNA
gtggacaaagagaccggcaaggaaagcatcgagatc

SEQ ID NO: 44543 - DNA, 42 bp, synthetic construct
  source 1..42: mol_type = other DNA
ctctgccggatctgttcttacggggaatatgacattgatccg

SEQ ID NO: 44544 - DNA, 48 bp, synthetic construct
  source 1..48: mol_type = other DNA
tgcaacgctctggccttccccgtgtcaactggaccaggctctcgcttg

SEQ ID NO: 44545 - DNA, 99 bp, synthetic construct
  source 1..99: mol_type = other DNA
ctggccttcggcggcgatattggaaacatcatcggcaatctcgattttatcatgcttaagaatgtcggcttatcccctaacgagggcagcaccattccc

SEQ ID NO: 44546 - DNA, 39 bp, synthetic construct
  source 1..39: mol_type = other DNA
tggggaggcggctggatcagcaagatcggcggaatcgac

SEQ ID NO: 44547 - DNA, 57 bp, synthetic construct
  source 1..57: mol_type = other DNA
gccaccgtgctgatcaatcccgacggaacaaacggcctgctctacgggagcttcaag

SEQ ID NO: 44548 - DNA, 39 bp, synthetic construct
  source 1..39: mol_type = other DNA
gtggtcgacaaagagaccggcaaggaaagcatcgtgatt

SEQ ID NO: 44549 - DNA, 69 bp, synthetic construct
  source 1..69: mol_type = other DNA
attaaggcaatctgtcgggcctgcaactatggcgaatacgatctggaccccagcaaggctgtggtcaag

SEQ ID NO: 44550 - DNA, 66 bp, synthetic construct
  source 1..66: mol_type = other DNA
gggtgcaacgcactggctttccccgtttcgtccggtcctggctctcggctggaccacatcattgcc

SEQ ID NO: 44551 - DNA, 33 bp, synthetic construct
  source 1..33: mol_type = other DNA
gcaataactgtgaaacggaccgagattgaccac

SEQ ID NO: 44552 - DNA, 54 bp, synthetic construct
  source 1..54: mol_type = other DNA
atcgtggtcgacaaggagaccggcaaggaatctattgtgatcgacaaagatgct

SEQ ID NO: 44553 - DNA, 72 bp, synthetic construct
  source 1..72: mol_type = other DNA
atcaaagccgtctgtcggtcgtgttcatatggcgaatatgatctagaccccgcaaaggctgttgttaagaaa

SEQ ID NO: 44554 - DNA, 69 bp, synthetic construct
  source 1..69: mol_type = other DNA
ggatgcaacgctctggccttccctgtatcgtcggggagcgggagtcgcatggagcacgtcatcgctaat

SEQ ID NO: 44555 - DNA, 54 bp, synthetic construct
  source 1..54: mol_type = other DNA
aaggccatctgtcgggcctgcaactacggcgaatatgatctggatccaagcaaa

SEQ ID NO: 44556 - DNA, 63 bp, synthetic construct
  source 1..63: mol_type = other DNA
ggctgtaacgccctggctttccctgtgtccaccggacccggctctcgcatggaccatgtcatc

SEQ ID NO: 44557 - DNA, 36 bp, synthetic construct
  source 1..36: mol_type = other DNA
ctggtcgtaaatgttgacatcttcaacaccaagctg

SEQ ID NO: 44558 - DNA, 75 bp, synthetic construct
  source 1..75: mol_type = other DNA
tggcactactccaacccctatcaattcatattgcaaacaattagcttcaacccgactggatcggcagctgcattt

SEQ ID NO: 44559 - DNA, 48 bp, synthetic construct
  source 1..48: mol_type = other DNA
gccattaattcaattagtcttaacaattacacccctgtgtcccctttc

SEQ ID NO: 44560 - DNA, 30 bp, synthetic construct
  source 1..30: mol_type = other DNA
taccacctgaaggagctcgtcggagtcaac

SEQ ID NO: 44561 - DNA, 51 bp, synthetic construct
  source 1..51: mol_type = other DNA
ttgggtggaatccctctgctgtctgggtacctcaaggcccacgctgcaacc

SEQ ID NO: 44562 - DNA, 255 bp, synthetic construct
  source 1..255: mol_type = other DNA
gtgaagagcatcgagtggcaaacctggaccctctctcctctcgagctgctgttttaccgggcaggctacactctgcaagtgcttgaccgcgccgtggtgctacaaggctcaacacacggccagctgctttacaacaccctgatggggttcttccattctaccgatcctcgcgtgattgtcggaagcacaactctcggctatgcccactccaccacatccatgattttcggccctgctcttctggacttcggtctg

SEQ ID NO: 44563 - DNA, 39 bp, synthetic construct
  source 1..39: mol_type = other DNA
atgtgggacatcatttacatcctgaaccagatcgacaac

SEQ ID NO: 44564 - DNA, 30 bp, synthetic construct
  source 1..30: mol_type = other DNA
atggactacagcttctataacccaactacc

SEQ ID NO: 44565 - DNA, 75 bp, synthetic construct
  source 1..75: mol_type = other DNA
aattaccagaacgtgccaagcatgttttacctgattttccaagacgctttcgacttccaaagtatagcttgtggg

SEQ ID NO: 44566 - DNA, 138 bp, synthetic construct
  source 1..138: mol_type = other DNA
agcacaggcgtcgcacgcgacgccgccgtataccggaatacgatccgtacaaaatgtgacttcaactccatctggaacggacggaccgacttccacaataattgcaacggcaccctgtgtattcacaacgcaagtggt

SEQ ID NO: 44567 - DNA, 39 bp, synthetic construct
  source 1..39: mol_type = other DNA
atctgtcgctcttgtagctatggcgaatacgatttagac

SEQ ID NO: 44568 - DNA, 39 bp, synthetic construct
  source 1..39: mol_type = other DNA
aacgccctggcatttccggtgtcatctggacctggtagc

SEQ ID NO: 44569 - DNA, 33 bp, synthetic construct
  source 1..33: mol_type = other DNA
gtgatcaagaccgaaattttcggcacaaacctc

SEQ ID NO: 44570 - DNA, 90 bp, synthetic construct
  source 1..90: mol_type = other DNA
ggcaactataacttcatcatgtttaacctgaatcccttcgactacttctttgtggccctgatgggactcaagggtgtctggcattacctg

SEQ ID NO: 44571 - DNA, 51 bp, synthetic construct
  source 1..51: mol_type = other DNA
gactttaatctctctatccttaacgcgaagttctcccacgtgtcttacttc

SEQ ID NO: 44572 - DNA, 42 bp, synthetic construct
  source 1..42: mol_type = other DNA
gtgggcgtggacaaggtagtctacgcttttcaatacgcaaat

SEQ ID NO: 44573 - DNA, 30 bp, synthetic construct
  source 1..30: mol_type = other DNA
gccttcggctttaccgtttctcccatcatg

SEQ ID NO: 44574 - DNA, 33 bp, synthetic construct
  source 1..33: mol_type = other DNA
ttcgccagcgccggcattccaagtaacatcggg

SEQ ID NO: 44575 - DNA, 123 bp, synthetic construct
  source 1..123: mol_type = other DNA
acagtctcgtcctccgggataacggctagcgaagtgtaccaggtcttcattaacaagatctggcccggcgacgacccttttgacatcgaatggcgcaggcaggagatcatttggcgggtttac

SEQ ID NO: 44576 - DNA, 75 bp, synthetic construct
  source 1..75: mol_type = other DNA
tacttcggcgatgctgacgccgtgaagcaggccatgttttggaccgtcggggacctggacaacgtggttatcggt

SEQ ID NO: 44577 - DNA, 129 bp, synthetic construct
  source 1..129: mol_type = other DNA
agcacatatcccgacatcaccctcaaggagacttacgagattatctggcatcacctgaccggcaagacctacgatattaatgtggacgcctaccggtggtgggccgacaggcacatctggaacacagcc

SEQ ID NO: 44578 - DNA, 36 bp, synthetic construct
  source 1..36: mol_type = other DNA
ggagcctcattttctaccgtggcgggagagactgga

SEQ ID NO: 44579 - DNA, 78 bp, synthetic construct
  source 1..78: mol_type = other DNA
atggtgacaaccgacgccgacaccctcaaggatgcttacctatggcaaattggtcacctggacggaatgacttgggat

SEQ ID NO: 44580 - DNA, 30 bp, synthetic construct
  source 1..30: mol_type = other DNA
agctatgtcgtgtacaccaacggcggaggc

SEQ ID NO: 44581 - DNA, 90 bp, synthetic construct
  source 1..90: mol_type = other DNA
tccttcaccttcaattggggtacagatctgggcaactactttatctccaacgttggcggcagctctaacatcagcgacattggattcctg

SEQ ID NO: 44582 - DNA, 72 bp, synthetic construct
  source 1..72: mol_type = other DNA
acccttcccggggccagcatcggcattaacgcactgctgcaccctaaatggaatatgctttgggacgtgaac

SEQ ID NO: 44583 - DNA, 105 bp, synthetic construct
  source 1..105: mol_type = other DNA
ggctatatgagttatacaagcggcaccgcactaactgagctgatttctgaaggtacaggcctgattttcatcgtgtttcctacaatcttcaacatcatgggtcca

SEQ ID NO: 44584 - DNA, 36 bp, synthetic construct
  source 1..36: mol_type = other DNA
atgctgttcgacaataccatatccgatccctactat

SEQ ID NO: 44585 - DNA, 69 bp, synthetic construct
  source 1..69: mol_type = other DNA
ctgcagagcatctttaatgccggcaacctcatgcccatcttcggcggccttattctgttctacgtggac

SEQ ID NO: 44586 - DNA, 75 bp, synthetic construct
  source 1..75: mol_type = other DNA
tccgacttcggaagtatagccctgaacatcttctttgggtacttcatcggaaccttctacaagttcaccgctttt

SEQ ID NO: 44587 - DNA, 45 bp, synthetic construct
  source 1..45: mol_type = other DNA
tacgacgcctttggcaccttccccgagggatactacttctacatg

SEQ ID NO: 44588 - DNA, 30 bp, synthetic construct
  source 1..30: mol_type = other DNA
tacgtcaacaagagcatcgtgttcaacgac

SEQ ID NO: 44589 - DNA, 111 bp, synthetic construct
  source 1..111: mol_type = other DNA
acagtcggtggataccatatcgtctttttcgaaacgtaccagattttggtcgaccacattcgaggagatgtttctgaccccaccaaggatctgatcgtttgggacacacgc

SEQ ID NO: 44590 - DNA, 75 bp, synthetic construct
  source 1..75: mol_type = other DNA
ctgttggcggaccccgaggatctggctgccgtctatagctggcaggtcggctccctcggtagatctagttgggac

SEQ ID NO: 44591 - DNA, 192 bp, synthetic construct
  source 1..192: mol_type = other DNA
aagtataccttcccgattagctgggacgtgtactatcacatccatatggctgacctgtacatgcggaacgggctcgtattttgggactttgagactgtggctccctatggccgccttatcatgtatcctcctctgttccacctcgtccttgccgggctgtccaaggttaccggaatagggcttgttagtctc

SEQ ID NO: 44592 - DNA, 66 bp, synthetic construct
  source 1..66: mol_type = other DNA
gtctatctgaagtacaccctcgtgttcaactccaaagccggcaatctgcttagcctgcccaacttt

SEQ ID NO: 44593 - DNA, 33 bp, synthetic construct
  source 1..33: mol_type = other DNA
acatacttgggagtccagaccgtctcgatccga

SEQ ID NO: 44594 - DNA, 36 bp, synthetic construct
  source 1..36: mol_type = other DNA
gtttatgttgatagctacacccctgaggtcatgtgc

SEQ ID NO: 44595 - DNA, 48 bp, synthetic construct
  source 1..48: mol_type = other DNA
aattctagcggcgtggtctccaacattggagtgaccgggatcaaggag

SEQ ID NO: 44596 - DNA, 93 bp, synthetic construct
  source 1..93: mol_type = other DNA
accaactattacggtgacatctttgccggcaacggctccatgatacctgttccaattaagtacattatcttttcgctcatcggaatcggaccc

SEQ ID NO: 44597 - DNA, 66 bp, synthetic construct
  source 1..66: mol_type = other DNA
gtgaattactgcaccggcttctcgattctccgcggatatcttggcaacattcccctgatctacaac

SEQ ID NO: 44598 - DNA, 81 bp, synthetic construct
  source 1..81: mol_type = other DNA
tacgggtccgtgctgcctattgagtttacgaagaataatgtcgtggccaggaccgagatattagcatcgtatatggactac

SEQ ID NO: 44599 - DNA, 30 bp, synthetic construct
  source 1..30: mol_type = other DNA
gtgagcggcctggagttaacagggacacag

SEQ ID NO: 44600 - DNA, 57 bp, synthetic construct
  source 1..57: mol_type = other DNA
ttctaccctagcatgatcgccgtataccaacttccggtctggtccccatcttggaat

SEQ ID NO: 44601 - DNA, 78 bp, synthetic construct
  source 1..78: mol_type = other DNA
gtctgggagatgcctgattttctgccccaagttatgattaacatggagaacgccggattcggaggcgacgctaactac

SEQ ID NO: 44602 - DNA, 33 bp, synthetic construct
  source 1..33: mol_type = other DNA
acgatcttcggcggagccgagtctgctaacatg

SEQ ID NO: 44603 - DNA, 51 bp, synthetic construct
  source 1..51: mol_type = other DNA
tgtggagtgcctattttttccacgctgggctccataattgccgacccttac

SEQ ID NO: 44604 - DNA, 39 bp, synthetic construct
  source 1..39: mol_type = other DNA
ttcggagtggacaacgctatcggcggctcagatatggcc

SEQ ID NO: 44605 - DNA, 42 bp, synthetic construct
  source 1..42: mol_type = other DNA
agcatacaatcttccgcgattaactttatacaactgccactg

SEQ ID NO: 44606 - DNA, 36 bp, synthetic construct
  source 1..36: mol_type = other DNA
cccaagatcttcacccctgacgtgacaaactacagc

SEQ ID NO: 44607 - DNA, 69 bp, synthetic construct
  source 1..69: mol_type = other DNA
gtcggagactttaatcattccacgtcctttatctacaatattctgttcgctgatgtgcttggaggtcct

SEQ ID NO: 44608 - DNA, 81 bp, synthetic construct
  source 1..81: mol_type = other DNA
ccatatttcactagcggcagcctgctggggagatgggacctttatcacattcacggaggcctcatcttttttttctgcggc

SEQ ID NO: 44609 - DNA, 78 bp, synthetic construct
  source 1..78: mol_type = other DNA
tgcgtcgacttcggcactcccgtgctgaacatcttcatcggatacttcattgggaccaatactgagtacaccgcattc

SEQ ID NO: 44610 - DNA, 57 bp, synthetic construct
  source 1..57: mol_type = other DNA
accctctggggcaaggagttatttagctctcgcggcgtgctgtactactatatgacc

SEQ ID NO: 44611 - DNA, 36 bp, synthetic construct; identical to SEQ ID NO: 44000
  source 1..36: mol_type = other DNA

SEQ ID NO: 44612 - DNA, 33 bp, synthetic construct
  source 1..33: mol_type = other DNA
ttcgtcagcaagcccaacatggtcaacctaaat

SEQ ID NO: 44613 - DNA, 75 bp, synthetic construct
  source 1..75: mol_type = other DNA
ataagacactcaatcgacctgaactacgcccttgatattttcctgggagcacccggaacactcggagtggctttc

SEQ ID NO: 44614 - DNA, 45 bp, synthetic construct
  source 1..45: mol_type = other DNA
gttccacactctgtgaatgccaaccagttcgtgactcttggatac

SEQ ID NO: 44615 - DNA, 42 bp, synthetic construct
  source 1..42: mol_type = other DNA
aacaatatctccaccttcgttaactactcatcgcaaaaccca

SEQ ID NO: 44616 - DNA, 39 bp, synthetic construct
  source 1..39: mol_type = other DNA
tggcccaagatcttcgcccctgacgtgacaagctacacc

SEQ ID NO: 44617 - DNA, 36 bp, synthetic construct
  source 1..36: mol_type = other DNA
cccaagatcttcaaccctgacgtgacaagctacacc

SEQ ID NO: 44618 - DNA, 33 bp, synthetic construct
  source 1..33: mol_type = other DNA
tgccgggcctgtaactacggcgaatatgatcta

SEQ ID NO: 44619 - DNA, 39 bp, synthetic construct
  source 1..39: mol_type = other DNA
aacgctttggcctttcccgtatcctctggacctggtagc

SEQ ID NO: 44620 - DNA, 36 bp, synthetic construct
  source 1..36: mol_type = other DNA
ggcgccgtgaccacattgggaggttttgagttggga

SEQ ID NO: 44621 - DNA, 36 bp, synthetic construct; identical to SEQ ID NO: 44104
  source 1..36: mol_type = other DNA

SEQ ID NO: 44622 - DNA, 267 bp, synthetic construct
  source 1..267: mol_type = other DNA
atgctacaaccgggagaatacgatgcgttcatctactatggcaccgactggttcgatgcggaaacctcttccaagatcatcgtcaagaagacgctctttagcgataacctgatcgtaccgagaggtaacgcctctacattcgacgtgtattgtctcgacgagaatgggactgtcctggccgagaatagcgaaattgatttctacatggacggcgtgatccgttctagatatgtggatgacgagggaatctgttctctcaacctgaat

SEQ ID NO: 44623 - DNA, 183 bp, synthetic construct
  source 1..183: mol_type = other DNA
tcttacaatgttcgaaccaacgagtttgtgaccaactggatctacgtggcagaaatctgcacacaagatctcgtgaagatctacaagaacgactccaagtttgaagctaagatcggcgtcgccaacgagaccgtcaccttcgagatcaatggcaagaactacacacggatcagcaacgagaat

SEQ ID NO: 44624 - DNA, 90 bp, synthetic construct
  source 1..90: mol_type = other DNA
gactatacaattaagaccagctacaacaacttcaccgtcgagaataacatcactgtgctgcccacactgatcgccgagaatctcgtgaag

SEQ ID NO: 44625 - DNA, 57 bp, synthetic construct
  source 1..57: mol_type = other DNA
ttctacatcgacctgattgacagcgagggcaatcccgtcgccgatgtgaacatcacc

SEQ ID NO: 44626 - DNA, 90 bp, synthetic construct
  source 1..90: mol_type = other DNA
acggctactgatcccctgacggggctgcagatgtcttacaacatcaccgtgctgcctaccctcaatgctgccgatctcgagatgacttat

SEQ ID NO: 44627 - DNA, 45 bp, synthetic construct
  source 1..45: mol_type = other DNA
gtcaccgtgctcgacgggcagggcaaccccctgagcaatgctaaa

SEQ ID NO: 44628 - DNA, 42 bp, synthetic construct
  source 1..42: mol_type = other DNA
aaaatatcggatagcaatggcatcgcaaagctgaacatcaac

SEQ ID NO: 44629 - DNA, 54 bp, synthetic construct
  source 1..54: mol_type = other DNA
attacaagcgaatacgatgggctgaagactgccaacaccattatcatcaagggc

SEQ ID NO: 44630 - DNA, 36 bp, synthetic construct
  source 1..36: mol_type = other DNA
cctaagatcttcacacccgacgtgaccaactacgac

SEQ ID NO: 44631 - DNA, 36 bp, synthetic construct
  source 1..36: mol_type = other DNA
acctacgtggtcagcgacatgggcacagccaacttc

SEQ ID NO: 44632 - DNA, 75 bp, synthetic construct
  source 1..75: mol_type = other DNA
ctgaagcactccatcgacatagataacgctatcgcaatattttctggtcatggcggtacaatgggcgttaccttc

SEQ ID NO: 44633 - DNA, 51 bp, synthetic construct
  source 1..51: mol_type = other DNA
gtggtgcccacctctatcctcaacaaccactttacgtatttgggctacttc

SEQ ID NO: 44634 - DNA, 33 bp, synthetic construct
  source 1..33: mol_type = other DNA
atgaactacatcgactatgcaagccagaacagc

SEQ ID NO: 44635 - DNA, 36 bp, synthetic construct
  source 1..36: mol_type = other DNA
cccaagatcttcacccctgacgtgacaaactacacc

SEQ ID NO: 44636 - DNA, 36 bp, synthetic construct
  source 1..36: mol_type = other DNA
cccaagatcttccaccctgacgtgaccagctacacc

SEQ ID NO: 44637 - DNA, 66 bp, synthetic construct
  source 1..66: mol_type = other DNA
ggagactttaaccactctatttccttcatctacaacatcctgtttgccgatgtgttgggaggaccc

SEQ ID NO: 44638 - DNA, 78 bp, synthetic construct
  source 1..78: mol_type = other DNA
tatttcacaagcgggtccctgctgggccgttgggatttgtatcacatttacggcggactcatcttcttcttctgtggg

SEQ ID NO: 44639 - DNA, 78 bp, synthetic construct
  source 1..78: mol_type = other DNA
tgcgccgactttggcacaccattcctgaacatcttcattggatacttcatcgggaccgacacaacgtacactgcgttt

SEQ ID NO: 44640 - DNA, 57 bp, synthetic construct
  source 1..57: mol_type = other DNA
acactttggggaaagggtctcttttcgggacggggagtgctctattactacatgacc

SEQ ID NO: 44641 - DNA, 30 bp, synthetic construct
  source 1..30: mol_type = other DNA
gaggacctgctgcggggcaacatgaataac

SEQ ID NO: 44642 - DNA, 39 bp, synthetic construct
  source 1..39: mol_type = other DNA
ggggccgtgaccacattagggggattcaccttgggatgg

SEQ ID NO: 44643 - DNA, 36 bp, synthetic construct
  source 1..36: mol_type = other DNA
cccaagatcttcacacctgacatcactaactacacc

SEQ ID NO: 44644 - DNA, 36 bp, synthetic construct; identical to SEQ ID NO: 44617
  source 1..36: mol_type = other DNA

SEQ ID NO: 44645 - DNA, 36 bp, synthetic construct
  source 1..36: mol_type = other DNA
cccaagatcctgaaccctgacgtgaccagctactcc

SEQ ID NO: 44646 - DNA, 54 bp, synthetic construct
  source 1..54: mol_type = other DNA
atcggcattctgtttgggcaaattggggccgatgtttggcacaacgctgacatc

SEQ ID NO: 44647 - DNA, 33 bp, synthetic construct; identical to SEQ ID NO: 42294
  source 1..33: mol_type = other DNA

SEQ ID NO: 44648 - DNA, 57 bp, synthetic construct
  source 1..57: mol_type = other DNA
atcctcgggatttacgacctgagtgcacaaacggaggccatgaccactaccatgcaa

SEQ ID NO: 44649 - DNA, 36 bp, synthetic construct
  source 1..36: mol_type = other DNA
cccaagatcttcacccctgacgtgactaactacacc

SEQ ID NO: 44650 - DNA, 39 bp, synthetic construct
  source 1..39: mol_type = other DNA
gtggtcgacaaggaaaccggcaaagagagcatcgtgatt

SEQ ID NO: 44651 - DNA, 69 bp, synthetic construct
  source 1..69: mol_type = other DNA
atcaaggcagtctgccgaagctgttcctatggcgaatatgatttagacccagccaaagctgctgtcaag

SEQ ID NO: 44652 - DNA, 45 bp, synthetic construct
  source 1..45: mol_type = other DNA
gctgccaaagttaagaaacctttcgagggcagtatcgtcgttgat

SEQ ID NO: 44653 - DNA, 51 bp, synthetic construct
  source 1..51: mol_type = other DNA
tgcaacgcccttgcattccctgtctctagcgggccaggcagccgaatggag

SEQ ID NO: 44654 - DNA, 33 bp, synthetic construct
  source 1..33: mol_type = other DNA
atcaccgtgacacggacagctgtcgaccatacc

SEQ ID NO: 44655 - DNA, 36 bp, synthetic construct
  source 1..36: mol_type = other DNA
cctaagatcttcactcccgacgtgaccaactacacc

SEQ ID NO: 44656 - DNA, 36 bp, synthetic construct
  source 1..36: mol_type = other DNA
cccaagatcttcacacctgacgccaccaactacacc

SEQ ID NO: 44657 - DNA, 45 bp, synthetic construct
  source 1..45: mol_type = other DNA
gtcggcatcgacaatgtgatcaacgccctcaagattgctgattcc

SEQ ID NO: 44658 - DNA, 33 bp, synthetic construct
  source 1..33: mol_type = other DNA
cgggccttcggcgctaatgtttcacccatcatt

SEQ ID NO: 44659 - DNA, 30 bp, synthetic construct
  source 1..30: mol_type = other DNA
tacagtaccgccggaattagctcttctatc

SEQ ID NO: 44660 - DNA, 36 bp, synthetic construct; identical to SEQ ID NO: 44305
  source 1..36: mol_type = other DNA

SEQ ID NO: 44661 - DNA, 51 bp, synthetic construct
  source 1..51: mol_type = other DNA
tccatcgatggcaataacgcaatcagccccatgtacaagtttatcatggat

SEQ ID NO: 44662 - DNA, 69 bp, synthetic construct
  source 1..69: mol_type = other DNA
agcggaatcatcctcggcgactggcactacacctatatctacggcggactgattattctgttcgtggac

SEQ ID NO: 44663 - DNA, 78 bp, synthetic construct
  source 1..78: mol_type = other DNA
agcatcaactttgggcccctgattctcaatttcctgtttggaaacttcattgggacggatgtcaattgtaccgcgttc

SEQ ID NO: 44664 - DNA, 42 bp, synthetic construct
  source 1..42: mol_type = other DNA
aagaccatcctgtacaacgacgccggctattattacttgaat

SEQ ID NO: 44665 - DNA, 39 bp, synthetic construct
  source 1..39: mol_type = other DNA
gcctctctgttcaagtccagctttaaccaaaactttcac

SEQ ID NO: 44666 - DNA, 78 bp, synthetic construct
  source 1..78: mol_type = other DNA
cactttgtggccggagccctcctcggaaaagctgatcttttccccatcgctggcggactgctgctcttctgcgttgat

SEQ ID NO: 44667 - DNA, 78 bp, synthetic construct
  source 1..78: mol_type = other DNA
ggaacagacttcggggtccccgtgctcaacctgttcttcgggaatttcatcggcaccaagggaggctttactagcttc

SEQ ID NO: 44668 - DNA, 51 bp, synthetic construct
  source 1..51: mol_type = other DNA
atttggggaggcgtggcaagcaatgatgtgcatcgttactacttcttgaac

SEQ ID NO: 44669 - DNA, 51 bp, synthetic construct
  source 1..51: mol_type = other DNA
gttaaggcctactcaccgggtctctctagcgcatatgaatttgtgttcggc

SEQ ID NO: 44670 - DNA, 78 bp, synthetic construct
  source 1..78: mol_type = other DNA
cacttcctggctgagtttctgggaattgatcctacacccttcgccatcgacggcggacttctgctcttctgtgttgac

SEQ ID NO: 44671 - DNA, 75 bp, synthetic construct
  source 1..75: mol_type = other DNA
ttcaccgatttcggcaaccctgacatcaacctgatttgcggccactttttcgggacaaagtttactgcctttccc

SEQ ID NO: 44672 - DNA, 51 bp, synthetic construct
  source 1..51: mol_type = other DNA
ctctgggggggcgtgttctccgagaacgtgcacttgtactactttctgaat

SEQ ID NO: 44673 - DNA, 90 bp, synthetic construct
  source 1..90: mol_type = other DNA
gggctgctcaacaccaaccacggcttgttcccacatttcatgctgcccaattggcaggagacaatccacttcccttttgctagtgcaagc

SEQ ID NO: 44674 - DNA, 126 bp, synthetic construct
  source 1..126: mol_type = other DNA
ttcgacacctatcccggcatctccctgcgggagtcttacgagatcatttggaaccacatcgttggcaatagctaccctaagggctccctctactggtgggcagacaggcagatctggaactcagcc

SEQ ID NO: 44675 - DNA, 33 bp, synthetic construct
  source 1..33: mol_type = other DNA
atgggcatcaccatgaacggggttgttggagag

SEQ ID NO: 44676 - DNA, 78 bp, synthetic construct
  source 1..78: mol_type = other DNA
atgatcactaccgacgctgataccctcaaatctgcctacctctggcaagtcggttcactggatgggatgacatgggac

SEQ ID NO: 44677 - DNA, 33 bp, synthetic construct
  source 1..33: mol_type = other DNA
gtgatcaatgggattgacagtagcattctcaac

SEQ ID NO: 44678 - DNA, 45 bp, synthetic construct
  source 1..45: mol_type = other DNA
aatatggcctttaaccactcctttagccctgcttacgagttcacc

SEQ ID NO: 44679 - DNA, 78 bp, synthetic construct
  source 1..78: mol_type = other DNA
aatttcctgagcggcaccctgctggggaactgggacgcctttccgattcaaggcggcctcttgctcttctgcgttgat

SEQ ID NO: 44680 - DNA, 78 bp, synthetic construct
  source 1..78: mol_type = other DNA
ggaaccgatttcggcgtgactttcctgaaccttttcgtctcggactttatcgggacacagggcggatttaccgctttc

SEQ ID NO: 44681 - DNA, 51 bp, synthetic construct
  source 1..51: mol_type = other DNA
ctctggggcggcatcctctccaacgacatccacatgtactacttcatgaat

SEQ ID NO: 44682 - DNA, 90 bp, synthetic construct
  source 1..90: mol_type = other DNA
gggctgcctgccctgacgcatcaaccagctagcttcaacggattcctgaattatctgatctgcttcaagggctccgactacccacatatg

SEQ ID NO: 44683 - DNA, 54 bp, synthetic construct
  source 1..54: mol_type = other DNA
ctcaccgtcgacgccgagtttactgtaaaagattttgtcggccaattctacctg

SEQ ID NO: 44684 - DNA, 51 bp, synthetic construct
  source 1..51: mol_type = other DNA
tacatcggagtgatgccaagtatccgggcctatgtctgtagtggcgcggac

SEQ ID NO: 44685 - DNA, 33 bp, synthetic construct
  source 1..33: mol_type = other DNA
tacccttactccaaattcgccctccaaattccc

SEQ ID NO: 44686 - DNA, 183 bp, synthetic construct
  source 1..183: mol_type = other DNA
gctatcttcgccgacatgttcttcaattcgcataacctgtccatctcttccggcatcgacctgaacctggccatcactacatttatccaagccttaccggtcgagattcaggggttcatcaagccttatgttggagcccttacctcgggggtgcacgacattctgacctacatcttcaactat

SEQ ID NO: 44687 - DNA, 33 bp, synthetic construct
  source 1..33: mol_type = other DNA
ctgggcttctccactgctagcggagacgctttt

SEQ ID NO: 44688 - DNA, 45 bp, synthetic construct
  source 1..45: mol_type = other DNA
gccacctgggataacatgtggggcttggggtcagaaacattggac

SEQ ID NO: 44689 - DNA, 111 bp, synthetic construct
  source 1..111: mol_type = other DNA
gttggcagctactcaattagcgcttctgaagtctacggcatcatctgggaccagatcaccggcggcaccccgagcgacacagtcaaacagcacattgtcatcgacctgcgg

SEQ ID NO: 44690 - DNA, 72 bp, synthetic construct
  source 1..72: mol_type = other DNA
ctgctgagcgaccccgacgacctcgcctccgtctacacctggctggttgggagtgttgacggaatcgattac

SEQ ID NO: 44691 - DNA, 57 bp, synthetic construct
  source 1..57: mol_type = other DNA
atcttcaaccccgtgattcggcctgtcacctacctgtttctgatgggtagctccaag

SEQ ID NO: 44692 - DNA, 186 bp, synthetic construct
  source 1..186: mol_type = other DNA
cgcctgcaaatgggcatcgggctcaacaccgtactttgttccatgaccaacgggatgtccagcacttccatcctccacacacacatgcttaagtctattctgggcgaagtcataactcagatcatcggccccttcattcaaggcgacattaataccggcgttggcctctaccaatacgtacctgga

SEQ ID NO: 44693 - DNA, 246 bp, synthetic construct
  source 1..246: mol_type = other DNA
atcgccttcgccggcgctgagcctgactactataccgtcgatgtcgcaaacccaaccggcgagattgatctcggaaatgtgaccgacaaaatcattgacctgaagcacgacaacacacttaacaagaccacctaccatatagattcagactacaacgagatggagctgatcaacgacctgaaagtccctcttaataactcctgcgagtactatactgtgtcttggaacgtttattcatacctgaat

SEQ ID NO: 44694 - DNA, 39 bp, synthetic construct
  source 1..39: mol_type = other DNA
ctgagcttcgggcaaaatgagttcacccatccttttggc

SEQ ID NO: 44695 - DNA, 54 bp, synthetic construct
  source 1..54: mol_type = other DNA
ctcaaccctattatccggcccgtgacctacctgttcctgatgggcagctctaag

SEQ ID NO: 44696 - DNA, 183 bp, synthetic construct
  source 1..183: mol_type = other DNA
cggatgcagatgggcattaagctgaacacagtgttttgctccatgactaatggcatgagctccacaagcatcctccatacccacctgattaagtccatccttggcgccgtccttacgcaaatcatggggcctttcattcaatccggaattaacaccggcgtcggcctatatgcctacgttccc

SEQ ID NO: 44697 - DNA, 243 bp, synthetic construct
  source 1..243: mol_type = other DNA
gcattcgcgggagccgaaccagactactacaccgtggacatcgtcaaccctagcgaggatattgatctggggaacatcagcgtcgaagtcatagacaacgagcacgataacaagactaacaagacaacctaccacatcgacccacaatataatgagatgaagctgatcaacgacctgcgggcgcctctggataatagttgcgagtactacactgtttcttggaacatctatagctacttggaa

SEQ ID NO: 44698 - DNA, 108 bp, synthetic construct
  source 1..108: mol_type = other DNA
ggccggaacatcctggtggacgagaacaagtacagcaccggcgactccgtgaaactgtgccttgagaataacaagattgtcgctgactaccctctggccgaaaatgca

SEQ ID NO: 44699 - DNA, 105 bp, synthetic construct
  source 1..105: mol_type = other DNA
cctgccatcttccaatctttgatcacacctaccatcaacggcatgaaggaaggagtgcaacaggggacggtgcagctggagacaatttccctcttcaccaataac

SEQ ID NO: 44700 - DNA, 33 bp, synthetic construct
  source 1..33: mol_type = other DNA
attcctctgggcaagtacatcctgagcaacatc

SEQ ID NO: 44701 - DNA, 93 bp, synthetic construct
  source 1..93: mol_type = other DNA
ctgcactccacttacccaaccttcatggacgccctgttcggcctcaccaaccctcaaaacgtgattaacaacatcctgagcgggacaccaaag

SEQ ID NO: 44702 - DNA, 45 bp, synthetic construct
  source 1..45: mol_type = other DNA
ctgatcgtctcctcgtcacaagctgagtttacccaccctttcggc

SEQ ID NO: 44703 - DNA, 300 bp, synthetic construct
  source 1..300: mol_type = other DNA
tctcgcgtgacaggaatgacaatctttagtccaattctgaggtttagccggatcgagcagtacagcctgtcctctattaaaactgtgctgcacaacatccagctcatcggccacaacgccaaggctagctactggggagccgagggcaccgccttcgctgaaggctatataacgctccctatgcaatttgtgctgttcttcggcctgccattccctatgttctttggcatccttgtgaaccaaaaggacaccatcgattacatgttgcctgggattttcggctatgggttcgactttggc

SEQ ID NO: 44704 - DNA, 54 bp, synthetic construct
  source 1..54: mol_type = other DNA
gacattgctctcctcgtaatatcgagctcgcaagcggagtttacccacccattt

SEQ ID NO: 44705 - DNA, 297 bp, synthetic construct
  source 1..297: mol_type = other DNA
cgtattactggaatgacaattttttcccccctgctgcggctcggccggatcgaacagtacagcctgacttccattaagaccgtgctcaacaacatccagctgattggccacaacggagcagcctcttattggggcgtcgagggtaccgccttcgctgagggttacatcactctgcccatgcaatttgtcctcttcttcggcctgcccttccctatgtttttcggaatccttgttaatcagaaggacacaattgattacatgctccccggtatcttcggctacggattcgacttcggc

SEQ ID NO: 44706 - DNA, 63 bp, synthetic construct
  source 1..63: mol_type = other DNA
ggcgtgtattacgatccgtcatacttgaaccagatcttctccctcccttttagctataactgg

SEQ ID NO: 44707 - DNA, 81 bp, synthetic construct
  source 1..81: mol_type = other DNA
ggtcagctccacttgccatacaatctgttccatgactatcaagccactaagaccaaaattatcaagtcctcattggatctg

SEQ ID NO: 44708 - DNA, 57 bp, synthetic construct
  source 1..57: mol_type = other DNA
gctgacattgcactgctagtcatctcatcttctcaagctgaattcacccatccattc

SEQ ID NO: 44709 - DNA, 300 bp, synthetic construct
  source 1..300: mol_type = other DNA
tcccgggtgaccggcatgactatcttttcgccactgctgcgccttggacggatcgagcagtacagcctgtctagcatcaagactgtgctcaacaacattcagctgatcggccactcgggcaaggcatcttactggggcattgaaggcacagccttcgctgagggctacatcaccctgcctatgcaatttgtcctgttcttcggcctccctttccccatgttctttggcattctcgtgaatcagaaggataccatcgactacatgctgcctggcatcttcggatatggatttgactttggc

SEQ ID NO: 44710 - DNA, 42 bp, synthetic construct
  source 1..42: mol_type = other DNA
ataatatcatcatcccaagccgagttcacacatccttttgga

SEQ ID NO: 44711 - DNA, 300 bp, synthetic construct
  source 1..300: mol_type = other DNA
gctcgagtgtccggcatgactgtgttctctcccctgctccgcctgggaaggattgaacagtactccctgagttctatcaagacagtcctgcacaacattcagctgattggccacaatgccaaagcctcctattggggcgctgaaggcactgccttcgccgagggctacatcaccatgcccatgcaactagtcctgttctttgggctgcctttccccatgttcttcggcattcttgtgaaccagaaggacacaatcgactacatgctgcctggcatctttggatatggattcgattttggc

SEQ ID NO: 44712 - DNA, 66 bp, synthetic construct
  source 1..66: mol_type = other DNA
ggcgtcgacctcttcatgttgttcgcaagcttcggccaaaacgagtttacccaccctttcggacct

SEQ ID NO: 44713 - DNA, 42 bp, synthetic construct
  source 1..42: mol_type = other DNA
atcatcagctcctcacaagcagagtttactcaccccttcggc

SEQ ID NO: 44714 - DNA, 300 bp, synthetic construct
  source 1..300: mol_type = other DNA
gccagggtcacaggcatgacgatttttagccccgtcctgcggctcacccgcatcgagcagtactccctgagctctatcaagaccgtgctcaacaacatccagctgatcggacacaatgctaacgcctcctattggggcgccgaaggcactgctttcgctgagggatacatcactctgcccatgcaatttgtacttttcttcggcctgcccttcccaatgttcttcgggattctcgtgaaccagaaggataccatcgactacatgctgcccggcattttcggctacggattcgattttggg

SEQ ID NO: 44715 - DNA, 30 bp, synthetic construct; identical to SEQ ID NO: 42876
  source 1..30: mol_type = other DNA

SEQ ID NO: 44716 - DNA, 48 bp, synthetic construct
  source 1..48: mol_type = other DNA
atttacctgatgcaaatcgatgagaacgtggacatcatcctcgcttac

SEQ ID NO: 44717 - DNA, 57 bp, synthetic construct
  source 1..57: mol_type = other DNA
atttatgcctcatttcaaataattaacatggagacaccaatcttttacatcggatgc

SEQ ID NO: 44718 - DNA, 69 bp, synthetic construct
  source 1..69: mol_type = other DNA
aaccagatccccctgaactacgatgccttagttttctacattaacgacttcttcaatctcggcgttaat

SEQ ID NO: 44719 - DNA, 75 bp, synthetic construct
  source 1..75: mol_type = other DNA
cagcctattccctacaagattctctatctgttcatgatcaataacaccatccacctggatagcttcctggacatt

SEQ ID NO: 44720 - DNA, 30 bp, synthetic construct
  source 1..30: mol_type = other DNA
ttcgacctgctccctttatctgggacacag

SEQ ID NO: 44721 - DNA, 54 bp, synthetic construct
  source 1..54: mol_type = other DNA
gacatcgccctcctggtcgtgtcctcttcacaagctgagttcacccaccctttc

SEQ ID NO: 44722 - DNA, 300 bp, synthetic construct
  source 1..300: mol_type = other DNA
tcccgcattactggcatgaccatatttagcccgatgcttcggctgggcaggattgagcaatatagcagcagcagcgtcaagatggtgctgaacaacatccagctgatcggccacaacggcaacgccagctactggggcgccgagggtacagcctttgctgaaggctacatcacactgcccatgcaacttgtgctcttctttgggctgcccttcccaatgttcttcggaatcctggtcaatcagaaggataccgtggactacatgctgcctgggattctcggatacgggttcgactttgga

SEQ ID NO: 44723 - DNA, 30 bp, synthetic construct
  source 1..30: mol_type = other DNA
tgcaagatcaggccagctgggtcacttggc

SEQ ID NO: 44724 - DNA, 54 bp, synthetic construct
  source 1..54: mol_type = other DNA
atctaccctaaggaccccagcaaatacttgaccctgttcctcgacggccagtat

SEQ ID NO: 44725 - DNA, 63 bp, synthetic construct
  source 1..63: mol_type = other DNA
accctgacccacatcaaggttggagccataactgagcacgctctcaagtattacctctaccaa

SEQ ID NO: 44726 - DNA, 42 bp, synthetic construct
  source 1..42: mol_type = other DNA
cgatggatctccaagaacattgtgccgatctactccaaatct

SEQ ID NO: 44727 - DNA, 45 bp, synthetic construct
  source 1..45: mol_type = other DNA
ctaattttgtcatcaagccaagctgagttcacccatccctttggc

SEQ ID NO: 44728 - DNA, 300 bp, synthetic construct
  source 1..300: mol_type = other DNA
tctcgcgtgaccggcatgaccatattctctccgatgctgagatttagtcggatagaacagtacagcctgtcctctattaagacagtcctccacaacattcagctgattgggcacaatgccaaagccagctactggggcgccgagggcacagccttcgctgagggttacatcaccctgcccatgcaattcgtgctgttcttcgggctcccattccccatgttcttcggcatcctcgtgaaccagaaggacaccatcgattacatgctgcctggcatctttggatatggatttgacttcgga

SEQ ID NO: 44729 - DNA, 60 bp, synthetic construct
  source 1..60: mol_type = other DNA
gacatcttcaaccctattatccggcccgtgacatatcagttcttaatgggcagctcaaag

SEQ ID NO: 44730 - DNA, 186 bp, synthetic construct
  source 1..186: mol_type = other DNA
cggatgcaaatgggcatcggcctgaacaccgtcttctgctccatgactaacgggatgtctagcaccagcatcctgcacacacacctgctgaagtctatcctcggcgccctgcttacccaaataatgggccctttcatacaaagtgacataaatacgggagttggactctacgcttacatcccatcc

SEQ ID NO: 44731 - DNA, 240 bp, synthetic construct
  source 1..240: mol_type = other DNA
gctttcgccggggccgaacctgactattacaccgtggacattgctaatcctacgggggacatcgacctgggaaacatctccgtcgaggtcattgaccacgagaccggcagcaacaagaccacttaccacatcgacccaagctacaacgagatgaaactgatcaacgatctcaaggtgccactgaataattcttgcgagtactacaccgtcacatggaacgcctatagctaccttgaacag

SEQ ID NO: 44732 - DNA, 42 bp, synthetic construct
  source 1..42: mol_type = other DNA
atgctcttcgagaatacagtgtctctgccttattacgttacc

SEQ ID NO: 44733 - DNA, 78 bp, synthetic construct
  source 1..78: mol_type = other DNA
caccacctgagccagtatctcctgaactccggcaatattctgcccatcctcggcggacttaagctgttctacgtggac

SEQ ID NO: 44734 - DNA, 75 bp, synthetic construct
  source 1..75: mol_type = other DNA
tctgactttgggtccgtgccactgaacatcctgttcggatacttcattggcaccagctacgagtttacggctttt

SEQ ID NO: 44735 - DNA, 48 bp, synthetic construct
  source 1..48: mol_type = other DNA
tacgacagctacgggacctttcccgagggctactacttctacatgtcc

SEQ ID NO: 44736 - DNA, 33 bp, synthetic construct
  source 1..33: mol_type = other DNA
aaatacgccaacaagagcatcgtgttcaatgac

SEQ ID NO: 44737 - DNA, 42 bp, synthetic construct
  source 1..42: mol_type = other DNA
gtgatctctagtagccaggctgagttcacccacccctttgga

SEQ ID NO: 44738 - DNA, 300 bp, synthetic construct
  source 1..300: mol_type = other DNA
gctcgcgtctcgggcatgacaatcttctcccctgtgctgcgtttgacacgtattgagcagtactccctctctagcatcaagaccgtgcttaacaacattcagctcatcgggcactctgctgacgccagctactggggagccgaaggaaccgccttcgccgaaggctacattactctgccgatgcaattagttctgttcttcggactgcctttcccaatgttcttcggcgtgctggtcaatcagaaggacaccatcgactatatgctgcccggaatcttcggctacggctttgattttgga

SEQ ID NO: 44739 - DNA, 189 bp, synthetic construct
  source 1..189: mol_type = other DNA
gagaccgctgtgttcgccaacatgttttttgcaagtcataatttaagtgtctcttccggaatcgacctcaacctggctatcaacacttttgtccaagccctgcctgtggagctgcagggcctggtcaagccctacctcggccttctgacctccggggtccacgaagcactgacctacatcttcaactat

SEQ ID NO: 44740 - DNA, 45 bp, synthetic construct
  source 1..45: mol_type = other DNA
ttagtcatatcgtcatcacaagccgaattcacccatccttttggc

SEQ ID NO: 44741 - DNA, 300 bp, synthetic construct
  source 1..300: mol_type = other DNA
agccggatcagtggaatgaccatctttagccctatgctccgcctttcgaggatcgagcagttttcctcttcctctgtcaagatggtcctgaacaatatccagctgatcggacacaacggcaacgctagctattggggtgccgagggcacagccttcgctgagggctacattactctgcctatgcaacttgtactgtttttcggcctgcctttccccatgttcttcggcatccttgtaaaccaaaaggacaccgtggactacatgctgcccggcattctcggatacggcttcgatttcgga

SEQ ID NO: 44742 - DNA, 36 bp, synthetic construct
  source 1..36: mol_type = other DNA
tacaccaagatcaggccaatcggctcggttggctgg

SEQ ID NO: 44743 - DNA, 57 bp, synthetic construct
  source 1..57: mol_type = other DNA
acctacccgacggatcctagcaactacctgactctcttcctgagttaccagcaagac

SEQ ID NO: 44744 - DNA, 63 bp, synthetic construct
  source 1..63: mol_type = other DNA
acactgacacatggcaaggttgggcttaccggtgacaataacctgaagtactatcactacgag

SEQ ID NO: 44745 - DNA, 45 bp, synthetic construct
  source 1..45: mol_type = other DNA
cggtggatcgaccacaacatgttccccatttactctgcatctgtg

SEQ ID NO: 44746 - DNA, 42 bp, synthetic construct
  source 1..42: mol_type = other DNA
ctggtcatctcttcttcccaagccgaattcacccatcctttt

SEQ ID NO: 44747 - DNA, 300 bp, synthetic construct
  source 1..300: mol_type = other DNA
gcccgggtctccggaatgacgatcttttcgcccctgcttaggatgggccgcattgagcagtactctttgtcctctattaaaaccgtgctcaataacatccagctcattggccacaacgccaaggcttcctactggggcgctgagggcactgctttcgccgagggctatatcacactgcccatgcaatttgtcctcttcttcgggctgcctttccccatgttcttcggagtcctagttaaccagaaggacacaatcgactacatgctgcctgggatctttggatggggcttcgattttggg

SEQ ID NO: 44748 - DNA, 45 bp, synthetic construct
  source 1..45: mol_type = other DNA
ctgccgagcatcgagcagggcttccacctgacctctagggaatcc

SEQ ID NO: 44749 - DNA, 39 bp, synthetic construct
  source 1..39: mol_type = other DNA
atcgacagctccaacttcttagcgtcactaacctctctg

SEQ ID NO: 44750 - DNA, 33 bp, synthetic construct
  source 1..33: mol_type = other DNA
ctcgtgatcctgtccatgggcatgaacaaccag

SEQ ID NO: 44751 - DNA, 45 bp, synthetic construct
  source 1..45: mol_type = other DNA
ctgcggctcttcgatgtgaccgactttgccttgggatactctccc

SEQ ID NO: 44752 - DNA, 42 bp, synthetic construct
  source 1..42: mol_type = other DNA
gttctcagctcgtctcaagctgagttcacacatccgtttggt

SEQ ID NO: 44753 - DNA, 300 bp, synthetic construct
  source 1..300: mol_type = other DNA
gcccgggtctccgggatgaccatcttctctcccctgctgaggctcggacgcatcgaacagtactctgcgtcaagcataaagaccgtgctgtctaacattcagctcatcggccacaacgctaatgcaagctactggggcgccgaaggcacagcctttgccgaaggatacatcaccctcccaatgcaattggtactcttcttcggcctgcccttccctatgtttttcggcattcttgtgaaccagaaggacacaatcgattacatgctgccgggcattttcggctatggattcgacttcgga

SEQ ID NO: 44754 - DNA, 75 bp, synthetic construct
  source 1..75: mol_type = other DNA
acactgtccggggactacgcctcgtttcaagaagctgtgatggggctattttcggacccccaaactttcatcaac

SEQ ID NO: 44755 - DNA, 123 bp, synthetic construct
  source 1..123: mol_type = other DNA
gtgcctggcgtgcagtacttcggcggacacaacccctccctcattagctccatgctgcccgcgtcgctcaatggtacccttgcctccatgttcaataccggaattgtttacgtcttctccgac

SEQ ID NO: 44756 - DNA, 69 bp, synthetic construct
  source 1..69: mol_type = other DNA
ggcaccatcgggagcctgaatatcacggatatcgtctacgtgctgaaccacaatctcgtcgatccactg

SEQ ID NO: 44757 - DNA, 57 bp, synthetic construct
  source 1..57: mol_type = other DNA
gacatcgccctgctcgtgatatccagctcacaagctgagtttactcaccctttcggc

SEQ ID NO: 44758 - DNA, 297 bp, synthetic construct
  source 1..297: mol_type = other DNA
agggtctctggaatgacgatcttttcacctctgctccgcctgggccgcattgagcagtactcattaagttctatcaagacagtgctttccaacatccagctgattggacacaacgctaacgcctcctattggggcgccgaaggcacagcctttgctgaaggctacatcaccctgccaatgcaattcgtcctgtttttcggcctgccattccctatgttcttcgggattttagtcaaccaaaaggacaccatcgactacatgctgcccggcatcttcggctacggcttcgattttgga

SEQ ID NO: 44759 - DNA, 39 bp, synthetic construct
  source 1..39: mol_type = other DNA
ggcgtgctgccaactaacattagcggattcgagatcggg

SEQ ID NO: 44760 - DNA, 39 bp, synthetic construct
  source 1..39: mol_type = other DNA
atgctgagccaccatgagttcacccacccttacggtccc

SEQ ID NO: 44761 - DNA, 39 bp, synthetic construct
  source 1..39: mol_type = other DNA
gtaatttcaagtagccaggccgagttcacccaccctttc

SEQ ID NO: 44762 - DNA, 57 bp, synthetic construct
  source 1..57: mol_type = other DNA
gccgacatcgccctgctcttcatctcctcctctcaagccgaattcacccatcctttt

SEQ ID NO: 44763 - DNA, 45 bp, synthetic construct
  source 1..45: mol_type = other DNA
ttggttataagctcatctcaagcggagttcacccatccctttggc

SEQ ID NO: 44764 - DNA, 300 bp, synthetic construct
  source 1..300: mol_type = other DNA
gcccgcgtgaccggcatgactattttttctccgatgcttaggtttggtcgcatcgagcagtactccctctcgtcgattaagacagtccttcaaaatatccagctgattggccacaacgcccaggcttcttactggggtgccgagggcaccgcctttgctgagggctatattacactgccaatgcaattagttctcttcttcgggctgcctttccccatgttctttggcattctggtcaaccagaaggacactatcgactacatgttgccggggatattcggctacggattcgattttggc

SEQ ID NO: 44765 - DNA, 57 bp, synthetic construct
  source 1..57: mol_type = other DNA
ctgctgaaccctatcatccggcccattacctacctgttcctcatgggcagttccaag

SEQ ID NO: 44766 - DNA, 186 bp, synthetic construct
  source 1..186: mol_type = other DNA
agacttcaaatgggcattgggctgaacaccgtgttctgctccatgactaacacaatgtctagcacatccatcctgcacacccacctcatcaagtccatcctcggcgaggccctgaatcagatcatgggagctttcatacaatccgacatcaacaccggcgtcggcttatatcaatacttgcctggc

SEQ ID NO: 44767 - DNA, 243 bp, synthetic construct
  source 1..243: mol_type = other DNA
atcgcattcgccggcgccgaacccgactactacaccgtggacgttgctaaccccactggcgaaattgatctggggtccatctctaccgatgtgatcagcactacacacgacaattcaaccaataagaccacttaccatattaatagctcatacaatgaaatggctctgatcaatgatctcaaagtgccactgaacaactcttgcgaatattataccgtctcctggaacatctactcttacctg

SEQ ID NO: 44768 - DNA, 42 bp, synthetic construct
  source 1..42: mol_type = other DNA
gtcgttagtagctctcaagcggagtttacgcacccattcggg

SEQ ID NO: 44769 - DNA, 39 bp, synthetic construct
  source 1..39: mol_type = other DNA
ggcgtcctgagcacaaccgtgtccggattcgagatcggg

SEQ ID NO: 44770 - DNA, 48 bp, synthetic construct
  source 1..48: mol_type = other DNA
ctgatcctgcccatgtttaaccaccatgagttcacccacccttacggg

SEQ ID NO: 44771 - DNA, 33 bp, synthetic construct
  source 1..33: mol_type = other DNA
atggagttttacctcgagaccttccctggtctg

SEQ ID NO: 44772 - DNA, 42 bp, synthetic construct
  source 1..42: mol_type = other DNA
ggcagcatcaccaccctgttgaagtcccagacacttcttacc

SEQ ID NO: 44773 - DNA, 36 bp, synthetic construct
  source 1..36: mol_type = other DNA
ggagtaattacttctctgggtggcttcgagcttggg

SEQ ID NO: 44774 - DNA, 54 bp, synthetic construct
  source 1..54: mol_type = other DNA
gacatcgctctgctggtcttatcctcgagtcaggccgagtttacccacccattt

SEQ ID NO: 44775 - DNA, 294 bp, synthetic construct
  source 1..294: mol_type = other DNA
ctcacaggcatgacaattttctccccattgctccggcttggacgcatcgaacagtactcgctatctagtatcaagactgtcctgaataacattcagctgattggacactccggaaaagcatcctactggggcatcgagggcaccgctttcgccgagggctatatcacactgcccatgcaattcgtcctgttctttgggttgccctttcccatgttcttcggcattcttgtgaatcagaaggacaccatagactatatgcttcccggactcttcggatatggttttgattttggc

SEQ ID NO: 44776 - DNA, 36 bp, synthetic construct
  source 1..36: mol_type = other DNA
gtgcagatcatggacggattcggtttgcctgccgca

SEQ ID NO: 44777 - DNA, 60 bp, synthetic construct
  source 1..60: mol_type = other DNA
gacgtgttcaaccctatcattcggcccgtcacctaccaatttttaatgggcagctctaag

SEQ ID NO: 44778 - DNA, 192 bp, synthetic construct
  source 1..192: mol_type = other DNA
ttccgcatgcaaatgggcattggcataaacacagtcttttgctccatgaccaacgggatgagcagcaccagcatcctccacacccatctgcttaagagcatcctgggcgcccttatcactcaaattatggggccctttattcaaagtaatattaacaccggagttggcctctaccaatatgtaccttccttt

SEQ ID NO: 44779 - DNA, 240 bp, synthetic construct
  source 1..240: mol_type = other DNA
atcgctttcgccggcgccgaacctgattactatactgttgatatcgtgaacccttccggggatattgacctcggaaacatcaccgccaaagtcattgacaatgtgactaccccaaacaagatcacctgtcacatcgaccccaactacaacgagatggagctgatcaatgaccttaaaattcccctgaacaacagctgcgagtattacaccgtcacatggaacgcatatagttaccttgag

SEQ ID NO: 44780 - DNA, 60 bp, synthetic construct
  source 1..60: mol_type = other DNA
gacagcctcaaccccatcattcggcctatcacctacctgttcctgatgggctcctctaag

SEQ ID NO: 44781 - DNA, 186 bp, synthetic construct
  source 1..186: mol_type = other DNA
tttcggctacaaatggggatcgggctgaacaccgttttttgtagcatgacaaatggcatgagctctacttccattcttcatacccacctgctgaaggccatcctcggccacgtgttgactcaaataatgggccctttcatacaatcggggattaacaccggggtcgggttatatgcctacgttccc

SEQ ID NO: 44782 - DNA, 243 bp, synthetic construct
  source 1..243: mol_type = other DNA
gcattcgcgggcgctgagccagactattatacggtcgatatcgtcaaccctagcgacgacatcgacctggggaacatgtccatcgaggtcatagactactcaaagaatactgacctgaacaagaccacataccattttgatccatcctacaacgagatggagctgatcaatgatctgaaggtgcccctgaacaacagctgcgagtactacacggtcagctggaacatctttagctacctggag

SEQ ID NO: 44783 - DNA, 33 bp, synthetic construct
  source 1..33: mol_type = other DNA
tgctcatttggaagcgtcaattacgggaaaatc

SEQ ID NO: 44784 - DNA, 54 bp, synthetic construct
  source 1..54: mol_type = other DNA
tatgctgccggcgtgcccctggagtactccctgctctctttcctggcaaacgac

SEQ ID NO: 44785 - DNA, 87 bp, synthetic construct
  source 1..87: mol_type = other DNA
cccgacttcactttttcgaatatgtacctaaaccagtttcttggcaacttcatcggaacccagggcatgaagatcgtgtcctgcttt

SEQ ID NO: 44786 - DNA, 54 bp, synthetic construct
  source 1..54: mol_type = other DNA
ttcagcgtgaccggcggcacagtaccacaaaaactaaaatacttgcatgcttca

SEQ ID NO: 44787 - DNA, 60 bp, synthetic construct
  source 1..60: mol_type = other DNA
gacatctttaaccccatcgtccgccccattacatatcaattccttatgggctctagcaag

SEQ ID NO: 44788 - DNA, 192 bp, synthetic construct
  source 1..192: mol_type = other DNA
ttcagactgcaaatggggattaagctcaatacaatcttctgctgcatgacaaatggcatgtctagtaccagcatcctgcacactcacctgctcaaaagtatcctcggggctgccatcacccaaatcatcggccctttcgtccaatccaacataaatactggcgttggcttgtactcttacgtgccaagcttc

SEQ ID NO: 44789 - DNA, 246 bp, synthetic construct
  source 1..246: mol_type = other DNA
atgtcggtcggcgtcgctggggccgagacagactgttttaccgtagatgtggttaatcccaccggagatatcgacctcggcaatattagttcaatgatcattgacaacaccaccggccagaacaagactacctaccacatcgaccaccgatacaatgagatgcagctgatcaatgatctgaaggtccctctccgcgactcctgcgaatactacaccgtgtcttggaatattttctcctatttggac

SEQ ID NO: 44790 - DNA, 36 bp, synthetic construct
  source 1..36: mol_type = other DNA
ggtgtcgtgaccacactgggcggatatgagcttggc

SEQ ID NO: 44791 - DNA, 57 bp, synthetic construct
  source 1..57: mol_type = other DNA
attttcaaccccatcatccggcctgtgacctacctctttctgatgggctctagcaag

SEQ ID NO: 44792 - DNA, 189 bp, synthetic construct
  source 1..189: mol_type = other DNA
ttccggcttcaaatgggcatcgggctgaacaccgtgttctgctctatgaccaatagcatgagctccacatccattctgcacactcacctcctcaagtctatcctgggcgaggtgctaacccaaattataggccccttcatccaatcggcgattaacaccggagtcggcctttaccaatacgtacctgat

SEQ ID NO: 44793 - DNA, 237 bp, synthetic construct
  source 1..237: mol_type = other DNA
gctttcgccggcgccgaacctgattgctacacggtagatgtggtcaacccaaccggaaagatcgacttgggcaacatatcagacagtgttatcgatttcaaatacgacaatgccctgaacaagactacctaccacatcgctcccgagtacaacgagatgcagctgatcaacgacctcaaggtgcctcttaactcctcctgcgagtactacaccgtcacatggaatatttattcctac

SEQ ID NO: 44794 - DNA, 57 bp, synthetic construct
  source 1..57: mol_type = other DNA
gtcctgaaccccatcattcggcctgtgacctacctcttcctgatgggctctagcaag

SEQ ID NO: 44795 - DNA, 186 bp, synthetic construct
  source 1..186: mol_type = other DNA
agattgcagatgggaattgggctcaacaccgtattttgctcgatgacaaacgggatgagctctacctccatcctgcacacacacctcctgaagtccgtgctgggcgccgtgctctctaacattatggggcctttcattcaaagcggcatcaataccggagttggattatacgcctacttgccttct

SEQ ID NO: 44796 - DNA, 243 bp, synthetic construct
  source 1..243: mol_type = other DNA
acaatcgctttcgccggggccgaacccgattactttacggtcgacgtggctaaccctacacatgagatcgacctcggcaacgtgtctaccgaggtcatcagtcaggagcacgacgccggactcaacaagaccacttaccacatcgacccttcctacaatgagatgcagctgattaacgacctgaaatatcctctgaacaattcttgcgagtactataccgtctcctggaatatctatagttac

SEQ ID NO: 44797 - DNA, 36 bp, synthetic construct
  source 1..36: mol_type = other DNA
aagctgcctagcgtcaccggatcaagttctcatcct

SEQ ID NO: 44798 - DNA, 42 bp, synthetic construct
  source 1..42: mol_type = other DNA
tgttatcattcgaacggatgggcagcagccttcgacgacacc

SEQ ID NO: 44799 - DNA, 135 bp, synthetic construct
  source 1..135: mol_type = other DNA
ggcgatagccagggcatggacttcggcggcagcgatgacgctggttccggcgacattgccgacaataacggcggttcctacgaaccctggacatctggcatctggggcgactatgaactgcctggagagacagag

SEQ ID NO: 44800 - DNA, 30 bp, synthetic construct
  source 1..30: mol_type = other DNA
tgcagcttcggctccgtggactacggaaag

SEQ ID NO: 44801 - DNA, 54 bp, synthetic construct
  source 1..54: mol_type = other DNA
tacgccgctggcgtgcccctggagtatagcctgctctccttcatcaccaacgac

SEQ ID NO: 44802 - DNA, 87 bp, synthetic construct
  source 1..87: mol_type = other DNA
cccgactttacattctcgaacatgtacctgaaccagttcctcgggcacttcatcgagacatccggcatgaagatcgtgtcttgcttc

SEQ ID NO: 44803 - DNA, 57 bp, synthetic construct
  source 1..57: mol_type = other DNA
atgttcagtgtaaccggtggcaccgtgcccgagaagctcaattacctgcatgctcct

SEQ ID NO: 44804 - DNA, 51 bp, synthetic construct
  source 1..51: mol_type = other DNA
attcccatcatccctaacttcctgaagcagttcgaatacgcacaaatcgcc

SEQ ID NO: 44805 - DNA, 33 bp, synthetic construct
  source 1..33: mol_type = other DNA
taccagggcatcctgagcaccaacatggctacc

SEQ ID NO: 44806 - DNA, 30 bp, synthetic construct
  source 1..30: mol_type = other DNA
ctgggcatttccaacatcagcatcccttac

SEQ ID NO: 44807 - DNA, 36 bp, synthetic construct
  source 1..36: mol_type = other DNA
ggggctgtgaccacatgcggcggcttcaacttggga

SEQ ID NO: 44808 - DNA, 45 bp, synthetic construct
  source 1..45: mol_type = other DNA
gccaagttctttaactactccttcgaccccatttactcacgcgct

SEQ ID NO: 44809 - DNA, 81 bp, synthetic construct
  source 1..81: mol_type = other DNA
cctcacttcctctccggctatctgctgaacaactggtctctcttccctatctacggtggcctggtgctctttactgtcgac

SEQ ID NO: 44810 - DNA, 78 bp, synthetic construct
  source 1..78: mol_type = other DNA
atgagcgtgtttgacaacaatatcatcaacctgctcctgggctacttcattgggaccaacatccacttcacaaccttc

SEQ ID NO: 44811 - DNA, 54 bp, synthetic construct
  source 1..54: mol_type = other DNA
ctggacatcgatggcgccttcttatgtgatgacacccactactattacatgacc

SEQ ID NO: 44812 - DNA, 204 bp, synthetic construct
  source 1..204: mol_type = other DNA
gacctgagccccatcgatccggtcaacgcttaccttagacaagcggccgtctccgaaactcaacggcagattctacaagaatatttcggcaccaacgtgcctatcacaaccaagatcttccattggctgatggatctacttcaagggaacctggggacatctcttatctatcgcgcacccgttatcgacatcatcattgagaag

SEQ ID NO: 44813 - DNA, 93 bp, synthetic construct
  source 1..93: mol_type = other DNA
gctgtgtacctcggctggttccccatcggattcggcgtccctattggcgtccggagtaccgacgcaacctttatggaatgggccagcaggctt

SEQ ID NO: 44814 - DNA, 72 bp, synthetic construct
  source 1..72: mol_type = other DNA
gagcaggttttctcttaccctggcgtcggccaaaccgcagttgctgccgggttgtcttccgatgtgcctctc

SEQ ID NO: 44815 - DNA, 30 bp, synthetic construct
  source 1..30: mol_type = other DNA
gtgttccacaccgccgatctgatcggtgac

SEQ ID NO: 44816 - DNA, 63 bp, synthetic construct
  source 1..63: mol_type = other DNA
ggcgtgtattacgatccaagttacctcggcaaagtgttcaacctgcctttctcctataattgg

SEQ ID NO: 44817 - DNA, 81 bp, synthetic construct
  source 1..81: mol_type = other DNA
ggccaactgcacatgccgtacaacctctttcatgactaccaggcgaccaaatcgaaaattattaagagctccctggacctg

SEQ ID NO: 44818 - DNA, 30 bp, synthetic construct
  source 1..30: mol_type = other DNA
gccggtgtcgtgctggctaagccatcagca

SEQ ID NO: 44819 - DNA, 57 bp, synthetic construct
  source 1..57: mol_type = other DNA
atcttcaaccctattatacggcccatcacctacctgtttctgatgggcagcagtaag

SEQ ID NO: 44820 - DNA, 186 bp, synthetic construct
  source 1..186: mol_type = other DNA
cggatgcaaatgggcatcggcctgaacactgttttctgctcaatgaccaacggcatgtcctctacctctatcctccacacacacctgctcaaatccattcttggggccgtgctgacccaaatcatggggcctttcatccaatccaatattaacaccggcgtcggactttaccaatacgtaccatcc

SEQ ID NO: 44821 - DNA, 237 bp, synthetic construct
  source 1..237: mol_type = other DNA
gctttcgccggcgctgagcccgattactacaccgtggacattgtgaacgcctctgaaaacattgacttcggcaatatcagcatggacgtgatcaatcacgactccaatagcaacaagacaacctaccacgtcgatcctaattataacgaaatgcagctgattaacgaccttaaagtcccactgcggaactcttgcgagtattacacaatcacctggaacgcctactcctacctcgac

SEQ ID NO: 44822 - DNA, 30 bp, synthetic construct
  source 1..30: mol_type = other DNA
ggccggcagagcgccatcctgggcgtgccc

SEQ ID NO: 44823 - DNA, 69 bp, synthetic construct
  source 1..69: mol_type = other DNA
aaccacctacaattcaactacgatagcctcatcttttacattgactccttcttcaaccttggggtcaat

SEQ ID NO: 44824 - DNA, 75 bp, synthetic construct
  source 1..75: mol_type = other DNA
cagcccgtcaagtccgatgcccttttcctgttcatggtcaacgacaccatccatttgaactcgtttctcgacatc

SEQ ID NO: 44825 - DNA, 30 bp, synthetic construct
  source 1..30: mol_type = other DNA
ttcgacctcctgccacttaccggaacacag

SEQ ID NO: 44826 - DNA, 33 bp, synthetic construct
  source 1..33: mol_type = other DNA
tgctcatttggttctgtcgactacgggaaaatc

SEQ ID NO: 44827 - DNA, 54 bp, synthetic construct
  source 1..54: mol_type = other DNA
tatgcagctggcgtgcccattgagtacagcctgctgtccttcatcgccaatgac

SEQ ID NO: 44828 - DNA, 87 bp, synthetic construct
  source 1..87: mol_type = other DNA
cccgacctgaccttctccaacatctacctgaatcaactattagggcacttcatcggcacatacgacatgaacaatattagctgcttt

SEQ ID NO: 44829 - DNA, 54 bp, synthetic construct
  source 1..54: mol_type = other DNA
ttcagcgtaaccggtggcaccgtgcccgagaagctgaactacctccatgcaagt

SEQ ID NO: 44830 - DNA, 48 bp, synthetic construct
  source 1..48: mol_type = other DNA
ggcgaaatgcaagtttacctcattagccacatcgagctgcctatcaca

SEQ ID NO: 44831 - DNA, 45 bp, synthetic construct
  source 1..45: mol_type = other DNA
gtgcagggctacaacgccgggctgtcttccacctatagcttcatc

SEQ ID NO: 44832 - DNA, 69 bp, synthetic construct
  source 1..69: mol_type = other DNA
gctggaagccttggcctggacgccacaccattcaacatctacggtggactggtgctctttgtggtcgac

SEQ ID NO: 44833 - DNA, 69 bp, synthetic construct
  source 1..69: mol_type = other DNA
accgacttcggcatccccgtcgtgaacctcattaccggccacctgtttggaacaaagttcactgctttc

SEQ ID NO: 44834 - DNA, 48 bp, synthetic construct
  source 1..48: mol_type = other DNA
tggggcggcgtctttagcaaggacgtgcacctgtactacttcatgaac

SEQ ID NO: 44835 - DNA, 60 bp, synthetic construct
  source 1..60: mol_type = other DNA
aacattttcaatcctatcgtccgtccaatcacccacctgtttctgatgggcagtagcaaa

SEQ ID NO: 44836 - DNA, 186 bp, synthetic construct
  source 1..186: mol_type = other DNA
cggatgcagctgggtatcggctggaacaccatctttgcctccatgacacatgggatgtcttcaacatccatcctgcacactcacctcctgaagagtattctcggcgaagtgcttgtgaatatcatgggccccttcattcaatctgatatcaacaccggcgttggcctgtatacctacgttcctgat

SEQ ID NO: 44837 - DNA, 234 bp, synthetic construct
  source 1..234: mol_type = other DNA
ttcgccggggctgaaaccgaccactatacggtagaaattgccgacatggacgataacatcaccttcggcgagatccccatggagaaaatcggacagaagaacgacaggaccatttaccacgtcacttcccaatacaatgagatggaactgctcaacgacctcaaggtgcctctgaataactcctgcgagtattatactgtttcctggaacatctatagctatctgagactccag

SEQ ID NO: 44838 - DNA, 36 bp, synthetic construct
  source 1..36: mol_type = other DNA
ttctataataacgctccacatagcgccaactacatg

SEQ ID NO: 44839 - DNA, 60 bp, synthetic construct
  source 1..60: mol_type = other DNA
ctggataatcaggctccaagcccttccaacatcctgaccatgtttttcgacgactactgg

SEQ ID NO: 44840 - DNA, 57 bp, synthetic construct
  source 1..57: mol_type = other DNA
cacaccgtatcgatctcttacatgaagcaccggctgagctactacggctatcagagt

SEQ ID NO: 44841 - DNA, 45 bp, synthetic construct
  source 1..45: mol_type = other DNA
aagtggatcgacaaatattactttcccgtgttttcccataacccc

SEQ ID NO: 44842 - DNA, 81 bp, synthetic construct
  source 1..81: mol_type = other DNA
tttagttacctgccatcctatgaacccaccttgcaatatttcatcgatgtctttttcgggttcaagggcgtgtcctcaatc

SEQ ID NO: 44843 - DNA, 48 bp, synthetic construct
  source 1..48: mol_type = other DNA
tacagcattgactacggctcctggtctatcaacaagctggacttcttc

SEQ ID NO: 44844 - DNA, 42 bp, synthetic construct
  source 1..42: mol_type = other DNA
gcctacaaccccttctttgaacaatttaaagtcgggaaagca

SEQ ID NO: 44845 - DNA, 36 bp, synthetic construct
  source 1..36: mol_type = other DNA
agcttttccaaccttagcattagtccgggcttcgag

SEQ ID NO: 44846 - DNA, 69 bp, synthetic construct
  source 1..69: mol_type = other DNA
aatgtgctggacaacatgctcaacatccccattccgcaattcacaattctgagcctgttcaaggtagat

SEQ ID NO: 44847 - DNA, 81 bp, synthetic construct
  source 1..81: mol_type = other DNA
ttcgtggactttaacaacatcttcctcaactactttttcggctatttcattggaacgatcctgcatcaatgcaccgttttt

SEQ ID NO: 44848 - DNA, 51 bp, synthetic construct
  source 1..51: mol_type = other DNA
cccgttcctgctggaagcatttccgataacgcacacgcctacttcatcaca

SEQ ID NO: 44849 - DNA, 33 bp, synthetic construct
  source 1..33: mol_type = other DNA
gaatatttctacaaggggatcgtgtttaccgag

SEQ ID NO: 44850 - DNA, 42 bp, synthetic construct
  source 1..42: mol_type = other DNA
gccagcgctttccacgccacctacaacccaacctcttccttt

SEQ ID NO: 44851 - DNA, 78 bp, synthetic construct
  source 1..78: mol_type = other DNA
cacttcgtggccggagctcttttaggaaagggtgacgtgtttcccatcgccggcggactcatgctgttctgtgtcgat

SEQ ID NO: 44852 - DNA, 78 bp, synthetic construct
  source 1..78: mol_type = other DNA
gacactgatttcggcaatcccttagttaatctcttctttagctacttcatcgggaccctgggcggtttcactgcgttc

SEQ ID NO: 44853 - DNA, 48 bp, synthetic construct
  source 1..48: mol_type = other DNA
tggggcggaatcgagtccagcgacgtgcacctgtactatttcctggac

SEQ ID NO: 44854 - DNA, 42 bp, synthetic construct
  source 1..42: mol_type = other DNA
atcggaattgacgaggtcatagatgcgctgaaggtctctaac

SEQ ID NO: 44855 - DNA, 30 bp, synthetic construct
  source 1..30: mol_type = other DNA
gccttcggcgcccgggtgagccccatcctg

SEQ ID NO: 44856 - DNA, 30 bp, synthetic construct
  source 1..30: mol_type = other DNA
tacagccgggccggcattacctcctctatc

SEQ ID NO: 44857 - DNA, 30 bp, synthetic construct
  source 1..30: mol_type = other DNA
ttcgtgctgaccggtgtcgacaaccctact

SEQ ID NO: 44858 - DNA, 75 bp, synthetic construct
  source 1..75: mol_type = other DNA
ctgaagcacagcttcgacatttccaacgccctggacatcttcttcggaaaacctggtaccctcggagtggctttt

SEQ ID NO: 44859 - DNA, 48 bp, synthetic construct
  source 1..48: mol_type = other DNA
gtgcccaaaagcatccaggccaaccactttgtctataagggctacttc

SEQ ID NO: 44860 - DNA, 33 bp, synthetic construct
  source 1..33: mol_type = other DNA
aataagtctgccaacggcgagtcactttgggcg

SEQ ID NO: 44861 - DNA, 69 bp, synthetic construct
  source 1..69: mol_type = other DNA
accatggacattaatggaatccccgctaactcccggggcctgattgtgatgatcgccagcatgcttggg

SEQ ID NO: 44862 - DNA, 36 bp, synthetic construct
  source 1..36: mol_type = other DNA
actcctcggcctgacggcttgctgatcgcaaacacc

SEQ ID NO: 44863 - DNA, 60 bp, synthetic construct
  source 1..60: mol_type = other DNA
gacatcttcaaccccattgtccgacctatcacttatcaatttctaatgggctctagcaag

SEQ ID NO: 44864 - DNA, 189 bp, synthetic construct
  source 1..189: mol_type = other DNA
cggctccaaatggggatcaagcttaacaccgtcttctgttgcatggccaacggcatgtcgagtacaagcattctgcacacacacctgctgaagtccatcctcggagctgccattactcaaataattggacctttcgtccaaaacatgaatacaggcgtcggcctctactcctatgtgccatctttcggg

SEQ ID NO: 44865 - DNA, 240 bp, synthetic construct
  source 1..240: mol_type = other DNA
gttgggatcgccggcgctgagactgactgctataccgtagacgtagtgaatcccaccgatgacatcgacctcggcaatattagcgccatggtcattgataacagcaccggaccgaacaagattacctaccacatcgaccaccggtacaacgagatggaactgatcaacgacctcaaggtccccctgatcgattcttgcgaatactacactgtatcgtggaacatctattcctacttgtcc

SEQ ID NO: 44866 - DNA, 66 bp, synthetic construct
  source 1..66: mol_type = other DNA
ctgaacccagcgtactccatacccgagttcacgactcaggggctctatcttaccgataaatccatc

SEQ ID NO: 44867 - DNA, 90 bp, synthetic construct
  source 1..90: mol_type = other DNA
ttctttcacggacagcctcaactagctgccatttacggcgcctcccctagcgtcggtgtctacgagatggctaagacccttgttggtccc

SEQ ID NO: 44868 - DNA, 57 bp, synthetic construct
  source 1..57: mol_type = other DNA
ctcaaccccattatccggcctctgacccacatcttcctgatggggagctctaagggc

SEQ ID NO: 44869 - DNA, 177 bp, synthetic construct
  source 1..177: mol_type = other DNA
cggtatcagctggggatcggccttaacaccaccttcatgtccgtgaagaacggcatctcttctacaagcattatccacacacacctgctcaagtccatcttcggcaatctgattgcctccgtgctcggacccgtctctggcgacatcaacaccggaatttcgctatactcctatgtc

SEQ ID NO: 44870 - DNA, 237 bp, synthetic construct
  source 1..237: mol_type = other DNA
attctcggcgcccagcctgagtattacaccctcgaggtgacaaaccccatcgataacatcgaaatgaccgggatcgacgtggagaacattaccattaacaataatactacaacttacatcatcaatccacactacaacgagatggacctgctgaaccggatcaaggtccagctgaacaacagctgcgagtactacacactgtcctggaacatgatgacctatttcaacaagccacaa

SEQ ID NO: 44871 - DNA, 33 bp, synthetic construct
  source 1..33: mol_type = other DNA
tccgtctcgatgatcggacctttctctcttggc

SEQ ID NO: 44872 - DNA, 81 bp, synthetic construct
  source 1..81: mol_type = other DNA
ttctctaacttcgccggatatgaactgagcatcaactatttcgtaaatgtgctgttcgggtttatgggcatctcctctatc

SEQ ID NO: 44873 - DNA, 42 bp, synthetic construct
  source 1..42: mol_type = other DNA
ctgggctacgggtcctggcaaatcaacaagcttgactttttc

SEQ ID NO: 44874 - DNA, 39 bp, synthetic construct
  source 1..39: mol_type = other DNA
tacaatcccttctttaatcaattcaaggttggcaaagcc

SEQ ID NO: 44875 - DNA, 33 bp, synthetic construct
  source 1..33: mol_type = other DNA
agcatcaccacgttaggcggctttaatttgggc

SEQ ID NO: 44876 - DNA, 36 bp, synthetic construct
  source 1..36: mol_type = other DNA
ggcgtagtcacggtttgcggcggtttcaccttgggg

SEQ ID NO: 44877 - DNA, 57 bp, synthetic construct
  source 1..57: mol_type = other DNA
atgtttaaccctattatccggcccgtgacctaccaattcttgatgggctcaagcaag

SEQ ID NO: 44878 - DNA, 186 bp, synthetic construct
  source 1..186: mol_type = other DNA
aggcttcaaatgggcatctctctgaactctatattcgcctcaatgacccacgggatgtcgagtaccagcatcctccacactcatctgatcaagtccattcttggcgagatcctggctaacgtcatggggcctttcatacaaagcgagattaataccggcgtcgggctttatagttacgtgcctgac

SEQ ID NO: 44879 - DNA, 234 bp, synthetic construct
  source 1..234: mol_type = other DNA
gtagccttcgctggggccgagccagattattatactgtggagatcactaacatggacaagaacgtggacttcggcgacatccccctggaaaagatcagccaaacaaataataccattacctaccacgtgactccggagtacaacgagatggagctgctgaacgacctcaaaatccctctgaccgactcctgcgagtattacaccgtctcctggaacatttactcctatctcgac

SEQ ID NO: 44880 - DNA, 33 bp, synthetic construct
  source 1..33: mol_type = other DNA
gtggttaccacactgggcggattcactttgggg

SEQ ID NO: 44881 - DNA, 33 bp, synthetic construct
  source 1..33: mol_type = other DNA
ttcaacattgagtcaggcaacctcctgatcgga

SEQ ID NO: 44882 - DNA, 42 bp, synthetic construct
  source 1..42: mol_type = other DNA
tatttccactcaatcgatggcatcgttatcaagatggaggtg

SEQ ID NO: 44883 - DNA, 36 bp, synthetic construct
  source 1..36: mol_type = other DNA
gacggcaaggtcaacaaagagatgatcttcggaccc

SEQ ID NO: 44884 - DNA, 72 bp, synthetic construct
  source 1..72: mol_type = other DNA
tttcacatatacatcgatggagcacccgccaatgtccgctgcatggtggtcctggtatcagggctgtttggg

SEQ ID NO: 44885 - DNA, 54 bp, synthetic construct
  source 1..54: mol_type = other DNA
ttttacaagaacccaagccccttctggcctctgaatgccggcatagcttctcct

SEQ ID NO: 44886 - DNA, 90 bp, synthetic construct
  source 1..90: mol_type = other DNA
ttcgatatccccactctcggccggcctttgcacactgactttgtgtctgggttcctcgccatgtgcatgggcgtctttaccgaccatctg

SEQ ID NO: 44887 - DNA, 42 bp, synthetic construct
  source 1..42: mol_type = other DNA
aaattcttcggcaccaacggcttttctcttgtgtacacaccc

SEQ ID NO: 44888 - DNA, 36 bp, synthetic construct
  source 1..36: mol_type = other DNA
ggtgttgtcactaccctgggcggattcacacttggg

SEQ ID NO: 44889 - DNA, 36 bp, synthetic construct
  source 1..36: mol_type = other DNA
ggagtcatcacaaccttgggtggcttcgaactggga

SEQ ID NO: 44890 - DNA, 42 bp, synthetic construct
  source 1..42: mol_type = other DNA
acatctgtcttgtctgcaagccacaacaataccgtgttctcc

SEQ ID NO: 44891 - DNA, 147 bp, synthetic construct
  source 1..147: mol_type = other DNA
cagagcattaacccttatttcctgctcatcctgcacaagcggatcgctgacttctcctttaccgactatttttggatcttctgggacatctccaagatcaccggcatgcccgatgaccagtctgcctgcatttttgtggcgttcgga

SEQ ID NO: 44892 - DNA, 33 bp, synthetic construct
  source 1..33: mol_type = other DNA
tccacaacaacggttccatatatatcgaacgac

SEQ ID NO: 44893 - DNA, 84 bp, synthetic construct
  source 1..84: mol_type = other DNA
aagattcgattcaaccggaaacagcgcaaacgcatgaagcagtatcggtcgctttacggcgatgatcggtatcgctataggaga

SEQ ID NO: 44894 - DNA, 291 bp, synthetic construct
  source 1..291: mol_type = other DNA
gacgagaatcacactgttagttatggtatcggctgggtttttgtgaaaaaagcgggctccgcgataaacgttcccgataatttcaacatcacctatggcgatgtgaaaactatcaacatcgctctcgagaatgtgaccgccgataacatcaacgccacttatgtgatctcaaacggcaagatcgtagtctgcaacattacaagaattgggactaatattaccattcgaggactgggcgtcggagattacgccatcatcgtagagtctagggaaacgaccaactacaatgct

SEQ ID NO: 44895 - DNA, 39 bp, synthetic construct
  source 1..39: mol_type = other DNA
gcctccttctctaatattagtataagccctggattcgag

SEQ ID NO: 44896 - DNA, 69 bp, synthetic construct
  source 1..69: mol_type = other DNA
aacgtcctcgacaatatgctgaacatgagcaacacacccatcaccattctgtcccttttcaaggtggac

SEQ ID NO: 44897 - DNA, 81 bp, synthetic construct
  source 1..81: mol_type = other DNA
ttcgtggactttaacaatatatttcttaactatttcttcggctacttcattggtactatcttacaccaatgtactgccttc

SEQ ID NO: 44898 - DNA, 51 bp, synthetic construct
  source 1..51: mol_type = other DNA
ccgtcacctgcgggatcgatatccgacaatgcacacgcctactttatcact

SEQ ID NO: 44899 - DNA, 30 bp, synthetic construct
  source 1..30: mol_type = other DNA
tacttctataagggtttcgtgtttactgac

SEQ ID NO: 44900 - DNA, 30 bp, synthetic construct
  source 1..30: mol_type = other DNA
tacatggttataataaaggagttcgacatc

SEQ ID NO: 44901 - DNA, 30 bp, synthetic construct
  source 1..30: mol_type = other DNA
aacaagagcaccaatggagaatcgctctgg

SEQ ID NO: 44902 - DNA, 69 bp, synthetic construct
  source 1..69: mol_type = other DNA
accatgaacgtcaacggagcaccagctaatgctcgcgggctcgtagtgatgattgcatctttgttgggc

SEQ ID NO: 44903 - DNA, 33 bp, synthetic construct
  source 1..33: mol_type = other DNA
acccctaagcccgacggcatcatcatagctaac

SEQ ID NO: 44904 - DNA, 63 bp, synthetic construct
  source 1..63: mol_type = other DNA
gccggcggctattctttccccactatgacactgaacaatctgcaccctaccggcatggagtat

SEQ ID NO: 44905 - DNA, 96 bp, synthetic construct
  source 1..96: mol_type = other DNA
gccttctacggcgacaccgccgcgcttaccgctgatctaaactcaggtggcgcttccggcgtcgtgtacaatatgtctcttgcattagctggtccc

SEQ ID NO: 44906 - DNA, 33 bp, synthetic construct
  source 1..33: mol_type = other DNA
aatgttccatatatcaactggctttacttcacc

SEQ ID NO: 44907 - DNA, 33 bp, synthetic construct
  source 1..33: mol_type = other DNA
atcatgttcaagtacaacatgggtctctttatg

SEQ ID NO: 44908 - DNA, 51 bp, synthetic construct
  source 1..51: mol_type = other DNA
ttctataaaaacccttccccaagctggcccctgactgccggaatcgttctc

SEQ ID NO: 44909 - DNA, 93 bp, synthetic construct
  source 1..93: mol_type = other DNA
ttctttgatatccccacactcggacggcctctgcataccgacttcgtctctgggttcctggccatgtgcatgggtgtcttcactgaccatctg

SEQ ID NO: 44910 - DNA, 36 bp, synthetic construct
  source 1..36: mol_type = other DNA
ggtgccgtgaccacacttggcggattcactttgggg

SEQ ID NO: 44911 - DNA, 36 bp, synthetic construct
  source 1..36: mol_type = other DNA
ggcatcgtgacaaccctaggaggattcgaattgggg

SEQ ID NO: 44912 - DNA, 33 bp, synthetic construct
  source 1..33: mol_type = other DNA
ctgggcttcagcaccacatccggaggacctttc

SEQ ID NO: 44913 - DNA, 45 bp, synthetic construct
  source 1..45: mol_type = other DNA
gccacctgggataatatgtggaacctgggaagccagactctagac

SEQ ID NO: 44914 - DNA, 36 bp, synthetic construct
  source 1..36: mol_type = other DNA
ggcgccgtgaccacactggggggattcgaattggga

SEQ ID NO: 44915 - DNA, 36 bp, synthetic construct
  source 1..36: mol_type = other DNA
ggggccgtgaccacactgggtggctttactcttgga

SEQ ID NO: 44916 - DNA, 36 bp, synthetic construct
  source 1..36: mol_type = other DNA
ggggccatcacaaccctcggcgggtttcaattaggc

SEQ ID NO: 44917 - DNA, 36 bp, synthetic construct
  source 1..36: mol_type = other DNA
ggcaccatcacatgcctgggcgggtttgagttgggt

SEQ ID NO: 44918 - DNA, 36 bp, synthetic construct
  source 1..36: mol_type = other DNA
ggagccgtgaccacactgggcggcttcaaccttggg

SEQ ID NO: 44919 - DNA, 90 bp, synthetic construct
  source 1..90: mol_type = other DNA
cagatcgtgaagaaactgcggagaggcaggcgaggacgccaacctcaatcgttgtatagacagaaccagaataatcggagatttcggcgg

SEQ ID NO: 44920 - DNA, 39 bp, synthetic construct
  source 1..39: mol_type = other DNA
gacaagctgctcaaccccaatctgatcaccacacctgac

SEQ ID NO: 44921 - DNA, 57 bp, synthetic construct
  source 1..57: mol_type = other DNA
tggggcgtggaacctctgagcgtcctgtacaacttcgaggaccctgacgccgggtac

SEQ ID NO: 44922 - DNA, 48 bp, synthetic construct
  source 1..48: mol_type = other DNA
tccgagatgattgagaacatcacgcacccggcatctgaaggaaacgtc

SEQ ID NO: 44923 - DNA, 54 bp, synthetic construct
  source 1..54: mol_type = other DNA
attgttggcccggacaagttcatcgattgcatggctcagacctttggaagtgcc

SEQ ID NO: 44924 - DNA, 51 bp, synthetic construct
  source 1..51: mol_type = other DNA
ggcgagatgcaggtttacctgattagccagattaagttgtcactcacctca

SEQ ID NO: 44925 - DNA, 33 bp, synthetic construct
  source 1..33: mol_type = other DNA
gctatcactacattgggtggcttcacacttggg

SEQ ID NO: 44926 - DNA, 204 bp, synthetic construct
  source 1..204: mol_type = other DNA
gacctgtctcccatcgaccctgtgtccgcctacctcaagggcgctgccgtttctgaggcgcaacgccagatcctggagcagtacttcggtaccaatgtccccctgactaccaagatctaccactggctcctggatttaattcaagggaatctcggcaccagcctgatttatcgggctccagtcatggacgtgatcttcgaaaag

SEQ ID NO: 44927 - DNA, 90 bp, synthetic construct
  source 1..90: mol_type = other DNA
tccgtgtacctgggatggtttcctattggcttcggcgtgcccatcggagtcaagagcacagacgccaccttcatggaatgggtcacccgc

SEQ ID NO: 44928 - DNA, 72 bp, synthetic construct
  source 1..72: mol_type = other DNA
gaacaggtcttctcctatcccgggatcgggcaaactgccgtggctgctgggctgcaatccgacgtgcctctc

SEQ ID NO: 44929 - DNA, 36 bp, synthetic construct
  source 1..36: mol_type = other DNA
ggcgtcattacaaccatcggtggattcgaacttggg

SEQ ID NO: 44930 - DNA, 45 bp, synthetic construct
  source 1..45: mol_type = other DNA
agcgaacacgtcctgcgggagtacctcaacgtgatcaacggaaat

SEQ ID NO: 44931 - DNA, 51 bp, synthetic construct
  source 1..51: mol_type = other DNA
tttggacaatctacggcccttacattccctattcacaacatcccgctggag

SEQ ID NO: 44932 - DNA, 63 bp, synthetic construct
  source 1..63: mol_type = other DNA
cccgaaatctccgacggcggacacttcatgatggatattctcgacatcgccatgccttcactg

SEQ ID NO: 44933 - DNA, 45 bp, synthetic construct
  source 1..45: mol_type = other DNA
ctcaacagcacctaccccacattcgtggacgccctgtttgctctg

SEQ ID NO: 44934 - DNA, 87 bp, synthetic construct
  source 1..87: mol_type = other DNA
tttgtgaagaaaatgcgcagaggcagaaggcgccggggccagcagagcctgtatcgacaaaaccaaaataacaggaggttcaagcgg

SEQ ID NO: 44935 - DNA, 30 bp, synthetic construct
  source 1..30: mol_type = other DNA
ttcgccaagagcgagccagtgcacagtctg

SEQ ID NO: 44936 - DNA, 66 bp, synthetic construct
  source 1..66: mol_type = other DNA
tatctgaactacccggcaaccattgagggcctgattgacatcattttcttcaaggggggggttttc

SEQ ID NO: 44937 - DNA, 33 bp, synthetic construct
  source 1..33: mol_type = other DNA
tacctgcaactgcttgacgaggtctactatctg

SEQ ID NO: 44938 - DNA, 39 bp, synthetic construct
  source 1..39: mol_type = other DNA
attacaaactaccagacccacatcctgctgcggaatccc

SEQ ID NO: 44939 - DNA, 36 bp, synthetic construct
  source 1..36: mol_type = other DNA
ggcgtcgtgactaccctcggtggattcacattgggg

SEQ ID NO: 44940 - DNA, 30 bp, synthetic construct
  source 1..30: mol_type = other DNA
tacagctccgatgtgctgggagttggaagt

SEQ ID NO: 44941 - DNA, 36 bp, synthetic construct
  source 1..36: mol_type = other DNA
ggcgtggttacaaccctgggcggattcgaacttggg

SEQ ID NO: 44942 - DNA, 42 bp, synthetic construct
  source 1..42: mol_type = other DNA
aaactcatcgggaccaagggcttctccctggtttacactcct

SEQ ID NO: 44943 - DNA, 36 bp, synthetic construct
  source 1..36: mol_type = other DNA
ggtgccgtgacaaccctgggcggattcgaattgggc

SEQ ID NO: 44944 - DNA, 114 bp, synthetic construct
  source 1..114: mol_type = other DNA
accatcggctccgcgaattactccgcatgggatgtgtatcgagacatctggtaccactttgtcgaccctgggcaaaataaccccaagatggaccacgtgatcttcgacatccga

SEQ ID NO: 44945 - DNA, 33 bp, synthetic construct
  source 1..33: mol_type = other DNA
atgggcatcaccgtgactggaattggaggaaca

SEQ ID NO: 44946 - DNA, 78 bp, synthetic construct
  source 1..78: mol_type = other DNA
aagctgagcgtgtctgagcaaacgctctcggcggtctttcaatggtcgatcggcgacctgagcacagtcacttggacc

SEQ ID NO: 44947 - DNA, 39 bp, synthetic construct
  source 1..39: mol_type = other DNA
ggaggcgtgacaaccctggctggtttccctcttggttgg

SEQ ID NO: 44948 - DNA, 42 bp, synthetic construct
  source 1..42: mol_type = other DNA
ccccagcccgaaaccgcaacctgggccgctatcctgtctctg

SEQ ID NO: 44949 - DNA, 42 bp, synthetic construct
  source 1..42: mol_type = other DNA
ggcatggcatccctcggaacctgggacgccctcttcgatctg

SEQ ID NO: 44950 - DNA, 36 bp, synthetic construct
  source 1..36: mol_type = other DNA
ggctacgtgaccacactcggtggattccagttgggg

SEQ ID NO: 44951 - DNA, 36 bp, synthetic construct
  source 1..36: mol_type = other DNA
ggcgcagtgaccacattgggtggctttcaattgggt

SEQ ID NO: 44952 - DNA, 204 bp, synthetic construct
  source 1..204: mol_type = other DNA
gacatgagccccatcaaccctgtgaatgcttacatctctaacatggtggtgtcacccgagaagatagcccagttagaggcctattggggcgtcaaccagcctatcaccgagaagatgctgaactggttgggcaacatcctgaccggcgacttcggcacatccctgatttaccgggcaccagtgctccatgtaatatcggaaaag

SEQ ID NO: 44953 - DNA, 90 bp, synthetic construct
  source 1..90: mol_type = other DNA
agtgtgtacctcggcctgttccccgtctccggcggagtgcctatcggggccctgtctcaagacgtatcgttctgggattggctgagacat

SEQ ID NO: 44954 - DNA, 72 bp, synthetic construct
  source 1..72: mol_type = other DNA
gagcaagtttttatgtaccccggaatcgggcaggctgctgtgtccgccggactgaggagcgacgttcctctg

SEQ ID NO: 44955 - DNA, 42 bp, synthetic construct
  source 1..42: mol_type = other DNA
gtgggcatcgaccaagttattgatgccctgaagatggccaac

SEQ ID NO: 44956 - DNA, 36 bp, synthetic construct
  source 1..36: mol_type = other DNA
tactcggctgcgggtatcagtagctccgttagttca

SEQ ID NO: 44957 - DNA, 114 bp, synthetic construct
  source 1..114: mol_type = other DNA
actattgggtccagcaacctgtctgctatcgatgtctaccggaatatctactatcacttcttcgatacgggaaaagtgaatgacgacatcgactgggtcatcttcacactgcga

SEQ ID NO: 44958 - DNA, 30 bp, synthetic construct
  source 1..30: mol_type = other DNA
ggcttcatgctgcctggtttaggaggtagt

SEQ ID NO: 44959 - DNA, 78 bp, synthetic construct
  source 1..78: mol_type = other DNA
aagctccggctgtccgatgcttccctgtctgccgtctttcaatggagtgtcggcgaccttagtaccagcacatgggag

SEQ ID NO: 44960 - DNA, 69 bp, synthetic construct
  source 1..69: mol_type = other DNA
atcaacaactatgccctcgacaatcttctgcccgtggtctattcttcgttttttaacttcggaatcctg

SEQ ID NO: 44961 - DNA, 90 bp, synthetic construct
  source 1..90: mol_type = other DNA
ctgagcgccgactacaccatcttctatgctctcaataaccacacatttgtggaaggcggcaacattttcttcgagacctacctggatttg

SEQ ID NO: 44962 - DNA, 30 bp, synthetic construct
  source 1..30: mol_type = other DNA
ctcggcaacatccacctgaccggaaccaag

SEQ ID NO: 44963 - DNA, 48 bp, synthetic construct
  source 1..48: mol_type = other DNA
gtcaacctgctgagctctaatatgaattccttcaacgatgctggagtg

SEQ ID NO: 44964 - DNA, 30 bp, synthetic construct
  source 1..30: mol_type = other DNA
tacaccgccgacgtgagcctgctgccccgg

SEQ ID NO: 44965 - DNA, 57 bp, synthetic construct
  source 1..57: mol_type = other DNA
ctgaacatcaccggctttgagcacaccatcggcctgatcgaagctgctatgagcagt

SEQ ID NO: 44966 - DNA, 42 bp, synthetic construct
  source 1..42: mol_type = other DNA
attggcatcgacgaagtggtcgaagccctcaagctggccaat

SEQ ID NO: 44967 - DNA, 30 bp, synthetic construct
  source 1..30: mol_type = other DNA
tacagcgctgccggcatttccacctctgtg

SEQ ID NO: 44968 - DNA, 30 bp, synthetic construct
  source 1..30: mol_type = other DNA
atgattatcgtcgagcacgtgaaggtggaa

SEQ ID NO: 44969 - DNA, 33 bp, synthetic construct
  source 1..33: mol_type = other DNA
aacaagagcgctaatggcgagtctctttgggcc

SEQ ID NO: 44970 - DNA, 69 bp, synthetic construct
  source 1..69: mol_type = other DNA
accatggacatcaatgggattcctgcaaactcccggggcctcatcgtgatgatctctagcatgttggga

SEQ ID NO: 44971 - DNA, 36 bp, synthetic construct
  source 1..36: mol_type = other DNA
acacctaggcccgacggcgtgattatcgcaaacagc

SEQ ID NO: 44972 - DNA, 33 bp, synthetic construct
  source 1..33: mol_type = other DNA
gccatcaccacactgggcggattcaacttgggt

SEQ ID NO: 44973 - DNA, 45 bp, synthetic construct
  source 1..45: mol_type = other DNA
gtgggcatcgacaaagtgattgaggccctgaagatcgctaagtgg

SEQ ID NO: 44974 - DNA, 30 bp, synthetic construct
  source 1..30: mol_type = other DNA
tacagcgccgctggagtgaccgcatcaatc

SEQ ID NO: 44975 - DNA, 42 bp, synthetic construct
  source 1..42: mol_type = other DNA
atcggcatagatcaagtcatagacgccctcaagatcgccaag

SEQ ID NO: 44976 - DNA, 30 bp, synthetic construct
  source 1..30: mol_type = other DNA
tactccgccgctggcattaccgctagcatc

SEQ ID NO: 44977 - DNA, 42 bp, synthetic construct
  source 1..42: mol_type = other DNA
gtcggcatagatcaagttattgatgccctgaagatggcaaac

SEQ ID NO: 44978 - DNA, 33 bp, synthetic construct
  source 1..33: mol_type = other DNA
tacagcgccgctggcatcagctcctccgtctca

SEQ ID NO: 44979 - DNA, 36 bp, synthetic construct
  source 1..36: mol_type = other DNA
cagcggttctatgactgctaccctagcctggaatgg

SEQ ID NO: 44980 - DNA, 69 bp, synthetic construct
  source 1..69: mol_type = other DNA
accggactcggcgagaagggcatcatcgggctgttcgagcggatgattcagggcccctttcacttctgg

SEQ ID NO: 44981 - DNA, 36 bp, synthetic construct
  source 1..36: mol_type = other DNA
tacatcagcgacgtggctcgggatttcagcgagaag

SEQ ID NO: 44982 - DNA, 48 bp, synthetic construct
  source 1..48: mol_type = other DNA
gctagcaatagagccggagcacctcatctgctgctctacggcaatatc

SEQ ID NO: 44983 - DNA, 33 bp, synthetic construct
  source 1..33: mol_type = other DNA
tgcaacatagatagcgcctacctgaatcctatt

SEQ ID NO: 44984 - DNA, 45 bp, synthetic construct
  source 1..45: mol_type = other DNA
gtgggcattgacaaagtcatcgatgccctgaaggtggctaagacc

SEQ ID NO: 44985 - DNA, 30 bp, synthetic construct
  source 1..30: mol_type = other DNA
tacagcgctgctggaattaccgcttccatc

SEQ ID NO: 44986 - DNA, 72 bp, synthetic construct
  source 1..72: mol_type = other DNA
tggcagtaccagcctacgattacctactttatcgatactgccttcggcgtgcaggattattctagacccttc

SEQ ID NO: 44987 - DNA, 48 bp, synthetic construct
  source 1..48: mol_type = other DNA
tacctgaagggcctggggagcatcgccctcgctcccattgactttttc

SEQ ID NO: 44988 - DNA, 42 bp, synthetic construct
  source 1..42: mol_type = other DNA
acaacccgctcattcctcgcacctatcattaagactaacgcc

SEQ ID NO: 44989 - DNA, 48 bp, synthetic construct
  source 1..48: mol_type = other DNA
accgtctatgtcggcggcaaaaagttcgccctgaagacaagcagtgag

SEQ ID NO: 44990 - DNA, 57 bp, synthetic construct
  source 1..57: mol_type = other DNA
gagcggtatctcgccaaactgtccaagacagaccgctatggcaccagctgcgatgcc

SEQ ID NO: 44991 - DNA, 30 bp, synthetic construct
  source 1..30: mol_type = other DNA
aaggccctgaacgaagttaagaagggcggc

SEQ ID NO: 44992 - DNA, 72 bp, synthetic construct
  source 1..72: mol_type = other DNA
tggcattaccaacctaccatcacttactttatcgacactgccttcggcgtgcaggactactcgagacccttc

SEQ ID NO: 44993 - DNA, 48 bp, synthetic construct
  source 1..48: mol_type = other DNA
tacctgaagggactcggcggaaccgccctgatgcccatcgacttcttt

SEQ ID NO: 44994 - DNA, 42 bp, synthetic construct
  source 1..42: mol_type = other DNA
accacaaggggattcctcgccccaaaagttaagactaacgct

SEQ ID NO: 44995 - DNA, 42 bp, synthetic construct
  source 1..42: mol_type = other DNA
gtgggcatcgagcaagttatagccgctctgaagatcgctaac

SEQ ID NO: 44996 - DNA, 72 bp, synthetic construct
  source 1..72: mol_type = other DNA
tggcactgcaagcccacgctggaatatttcttcgctattatctttggcgcccatgacttgagctccctgttc

SEQ ID NO: 44997 - DNA, 48 bp, synthetic construct
  source 1..48: mol_type = other DNA
tactataaggggcttggtggatggggtctggtgcccgtcgacttcttt

SEQ ID NO: 44998 - DNA, 42 bp, synthetic construct
  source 1..42: mol_type = other DNA
atcgactgcggctttatgcacgaatgggtcaacgaaaacctg

SEQ ID NO: 44999 - DNA, 69 bp, synthetic construct
  source 1..69: mol_type = other DNA
tggcactgcaagccaacgtccgagtacttcttcgccgtgatattcgggtcgcatgacctctctagtctg

SEQ ID NO: 45000 - DNA, 48 bp, synthetic construct
  source 1..48: mol_type = other DNA
tactataacgggctcggcggactgggccttgtgcctgttgactttttc

SEQ ID NO: 45001 - DNA, 42 bp, synthetic construct
  source 1..42: mol_type = other DNA
ttcgactttggctttatgcacgaatgggcctacgaaaacctg

SEQ ID NO: 45002 - DNA, 42 bp, synthetic construct
  source 1..42: mol_type = other DNA
atcgggatcgattctgtaatagacgctttgcaaatggccaac

SEQ ID NO: 45003 - DNA, 30 bp, synthetic construct
  source 1..30: mol_type = other DNA
tacgccgtggctggcattagcacctccatc

SEQ ID NO: 45004 - DNA, 51 bp, synthetic construct
  source 1..51: mol_type = other DNA
atcctctctcggaaggaggaagagaaagcagccgaaagtgatacaaccgat

SEQ ID NO: 45005 - DNA, 42 bp, synthetic construct
  source 1..42: mol_type = other DNA
gtcggtatcgaccaagtgataggagctctgaagatggccaat

SEQ ID NO: 45006 - DNA, 30 bp, synthetic construct
  source 1..30: mol_type = other DNA
tacagcgccgctggcatcagttcctctatc

SEQ ID NO: 45007 - DNA, 39 bp, synthetic construct
  source 1..39: mol_type = other DNA
atcaaggctgtctgtagcggctgcatgtactccgatacc

SEQ ID NO: 45008 - DNA, 36 bp, synthetic construct
  source 1..36: mol_type = other DNA
gccaaggtgaccaagcctttcgagggcagtcttaca

SEQ ID NO: 45009 - DNA, 72 bp, synthetic construct
  source 1..72: mol_type = other DNA
tggcagtaccaccctaccatcacttacttcattgacactgccttcggcgtgcaggattactctcggcctttt

SEQ ID NO: 45010 - DNA, 48 bp, synthetic construct
  source 1..48: mol_type = other DNA
tacctcaagggacttggcggcatcgccctggctcccattgactttttc

SEQ ID NO: 45011 - DNA, 42 bp, synthetic construct
  source 1..42: mol_type = other DNA
atgtttgacgggttcctctctcccattatcaaaaccaacgcc

SEQ ID NO: 45012 - DNA, 42 bp, synthetic construct
  source 1..42: mol_type = other DNA
gtgggcattgatcaggttatctctgccctgaagatggctaac

SEQ ID NO: 45013 - DNA, 30 bp, synthetic construct
  source 1..30: mol_type = other DNA
tactccgccgctggtatctctgcaagtgta

SEQ ID NO: 45014 - DNA, 36 bp, synthetic construct
  source 1..36: mol_type = other DNA
agctttaactaccggttcgaggaccctctgaagccc

SEQ ID NO: 45015 - DNA, 54 bp, synthetic construct
  source 1..54: mol_type = other DNA
ctgggcggtatccccctgttcaactcggtgctcaagtccaacgccacaaccaat

SEQ ID NO: 45016 - DNA, 240 bp, synthetic construct
  source 1..240: mol_type = other DNA
tctcagagtattgctaatcagcactggacactcaaccctctcgagctggtcttttaccgagcggcctttacccttgaagtcttcgagaagatcatccccctgggcggtagcactcacggacacatcctgtccatgatcttctctagcggctccccacggaccttcattggacaatatgtattacactacgacgtctgtcttacaagcaccctcttcggccccgtgtatctggactttggc

SEQ ID NO: 45017 - DNA, 33 bp, synthetic construct
  source 1..33: mol_type = other DNA
agctttaactaccggttcgaggacccactgaag

SEQ ID NO: 45018 - DNA, 54 bp, synthetic construct
  source 1..54: mol_type = other DNA
ctgggcggaatccccctgttcaactccgtgctcaagagcaacgccaccacaaat

SEQ ID NO: 45019 - DNA, 240 bp, synthetic construct
  source 1..240: mol_type = other DNA
agccagtctattgctaaccagcactggacccttaaccctctggagctcctcttctatcgggcggccttcacactcgaagtgtttgagaaaattatcccacttggcggaacaacccatggccacatcctctcgatgatcttctcctccggctctccccggacctttatcggccaatacgtattgcactatgacgtctgtctgactagcaccatgttcggacccgtgtacctggactttggg

SEQ ID NO: 45020 - DNA, 45 bp, synthetic construct
  source 1..45: mol_type = other DNA
atcggcgtggacaagatcattgaggctcttaaaaccgccgatatg

SEQ ID NO: 45021 - DNA, 36 bp, synthetic construct
  source 1..36: mol_type = other DNA
ctcggcttcggtgctgaggccagctacggactgatc

SEQ ID NO: 45022 - DNA, 36 bp, synthetic construct
  source 1..36: mol_type = other DNA
ctgtacagcacttccggcatcacaaccgccattacc

SEQ ID NO: 45023 - DNA, 33 bp, synthetic construct
  source 1..33: mol_type = other DNA
agctttaactaccgcttcgaggaccctctggat

SEQ ID NO: 45024 - DNA, 54 bp, synthetic construct
  source 1..54: mol_type = other DNA
atgggaggcatccccctgttcaattccgtgctgaagagcaacgccaccacaaac

SEQ ID NO: 45025 - DNA, 240 bp, synthetic construct
  source 1..240: mol_type = other DNA
agccagtccatcgccaaccagcactggaccctgaaccctctcgagctgattttctatcgcgctggcttcaccctcgaagtgttcgagcgcatcctgcggcttggcggaacaactcatggccacatcctctctatgatcttttcctctgggagccccagaacattcgtcgggcaatatgtactgaccgacaatgtctgccttacttcaacactctttggtccggtctatctggactttggt

SEQ ID NO: 45026 - DNA, 42 bp, synthetic construct
  source 1..42: mol_type = other DNA
gtggggatagacaacgtgatcaatgccctgaagattgctaac

SEQ ID NO: 45027 - DNA, 30 bp, synthetic construct
  source 1..30: mol_type = other DNA
tacagcgccgctgggatcacggcatcgatc

SEQ ID NO: 45028 - DNA, 75 bp, synthetic construct
  source 1..75: mol_type = other DNA
gacctgcgggatattagcaacctcatcaccacctctgagatgcagacattctacgacgcccagctgatgactagc

SEQ ID NO: 45029 - DNA, 66 bp, synthetic construct
  source 1..66: mol_type = other DNA
aattactattacgaggtgcagcttgaggacggcttcctgcccgtgtttaagcctacctacaacatt

SEQ ID NO: 45030 - DNA, 48 bp, synthetic construct
  source 1..48: mol_type = other DNA
gtcgaaatcgtgttcaaggacattgaggtgcccgagtacagcttcaac

SEQ ID NO: 45031 - DNA, 69 bp, synthetic construct
  source 1..69: mol_type = other DNA
cgcatccgttatgcgagaaagcggaagcgccagagccactccctgtaccccgagaacaggagataccgg

SEQ ID NO: 45032 - DNA, 33 bp, synthetic construct
  source 1..33: mol_type = other DNA
agcttcaactaccgctttgaggaccccatcaat

SEQ ID NO: 45033 - DNA, 54 bp, synthetic construct
  source 1..54: mol_type = other DNA
atcggcggcatcccccttctctctagtactctcaaggctaacgccactaccaat

SEQ ID NO: 45034 - DNA, 240 bp, synthetic construct
  source 1..240: mol_type = other DNA
agcaagtctattgcaacacagagttggaccctcaacccccttgagctgatattttaccgggcagccttcaccctggagctgttcgagaaaattatccccctggctggcacaactcacggacacatcctatccatgatattttcgtccggatccccacggacatttgttggcgaatacgtcatgaagtataccttttgcgctacctctacaatgttcgggcctgtgatgctggactttggc

SEQ ID NO: 45035 - DNA, 42 bp, synthetic construct
  source 1..42: mol_type = other DNA
gtcggaattgatcaagtcatagatgccctgaagatggctaac

SEQ ID NO: 45036 - DNA, 30 bp, synthetic construct
  source 1..30: mol_type = other DNA
tacagtgccgctggcatcccggcatccgtg

SEQ ID NO: 45037 - DNA, 30 bp, synthetic construct
  source 1..30: mol_type = other DNA
ttcaactaccggtttgacgatccactggac

SEQ ID NO: 45038 - DNA, 54 bp, synthetic construct
  source 1..54: mol_type = other DNA
atgggaggcatccccctttttaactcggttctcaagtccaatgccacaaccaac

SEQ ID NO: 45039 - DNA, 240 bp, synthetic construct
  source 1..240: mol_type = other DNA
tcccagtctatcgccaaccagcactggaccctcaaccccctggagctgatcttctatagggctgctttcaccctggaggtcttcgagaaaatcctcccactgggcggtacaacccacggacatattctgagcatgattttctctagcgggtcccctcggaccttcatcggacaatacgtgctaagctacgacgtctgtcttacttccacactgttcggccccgtgtacctcgactttggg

SEQ ID NO: 45040 - DNA, 54 bp, synthetic construct
  source 1..54: mol_type = other DNA
ctgaaccccatcatccggcctattacctacctgttcctcatgggctctagcaag

SEQ ID NO: 45041 - DNA, 189 bp, synthetic construct
  source 1..189: mol_type = other DNA
aggttacaaatgggcatcaagctcaataccgtcttctgcgctatgtctaacacaatgagctccacaagtatcctgcacacccacctgctgaagtctattctcggggccctcctgagccagatcattggcccctttatacaatctgacatcaacaccggagttggactttactcctacatccctagtgcc

SEQ ID NO: 45042 - DNA, 219 bp, synthetic construct
  source 1..219: mol_type = other DNA
gcactggccggcgccgagccagactactacactgtggagatcgctaacatcaccgacgatgtcgacttcgctgacatccccattgaaaagattagcaacgggacctaccacgtcgactcctcttacaacgagatggagctcctcaatgatctgcgggtgcctctgaacaacagttgcgactattacaccgtgtcctggaacgcgtactcatacctgaaa

SEQ ID NO: 45043 - DNA, 81 bp, synthetic construct
  source 1..81: mol_type = other DNA
aaaatcagattcaaccgcaagcaacggaagaggaagaatcagtaccggagtctttatagcgatgataggtaccggtaccgc

SEQ ID NO: 45044 - DNA, 33 bp, synthetic construct
  source 1..33: mol_type = other DNA
agcttcaactaccggtttgaggaccctctgaat

SEQ ID NO: 45045 - DNA, 54 bp, synthetic construct
  source 1..54: mol_type = other DNA
attggcggtatccccctcttcaactcaacgctgaaggccaacgctaccacaaat

SEQ ID NO: 45046 - DNA, 240 bp, synthetic construct
  source 1..240: mol_type = other DNA
agtaaatctattgccacccaaacgtggaccctgaacccactcgagctgatcttctaccgggctgccttcacactcgagctctttgagaaaattatccccctggctgggaccacccacggacacatcctgtccatgatcttctcctcgggaagccctaggactttcgtcggagaatacgtgatgaagtatacattctgcgccactagcaccctgttcggccctgtcatgctggactttggg

SEQ ID NO: 45047 - DNA, 42 bp, synthetic construct
  source 1..42: mol_type = other DNA
gtgggcattgaacaggtgctcgaggctttgcggatcgccaac

SEQ ID NO: 45048 - DNA, 30 bp, synthetic construct
  source 1..30: mol_type = other DNA
tacagtagcgccggcatctcgtcatcggtt

SEQ ID NO: 45049 - DNA, 42 bp, synthetic construct
  source 1..42: mol_type = other DNA
gtcggcatcgataacgtgatcgacgccctgaagatcgccaag

SEQ ID NO: 45050 - DNA, 30 bp, synthetic construct
  source 1..30: mol_type = other DNA
tacagtgccgccggcgtgaccgcttccatc

SEQ ID NO: 45051 - DNA, 54 bp, synthetic construct
  source 1..54: mol_type = other DNA
atgtacacaaagcggaccaacagcgagggcattatcgtgttcaagcccaaactc

SEQ ID NO: 45052 - DNA, 90 bp, synthetic construct
  source 1..90: mol_type = other DNA
gaacccaagctgagccacatcattaagcgcgagaaatggaatgtcattgagcgggccatcaacaccaagatcgtgaagaagaataagaac

SEQ ID NO: 45053 - DNA, 33 bp, synthetic construct
  source 1..33: mol_type = other DNA
gaggtccgggacgtgcagaacaccggttacact

SEQ ID NO: 45054 - DNA, 54 bp, synthetic construct
  source 1..54: mol_type = other DNA
gagaagtacttggctcaaaacggggacgctaccccctcggaaggttcctctacc

SEQ ID NO: 45055 - DNA, 45 bp, synthetic construct
  source 1..45: mol_type = other DNA
agcttcaacaaggctctgaaacagcttaaaaaaggaggaagtgcc

SEQ ID NO: 45056 - DNA, 30 bp, synthetic construct
  source 1..30: mol_type = other DNA
aagaagaatgtgaacaacttctactactcc

SEQ ID NO: 45057 - DNA, 36 bp, synthetic construct
  source 1..36: mol_type = other DNA
agcttcaactaccggttcgaggaccctctgaagccc

SEQ ID NO: 45058 - DNA, 54 bp, synthetic construct
  source 1..54: mol_type = other DNA
ctcggcggcatccccctgttcaactccgtgctgaagagcaacgccacaaccaat

SEQ ID NO: 45059 - DNA, 243 bp, synthetic construct
  source 1..243: mol_type = other DNA
gcctcccaaagcatcgcaaatcagcactggacccttaacccggttgagcttgttttctaccgggcagcttttacacttgaagttttcgaaaaaatcatacccctcggcggaacgacccatggacatattctctccatgattttttcgagtggtagtccaagaacattcatcgggaactacgtgctgcactatgatgtctgcctgacgtcaacgcttttcggccccgtgtacttggactttggc

SEQ ID NO: 45060 - DNA, 171 bp, synthetic construct
  source 1..171: mol_type = other DNA
accatgtctggctgcatcctggacccggacatcgcgatatacctcctttccgccctcaaatatgcaggcctggacttctatggagtggcgtaccctcaagatttgttctatactccaaccatatccttcctgactagtttgatattccgaatgggttatgtggataagaac

SEQ ID NO: 45061 - DNA, 150 bp, synthetic construct
  source 1..150: mol_type = other DNA
atcctcgacttcggcggctccctgtccttctttgatcaatctgtcaacacatttaatggccacgggatctccaaaacgtctattgactatgtgtctgacaagagctactacttagaccgcttgaccgacatgctgttcggatctagggac

SEQ ID NO: 45062 - DNA, 42 bp, synthetic construct
  source 1..42: mol_type = other DNA
gtgggcattgaccaggttatcgatgccctgaagatagctaac

SEQ ID NO: 45063 - DNA, 30 bp, synthetic construct
  source 1..30: mol_type = other DNA
tacagcgcagccggagtgcctgcttcaatc

SEQ ID NO: 45064 - DNA, 51 bp, synthetic construct
  source 1..51: mol_type = other DNA
cagtacatcaggcctattacttcaatctttctcatgggcagctccaaaggc

SEQ ID NO: 45065 - DNA, 183 bp, synthetic construct
  source 1..183: mol_type = other DNA
ctgcggctgaagtacaacgtccctatcaacactaccttcatctccatggacgggaccaatatcaacacgtcaagcatcatccactctcacctgttcaagtctgtgattggagagctgattacgaagattatcgacataccgtctgggattcatatcggtacctccctgctcacatacactcca

SEQ ID NO: 45066 - DNA, 270 bp, synthetic construct
  source 1..270: mol_type = other DNA
ctctccttcggaaccaacacctactacgacatctacctcctgaaccccgactctaacatcaacatcacggactcgattgacaatctggaggagatttctaacgaatccgattacctggtgctgcggatcaattcttcattggactacaacgaaatggacttgacggatagtctgactaagaaacttaacgggaaatgtgacggcttctttatcactgtcaacacaatttcgtacctgaagaaggagagaatcctcgacaagatcttcaac

SEQ ID NO: 45067 - DNA, 48 bp, synthetic construct
  source 1..48: mol_type = other DNA
atcgggcagaagggctccattctgttcattaaccctggctattcactg

SEQ ID NO: 45068 - DNA, 48 bp, synthetic construct
  source 1..48: mol_type = other DNA
agccggaacattatcgagttcaagatcttcaccacaaccgattcattt

SEQ ID NO: 45069 - DNA, 33 bp, synthetic construct
  source 1..33: mol_type = other DNA
agcttcaactaccgctttgaggacccactgaat

SEQ ID NO: 45070 - DNA, 54 bp, synthetic construct
  source 1..54: mol_type = other DNA
atcggaggcattcccttattcaattccgtcctgaagtccaacgccacaaccaat

SEQ ID NO: 45071 - DNA, 240 bp, synthetic construct
  source 1..240: mol_type = other DNA
agccagtccatcgctaaccagcactggacactcaaccccattgagctggtcttttatcgcgccgcctttactctggaagtttttgaaaaaatcatccccctgggtggtagcacccacggacatatcctctccatgattttctctagcggctctccacggaccttcatcggccaatatgttctccactacgacgtttgtttgacatccaccctgttcgggcctgcatatctggactttggg

SEQ ID NO: 45072 - DNA, 123 bp, synthetic construct
  source 1..123: mol_type = other DNA
tgcatctcccaatatgcagtctccttttctgaggctctggacgtcatcgccaagaacctgagtggaggaacattcgacacctaccacgatcggctcgtgaaccacatcgtctgggaaggttac

SEQ ID NO: 45073 - DNA, 33 bp, synthetic construct
  source 1..33: mol_type = other DNA
ctggacttccaaattgctggaccctctatggat

SEQ ID NO: 45074 - DNA, 78 bp, synthetic construct
  source 1..78: mol_type = other DNA
cggtacacagcaagcgaagaggacatcgcttccatctactcttggaccgttggtactctggccggaattggatggaac

SEQ ID NO: 45075 - DNA, 33 bp, synthetic construct
  source 1..33: mol_type = other DNA
agctttaactaccgcttcgaggacccacttgat

SEQ ID NO: 45076 - DNA, 54 bp, synthetic construct
  source 1..54: mol_type = other DNA
ctcggcggaatccccctgttcaatagcacactgaaggctaacgccaccactaac

SEQ ID NO: 45077 - DNA, 240 bp, synthetic construct
  source 1..240: mol_type = other DNA
tcccagtctatttcgaatcaacactggacactgaatcccctggagctgatcttctaccgtgccgcttttaccctggaagtgttcgagcgaatcctccctctcgccggcaccaccggcggcaaaatcctcgctatgatcttctcgtcggggagccccaggaccttcattggcgaatacgtcctgcactacaacgtctgcctgactagcacactgttcggaccagtgatgctggactttggc

SEQ ID NO: 45078 - DNA, 72 bp, synthetic construct
  source 1..72: mol_type = other DNA
atgcccggcgtcacacataaccaaaccttcgcgcaattcattcacctgaaggactatttctactaccttggt

SEQ ID NO: 45079 - DNA, 33 bp, synthetic construct
  source 1..33: mol_type = other DNA
tggcggaacggagcccaagtgttcggctttgac

SEQ ID NO: 45080 - DNA, 42 bp, synthetic construct
  source 1..42: mol_type = other DNA
gccctctctaatcctgtttcttacaacattttttcccactat

SEQ ID NO: 45081 - DNA, 78 bp, synthetic construct
  source 1..78: mol_type = other DNA
ggaggcgtgatcccctacgactttgtcttcgatttcaacgccacacaaagcaagattctcggctcatggctggatgtt

SEQ ID NO: 45082 - DNA, 36 bp, synthetic construct
  source 1..36: mol_type = other DNA
cccttcttcgtcggcatacctcactctggaacaggg

SEQ ID NO: 45083 - DNA, 48 bp, synthetic construct
  source 1..48: mol_type = other DNA
atctatcacatcatggacccacataacgtctattccctatccattacc

SEQ ID NO: 45084 - DNA, 75 bp, synthetic construct
  source 1..75: mol_type = other DNA
atgaagaacgattttaatctgatctccgtgattgccgacattctcctgcttcggcccatcgagatcagccacttc

SEQ ID NO: 45085 - DNA, 33 bp, synthetic construct
  source 1..33: mol_type = other DNA
ttcgggattaagggcctgagcatccagcaagcc

SEQ ID NO: 45086 - DNA, 39 bp, synthetic construct
  source 1..39: mol_type = other DNA
ttcaaccacaagtacacctacatcctgtattacgattgg

SEQ ID NO: 45087 - DNA, 36 bp, synthetic construct
  source 1..36: mol_type = other DNA
agcttcaactaccggtttgaggacccactggatggg

SEQ ID NO: 45088 - DNA, 54 bp, synthetic construct
  source 1..54: mol_type = other DNA
ctgggcggcatccccttatttaactcgacactcaaggctaatgccactaccaac

SEQ ID NO: 45089 - DNA, 240 bp, synthetic construct
  source 1..240: mol_type = other DNA
tcccagagcattgctggccagacatggaccctgaaccccctggagctcatcttctaccgggccgccttcacactcgaagtctttgagcgcatcctgccccttgctggaacaaccggcggcaagatcctggccatgattttctcttccgggtctccaaggacctttatcggcgaatatgtcctccactacaacgtttgcttgacttccaccctgtttggccctgtgatgctcgacttcggc

SEQ ID NO: 45090 - DNA, 207 bp, synthetic construct
  source 1..207: mol_type = other DNA
cagctgagcccaatcgaccccgtgaaggcctacttaggtcaacggatagtgtctcaagagcagctcgccatcatgggcgaatattggggcaccaacctgactctcggcgagcgcgtgctgggctggctacaaacgcttgcctctggaagcatggggtttagcctgatctaccgggcccctgtgaccgaagtcaaagcgataaagcag

SEQ ID NO: 45091 - DNA, 90 bp, synthetic construct
  source 1..90: mol_type = other DNA
gtgtacctgggctggttccctatcgggctgagcgtccccattggacagctgtccgacaccgtgacattttggcaatggttaagactgtat

SEQ ID NO: 45092 - DNA, 72 bp, synthetic construct
  source 1..72: mol_type = other DNA
gagcaggtcttcgcctaccccggaattgggcaagccaccgtcgctgctgggctgaggtcagacgttcctctg

SEQ ID NO: 45093 - DNA, 54 bp, synthetic construct
  source 1..54: mol_type = other DNA
ttcaagacaaccctgttcggacccatcggtggcaccctgcctctctggaactac

SEQ ID NO: 45094 - DNA, 108 bp, synthetic construct
  source 1..108: mol_type = other DNA
tttggcacctacaatatttccgttggtgacgccatcgggtgcttcatcgaccacctgagcggaaacgtcaaggatccaacgggagaccactacatctgggatgttcgc

SEQ ID NO: 45095 - DNA, 33 bp, synthetic construct
  source 1..33: mol_type = other DNA
ggcattagcatcgtgcccttcctcactaaccag

SEQ ID NO: 45096 - DNA, 78 bp, synthetic construct
  source 1..78: mol_type = other DNA
atggtgacatctcctagcgagtccatggccgaggcttacgcttggcgggtcggcgatctagggacagtcggctgggcc

SEQ ID NO: 45097 - DNA, 66 bp, synthetic construct
  source 1..66: mol_type = other DNA
cttgggcacgagaacctctctctgtccggcttctggtactacctaagcctgggcgtgttcgaaggc

SEQ ID NO: 45098 - DNA, 30 bp, synthetic construct
  source 1..30: mol_type = other DNA
ctgttcggacgaggatggtgcggatacgcc

SEQ ID NO: 45099 - DNA, 54 bp, synthetic construct
  source 1..54: mol_type = other DNA
ctcatctggaaaatcaagtttttccaaagctcatacgacctgctgaacaagaac

SEQ ID NO: 45100 - DNA, 60 bp, synthetic construct
  source 1..60: mol_type = other DNA
gacaccctgaaccctatcatccggcccattacatacctgttcctcatgggctcctcaaag

SEQ ID NO: 45101 - DNA, 186 bp, synthetic construct
  source 1..186: mol_type = other DNA
aggctgcaaatgggcattaagctcaacaccgtcttttgctcgatgactaacacaatgtctagcacctccatcctgcacacacacctgctgaagagcatcctaggtcagatcctctccttcatcatggggcccttcatccaaagtgatatcaataccggagtcggcctttatcaatatctgccgccg

SEQ ID NO: 45102 - DNA, 216 bp, synthetic construct
  source 1..216: mol_type = other DNA
gccttcgctggggccgagcctgactactacaccgtgaccatcgaggacattgacgagcacgtcgatttcggcaacatccccatcgaaaagatcaacaacacaacctaccacgtggactctaaatacaatgagatgctgctgattaatgacctcaaggtcccactcaacaacagctgcaagtactacactgtgacatggaacatctactcctacctg

SEQ ID NO: 45103 - DNA, 33 bp, synthetic construct
  source 1..33: mol_type = other DNA
agcttcaactaccgctttgaggacccactggat

SEQ ID NO: 45104 - DNA, 57 bp, synthetic construct
  source 1..57: mol_type = other DNA
cttctcggcggcatccccctgttcaattccgtgctgaagagcaacgccaccacaaac

SEQ ID NO: 45105 - DNA, 240 bp, synthetic construct
  source 1..240: mol_type = other DNA
agccagtccattgccaaccagacctggacccttaatcccctggagctgatcttctaccgcgctgcattcacactcgaggtcttcgaacgcatcctccctctggccgggacaacccacggccacatcctgtccatgatcttctctagcggatctccccggacttttatcggcgaatacgtgctccattataacgtctgcctgacaagcaccctgttcgggccagtgatgctggactttggc

SEQ ID NO: 45106 - DNA, 84 bp, synthetic construct
  source 1..84: mol_type = other DNA
atctacgaaggggcccaccgcatttatttatggggcgcccaccggatctacttatgggggtcgtacttcatcaccctcgaggct

SEQ ID NO: 45107 - DNA, 57 bp, synthetic construct
  source 1..57: mol_type = other DNA
cagggctacggatacataaatgtgtatccatcactggactttagcttccacgatctg

SEQ ID NO: 45108 - DNA, 87 bp, synthetic construct
  source 1..87: mol_type = other DNA
gcgtttggtagtagtggtggcattatcggcaacctggactttgtgttcatgaacggcctcgatgagggccagtctgactactctgtg

SEQ ID NO: 45109 - DNA, 42 bp, synthetic construct
  source 1..42: mol_type = other DNA
tggagcggcggcttcgaatccatcggactgacagttctggac

SEQ ID NO: 45110 - DNA, 54 bp, synthetic construct
  source 1..54: mol_type = other DNA
gccgagtccaagtacactggtggcaccgttggactactgttcgggagtacagac

SEQ ID NO: 45111 - DNA, 33 bp, synthetic construct
  source 1..33: mol_type = other DNA
agcttcaactaccgctttgagaacccactgaat

SEQ ID NO: 45112 - DNA, 54 bp, synthetic construct
  source 1..54: mol_type = other DNA
ctcggcggcatccccctgttcgactccgtgctgaagagccaggccaccacaaac

SEQ ID NO: 45113 - DNA, 246 bp, synthetic construct
  source 1..246: mol_type = other DNA
gcctctaagagcatcgctaaccagaactggaccttgaacccggtcgaactgatcttcttccgggccgcatttaccctggaggtgctcgagaagattatccccctgaatagtacaacgcaggggcatatcctgagcatgatattctcctccggctctcctaggacattcatcggcaactatgtgatgcactacgaagtctgtcttacgtctactattttcggacccgtcctcctggactttggttac

SEQ ID NO: 45114 - DNA, 33 bp, synthetic construct
  source 1..33: mol_type = other DNA
agctttaactaccgcttcgaggaccccttggat

SEQ ID NO: 45115 - DNA, 54 bp, synthetic construct
  source 1..54: mol_type = other DNA
ctgggcggcatccccctatttaactcaaccctcaaggccaatgctactaccaac

SEQ ID NO: 45116 - DNA, 240 bp, synthetic construct
  source 1..240: mol_type = other DNA
tctcagtccatcgctggacagcactggactctcaacccaatggaactgatcttctatcgcgccgctttcacactggaagttttcgaacggatcattcctctggccggcaccacccatggcaagatcctggccatgatcttctcgtctggatctcctaggaccttcattggggaatatgtcctgcactacaacgtctgtctaacatccaccctctttggccccgtgatgctcgatttcggt

SEQ ID NO: 45117 - DNA, 204 bp, synthetic construct
  source 1..204: mol_type = other DNA
cagctcagccccatcgacccggtcaaggcctacctgggccagcggatcgtatctcaagaacagctggccatcatcggcaattattggggcactaatctgagcctgggcgagcgcgtcctgggatggctccaaaccctagcaagcggctcaatgggctttagcctcatataccgagttcctgtcaccgaagtaatcattcaaaaa

SEQ ID NO: 45118 - DNA, 90 bp, synthetic construct
  source 1..90: mol_type = other DNA
gtgtacctgggctggttccccattgggctgagcgtgcctatcggacagctctccgacaccgtcacattctggcaatggctatataggcgt

SEQ ID NO: 45119 - DNA, 72 bp, synthetic construct
  source 1..72: mol_type = other DNA
gagcaggtctttgcataccctggtatcggacaagcaaccgtggccgctggcttgagatccgatgtccctctg

SEQ ID NO: 45120 - DNA, 42 bp, synthetic construct
  source 1..42: mol_type = other DNA
atcgggatcgagaatattattgacgccctgaagaccgctaac

SEQ ID NO: 45121 - DNA, 33 bp, synthetic construct
  source 1..33: mol_type = other DNA
gctttcggcgccagcctgaacgtcatcgtgatt

SEQ ID NO: 45122 - DNA, 33 bp, synthetic construct
  source 1..33: mol_type = other DNA
tactcaaaggcaggcatctccctctctctggcc

SEQ ID NO: 45123 - DNA, 30 bp, synthetic construct
  source 1..30: mol_type = other DNA
ttcaactaccggtttgaggaccctctgaat

SEQ ID NO: 45124 - DNA, 54 bp, synthetic construct
  source 1..54: mol_type = other DNA
ctgggcggtatccccctgttcaactccgtgctcaagagcaacgccaccacaaat

SEQ ID NO: 45125 - DNA, 240 bp, synthetic construct
  source 1..240: mol_type = other DNA
agccagagcatcgctacacaacactggaccctgaaccctattgaactgatattctaccgcgccgcctttacgcaagaagtcttcgaaaagattattcccctggccggcaccacacatggacacatcctttctatgatattctcatcgggttctccacggagcttcatcgggaattatgtcctccactacgacgtttgcttaacatccaccatgtttggccccgttatgctcgatttcggc

SEQ ID NO: 45126 - DNA, 30 bp, synthetic construct
  source 1..30: mol_type = other DNA
ttcaactaccggtttgagaaccctctgaat

SEQ ID NO: 45127 - DNA, 54 bp, synthetic construct
  source 1..54: mol_type = other DNA
ctgggtggcatccccctctttaattccgtcctcaaggccaacgctaccacaaat

SEQ ID NO: 45128 - DNA, 243 bp, synthetic construct
  source 1..243: mol_type = other DNA
gcttcgcaaagcattgcaacacagacctggacactcaaccctgtggaactggtcttttaccgggcggcttttacccaagaggtcttcgagaagatcattcccctcgccggaacgactcacggccacatcctgtctatgatcttctcttctggatcacctcgaagttttatcggcaattatgtgctgcactacgacgtttgcctcacctccaccctcttcggacccgttatgttggacttcggc

SEQ ID NO: 45129 - DNA, 96 bp, synthetic construct
  source 1..96: mol_type = other DNA
ggggctatctacgccacctacaatagcaccgtgaacgcagccaacacaaagttctaccacaacaacgctgactgcggaggcgccattttcgctttc

SEQ ID NO: 45130 - DNA, 171 bp, synthetic construct
  source 1..171: mol_type = other DNA
accgatctgaacattaatcactgtgattttttcgaaaatatcgcaaattactatggcggtagcatttatagtgatagcgtgattaacatcagctactcaaatttttactctaataaagccaagctcaagggcggcgctattcattcctctaactctccatacttttgcaat

SEQ ID NO: 45131 - DNA, 42 bp, synthetic construct
  source 1..42: mol_type = other DNA
attgggatagagaatatcatcgacgctctgaagaccgccaac

SEQ ID NO: 45132 - DNA, 30 bp, synthetic construct
  source 1..30: mol_type = other DNA
gccttcggcgctagcctgaacgtgatcgtg

SEQ ID NO: 45133 - DNA, 36 bp, synthetic construct
  source 1..36: mol_type = other DNA
ctgtacagcaaggctggtgcctccacctctttggtg

SEQ ID NO: 45134 - DNA, 207 bp, synthetic construct
  source 1..207: mol_type = other DNA
cagctgtcaccgatcgaccctgtccgagcttacctgggacagcggatcgtgtccgaggagcagctcgccatcatgggccagtactggggcacaaacctgagccttggcgagcgcgtgatgggctggcttcaaacattagcttcggggtctatggggttcagtctgatattcagggtgcctgttaccgaagtgatacaacagaaagtg

SEQ ID NO: 45135 - DNA, 90 bp, synthetic construct
  source 1..90: mol_type = other DNA
tccgtctacctgggatggttccccattggactgtctgtgcctatcggccaactgtcggataccgtgacattctggcaatggctctaccgc

SEQ ID NO: 45136 - DNA, 72 bp, synthetic construct
  source 1..72: mol_type = other DNA
gagcaggtcttcgcttaccctggcattggccaagctacagtagcagcgggcttaaggtctgacgttcctctg

SEQ ID NO: 45137 - DNA, 42 bp, synthetic construct
  source 1..42: mol_type = other DNA
gttggattccaaagaggctcaagcggaatcgggactattgct

SEQ ID NO: 45138 - DNA, 30 bp, synthetic construct
  source 1..30: mol_type = other DNA
ttcaactaccgatttcaagaccccctgaat

SEQ ID NO: 45139 - DNA, 54 bp, synthetic construct
  source 1..54: mol_type = other DNA
ctcggcggcatccccctgttcaactccgtgctgaagagcaacgccaccacaaat

SEQ ID NO: 45140 - DNA, 240 bp, synthetic construct
  source 1..240: mol_type = other DNA
agccagtctatcgccaaccagacctggaccctgaaccccatcgagttggttttctataggcttgcttttacactcgaggtctttgaaaaaattattccactggccggcactacacatggacacatcctgagcatgatctttagctccggctcccctcggtctttcatcggcaattacgtgcttcactatgacgtctgcttaactagcactctcttcgggccagtcatgctggattttggg

SEQ ID NO: 45141 - DNA, 36 bp, synthetic construct
  source 1..36: mol_type = other DNA
aagctgccttccgtgaccggtagctcttctcacccc

SEQ ID NO: 45142 - DNA, 39 bp, synthetic construct
  source 1..39: mol_type = other DNA
tgctatcatagtagtggatggggcgaagctttcgctgac

SEQ ID NO: 45143 - DNA, 132 bp, synthetic construct
  source 1..132: mol_type = other DNA
ggggatagtcagggcatggacttcggaggctccgacgacgccggatcaggcgacatcgccgataacaatggcgggtcatacgaaccatggacgtctggaatctggggagattacgagctgccgggcgaaacc

SEQ ID NO: 45144 - DNA, 102 bp, synthetic construct
  source 1..102: mol_type = other DNA
ccttctgtctttcaacaactcgtaatgccagccctgcaaggcatgaacgaaggagttaataatggaaccgtacaattgagtacagtacccctgtttaccaac

SEQ ID NO: 45145 - DNA, 30 bp, synthetic construct
  source 1..30: mol_type = other DNA
acaggcagcaccctgcccatcgtgtattac

SEQ ID NO: 45146 - DNA, 33 bp, synthetic construct
  source 1..33: mol_type = other DNA
atcccattgggcaccaccatcctgggtctcatt

SEQ ID NO: 45147 - DNA, 33 bp, synthetic construct
  source 1..33: mol_type = other DNA
tttaattaccgattcgagaaccccctgaacaca

SEQ ID NO: 45148 - DNA, 54 bp, synthetic construct
  source 1..54: mol_type = other DNA
ctcggcggcatccccctatttgattcggtactgaaggctaacgccacaaccaat

SEQ ID NO: 45149 - DNA, 243 bp, synthetic construct
  source 1..243: mol_type = other DNA
gcgagccagtcaatcagcaaccaacattggacactgaatccccttgaactcatcttctatagggcagcgttcacgctggaggtctttcaaaagattatccccctcgcggggacaacccacgggcacatcctgtctatgattttctcatccgggtccccacggacattcatcggcgaatatgtgttgcattacaatgtttgcctgacgagcaccatttttggcccggttatgctcgattttgga

SEQ ID NO: 45150 - DNA, 30 bp, synthetic construct
  source 1..30: mol_type = other DNA
ttcaactaccggtttaaggaccctctgaat

SEQ ID NO: 45151 - DNA, 54 bp, synthetic construct
  source 1..54: mol_type = other DNA
ctcggaggcatcccccttttcaatagcgttctgaaggccaacgctacaaccaat

SEQ ID NO: 45152 - DNA, 240 bp, synthetic construct
  source 1..240: mol_type = other DNA
tcccagtccatcgcaacacagacatggactctgaaccctgttgagctgatcttctatagggctgccttcacgcaagaggtcttcgagaagattattcccctggccgggaccacccacggccatatcctttcaatgatcttctctagcggctctccacggagtttcatcgggaattacgtgctccattacgacgtctgcttaacatctactatgtttggccccgtgatgcttgacttcggc

SEQ ID NO: 45153 - DNA, 42 bp, synthetic construct
  source 1..42: mol_type = other DNA
attgggatcgagaatgtgctcgacgctctgaagaccgctaac

SEQ ID NO: 45154 - DNA, 33 bp, synthetic construct; identical to SEQ ID NO: 45121
  source 1..33: mol_type = other DNA

SEQ ID NO: 45155 - DNA, 33 bp, synthetic construct
  source 1..33: mol_type = other DNA
tactccaaggccggcatctccctctctcttgcc

SEQ ID NO: 45156 - DNA, 108 bp, synthetic construct
  source 1..108: mol_type = other DNA
tgcattgtgaacttcggcggcatcgccgacgatatcagcaatctccggatatccgtgtatatcccctacgggattgacgacctggttctgactagggttggaggaagc

SEQ ID NO: 45157 - DNA, 69 bp, synthetic construct
  source 1..69: mol_type = other DNA
gccactaataacactccctcgactgattggatgagcgatttcacccggtttgagatggtttttctcctg

SEQ ID NO: 45158 - DNA, 207 bp, synthetic construct
  source 1..207: mol_type = other DNA
cagctgtccccaattgaccctgtcaaggcctacctaggacagcgaattgtcagccaggagcagcttgctatcatgggcgagtattggggcactaacctgagcctcggcgagcgcgtgtttggatggctgtctaccctggcgagcgggtcgatgggattctccctgatctaccgggtgcccgtgaccgaggtcaagatacagcaggtc

SEQ ID NO: 45159 - DNA, 87 bp, synthetic construct
  source 1..87: mol_type = other DNA
gtgtacctgggctggttccctatcggcctgagcgtccccattggacagctgtcggacactgtaacgttctggcaatggctctaccgc

SEQ ID NO: 45160 - DNA, 72 bp, synthetic construct
  source 1..72: mol_type = other DNA
gagcaagttttcgcgtatcccgggatcggtcaggctacagtagcagccggactccgctctgatgttcctctg

SEQ ID NO: 45161 - DNA, 42 bp, synthetic construct
  source 1..42: mol_type = other DNA
attggcatcgagaatgtgctggacgccctcaagaccgcaaac

SEQ ID NO: 45162 - DNA, 33 bp, synthetic construct
  source 1..33: mol_type = other DNA
gccttcggcgctagcctgaacgtgatcgtcatt

SEQ ID NO: 45163 - DNA, 33 bp, synthetic construct
  source 1..33: mol_type = other DNA
tactccaaggccggagtcagcctgagtcttgct

SEQ ID NO: 45164 - DNA, 162 bp, synthetic construct
  source 1..162: mol_type = other DNA
gtcatgggtggcattagcactgcggtggatacctatgctccaaactacagcggggatgagcagttccatcaagaagtatacgactactttcaaaagctcgataccatcgatggacaagactctatcgttgtcaacaccgccgatatcataattcaaaatgca

SEQ ID NO: 45165 - DNA, 42 bp, synthetic construct
  source 1..42: mol_type = other DNA
atcggaatcgagaatattatttctgccctgaagacagctaac

SEQ ID NO: 45166 - DNA, 30 bp, synthetic construct; identical to SEQ ID NO: 45132
  source 1..30: mol_type = other DNA

SEQ ID NO: 45167 - DNA, 33 bp, synthetic construct
  source 1..33: mol_type = other DNA
tactctaaagccggagttagcctttcactggcc

SEQ ID NO: 45168 - DNA, 42 bp, synthetic construct
  source 1..42: mol_type = other DNA
ataggcatcgataagctgattgacgccatcgaggacgctaac

SEQ ID NO: 45169 - DNA, 30 bp, synthetic construct
  source 1..30: mol_type = other DNA
gccttcggcgctaccctgaacgtgatcgtg

SEQ ID NO: 45170 - DNA, 33 bp, synthetic construct
  source 1..33: mol_type = other DNA
tacagccgggccggctgcccccagggcctggcc

SEQ ID NO: 45171 - DNA, 42 bp, synthetic construct
  source 1..42: mol_type = other DNA
gtaggaattgatgacgtgatcaatgccctgaagatagcaaac

SEQ ID NO: 45172 - DNA, 33 bp, synthetic construct
  source 1..33: mol_type = other DNA
tacgcagccgccggcatcaacgcctctatttca

SEQ ID NO: 45173 - DNA, 42 bp, synthetic construct
  source 1..42: mol_type = other DNA
gtcggcatcgatgacgtgattaatgctctgaagatcgcaaac

SEQ ID NO: 45174 - DNA, 30 bp, synthetic construct
  source 1..30: mol_type = other DNA
acagcagccggcattaccgctagcatctcc

SEQ ID NO: 45175 - DNA, 33 bp, synthetic construct
  source 1..33: mol_type = other DNA
caggtctatcttattagccagatcaagttgcct

SEQ ID NO: 45176 - DNA, 42 bp, synthetic construct
  source 1..42: mol_type = other DNA
gtgggcatcgacaaggtcattgcggcgctcaaaatcgcaaag

SEQ ID NO: 45177 - DNA, 30 bp, synthetic construct
  source 1..30: mol_type = other DNA
gctttcggcgcaagcgtctctccggtagta

SEQ ID NO: 45178 - DNA, 30 bp, synthetic construct
  source 1..30: mol_type = other DNA
tacagcgccgccggaattaccgcttccatc

SEQ ID NO: 45179 - DNA, 42 bp, synthetic construct
  source 1..42: mol_type = other DNA
aagatgcaggtctacctgattagtcagatacagcttcctctg

SEQ ID NO: 45180 - DNA, 39 bp, synthetic construct
  source 1..39: mol_type = other DNA
taccggaagcgcagaaggaagagaaacaggcgctatcgg

SEQ ID NO: 45181 - DNA, 81 bp, synthetic construct
  source 1..81: mol_type = other DNA
gatgactcctttttcatcgattcatttagcctcctgtctggggaggccgtatacatggatcctaaccggaagaactgttct

SEQ ID NO: 45182 - DNA, 243 bp, synthetic construct
  source 1..243: mol_type = other DNA
acagacgtcattgacggccacatgatcaacttcgaccccgagtatatgtactatcgccacttcataaaccttgccgacaaaaagatcgatatcgtcctccttctttatagcgcaatcatgaaccgggtcgagcgcaacctctgcaacggagtggagtactccggcgagttcagaatcaacgaatatgttttgaccctgtctcggagtttcgatgatggcgttacattcgagaaggcttaccat

SEQ ID NO: 45183 - DNA, 48 bp, synthetic construct
  source 1..48: mol_type = other DNA
aacgacatcttctacaagctgaagaataacgactacaaatatgacgat

SEQ ID NO: 45184 - DNA, 39 bp, synthetic construct
  source 1..39: mol_type = other DNA
tatgagctgtaccccacactcaagaacatcaccgacgac

SEQ ID NO: 45185 - DNA, 42 bp, synthetic construct
  source 1..42: mol_type = other DNA
gtcggcatcgacaaggtcatcggcgccctcaagctggctaaa

SEQ ID NO: 45186 - DNA, 33 bp, synthetic construct
  source 1..33: mol_type = other DNA
ctggccttcggcgcttctgtgaacccagtcatc

SEQ ID NO: 45187 - DNA, 33 bp, synthetic construct
  source 1..33: mol_type = other DNA
tacagcgctgctggcatcaccgcatctgtatcc

SEQ ID NO: 45188 - DNA, 33 bp, synthetic construct
  source 1..33: mol_type = other DNA
cagaccgctgttcaaagttccaagatccttgac

SEQ ID NO: 45189 - DNA, 36 bp, synthetic construct
  source 1..36: mol_type = other DNA
acaccattaactttctctaacgtgtttcctctgaat

SEQ ID NO: 45190 - DNA, 84 bp, synthetic construct
  source 1..84: mol_type = other DNA
tggttcggctctaactccgcctacggcttcctgagcactcccaaccgctttgatggagctacccacaatgttgttagaggaaca

SEQ ID NO: 45191 - DNA, 45 bp, synthetic construct
  source 1..45: mol_type = other DNA
gtgcacaccttcatccccaacgtcgaggacaagtaccacaactat

SEQ ID NO: 45192 - DNA, 57 bp, synthetic construct
  source 1..57: mol_type = other DNA
aatgtatcccaacccggcaattccgtcaacggcctggcattcaacaagttgggagcc

SEQ ID NO: 45193 - DNA, 42 bp, synthetic construct
  source 1..42: mol_type = other DNA
gtaggcatcgacgaggtgctgaacgccctgaaggatgctaac

SEQ ID NO: 45194 - DNA, 30 bp, synthetic construct
  source 1..30: mol_type = other DNA
gcctttggtgctagcgtgtctcctgtcgtc

SEQ ID NO: 45195 - DNA, 30 bp, synthetic construct
  source 1..30: mol_type = other DNA
tactccgccgccggaatcagcgcttctatc

SEQ ID NO: 45196 - DNA, 42 bp, synthetic construct
  source 1..42: mol_type = other DNA
gttggcattgacaaaatcatcgagaccctgaagaacgccaat

SEQ ID NO: 45197 - DNA, 30 bp, synthetic construct
  source 1..30: mol_type = other DNA
gccttcggcgctacccttaacgtggttgtc

SEQ ID NO: 45198 - DNA, 36 bp, synthetic construct
  source 1..36: mol_type = other DNA
ttctacagcaaggctggcgtgtccatgtctttggcc

SEQ ID NO: 45199 - DNA, 42 bp, synthetic construct
  source 1..42: mol_type = other DNA
gtcggcatcgacaaagtgatcgaggcccttaaagtagcaaag

SEQ ID NO: 45200 - DNA, 30 bp, synthetic construct
  source 1..30: mol_type = other DNA
gccttcggagctagcgtcaaccctgtggtc

SEQ ID NO: 45201 - DNA, 30 bp, synthetic construct
  source 1..30: mol_type = other DNA
agcgtcgctggagtgaccgcctctgttagc

SEQ ID NO: 45202 - DNA, 33 bp, synthetic construct
  source 1..33: mol_type = other DNA
agtttcaactaccggttcgaggacccactgaag

SEQ ID NO: 45203 - DNA, 54 bp, synthetic construct
  source 1..54: mol_type = other DNA
ctcggaggcatccccctttttgactcgaccctgaaagtcaatgccactacaaat

SEQ ID NO: 45204 - DNA, 240 bp, synthetic construct
  source 1..240: mol_type = other DNA
agccagtccatcgcaactcagcactggactctcaaccccctggaactgattttctatcgggcagccttcaccctcgaggtgcttgagaaaatcatcccactggccggcacaacaaatggcaaaatcctctccatgattttctctagcggcagccctaggacatttatcggcaactacgtcctgcactacgatgtctgtctaacctctaccctgttcggccccgtgatgcttgactttgga

SEQ ID NO: 45205 - DNA, 42 bp, synthetic construct
  source 1..42: mol_type = other DNA
gtcgggattaatgatgttatcaacgctctcaaggtggcagac

SEQ ID NO: 45206 - DNA, 30 bp, synthetic construct
  source 1..30: mol_type = other DNA
tacacagctgccggcattaccgcaagcatc

SEQ ID NO: 45207 - DNA, 42 bp, synthetic construct
  source 1..42: mol_type = other DNA
gtgggcatcgaccaggttatctcggccctgaaggtcgcaaaa

SEQ ID NO: 45208 - DNA, 33 bp, synthetic construct
  source 1..33: mol_type = other DNA
ctggcctttggcgctagcgtcaaccctgtggtg

SEQ ID NO: 45209 - DNA, 30 bp, synthetic construct
  source 1..30: mol_type = other DNA
tacagtgccgctggaatcaccgctagcatc

SEQ ID NO: 45210 - DNA, 84 bp, synthetic construct
  source 1..84: mol_type = other DNA
ctgcactccacctatcccacattcatggacgctttatatggtcttaagaaccctcaaaacgtgatcaacagcgccctgtctaag

SEQ ID NO: 45211 - DNA, 45 bp, synthetic construct
  source 1..45: mol_type = other DNA
gtgaagaaactgaacattaccgggacagtatcgatagtgctcatg

SEQ ID NO: 45212 - DNA, 30 bp, synthetic construct
  source 1..30: mol_type = other DNA
agcggccaagtatttgagtctctgtccttc

SEQ ID NO: 45213 - DNA, 120 bp, synthetic construct
  source 1..120: mol_type = other DNA
accgctctgcccctgcacccatacgcactggccatggcctccgggattggcagcgcctccatgaatgctgccgctatcacacctctcctcaacatatttccatccatgtctcacgagatc

SEQ ID NO: 45214 - DNA, 51 bp, synthetic construct
  source 1..51: mol_type = other DNA
cgccggaccatggccaacaacacttattggaacgcttatatcgtgtctcac

SEQ ID NO: 45215 - DNA, 45 bp, synthetic construct
  source 1..45: mol_type = other DNA
cctatcaagatccccctgtccgagagcgtcgaggtgtctatcatg

SEQ ID NO: 45216 - DNA, 30 bp, synthetic construct
  source 1..30: mol_type = other DNA
ggccagagcattcacctgatcttcgagatg

SEQ ID NO: 45217 - DNA, 123 bp, synthetic construct
  source 1..123: mol_type = other DNA
tccctgctgccactgcatccttatgcatttgcaatggcatctggagtcggaagcgcatcgatgaatgctgctgcccttggccccacgctggcggctttcccggcgctcgagaccaacatcgag

SEQ ID NO: 45218 - DNA, 33 bp, synthetic construct
  source 1..33: mol_type = other DNA
gccctggacgtgaatccgcttttttctgctaac

SEQ ID NO: 45219 - DNA, 90 bp, synthetic construct
  source 1..90: mol_type = other DNA
cggcagggcctcggctccaactggcagatcctcgatctgttcaagtactttatcaccggattccttgaccccacactgatttctgtgcag

SEQ ID NO: 45220 - DNA, 48 bp, synthetic construct
  source 1..48: mol_type = other DNA
atcacaaaccagcagagcctgttctttatccggctcggagacattacc

SEQ ID NO: 45221 - DNA, 30 bp, synthetic construct
  source 1..30: mol_type = other DNA
gtgcacatcattaacctgaccggtttcgcc

SEQ ID NO: 45222 - DNA, 33 bp, synthetic construct
  source 1..33: mol_type = other DNA
atccggtttagctctgcctgcccatccaagttc

SEQ ID NO: 45223 - DNA, 69 bp, synthetic construct
  source 1..69: mol_type = other DNA
atgaagatccccgtcgaaggcaacatcctgctgttcctctacaatgactgcattgagggctctatcatg

SEQ ID NO: 45224 - DNA, 54 bp, synthetic construct
  source 1..54: mol_type = other DNA
tctgtctacgacactacacaccagtctacttacctgttcaaaagttactcgtac

SEQ ID NO: 45225 - DNA, 33 bp, synthetic construct
  source 1..33: mol_type = other DNA
accctcgacgtgaaccccctgttctccgctaat

SEQ ID NO: 45226 - DNA, 90 bp, synthetic construct
  source 1..90: mol_type = other DNA
cggcaggccctggggcctaactggcagatcctggacctcttcaagtacatcttcaccggcttcctcgatcccacactgattagtgttcag

SEQ ID NO: 45227 - DNA, 48 bp, synthetic construct
  source 1..48: mol_type = other DNA
attacaaaccagcagtttctgttcttcatccggctgggagatatcacc

SEQ ID NO: 45228 - DNA, 33 bp, synthetic construct
  source 1..33: mol_type = other DNA
aaagtccacattatcaatttaacgggcttcacc

SEQ ID NO: 45229 - DNA, 42 bp, synthetic construct
  source 1..42: mol_type = other DNA
aacgtgattatgagcatatccacaaataacatctcccaaacc

SEQ ID NO: 45230 - DNA, 33 bp, synthetic construct
  source 1..33: mol_type = other DNA
tacatcacacactatacactgaactcctccctc

SEQ ID NO: 45231 - DNA, 84 bp, synthetic construct
  source 1..84: mol_type = other DNA
aagtacagtctgacctacattatctctaacatcttcaatctcctgattatcagcatcctggaccccacaatcctgaccgttgag

SEQ ID NO: 45232 - DNA, 51 bp, synthetic construct
  source 1..51: mol_type = other DNA
aatttcatcggcgagcttgaactgacctttatgcccttgggcgatctgacc

SEQ ID NO: 45233 - DNA, 33 bp, synthetic construct
  source 1..33: mol_type = other DNA
aagatcggcatatacgacatttccatctcacca

SEQ ID NO: 45234 - DNA, 45 bp, synthetic construct
  source 1..45: mol_type = other DNA
ctgaacagcacccacaaccaggtgacaaatatcttcgcctttcgc

SEQ ID NO: 45235 - DNA, 69 bp, synthetic construct
  source 1..69: mol_type = other DNA
ggctggatccctctgatcgacgacttcgctgccaacaccagccctattctgtcttcctggctggatgtg

SEQ ID NO: 45236 - DNA, 30 bp, synthetic construct
  source 1..30: mol_type = other DNA
ctgcagccctttaagttcaccggaacacag

SEQ ID NO: 45237 - DNA, 42 bp, synthetic construct
  source 1..42: mol_type = other DNA
gtggggattgacaacctgatcgagaccctcaaggatgcagac

SEQ ID NO: 45238 - DNA, 33 bp, synthetic construct
  source 1..33: mol_type = other DNA
gccttcggcgctaccctgaacgtcatcgtgatt

SEQ ID NO: 45239 - DNA, 33 bp, synthetic construct
  source 1..33: mol_type = other DNA
tactccaaggccggggttgcatattctctggca

SEQ ID NO: 45240 - DNA, 42 bp, synthetic construct
  source 1..42: mol_type = other DNA
gcccagccccctgctccgacctgggatggagtactttcactg

SEQ ID NO: 45241 - DNA, 42 bp, synthetic construct
  source 1..42: mol_type = other DNA
agcctgcacccccaatctgtacccgcccaaaccatgttcgga

SEQ ID NO: 45242 - DNA, 42 bp, synthetic construct
  source 1..42: mol_type = other DNA
actatggcaagtggcggcacatggcaagacttgttcgatttg

SEQ ID NO: 45243 - DNA, 45 bp, synthetic construct
  source 1..45: mol_type = other DNA
atgcacaagacccacgaccagatgcagatcttcgcctttagatgg

SEQ ID NO: 45244 - DNA, 75 bp, synthetic construct
  source 1..75: mol_type = other DNA
gagctgcacctgatccccctggtggacaacttcattgccaaccagagcaagatgctccactcatgggtggacgtg

SEQ ID NO: 45245 - DNA, 33 bp, synthetic construct
  source 1..33: mol_type = other DNA
agctttaattaccggtttgagaaccctctttct

SEQ ID NO: 45246 - DNA, 54 bp, synthetic construct
  source 1..54: mol_type = other DNA
ctcggcggcatccccctattcaattctactctgaaggctaacgccaccactaat

SEQ ID NO: 45247 - DNA, 240 bp, synthetic construct
  source 1..240: mol_type = other DNA
agccagagtatcgcaactcaacactggacactgaacccactggagctgatattctaccgggcaggattcactctggaagtattcgagaagatcattcccctggctgggacaacaaatgggcacatcctgtccatgatttttagctctggctctccccggaccttcattggcgaatatgtcctcaagtacaccgtttgcctcacttccaccctgttcggccctgtgatgctcgactttggg

SEQ ID NO: 45248 - DNA, 33 bp, synthetic construct
  source 1..33: mol_type = other DNA
ctgctgtccgaggacatcctgttctcgctgaac

SEQ ID NO: 45249 - DNA, 87 bp, synthetic construct
  source 1..87: mol_type = other DNA
ggcgagcttggtgacagttggaatctgtttgacctgattgagtacatcttcatggggttcctgaaccctactaacatctccatccag

SEQ ID NO: 45250 - DNA, 51 bp, synthetic construct
  source 1..51: mol_type = other DNA
tacatgctggccgatcaatccctgtttttcatccaattgggcgacattacc

SEQ ID NO: 45251 - DNA, 30 bp, synthetic construct
  source 1..30: mol_type = other DNA
tacgggattatcaacttcaacggctttgcc

SEQ ID NO: 45252 - DNA, 60 bp, synthetic construct
  source 1..60: mol_type = other DNA
aatcggaccggcgcccacaagatctacctgatgcaaaattttttcgtgacatatgaagcc

SEQ ID NO: 45253 - DNA, 57 bp, synthetic construct
  source 1..57: mol_type = other DNA
cagggctacgggattataaacatatacccgtctatagacttctccttctccgatctg

SEQ ID NO: 45254 - DNA, 147 bp, synthetic construct
  source 1..147: mol_type = other DNA
tgcggcagcgaggccgtttatgagacgggcggacactacaaatgcgccgaatgcggcaacagtatctacaaccccgacgacctggaactggcctacgacgatggatacatcgatctgctctcccctatcttcttgtcaattagcttc

SEQ ID NO: 45255 - DNA, 63 bp, synthetic construct
  source 1..63: mol_type = other DNA
tactattttgtgcaagcttatcgaacttcagtttctatgggcctggacatgatcgattggagc

SEQ ID NO: 45256 - DNA, 30 bp, synthetic construct
  source 1..30: mol_type = other DNA
gtcaacgacaatgttggggctgtggttaat

SEQ ID NO: 45257 - DNA, 33 bp, synthetic construct
  source 1..33: mol_type = other DNA
acccaccatagcgtgctgaacgagattgacatc

SEQ ID NO: 45258 - DNA, 33 bp, synthetic construct
  source 1..33: mol_type = other DNA
aataagagtacaaacggcgagagcatctggggg

SEQ ID NO: 45259 - DNA, 69 bp, synthetic construct
  source 1..69: mol_type = other DNA
accctcgacgtgaacggcgctcctgccaatgcccggggccccctggtggtcatcagtgcttttttcgct

SEQ ID NO: 45260 - DNA, 42 bp, synthetic construct
  source 1..42: mol_type = other DNA
ctgctcaacatgagcaaacccaagatcctcgtttgtgataac

SEQ ID NO: 45261 - DNA, 69 bp, synthetic construct
  source 1..69: mol_type = other DNA
ctgaagaccgggtccatgaacatcgctgacgtgatcgcatatcaatcagctaatggcccacttatcatg

SEQ ID NO: 45262 - DNA, 93 bp, synthetic construct
  source 1..93: mol_type = other DNA
ctgggcagtgtcaggatcgcactcgcggacgtctggggctcgcttttttcgggcgacgattggggcaacagagtcattgtccgagacatcaga

SEQ ID NO: 45263 - DNA, 72 bp, synthetic construct
  source 1..72: mol_type = other DNA
tttttctccgacgaggacacagtgacaagcatcgtgttctggatgttgggcagttttgatggatgtggatgg

SEQ ID NO: 45264 - DNA, 45 bp, synthetic construct
  source 1..45: mol_type = other DNA
ctgatttacctgatccttatgatcaccgagctctactccaactcc

SEQ ID NO: 45265 - DNA, 54 bp, synthetic construct
  source 1..54: mol_type = other DNA
aagctgaacgccacctaccccacattcatcgacgctatgcttgggctcagacac

SEQ ID NO: 45266 - DNA, 51 bp, synthetic construct
  source 1..51: mol_type = other DNA
gggatatatatcataacgtcggacatgatcgtgaactacacccttccaagc

SEQ ID NO: 45267 - DNA, 69 bp, synthetic construct
  source 1..69: mol_type = other DNA
tttgtaacggtcttctacgacgttgtcaacgttagcgaggccggcaccctgttcttctcacacatgtgg

SEQ ID NO: 45268 - DNA, 30 bp, synthetic construct
  source 1..30: mol_type = other DNA
ttcggcattcaggacgtgaacatccagtac

SEQ ID NO: 45269 - DNA, 36 bp, synthetic construct
  source 1..36: mol_type = other DNA
ctgcggggctatgacttctttctgtggtacgagtgg

SEQ ID NO: 45270 - DNA, 30 bp, synthetic construct
  source 1..30: mol_type = other DNA
ccttttgtcgtgtacctacctttttccgag

SEQ ID NO: 45271 - DNA, 30 bp, synthetic construct
  source 1..30: mol_type = other DNA
tgcttttggcaattctcaaccggacgttat

SEQ ID NO: 45272 - DNA, 81 bp, synthetic construct
  source 1..81: mol_type = other DNA
atccaaactattgccctcaatgacgtttctctcacctatattgtgaacggcttattggccggcaatcttgtgcaaatctac

SEQ ID NO: 45273 - DNA, 48 bp, synthetic construct
  source 1..48: mol_type = other DNA
ctgagcatggccgctggcgagattatcaagacctacaaggggtttttc

SEQ ID NO: 45274 - DNA, 45 bp, synthetic construct
  source 1..45: mol_type = other DNA
ggcatctatataataagttcggacgccattatgaactacaccatc

SEQ ID NO: 45275 - DNA, 69 bp, synthetic construct
  source 1..69: mol_type = other DNA
ttcatcaccataggcagcagccaaattaatgtcagcgaggccgggaatctgttcttctcacacatgtgg

SEQ ID NO: 45276 - DNA, 30 bp, synthetic construct
  source 1..30: mol_type = other DNA
atgcacggcatccagaacgtgaacattcag

SEQ ID NO: 45277 - DNA, 39 bp, synthetic construct
  source 1..39: mol_type = other DNA
tttaccaagggctacgagttcttcctatgggagtggtat

SEQ ID NO: 45278 - DNA, 30 bp, synthetic construct
  source 1..30: mol_type = other DNA
cccatcgtcgtggagctgcctttcaccgaa

SEQ ID NO: 45279 - DNA, 33 bp, synthetic construct
  source 1..33: mol_type = other DNA
cggtggtccgccgaattgcagagctggatggag

SEQ ID NO: 45280 - DNA, 36 bp, synthetic construct
  source 1..36: mol_type = other DNA
taccatcttcaatatatcaagggcctcgattctcag

SEQ ID NO: 45281 - DNA, 54 bp, synthetic construct
  source 1..54: mol_type = other DNA
gtcatgggcaacgtgcctattatcgagaagtactaccccctgctcatctcatcc

SEQ ID NO: 45282 - DNA, 45 bp, synthetic construct
  source 1..45: mol_type = other DNA
ggcatttacatcataagctcaaacacaatcctgaattacaccatt

SEQ ID NO: 45283 - DNA, 63 bp, synthetic construct
  source 1..63: mol_type = other DNA
accgtgaacagccaccaaatttcgctgaatgagtccggcacacttttcttctcccatatgtgg

SEQ ID NO: 45284 - DNA, 30 bp, synthetic construct
  source 1..30: mol_type = other DNA
atgaatggcatcaagaacgtgaacatccag

SEQ ID NO: 45285 - DNA, 36 bp, synthetic construct
  source 1..36: mol_type = other DNA
atcaagggctatgacttctacctggaatactattgg

SEQ ID NO: 45286 - DNA, 30 bp, synthetic construct
  source 1..30: mol_type = other DNA
cctctgatcgtggacttgccgttttctgag

SEQ ID NO: 45287 - DNA, 174 bp, synthetic construct
  source 1..174: mol_type = other DNA
gtggacataatcagctcatttctcatcaatactggtggaatctcaagctttaatctgaactctctgaataacataatcttctcccatttgccaagccagtacaacggattaagtcaaacaatctctaatatcatactgaacagctcgaacactctgcttaagggcgtcctcaac

SEQ ID NO: 45288 - DNA, 69 bp, synthetic construct
  source 1..69: mol_type = other DNA
ttacatagctcgtaccctacattcatggacgccctatacggccttaccaatccgcaaaacgtaatcaac

SEQ ID NO: 45289 - DNA, 45 bp, synthetic construct
  source 1..45: mol_type = other DNA
atcttcataataagctcagatgccatcctgaacttcacctttacc

SEQ ID NO: 45290 - DNA, 63 bp, synthetic construct
  source 1..63: mol_type = other DNA
atcaccgtcttctacgacgtagttaatcctggcgaggccgggaatttgttttactcacacatg

SEQ ID NO: 45291 - DNA, 30 bp, synthetic construct
  source 1..30: mol_type = other DNA
atgaacggcatccagaacgtgaacattcag

SEQ ID NO: 45292 - DNA, 36 bp, synthetic construct
  source 1..36: mol_type = other DNA
ctgaaggggtacaacttctttctctggtacgaggag

SEQ ID NO: 45293 - DNA, 48 bp, synthetic construct
  source 1..48: mol_type = other DNA
aagctgaacgccacctaccccacattcattgacgctatcctcggaatc

SEQ ID NO: 45294 - DNA, 45 bp, synthetic construct
  source 1..45: mol_type = other DNA
ggcatttatataatcagctccgacgccatcctgaactacacactg

SEQ ID NO: 45295 - DNA, 66 bp, synthetic construct
  source 1..66: mol_type = other DNA
atcaccgtctctagccccgctgtgaaccctattgaggccggcacactgttcttctctcacatgtgg

SEQ ID NO: 45296 - DNA, 36 bp, synthetic construct
  source 1..36: mol_type = other DNA
atccggggccacgactttttcctctattacgaatgg

SEQ ID NO: 45297 - DNA, 48 bp, synthetic construct
  source 1..48: mol_type = other DNA
ggcatttacatcatttcatctgacgccattctgaactataccatctac

SEQ ID NO: 45298 - DNA, 69 bp, synthetic construct
  source 1..69: mol_type = other DNA
tttgtgacggtctcgactccccggatcaactacgctgaggccggcacccttttcttctcacacatgtgg

SEQ ID NO: 45299 - DNA, 33 bp, synthetic construct
  source 1..33: mol_type = other DNA
gagatgcacggcattaacgggatcgctctccag

SEQ ID NO: 45300 - DNA, 39 bp, synthetic construct
  source 1..39: mol_type = other DNA
tacaccctgcactacgacttcgccctctggtgggagtac

SEQ ID NO: 45301 - DNA, 114 bp, synthetic construct
  source 1..114: mol_type = other DNA
accgtcggatcaagcgggatttccatgggcgaagtatacagggacatatggtaccacatctttgaccctgataaatgcgatgaaatgacagactgggcagtgttcaccattaga

SEQ ID NO: 45302 - DNA, 30 bp, synthetic construct
  source 1..30: mol_type = other DNA
gggtttaccttcgctggaatcggagggtcc

SEQ ID NO: 45303 - DNA, 78 bp, synthetic construct
  source 1..78: mol_type = other DNA
aagctgagcatctccgagcaatcgttatctgccgtgtaccagtggtccattggtgacctgtccggggctacatggacc

SEQ ID NO: 45304 - DNA, 36 bp, synthetic construct
  source 1..36: mol_type = other DNA
gtgagcggcctgaacgctgacgcccttacggcaatt

SEQ ID NO: 45305 - DNA, 57 bp, synthetic construct
  source 1..57: mol_type = other DNA
gacaccctcatcgtctgggtcggcggggagagtgtcctccccctatgtagagcttac

SEQ ID NO: 45306 - DNA, 33 bp, synthetic construct
  source 1..33: mol_type = other DNA
ttcaccgccgggattggcgagatcgctagctac

SEQ ID NO: 45307 - DNA, 63 bp, synthetic construct
  source 1..63: mol_type = other DNA
caccagttctgcggaattttctccctgacactatcggacacaaacgtgattgatagagctgcc

SEQ ID NO: 45308 - DNA, 30 bp, synthetic construct
  source 1..30: mol_type = other DNA
ttcagctccggcaacagcatgaactacatc

SEQ ID NO: 45309 - DNA, 30 bp, synthetic construct
  source 1..30: mol_type = other DNA
gagggcaacctgctcttcaagaacctgaat

SEQ ID NO: 45310 - DNA, 51 bp, synthetic construct
  source 1..51: mol_type = other DNA
ctcggtaccacttaccctacctttatggatgccgtattcgccctgaaaaac

SEQ ID NO: 45311 - DNA, 48 bp, synthetic construct
  source 1..48: mol_type = other DNA
ggcatctatattatttcgtctgacgccatcctgaactacaccatatat

SEQ ID NO: 45312 - DNA, 69 bp, synthetic construct
  source 1..69: mol_type = other DNA
tatatcagcttcggatatgagcaagtaaatttctctgaggccggcaacctttttttctcgcacatgtgg

SEQ ID NO: 45313 - DNA, 30 bp, synthetic construct
  source 1..30: mol_type = other DNA
atgcacggcatcaagaatgtgaacatccag

SEQ ID NO: 45314 - DNA, 36 bp, synthetic construct
  source 1..36: mol_type = other DNA
atcaagggctatgattttttcctggaatgggagtac

SEQ ID NO: 45315 - DNA, 30 bp, synthetic construct
  source 1..30: mol_type = other DNA
cccgtcatcgtggacctgcctttcaccgag

SEQ ID NO: 45316 - DNA, 42 bp, synthetic construct
  source 1..42: mol_type = other DNA
attttcataataagttccgacgctatcatgaactacaccatt

SEQ ID NO: 45317 - DNA, 66 bp, synthetic construct
  source 1..66: mol_type = other DNA
gtgaccgtgaagagcgggcaggtcaacttttctgaagccggcaacctgttcttctcccacatgtgg

SEQ ID NO: 45318 - DNA, 30 bp, synthetic construct
  source 1..30: mol_type = other DNA
atgcagggcatcgagaatgtgaacatccag

SEQ ID NO: 45319 - DNA, 39 bp, synthetic construct
  source 1..39: mol_type = other DNA
gtgcggggctacaactttttcctgtggtgggaggagtac

SEQ ID NO: 45320 - DNA, 33 bp, synthetic construct
  source 1..33: mol_type = other DNA
agcttcaactaccgctttgaggaccctctggat

SEQ ID NO: 45321 - DNA, 54 bp, synthetic construct
  source 1..54: mol_type = other DNA
ctgggcggcatccccttatttgattccgctctcaaggcatccgccacaaccaac

SEQ ID NO: 45322 - DNA, 240 bp, synthetic construct
  source 1..240: mol_type = other DNA
tctcagtccatcgctaaccagcactggacactgaaccccctggaactgatcttctaccgggccgcctttaccctcgaggttttcgaacgcatcctgccactggctggtacaaccagcggcaagattctcgccatgattttctcttccggatcaccaaggacattcatcggtaactacgtgctcactgacaacgtctgcctgacatccaccctgtttgggcctgtgctcctggatttcggg

SEQ ID NO: 45323 - DNA, 48 bp, synthetic construct
  source 1..48: mol_type = other DNA
ggcatctacattatttcatccgacgccattctgaactataccctgtac

SEQ ID NO: 45324 - DNA, 66 bp, synthetic construct
  source 1..66: mol_type = other DNA
gtgaccctgaatagcggccaggtcaattttaccgaggccgggaacctgttcttctcccatatgtgg

SEQ ID NO: 45325 - DNA, 36 bp, synthetic construct
  source 1..36: mol_type = other DNA
atgaatggcattaagaacgtgacgatacagcaatat

SEQ ID NO: 45326 - DNA, 36 bp, synthetic construct
  source 1..36: mol_type = other DNA
atcatgggctatgactttttcctctgggaatggtac

SEQ ID NO: 45327 - DNA, 30 bp, synthetic construct
  source 1..30: mol_type = other DNA
cccgtggtagtacaactccctgtatccgag

SEQ ID NO: 45328 - DNA, 48 bp, synthetic construct
  source 1..48: mol_type = other DNA
ggcatttatataatcagctccgacgccatcatgaactacaccctgttc

SEQ ID NO: 45329 - DNA, 69 bp, synthetic construct
  source 1..69: mol_type = other DNA
ttcgtgaccgtcggctctagtcacgtgaacttctccgaggccgggaacctgttctttagccatatgtgg

SEQ ID NO: 45330 - DNA, 39 bp, synthetic construct
  source 1..39: mol_type = other DNA
gacatgaacgggatcagcggcgtgacattgcaataccaa

SEQ ID NO: 45331 - DNA, 36 bp, synthetic construct
  source 1..36: mol_type = other DNA
atccggggctacaacttctttctggaatgggagtac

SEQ ID NO: 45332 - DNA, 33 bp, synthetic construct
  source 1..33: mol_type = other DNA
cctgtggtggtccagctgactccgacatttgag

SEQ ID NO: 45333 - DNA, 48 bp, synthetic construct
  source 1..48: mol_type = other DNA
ggcatttacatcatctcatcggatgccataatgaactacaccctgtat

SEQ ID NO: 45334 - DNA, 66 bp, synthetic construct
  source 1..66: mol_type = other DNA
gtgaccgtcaagtcgggtcaagtaaactttgctgaggccggcagcctgttcttctcccacatgtgg

SEQ ID NO: 45335 - DNA, 30 bp, synthetic construct
  source 1..30: mol_type = other DNA
atgcacggcattcataacgtgaccatccag

SEQ ID NO: 45336 - DNA, 36 bp, synthetic construct
  source 1..36: mol_type = other DNA
atccggggctatgactttttcctgtggtacgagtgg

SEQ ID NO: 45337 - DNA, 117 bp, synthetic construct
  source 1..117: mol_type = other DNA
accgtcgggtccagccacatttctatggccgacgtgtaccgcgacatatggtaccacgtgttcgaccccgaccgctgcgatgagatgacagattgggctgtgtttaccatcacgcgc

SEQ ID NO: 45338 - DNA, 30 bp, synthetic construct
  source 1..30: mol_type = other DNA
ggcatcacggttgccgggttcggaggtagc

SEQ ID NO: 45339 - DNA, 78 bp, synthetic construct
  source 1..78: mol_type = other DNA
aagctgagcataagcgagcagtctctctccgccgtgtaccagtggtcaattggcgatctgtccggctctacatggact

SEQ ID NO: 45340 - DNA, 48 bp, synthetic construct
  source 1..48: mol_type = other DNA
gggatctacataatcagttccgatatgatcatcgattacacttggggc

SEQ ID NO: 45341 - DNA, 66 bp, synthetic construct
  source 1..66: mol_type = other DNA
gtgttcaccaattcttccgagatcaaccccgtcgaagccggcaacttgtttttttctcacatgtgg

SEQ ID NO: 45342 - DNA, 36 bp, synthetic construct
  source 1..36: mol_type = other DNA
atccagggcatcaagaacgtgtatattacaatacag

SEQ ID NO: 45343 - DNA, 39 bp, synthetic construct
  source 1..39: mol_type = other DNA
ttcagcgtggcctataactttgctctgtggtactgggaa

SEQ ID NO: 45344 - DNA, 33 bp, synthetic construct
  source 1..33: mol_type = other DNA
cccttcgtggtcatgatccctgttgaagagacg

SEQ ID NO: 45345 - DNA, 48 bp, synthetic construct
  source 1..48: mol_type = other DNA
ggcatttacatcattagctccgacgccatcctgaactacaccatctat

SEQ ID NO: 45346 - DNA, 66 bp, synthetic construct
  source 1..66: mol_type = other DNA
gtcacactgagctccaatcaagtgaatttgaccgaggccggcaaccttttcttttcgcacatgtgg

SEQ ID NO: 45347 - DNA, 36 bp, synthetic construct
  source 1..36: mol_type = other DNA
atcaacggcatcgagaatgtgaccactcaaatctat

SEQ ID NO: 45348 - DNA, 36 bp, synthetic construct
  source 1..36: mol_type = other DNA
atcaaggggtacaacttctttctctatgaggagtgg

SEQ ID NO: 45349 - DNA, 30 bp, synthetic construct
  source 1..30: mol_type = other DNA
ccagtggtggtccagctgcctgttcctgag

SEQ ID NO: 45350 - DNA, 60 bp, synthetic construct
  source 1..60: mol_type = other DNA
tacctagactcgtttgtgacctctctgctgtggcccatcctcgaaggcagttcagaaggc

SEQ ID NO: 45351 - DNA, 168 bp, synthetic construct
  source 1..168: mol_type = other DNA
gaggcactgatccggaacaggttcggggtgtcatttttcactatcctaacggcaatggacccaaacacaagcactacttcccctatccactcccacgcttacaagtctatcctggggtatctggcctacaacttcgtgcctgctcatgtcaatactgcctcatccatt

SEQ ID NO: 45352 - DNA, 261 bp, synthetic construct
  source 1..261: mol_type = other DNA
gaggtcggagggtccgacatgtctgaccacaccctgactgtggtcaaccaaacagagccagtggatatgacacaatataatgttaccgacgttcaggtccacggggacctgaccatctatacattgaacacaactactcccgacaaacagctgataagggacgtgtttcaaacatttgaggggaaagccgacgtcaccttcatgagttggaatttttatacttacctggacaatccaacaatggaggccagactgcacgca

SEQ ID NO: 45353 - DNA, 48 bp, synthetic construct
  source 1..48: mol_type = other DNA
ggcatttacatcatctcgtcggattcgatcctgaactacaccctgttc

SEQ ID NO: 45354 - DNA, 66 bp, synthetic construct
  source 1..66: mol_type = other DNA
attaccgtgaacgcaacacaagtcaacatcggcgaggccgggaatctgttcttctcacacatgtgg

SEQ ID NO: 45355 - DNA, 33 bp, synthetic construct
  source 1..33: mol_type = other DNA
atgcacggcattaagaacatcaacatccagtat

SEQ ID NO: 45356 - DNA, 36 bp, synthetic construct
  source 1..36: mol_type = other DNA
atcattggctacgacttctttctgtggtacgagtac

SEQ ID NO: 45357 - DNA, 54 bp, synthetic construct
  source 1..54: mol_type = other DNA
ggaatctatattatcttctccgaggcgtttctggactatgttttctttccttcc

SEQ ID NO: 45358 - DNA, 63 bp, synthetic construct
  source 1..63: mol_type = other DNA
acgttcaactcgccggacatcgacaccgtggatatgggcaacctgttctttagccacatgtgg

SEQ ID NO: 45359 - DNA, 36 bp, synthetic construct
  source 1..36: mol_type = other DNA
gacatcaacggcatccagaacgttagcatacagtac

SEQ ID NO: 45360 - DNA, 39 bp, synthetic construct
  source 1..39: mol_type = other DNA
ttcagcaagggttatccctttgtgctggaatgggagtac

SEQ ID NO: 45361 - DNA, 48 bp, synthetic construct
  source 1..48: mol_type = other DNA
ggcgagatgcaagtttatctaatttcgtatatcaagatttcccttacc

SEQ ID NO: 45362 - DNA, 33 bp, synthetic construct
  source 1..33: mol_type = other DNA
aacgccctgagcttccctaaagtcgatgctccc

SEQ ID NO: 45363 - DNA, 45 bp, synthetic construct
  source 1..45: mol_type = other DNA
ggcatctatataatcagctccgacgccattctcaactacacactg

SEQ ID NO: 45364 - DNA, 66 bp, synthetic construct
  source 1..66: mol_type = other DNA
gtgaccgtgaagagcggccaggtcaacttcggcgaggccggaacactatttttttcgcacatgtgg

SEQ ID NO: 45365 - DNA, 39 bp, synthetic construct
  source 1..39: mol_type = other DNA
tttaccaagggctacaatttccaactgtggtgggagtac

SEQ ID NO: 45366 - DNA, 45 bp, synthetic construct
  source 1..45: mol_type = other DNA
ggcatctacatcattagctctgactccatgatgcacttcggtgtc

SEQ ID NO: 45367 - DNA, 63 bp, synthetic construct
  source 1..63: mol_type = other DNA
gtcgtgaccggaagctctcaagtcaattttaccgaaggcggcaacctgttcttttcccacatg

SEQ ID NO: 45368 - DNA, 30 bp, synthetic construct
  source 1..30: mol_type = other DNA
atgcagggcattaagaacgtatcgattcag

SEQ ID NO: 45369 - DNA, 36 bp, synthetic construct
  source 1..36: mol_type = other DNA
acccggggctacgacttctttctgtggtgggagtat

SEQ ID NO: 45370 - DNA, 30 bp, synthetic construct
  source 1..30: mol_type = other DNA
cccgtgatagtacaattgccattgactgag

SEQ ID NO: 45371 - DNA, 48 bp, synthetic construct
  source 1..48: mol_type = other DNA
ggcatctacattatatctagtgacgctatactgaaccacacccttgcc

SEQ ID NO: 45372 - DNA, 63 bp, synthetic construct
  source 1..63: mol_type = other DNA
gtgaccgttgggtctagcgccgtgaatacagtcgaggctggcaacctgtttttctcccatatg

SEQ ID NO: 45373 - DNA, 36 bp, synthetic construct
  source 1..36: mol_type = other DNA
gacatgcagggcatcaagaacgtgactatccaatat

SEQ ID NO: 45374 - DNA, 39 bp, synthetic construct
  source 1..39: mol_type = other DNA
ttcaccaaggactacaacttctttttatgggagtggtac

SEQ ID NO: 45375 - DNA, 48 bp, synthetic construct
  source 1..48: mol_type = other DNA
ggcatctacatcatctcatcggacgccatcatgaactataccacattc

SEQ ID NO: 45376 - DNA, 63 bp, synthetic construct
  source 1..63: mol_type = other DNA
atcagctttggtagttctcaagtaaacttctctgaatcaggcaatttatttttttctcacatg

SEQ ID NO: 45377 - DNA, 30 bp, synthetic construct
  source 1..30: mol_type = other DNA
atgaacggcattgagaacgttagtatacag

SEQ ID NO: 45378 - DNA, 39 bp, synthetic construct
  source 1..39: mol_type = other DNA
tttaccaagggctatgatttccaactttggtactgggaa

SEQ ID NO: 45379 - DNA, 33 bp, synthetic construct
  source 1..33: mol_type = other DNA
cctgtggttgttcaacttccgtttactgaaccg

SEQ ID NO: 45380 - DNA, 48 bp, synthetic construct
  source 1..48: mol_type = other DNA
cagatgcaagtatatttgatttcccggatcaatctttcactcacttcc

SEQ ID NO: 45381 - DNA, 48 bp, synthetic construct
  source 1..48: mol_type = other DNA
cctgccatccccgagtttctgaacaagttcgaatatcagataattgct

SEQ ID NO: 45382 - DNA, 36 bp, synthetic construct
  source 1..36: mol_type = other DNA
taccagggcatcatgacccctgaacttagcacacag

SEQ ID NO: 45383 - DNA, 30 bp, synthetic construct
  source 1..30: mol_type = other DNA
ctgggcatcagcaacatctccattccttac

SEQ ID NO: 45384 - DNA, 33 bp, synthetic construct
  source 1..33: mol_type = other DNA
tacctgagcaagactgccttattctctggtatc

SEQ ID NO: 45385 - DNA, 93 bp, synthetic construct
  source 1..93: mol_type = other DNA
atcgacaagaccatcgctgtcacaagcgcctacgagttcttagtgcaattcgtgaactgtattctcaacccctctatcatttccgaggagttc

SEQ ID NO: 45386 - DNA, 54 bp, synthetic construct
  source 1..54: mol_type = other DNA
accctgatgagcaatcagctcaatctgaactacattggcatcgagaaccttgcg

SEQ ID NO: 45387 - DNA, 39 bp, synthetic construct
  source 1..39: mol_type = other DNA
cccattcggatgatctacaacgtgaatatcagccctttc

SEQ ID NO: 45388 - DNA, 48 bp, synthetic construct
  source 1..48: mol_type = other DNA
ggcatctacatcattagctccgacgccatcacatattacaccgctttc

SEQ ID NO: 45389 - DNA, 63 bp, synthetic construct
  source 1..63: mol_type = other DNA
atcgccgtcggtagtgcccaggtcaacttttccgaggccgggaatctgttcttctctcacatg

SEQ ID NO: 45390 - DNA, 39 bp, synthetic construct
  source 1..39: mol_type = other DNA
tttaccaagggctatgattttcacctgtggtacgaggag

SEQ ID NO: 45391 - DNA, 48 bp, synthetic construct
  source 1..48: mol_type = other DNA
ggcatttacatcatcacaagttcggagatcgtgcactacaccatctat

SEQ ID NO: 45392 - DNA, 66 bp, synthetic construct
  source 1..66: mol_type = other DNA
tacatcaccgtttggtacgacgttgtaaatgtcaacgaggccggcaacctgttctttagccacatg

SEQ ID NO: 45393 - DNA, 30 bp, synthetic construct; identical to SEQ ID NO: 45276
  source 1..30: mol_type = other DNA

SEQ ID NO: 45394 - DNA, 39 bp, synthetic construct
  source 1..39: mol_type = other DNA
tttaccaagggctatgacttcttcctgtggtacgattgg

SEQ ID NO: 45395 - DNA, 33 bp, synthetic construct
  source 1..33: mol_type = other DNA
ctgcctaccatcgtgatgctgccctactccgaa

SEQ ID NO: 45396 - DNA, 66 bp, synthetic construct
  source 1..66: mol_type = other DNA
atgatcgagtacaacaagttcataaacgacattgtattttcgaatggtggcattatcaatagcaac

SEQ ID NO: 45397 - DNA, 81 bp, synthetic construct
  source 1..81: mol_type = other DNA
atgaacctgtcttccattcttttcgaaaatgtttcttcgatttctgatttactgatactcattaacgctaacaacctttcc

SEQ ID NO: 45398 - DNA, 111 bp, synthetic construct
  source 1..111: mol_type = other DNA
tccaaggacttcatcctgaaccactttgcgaacagccatatgctggactgttacggcgcctcttacatcgtcaataaccttaccatctttcaccaatttaccctctacccg

SEQ ID NO: 45399 - DNA, 30 bp, synthetic construct
  source 1..30: mol_type = other DNA
gacctgatttccctgatatcttcgcttgtc

SEQ ID NO: 45400 - DNA, 33 bp, synthetic construct
  source 1..33: mol_type = other DNA
atcaacacccatatcattatcatgcaccacaat

SEQ ID NO: 45401 - DNA, 33 bp, synthetic construct
  source 1..33: mol_type = other DNA
ggcctgttcactaattttctgaccttctactgg

SEQ ID NO: 45402 - DNA, 57 bp, synthetic construct
  source 1..57: mol_type = other DNA
gtgggccttttgaatagtatctacccacattatcacctgttctccgggatcgatctg

SEQ ID NO: 45403 - DNA, 39 bp, synthetic construct
  source 1..39: mol_type = other DNA
taccctgtttggggtctgatggggttcaagggaatcagc

SEQ ID NO: 45404 - DNA, 51 bp, synthetic construct
  source 1..51: mol_type = other DNA
cgcggactggaaggagtcatggaatttagcatcttcggcattgaaggagac

SEQ ID NO: 45405 - DNA, 60 bp, synthetic construct
  source 1..60: mol_type = other DNA
ggcgtccacgtgcaagtgttcgccgaggactttatcctggatctcggggtcgtgttttta

SEQ ID NO: 45406 - DNA, 45 bp, synthetic construct
  source 1..45: mol_type = other DNA
atgggggacgcctaccccttcgacgtccttggcgtggatttgtca

SEQ ID NO: 45407 - DNA, 51 bp, synthetic construct
  source 1..51: mol_type = other DNA
cacgtccaaattatatttgaggattttatttaccgaatcatcggcgtgctt

SEQ ID NO: 45408 - DNA, 81 bp, synthetic construct
  source 1..81: mol_type = other DNA
atgaacttgtcctccatcctgtttgagaacgtgtcttccataagcgacctgctcattcttatcaacgccaacgactttagc

SEQ ID NO: 45409 - DNA, 111 bp, synthetic construct
  source 1..111: mol_type = other DNA
tctaaagactttatcctgaatcattttgccaactcccatatgttggcatgctatggatcatcttacatcgtcaacaatctcacaatattcagccaattcacactctacccc

SEQ ID NO: 45410 - DNA, 30 bp, synthetic construct
  source 1..30: mol_type = other DNA
gacctgattagcctgatctcttcccttgtg

SEQ ID NO: 45411 - DNA, 30 bp, synthetic construct
  source 1..30: mol_type = other DNA
tgcttttggcaattcagcaccgcaaggtac

SEQ ID NO: 45412 - DNA, 81 bp, synthetic construct
  source 1..81: mol_type = other DNA
atgcatacgattaagatcagctccatcgacctgacctacatcatcaatggactcctcaacggctccctggtgcaagtatat

SEQ ID NO: 45413 - DNA, 45 bp, synthetic construct
  source 1..45: mol_type = other DNA
tccaccagcgccggcgaggtcatcaagacttacaaagggttcaca

SEQ ID NO: 45414 - DNA, 30 bp, synthetic construct
  source 1..30: mol_type = other DNA
cggacattcaacatcaacaataccagcatt

SEQ ID NO: 45415 - DNA, 30 bp, synthetic construct
  source 1..30: mol_type = other DNA
tgcttttgggacttttcaacatcgagatac

SEQ ID NO: 45416 - DNA, 81 bp, synthetic construct
  source 1..81: mol_type = other DNA
ataaagtccgttaacctttcctccgtgaacattacttacataatcaacggactgatcaacgggaatttggtccaagtttac

SEQ ID NO: 45417 - DNA, 48 bp, synthetic construct
  source 1..48: mol_type = other DNA
agcatccaggccggcgagatcattaagaccttcaaagggtttacatcc

SEQ ID NO: 45418 - DNA, 30 bp, synthetic construct
  source 1..30: mol_type = other DNA
atgaccttcaatatcaacaacacaagcatc

SEQ ID NO: 45419 - DNA, 36 bp, synthetic construct
  source 1..36: mol_type = other DNA
gagtaccacgccaccatcggcatcaacattgacctc

SEQ ID NO: 45420 - DNA, 39 bp, synthetic construct
  source 1..39: mol_type = other DNA
ttcgatgccaagatcgacgtggctatgcactttggacct

SEQ ID NO: 45421 - DNA, 69 bp, synthetic construct
  source 1..69: mol_type = other DNA
tgcgtgatgatcaatgggacaccagcgaacatacggtccctgattgtcatgatcagcgggcttttcggt

SEQ ID NO: 45422 - DNA, 30 bp, synthetic construct
  source 1..30: mol_type = other DNA
acccctagcgacatttcctttcccttcatt

SEQ ID NO: 45423 - DNA, 51 bp, synthetic construct
  source 1..51: mol_type = other DNA
cggggcctggaaggcgtgatggagttcgacgtgcttggcgtggagggtgat

SEQ ID NO: 45424 - DNA, 57 bp, synthetic construct
  source 1..57: mol_type = other DNA
ggcgtacatgtccaagtcttagccgaggacttcatcctgggactgctgggagtgttt

SEQ ID NO: 45425 - DNA, 81 bp, synthetic construct
  source 1..81: mol_type = other DNA
atgaacctctcgtctattctcttcgagaacttgttttccatttccgatctgctgatcctcattaatgtcaacgacctgtcc

SEQ ID NO: 45426 - DNA, 105 bp, synthetic construct
  source 1..105: mol_type = other DNA
gacttcatcctgaaccacttcgccaactccaatatgctggactgctatggctcgtcgtacatcgtgaacaacctggtcatctttaatcaattcacactctaccca

SEQ ID NO: 45427 - DNA, 30 bp, synthetic construct
  source 1..30: mol_type = other DNA
gacctggtgtcacttatatcaagtcttgtc

SEQ ID NO: 45428 - DNA, 51 bp, synthetic construct
  source 1..51: mol_type = other DNA
ttcaactatggcatgtttaacttctacctcgggaagaataacgtgtttaac

SEQ ID NO: 45429 - DNA, 57 bp, synthetic construct
  source 1..57: mol_type = other DNA
atgatgcacattaacgagctgatcaaatgcgatattcggatcatggtcgtgatggtg

SEQ ID NO: 45430 - DNA, 42 bp, synthetic construct
  source 1..42: mol_type = other DNA
ggctccatgcaagtttatcttattagctacattaaagtttct

SEQ ID NO: 45431 - DNA, 36 bp, synthetic construct
  source 1..36: mol_type = other DNA
tttctgtctgacgagtttcttttctctagcacatgg

SEQ ID NO: 45432 - DNA, 81 bp, synthetic construct
  source 1..81: mol_type = other DNA
ggggcatctggctctaatgtatctgatagttttgtgtacatcgcgaacggcttcctcaatcccaccatcgtctccattcaa

SEQ ID NO: 45433 - DNA, 42 bp, synthetic construct
  source 1..42: mol_type = other DNA
agcggcacccagtccctgttcttcatcaagctcggggagatt

SEQ ID NO: 45434 - DNA, 30 bp, synthetic construct
  source 1..30: mol_type = other DNA
atccacctggttaacggtagcggattcaca

SEQ ID NO: 45435 - DNA, 45 bp, synthetic construct
  source 1..45: mol_type = other DNA
ctgggaggccaggtgcccttcgacatcgctgggattcatgtcacc

SEQ ID NO: 45436 - DNA, 48 bp, synthetic construct
  source 1..48: mol_type = other DNA
gtccagatcatctgcgaggacagcgtgatgggcctgattagaggtttc

SEQ ID NO: 45437 - DNA, 207 bp, synthetic construct
  source 1..207: mol_type = other DNA
acaatgaatctgaacgagtataacgagttccggattcacatcggaagagtggtctatgtaaaggaaatcctgaagaacggaatcttcccacctttcatttctcacaagaacatgctgacctttggttatgccctcaacatcttctacggcgtcctgaccacctacatccccattcttattagcttaattacggggtcaagtatcatg

SEQ ID NO: 45438 - DNA, 177 bp, synthetic construct
  source 1..177: mol_type = other DNA
atcgagcacaagacctacggcgactacacaatctttaatcaaaatatgatgaatagttcatcaattgacgtctacaatgaaactaacaagatcaccgactggttcgtgtacaatgagacaaacaagattaccgattggttctccttagagaccaagaccgggctcaactactcattc

SEQ ID NO: 45439 - DNA, 54 bp, synthetic construct
  source 1..54: mol_type = other DNA
aagctcttcccctggctgattatgcctagcttcctgaccattatccaatttgcg

SEQ ID NO: 45440 - DNA, 33 bp, synthetic construct
  source 1..33: mol_type = other DNA
gtgaagcccaatgcaaactacttcaactacatc

SEQ ID NO: 45441 - DNA, 51 bp, synthetic construct
  source 1..51: mol_type = other DNA
aacatctcctttctgaattctcttttccgccactggattgttggaaacgag

SEQ ID NO: 45442 - DNA, 51 bp, synthetic construct
  source 1..51: mol_type = other DNA
cacttcctgggcgatcaaattccgtttgacatcgccggagtgcacatcacc

SEQ ID NO: 45443 - DNA, 54 bp, synthetic construct
  source 1..54: mol_type = other DNA
atccacattcaagtaatttttgaggacgccctgatccggctcttcggagtgttc

SEQ ID NO: 45444 - DNA, 90 bp, synthetic construct
  source 1..90: mol_type = other DNA
agctctctggagaccgtcactacaacccctagcgtgtccctcgtgattcccggggtcgagatgccggggtccagtatctacgttccactg

SEQ ID NO: 45445 - DNA, 276 bp, synthetic construct
  source 1..276: mol_type = other DNA
atcaatgggctggatcaaggcgtggaactcaagggcggaagtcaagcagtcctacaattaaacgacaacatcagctccatcgacttgcaaaaccaactgagccacgacctcggcacttctgatgtgaaggtgaccaacaacggcgacaaccaggtgaccgtcgacctcgagtcttctgtgaactctactgcattcgctaatgccatcaagggagagggcaaagtcatttccttcaactcaataggacctgtcctaagcgaggaagcgatgggtcaa

SEQ ID NO: 45446 - DNA, 30 bp, synthetic construct
  source 1..30: mol_type = other DNA
atcatcatgcccgaggctaccacacttagc

SEQ ID NO: 45447 - DNA, 66 bp, synthetic construct
  source 1..66: mol_type = other DNA
atgatcgatttcaataacctcattaacgacatcattactaccaagatcagctgcatcacatctctg

SEQ ID NO: 45448 - DNA, 72 bp, synthetic construct
  source 1..72: mol_type = other DNA
ctgcactcttcctaccctacctttatggatgccgtctttggccttagtaaccctcaaaacgttattaataat

SEQ ID NO: 45449 - DNA, 66 bp, synthetic construct
  source 1..66: mol_type = other DNA
atgatcgagtacaacaagctcatcaacgacatcgtgttttctaacggcggcaacatcaactcgcta

SEQ ID NO: 45450 - DNA, 30 bp, synthetic construct
  source 1..30: mol_type = other DNA
ttcagctctggcaactccatggactacacc

SEQ ID NO: 45451 - DNA, 30 bp, synthetic construct
  source 1..30: mol_type = other DNA
ggcgagctgctgttcgaaaacctcgatagc

SEQ ID NO: 45452 - DNA, 57 bp, synthetic construct
  source 1..57: mol_type = other DNA
atgcttcaatctacataccctaccttcatggacgccgtgtttgctctgaagaaccct

SEQ ID NO: 45453 - DNA, 54 bp, synthetic construct
  source 1..54: mol_type = other DNA
ggggtcagagctggttggaccctatgggacgggggatgggatgcctacgaagtg

SEQ ID NO: 45454 - DNA, 57 bp, synthetic construct
  source 1..57: mol_type = other DNA
aagctgcagaccttctcgttatccattttcatcgagcccgcaaacatgcctctttgg

SEQ ID NO: 45455 - DNA, 36 bp, synthetic construct
  source 1..36: mol_type = other DNA
ttcttcagcctgtttggaacttctacggcatcgctg

SEQ ID NO: 45456 - DNA, 33 bp, synthetic construct
  source 1..33: mol_type = other DNA
atcgacgcccatggccacctcaacttcttccag

SEQ ID NO: 45457 - DNA, 126 bp, synthetic construct
  source 1..126: mol_type = other DNA
atgggcaagccaatgatcatcatgggcaaatccattgctgactatgatctggtggacttcctccgggccttcatcgaccgcggatcttgggacagcggcaacggggtccctatgctgtgtccttac

SEQ ID NO: 45458 - DNA, 30 bp, synthetic construct
  source 1..30: mol_type = other DNA
gccaagtacctgatcgaggctcctgattgg

SEQ ID NO: 45459 - DNA, 63 bp, synthetic construct
  source 1..63: mol_type = other DNA
atgatcgagtacaacaccctcctgaacgacatcatccacaccaagatcaacagcatcacttcc

SEQ ID NO: 45460 - DNA, 45 bp, synthetic construct
  source 1..45: mol_type = other DNA
ctcagcgccacctaccccacatttatcgacgctctgttcggtttg

SEQ ID NO: 45461 - DNA, 66 bp, synthetic construct
  source 1..66: mol_type = other DNA
atgatcgagtacaatgagctgatcaacaagctcatgttcaccaacgtgaacgacattgtctcactg

SEQ ID NO: 45462 - DNA, 66 bp, synthetic construct
  source 1..66: mol_type = other DNA
atcgagtacaactacctcctgaacgacattatcttagtaaagacttccaatatcgtatccctaaat

SEQ ID NO: 45463 - DNA, 33 bp, synthetic construct
  source 1..33: mol_type = other DNA
agctttaactaccggttcgaggaccctctttct

SEQ ID NO: 45464 - DNA, 54 bp, synthetic construct
  source 1..54: mol_type = other DNA
ctgggcggaatcccccttttcaattcgaccctcaaggctaatgccaccactaac

SEQ ID NO: 45465 - DNA, 240 bp, synthetic construct
  source 1..240: mol_type = other DNA
tctcagtccatcgccaaccagcactggacccttaaccctctggagctgatcttctaccgggccggcttcactctcgaggtcttcgagaaaatcatcccactggctgggaccacacacgggcatatcctggggatgatcttttctagcggcagcccgcggaccttcattggcgaatacgtattaaagtatactgtttgcctcacaagcaccctctttggccccgtgatgttggacttcggc

SEQ ID NO: 45466 - DNA, 57 bp, synthetic construct
  source 1..57: mol_type = other DNA
atcccctattttcaactatcgtactaccctatcttcatatatcctgaatacggtctg

SEQ ID NO: 45467 - DNA, 54 bp, synthetic construct
  source 1..54: mol_type = other DNA
taccagctggagttcataaagtttaacaaggcctatagcttcaatggtatcgac

SEQ ID NO: 45468 - DNA, 33 bp, synthetic construct; identical to SEQ ID NO: 45103
  source 1..33: mol_type = other DNA

SEQ ID NO: 45469 - DNA, 54 bp, synthetic construct
  source 1..54: mol_type = other DNA
ctgggcggtatccccctgttcgactccgcactcaaggctagcgccacaaccaat

SEQ ID NO: 45470 - DNA, 240 bp, synthetic construct
  source 1..240: mol_type = other DNA
agccagtccatcgccgggcagcactggacactcaaccccctggaacttatcttctaccgggccgcttttactctggaggtctttgagcgcatcctgtccctggccggcaccaccaacggcaaaatcctcgctatgattttttcttctggttctcctcgcacattcattggaaattacgtcctgaccgacaacgtttgcttaacctctacactcttcggacccgtcatgctggactttggt

SEQ ID NO: 45471 - DNA, 51 bp, synthetic construct
  source 1..51: mol_type = other DNA
atgggcacaatcaacagcacaatcgaatacttcaagaacattactaccgag

SEQ ID NO: 45472 - DNA, 66 bp, synthetic construct
  source 1..66: mol_type = other DNA
atgatcgagtacaactacctgattaacgacgtcctgaccaagaatgtgaacgccctcgatagcttc

SEQ ID NO: 45473 - DNA, 87 bp, synthetic construct
  source 1..87: mol_type = other DNA
ctgaacgccacatacccaaccttcatggacgccgtctacgctctgagcaaccctcaaaacgtgatcaactccatgctcaacccaccc

SEQ ID NO: 45474 - DNA, 36 bp, synthetic construct
  source 1..36: mol_type = other DNA
tacctgcggtatctgtattttcgcaagggtagaagg

SEQ ID NO: 45475 - DNA, 66 bp, synthetic construct
  source 1..66: mol_type = other DNA
atgattgagtacaataacctcatcaacgacatcattacaaccaagatcagcaccatcacttctctg

SEQ ID NO: 45476 - DNA, 96 bp, synthetic construct
  source 1..96: mol_type = other DNA
ctccacgccgcttaccctaccttcatggacgccatctacggcctgagcaatccgcaaaacgtgattaacaacgtgctgtctccgcctccaacaatc

SEQ ID NO: 45477 - DNA, 69 bp, synthetic construct
  source 1..69: mol_type = other DNA
atgatcgagtacaacaacctcatcaacggcattatcacaaccaagattagcaacatcatctccctgaat

SEQ ID NO: 45478 - DNA, 66 bp, synthetic construct
  source 1..66: mol_type = other DNA
atgattgagtacaacaacctgattaatgacatcatctttactcaaaccggaaacatcaactctctg

SEQ ID NO: 45479 - DNA, 42 bp, synthetic construct
  source 1..42: mol_type = other DNA
gagctgacacgcacaagcatgaatcttaccaacatcaactcc

SEQ ID NO: 45480 - DNA, 42 bp, synthetic construct
  source 1..42: mol_type = other DNA
caagtttatcttatttctcatatccaactaccactgacccgg

SEQ ID NO: 45481 - DNA, 63 bp, synthetic construct
  source 1..63: mol_type = other DNA
aacgagatctacggggccaacagcgtctttaactccgacaacttcggcaacgacgctctgaat

SEQ ID NO: 45482 - DNA, 66 bp, synthetic construct
  source 1..66: mol_type = other DNA
atgatcgagtacaacaatatcattaataatattatatccatcgacacaaccaacatcgtgtcactg

SEQ ID NO: 45483 - DNA, 51 bp, synthetic construct
  source 1..51: mol_type = other DNA
atggctgacgagatcgccaccctgattagctctgtcggtctcacctccgag

SEQ ID NO: 45484 - DNA, 30 bp, synthetic construct
  source 1..30: mol_type = other DNA
ctgggcaacatgagccaggttaagggcatc

SEQ ID NO: 45485 - DNA, 69 bp, synthetic construct
  source 1..69: mol_type = other DNA
tccctgatcaatcaccgggccatacatatcagcaccatttacactaacttcttcatgtttccattgacc

SEQ ID NO: 45486 - DNA, 69 bp, synthetic construct
  source 1..69: mol_type = other DNA
ggccagagccccgaggtgaccctcatctttgctaacattcctctgggacaggcctccttcatcgatgtc

SEQ ID NO: 45487 - DNA, 33 bp, synthetic construct
  source 1..33: mol_type = other DNA
tacacccccgttcaagggagtggtacacatgtg

SEQ ID NO: 45488 - DNA, 45 bp, synthetic construct
  source 1..45: mol_type = other DNA
atgaatgtgatcaacctgatcatgaccattctaccacaattgccc

SEQ ID NO: 45489 - DNA, 66 bp, synthetic construct
  source 1..66: mol_type = other DNA
cccggcgtgatcgagaataagaccctgatgaactttctccacattaaggagatgttctaccatgtc

SEQ ID NO: 45490 - DNA, 87 bp, synthetic construct
  source 1..87: mol_type = other DNA
ctgcacgcttcctatccaaccttcatggacgccatctacggcctgtctaatccgcaaaatgtcattaacaacatcctctcaccacag

SEQ ID NO: 45491 - DNA, 33 bp, synthetic construct
  source 1..33: mol_type = other DNA
agctttaactaccggttcgaggaccctctgaag

SEQ ID NO: 45492 - DNA, 54 bp, synthetic construct
  source 1..54: mol_type = other DNA
ctgggcggcatccccctatttaactctaccctcaaggctaatgccacaaccaac

SEQ ID NO: 45493 - DNA, 240 bp, synthetic construct
  source 1..240: mol_type = other DNA
tcccagagcatcgcatcgcaacattggacactgaacccactggaactcgttttttatagggccgcctttaccctggaggtctttgaaaagatcattccactggctgggaccacacacggcaaaattttgtctatgatctttagctccggaagccctcggactttcattggcgaatatgtactgcactacaacgtctgcctgacctctaccatcttcggccctgtgatgctcgactttggt

SEQ ID NO: 45494 - DNA, 39 bp, synthetic construct
  source 1..39: mol_type = other DNA
tttttcaaatacgcggttacccacgacgtcttccacatc

SEQ ID NO: 45495 - DNA, 57 bp, synthetic construct
  source 1..57: mol_type = other DNA
tacaccatacccgtcaagaacagcttcgccaatgttcggaacctcattatcctgatc

SEQ ID NO: 45496 - DNA, 30 bp, synthetic construct
  source 1..30: mol_type = other DNA
acacctccaaacattagcatcacctacatc

SEQ ID NO: 45497 - DNA, 138 bp, synthetic construct
  source 1..138: mol_type = other DNA
accaacctgttcgccaatgcaatcgctgtgatccaggaggtcatttaccaaacgttcaacgtgtacttcatggggtccagcacctatctcgccgccaccgccattacatacgctttcgagaagttcgtcggatctctg

SEQ ID NO: 45498 - DNA, 99 bp, synthetic construct
  source 1..99: mol_type = other DNA
ggcctgcccatcttcgacgccgtgaacctcacatttacctctatttccaccggcggcatgagcatcaagaacgctaacatcggcttttatcaaaataac

SEQ ID NO: 45499 - DNA, 102 bp, synthetic construct
  source 1..102: mol_type = other DNA
aacaacatcgtccctatcgagggtatcttcaccgtcgtctccgcggtaacaacaaccggcgcaaacattgtgccaccccaagaattggcagtttggaacggg

SEQ ID NO: 45500 - DNA, 96 bp, synthetic construct
  source 1..96: mol_type = other DNA
tacggttttgatcctttcaccgccctgttcgacgtgatttctgtcactagcaacaacgggttaagtaccggaattgtctacggcgggcttccactg

SEQ ID NO: 45501 - DNA, 45 bp, synthetic construct
  source 1..45: mol_type = other DNA
attggctaccatctggagaaccacaccttcgcaattagctttcct

SEQ ID NO: 45502 - DNA, 33 bp, synthetic construct
  source 1..33: mol_type = other DNA
aacgcctccaccaagacaggagagttcatcgcc

SEQ ID NO: 45503 - DNA, 57 bp, synthetic construct
  source 1..57: mol_type = other DNA
tataccatccccgtcgacaacagctacgccaacgtccgaaacctgataatcctcatt

SEQ ID NO: 45504 - DNA, 36 bp, synthetic construct
  source 1..36: mol_type = other DNA
accccacctaatatcagcattccctacatcaacgat

SEQ ID NO: 45505 - DNA, 39 bp, synthetic construct
  source 1..39: mol_type = other DNA
tggcaggccggcgtcagcgtgcacctggaaacttacgac

SEQ ID NO: 45506 - DNA, 33 bp, synthetic construct
  source 1..33: mol_type = other DNA
ggcaagagcaacaccgccgtgatcttcggaccc

SEQ ID NO: 45507 - DNA, 60 bp, synthetic construct
  source 1..60: mol_type = other DNA
aggttccacatccgggttaacggggctcccgcgaacgtcaggtgcatggtggtcatgtta

SEQ ID NO: 45508 - DNA, 33 bp, synthetic construct
  source 1..33: mol_type = other DNA
gcaaccccatccgacatctcgtttcaatatgtt

SEQ ID NO: 45509 - DNA, 72 bp, synthetic construct
  source 1..72: mol_type = other DNA
atgatcattgaaaattttgtgaacaatcttccaattaccgagtctggggccgtggccagtagctctctgtcc

SEQ ID NO: 45510 - DNA, 36 bp, synthetic construct
  source 1..36: mol_type = other DNA
gcaggccccacactggagattcagcaacagagcttc

SEQ ID NO: 45511 - DNA, 81 bp, synthetic construct
  source 1..81: mol_type = other DNA
cttcacgctacctaccccactttcatggatgccatctatgccatgtccaacccccaaaacgttattaataacgtcctgaca

SEQ ID NO: 45512 - DNA, 30 bp, synthetic construct
  source 1..30: mol_type = other DNA
ttctacggaccgctgaacacccctttgcag

SEQ ID NO: 45513 - DNA, 54 bp, synthetic construct
  source 1..54: mol_type = other DNA
ttccacgagtacagcatgatcatccccgtgattattggcgactttagtgtcacc

SEQ ID NO: 45514 - DNA, 39 bp, synthetic construct
  source 1..39: mol_type = other DNA
gactatgccaacctcggcttaatccaactgatctaccag

SEQ ID NO: 45515 - DNA, 36 bp, synthetic construct
  source 1..36: mol_type = other DNA
cgcatcctgaggaacgactataccttacggtcactc

SEQ ID NO: 45516 - DNA, 39 bp, synthetic construct
  source 1..39: mol_type = other DNA
accgacaagggctttagctacaacatcttctctcatagc

SEQ ID NO: 45517 - DNA, 81 bp, synthetic construct
  source 1..81: mol_type = other DNA
actggcgctatcatgcccaagagctttgctctcaattacgaggcaacacagtcacaagtgctaaactcctgggtggacgtt

SEQ ID NO: 45518 - DNA, 30 bp, synthetic construct
  source 1..30: mol_type = other DNA
ccttttttcacctcgttaccacggaatggg

SEQ ID NO: 45519 - DNA, 30 bp, synthetic construct
  source 1..30: mol_type = other DNA
gtgatgggcgacttcgagatcaggagtctg

SEQ ID NO: 45520 - DNA, 33 bp, synthetic construct
  source 1..33: mol_type = other DNA
gtgaagcctaaccccctgtacctcgactacatc

SEQ ID NO: 45521 - DNA, 51 bp, synthetic construct
  source 1..51: mol_type = other DNA
aatatactgttcttctccatgctgtttaagaagtggatcagcggcaatgaa

SEQ ID NO: 45522 - DNA, 42 bp, synthetic construct
  source 1..42: mol_type = other DNA
atggacctgatgatcaccatgatgatcctccctcaacttccc

SEQ ID NO: 45523 - DNA, 69 bp, synthetic construct
  source 1..69: mol_type = other DNA
atgcccggcgtgattggcaaccagaccctgatgaactttcttcaaattaaggagatgttttaccacatc

SEQ ID NO: 45524 - DNA, 30 bp, synthetic construct
  source 1..30: mol_type = other DNA
acccactacttcgcccatcacgagctgaag

SEQ ID NO: 45525 - DNA, 30 bp, synthetic construct
  source 1..30: mol_type = other DNA
cagagcacacacaccaccggcttcttcacg

SEQ ID NO: 45526 - DNA, 75 bp, synthetic construct
  source 1..75: mol_type = other DNA
tacactattcctgtaaataactcctttgctaacgtcagaaatctgataatcatgattgctggattggttggagga

SEQ ID NO: 45527 - DNA, 33 bp, synthetic construct
  source 1..33: mol_type = other DNA
accccacctaacatcagcatcacctacatcaat

SEQ ID NO: 45528 - DNA, 42 bp, synthetic construct
  source 1..42: mol_type = other DNA
atggatgctgattcttacggagccgtggttacgttcaccggc

SEQ ID NO: 45529 - DNA, 198 bp, synthetic construct
  source 1..198: mol_type = other DNA
aagaactacaactccgctagcaagaatactgacttcatcgtctctaagaacgacgttaaaatggacctgagcgtgttcaattccacctatggcgagaagaccattgtgaacgccctcctgtctgatcttaaggggaacctgattaacgagaagatcaagctggaaatcgccggcaatctctacgagatcacaagcaat

SEQ ID NO: 45530 - DNA, 60 bp, synthetic construct
  source 1..60: mol_type = other DNA
tttaccgtccccgtgatcctgaacgctagcaaatacgacgtgaaggccagtttcgaggga

SEQ ID NO: 45531 - DNA, 174 bp, synthetic construct
  source 1..174: mol_type = other DNA
aactacaacaagaataacgccgtcaaaagcttcaccatctccaaggccaagcttgatctgtccctcacaatggacaacgccacttacggctcctacctcgtgctgaataacaagctgaagcacgacctgatcctgaatatcaacaataagaactattctgtgaaagccttctcc

SEQ ID NO: 45532 - DNA, 30 bp, synthetic construct
  source 1..30: mol_type = other DNA
ggcggatacgaggccaagatcatcttcaac

SEQ ID NO: 45533 - DNA, 171 bp, synthetic construct
  source 1..171: mol_type = other DNA
aacagtcagataatcaaggtttctgtaaaccgggctactccggagctgattgtgaacatccctgacatttcttacggttcttacattaacgcggacgtgaagctgatcgggatcaaacttgatgagaatctcgtgctcacaatcaacaataaggattacacttttaaggct

SEQ ID NO: 45534 - DNA, 117 bp, synthetic construct
  source 1..117: mol_type = other DNA
aactctattagcaaggacgtcaatgtgaacgttggcaagatcgaccccaagctagtcatcgacattagtgactctaaatacggcgagaaccctatcgccgatgtcaagctcactggg

SEQ ID NO: 45535 - DNA, 54 bp, synthetic construct
  source 1..54: mol_type = other DNA
ctgaacgagaacgttgtcctaactgttaacaacaagaagtacaccttcaaagcc

SEQ ID NO: 45536 - DNA, 108 bp, synthetic construct
  source 1..108: mol_type = other DNA
ggccggtaccccgtggctcctgtggacgtcatcaagaccatcctctccccattcattcctagtctggccgtttccccccaagtgacatctatcgtgttcaacatcaga

SEQ ID NO: 45537 - DNA, 72 bp, synthetic construct
  source 1..72: mol_type = other DNA
atggccgatccctacgacaaactacctcaaattgtgtattggctgatgggttccctctcgagcgtcaacttc

SEQ ID NO: 45538 - DNA, 54 bp, synthetic construct
  source 1..54: mol_type = other DNA
tccgtcggcggcattcctatcctgaagccaagcatccggtacctgctcaaacca

SEQ ID NO: 45539 - DNA, 261 bp, synthetic construct
  source 1..261: mol_type = other DNA
agatctgtaaaagagttttccattaccactgccacaaatcccctgagcactctgcaaaatcgagcagacttcaccctgcatgtactgaacctccttgacttcctgggcggcgattttggcctcacccacggaaaattgctggcatcagctatccctgggtctgaactcggtccccgaatgactgttggaaaactcatcgcttggagaagtgaagtaacaatcacccccactctgatcgggcagatggttattgattttgga

SEQ ID NO: 45540 - DNA, 30 bp, synthetic construct
  source 1..30: mol_type = other DNA
ctgagcggagactatacgttgaggtctctc

SEQ ID NO: 45541 - DNA, 96 bp, synthetic construct
  source 1..96: mol_type = other DNA
aattttgcgagtatatgcggcgagtttggcggaatctatgctcggctgtccttcggcctctgggatttcgacctgtggacctaccgcggcatttgg

SEQ ID NO: 45542 - DNA, 69 bp, synthetic construct
  source 1..69: mol_type = other DNA
ctcgtcgaccaggtgccaagcacagactggctggacaactactccacctatgagctggccttcctgttt

SEQ ID NO: 45543 - DNA, 48 bp, synthetic construct
  source 1..48: mol_type = other DNA
tacgccgggtttatggaatccttcggacacgtgacagagctggttagc

SEQ ID NO: 45544 - DNA, 66 bp, synthetic construct
  source 1..66: mol_type = other DNA
gccagcatgctcaccggcggattctggaatctgtaccccgaacaagaaaacatcatcaagaagatc

SEQ ID NO: 45545 - DNA, 33 bp, synthetic construct
  source 1..33: mol_type = other DNA
gtgagtggattaggtgctgatgctctcgccggc

SEQ ID NO: 45546 - DNA, 57 bp, synthetic construct
  source 1..57: mol_type = other DNA
gagcccattctgaacgctatgggcgcggcgcagaccatcagctacgcaacagactac

SEQ ID NO: 45547 - DNA, 36 bp, synthetic construct
  source 1..36: mol_type = other DNA
gcctttcttgggtctaccgactccgtggctgtgtac

SEQ ID NO: 45548 - DNA, 33 bp, synthetic construct
  source 1..33: mol_type = other DNA
ttccctgtgaacatgaattacctgacctctccc

SEQ ID NO: 45549 - DNA, 63 bp, synthetic construct
  source 1..63: mol_type = other DNA
gcctatgtgaatagcttcaactttgatctgatgtacctgtggatttacgacgctcctttccct

SEQ ID NO: 45550 - DNA, 33 bp, synthetic construct
  source 1..33: mol_type = other DNA
gccctgaacttcgccgccatcgtgtacatcgag

SEQ ID NO: 45551 - DNA, 33 bp, synthetic construct
  source 1..33: mol_type = other DNA
ctgcaatattaccccatctctaccttcgatctg

SEQ ID NO: 45552 - DNA, 168 bp, synthetic construct
  source 1..168: mol_type = other DNA
atcgagctgtccggccttatctctggaatactcgcaagcaacacatacaccgacatctcttccgccctgaacgcggtaaccgcttacctgcccttcgatttcgacattaattccatttcatctagcataaactcttctcttcacgaggttggccgatacgtgcttaat

SEQ ID NO: 45553 - DNA, 39 bp, synthetic construct
  source 1..39: mol_type = other DNA
ctcgtgatgtccctgaacttaaactctattaatcaaacc

SEQ ID NO: 45554 - DNA, 171 bp, synthetic construct
  source 1..171: mol_type = other DNA
attgagctaactggactaatctccggaatccttgcttctaatacctacaccgacatcaatagttccctaaatgccgtgacatcatacctgccattcaactttgatgtcaactccgtatctagctctattaactcatccctgcatgaggtcggctcctatatcctgaattac

SEQ ID NO: 45555 - DNA, 45 bp, synthetic construct
  source 1..45: mol_type = other DNA
ctgatcaaattctactacgtgaaccacgtcttcaaagtctcctgg

SEQ ID NO: 45556 - DNA, 30 bp, synthetic construct
  source 1..30: mol_type = other DNA
aacaagagcacaaacactgaggccttcttt

SEQ ID NO: 45557 - DNA, 60 bp, synthetic construct
  source 1..60: mol_type = other DNA
aagtataccattccggttaacagtagttacgccaacgttaggaatctcatcatcctgatc

SEQ ID NO: 45558 - DNA, 33 bp, synthetic construct
  source 1..33: mol_type = other DNA
accccacctaatatcagcgtgccctacatcaac

SEQ ID NO: 45559 - DNA, 48 bp, synthetic construct
  source 1..48: mol_type = other DNA
ccccggaatattagcatctccgacaagaacgagttctacgctactggc

SEQ ID NO: 45560 - DNA, 39 bp, synthetic construct
  source 1..39: mol_type = other DNA
aacaacctgtaccacgactctaattttaatatccccttc

SEQ ID NO: 45561 - DNA, 36 bp, synthetic construct
  source 1..36: mol_type = other DNA
aataagaccagcaacacagagatgttcatcgctccc

SEQ ID NO: 45562 - DNA, 72 bp, synthetic construct
  source 1..72: mol_type = other DNA
tatcacgtctatgttaacaacacaccggcgaacgtccgtacactgattattatgataggaggactcttcggc

SEQ ID NO: 45563 - DNA, 33 bp, synthetic construct
  source 1..33: mol_type = other DNA
acccctaataacatctctttccactttgtggag

SEQ ID NO: 45564 - DNA, 33 bp, synthetic construct
  source 1..33: mol_type = other DNA
tatcggcccttcatctacaataacctgaagctc

SEQ ID NO: 45565 - DNA, 60 bp, synthetic construct
  source 1..60: mol_type = other DNA
gtgctgggcagcaacaccaaacagctcattaagatctttttcggagacgaaaggtacacg

SEQ ID NO: 45566 - DNA, 33 bp, synthetic construct
  source 1..33: mol_type = other DNA
aaatacaacatgatcgccaatagtagctatctg

SEQ ID NO: 45567 - DNA, 42 bp, synthetic construct
  source 1..42: mol_type = other DNA
aacaatttctattctgacaagaacttccaaatcccctttgga

SEQ ID NO: 45568 - DNA, 36 bp, synthetic construct
  source 1..36: mol_type = other DNA
aacaagtccagcaataccgaggccattatcgctccc

SEQ ID NO: 45569 - DNA, 72 bp, synthetic construct
  source 1..72: mol_type = other DNA
taccacgtctacgttggggaaacacctgcaaacgttaggacactgatcataatgatcggtggactgttcgga

SEQ ID NO: 45570 - DNA, 36 bp, synthetic construct
  source 1..36: mol_type = other DNA
acaccaaacgagatcagcttccaatacgtggaggac

SEQ ID NO: 45571 - DNA, 117 bp, synthetic construct
  source 1..117: mol_type = other DNA
acaaagttctacctgaccaatcagcacatgcccaacatgaccgaggccctcaagcctattgttggggtctttttgctccaaactgaaacaagcatttcctgcgggcttaactctgtg

SEQ ID NO: 45572 - DNA, 30 bp, synthetic construct
  source 1..30: mol_type = other DNA
cacgccaacgagaccaacttctctctacat

SEQ ID NO: 45573 - DNA, 45 bp, synthetic construct
  source 1..45: mol_type = other DNA
ctgaagcccatcttccacgtgcctgccgactacgtctattcaagc

SEQ ID NO: 45574 - DNA, 30 bp, synthetic construct
  source 1..30: mol_type = other DNA
atgtctagcctcatttccatccctacactg

SEQ ID NO: 45575 - DNA, 69 bp, synthetic construct
  source 1..69: mol_type = other DNA
cccggcgtgacccacaaccagacattcgcgcaattcattcacctgaaggacatcttctattacttgggc

SEQ ID NO: 45576 - DNA, 108 bp, synthetic construct
  source 1..108: mol_type = other DNA
ggcaggtaccccgtggctcctatcgacgtgattaagactatattgtctccgattttccctagtctggccgtttctcccgaattgaactctatcgtgttcaccatccgc

SEQ ID NO: 45577 - DNA, 72 bp, synthetic construct
  source 1..72: mol_type = other DNA
atggccgatccttatgacaagctgcctcaaataacttactggctcatgggcagcctctccgctgtcaacttc

SEQ ID NO: 45578 - DNA, 45 bp, synthetic construct
  source 1..45: mol_type = other DNA
atgctcctgttcggcgccacacccgaggtgctggaatacgctatg

SEQ ID NO: 45579 - DNA, 48 bp, synthetic construct
  source 1..48: mol_type = other DNA
aacatttacggggccgccagcatctatggcaacaatatccctatcgct

SEQ ID NO: 45580 - DNA, 60 bp, synthetic construct
  source 1..60: mol_type = other DNA
agccagatcatttccctgttcggctctggtaacgagctgtacatggaatttgctgtgaag

SEQ ID NO: 45581 - DNA, 30 bp, synthetic construct
  source 1..30: mol_type = other DNA
atgagctccctgatctctattcctaccatg

SEQ ID NO: 45582 - DNA, 69 bp, synthetic construct
  source 1..69: mol_type = other DNA
cccagcgtgacacacaaccagaccttcgctcaatttattcacctgaaggactacttctattaccttggc

SEQ ID NO: 45583 - DNA, 30 bp, synthetic construct
  source 1..30: mol_type = other DNA
atgtcctctctgattagcatccctacactg

SEQ ID NO: 45584 - DNA, 69 bp, synthetic construct
  source 1..69: mol_type = other DNA
cccggcgtgacccatgatcagacatttgcgcaattcatccacctgaaggactacttctactatttgggg

SEQ ID NO: 45585 - DNA, 78 bp, synthetic construct
  source 1..78: mol_type = other DNA
cccgggatgctcgagaataagacccttgtgaacttcctgcaaatcaaagagatgttctaccacatcggcctgatccag

SEQ ID NO: 45586 - DNA, 57 bp, synthetic construct
  source 1..57: mol_type = other DNA
atgattaacatcaacgacatcattttcttcaacttcaacactatcaactcctttaac

SEQ ID NO: 45587 - DNA, 30 bp, synthetic construct
  source 1..30: mol_type = other DNA
ttcagcgctgccaactccatggactacagc

SEQ ID NO: 45588 - DNA, 30 bp, synthetic construct
  source 1..30: mol_type = other DNA
ggcaatctgctgttcgagaacatcacaagc

SEQ ID NO: 45589 - DNA, 42 bp, synthetic construct
  source 1..42: mol_type = other DNA
gtggggcccgaggaaattatcaatgccctcaagaacgcagac

SEQ ID NO: 45590 - DNA, 30 bp, synthetic construct
  source 1..30: mol_type = other DNA
tactccgctgccggcattacctctagcatc

SEQ ID NO: 45591 - DNA, 51 bp, synthetic construct
  source 1..51: mol_type = other DNA
agtcaatgggtcggtagctttattactaaccccaccgcgtctagtctggtg

SEQ ID NO: 45592 - DNA, 108 bp, synthetic construct
  source 1..108: mol_type = other DNA
ggccggtaccaggtcgcccctattgacgtgatcaagaccatcctgtctcccatctttccatcgttgtccgtttcccctgaaattaacagtatcgtgttcaccattcgc

SEQ ID NO: 45593 - DNA, 72 bp, synthetic construct
  source 1..72: mol_type = other DNA
atggccgatccctacgacaagttgccacaaataacttattggctgatgggcagcctctccgctgtcaacttc

SEQ ID NO: 45594 - DNA, 54 bp, synthetic construct
  source 1..54: mol_type = other DNA
atgatcgattacaacacaataatatcgttgaatacaaacgacattgtgtcactg

SEQ ID NO: 45595 - DNA, 159 bp, synthetic construct
  source 1..159: mol_type = other DNA
attgccatcctgtccggggcttcgtcttccgcaacctacgctgacatcaacggagtgcttagctcgttgagcagctacctgccctggtccttcgatgttaattcaattagcagcagtctcaactcctcggttcaagaaatcggcaagtttctgctgaac

SEQ ID NO: 45596 - DNA, 174 bp, synthetic construct
  source 1..174: mol_type = other DNA
ctctccaccttcgtgacatggattctcgctaacaaccccgatgctaacgtgaactctgccatgtatcagatctccgcctacctgcctgccggcgtcgatatcaactccattaattcctacttagattctgtcatcaacaatgtcggatcttacatcctgaactacagcgtcaaa

SEQ ID NO: 45597 - DNA, 33 bp, synthetic construct
  source 1..33: mol_type = other DNA
ctgggcttcagtactgtttctggtgaccctttt

SEQ ID NO: 45598 - DNA, 42 bp, synthetic construct
  source 1..42: mol_type = other DNA
gctacctgggacaacatgtggggtctcggttcacaaacgtta

SEQ ID NO: 45599 - DNA, 180 bp, synthetic construct
  source 1..180: mol_type = other DNA
gagctcagtatctttgtctcatggattctcgccaacaaccctaacaccgatgtcaactctgtgatgagccagatctcctcctacctgccctcttacgtggacgtcaactccctgaactcctacatcgatagcgtgattagcaatgttggaagctatctgctgaattacagcgtcaaaagc

SEQ ID NO: 45600 - DNA, 33 bp, synthetic construct
  source 1..33: mol_type = other DNA
ggaccccagatgggcatcgaccctctcttcact

SEQ ID NO: 45601 - DNA, 177 bp, synthetic construct
  source 1..177: mol_type = other DNA
gaggtctccaccttcgtcacatggattctcgccaataaccccgacaccgacattaattcggcaatgtaccagatctccggctatttgcctccgggggtcgacgtgaatagcatcaactcttacctggattccgctatcaacgacattggctcttacatcctgaactactctgtgaag

SEQ ID NO: 45602 - DNA, 69 bp, synthetic construct
  source 1..69: mol_type = other DNA
atgacagacatctttaaccccatcgtccgaccgatcacccacatcttcctgatgggctccagcaaaggg

SEQ ID NO: 45603 - DNA, 183 bp, synthetic construct
  source 1..183: mol_type = other DNA
agactacaaatgggaatcaagctgaacaccattttctgctcgatgacggggaccatgagctccacaagcatcctgcacacccacctccttaagtccatccttggcgctgtgatcactccaatcatggggccttttgttcaatcgggcattaacaccggcgtcggactttatgcctatgtacct

SEQ ID NO: 45604 - DNA, 249 bp, synthetic construct
  source 1..249: mol_type = other DNA
acagtcgcatttgccggggccgaggccgattgctacactgtcgacgtagtcaatccgaccgacaacatcgacctggggaatatttccacacacgtgctggacgtgcagaacagcaccaacaagatcacctactatatcgaacccaactacaatgagatgcagctcctgaacgacctgaaggtgcctctcaacaacagttgcgagtactacacggtatcgtggaacatttactcttaccttcaagatgac

SEQ ID NO: 45605 - DNA, 162 bp, synthetic construct
  source 1..162: mol_type = other DNA
atggcaatttttagtggagcctcatcaagctccacatacgtcgacattaatgccgccctgagctccatctccacctacctgccctggcgcttcgacgtaaactctatctcaacctcgatcaattcatccctacaagagatcggccgctacgtgctgaattat

SEQ ID NO: 45606 - DNA, 48 bp, synthetic construct
  source 1..48: mol_type = other DNA
accggccagatcgatattactcccgactacacggttcgatttggacag

SEQ ID NO: 45607 - DNA, 48 bp, synthetic construct
  source 1..48: mol_type = other DNA
aacatgatctgggcccggtctttgaggctgggccttagcctcaagagc

SEQ ID NO: 45608 - DNA, 102 bp, synthetic construct
  source 1..102: mol_type = other DNA
gattttctgctggagcacaagtaccattggaaggacttctcactgaactaccttttccccgcccgcatccttgaaaaagtcggaatggatgcaagcggcaaa

SEQ ID NO: 45609 - DNA, 36 bp, synthetic construct
  source 1..36: mol_type = other DNA
aacaagctgagcaaaaaggtccagatcaccgtgaaa

SEQ ID NO: 45610 - DNA, 183 bp, synthetic construct
  source 1..183: mol_type = other DNA
tatgaaatgtcttccttaataacatcaatgttagcgtcgtcatcctacatggagttcaacgcctcactgagccagtttatcacatatttgcctgttgaaggcgatcctacttctgtgtccacatacctgaacaactccttcgaatcaatctccgggttcctcctgaattactctgccaccgcg

SEQ ID NO: 45611 - DNA, 48 bp, synthetic construct
  source 1..48: mol_type = other DNA
ggccacatgcaagtgtatatgattagccagatcaagctgcctctcacg

SEQ ID NO: 45612 - DNA, 42 bp, synthetic construct
  source 1..42: mol_type = other DNA
attaaattctactacgtgaataacgtgtttaagatatcatgg

SEQ ID NO: 45613 - DNA, 33 bp, synthetic construct
  source 1..33: mol_type = other DNA
aacaagagcactaataccgaggccttcttcaca

SEQ ID NO: 45614 - DNA, 60 bp, synthetic construct
  source 1..60: mol_type = other DNA
aagtataccatccccgtgaattccagctatgccaacgtccgtgatctgatcatactcatt

SEQ ID NO: 45615 - DNA, 33 bp, synthetic construct
  source 1..33: mol_type = other DNA
acccctccaaacatcagcgtgccctacatcaat

SEQ ID NO: 45616 - DNA, 171 bp, synthetic construct
  source 1..171: mol_type = other DNA
ttcgagctcagtggaatgcttagcgggttcctcgccactaactccgccaccgacatcaatgctaccttgtcctctgttagcgcatatcttccctggagcatagacataaattccatatcatcgcaaatcaattcatccatgcacgaaatcggccgctacctgctgaactac

SEQ ID NO: 45617 - DNA, 171 bp, synthetic construct
  source 1..171: mol_type = other DNA
atggaagttacaggtatcctgactgggttcctcgctacgaactccgacgccggcgtcaacgccgctattagctctctttcgcaatatatacctggtggtctggacatcaatagtatctccgcctccatatattcaagcgcacgcgaaataggcacctacgtgctgaactac

SEQ ID NO: 45618 - DNA, 33 bp, synthetic construct
  source 1..33: mol_type = other DNA
gtgacgccgaacattatctatctggactacatc

SEQ ID NO: 45619 - DNA, 57 bp, synthetic construct
  source 1..57: mol_type = other DNA
attggcgcccctcacaacatcgtcatgtacaccgtgtccaagatccccttcgaaagc

SEQ ID NO: 45620 - DNA, 51 bp, synthetic construct
  source 1..51: mol_type = other DNA
aatatagacttttttacgcgcatcttcgaacgatggattatcggtaacgag

SEQ ID NO: 45621 - DNA, 45 bp, synthetic construct
  source 1..45: mol_type = other DNA
aagctgagcgctacctaccccacattcattgacgccatctttggg

SEQ ID NO: 45622 - DNA, 165 bp, synthetic construct
  source 1..165: mol_type = other DNA
gagctctccgggatgatttccggattcctggctagcaacagctaccgggatatcaacaactctctgacaatggtttcgacatatctgccttggaagttcgacatcaactccattagcgccagcatgaactctagtctgcaacaagtcgggtcctacgtcctgaat

SEQ ID NO: 45623 - DNA, 105 bp, synthetic construct
  source 1..105: mol_type = other DNA
gtcaccggcaactacaatgtgcttgccaagctgatcgagatgtttagcgttagcaactgctacaaatatctgatcttcaacgtgtctccaacatacgctcatctg

SEQ ID NO: 45624 - DNA, 33 bp, synthetic construct
  source 1..33: mol_type = other DNA
ggcttcaagttttcatactacttctatcgtaat

SEQ ID NO: 45625 - DNA, 36 bp, synthetic construct
  source 1..36: mol_type = other DNA
aacatcaccttcattcacctgcacggtgacctcggt

SEQ ID NO: 45626 - DNA, 168 bp, synthetic construct
  source 1..168: mol_type = other DNA
gagatcatgacaattttaagcggcacattgagcagctctatgtacgtcgatattaatagcttactctcctctctgtccacctacctgccttggaatttcgacattaactctatttccgcctcaataaccagctccctccaagacataggcaaatatgtgcttgactac

SEQ ID NO: 45627 - DNA, 48 bp, synthetic construct
  source 1..48: mol_type = other DNA
agctacaccaaggtgactacatccatcttcctcattcccctgtttggc

SEQ ID NO: 45628 - DNA, 45 bp, synthetic construct
  source 1..45: mol_type = other DNA
ctgagcttcacctctatcatgatgcggtcctactacaagaaccac

SEQ ID NO: 45629 - DNA, 36 bp, synthetic construct
  source 1..36: mol_type = other DNA
cggttcgtgaaggtctttatcaatagcaacggcgga

SEQ ID NO: 45630 - DNA, 159 bp, synthetic construct
  source 1..159: mol_type = other DNA
atcgctatcctgtccggagctagttcgtcgtctacctacgctgacattaacgccctgttttcgtccatttccgcctacttgccttggtctttcgacgtcaattctatctccacttctgtaaatagcagtatacaggagattgggcgctatgtgctgaat

SEQ ID NO: 45631 - DNA, 45 bp, synthetic construct
  source 1..45: mol_type = other DNA
atcaagcactacctctacgactctgacatcctcatttccgttacc

SEQ ID NO: 45632 - DNA, 33 bp, synthetic construct
  source 1..33: mol_type = other DNA
aaccggagcgccaataccgaggctatcatcaac

SEQ ID NO: 45633 - DNA, 72 bp, synthetic construct
  source 1..72: mol_type = other DNA
taccacgtttatgtaaacggagcgccagcaaatgttcggtgcctgattatcatgatcggcggtctcattggg

SEQ ID NO: 45634 - DNA, 33 bp, synthetic construct
  source 1..33: mol_type = other DNA
acccctaaggccatcagcttcccctttgcccag

SEQ ID NO: 45635 - DNA, 177 bp, synthetic construct
  source 1..177: mol_type = other DNA
gagatttctatcttcgcctcttgggttctggccaacaactacaatacagacgtgaccagtgcaatctcccaaatcagtgcttatcttcctagcggcgtggacgtgaattcattaaactcgttcattgattccaccatcaagaacgtcgggtcttacgtcctgaactactccgtgaag

SEQ ID NO: 45636 - DNA, 84 bp, synthetic construct
  source 1..84: mol_type = other DNA
atggagctcaacctggtcgactccatctactatagtgtcatcaccatggcgacagtcggatatggcgattacattcctcataca

SEQ ID NO: 45637 - DNA, 33 bp, synthetic construct
  source 1..33: mol_type = other DNA
tactacttcaccaactacgattttgacatcagc

SEQ ID NO: 45638 - DNA, 36 bp, synthetic construct
  source 1..36: mol_type = other DNA
aataagagcactaacaccgagacattctttgctccc

SEQ ID NO: 45639 - DNA, 57 bp, synthetic construct
  source 1..57: mol_type = other DNA
aagtaccacgtatacgttggggacacccctgccaacgtccgttgcctgatcatcatg

SEQ ID NO: 45640 - DNA, 30 bp, synthetic construct
  source 1..30: mol_type = other DNA
acccctgactacattagctttcccttcatt

SEQ ID NO: 45641 - DNA, 69 bp, synthetic construct
  source 1..69: mol_type = other DNA
cccatcattaccggcaatgccagcatcgagcggattctgatgctgaaggaccacctctactacaacatc

SEQ ID NO: 45642 - DNA, 33 bp, synthetic construct
  source 1..33: mol_type = other DNA
gtgaagcccggcatcaattacctaagctacatt

SEQ ID NO: 45643 - DNA, 51 bp, synthetic construct
  source 1..51: mol_type = other DNA
aatatctccttcttcaacctgctctttaggaaatggattgtcggcaacgag

SEQ ID NO: 45644 - DNA, 48 bp, synthetic construct
  source 1..48: mol_type = other DNA
ggccagatgcaggtctacatgatcagccaagtgaagttgccactgaca

SEQ ID NO: 45645 - DNA, 39 bp, synthetic construct
  source 1..39: mol_type = other DNA
cgggtcttatccgttgacaacttcgccctgggatacagt

SEQ ID NO: 45646 - DNA, 66 bp, synthetic construct
  source 1..66: mol_type = other DNA
ctgaacccctcatattcgatacctgagttcaccacgcaagggatgtatttcaccgacaaatccatt

SEQ ID NO: 45647 - DNA, 90 bp, synthetic construct
  source 1..90: mol_type = other DNA
tttttccacgggcagccgcaacttgccgctatctacggagccgcccctgcggtagctgtaaatgaaatggctaccgtcttggttggacct

SEQ ID NO: 45648 - DNA, 84 bp, synthetic construct
  source 1..84: mol_type = other DNA
attaccaactccggcggcgcctatccctataactacaagaccgtcctctctagcttcctgctgcttaacgggatcggatatgtg

SEQ ID NO: 45649 - DNA, 45 bp, synthetic construct
  source 1..45: mol_type = other DNA
ttcaacgggtttcagcccacgcaaatcatgaagtaccctcctacc

SEQ ID NO: 45650 - DNA, 30 bp, synthetic construct
  source 1..30: mol_type = other DNA
ttctatccctacgtgaccacaagcctgaag

SEQ ID NO: 45651 - DNA, 60 bp, synthetic construct
  source 1..60: mol_type = other DNA
gttctgaagaccaaccccgtcggcgtgctggattgggcattaggcaaaggcgtgacatgg

SEQ ID NO: 45652 - DNA, 39 bp, synthetic construct
  source 1..39: mol_type = other DNA
aacaccttttacactacaagttctttctcgtaccatagc

SEQ ID NO: 45653 - DNA, 78 bp, synthetic construct
  source 1..78: mol_type = other DNA
atcaccaagggaaactacccctatagcttctctacaatcctgcggtccttcctgctcctggacgggattggatacgtg

SEQ ID NO: 45654 - DNA, 45 bp, synthetic construct
  source 1..45: mol_type = other DNA
tacaaccagattcaggctacacaaataatgaagtatcctcctacc

SEQ ID NO: 45655 - DNA, 33 bp, synthetic construct
  source 1..33: mol_type = other DNA
tacatcaacgtcgggttcgggatcgacattaac

SEQ ID NO: 45656 - DNA, 33 bp, synthetic construct
  source 1..33: mol_type = other DNA
cacaagctgaacatgcccacactccttgatcct

SEQ ID NO: 45657 - DNA, 72 bp, synthetic construct
  source 1..72: mol_type = other DNA
gtgcacatgaacgtgaacaatgcccccgcaaatattaggtgcttggtcgtgatgatctccggactgttcggc

SEQ ID NO: 45658 - DNA, 30 bp, synthetic construct
  source 1..30: mol_type = other DNA
aacattgtgttcggcatcgactttaagccc

SEQ ID NO: 45659 - DNA, 36 bp, synthetic construct
  source 1..36: mol_type = other DNA
agccacaagctgaacatgcctaccctcctcgatccc

SEQ ID NO: 45660 - DNA, 72 bp, synthetic construct
  source 1..72: mol_type = other DNA
gtgcacatgaacgttaataatgctcccgctaacatcagatgcctcgtggttatgataagcggccttttcggg

SEQ ID NO: 45661 - DNA, 30 bp, synthetic construct
  source 1..30: mol_type = other DNA
accccacctgacatcagctttcctttcgtc

SEQ ID NO: 45662 - DNA, 93 bp, synthetic construct
  source 1..93: mol_type = other DNA
tacgcacctgaccccattccatttcatcgtgtttgggacgtcatatgtggtcgggggacctgggctgacgggttgatcgttccaatgaacgcc

SEQ ID NO: 45663 - DNA, 69 bp, synthetic construct
  source 1..69: mol_type = other DNA
atttccggcgacaagatggaggacatcgtgttttggaccatggggagcctgtctcgagccgatttcggc

SEQ ID NO: 45664 - DNA, 87 bp, synthetic construct
  source 1..87: mol_type = other DNA
ctgagcaccttctatcccacatttatcgacgccatctacggcctctccaatccgcaaaacgttattaataacattctggctccaaag

SEQ ID NO: 45665 - DNA, 42 bp, synthetic construct
  source 1..42: mol_type = other DNA
attggccccggcgaagttctcaacgcactacaaaccgcagac

SEQ ID NO: 45666 - DNA, 33 bp, synthetic construct
  source 1..33: mol_type = other DNA
tacagcatggccggcgtcccttcttcaatctcc

SEQ ID NO: 45667 - DNA, 165 bp, synthetic construct
  source 1..165: mol_type = other DNA
gagacctctaccctggtatcatgggtcctggccaacaattcttactcggatgtgaatcagatcatctccgatattagcaagtacctgcccggcatcaacgtgaccgaagtcaactcctatattgactctgcgatacagaatatcgcttcctacatcctcaactat

SEQ ID NO: 45668 - DNA, 42 bp, synthetic construct
  source 1..42: mol_type = other DNA
cgctactactatattgagggcatctttaagataagcttcgac

SEQ ID NO: 45669 - DNA, 33 bp, synthetic construct
  source 1..33: mol_type = other DNA
aacaagtccaccaatagcgacgccttcatctct

SEQ ID NO: 45670 - DNA, 72 bp, synthetic construct
  source 1..72: mol_type = other DNA
tacattctgttcatcaacgattcttatgtcaatgttcgctcaatggtcgtcatgaccgctggactgttcggg

SEQ ID NO: 45671 - DNA, 30 bp, synthetic construct
  source 1..30: mol_type = other DNA
tctccgcaaaacattagcattccctatgtg

SEQ ID NO: 45672 - DNA, 99 bp, synthetic construct
  source 1..99: mol_type = other DNA
tggatcgatgccggccattcttatagttttagtcaagttatcgacacactgctcggcggcggaacttggggctcccggatcatcattctggacaccaac

SEQ ID NO: 45673 - DNA, 30 bp, synthetic construct
  source 1..30: mol_type = other DNA
ctgtttaccattcccttcatccctggaacc

SEQ ID NO: 45674 - DNA, 66 bp, synthetic construct
  source 1..66: mol_type = other DNA
atcgccggggaccggatggagggtatcgtattctggactgtcgggaatctgggcaacgctaactgg

SEQ ID NO: 45675 - DNA, 33 bp, synthetic construct
  source 1..33: mol_type = other DNA
ctgaagaagaatatcgagatctttcacttcaac

SEQ ID NO: 45676 - DNA, 30 bp, synthetic construct
  source 1..30: mol_type = other DNA
aacatctaccggcaccctctgacaagcttc

SEQ ID NO: 45677 - DNA, 54 bp, synthetic construct
  source 1..54: mol_type = other DNA
ggcaattttttcgacatctaccccaagatgaacctgagctccaccctcgatctg

SEQ ID NO: 45678 - DNA, 39 bp, synthetic construct
  source 1..39: mol_type = other DNA
cccttcttcaagacactgaactttaatagcaccaacatg

SEQ ID NO: 45679 - DNA, 30 bp, synthetic construct
  source 1..30: mol_type = other DNA
agcaccgtgctgggtgacgtcttcccttca

SEQ ID NO: 45680 - DNA, 42 bp, synthetic construct
  source 1..42: mol_type = other DNA
tacggcgccgttcgaagcgttagacacagaggtcgaagaagg

SEQ ID NO: 45681 - DNA, 96 bp, synthetic construct
  source 1..96: mol_type = other DNA
atccctagtggcgagataacctcttacactctctcctatagcctgaacaacctccaacactggggcatcatggtcggtctaacacctacggacact

SEQ ID NO: 45682 - DNA, 69 bp, synthetic construct
  source 1..69: mol_type = other DNA
cccgggatgcttgagaaccagaccctcatgaactttttgcaaatcaaggagatgctgtaccacgttggc

SEQ ID NO: 45683 - DNA, 30 bp, synthetic construct
  source 1..30: mol_type = other DNA
aagttcatcaaatttaggaagcggagacgg

SEQ ID NO: 45684 - DNA, 33 bp, synthetic construct
  source 1..33: mol_type = other DNA
ctgaagcccagcttcgactacttcaactacatc

SEQ ID NO: 45685 - DNA, 54 bp, synthetic construct
  source 1..54: mol_type = other DNA
atcggcgctccacacaacattgtgatgtacacggtatcgaacgtctcctttgag

SEQ ID NO: 45686 - DNA, 51 bp, synthetic construct
  source 1..51: mol_type = other DNA
aacatctcattctttacaagtctcttcgagagatacattgcgggaaatgaa

SEQ ID NO: 45687 - DNA, 69 bp, synthetic construct
  source 1..69: mol_type = other DNA
cccggcatgctcgagaatcagaccctgatgaattttctccaaatcaaggagatgttctaccacatggga

SEQ ID NO: 45688 - DNA, 36 bp, synthetic construct
  source 1..36: mol_type = other DNA
ctgaaggagaacatcctgatcatcaacttcaatatc

SEQ ID NO: 45689 - DNA, 30 bp, synthetic construct
  source 1..30: mol_type = other DNA
aacatatacgctcggcccctggtggctttt

SEQ ID NO: 45690 - DNA, 57 bp, synthetic construct
  source 1..57: mol_type = other DNA
ttcggcaactttttcgacatctaccccaagatgaacttatcgtccacgctggatctg

SEQ ID NO: 45691 - DNA, 39 bp, synthetic construct
  source 1..39: mol_type = other DNA
cccttctttaagacactgactctgagctccaccaacatg

SEQ ID NO: 45692 - DNA, 33 bp, synthetic construct
  source 1..33: mol_type = other DNA
gtgaagcccagcatcaactatctgaactacatc

SEQ ID NO: 45693 - DNA, 51 bp, synthetic construct
  source 1..51: mol_type = other DNA
aatattggattcttccgcgaactgttcacccgatacatcatcgggaacgag

SEQ ID NO: 45694 - DNA, 57 bp, synthetic construct
  source 1..57: mol_type = other DNA
tacttcttcgacatggaggaagccatcaggattatcaccgctaacgagaggttcacc

SEQ ID NO: 45695 - DNA, 36 bp, synthetic construct
  source 1..36: mol_type = other DNA
cggttcgccaagttccacatcaactgcggatacgag

SEQ ID NO: 45696 - DNA, 33 bp, synthetic construct
  source 1..33: mol_type = other DNA
gtgctgccaaaccgggactacctgaactacatc

SEQ ID NO: 45697 - DNA, 54 bp, synthetic construct
  source 1..54: mol_type = other DNA
atcggcgcccctcacaacatcgtgatgtacaccgttagtcatattcctttccag

SEQ ID NO: 45698 - DNA, 51 bp, synthetic construct
  source 1..51: mol_type = other DNA
agcatcccattcttcaactccctttttaagcaatggatcattggtaacgag

SEQ ID NO: 45699 - DNA, 33 bp, synthetic construct
  source 1..33: mol_type = other DNA
attaagcccagcatcgcctatctcgactacatc

SEQ ID NO: 45700 - DNA, 51 bp, synthetic construct
  source 1..51: mol_type = other DNA
aacatccctttcttcaacctgctcttcaagaaatggataatcggcaatgag

SEQ ID NO: 45701 - DNA, 33 bp, synthetic construct
  source 1..33: mol_type = other DNA
atcaagtacattcgctaccgacgccataggaag

SEQ ID NO: 45702 - DNA, 33 bp, synthetic construct
  source 1..33: mol_type = other DNA
gtgaagcccagcctcgactatctgaactacatc

SEQ ID NO: 45703 - DNA, 51 bp, synthetic construct
  source 1..51: mol_type = other DNA
aacataccattctttaacgagctgttcaagacctggatcgtcggcaacgaa

SEQ ID NO: 45704 - DNA, 90 bp, synthetic construct
  source 1..90: mol_type = other DNA
acacccggcgagatccactacaacctgctggcccctgtgctcaagacccttaatgactggggcattatgctgtcctatagccagactgag

SEQ ID NO: 45705 - DNA, 33 bp, synthetic construct
  source 1..33: mol_type = other DNA
ttccagactccgatctcctctggcgttagctcg

SEQ ID NO: 45706 - DNA, 63 bp, synthetic construct
  source 1..63: mol_type = other DNA
attggcaacccccggtctggcatcgccgtgtacatgtcctacctcatctctgagatgagcatc

SEQ ID NO: 45707 - DNA, 66 bp, synthetic construct
  source 1..66: mol_type = other DNA
cccatcatgaccggcaacgagtcactcgagcatatcctgattcttaaggaccacctgtactacatt

SEQ ID NO: 45708 - DNA, 39 bp, synthetic construct
  source 1..39: mol_type = other DNA
gggattttcatcggcggatctcagctggccccaatcaac

SEQ ID NO: 45709 - DNA, 60 bp, synthetic construct
  source 1..60: mol_type = other DNA
gacaatattttgcaattgttgaatataccgtcgaacatcttttaccaagccaaatcctac

SEQ ID NO: 45710 - DNA, 45 bp, synthetic construct
  source 1..45: mol_type = other DNA
gttgggccccagcaaataataggcgctctgcaaacagccgacatc

SEQ ID NO: 45711 - DNA, 33 bp, synthetic construct
  source 1..33: mol_type = other DNA
tacagcatggccggtatcaccgcttctgttagt

SEQ ID NO: 45712 - DNA, 33 bp, synthetic construct
  source 1..33: mol_type = other DNA
gtgcggagcgtcagaacacgcagaaggaggcga

SEQ ID NO: 45713 - DNA, 33 bp, synthetic construct
  source 1..33: mol_type = other DNA
gtgaagcccagcatggattacatcgactatatt

SEQ ID NO: 45714 - DNA, 57 bp, synthetic construct
  source 1..57: mol_type = other DNA
attggcgcccctcacaacatcgtgctgtacaccgctagcaatatcccctttgatagc

SEQ ID NO: 45715 - DNA, 51 bp, synthetic construct
  source 1..51: mol_type = other DNA
tgcattccattctttaacacatttttcaaatcccacatcatgggaaatgag

SEQ ID NO: 45716 - DNA, 108 bp, synthetic construct
  source 1..108: mol_type = other DNA
ggcaggtaccccatttctcccatcgacgtggttaacactattctctgccctatctttcctcaattagaagttaaccctactattaccaccatcgtcttcgagatcaga

SEQ ID NO: 45717 - DNA, 72 bp, synthetic construct
  source 1..72: mol_type = other DNA
atcgccgaccccgatgacaagctccctgagatcgtatactggctgatgggctctctcgcctccattaacgcc

SEQ ID NO: 45718 - DNA, 33 bp, synthetic construct
  source 1..33: mol_type = other DNA
gtgaagcccacactgaactacagcacctacatc

SEQ ID NO: 45719 - DNA, 54 bp, synthetic construct
  source 1..54: mol_type = other DNA
attggcgcccctcacaacatcgtcatgtacaccgtctcacgaatcccatttgag

SEQ ID NO: 45720 - DNA, 51 bp, synthetic construct
  source 1..51: mol_type = other DNA
aacatccctttcttcaacgctctgttcaccaagtggattaccgggaatgaa

SEQ ID NO: 45721 - DNA, 69 bp, synthetic construct
  source 1..69: mol_type = other DNA
atgcccggcgtgatcgagaaccagaccctgatgaactttctgcatattaaggagatgttctaccacatc

SEQ ID NO: 45722 - DNA, 66 bp, synthetic construct
  source 1..66: mol_type = other DNA
cccggcatgctcgaatccaaaaccctgatgaacttccttcaaatcaaggagatgttttaccacatc

SEQ ID NO: 45723 - DNA, 108 bp, synthetic construct
  source 1..108: mol_type = other DNA
ggccggtatccgatatctccaatcgacgtcgtaaatacgatcctgtgccccatctttccacaactcgaagtcaactccaccattacaactattgtatacgaaataagg

SEQ ID NO: 45724 - DNA, 72 bp, synthetic construct
  source 1..72: mol_type = other DNA
atcgccgaccccgatgataaattgcccgagatcgtctactggctgatggggagtctcgcatccattaacgcc

SEQ ID NO: 45725 - DNA, 93 bp, synthetic construct
  source 1..93: mol_type = other DNA
cattcatattaccccacgttcatggaggcgatatacggcctgagcaaccctcaaaatgtaatcaataacatggtgtcgccaccgccttctgtg

SEQ ID NO: 45726 - DNA, 33 bp, synthetic construct
  source 1..33: mol_type = other DNA
gtggctggcttgggacagaccgcaatagcaggg

SEQ ID NO: 45727 - DNA, 57 bp, synthetic construct
  source 1..57: mol_type = other DNA
gagcccttgctgcggacctacggtgctagcggacaggcactcgccgaagccatgaag

SEQ ID NO: 45728 - DNA, 36 bp, synthetic construct
  source 1..36: mol_type = other DNA
agctccattggaggcgaatacgggattgctgctttc

SEQ ID NO: 45729 - DNA, 108 bp, synthetic construct
  source 1..108: mol_type = other DNA
ggcaggtaccccatctcccctgtggacgttgtcaaaacgatcctctctccaatctttccccaattgaaggtcagccagaccatcaccacaattgtcttcgagatcagg

SEQ ID NO: 45730 - DNA, 72 bp, synthetic construct
  source 1..72: mol_type = other DNA
gtggccgacccccaagacaaactgcccgagatcatttactggctcatgggctctttgtcgagtgtaactatt

SEQ ID NO: 45731 - DNA, 108 bp, synthetic construct
  source 1..108: mol_type = other DNA
ggcaggtaccctgtgtcgcctgtcgacgtggtcaagaccctgctctgccccatttttcctcaaatggaagtgtcctctactatcacaaccatcgtttacgaaatcagg

SEQ ID NO: 45732 - DNA, 72 bp, synthetic construct
  source 1..72: mol_type = other DNA
atcgctgaccccgatgacaagttgcctgagatcgtgtactggctgatgggctctctggcctctataaacatg

SEQ ID NO: 45733 - DNA, 45 bp, synthetic construct
  source 1..45: mol_type = other DNA
atgatcaactattacaacatcatcaacaacatcaatagcatggag

SEQ ID NO: 45734 - DNA, 66 bp, synthetic construct
  source 1..66: mol_type = other DNA
cccgacgtgatcggcaaccagaccctggccaatttcctacaaattaaggagatgttctaccacatc

SEQ ID NO: 45735 - DNA, 171 bp, synthetic construct
  source 1..171: mol_type = other DNA
ttcattatctccgggttcttggtcgggtttttctcctccaatccgaatcttgacatcgactccgtgatctcgcaactgtccacatatatccctcaaaatccttttctggacaaaaactctatcgtgcccgctatccaaagcgctggaaaatccgtactgacataccttgtc

SEQ ID NO: 45736 - DNA, 108 bp, synthetic construct
  source 1..108: mol_type = other DNA
ggccggtaccccgttagccccgtggacgtggtcaagaccattctctccccaatcttcccgcaacttaccgtatcatccactatcaacaccatcgtttggcaaatacgc

SEQ ID NO: 45737 - DNA, 72 bp, synthetic construct
  source 1..72: mol_type = other DNA
gtggctgatcccgaggataagctgcctgaaatcgtctactggctgatgggaagtctcgcctccattactatg

SEQ ID NO: 45738 - DNA, 69 bp, synthetic construct
  source 1..69: mol_type = other DNA
atgcccggcgtgatcggcaaccagaccctggccaactttctacaaattaaagagatgttttaccacatt

SEQ ID NO: 45739 - DNA, 168 bp, synthetic construct
  source 1..168: mol_type = other DNA
atttccgggtttctgtctaccttctacgtctccaatcaaaactttgacgtgaacactgttttatcgcaaatcagctactatatccccgacaaccctttcctgaacgagaataacttcgttcaaacgattgagtccgccggcaaatatgtgctcaattacctcgtgtct

SEQ ID NO: 45740 - DNA, 93 bp, synthetic construct
  source 1..93: mol_type = other DNA
attcccagcggcgagattaccagcgacatgctctctagcttcctgaaatctttgcaagattggggcataatggtcggtttcacacctactgac

SEQ ID NO: 45741 - DNA, 33 bp, synthetic construct
  source 1..33: mol_type = other DNA
gtgcagccaacaatcaattacctgaactacatt

SEQ ID NO: 45742 - DNA, 54 bp, synthetic construct
  source 1..54: mol_type = other DNA
atcggcgcccctcataacatcgtgatgttcacggtctctcacattccctttgag

SEQ ID NO: 45743 - DNA, 51 bp, synthetic construct
  source 1..51: mol_type = other DNA
aatattccctttttcaactcgctatttaggcaattcatcactggcaacgag

SEQ ID NO: 45744 - DNA, 108 bp, synthetic construct
  source 1..108: mol_type = other DNA
ggccggtacccaatctcccctatcgacgtgattaacaccctcctgtgccccatcttccctcaatgtgaagttaacagcacaattaccactgtcgtgtttgagatccga

SEQ ID NO: 45745 - DNA, 75 bp, synthetic construct
  source 1..75: mol_type = other DNA
atcgctgaccccgatgacaagctgcctgagatcgtgtactggctgatgggtagcctcgcctccatcaacgacgac

SEQ ID NO: 45746 - DNA, 33 bp, synthetic construct
  source 1..33: mol_type = other DNA
gtgcggcccagcattaactacctgaactacatc

SEQ ID NO: 45747 - DNA, 54 bp, synthetic construct
  source 1..54: mol_type = other DNA
atcggcgctcctcacaacatcgtgatgtatacggtgtctaaaattcccttcgaa

SEQ ID NO: 45748 - DNA, 51 bp, synthetic construct
  source 1..51: mol_type = other DNA
aacattccctttttcaatgcattgttcaccaagtggatcaccgggaacgaa

SEQ ID NO: 45749 - DNA, 54 bp, synthetic construct
  source 1..54: mol_type = other DNA
gatttcatcaccggactgttccccgactttctggccgggaaagacaacgcaggg

SEQ ID NO: 45750 - DNA, 108 bp, synthetic construct
  source 1..108: mol_type = other DNA
ggcaggtatccgattagtcccgtcgacgtgatcaagaccatcctgagtccaatttttccgcaacttactgtctcttccactgtgaacacaattgtctggcaaatccgc

SEQ ID NO: 45751 - DNA, 72 bp, synthetic construct
  source 1..72: mol_type = other DNA
attgccgaccctgacgataagctgcctgagatcgtgtactggctgatgggctctctcgcttctgtgacaatg

SEQ ID NO: 45752 - DNA, 66 bp, synthetic construct
  source 1..66: mol_type = other DNA
cccggcatgcttgagtccaagaccctcatgaacttccttcaaataaaggagatgttctaccatgtg

SEQ ID NO: 45753 - DNA, 33 bp, synthetic construct
  source 1..33: mol_type = other DNA
gtgaagcccagcttcaactacctgaactacatc

SEQ ID NO: 45754 - DNA, 54 bp, synthetic construct
  source 1..54: mol_type = other DNA
attggcgcccctcataacatcgtgctgtatacgagcagtaatatcccctttgag

SEQ ID NO: 45755 - DNA, 51 bp, synthetic construct
  source 1..51: mol_type = other DNA
aacattgctttttttaatctgttcttcaagcaatggattacgggcaacgaa

SEQ ID NO: 45756 - DNA, 66 bp, synthetic construct
  source 1..66: mol_type = other DNA
cccggcgtgctcgagaatcagaccctggccaactttctgcacattaaggagatgttctaccatatc

SEQ ID NO: 45757 - DNA, 108 bp, synthetic construct
  source 1..108: mol_type = other DNA
ggcaggtaccccatctcccctattgacgtgattaacaccatcctgtgccccatctttccacaactcgaagtcagccctacaatcactaccatcgtgttcgagatcagg

SEQ ID NO: 45758 - DNA, 72 bp, synthetic construct
  source 1..72: mol_type = other DNA
gtcgccgatcccgacgacaaactccctgaaatcgtttactggctgatgggcagcctcgctagtgtcactgcc

SEQ ID NO: 45759 - DNA, 54 bp, synthetic construct
  source 1..54: mol_type = other DNA
ctgcaggccacctaccccacattcatggacgccgtgtttgctctcaagaacccc

SEQ ID NO: 45760 - DNA, 87 bp, synthetic construct
  source 1..87: mol_type = other DNA
ctgactaccttctacccaacattcatggacgccatctatggactatccaaccctcaaaatgtcatcaacaatattctgacccctaaa

SEQ ID NO: 45761 - DNA, 66 bp, synthetic construct
  source 1..66: mol_type = other DNA
cccggcatgctcgagaaccagaccctgatgaatttcctgcacattaaggagatgttctaccatatc

SEQ ID NO: 45762 - DNA, 66 bp, synthetic construct
  source 1..66: mol_type = other DNA
cccggcatgctcgagaatcagaccctgatgaactttctacaaatcaaagagatgttttaccacatc

SEQ ID NO: 45763 - DNA, 171 bp, synthetic construct
  source 1..171: mol_type = other DNA
gtcatcagcggggtgctcacggatttcttcgccgcaaatcccaacctcgacattaatagtaccatgagccaattatccgcctacgtcccccaaaaccctttcttcgacgcgaacaacctcgttcccactattcaaagcgccggaaaatatgttttgagctatctggtcggc

SEQ ID NO: 45764 - DNA, 66 bp, synthetic construct
  source 1..66: mol_type = other DNA
cccggcgtgctggaaaataaggtcctcggcaactttctgcatttcaaggagaccttctaccacatc

SEQ ID NO: 45765 - DNA, 108 bp, synthetic construct
  source 1..108: mol_type = other DNA
ggccggtacccaatatcccctatcgacgtcatttccacaattctgtctcccatcttcccgcaactcgaggtgtcaagtaccgtgaccactatcgtgttcgagatccga

SEQ ID NO: 45766 - DNA, 72 bp, synthetic construct
  source 1..72: mol_type = other DNA
atcgcagaccccgatgacaaactccctgaaattgtctactggcttatgggatcactcgcatcaatcaacgct

SEQ ID NO: 45767 - DNA, 207 bp, synthetic construct
  source 1..207: mol_type = other DNA
gacctcagccctatcgaccccgtctccgtgtacctcaagggcgccgctgtgtctgaggcccagcggaccatcctagaacaatacttcggcgtcaacgtgccactgcacactaaaatctttcattggctggtcgacctgttccaaggcaacctcgggaccagtctgatattcagagcacccgtgctggatgtgataatcaaaattcag

SEQ ID NO: 45768 - DNA, 93 bp, synthetic construct
  source 1..93: mol_type = other DNA
gccgtgtacctgggctggttccccatcggctttggagtccccattggggtctcctccaatgacgccaccttcgcccaatgggcttctagactc

SEQ ID NO: 45769 - DNA, 72 bp, synthetic construct
  source 1..72: mol_type = other DNA
gagcaagtattcagttatcccggaattggccagacagctgttgctgccgggctgcagtctgatgtgcctctc

SEQ ID NO: 45770 - DNA, 108 bp, synthetic construct
  source 1..108: mol_type = other DNA
ggccggtaccccatttcccctgtggacgtggtatccactctgctctctccaatctttccgcaaatggaggtatcaagcacgatcaccaccattgtcttcgagatccgg

SEQ ID NO: 45771 - DNA, 72 bp, synthetic construct
  source 1..72: mol_type = other DNA
atcgccgaccccgacgataaactgcctgagattgtgtattggctcatgggatcactcgcatccatcaacgct

SEQ ID NO: 45772 - DNA, 33 bp, synthetic construct
  source 1..33: mol_type = other DNA
gtgcagcccaacgtgaactacctgaactacatc

SEQ ID NO: 45773 - DNA, 57 bp, synthetic construct
  source 1..57: mol_type = other DNA
attggcgcccctcacaacatcgtgatgtatactgtgtctaaaatccccttcgatacg

SEQ ID NO: 45774 - DNA, 51 bp, synthetic construct
  source 1..51: mol_type = other DNA
aacatcagctttttcaactccctcttcacccgctggattgccggcaacgaa

SEQ ID NO: 45775 - DNA, 66 bp, synthetic construct
  source 1..66: mol_type = other DNA
cccggcatgattgagaatcagaccctgatgaacttcctcaagatcaaggagatgttctaccacatc

SEQ ID NO: 45776 - DNA, 165 bp, synthetic construct
  source 1..165: mol_type = other DNA
tctggaatgcttaacgactttttcatgagcaaccccaacctggatattaattacgccataagccaaatttccatgtatatcccacaaaaccccttcttcgacggcaacaacattgtgccggcaatcggggacggcgccaaatacgttttgaactaccttgtctct

SEQ ID NO: 45777 - DNA, 69 bp, synthetic construct
  source 1..69: mol_type = other DNA
atgcccggcgtcatcggcaaccagaccctggccaattttctgcaaattaaagagatgttctaccatgtc

SEQ ID NO: 45778 - DNA, 33 bp, synthetic construct
  source 1..33: mol_type = other DNA
gtgcggcccagcatcaactacctgaactacatt

SEQ ID NO: 45779 - DNA, 51 bp, synthetic construct
  source 1..51: mol_type = other DNA
aacattcctttcttcaatgctttgtttacgaaatggatcggaggcaacgag

SEQ ID NO: 45780 - DNA, 69 bp, synthetic construct
  source 1..69: mol_type = other DNA
atgcccggcaccctcgagaacaagacactgatgaactttctccaaatcaaggaaatgttctaccacatt

SEQ ID NO: 45781 - DNA, 33 bp, synthetic construct
  source 1..33: mol_type = other DNA
gtgcggcccagcctggactacctgaactacatc

SEQ ID NO: 45782 - DNA, 54 bp, synthetic construct
  source 1..54: mol_type = other DNA
atcggcgcccctcacaatatcgtcatgtacacggtctcgaagattcccttcgag

SEQ ID NO: 45783 - DNA, 51 bp, synthetic construct
  source 1..51: mol_type = other DNA
aacattcccttctttaacgccctcttcacgagatggatcgttggaaatgag

SEQ ID NO: 45784 - DNA, 108 bp, synthetic construct
  source 1..108: mol_type = other DNA
ggccggtaccctatttctcccgtggacgtgatcaagacaatcctctcccctatttttcctcaattagagatcaaccccactatcaccaccatcgtcttcgagatcagg

SEQ ID NO: 45785 - DNA, 72 bp, synthetic construct
  source 1..72: mol_type = other DNA
atcgccgatcccgacgacaaacttcccgagatcgtctattggttgatgggcagcttggcctccatcaacgca

SEQ ID NO: 45786 - DNA, 33 bp, synthetic construct
  source 1..33: mol_type = other DNA
gtgcccgtcaacatggactacttcaactacatc

SEQ ID NO: 45787 - DNA, 54 bp, synthetic construct
  source 1..54: mol_type = other DNA
atcggcgctcctcacaatattgtgctgtatacggctgcggacattcccttcgag

SEQ ID NO: 45788 - DNA, 51 bp, synthetic construct
  source 1..51: mol_type = other DNA
aatattgcatttttctcatcactattcggcaaatggatcgttggaaacgag

SEQ ID NO: 45789 - DNA, 93 bp, synthetic construct
  source 1..93: mol_type = other DNA
aacgctagcggcgagataaatatcgatatattcggggcagtgctgaacgtatttcaaagtgtcggtgccatggtcggctatgaccaagtggac

SEQ ID NO: 45790 - DNA, 108 bp, synthetic construct
  source 1..108: mol_type = other DNA
ggcaggtacccagtgtctcccgtggacgtggtcaagacgatcctatccccaatcttcccacaacttagtgtttcctccactgtcaacacaatcgtctggcaaatcaga

SEQ ID NO: 45791 - DNA, 72 bp, synthetic construct
  source 1..72: mol_type = other DNA
atcgccgaccccgaggacaagctgcctgagattgtgtactggctgatgggctccctggcttctgtgacgatg

SEQ ID NO: 45792 - DNA, 90 bp, synthetic construct
  source 1..90: mol_type = other DNA
aatgccagcggccagatcaacatcgacatcctgggactgattctcaagacgttccaagattggggcattatggtcggctacaaccaagtg

SEQ ID NO: 45793 - DNA, 36 bp, synthetic construct
  source 1..36: mol_type = other DNA
atttggagcaataccgagatcctgaactacaagatc

SEQ ID NO: 45794 - DNA, 33 bp, synthetic construct
  source 1..33: mol_type = other DNA
gtgtacagcccgtcccaaccactgtccaagttc

SEQ ID NO: 45795 - DNA, 57 bp, synthetic construct
  source 1..57: mol_type = other DNA
aactacgagacattctatttatatgacaatctgatgctgaccagcaagctttctctc

SEQ ID NO: 45796 - DNA, 30 bp, synthetic construct
  source 1..30: mol_type = other DNA
tacttcaagggcgtgcactatagcggtacc

SEQ ID NO: 45797 - DNA, 36 bp, synthetic construct
  source 1..36: mol_type = other DNA
tcctctaagaacgttttccaatttagtatcagtgac

SEQ ID NO: 45798 - DNA, 36 bp, synthetic construct
  source 1..36: mol_type = other DNA
aacagcatcgccaatgacttcctgtccctggaaccc

SEQ ID NO: 45799 - DNA, 69 bp, synthetic construct
  source 1..69: mol_type = other DNA
tccctggactatggctcgtactcctctaacgtccggaccatgactgttatgatggccggaatgttcggc

SEQ ID NO: 45800 - DNA, 96 bp, synthetic construct
  source 1..96: mol_type = other DNA
cggtaccactccttctatgactctatttattcaatcacattgggtcaaattttcaacgctctgattttcaatgcctacacctacggtccacatctg

SEQ ID NO: 45801 - DNA, 42 bp, synthetic construct
  source 1..42: mol_type = other DNA
tttatcggattcaagcacattcctatcacctactatcggaac

SEQ ID NO: 45802 - DNA, 36 bp, synthetic construct
  source 1..36: mol_type = other DNA
ctgttcgttcaaggggtctgcaaccagacagctacc

SEQ ID NO: 45803 - DNA, 51 bp, synthetic construct
  source 1..51: mol_type = other DNA
gtgttcacgggaggttacgtcgctcacgacaagattactgtgtctgccttt

SEQ ID NO: 45804 - DNA, 33 bp, synthetic construct
  source 1..33: mol_type = other DNA
gtgaagcccagcatcaactatctgggctacatc

SEQ ID NO: 45805 - DNA, 57 bp, synthetic construct
  source 1..57: mol_type = other DNA
atcggcgcccctcacaacattgtgatgtatacggtttccaatatcccctttgagtct

SEQ ID NO: 45806 - DNA, 51 bp, synthetic construct
  source 1..51: mol_type = other DNA
aatattccattcttcaactctttgttcaccaagtggatagtcggtaacgag

SEQ ID NO: 45807 - DNA, 51 bp, synthetic construct
  source 1..51: mol_type = other DNA
atcatgtgggagagctctggagactccttctatatccttccatctgtgtca

SEQ ID NO: 45808 - DNA, 156 bp, synthetic construct
  source 1..156: mol_type = other DNA
gtcgcttctgtactgtccgatttcctgctgaaccagaacatcgacttcaatctcatcttaactcaaataaactcctatatcccccaaaactcgtttatagactcaacctctattaacgggatcattaagagtgccggaagctacgtgctgaactat

SEQ ID NO: 45809 - DNA, 48 bp, synthetic construct
  source 1..48: mol_type = other DNA
aagatgcaagtttacctaatctctcggattaagctcagcctgacatcc

SEQ ID NO: 45810 - DNA, 33 bp, synthetic construct
  source 1..33: mol_type = other DNA
gtcatcccgtcttgggactatcttggctacatt

SEQ ID NO: 45811 - DNA, 54 bp, synthetic construct
  source 1..54: mol_type = other DNA
atcggcgcccctcacaatatcgtcatgtacactgtctctaacatccccttccag

SEQ ID NO: 45812 - DNA, 51 bp, synthetic construct
  source 1..51: mol_type = other DNA
aacattccctacctgagcctcctgcttaaaaagtggataatcggcaatgaa

SEQ ID NO: 45813 - DNA, 159 bp, synthetic construct
  source 1..159: mol_type = other DNA
atgtacaacttcgtgacctggatcctggctaacgacgtgtcaataaacaacgccttagatcaagtttcgatgtacctgcccgcaaatgcctcctccatcaatagctacatcgaaggttctcttaacgatgtcggcaactacattctgaactacagtgtc

SEQ ID NO: 45814 - DNA, 90 bp, synthetic construct
  source 1..90: mol_type = other DNA
agcgcctccggcgagatcaacattgatatcctgggcctcatcctcaagacgttccaagactggggcattatggtcggatacgaacaagtg

SEQ ID NO: 45815 - DNA, 42 bp, synthetic construct
  source 1..42: mol_type = other DNA
ctggactttaccttcgagaaggtcctccggttcaacatcaat

SEQ ID NO: 45816 - DNA, 30 bp, synthetic construct
  source 1..30: mol_type = other DNA
ggcgtcgtgaatgacaacttcgtgcttgag

SEQ ID NO: 45817 - DNA, 69 bp, synthetic construct
  source 1..69: mol_type = other DNA
accaagaacctgggacacagctccgccaacgtccggacaatgaccgtgatgatcgctgggatgttcggc

SEQ ID NO: 45818 - DNA, 51 bp, synthetic construct
  source 1..51: mol_type = other DNA
agtatcagcgtgtttcgcgcattcttcaaacaatgcacggtcggtaacgag

SEQ ID NO: 45819 - DNA, 54 bp, synthetic construct
  source 1..54: mol_type = other DNA
gtgtacagcaccttcatgattgagcttggcaagggaggcgctatctgcgaagtt

SEQ ID NO: 45820 - DNA, 51 bp, synthetic construct
  source 1..51: mol_type = other DNA
aacatctccgtgtttaaagcactgtttaagcaatgtattgttggaaacgaa

SEQ ID NO: 45821 - DNA, 93 bp, synthetic construct
  source 1..93: mol_type = other DNA
aattacgggctgcattacttcggcggctacgagcccatgctggacaacgtgaccaacgtcatgttccaccctgccataacgtattcatttacg

SEQ ID NO: 45822 - DNA, 78 bp, synthetic construct
  source 1..78: mol_type = other DNA
gctatgactgggtccgtgaacatcacggacatagcagcagccgtacacaatggcctggtggatgtgacctcacctgtg

SEQ ID NO: 45823 - DNA, 99 bp, synthetic construct
  source 1..99: mol_type = other DNA
gactggatcttctcttgctggcgcatcaggttccactggagcggctattggtcatggtactcaatattcaataactgtcggtccttccctggattcgag

SEQ ID NO: 45824 - DNA, 45 bp, synthetic construct
  source 1..45: mol_type = other DNA
tttgtgaccggcgtctaccccgacttcctggccaaggattctggg

SEQ ID NO: 45825 - DNA, 33 bp, synthetic construct
  source 1..33: mol_type = other DNA
gtgaagccctccgttaactacctgaactacatc

SEQ ID NO: 45826 - DNA, 54 bp, synthetic construct
  source 1..54: mol_type = other DNA
attggcgccccacacaacatcgtcatgtacacggtctcaaaaatcccctttgag

SEQ ID NO: 45827 - DNA, 51 bp, synthetic construct
  source 1..51: mol_type = other DNA
aatattccctttttcacatccctcttcgagcgatggatcgtcggcaatgaa

SEQ ID NO: 45828 - DNA, 72 bp, synthetic construct
  source 1..72: mol_type = other DNA
gtcagcgccaagtctctctatctttccgacataatcaaataccaaatggccaacgggccgttgctcttcaca

SEQ ID NO: 45829 - DNA, 39 bp, synthetic construct
  source 1..39: mol_type = other DNA
atgatcgagtacaatagcatcctgttcaccaacatcaac

SEQ ID NO: 45830 - DNA, 33 bp, synthetic construct
  source 1..33: mol_type = other DNA
gtgaagcctaccatcaactatcttgactacatt

SEQ ID NO: 45831 - DNA, 51 bp, synthetic construct
  source 1..51: mol_type = other DNA
aatatctcttacttcaacgagttgttcaagacatggatcagcggcaacgaa

SEQ ID NO: 45832 - DNA, 33 bp, synthetic construct
  source 1..33: mol_type = other DNA
gtgaagcccagctccaactacctgaactacatc

SEQ ID NO: 45833 - DNA, 54 bp, synthetic construct
  source 1..54: mol_type = other DNA
atcggcgcccctcacaacatcgtcatgtacaccgtttccaaaattccctttggg

SEQ ID NO: 45834 - DNA, 51 bp, synthetic construct
  source 1..51: mol_type = other DNA
aatatcccatttttcacaagccttttcgagagatgggtggcgggcaacgag

SEQ ID NO: 45835 - DNA, 162 bp, synthetic construct
  source 1..162: mol_type = other DNA
tacgaagtctactcggtcgccgcttcattcatggcgtccaattattacgtcaacttggaccaattcataagccagctgccaatcgatatggggtccgttaacaatactgtcaattcctcaatcaatgaaatcgctaaatacctgctctcttattctgtgtct

SEQ ID NO: 45836 - DNA, 42 bp, synthetic construct
  source 1..42: mol_type = other DNA
accgacaagggcttctccttcaacatctttagtcaacagtac

SEQ ID NO: 45837 - DNA, 75 bp, synthetic construct
  source 1..75: mol_type = other DNA
gccatcatgcccaagaacttcgctctggactactccgccacgcaaagcgctgtcctcgcaagctgggtagacgtg

SEQ ID NO: 45838 - DNA, 33 bp, synthetic construct
  source 1..33: mol_type = other DNA
aacccctttttcacatctcttccgaggaacggg

SEQ ID NO: 45839 - DNA, 39 bp, synthetic construct
  source 1..39: mol_type = other DNA
accgacaagggcttctcctacaatatattttctcaatat

SEQ ID NO: 45840 - DNA, 81 bp, synthetic construct
  source 1..81: mol_type = other DNA
accggtgccatcatgccaaagaatttcgcccttgactacgaagctacccaatccgtggtacttgattcatgggtcgacatt

SEQ ID NO: 45841 - DNA, 30 bp, synthetic construct
  source 1..30: mol_type = other DNA
ccctttttcacatcgctacctaggaacgcc

SEQ ID NO: 45842 - DNA, 156 bp, synthetic construct
  source 1..156: mol_type = other DNA
gagattagctccgtgatcacctccttcctcgctagtaactactatctggatctgaatcagttcataagccagctgcctgtggacattaatagtattaactcatccatcaactctagcgcttcggagattggaaagtaccttctacaatacacggtg

SEQ ID NO: 45843 - DNA, 33 bp, synthetic construct
  source 1..33: mol_type = other DNA
ctgggcacttattcggacccagtgaacagtacc

SEQ ID NO: 45844 - DNA, 30 bp, synthetic construct
  source 1..30: mol_type = other DNA
atcttccacgatctggcggcagccgaggag

SEQ ID NO: 45845 - DNA, 84 bp, synthetic construct
  source 1..84: mol_type = other DNA
ctggctgccgcctatcccacattcatggacgccatctatgctctgtcaaaccctcaaaacgtgattaacaacatcctgactccc

SEQ ID NO: 45846 - DNA, 33 bp, synthetic construct; identical to SEQ ID NO: 45781
  source 1..33: mol_type = other DNA

SEQ ID NO: 45847 - DNA, 51 bp, synthetic construct
  source 1..51: mol_type = other DNA
atcggggctcctcacaacattgttatgtacaccgtgtccaagattcccttt

SEQ ID NO: 45848 - DNA, 51 bp, synthetic construct
  source 1..51: mol_type = other DNA
aacattccatttttcaatgtactgttcaccaagagcattgccggaaacgag

SEQ ID NO: 45849 - DNA, 48 bp, synthetic construct
  source 1..48: mol_type = other DNA
ctgagcattttcaatatcgccaacccctaccacgtgaaggtcgttaca

SEQ ID NO: 45850 - DNA, 30 bp, synthetic construct
  source 1..30: mol_type = other DNA
tggcagcacggcgaacaagtcaacggtgtc

SEQ ID NO: 45851 - DNA, 42 bp, synthetic construct
  source 1..42: mol_type = other DNA
accgacattggctttagcttcaacatcttttcccaatactcc

SEQ ID NO: 45852 - DNA, 81 bp, synthetic construct
  source 1..81: mol_type = other DNA
accggggccatcatgccgaagtcctttgctctggatttcgaagctacgcaatcggtcgtactggatagctgggttgacatt

SEQ ID NO: 45853 - DNA, 36 bp, synthetic construct
  source 1..36: mol_type = other DNA
gaccccttcttcatcggctggaggagaaccggaatt

SEQ ID NO: 45854 - DNA, 162 bp, synthetic construct
  source 1..162: mol_type = other DNA
tacgaactttcaagcgtgattacttccatgatggctaacaattactacgccgatatcgacaagttcattagccagctccctatcgacatggggtctatcaattcttccatcaactcctctcttaacgaaatcggaaaatacgtcttacaatacgcagtgacc

SEQ ID NO: 45855 - DNA, 60 bp, synthetic construct
  source 1..60: mol_type = other DNA
aaccggaccggcgcccacaagattttcctgtggaataacttcttcatcacattcgaagcc

SEQ ID NO: 45856 - DNA, 60 bp, synthetic construct
  source 1..60: mol_type = other DNA
aagggcgtcgggatgataaatatctgcccttccatcgatttttcctttagcaacttgccc

SEQ ID NO: 45857 - DNA, 159 bp, synthetic construct
  source 1..159: mol_type = other DNA
tacgagatcagctctgtcatcacaacctttctcgcttccaactattacttcgacctgagtcacttcatctctcaacttcccatcgacactaattcgattaacagctccattaatagctctgccaccgagattggcaagtaccttctccaatatacagtc

SEQ ID NO: 45858 - DNA, 33 bp, synthetic construct
  source 1..33: mol_type = other DNA
gccggcagcgtgctggactacgctatggattat

SEQ ID NO: 45859 - DNA, 30 bp, synthetic construct
  source 1..30: mol_type = other DNA
atgatgacagctggcaccatggaggttgcc

SEQ ID NO: 45860 - DNA, 63 bp, synthetic construct
  source 1..63: mol_type = other DNA
cccattagccacgcattcaatttcatctcggggaatcctgagatgatcgccagaacagcagaa

SEQ ID NO: 45861 - DNA, 33 bp, synthetic construct
  source 1..33: mol_type = other DNA
gtgaagcccagctttgactacttctcctacatc

SEQ ID NO: 45862 - DNA, 51 bp, synthetic construct
  source 1..51: mol_type = other DNA
aacatcccctttttcaacgagctgttcactaagtggatagtcggtaacgag

SEQ ID NO: 45863 - DNA, 120 bp, synthetic construct
  source 1..120: mol_type = other DNA
gtcggggcttatagtgttgggttcgtggagtcctacgaggccctgattgatcacctgctgggcaacgtgcccgctgacgaactcggcaagggggtcgacatgattgtttgggataagagg

SEQ ID NO: 45864 - DNA, 36 bp, synthetic construct
  source 1..36: mol_type = other DNA
tcgggcttttcaatagtgtctggaacctacggtgag

SEQ ID NO: 45865 - DNA, 78 bp, synthetic construct
  source 1..78: mol_type = other DNA
aagctgaccgccagcgaggagtcactggctgagatctacatgtggaacattggcacactcggcaagtcctcttgggac

SEQ ID NO: 45866 - DNA, 51 bp, synthetic construct
  source 1..51: mol_type = other DNA
tgcatcccctttttcaatattttctttaaatctcacatcatgggcaacgaa

SEQ ID NO: 45867 - DNA, 54 bp, synthetic construct
  source 1..54: mol_type = other DNA
atcggcgcccctcacaacatcgtgatgtatacaatatcgaaaattcccttccag

SEQ ID NO: 45868 - DNA, 51 bp, synthetic construct
  source 1..51: mol_type = other DNA
agcatccctttcttcaacgctctgtttacaaagtggatttccggaaacgaa

SEQ ID NO: 45869 - DNA, 60 bp, synthetic construct
  source 1..60: mol_type = other DNA
aatcggacaggcgcccacaagatctatctgtggagcaacttctttgtgacctacgaagca

SEQ ID NO: 45870 - DNA, 60 bp, synthetic construct
  source 1..60: mol_type = other DNA
cacggcgtcggcatgattaacatctacccttccatcgacttccgttttagcaatttgcct

SEQ ID NO: 45871 - DNA, 36 bp, synthetic construct
  source 1..36: mol_type = other DNA
cctaagatcttcaatcccgacgtgaccaactacacc

SEQ ID NO: 45872 - DNA, 69 bp, synthetic construct
  source 1..69: mol_type = other DNA
acctgcaactggacatgtgacaatagctctgacgtgctctccgtcaacgccgatcagttgcaatatgcc

SEQ ID NO: 45873 - DNA, 30 bp, synthetic construct
  source 1..30: mol_type = other DNA
ttcttcggttctcttaacacacctctccag

SEQ ID NO: 45874 - DNA, 60 bp, synthetic construct
  source 1..60: mol_type = other DNA
accatgaagtcctacacgttcgcctggaacaccttcatcggcaccccttccataacatgg

SEQ ID NO: 45875 - DNA, 45 bp, synthetic construct
  source 1..45: mol_type = other DNA
ttcgactacaacaagattaatctcatcaagctgatctacctgaac

SEQ ID NO: 45876 - DNA, 144 bp, synthetic construct
  source 1..144: mol_type = other DNA
ttcgccaccgtggatggcggcgccatctattctgagaataacagtgacgtggtggacagcctgttcaagtttaactccgcctacgtggacggaggcgcaatatattctaaaaagaatgtggctgtcaagaagtccatcttcgat

SEQ ID NO: 45877 - DNA, 48 bp, synthetic construct
  source 1..48: mol_type = other DNA
acctgcgacaaattctccgggatttacctgatcggaagcctgaagtgg

SEQ ID NO: 45878 - DNA, 51 bp, synthetic construct
  source 1..51: mol_type = other DNA
acattttttgcaagtcaaatcgccgagaagcacagctggattacctacctc

SEQ ID NO: 45879 - DNA, 42 bp, synthetic construct
  source 1..42: mol_type = other DNA
ctcggcctggcaatcattaaggagctttacatcctcaatcca

SEQ ID NO: 45880 - DNA, 72 bp, synthetic construct
  source 1..72: mol_type = other DNA
gtccaatccggtagcatttaccttggagatattgtggcatatcaacaagcccatggccctgtcatcttcaca

SEQ ID NO: 45881 - DNA, 33 bp, synthetic construct
  source 1..33: mol_type = other DNA
tacttcggccctgtggcacttcccaccgaagag

SEQ ID NO: 45882 - DNA, 57 bp, synthetic construct
  source 1..57: mol_type = other DNA
ttccacaagccttatagctacatgtggaacgtgttcattggcaacccttccatcatg

SEQ ID NO: 45883 - DNA, 42 bp, synthetic construct
  source 1..42: mol_type = other DNA
gaccggacatatgggttctcaacactgaccttgatgtaccag

SEQ ID NO: 45884 - DNA, 69 bp, synthetic construct
  source 1..69: mol_type = other DNA
gtgggagacttcaaccatagcatttccttcatctacaacatcctgttcgccgatgtcttgggaggtcct

SEQ ID NO: 45885 - DNA, 81 bp, synthetic construct
  source 1..81: mol_type = other DNA
cccttcttcacatctggtagcctgcttggccgctgggacctttatcatatctacggtggtctgattttctttttctgcggg

SEQ ID NO: 45886 - DNA, 78 bp, synthetic construct
  source 1..78: mol_type = other DNA
ggggccgactttggcacacccgtgctgaacatcttcatcggctatttcattggaaccaataccagctacactgctttc

SEQ ID NO: 45887 - DNA, 33 bp, synthetic construct
  source 1..33: mol_type = other DNA
ctttggggaaaaggactttttagcggaagaggg

SEQ ID NO: 45888 - DNA, 72 bp, synthetic construct
  source 1..72: mol_type = other DNA
gtcaccgcccgctctattttcctgcaagacatcgtcgcttaccaacaagttcacgggcccttccttttcaca

SEQ ID NO: 45889 - DNA, 30 bp, synthetic construct
  source 1..30: mol_type = other DNA
cggcccagcatcggctatctgaactacatt

SEQ ID NO: 45890 - DNA, 51 bp, synthetic construct
  source 1..51: mol_type = other DNA
aacatcccatttttcaccttgatttttaaaaagtggatcgttgggaatgag

SEQ ID NO: 45891 - DNA, 42 bp, synthetic construct
  source 1..42: mol_type = other DNA
cactacggcttcgagatgatattcggatttctcgaatcagcc

SEQ ID NO: 45892 - DNA, 42 bp, synthetic construct
  source 1..42: mol_type = other DNA
gtcacggacattacgagcaaaatcttttacatgatcttcgcc

SEQ ID NO: 45893 - DNA, 132 bp, synthetic construct
  source 1..132: mol_type = other DNA
gagtactacaagtccaatagcacatatctcgatgccctagccgagggtggcttttctcctagtatcctgcaaatctcagccttcgccaacaagaaggacgcgtccggatatgaaagcgcgtacaacgtagaa

SEQ ID NO: 45894 - DNA, 45 bp, synthetic construct
  source 1..45: mol_type = other DNA
cgcgatgcctcatcccgcttcgctaaggaaaacagatggggtagc

SEQ ID NO: 45895 - DNA, 132 bp, synthetic construct
  source 1..132: mol_type = other DNA
cagcaaggcaatgacaacatcggcaactgggcctacaccgatctctatacactgtctcaagtctcagacaccgaaatgagcgcatccttcgctaggctcggtaacaagaatattacttgggaaacaactaca

SEQ ID NO: 45896 - DNA, 96 bp, synthetic construct
  source 1..96: mol_type = other DNA
accaagaagaccaccgatctgcttttctggctccgggtgcccgagtcccagggaactcgcggctactatagcaacgtcggggacctgaggaatacc

SEQ ID NO: 45897 - DNA, 297 bp, synthetic construct
  source 1..297: mol_type = other DNA
aacaagaccgagatactgaaactggacagcacatccaagaaccagtttgggggattttcgcaagcaagtgatatgtcatacacaatgtactggtacaaggagggcggacctctgtacaacggcttcctgccaaaatatgctggcgttaacgagaagggcgaagcgctatactgggtcgacgaggacatcagcgacagcgaacggactggcaggccagctccacggcaagaagatagatgccgcgaagctagagtgcacgatagacctgaggaagaggaccatcacttgcaaggattg

SEQ ID NO: 45898 - DNA, 36 bp, synthetic construct
  source 1..36: mol_type = other DNA
agccagcttatcctggacctcaacacctccctgagc

SEQ ID NO: 45899 - DNA, 57 bp, synthetic construct
  source 1..57: mol_type = other DNA
ctgcggaccgcttgccggaaggccttccaagacatccaaagccaagattcggatgtg

SEQ ID NO: 45900 - DNA, 78 bp, synthetic construct
  source 1..78: mol_type = other DNA
aatgatcagatctatggggccgactccgtgttctatcaaaacaatttcggcaacagcgctctgaacactgctgtttct

SEQ ID NO: 45901 - DNA, 75 bp, synthetic construct
  source 1..75: mol_type = other DNA
gtggtcaaaagctcaagcctactcctgtccgacatcattatctatcaacaaataaatggcccaatcctgttctct

SEQ ID NO: 45902 - DNA, 69 bp, synthetic construct
  source 1..69: mol_type = other DNA
atggccgggtccatcgacctcgctgagattgtcaagtaccaggtggccagcggcccaatcctgttcacc

SEQ ID NO: 45903 - DNA, 96 bp, synthetic construct
  source 1..96: mol_type = other DNA
ctgcacgctacctaccccacattcatggaggccatctatgcactgagtaatcctcaaaacgtaattaacaacatcctgagtcctccaccttctgtg

SEQ ID NO: 45904 - DNA, 57 bp, synthetic construct
  source 1..57: mol_type = other DNA
gacttacactatagctttgccaaggcctttaacctgctggagatggctaccgataac

SEQ ID NO: 45905 - DNA, 57 bp, synthetic construct
  source 1..57: mol_type = other DNA
ggcgatatgacctccatcttctacatcctatatgaccgaattatcagcgtgttggac

SEQ ID NO: 45906 - DNA, 72 bp, synthetic construct
  source 1..72: mol_type = other DNA
accgcagcgcgctccatcttcttgtctgacatagcagcttaccaacacgccaacggtagctttctcttcacc

SEQ ID NO: 45907 - DNA, 57 bp, synthetic construct
  source 1..57: mol_type = other DNA
gacctgcactattctttcgccaaggccttcaacctgctcgagatggctaccgacaat

SEQ ID NO: 45908 - DNA, 57 bp, synthetic construct
  source 1..57: mol_type = other DNA
ggcgacatgacctccatcttctatatcctttacgataggattatcagcgtgcttgat

SEQ ID NO: 45909 - DNA, 72 bp, synthetic construct
  source 1..72: mol_type = other DNA
acagcagctgggtccatcttccttagcgacattgtcgcataccaacaagcaaatggccctttcctcttcacc

SEQ ID NO: 45910 - DNA, 72 bp, synthetic construct
  source 1..72: mol_type = other DNA
accgccgcgagatctatcttcctctcggatattgttagctaccagcaaattcatggcccattcctcttcaca

SEQ ID NO: 45911 - DNA, 72 bp, synthetic construct
  source 1..72: mol_type = other DNA
ctgggcaccgtttaccccactttcatcgatgctatcttcgccctcaagaatccccaaaatgtaattaaccac

SEQ ID NO: 45912 - DNA, 72 bp, synthetic construct
  source 1..72: mol_type = other DNA
accgccagtcgttcaatcttcctccctgacatcgtagcttaccaacatgctcacggtccgttcctgttcact

SEQ ID NO: 45913 - DNA, 72 bp, synthetic construct
  source 1..72: mol_type = other DNA
accgccgctaagagcatcttcctccaagacattgtggcctatcaacaagccaacggcccctttctgttcacc

SEQ ID NO: 45914 - DNA, 30 bp, synthetic construct
  source 1..30: mol_type = other DNA
ggcgtgcccgccaccctgttcagccccacc

SEQ ID NO: 45915 - DNA, 72 bp, synthetic construct
  source 1..72: mol_type = other DNA
accgccgcacggtctatcttcctcaacgacattgttagctaccaacaagcgcacggccctttcctcttcaca

SEQ ID NO: 45916 - DNA, 30 bp, synthetic construct
  source 1..30: mol_type = other DNA
ccccaggccttcgctatccctgctctttcc

SEQ ID NO: 45917 - DNA, 75 bp, synthetic construct
  source 1..75: mol_type = other DNA
atcacacaagcacgtagcattttcctgcccgacatcgtggcttatcaacaagctcacggccctatactcttcacc

SEQ ID NO: 45918 - DNA, 30 bp, synthetic construct
  source 1..30: mol_type = other DNA
ccctataactaccagttcatggccttttcc

SEQ ID NO: 45919 - DNA, 66 bp, synthetic construct
  source 1..66: mol_type = other DNA
ctcagcaagtccatctacctgtctgacattgtggcgtatcaacaagcgcacggacccttcctgttc

SEQ ID NO: 45920 - DNA, 30 bp, synthetic construct
  source 1..30: mol_type = other DNA
cccgaggcctacaagatccctgctctgtct

SEQ ID NO: 45921 - DNA, 78 bp, synthetic construct
  source 1..78: mol_type = other DNA
accgcagctcggagcatctttctccaagatattgtggcatatcagcaaatgaacggccccttttttttcgtattgaca

SEQ ID NO: 45922 - DNA, 72 bp, synthetic construct
  source 1..72: mol_type = other DNA
acagccgctcgatccatcttcctccctgatattgtcgcttatcaacacgcccatggtcccttcctctttacc

SEQ ID NO: 45923 - DNA, 30 bp, synthetic construct
  source 1..30: mol_type = other DNA
ttcggccccctgaacacaaccagtggaatc

SEQ ID NO: 45924 - DNA, 57 bp, synthetic construct
  source 1..57: mol_type = other DNA
ttccacaaaccctatagctatatgtggaacgtgttcatcggcaatccttccatcgcc

SEQ ID NO: 45925 - DNA, 42 bp, synthetic construct
  source 1..42: mol_type = other DNA
cccatcggcgacaacttcaataccgtggagctgatgtaccag

SEQ ID NO: 45926 - DNA, 66 bp, synthetic construct
  source 1..66: mol_type = other DNA
ctgagcaagtccatcttcctcgccgacatcgtggcgtatcagcaagcaaatggcccctttctgttc

SEQ ID NO: 45927 - DNA, 66 bp, synthetic construct
  source 1..66: mol_type = other DNA
gtcgagggctccaaggccgagatgtctggatgcgtgtttgagaacaacagcgctgaggacgatggg

SEQ ID NO: 45928 - DNA, 66 bp, synthetic construct
  source 1..66: mol_type = other DNA
ctgtccaagtctatctacctgagcgagattgtcgcgtatcaacacgcacacggaccagtgctcttc

SEQ ID NO: 45929 - DNA, 204 bp, synthetic construct
  source 1..204: mol_type = other DNA
atgagccccatcaaccctgtcaagacctacattgcaaacctcggcgttgtttcgcccgagaaaatcgccatcctcgagtcctactggggcgttaatgaacccatcaccaccaaaatgttcaactggctggctaatattatccacctcgatttcggcacctctctgatttatcgggccccagtgctggatgtcatcaaggagaag

SEQ ID NO: 45930 - DNA, 87 bp, synthetic construct
  source 1..87: mol_type = other DNA
gtgtacttgggctggttccctactgggctaggcgtgcctgtcggaaccctgagcgagaacgtctcattctgggactggctgcataga

SEQ ID NO: 45931 - DNA, 72 bp, synthetic construct
  source 1..72: mol_type = other DNA
gagcagatcttcacgtaccccgggatcggacaggctgccgtatccgcggggcttcgctctgatgtccctctg

SEQ ID NO: 45932 - DNA, 30 bp, synthetic construct
  source 1..30: mol_type = other DNA
ccccaggcctacaagatccctgctctttct

SEQ ID NO: 45933 - DNA, 72 bp, synthetic construct
  source 1..72: mol_type = other DNA
accgcggcacgcagtatcttcctccaagacattgtcgcctaccaacaagcgaacggcccctttctcttcaca

SEQ ID NO: 45934 - DNA, 72 bp, synthetic construct
  source 1..72: mol_type = other DNA
acagccgcgagatcaattttcctcggggacatcgttgcgtaccaacaaacacacggtccctttctcttcact

SEQ ID NO: 45935 - DNA, 30 bp, synthetic construct
  source 1..30: mol_type = other DNA
atcggcgtgccacctacaatcttctcttgg

SEQ ID NO: 45936 - DNA, 123 bp, synthetic construct
  source 1..123: mol_type = other DNA
atgaagaagtacattaacgaagtaatctacatcttcacaacggcattcctgctctttcttcaaggcctccgggaggccagcgggggaatcctcgataattttttcgcctgcatcaccaacttt

SEQ ID NO: 45937 - DNA, 108 bp, synthetic construct
  source 1..108: mol_type = other DNA
ctcaccgcatgcatttaccggccctgggtcgccgactccaacatcaagccttacgagggcgtgctggatgacgctaccggttatagcttcccatctggacatgctact

SEQ ID NO: 45938 - DNA, 66 bp, synthetic construct
  source 1..66: mol_type = other DNA
ttcaagagctaccccatggattacgacaccgccggcaagctgatcgtcgaccctgtgaaaatggca

SEQ ID NO: 45939 - DNA, 72 bp, synthetic construct
  source 1..72: mol_type = other DNA
accgccgcgaggtcaatcttcttacaagacatcgtggccttccaacaaactcacggccctttcctgtttaca

SEQ ID NO: 45940 - DNA, 60 bp, synthetic construct
  source 1..60: mol_type = other DNA
aatcggacaggcgcccacaagatttatctgtggagcaacttctttatcacctacgaagcc

SEQ ID NO: 45941 - DNA, 60 bp, synthetic construct
  source 1..60: mol_type = other DNA
aagggcgtcggcatgattaatatctacccaagcatcgacttctcgttttcgaatcttccc

SEQ ID NO: 45942 - DNA, 240 bp, synthetic construct
  source 1..240: mol_type = other DNA
ggcagtcgcaagcgcaagggataccttgccaaagcttgcgacatcctgctcgcctaccgagaccccggcaccatttgtggaatcgtccggaacattgggcgcgagggcgaagaagctatggtgctgtctctggagcagctgaggtccactgagccagacatgttcaccaccgtgttcatcggcaacagcacaaccctcgagatcgctggacggatggtgacacctcggggctatcaattg

SEQ ID NO: 45943 - DNA, 72 bp, synthetic construct
  source 1..72: mol_type = other DNA
acagcagccagatcaatctttctccaagacatcgttttgtatcaacaagccaacggaccgttcttgttcacc

SEQ ID NO: 45944 - DNA, 33 bp, synthetic construct
  source 1..33: mol_type = other DNA
atcggcgtgcctgccaccatcatgtctcctagc

SEQ ID NO: 45945 - DNA, 72 bp, synthetic construct
  source 1..72: mol_type = other DNA
accgcggcccgaagcatcttcctccaagatattgtcacataccaacaaatccatggacctttcctctttaca

SEQ ID NO: 45946 - DNA, 30 bp, synthetic construct
  source 1..30: mol_type = other DNA
tttttcggccctttgaccacacctgcacag

SEQ ID NO: 45947 - DNA, 60 bp, synthetic construct
  source 1..60: mol_type = other DNA
ctgcacgggtacaactcccggttcatttggagcgtgttcatcggcgagccatctatcaca

SEQ ID NO: 45948 - DNA, 42 bp, synthetic construct
  source 1..42: mol_type = other DNA
ggctactccaagctggacttcctgagcccacgctatctcaac

SEQ ID NO: 45949 - DNA, 105 bp, synthetic construct
  source 1..105: mol_type = other DNA
atggtttgggattttatacaaaaccaactcctcgggatgaagtggctgtccgtccttatacaaaagttagtgacagcctgtggccttgatgcaacatcaagactg

SEQ ID NO: 45950 - DNA, 42 bp, synthetic construct
  source 1..42: mol_type = other DNA
ccagaacaatggattgagactgcactcggcaataagaaccca

SEQ ID NO: 45951 - DNA, 30 bp, synthetic construct
  source 1..30: mol_type = other DNA
agcgaggcactgctcgctaagggtgctctg

SEQ ID NO: 45952 - DNA, 99 bp, synthetic construct
  source 1..99: mol_type = other DNA
atccggtggtactccgtagagaagatcatctctctcttctacattgacaatattttcgaatacattatctttaacgtcagcccaactggtggacacctg

SEQ ID NO: 45953 - DNA, 42 bp, synthetic construct
  source 1..42: mol_type = other DNA
cttaccgccaacccctatccttactactttaataggtccttc

SEQ ID NO: 45954 - DNA, 72 bp, synthetic construct
  source 1..72: mol_type = other DNA
accgctgctcgatcaatcttcctccaagacatagtgcaataccagcatgtccacggccccttcctcttcacg

SEQ ID NO: 45955 - DNA, 33 bp, synthetic construct
  source 1..33: mol_type = other DNA
tttttcggcccacttacaagtcagacccaggtt

SEQ ID NO: 45956 - DNA, 60 bp, synthetic construct
  source 1..60: mol_type = other DNA
ttgtatcaatacaatagcacccacctgtggaaggtcttcatcggagagccatccatcaca

SEQ ID NO: 45957 - DNA, 39 bp, synthetic construct
  source 1..39: mol_type = other DNA
aactatatcggctccgactggatcagcctgatctaccag

SEQ ID NO: 45958 - DNA, 72 bp, synthetic construct
  source 1..72: mol_type = other DNA
accgcagccggctctatattcctcaaggacattgtggcctaccaacaagcacacggaccattcctctttacg

SEQ ID NO: 45959 - DNA, 75 bp, synthetic construct
  source 1..75: mol_type = other DNA
gtgacacaggcccggagcatcttcctggaagagatcgtcgcgtaccagcaagtacacggcccctttctcttcacc

SEQ ID NO: 45960 - DNA, 72 bp, synthetic construct
  source 1..72: mol_type = other DNA
acagctgctcgctcaatctttctctacgacatcgtggcctatcaacaagcgcacggtccattcctgttcact

SEQ ID NO: 45961 - DNA, 30 bp, synthetic construct
  source 1..30: mol_type = other DNA
ggcgtgcccgctacaatcttctcacctacc

SEQ ID NO: 45962 - DNA, 72 bp, synthetic construct
  source 1..72: mol_type = other DNA
accgccgccggctccattttcctacaagatatagtagcctaccaacaagcgaatgggccgttcctctttacc

SEQ ID NO: 45963 - DNA, 72 bp, synthetic construct
  source 1..72: mol_type = other DNA
accgcggccgggtctatcttcctttccgacatcgtcgcataccagcaagctaacgggcccttcctcttcacc

SEQ ID NO: 45964 - DNA, 201 bp, synthetic construct
  source 1..201: mol_type = other DNA
ctgtccccaatagatccagtcaaggcctacttgggccagaggatcgtgtcccaagagcagctcgctatcatgggcgagtactggggaacgaatctgtccctgggggacagagtgtttggttggctgagtactctagcgtcagggagcatgggcttctccctgatttaccgggtgcccgtgactgaagtaattatgcaaaaa

SEQ ID NO: 45965 - DNA, 87 bp, synthetic construct
  source 1..87: mol_type = other DNA
gtgtacctgggctggttccccatcgggctgagcgtccctattggacagctctccgacaccgtgacattttggcaatggctctaccgc

SEQ ID NO: 45966 - DNA, 72 bp, synthetic construct
  source 1..72: mol_type = other DNA
gagcaggttttcgcgtaccccggaatcggacaggctactgtggctgctggactccgaagcgacgttcctctg

SEQ ID NO: 45967 - DNA, 33 bp, synthetic construct
  source 1..33: mol_type = other DNA
ttcattcaaggtgtcgctaatcattcggctatc

SEQ ID NO: 45968 - DNA, 204 bp, synthetic construct
  source 1..204: mol_type = other DNA
cagctcagtcctattgaccctgtccgcgcctacctggggcagcgcatcgtgtccgaggagcagctggccatcatcggacactattggggcactgagctgtctctgggcgagcgcgtgctcggatggcttcaaacactggctactgggtctatgggattctccctgatttaccgtgtccccgtgaccgaggtcattataagcaaa

SEQ ID NO: 45969 - DNA, 90 bp, synthetic construct
  source 1..90: mol_type = other DNA
gtgtacctgggatggttccccattgggctgtccgtgcctatcggccagctgagcgacaccgtcacaatctgggagtggctcgatagactg

SEQ ID NO: 45970 - DNA, 72 bp, synthetic construct
  source 1..72: mol_type = other DNA
gaacaggttttcgcttatcctgggattggccaagccacagtcgctgcgggactgcggagcgacgtgcctctc

SEQ ID NO: 45971 - DNA, 108 bp, synthetic construct
  source 1..108: mol_type = other DNA
ttcggcgtctatgatataagcatttccgacgctatcggcgtgttcttcgggcacctggccggagacgaggtcgatcccgatgacgacttctacatctgggatacacgc

SEQ ID NO: 45972 - DNA, 36 bp, synthetic construct
  source 1..36: mol_type = other DNA
tctggcatcagcgtgattcctggtttgaccggctcc

SEQ ID NO: 45973 - DNA, 78 bp, synthetic construct
  source 1..78: mol_type = other DNA
ctggtcaccgccccttccgagagcctggccgacgcatatagttggcgcgttggagatttaggccgcgccaactctgga

SEQ ID NO: 45974 - DNA, 30 bp, synthetic construct
  source 1..30: mol_type = other DNA
atccccaagttcgagtacaacctgcctcag

SEQ ID NO: 45975 - DNA, 153 bp, synthetic construct
  source 1..153: mol_type = other DNA
tacgccatcatttataacggattttccatcaacggctacctgagcctgaatccatcccctttcgactacctgatcaatggcatcttctacaacatatttacaccaatcggcgatatgctcgttaagctccagatcaacggatggaatacaagt

SEQ ID NO: 45976 - DNA, 39 bp, synthetic construct
  source 1..39: mol_type = other DNA
atccctcggcccgtgaaccctcctgaaaccgagttggac

SEQ ID NO: 45977 - DNA, 36 bp, synthetic construct
  source 1..36: mol_type = other DNA
ggctactacaagttctataaccccaacatgaacgtg

SEQ ID NO: 45978 - DNA, 204 bp, synthetic construct
  source 1..204: mol_type = other DNA
cagctcagccctattgaccccgtcaaggcatacctggggcagcggatcgttagccaggaacaactcgctattatcggcgagtattggggcaccaacctgtccctgggcgaacgagtcctgggctggctacaaacgcttgcctccggttctatgggattcagcctgatctaccgagcgccggtaactgaggtcataatgcagaag

SEQ ID NO: 45979 - DNA, 90 bp, synthetic construct
  source 1..90: mol_type = other DNA
agcgtgcacctgggatggttccccattgggctgtccgtccctatcggccagctgtctgacactgtcacattctggcaatggttgtaccgg

SEQ ID NO: 45980 - DNA, 72 bp, synthetic construct
  source 1..72: mol_type = other DNA
gagcaagtgtttgcatatcccggtatcggccaggccaccgtcgccgccggactgcgatcagacgttcctctt

SEQ ID NO: 45981 - DNA, 45 bp, synthetic construct
  source 1..45: mol_type = other DNA
acccggagcgacagggtcatagataacgtcatctctggagaatcc

SEQ ID NO: 45982 - DNA, 207 bp, synthetic construct
  source 1..207: mol_type = other DNA
cagctgtccccaatcgaccccgttaaggcctatctcggacaacggatagtgtcacaagagcagctcgccatcattggcgaatactggggcaccaacctgtctctggctgagcgcgttgtcggttggttacaaacgctagcgtcaggttctatggggttcagtctgatctaccgggtccctgtgaccgaagtgattgctcaaaaagcg

SEQ ID NO: 45983 - DNA, 87 bp, synthetic construct
  source 1..87: mol_type = other DNA
gtctacctgggctggttccccatcggactgtccgtgcctattgggcagctcagcgacaccgtgacattttggcaatggttatatcgt

SEQ ID NO: 45984 - DNA, 72 bp, synthetic construct
  source 1..72: mol_type = other DNA
gagcaggttttcgcttatcccgggattggccaggcaactgtcgctgccggcttgcggtctgacgtgcctctc

SEQ ID NO: 45985 - DNA, 204 bp, synthetic construct
  source 1..204: mol_type = other DNA
cagcttagccctatcgaccccgtcaaggcttacctgggccagcggattgtgtcccaagagcaaatcgccatcgtcggcgaatattggggcaccaacctgtccctgggcgagcgcgtgattggatggttgcaaacgctggcctctgggagcatgggattcagtctaatatatcgggttcccgtcactgaggttatagtgcagaaa

SEQ ID NO: 45986 - DNA, 90 bp, synthetic construct
  source 1..90: mol_type = other DNA
gtgtacctgggctggttccctattggactgtccgtccccatcgggcagctgagcgacacagtgaccttttggcaatggaggtacaggttg

SEQ ID NO: 45987 - DNA, 72 bp, synthetic construct
  source 1..72: mol_type = other DNA
gagcaggtcttcgcctaccccgggattggccaggctacggtcgctgccggactgcggagtgatgttcctttg

SEQ ID NO: 45988 - DNA, 204 bp, synthetic construct
  source 1..204: mol_type = other DNA
cagatgagtcccatcgatcccgtaaaagcctatctggggcagaggatcgtgtctcaagagcagatggctatcattggcaactactggggcacaaaccttaccctcggcgagcgggtgctcggctggttgcaaaccttagccaccgggtctatgggattcagcctgatctaccgcgtgcctgtgaccgaggtcataatgcagaaa

SEQ ID NO: 45989 - DNA, 87 bp, synthetic construct
  source 1..87: mol_type = other DNA
gtgtacctgggctggttccctatcggactgagcgtgcccattgggcagctcagcgacaccgtgacgttctggcaatggctgtaccgg

SEQ ID NO: 45990 - DNA, 72 bp, synthetic construct
  source 1..72: mol_type = other DNA
gaacaggtcttcgcttaccctggcatcgggcaggctactgttgctgccggacttcggagtgacgttcctctg

SEQ ID NO: 45991 - DNA, 30 bp, synthetic construct
  source 1..30: mol_type = other DNA
ctgaccttcggcgtggacaacgccgatttt

SEQ ID NO: 45992 - DNA, 72 bp, synthetic construct
  source 1..72: mol_type = other DNA
tctcacaactacacgttttccaatatatgcaatatcatcttcggccattccggcggccttggtgtcacattt

SEQ ID NO: 45993 - DNA, 48 bp, synthetic construct
  source 1..48: mol_type = other DNA
gtgcctcggagccaacttagcggccggcttatctgcctcgggtacttc

SEQ ID NO: 45994 - DNA, 36 bp, synthetic construct
  source 1..36: mol_type = other DNA
gtgaatttcctggcctatatccatcactacaactcc

SEQ ID NO: 45995 - DNA, 36 bp, synthetic construct
  source 1..36: mol_type = other DNA
gagcggctgtactacggcacctatagcgtgcctgac

SEQ ID NO: 45996 - DNA, 207 bp, synthetic construct
  source 1..207: mol_type = other DNA
cagctgtctcccatagatcccgtcaaggcttacctggggcagcggattgtctctcaacaacagctgtccatcatcggcgaatactggggcacaaacctgagcctcggcgaacgagtgctcggctggttgcaaacactcgcctccggatctatgggattcagcctgatctatcgcgtccctgtcaccgaagtgattgtaattcagaaa

SEQ ID NO: 45997 - DNA, 90 bp, synthetic construct
  source 1..90: mol_type = other DNA
gtctacctgggatggttccctatcgggctgagcgtgcccattggccagctgtccgacaccgtgacattttggcaatggtggtacaggcta

SEQ ID NO: 45998 - DNA, 72 bp, synthetic construct
  source 1..72: mol_type = other DNA
gagcaggtttttgcttatcccggaatcggacaggcaactgtcgctgctggactccgctccgatgttcctttg

SEQ ID NO: 45999 - DNA, 204 bp, synthetic construct
  source 1..204: mol_type = other DNA
cagctctcccctatcgaccccgtcaaagcctacctgggccagcggattgtatcgcaagaacagctggccatcgtcggcgagtactggggcaccaacctgagcctcggcgagcgcgtgatgggctggcttactacactggctagtggctccatgggcttcagcctaattttccgagttccagtcaccgaggtcattgtacaaaaa

SEQ ID NO: 46000 - DNA, 90 bp, synthetic construct
  source 1..90: mol_type = other DNA
gtgtacctcggctggttccctatcgggctgagcgtccccattggacagctgtccgacaccgtgacattctggcaatggtatcggaggcta

SEQ ID NO: 46001 - DNA, 72 bp, synthetic construct
  source 1..72: mol_type = other DNA
gagcaggtttttgcgtaccctggcatcgggcaagcgaccgttgccgctggactgaggtctgatgttcctctg

SEQ ID NO: 46002 - DNA, 33 bp, synthetic construct
  source 1..33: mol_type = other DNA
ctggatctgcctgtgcctctcaaggacgattgc

SEQ ID NO: 46003 - DNA, 36 bp, synthetic construct
  source 1..36: mol_type = other DNA
ctctacgatggccggatggagttcatggaccatctg

SEQ ID NO: 46004 - DNA, 33 bp, synthetic construct
  source 1..33: mol_type = other DNA
ttcttcggccccctgaacacccctatcaagatt

SEQ ID NO: 46005 - DNA, 60 bp, synthetic construct
  source 1..60: mol_type = other DNA
tacctgaacggctcctactctaaagtttggaataccttcattgggaatcctagcatcacc

SEQ ID NO: 46006 - DNA, 45 bp, synthetic construct
  source 1..45: mol_type = other DNA
gactacaacaacatcaattatatctcaaagatacaacagaattac

SEQ ID NO: 46007 - DNA, 36 bp, synthetic construct
  source 1..36: mol_type = other DNA
ctgaccaacatggttggttcctatgcgactgggatt

SEQ ID NO: 46008 - DNA, 51 bp, synthetic construct
  source 1..51: mol_type = other DNA
actgatatcatacacctgatttacggacaccaatatgacgcgtcctcttct

SEQ ID NO: 46009 - DNA, 33 bp, synthetic construct
  source 1..33: mol_type = other DNA
tttttcggacccctgacaactcagacccaagtg

SEQ ID NO: 46010 - DNA, 60 bp, synthetic construct
  source 1..60: mol_type = other DNA
tatatgcacggcaactacacccaagtctggaacactttcatcggtaacccaagcatcacc

SEQ ID NO: 46011 - DNA, 39 bp, synthetic construct
  source 1..39: mol_type = other DNA
gactacaacaacattaactttatatcggagatctaccag

SEQ ID NO: 46012 - DNA, 201 bp, synthetic construct
  source 1..201: mol_type = other DNA
atgtcaccaattaaccctgttaagacgtatattagcaacgtgatcattagccaggaacagattgccaccctggaagcatattggggggtcaatgagccgatcactactaagatgatcaattggctcggcaatatcattcatggcgactttggaacaagcctgatatttcgaatcccagtcatcgacgttattaaagaaaga

SEQ ID NO: 46013 - DNA, 87 bp, synthetic construct
  source 1..87: mol_type = other DNA
atctacctcggctggttcccaagcgggctcggtgtccctattggctccctgtctgagaacgtgaccttctgggagtggctgaaccgg

SEQ ID NO: 46014 - DNA, 72 bp, synthetic construct
  source 1..72: mol_type = other DNA
gaacagatcttcacgtaccccggaataggccaggccgcggtgtccgccggactgcggagtgatgttcctctg

SEQ ID NO: 46015 - DNA, 204 bp, synthetic construct
  source 1..204: mol_type = other DNA
gacctgtctcctattgaccccgtgaacgcttatctacaaaacgtaccagtatccagtgcccagcgtgctgccctcgagtcctactggggcgtcggccagccaatgtacgtcaaggtctggaattggctgatcaaccttttgcaaggcaatctcggcacctccctcatttatcgaatacctgtcatcgatgtgatcctcgagaag

SEQ ID NO: 46016 - DNA, 90 bp, synthetic construct
  source 1..90: mol_type = other DNA
ggcgtggagctgggctggttccctatcggcctcggaacacccattgggaccctgtccaacgacgtcagtatctgggactggatctcatca

SEQ ID NO: 46017 - DNA, 72 bp, synthetic construct
  source 1..72: mol_type = other DNA
gagcaagttttttcttatcccggaatcgggcaaaccgccgtggccgctggattgcaatctgatgttcctctg

SEQ ID NO: 46018 - DNA, 33 bp, synthetic construct
  source 1..33: mol_type = other DNA
attaacatgtacgactacggcatctaccgcatc

SEQ ID NO: 46019 - DNA, 48 bp, synthetic construct
  source 1..48: mol_type = other DNA
aactcccggtctgagaagatcgtggacaacgtcatctcgggagaatcc

SEQ ID NO: 46020 - DNA, 201 bp, synthetic construct
  source 1..201: mol_type = other DNA
ctcagccccattaatcctgttaagacctatattagcaacgtcgtgattagccaagcacagatcgcaaatctggaggcctactggggagttaacgagccgataacatcaaaaatggccaactggctcgggaatgtccttcaaggtaacctaggcacttcgttgatattccgagtgcctgtaatggacgttatcctggagagg

SEQ ID NO: 46021 - DNA, 87 bp, synthetic construct
  source 1..87: mol_type = other DNA
atctacctgggatggtttccaaccgggctaggcgtccccattggcaccctgagcgagaacgtgtccttctgggactggctgaacaga

SEQ ID NO: 46022 - DNA, 72 bp, synthetic construct
  source 1..72: mol_type = other DNA
gaacagattttcacatacccgggtatcgggcaggctgcggtctccgcgggccttagaagcgacgttcctctc

SEQ ID NO: 46023 - DNA, 51 bp, synthetic construct
  source 1..51: mol_type = other DNA
agcattcccgtcttcaagttgctctttaaaaagctgatcgtcggaaacgag

SEQ ID NO: 46024 - DNA, 33 bp, synthetic construct
  source 1..33: mol_type = other DNA
tacaccggcggagccgaggtgctgaacttcaaa

SEQ ID NO: 46025 - DNA, 33 bp, synthetic construct
  source 1..33: mol_type = other DNA
ggcatctctaatcacattctgtactactattgg

SEQ ID NO: 46026 - DNA, 48 bp, synthetic construct
  source 1..48: mol_type = other DNA
atcggcgtgttcgcgtattcccacgagttccagacctatctcgatctg

SEQ ID NO: 46027 - DNA, 36 bp, synthetic construct
  source 1..36: mol_type = other DNA
cctcacttcatcaagcccatgaaactgtctggaacc

SEQ ID NO: 46028 - DNA, 33 bp, synthetic construct
  source 1..33: mol_type = other DNA
tttttcggtcctctgacaactcccacccaagtg

SEQ ID NO: 46029 - DNA, 60 bp, synthetic construct
  source 1..60: mol_type = other DNA
taccacggctataactcaaaatttatctggaatgtgttcattggcgaacccagtatcact

SEQ ID NO: 46030 - DNA, 36 bp, synthetic construct
  source 1..36: mol_type = other DNA
ggctatgccaagattgacctgatccgttacgaaaac

SEQ ID NO: 46031 - DNA, 33 bp, synthetic construct
  source 1..33: mol_type = other DNA
tttttcggccccctgacaactccgacacaaata

SEQ ID NO: 46032 - DNA, 60 bp, synthetic construct
  source 1..60: mol_type = other DNA
ctgcacgggtacaactccaagttcatctggaatgtgtttatcggcgagccaagcatcacc

SEQ ID NO: 46033 - DNA, 36 bp, synthetic construct
  source 1..36: mol_type = other DNA
ggctataccaaagtgtcgcttatccgctacgaaaat

SEQ ID NO: 46034 - DNA, 204 bp, synthetic construct
  source 1..204: mol_type = other DNA
gatatgagcccaattaaccctgtgaatgcctatatctctaacatggtggttgggcctgagaagatcgccaagctcgaggcttactggggagtcaatcagcccatcactgtcaagctgatgaactggttgggcaatattctaactggagattttggcaccagtctgatctaccggacaccggtccttcaagtaatctctgagaag

SEQ ID NO: 46035 - DNA, 87 bp, synthetic construct
  source 1..87: mol_type = other DNA
atttggctgggctggtttccggtatcaggtggcgtccccatcggcgccctgtctaataccgtgtccttctgggattggttacgacac

SEQ ID NO: 46036 - DNA, 72 bp, synthetic construct
  source 1..72: mol_type = other DNA
gagcaggtcttcatgtacccggggatcggtcaggctgcggtgtcggcgggactgaggtctgatgttcctctt

SEQ ID NO: 46037 - DNA, 66 bp, synthetic construct
  source 1..66: mol_type = other DNA
ctgcggaacatcgagattttcggcaacaagatggagtatatcgtggactgcgattacggagctggg

SEQ ID NO: 46038 - DNA, 129 bp, synthetic construct
  source 1..129: mol_type = other DNA
accggcgtcgtgtattgcatgaattgtaccttccacgacaacaaggccaaatatgggggggctatctacaaccagggtctcctggtggtgacaaactccagcttctactctaacaacggctacggtaaa

SEQ ID NO: 46039 - DNA, 57 bp, synthetic construct
  source 1..57: mol_type = other DNA
ggcggaaagaacatcgtgtacctcgagggcctgagctccgcatggcaaacaggaatt

SEQ ID NO: 46040 - DNA, 48 bp, synthetic construct
  source 1..48: mol_type = other DNA
agcaacgtttacgacataaacttttgccggtggtcctgtgctttgact

SEQ ID NO: 46041 - DNA, 57 bp, synthetic construct
  source 1..57: mol_type = other DNA
cccgatgacctcaaaaaggttttatcctcggatagcaacaccatcattgtgtcttcc

SEQ ID NO: 46042 - DNA, 60 bp, synthetic construct
  source 1..60: mol_type = other DNA
atccacagcatcaaactggataaggacaacggcattcaggtcgtgaatgccttcatcaac

SEQ ID NO: 46043 - DNA, 81 bp, synthetic construct
  source 1..81: mol_type = other DNA
tcttccttctccgaggatgaagtgctcgacgtcatctccactattgattccaaaaaagagggactggactcaatcctttac

SEQ ID NO: 46044 - DNA, 30 bp, synthetic construct
  source 1..30: mol_type = other DNA
ctgaactgggatagctacgcattcaccgac

SEQ ID NO: 46045 - DNA, 57 bp, synthetic construct
  source 1..57: mol_type = other DNA
agcgggtccaactaccacatgatctgggacgtgattgttggcaacttctctgttact

SEQ ID NO: 46046 - DNA, 39 bp, synthetic construct
  source 1..39: mol_type = other DNA
gactacaacaagctgaacctgatcaatctcatctaccag

SEQ ID NO: 46047 - DNA, 45 bp, synthetic construct
  source 1..45: mol_type = other DNA
ggcgacatgcaagtgtacctaattagccacatcaagcttcctctc

SEQ ID NO: 46048 - DNA, 207 bp, synthetic construct
  source 1..207: mol_type = other DNA
gatctgtccccaatcgaccccgtgaacgcctatttacaacaaactgcagtcagcgcggcacagagggcatctctggagcagtactggggcgtcggcgagcctctgacaaccaagattggcaagtggctgctcatgctcttgcaaggtaacctgggcactagtttaatatataggatacctgtggtcgacgtgatcgctgccaaacag

SEQ ID NO: 46049 - DNA, 87 bp, synthetic construct
  source 1..87: mol_type = other DNA
gtgtacctgggctggttccctattggactcggcgtgcccatcgggaccgttgaatcagacgtcacaatatggcagtggatagctagg

SEQ ID NO: 46050 - DNA, 72 bp, synthetic construct
  source 1..72: mol_type = other DNA
gagcaggtcttccaatacccaggaatcggccagactgctgtggctgctgggttgcaatccgacgtacctctg

SEQ ID NO: 46051 - DNA, 30 bp, synthetic construct
  source 1..30: mol_type = other DNA
atgatcgagtacattaacctgatgtctctg

SEQ ID NO: 46052 - DNA, 201 bp, synthetic construct
  source 1..201: mol_type = other DNA
atgtcaccgatcaaccccgtgaaaacctacatctccaacatggttgtctcgccggagcaagttgcagcgctcgagtcttattggggggttaacgaacctatcacaagcaagatggccaactggtttgggaatatcattcacggggattttggcaactccctcatatttaggatgccggttattgatgtgattaaagagaga

SEQ ID NO: 46053 - DNA, 87 bp, synthetic construct
  source 1..87: mol_type = other DNA
gtgtacctcggctggttccctaccgggctgggcgtccccatcggaacactgtccgagaatgtgtcattttgggactggctgaaccga

SEQ ID NO: 46054 - DNA, 72 bp, synthetic construct
  source 1..72: mol_type = other DNA
gagcagatcttcacctaccccgggatcggacaggcagctgtctctgccgggctcagatctgacgttcctctg

SEQ ID NO: 46055 - DNA, 39 bp, synthetic construct
  source 1..39: mol_type = other DNA
aatctgcaagtttacctaattagccatattaacttgccc

SEQ ID NO: 46056 - DNA, 201 bp, synthetic construct
  source 1..201: mol_type = other DNA
ctttcacccatcaaccctgtaaaaacgtatattagcaatgtgatcataagcgccgaccaaattgcaaagctggaagcctactggggagtcaatgagcccatcacgagcaagatggtcaactggttgggaaatgtggtcaagggggacctcggcacctcactgatcttccgcatccccgttattgacgttatcaaagagagg

SEQ ID NO: 46057 - DNA, 87 bp, synthetic construct
  source 1..87: mol_type = other DNA
atttaccttggctggtttccaagtggtctgggcgtgcctatcggctccctctctgagaacgtcaccttttgggagtggctgaacaga

SEQ ID NO: 46058 - DNA, 72 bp, synthetic construct
  source 1..72: mol_type = other DNA
gagcagattttcacctaccctggcatcggccaggccgctgtatccgctggactgcgctccgatgtgccactc

SEQ ID NO: 46059 - DNA, 201 bp, synthetic construct
  source 1..201: mol_type = other DNA
ttgtcaccaatcaatcccgtgaagacctacgtctcaaatatgatcgttagtcaagaacaaatagccgcgctggaagcctactggggagttaatcagccaatcactactaagctcgtgaactggctcggtaacattattcacggcgacctggggaccagtctcatatttcggatgcctgtggtggacgtgataaaagagaga

SEQ ID NO: 46060 - DNA, 87 bp, synthetic construct
  source 1..87: mol_type = other DNA
gtgtacctgggctggttccctaccggtttaggggtccctatcggaaccctctccgaggatgtatcgttcctggactggctgaagaga

SEQ ID NO: 46061 - DNA, 72 bp, synthetic construct
  source 1..72: mol_type = other DNA
gaacaagtatttacataccccggaatcggccaggcggctgtctctgccggtttgcggagtgacgttcctctg

SEQ ID NO: 46062 - DNA, 51 bp, synthetic construct
  source 1..51: mol_type = other DNA
ttcaaggaccagaacatgaatgaactgcttgaaatcattaagagtagcaac

SEQ ID NO: 46063 - DNA, 201 bp, synthetic construct
  source 1..201: mol_type = other DNA
ctgtcacctattgaccccgtcaacgcatacctgaaacaggcagtcatcagccctgagcaacgactcatcctggaacagtactggggggtcaatcagccgcttaccaccaagatttggggttggctctcaaacctgctgcaaggcaaccttggcaacagccttatctatagagtgcccgttatcgacgtcatatatgagaga

SEQ ID NO: 46064 - DNA, 90 bp, synthetic construct
  source 1..90: mol_type = other DNA
tctgtcgagctgggctggttccccatcgggatgtcggtcgcaattggaaccttaagtagtgatgcaaccatatggcaatggcttgctcgg

SEQ ID NO: 46065 - DNA, 72 bp, synthetic construct
  source 1..72: mol_type = other DNA
gagcaggttttctcataccctgggatcgggcaaactgctgtggccgctggcctacaatcagacgtcaccctc

SEQ ID NO: 46066 - DNA, 57 bp, synthetic construct
  source 1..57: mol_type = other DNA
attggcgcccctcataacatcgtgatgtataccgtttctcacatccccttcgaatcc

SEQ ID NO: 46067 - DNA, 54 bp, synthetic construct
  source 1..54: mol_type = other DNA
tcaatccccgtgtttaaccttctgttcaagaagctcatagtcggaaatgaggtt

SEQ ID NO: 46068 - DNA, 45 bp, synthetic construct
  source 1..45: mol_type = other DNA
tcccggtctgaccggatcgtggataacgtcattagcggagagaat

SEQ ID NO: 46069 - DNA, 204 bp, synthetic construct
  source 1..204: mol_type = other DNA
gatctctctcccattgaccctgtcaatgcctatctccacggagcggcagtttccgaggcgcagcgggccatcctggagcagtacttcggcacaaacactcccatgaccgagaaaatcttccactggctgatggacctgatccgcggcgatctgggcaccagccttatcttccggcgcccagttatcgacgtgatcatcgaaaag

SEQ ID NO: 46070 - DNA, 87 bp, synthetic construct
  source 1..87: mol_type = other DNA
gtctacctgggatggttccctatcggcttcggggttcccattggagttagatcaacagacgccacctttatggaatgggctgtcagg

SEQ ID NO: 46071 - DNA, 72 bp, synthetic construct
  source 1..72: mol_type = other DNA
gagcaggtcttctcttaccctggcatagggcaaactgctgtcgccgccggacttcagaacgacgttcctctg

SEQ ID NO: 46072 - DNA, 204 bp, synthetic construct
  source 1..204: mol_type = other DNA
gatctttctcccatcgaccccgtgaacgcctacctcaagggcgccgccgtctccgaggctcagcggcagatccttcaccaatacttcggcacaaacgtcccactgactaccaagatttaccactggctgatcgacttggcgcaaggaaatctcggcaccagcttaatctatcgaatgcctgtgatggacgtgatcatcgacaag

SEQ ID NO: 46073 - DNA, 90 bp, synthetic construct
  source 1..90: mol_type = other DNA
gccgtgtacctggggctcttccccatcggattcggcgtccctattggggtcaagtcgacagacgctacctttatggaatgggccagtagg

SEQ ID NO: 46074 - DNA, 72 bp, synthetic construct
  source 1..72: mol_type = other DNA
gagcaagtgttttcatacccgggcattgggcagactgctgttgctgccggtttgcaaaacgacgttcctctg

SEQ ID NO: 46075 - DNA, 204 bp, synthetic construct
  source 1..204: mol_type = other DNA
gacctgagtcccattgatcccgtttccgcgtacctcaagggagccgccgtgtctgaatcccagagggctatcctcgagtcctacttcggagttaacgtacccctgacaactaaaatctaccactggctcgtccaactaattcaaggtaacctcggaaccagcctgatctatcgggccccagtgaccgacatcattctggagaag

SEQ ID NO: 46076 - DNA, 87 bp, synthetic construct
  source 1..87: mol_type = other DNA
atttacctgggctggttccctatcggattcggcgtgcccattggggttaagtctaccgacgtcacatttatcgattgggcatcacgc

SEQ ID NO: 46077 - DNA, 72 bp, synthetic construct
  source 1..72: mol_type = other DNA
gagcaagtcttttcctatcccggtatcggtcagacggcagtagctgctgggcttcaaaacgacgttcctctg

SEQ ID NO: 46078 - DNA, 45 bp, synthetic construct
  source 1..45: mol_type = other DNA
agccggtccgagaagatcgtggacaacgtcatttctggagaaacc

SEQ ID NO: 46079 - DNA, 204 bp, synthetic construct
  source 1..204: mol_type = other DNA
gacctgagccccatcaaccccgtctccgtatatctcaagggggccgcagtgtctgagtcccagcgggctattctcaatgagtacttcggggtcggggtccctctacaaacgaagatctatcactggcttctgaacctgattcaagggaatctggggacatccctgatttatcgcgcccctgtgctggacgtcatcatcgataag

SEQ ID NO: 46080 - DNA, 93 bp, synthetic construct
  source 1..93: mol_type = other DNA
gccgtgtacctgaagctcttccctatcggctttggggtccccattggagtccgaagtaccgacgcaagcttcatcgattgggcttctaggctc

SEQ ID NO: 46081 - DNA, 72 bp, synthetic construct
  source 1..72: mol_type = other DNA
gaacaagttttttcgtaccctgggataggacagactgccgtgaccgctggtttgcaatccgacgtacccctg

SEQ ID NO: 46082 - DNA, 204 bp, synthetic construct
  source 1..204: mol_type = other DNA
gacctgtctcccattaaccctgttagcgtgtacctgaagggggccgccgtctctgaagctcagcggcagattctcaaccaatatttcggcgtcggcgtccctctgccaaccaaaatctaccactggctgctggatctgattcaagggaatctcggcaccagccttatttatcgtgcaccagtgatcgacgtcatcgtggacaaa

SEQ ID NO: 46083 - DNA, 93 bp, synthetic construct
  source 1..93: mol_type = other DNA
gccgtgtacctgaaactgtttcctattgggttcggcgtccccatcggagttaagagtaccgacgctacattcatcgaatgggcaagtcgcctg

SEQ ID NO: 46084 - DNA, 72 bp, synthetic construct
  source 1..72: mol_type = other DNA
gagcaagtattctcctaccccggcattggccagacagcagtggctgccggtttacaatcggatgtccctttg

SEQ ID NO: 46085 - DNA, 204 bp, synthetic construct
  source 1..204: mol_type = other DNA
gacctctcccctattgaccctgtttctgcttacctcaagggcgcggcagtgtccgaagctcaacggcagatcttgcaacaatacttcggcactaatgtgcctctgcccactaagatctatcactggctgctggacttgatacaaggcaacctgggcacctctctcatctaccgggccccagtgatcgatgtcatcttcgaaaag

SEQ ID NO: 46086 - DNA, 87 bp, synthetic construct
  source 1..87: mol_type = other DNA
gtgtacctgggatggtttcctatcggcttcggcgtccccattggcgttcggtcgaccgacgccacattcatggaatgggcaacaagg

SEQ ID NO: 46087 - DNA, 72 bp, synthetic construct
  source 1..72: mol_type = other DNA
gagcaggtcttctcctaccctggcatcgggcaaacagccgttgccgctggactgcagaacgacgttcctctg

SEQ ID NO: 46088 - DNA, 45 bp, synthetic construct
  source 1..45: mol_type = other DNA
aactacggaggactgttccccggcgacgttcttacctctgatcgc

SEQ ID NO: 46089 - DNA, 66 bp, synthetic construct
  source 1..66: mol_type = other DNA
gacggcaccgaagcctacggacgatatgccgaaggtttggtctttatcgccgcggcaccgttcgct

SEQ ID NO: 46090 - DNA, 30 bp, synthetic construct
  source 1..30: mol_type = other DNA
agcgtgatggagggccccgctattggagac

SEQ ID NO: 46091 - DNA, 30 bp, synthetic construct
  source 1..30: mol_type = other DNA
atctacatggggtcggttggactcgtatcc

SEQ ID NO: 46092 - DNA, 48 bp, synthetic construct
  source 1..48: mol_type = other DNA
ctggtgctctacaacctgcacaccagcccccatgtcgagacattccgg

SEQ ID NO: 46093 - DNA, 204 bp, synthetic construct
  source 1..204: mol_type = other DNA
gacctgagccctatagaccctgtgaatgcttacctcaacggagctgccgtctccgaggcccagcggcagattctgcaacaatattttggcactaacgtgcctatgcaaacaaaaatctatcactggctgctggatttacttcaaggcaatctggggacctctctcatctaccgggcaccagtgattgacgtcatcctcgacaag

SEQ ID NO: 46094 - DNA, 90 bp, synthetic construct
  source 1..90: mol_type = other DNA
gccgtgtacctgggctggttcccggtcggttttggcgtgcccatcggggtcaagagcacagacgctaccttcatggaatgggcatctcgg

SEQ ID NO: 46095 - DNA, 72 bp, synthetic construct
  source 1..72: mol_type = other DNA
gaacaggtctttacctatcccgggatcggccaaaccgccgtcgctgctggactgcagtctgatgtgcctttg

SEQ ID NO: 46096 - DNA, 204 bp, synthetic construct
  source 1..204: mol_type = other DNA
gacctgagccctattgaccccgtgaatgcatacctgcacggcgctgccgtgtctgaggcccagcggcagatcttgcaacaatattttggcaccaacgtccctcttcccgagaaaatcttccactggctcatggacctgatccaaggcaacctgggcacatccctgatatataggcgcccggtcatggatgtgatcatcgacaag

SEQ ID NO: 46097 - DNA, 90 bp, synthetic construct
  source 1..90: mol_type = other DNA
agcgtctacctggggctgttccctatcggatttggcgtgcccataggcgttcggagcaccgacgccactttcctcgaatgggcgacgcgg

SEQ ID NO: 46098 - DNA, 72 bp, synthetic construct
  source 1..72: mol_type = other DNA
gaacaagtgttttcctaccccggaattgggcagaccgctgtggccgctggtctacaaaatgacgtccctctg

SEQ ID NO: 46099 - DNA, 204 bp, synthetic construct
  source 1..204: mol_type = other DNA
gacctctctcccatcgaccctgtgaacgcctatcttagacaagctgctgtgtccgaggctcagcgccagatcctggagaattacttcgggactaacgtcccactgaccaccaaaatcttccactggctcatggacctgattcacctggatctgggcaccagccttatttatagagcgccagtgatcgacatcattatcgacaaa

SEQ ID NO: 46100 - DNA, 90 bp, synthetic construct
  source 1..90: mol_type = other DNA
gctgtgtacctgggctggttccccattgggttcggcgtgcctatcggagtcaagtccaccgacgccacatttatggaatgggcttctaga

SEQ ID NO: 46101 - DNA, 72 bp, synthetic construct
  source 1..72: mol_type = other DNA
gagcaagttttctcataccccggtgtcggccaaacagcagtagccgctggtttgaattccgatgttcctctg

SEQ ID NO: 46102 - DNA, 48 bp, synthetic construct
  source 1..48: mol_type = other DNA
agccggagtgataagattgtggacaacgtcatctccgaatcgtccggt

SEQ ID NO: 46103 - DNA, 204 bp, synthetic construct
  source 1..204: mol_type = other DNA
gatctgagccccatcgaccctgtcaacgcctatttgagacaggccgccgtgtccgaggcccagcggcagatcctcgagaattacttcggtaccaatgtgcccctgaccaccaagatcttccactggctcctggacctggtccacctggacctcggcacttctctgatttaccgggcgccagtgatagatatcatctgggacaag

SEQ ID NO: 46104 - DNA, 93 bp, synthetic construct
  source 1..93: mol_type = other DNA
gctgtgtacctgggatggtttcctattgggttcggcgtccccatcggcgttaagagcacggacgccaccttcatggaatgggcttcacgactg

SEQ ID NO: 46105 - DNA, 72 bp, synthetic construct
  source 1..72: mol_type = other DNA
gagcaagtattcagttacccgggaatcggccagacagcggtcgctgccggactgaacagcgatgttcctctg

SEQ ID NO: 46106 - DNA, 204 bp, synthetic construct
  source 1..204: mol_type = other DNA
gacctgtctcccatcaatcctgtgaccgcttatctgaaaggcgcagccgtcagcgagtcccaacgcgctatcctggagtcctacttcggggtcaacgtcccactgcctaccaagatttaccactggctgctcgacctcgctcaaggcaacctggggaccagcctcatctaccgggcccctgtgatggatgtcatcattgacaag

SEQ ID NO: 46107 - DNA, 90 bp, synthetic construct
  source 1..90: mol_type = other DNA
gccgtgtacctgggatggttccccattgggttcggcgtccctatcggtgtcaaatcgacagacgccacctttatggaatgggcttctcgg

SEQ ID NO: 46108 - DNA, 72 bp, synthetic construct
  source 1..72: mol_type = other DNA
gagcaggttttttcttatccgggaatcggccagaccgccgttgctgccggactccaaaacgacgttcctctg

SEQ ID NO: 46109 - DNA, 204 bp, synthetic construct
  source 1..204: mol_type = other DNA
gatctgagccccatcgaccctgtcaacgcctacctgcacggcgccgctgtctccgagacccagaggcagatattgcaacaatatttcggaacaaacgtgcctatgactgagaagattttccactggctgatggacctcatacaaggaaacctgggcacctctcttatttaccgccggcccgtcatcgacgtgatcattgacaag

SEQ ID NO: 46110 - DNA, 87 bp, synthetic construct
  source 1..87: mol_type = other DNA
gtctacctgggctggttccctatcggctttggagtgcccatcggcgttcgttctactgacgctaccttcattgaatgggcaacgcgc

SEQ ID NO: 46111 - DNA, 72 bp, synthetic construct
  source 1..72: mol_type = other DNA
gagcaagtgttctcctaccctggaatcgggcaaaccgcggtcgccgctgggctccagaatgatgttcctctg

SEQ ID NO: 46112 - DNA, 54 bp, synthetic construct
  source 1..54: mol_type = other DNA
atcaacaataatctgatcgtgaacatttacaaatcagacgtcatgttccctatc

SEQ ID NO: 46113 - DNA, 33 bp, synthetic construct
  source 1..33: mol_type = other DNA
tacatcggcgtggaacccgaccttgccattctg

SEQ ID NO: 46114 - DNA, 42 bp, synthetic construct
  source 1..42: mol_type = other DNA
ggctggggcgtgtctacatttccttattcgataggatatgtc

SEQ ID NO: 46115 - DNA, 204 bp, synthetic construct
  source 1..204: mol_type = other DNA
gacctgagccccattgaccctgtcaacgcctatctaaggcaagccgctgtgtctgaagctcagcggcagattcttgagaattacttcggcaccaacgtgcccctgaccactaagatctaccactggctgctggatttaatccaactgaatctcggcacatccttaatctatcgagccccagtgatcgatatcatttgggagaaa

SEQ ID NO: 46116 - DNA, 90 bp, synthetic construct
  source 1..90: mol_type = other DNA
gccgtgtacctcggctggttccccatcggcttcggagttcctattggagtcaggagcacagacgccacctttctggaatgggctagtcga

SEQ ID NO: 46117 - DNA, 72 bp, synthetic construct
  source 1..72: mol_type = other DNA
gaacaggtctttagttaccccgggattggccagaccgccgttgccgctggtctctcttccgacgttcctctg

SEQ ID NO: 46118 - DNA, 72 bp, synthetic construct
  source 1..72: mol_type = other DNA
acagccgctcgaagcatcttcctaagtgatatcgtcacatatcagcaaacccacggccctttcctgttcacc

SEQ ID NO: 46119 - DNA, 33 bp, synthetic construct
  source 1..33: mol_type = other DNA
cttcgggtgtctcctttcatggagatccccgcg

SEQ ID NO: 46120 - DNA, 204 bp, synthetic construct
  source 1..204: mol_type = other DNA
gacctgagtcctattaaccccgtgaccgtgtatctcaaaggggcggcagtctctccggctcaaagggcgatcctggagcagtacttcggggtcggcgtccccctgcctaccaagatctaccactggctttgtgatctggcacaaggtaacctgggaacatctctcatatatcgggtccctgtgattgatgtgatctgggacaag

SEQ ID NO: 46121 - DNA, 90 bp, synthetic construct
  source 1..90: mol_type = other DNA
gcagtctacctgggctggtttcccatcggcttcggcgtgcctattggcgttaaatcgacagacgccaccttcatggaatgggcatcacgg

SEQ ID NO: 46122 - DNA, 72 bp, synthetic construct
  source 1..72: mol_type = other DNA
gaacaggtcttctcctatcctgggatcggtcaaacagccgtggctgctggacttcaatccgacgttcctctg

SEQ ID NO: 46123 - DNA, 204 bp, synthetic construct
  source 1..204: mol_type = other DNA
gacctgagcccaattgaccccgtgaacgcctatctacgccaagcagccgtcagcgaggcccagcggcagatcttacaaaattacttcggcacaaacgtcccactcaccactaagatcttccactggctcatggacctgttccaaggaaacctcggtacctctctgatctaccgcgctcctgtgatcgatatcattctggacaag

SEQ ID NO: 46124 - DNA, 93 bp, synthetic construct
  source 1..93: mol_type = other DNA
gccgtgtacctgggatggttccccattggcttcggcgtgcctatcggggttaagtcaaccgacgctacattctttgaatgggcgagccgactt

SEQ ID NO: 46125 - DNA, 72 bp, synthetic construct
  source 1..72: mol_type = other DNA
gagcaggtcttctcctaccctggcgttggtcaaactgccgtggccgctggactcaactctgatgtgcctctg

SEQ ID NO: 46126 - DNA, 87 bp, synthetic construct
  source 1..87: mol_type = other DNA
aatgcttactaccctacattcatggacgccatctatggcctcaccaatccccaaaatgttatcaacaacattctgacgccgcaacaa

SEQ ID NO: 46127 - DNA, 45 bp, synthetic construct
  source 1..45: mol_type = other DNA
tctcggtccgaccgcgttatagacaacgtcgttgctggagaaagc

SEQ ID NO: 46128 - DNA, 48 bp, synthetic construct
  source 1..48: mol_type = other DNA
ttcgacggcagcaattccttcatccccaagctgtttaaaaccaactgg

SEQ ID NO: 46129 - DNA, 72 bp, synthetic construct
  source 1..72: mol_type = other DNA
acctctgccactacaagctggacagctttcttcattaatatctacgggaccaccttccacatctccgtggat

SEQ ID NO: 46130 - DNA, 75 bp, synthetic construct
  source 1..75: mol_type = other DNA
atgcggcggtgtccgcaatgcggctcagcgggagacgatatctacggcttctgcattaaatgtggttatgagttc

SEQ ID NO: 46131 - DNA, 57 bp, synthetic construct
  source 1..57: mol_type = other DNA
tttaccaaccccgatgaggccgactactgtgtcaaatgcggctcgcctctgatcttc

SEQ ID NO: 46132 - DNA, 96 bp, synthetic construct
  source 1..96: mol_type = other DNA
atcgccgtgctctacatgactggctccatcccacccgaagttcttacggactacaagtcactcctgattggcaatttcaccccctttcactttaga

SEQ ID NO: 46133 - DNA, 45 bp, synthetic construct
  source 1..45: mol_type = other DNA
agcaggtccgaccgtgtcatcgataacgtggtcgctggagaaacc

SEQ ID NO: 46134 - DNA, 39 bp, synthetic construct
  source 1..39: mol_type = other DNA
gtgagcaatctgaagctgaccaacgactccctctacgat

SEQ ID NO: 46135 - DNA, 30 bp, synthetic construct
  source 1..30: mol_type = other DNA
agcgtgatcaacaccttcatgtccttgggc

SEQ ID NO: 46136 - DNA, 69 bp, synthetic construct
  source 1..69: mol_type = other DNA
agcattttcatcgacaagtctcctgcaaatgtccgaaccatgaccattctgatcggctccatgcttggg

SEQ ID NO: 46137 - DNA, 30 bp, synthetic construct
  source 1..30: mol_type = other DNA
gtccccagctccatggacgtgcagttggtg

SEQ ID NO: 46138 - DNA, 30 bp, synthetic construct
  source 1..30: mol_type = other DNA
tggatggacggccagcagatcctgcacttc

SEQ ID NO: 46139 - DNA, 39 bp, synthetic construct
  source 1..39: mol_type = other DNA
ctgcgggacggcgatttcaatgtgctgggctacaactgg

SEQ ID NO: 46140 - DNA, 81 bp, synthetic construct
  source 1..81: mol_type = other DNA
gtgctgaattacatccctcacgaatttatctctaactttgtctgttacaataacaacctccattcctcctggattagagtt

SEQ ID NO: 46141 - DNA, 42 bp, synthetic construct
  source 1..42: mol_type = other DNA
gactggtacatccacggcctgcccctgactggcaaggagatg

SEQ ID NO: 46142 - DNA, 69 bp, synthetic construct
  source 1..69: mol_type = other DNA
atggcccggagcatcaacctgctggacatcgtggtctatcaacaagtagctggccccattctcttcaca

SEQ ID NO: 46143 - DNA, 36 bp, synthetic construct
  source 1..36: mol_type = other DNA
aacatcgtgaatgaatacggggtcttgccttctccc

SEQ ID NO: 46144 - DNA, 93 bp, synthetic construct
  source 1..93: mol_type = other DNA
ttccacatcggatggatcaagaccttcgatatcatgagcatcctcgactacatttataacgcctacctgtgccattccaaaggcttctaccag

SEQ ID NO: 46145 - DNA, 36 bp, synthetic construct
  source 1..36: mol_type = other DNA
agcacacccaaggacatctacactttcaaccgatat

SEQ ID NO: 46146 - DNA, 48 bp, synthetic construct
  source 1..48: mol_type = other DNA
ttcgggcaatctaccatcctgaactttcccgtgctgaacattcctctc

SEQ ID NO: 46147 - DNA, 60 bp, synthetic construct; identical to SEQ ID NO: 38958
  source 1..60: mol_type = other DNA

SEQ ID NO: 46148 - DNA, 45 bp, synthetic construct
  source 1..45: mol_type = other DNA
gagtccaggagcgaacggatcgtcgacaacgtgacctctggtgag

SEQ ID NO: 46149 - DNA, 138 bp, synthetic construct
  source 1..138: mol_type = other DNA
atcggcttcattagcgattacatgctcgtgacaaacttcgatttcaatcaaatctcaaccgccgtgcccaactccctgcctatggactttgacttcaactctgtgatcaaggacgtctccaaggtcgtgctgaatttc

SEQ ID NO: 46150 - DNA, 45 bp, synthetic construct
  source 1..45: mol_type = other DNA
cccatcgaaatccacctgaccaactccatcgagattagcatcatg

SEQ ID NO: 46151 - DNA, 30 bp, synthetic construct; identical to SEQ ID NO: 45216
  source 1..30: mol_type = other DNA

SEQ ID NO: 46152 - DNA, 123 bp, synthetic construct
  source 1..123: mol_type = other DNA
agtacactgccattgcacccatttgctttcgccatggcaagcggggtcgggtcagcatcaatgaacgctgctagcctggggcctacactggccgagtttcctgcactggagaccagcatcgaa

SEQ ID NO: 46153 - DNA, 51 bp, synthetic construct
  source 1..51: mol_type = other DNA
tacgaccggtcagcgcgggttgttgactctgtcgctagcggagagtcaagc

SEQ ID NO: 46154 - DNA, 273 bp, synthetic construct
  source 1..273: mol_type = other DNA
ctgaagcttacacaaaacggcagcgtgacattctccgggttccacacaattaagctcgagaacgagatccccatcaagaagggcgacaacttcactgtcatcatgaccaagaactccgctcctctgctgaatttttcgcaaatatatttcaaagagaatgtttcgttctataacaacggcaatggatggatcgacgccagtctgaagaatcagacagccattctcaaagtatacaccaaggatctcgcaatctacactgaggacctggtcaag

SEQ ID NO: 46155 - DNA, 219 bp, synthetic construct
  source 1..219: mol_type = other DNA
agcaagttcgaggccgagattggcatcgccaatgagaccgtcatcttcgagatcaacggcgaaacctacaaccggacatccgacgaaaacggaacagccaggctcgctattaatctgaaccccggcaactataccatcaagaccacctttaacgggacaactgtggagaacatgattaccgttctccctaccctgatcgctgacaacctcgtgaagtat

SEQ ID NO: 46156 - DNA, 57 bp, synthetic construct
  source 1..57: mol_type = other DNA
tttttcatctccctgattgacggcgagggaaaggccattagcgggatcaacatcaca

SEQ ID NO: 46157 - DNA, 66 bp, synthetic construct
  source 1..66: mol_type = other DNA
aacggtgtcttctacaaccggctgaccaatgagaacggcacagccaagctgaacatcaatctggaa

SEQ ID NO: 46158 - DNA, 69 bp, synthetic construct
  source 1..69: mol_type = other DNA
ggcgagtatattctcactgccaccgaccccctgaccgggctgcagatgagctacaatatcacggttata

SEQ ID NO: 46159 - DNA, 33 bp, synthetic construct
  source 1..33: mol_type = other DNA
cccgtgctgttcgccgacaacctggagatgaag

SEQ ID NO: 46160 - DNA, 51 bp, synthetic construct
  source 1..51: mol_type = other DNA
aacgccctggtcttgaacggcgaaggcaagccgttagctaatgcaaaggtc

SEQ ID NO: 46161 - DNA, 132 bp, synthetic construct
  source 1..132: mol_type = other DNA
ggcgttttctacaccaaatactcaaactccagcgggatcgcaaagctcaacattaatctgatggccggcgaatatattatcacatctgaatatgatgggatgcggatctctaacaccattacaatcaaggac

SEQ ID NO: 46162 - DNA, 51 bp, synthetic construct
  source 1..51: mol_type = other DNA
aaagccgtgaagttcgggcctggcgacacatcctacaccaataacgatacg

SEQ ID NO: 46163 - DNA, 48 bp, synthetic construct
  source 1..48: mol_type = other DNA
ggcgacatgcaagtgtacctcattagccgcttcaacctgtccttgacc

SEQ ID NO: 46164 - DNA, 45 bp, synthetic construct
  source 1..45: mol_type = other DNA
ctccacagccagctggtgtccaacttccacatctctattgacaac

SEQ ID NO: 46165 - DNA, 33 bp, synthetic construct
  source 1..33: mol_type = other DNA
tgcgggagcggcgctgatttcgatgctgatgca

SEQ ID NO: 46166 - DNA, 30 bp, synthetic construct
  source 1..30: mol_type = other DNA
agccactccactgttaccgacaatttgggc

SEQ ID NO: 46167 - DNA, 60 bp, synthetic construct
  source 1..60: mol_type = other DNA
cagaaacggggcgtgcaccggatttacctgatgaagaactttttcatcacctatgaagcc

SEQ ID NO: 46168 - DNA, 57 bp, synthetic construct
  source 1..57: mol_type = other DNA
ggctacggtctgaccaacatctaccctagcctggatttcgctcttacggatcttcct

SEQ ID NO: 46169 - DNA, 42 bp, synthetic construct
  source 1..42: mol_type = other DNA
gaggacataatcaaaatcatcgcgaacctgagcaagtacaat

SEQ ID NO: 46170 - DNA, 60 bp, synthetic construct
  source 1..60: mol_type = other DNA
aacagcgtggatctgtcctctctcgacaacatcaacattttcaatcgggagtacttcacc

SEQ ID NO: 46171 - DNA, 33 bp, synthetic construct
  source 1..33: mol_type = other DNA
caggtctacctggtgtctcacatcaacttggct

SEQ ID NO: 46172 - DNA, 96 bp, synthetic construct
  source 1..96: mol_type = other DNA
ctccacagcacttatcctacattcatcgacgctatctacgccctgggcaaccctcaaaatgtgatcaacaatattctgacccctcaacccgaaatt

SEQ ID NO: 46173 - DNA, 105 bp, synthetic construct
  source 1..105: mol_type = other DNA
atgattaagatcttcacaaccatgttcctcctgtttttacaaggcattcgggagtcggtcggcgggtccctcaataccttctttatgaattgcaccgactttggc

SEQ ID NO: 46174 - DNA, 108 bp, synthetic construct
  source 1..108: mol_type = other DNA
ctcaccgcttgcgtctaccggccctgggtggcagacccaaacgtgcatccttacgagaaggccctggaaacagccaccgggtacagttttccaagcggtcacatcacc

SEQ ID NO: 46175 - DNA, 63 bp, synthetic construct
  source 1..63: mol_type = other DNA
aaatcctaccccatggactatgatagcgctgggaaactgatcgtggaccctgcaaagatggca

SEQ ID NO: 46176 - DNA, 30 bp, synthetic construct
  source 1..30: mol_type = other DNA
ttctccagcggcaacaccatcgactacacc

SEQ ID NO: 46177 - DNA, 222 bp, synthetic construct
  source 1..222: mol_type = other DNA
ggactcgggggcgcaatttgcatcgttggggctgccgaaaactctatgttcactggagactacgtgctcaactctgccctcgccgggggtgctatcttcgtttatggcatcgagataccgaaactcaagatgacaaggcctttcaacaacaatgccatctattcccggttcgtgtacaatggcgcctatgaaggcggtgccatcctgatcaacgccacttct

SEQ ID NO: 46178 - DNA, 45 bp, synthetic construct
  source 1..45: mol_type = other DNA
agcaggtctgaccgtgtcatagacaacgtggttagcggcgaatcc

SEQ ID NO: 46179 - DNA, 51 bp, synthetic construct
  source 1..51: mol_type = other DNA
gttgccgggtggaccggtggcgtgttgttcctgaagccaggtcgagctctc

SEQ ID NO: 46180 - DNA, 48 bp, synthetic construct
  source 1..48: mol_type = other DNA
attcccagccgagtcatactgctacaacacccctaccacaagcacttc

SEQ ID NO: 46181 - DNA, 54 bp, synthetic construct
  source 1..54: mol_type = other DNA
ggcgaggacgtcaaggagctgcagaccatcttgcaaaacaagggctactatgtg

SEQ ID NO: 46182 - DNA, 129 bp, synthetic construct
  source 1..129: mol_type = other DNA
cagacaagcggagccagcaagaccgtgaccaagacctccactaactctaacaactgcgccggccagaagttctccaagacagagctctacaaggctgggcagaccctgaagaaacacatcggcaataac

SEQ ID NO: 46183 - DNA, 117 bp, synthetic construct
  source 1..117: mol_type = other DNA
gatcaccagaacaatgcctacaactgcggacctacctccctgagcatgtgcatgcaaatgatgggcgagtacatccccgagaaccagttggccagggaggctggaactacaagagat

SEQ ID NO: 46184 - DNA, 45 bp, synthetic construct
  source 1..45: mol_type = other DNA
agcggcaccgatcggatcgtcgacaacgtggtgtccggcgaaaat

SEQ ID NO: 46185 - DNA, 48 bp, synthetic construct
  source 1..48: mol_type = other DNA
gccggaactgaccgccttgtggatcacgtggtcagcggcgagaacaat

SEQ ID NO: 46186 - DNA, 30 bp, synthetic construct
  source 1..30: mol_type = other DNA
gtggccagcttgggggaggctgcgatcagt

SEQ ID NO: 46187 - DNA, 57 bp, synthetic construct
  source 1..57: mol_type = other DNA
ctgattggcatcctcttcggccaaattgaggccgatgtctggcacaacgctgacgtg

SEQ ID NO: 46188 - DNA, 30 bp, synthetic construct; identical to SEQ ID NO: 42224
  source 1..30: mol_type = other DNA

SEQ ID NO: 46189 - DNA, 48 bp, synthetic construct
  source 1..48: mol_type = other DNA
tctcggagcgaccgcgtcatagataacgtcgtgtccggcgaaacagag

SEQ ID NO: 46190 - DNA, 36 bp, synthetic construct
  source 1..36: mol_type = other DNA
atgctgatcgccacaaccggcgagattaggccaatc

SEQ ID NO: 46191 - DNA, 48 bp, synthetic construct
  source 1..48: mol_type = other DNA
gcctttagcctgttctccatcaacggcatgggaaccgagtttgaagtc

SEQ ID NO: 46192 - DNA, 60 bp, synthetic construct
  source 1..60: mol_type = other DNA
tatcccctgataagtcagtttatagggaacgcctttttctctgggttctcctatatccgg

SEQ ID NO: 46193 - DNA, 66 bp, synthetic construct
  source 1..66: mol_type = other DNA
ctgcggattctctacctcaaaatcaccatgctgctcaagatggtggagcagtacagacaggaacac

SEQ ID NO: 46194 - DNA, 42 bp, synthetic construct
  source 1..42: mol_type = other DNA
aaaatgcaagtctacctcatctcacaaattaaactgcctctc

SEQ ID NO: 46195 - DNA, 42 bp, synthetic construct
  source 1..42: mol_type = other DNA
agaaccgatagaatcattgacaacgtggtggctggcgaaaca

SEQ ID NO: 46196 - DNA, 39 bp, synthetic construct
  source 1..39: mol_type = other DNA
gccgctctggcaaagacggtaacggctactgcattctac

SEQ ID NO: 46197 - DNA, 45 bp, synthetic construct
  source 1..45: mol_type = other DNA
gccgccctgaccaaagtgattgcacccgctagcatgttctaccct

SEQ ID NO: 46198 - DNA, 30 bp, synthetic construct
  source 1..30: mol_type = other DNA
gccctgaattacaagcccaacaccatcgag

SEQ ID NO: 46199 - DNA, 90 bp, synthetic construct
  source 1..90: mol_type = other DNA
gggctgcctgccctgacgcatcaaccggcgtccttcaacggattcctgaactacctcatctgctttaagggcagcgactacccacacatg

SEQ ID NO: 46200 - DNA, 54 bp, synthetic construct
  source 1..54: mol_type = other DNA
ctgaccatcgatgccgaattcactgttaaagacttcgtagcccaattttacctg

SEQ ID NO: 46201 - DNA, 51 bp, synthetic construct
  source 1..51: mol_type = other DNA
tacattggcgtcataccatctatccgcgcttatgtttgttctggggccgac

SEQ ID NO: 46202 - DNA, 45 bp, synthetic construct
  source 1..45: mol_type = other DNA
gcccagcctaagaattatccttcgatttatgacctgttcctgatc

SEQ ID NO: 46203 - DNA, 39 bp, synthetic construct
  source 1..39: mol_type = other DNA
ctgatggccaacgtgttcctcaagaagccagagactctg

SEQ ID NO: 46204 - DNA, 33 bp, synthetic construct
  source 1..33: mol_type = other DNA
aagttcctcaccctggagagcgttgggtttttt

SEQ ID NO: 46205 - DNA, 108 bp, synthetic construct
  source 1..108: mol_type = other DNA
atggagaagatgttcacaactgctttcctgctgttccttcaaggaattcgggaatctgccggcggaccactgaactcttttttcatgtcctgcaccgactttggaaac

SEQ ID NO: 46206 - DNA, 108 bp, synthetic construct
  source 1..108: mol_type = other DNA
ctcaccgcctgcgtctatcggccttgggtggccgactccaacatccacccatacgagaaggctctggaagcggctaccggctatagcttcccctctggacacgtagcc

SEQ ID NO: 46207 - DNA, 63 bp, synthetic construct
  source 1..63: mol_type = other DNA
aagtcctaccccatggactacgattccgccggcaaacttcttgtcaatcccgcaaagatggca

SEQ ID NO: 46208 - DNA, 45 bp, synthetic construct
  source 1..45: mol_type = other DNA
tccggcaccgaccggctgatcgataatgtcgtatctggggagaat

SEQ ID NO: 46209 - DNA, 33 bp, synthetic construct
  source 1..33: mol_type = other DNA
acccgactgttcatagccgagtctcctgatgcc

SEQ ID NO: 46210 - DNA, 174 bp, synthetic construct
  source 1..174: mol_type = other DNA
ggcacagtgatgaacaataccagctccgatctccaaggcactagccaggtcagctcctcgtccggggatagcgcccaggtgtcctcttccgttaacaacagctctgaaaaagtcaccggatcaagtaacgccaaatctggcaccgtctactgggcctctgtgaagaccaattcc

SEQ ID NO: 46211 - DNA, 114 bp, synthetic construct
  source 1..114: mol_type = other DNA
cacaagcccaactgcgaatgggctcagaaaatctctgatgacaacaagattgtgtttcactcaaggcaggacgctctgaactcgggaaggcaaccttgcgaggtctgcaatccc

SEQ ID NO: 46212 - DNA, 42 bp, synthetic construct
  source 1..42: mol_type = other DNA
tccagcaccgaccggatcgtggataacgtggtgtcaggagag

SEQ ID NO: 46213 - DNA, 45 bp, synthetic construct
  source 1..45: mol_type = other DNA
agccggtccgatcgggtcattgacaacgtgatctctggagagaat

SEQ ID NO: 46214 - DNA, 63 bp, synthetic construct
  source 1..63: mol_type = other DNA
gagttcggcattttgccaagtactttcctgaatgcctacctctcgctccaagactttgctaac

SEQ ID NO: 46215 - DNA, 54 bp, synthetic construct
  source 1..54: mol_type = other DNA
gatatgggcaaccagattaccgacctgtaccatccaatctttgctgtgttcgac

SEQ ID NO: 46216 - DNA, 63 bp, synthetic construct
  source 1..63: mol_type = other DNA
gagttcggcatacttccgagcaccttccttaacgcctacctgtcgttgcaagattttgctaat

SEQ ID NO: 46217 - DNA, 51 bp, synthetic construct
  source 1..51: mol_type = other DNA
gatatgggcaatcagatcaccgatctttaccaccctatctttgccgtattc

SEQ ID NO: 46218 - DNA, 33 bp, synthetic construct
  source 1..33: mol_type = other DNA
atctacaacgcatgggttggccccaccctttcc

SEQ ID NO: 46219 - DNA, 96 bp, synthetic construct
  source 1..96: mol_type = other DNA
gggatctcccacgtcgtgaagggcttcgaccttgtatctttgggcaacttcgtggtcggagcttttatgggcgaagtatatggatttaacgctaac

SEQ ID NO: 46220 - DNA, 42 bp, synthetic construct
  source 1..42: mol_type = other DNA
cggtcatcccctactaacatctcctgcttccaacggtacagc

SEQ ID NO: 46221 - DNA, 207 bp, synthetic construct
  source 1..207: mol_type = other DNA
cagctgtcccctattgaccccgtccgcgcttacctaggtcaacgtatagtcagccaggaacagctcgccatagttggccagtactggggcacagatctcactctgggcgaacgcgtgctgggatggctgcaaactttagcatcggggtccatgggattctctctgatctatagggtgccagtcaccgaagttattaagcaaaaagtg

SEQ ID NO: 46222 - DNA, 87 bp, synthetic construct
  source 1..87: mol_type = other DNA
gtgtacctgggatggttccccataggtctcagtgtacctatcgggcagctctccgacactgtgaccttttggcaatggctctaccgc

SEQ ID NO: 46223 - DNA, 72 bp, synthetic construct
  source 1..72: mol_type = other DNA
gagcaggttttcgcttacccggggatagggcaggccaccgtcgctgctgggctacgaagcgacgttcctctg

SEQ ID NO: 46224 - DNA, 63 bp, synthetic construct
  source 1..63: mol_type = other DNA
gagttcggcatattgcccggcaccttcatccacgcctacctatcgcttcaagattttgctaac

SEQ ID NO: 46225 - DNA, 51 bp, synthetic construct
  source 1..51: mol_type = other DNA
gatatgggtacccagatcacaaatctctaccaccctatcttcgctattttc

SEQ ID NO: 46226 - DNA, 42 bp, synthetic construct
  source 1..42: mol_type = other DNA
gggttgacctctttcgacggaaccgagactggcttggatgga

SEQ ID NO: 46227 - DNA, 57 bp, synthetic construct
  source 1..57: mol_type = other DNA
ctcctggtcttcgccccaagcgagtaccacacccttgatgagggggaagacgctgtg

SEQ ID NO: 46228 - DNA, 66 bp, synthetic construct
  source 1..66: mol_type = other DNA
atcggcgaggagatctctgaggacttcaccgacaagatgtccaactacgagattatggctagcatg

SEQ ID NO: 46229 - DNA, 66 bp, synthetic construct
  source 1..66: mol_type = other DNA
gagggcaatctgatcctggagaacagcaccctcaaggacaactccgctgatgactgttctggagcc

SEQ ID NO: 46230 - DNA, 102 bp, synthetic construct
  source 1..102: mol_type = other DNA
gtggaaggcagcaaagccgagatatacggatgcaccttcgaaaataaccacgccaaggacgacgagggtgccttatgggctaaggataaccttatcgcgaag

SEQ ID NO: 46231 - DNA, 90 bp, synthetic construct
  source 1..90: mol_type = other DNA
aaggccgagatttacggatgcaccttcgagaacaatcacgctaaggacgacggcggcgccttatgggctaaaggcaatgctaacatccag

SEQ ID NO: 46232 - DNA, 42 bp, synthetic construct
  source 1..42: mol_type = other DNA
agatctgatcgcgtgatcgataatgtcgtatctggcgagacc

SEQ ID NO: 46233 - DNA, 30 bp, synthetic construct
  source 1..30: mol_type = other DNA
ttcagctccggcaacaccatggactacgtg

SEQ ID NO: 46234 - DNA, 42 bp, synthetic construct
  source 1..42: mol_type = other DNA
ggtgagatgcaggtctacctcattagccatatcaagctgtca

SEQ ID NO: 46235 - DNA, 63 bp, synthetic construct
  source 1..63: mol_type = other DNA
agcgacgggctgacccttgaggagggtgtccgcctctccgcttttctcgccaacgataagttc

SEQ ID NO: 46236 - DNA, 30 bp, synthetic construct
  source 1..30: mol_type = other DNA
gtgaccggcatcaccgagaggagcatcgag

SEQ ID NO: 46237 - DNA, 30 bp, synthetic construct
  source 1..30: mol_type = other DNA
ttctccagcaacaactctatgagttacatc

SEQ ID NO: 46238 - DNA, 45 bp, synthetic construct
  source 1..45: mol_type = other DNA
tccgggaccgagcggatcgtggacaacgtcgtttccggagaaaat

SEQ ID NO: 46239 - DNA, 30 bp, synthetic construct
  source 1..30: mol_type = other DNA
accgtgttccatcctcacaactacgatcgg

SEQ ID NO: 46240 - DNA, 36 bp, synthetic construct
  source 1..36: mol_type = other DNA
ggccaatacgaaataatctccatcaacctgtcttcc

SEQ ID NO: 46241 - DNA, 96 bp, synthetic construct
  source 1..96: mol_type = other DNA
atgggctttaacgtctcgggacaagaggagattaccagcctgatcaacttcaatcaagtccactactccatcctcggcggcaataacttcggaccc

SEQ ID NO: 46242 - DNA, 33 bp, synthetic construct
  source 1..33: mol_type = other DNA
ttctccggaggctctagagacgataacggagcc

SEQ ID NO: 46243 - DNA, 30 bp, synthetic construct
  source 1..30: mol_type = other DNA
ttcagcaacggcatctccctggactacccc

SEQ ID NO: 46244 - DNA, 66 bp, synthetic construct
  source 1..66: mol_type = other DNA
gaatggggtatcctgcccggcacctttctcaatgtgtacctttccctccaagacttcgccgataac

SEQ ID NO: 46245 - DNA, 57 bp, synthetic construct
  source 1..57: mol_type = other DNA
gtggacttcggcaatcccgtcaccaacctgtaccaccctatcttcgaggaagtattt

SEQ ID NO: 46246 - DNA, 33 bp, synthetic construct
  source 1..33: mol_type = other DNA
ggcaatcagctgttcggactttccaacaatcat

SEQ ID NO: 46247 - DNA, 36 bp, synthetic construct
  source 1..36: mol_type = other DNA
ttcagcggcggcggtggcgataatgacaacggaggc

SEQ ID NO: 46248 - DNA, 30 bp, synthetic construct
  source 1..30: mol_type = other DNA
ttctccagcggcaacgccatggactacacc

SEQ ID NO: 46249 - DNA, 102 bp, synthetic construct
  source 1..102: mol_type = other DNA
accagcttcttcgagaacgaagcctactcctactacgacgacgaggacgagatcaatatcgctggcttcggcggagccattatgcactttggagagttcgat

SEQ ID NO: 46250 - DNA, 273 bp, synthetic construct
  source 1..273: mol_type = other DNA
gtgagcttcctgggcaataaggtcagcggatacggacacggcggcgctatcgctgtagttggaacaacccggcctaaatccctgattgaaaatgcgttcttttcgcaaaacatctgtgaaggggccggcggaggagccatatatacggtccatgacctggtcgtggcaaactgcatattcatccgcaactatgccgtcggcaagaaggaggtccagtttgggcctgacaaggacatcgatttagccggagggactatctattgccgagacgag

SEQ ID NO: 46251 - DNA, 30 bp, synthetic construct
  source 1..30: mol_type = other DNA
tatcatccttacgacatctctactgcaaac

SEQ ID NO: 46252 - DNA, 30 bp, synthetic construct
  source 1..30: mol_type = other DNA
ttcagctccgccaacaccatcgactacgcc

SEQ ID NO: 46253 - DNA, 30 bp, synthetic construct
  source 1..30: mol_type = other DNA
ttcagcaacggcaatgctatggactacgcc

SEQ ID NO: 46254 - DNA, 48 bp, synthetic construct
  source 1..48: mol_type = other DNA
agccggacagacaggattatcgacaacgtggttgcgggagaaaccact

SEQ ID NO: 46255 - DNA, 30 bp, synthetic construct
  source 1..30: mol_type = other DNA
atccacaacaccgaagtgattttccctgag

SEQ ID NO: 46256 - DNA, 63 bp, synthetic construct
  source 1..63: mol_type = other DNA
tggggcatcatgcccgcttcctttctcaacttctacctgagcatccagaacatcgccgataat

SEQ ID NO: 46257 - DNA, 54 bp, synthetic construct
  source 1..54: mol_type = other DNA
gacctgcacattcccgtgaccgacatgtacggccctatcttcgccacattcgat

SEQ ID NO: 46258 - DNA, 30 bp, synthetic construct
  source 1..30: mol_type = other DNA
gagagccaggtgctgttcgacaaccttgtg

SEQ ID NO: 46259 - DNA, 60 bp, synthetic construct
  source 1..60: mol_type = other DNA
atggaccccagcttttccggaagaccgctgttcgaggagggccgttctgtgaatgagatg

SEQ ID NO: 46260 - DNA, 36 bp, synthetic construct
  source 1..36: mol_type = other DNA
tttactaactcgggtgctgtttacgcacacggaatc

SEQ ID NO: 46261 - DNA, 183 bp, synthetic construct
  source 1..183: mol_type = other DNA
aatgaagccgatgcaccaaacctgattcaatacgtcggctacatgccttgcttcgcccctgacatggcgctcaatagtttaggcaacaatataagtctggagcacttcggaaccaactttgtaccttctgcatggatgacacttggcggactgctgccataccctgttcgattaggctctgat

SEQ ID NO: 46262 - DNA, 42 bp, synthetic construct
  source 1..42: mol_type = other DNA
cccaattccttcaaatgggtgctaagcgagtacaacggtatc

SEQ ID NO: 46263 - DNA, 30 bp, synthetic construct; identical to SEQ ID NO: 46258
  source 1..30: mol_type = other DNA

SEQ ID NO: 46264 - DNA, 30 bp, synthetic construct
  source 1..30: mol_type = other DNA
ggaggccagctgttcgccaacctcgattct

SEQ ID NO: 46265 - DNA, 45 bp, synthetic construct
  source 1..45: mol_type = other DNA
cccattaagatccctctggccaaaggcgtcgaagtatcaatcatg

SEQ ID NO: 46266 - DNA, 30 bp, synthetic construct
  source 1..30: mol_type = other DNA
ggccagagcatgcacctgatcttcgagatg

SEQ ID NO: 46267 - DNA, 123 bp, synthetic construct
  source 1..123: mol_type = other DNA
agtctgctgcccctgcatccatacgcattcgctatggccagcggggttggctccgcatctatgaatgcagccgccctgggtccgaccctggctgcatttccaactctggagacaaacatcgaa

SEQ ID NO: 46268 - DNA, 30 bp, synthetic construct
  source 1..30: mol_type = other DNA
ttcagctccggcaacaccatggactacacc

SEQ ID NO: 46269 - DNA, 30 bp, synthetic construct
  source 1..30: mol_type = other DNA
ggcgagctgctcttcgccaacctggattcc

SEQ ID NO: 46270 - DNA, 45 bp, synthetic construct
  source 1..45: mol_type = other DNA
agccggtccgatagggttatagataacgtggtctctggagaatca

SEQ ID NO: 46271 - DNA, 33 bp, synthetic construct
  source 1..33: mol_type = other DNA
ttcagcggtggcggcgataatgataacggaggc

SEQ ID NO: 46272 - DNA, 33 bp, synthetic construct
  source 1..33: mol_type = other DNA
ttctccggcggcggtgacaatgataacggcggc

SEQ ID NO: 46273 - DNA, 45 bp, synthetic construct
  source 1..45: mol_type = other DNA
aagggactgcaggagcagatcaatgacgccagagctggatctacc

SEQ ID NO: 46274 - DNA, 159 bp, synthetic construct
  source 1..159: mol_type = other DNA
aaaatttccaaggacatggttatagatgggcacgggcacacaatcgacctggccggcagctctggccacgaccattacttcaaggtgaccgacggaagtgtcactttcaagaatatccggttcatcaacggctataacaaggatgatgacaccgatggc

SEQ ID NO: 46275 - DNA, 90 bp, synthetic construct
  source 1..90: mol_type = other DNA
atctgcacaatcatcaactgcaccttcgagaactgttgggccgagtccaaggccggggctattttttccattggcgaactgcggatcttt

SEQ ID NO: 46276 - DNA, 36 bp, synthetic construct
  source 1..36: mol_type = other DNA
agcaccttcctgaacaatcgggtcggcgacgatgga

SEQ ID NO: 46277 - DNA, 102 bp, synthetic construct
  source 1..102: mol_type = other DNA
ccattcgcattcggggacgtttccatcggaggactgatagctcagcctgctcacttccttatgagcggaattggcatcgacgatctcaccggctctatccca

SEQ ID NO: 46278 - DNA, 48 bp, synthetic construct
  source 1..48: mol_type = other DNA
gtttggggtggaggatggcttatgcaaatgggcgctctggatttcgcc

SEQ ID NO: 46279 - DNA, 30 bp, synthetic construct
  source 1..30: mol_type = other DNA
ggcggaagtgccctggctgcaaatggtctg

SEQ ID NO: 46280 - DNA, 51 bp, synthetic construct
  source 1..51: mol_type = other DNA
gcctcacccctcattaacgaggccagtggactgctgtttgggaatcccggc

SEQ ID NO: 46281 - DNA, 45 bp, synthetic construct
  source 1..45: mol_type = other DNA
ggcatctacattattagctccgacgccatcatgaactatactctc

SEQ ID NO: 46282 - DNA, 66 bp, synthetic construct
  source 1..66: mol_type = other DNA
tttgttagctttagtagtatccaggtcaacacaattgaggccggcaccctgttcttctctcacatg

SEQ ID NO: 46283 - DNA, 30 bp, synthetic construct
  source 1..30: mol_type = other DNA
atgcagggcctccaaaacgttaacatccaa

SEQ ID NO: 46284 - DNA, 39 bp, synthetic construct
  source 1..39: mol_type = other DNA
tttaccatcggctatgagttcaacctggaatgggagtac

SEQ ID NO: 46285 - DNA, 42 bp, synthetic construct
  source 1..42: mol_type = other DNA
cgcagcgatagagttatcgacaacgtcgtggcgggagagact

SEQ ID NO: 46286 - DNA, 30 bp, synthetic construct
  source 1..30: mol_type = other DNA
atcggcaccctgcctattgacgagttgccc

SEQ ID NO: 46287 - DNA, 33 bp, synthetic construct
  source 1..33: mol_type = other DNA
ctcggctctcccatcttcgaggggttgcctgcc

SEQ ID NO: 46288 - DNA, 42 bp, synthetic construct
  source 1..42: mol_type = other DNA
cccaagctgttcaactgggtgctcagcgaagttaatggcatc

SEQ ID NO: 46289 - DNA, 36 bp, synthetic construct
  source 1..36: mol_type = other DNA
gagtttctgaatgccatcaccaacattttcggttcc

SEQ ID NO: 46290 - DNA, 33 bp, synthetic construct
  source 1..33: mol_type = other DNA
gctgggacagcacccgtacacgaacttcctgcc

SEQ ID NO: 46291 - DNA, 129 bp, synthetic construct
  source 1..129: mol_type = other DNA
accgacggcacaccacttatcctgctggacaccatcttcgatcacacaagcaacgtggccgggtccaatggcctggtcaacatcggcgattggactgacctcatcttcggaaccttcgtgtctgaatcc

SEQ ID NO: 46292 - DNA, 45 bp, synthetic construct
  source 1..45: mol_type = other DNA
agcgggaccgagcggatcgtcgacaacgtggtgtccggcgaaaat

SEQ ID NO: 46293 - DNA, 36 bp, synthetic construct
  source 1..36: mol_type = other DNA
atcggcacggctcctattgacgccgagctggcgccc

SEQ ID NO: 46294 - DNA, 33 bp, synthetic construct
  source 1..33: mol_type = other DNA
atcggcagccccaccgtgaacgagctgcccgcc

SEQ ID NO: 46295 - DNA, 33 bp, synthetic construct
  source 1..33: mol_type = other DNA
ataccacaaatcaatctcatacaatacaccgga

SEQ ID NO: 46296 - DNA, 36 bp, synthetic construct
  source 1..36: mol_type = other DNA
tacaccctgggaggcagcctctccgggatcttcaat

SEQ ID NO: 46297 - DNA, 90 bp, synthetic construct
  source 1..90: mol_type = other DNA
gacgagtctcccaacttatttgattcattgtacttcgtcatcattaccctcactaccgttggctacggagatatgggtttcacatccccc

SEQ ID NO: 46298 - DNA, 63 bp, synthetic construct
  source 1..63: mol_type = other DNA
atgcctaccgtcgacaccttcctgcccgatattattcaaacgacttttttctccggttacacc

SEQ ID NO: 46299 - DNA, 45 bp, synthetic construct
  source 1..45: mol_type = other DNA
gtggacaacggcattctgcctaagaccgtcttcctcatcacaccc

SEQ ID NO: 46300 - DNA, 72 bp, synthetic construct
  source 1..72: mol_type = other DNA
gccgtggagtacttcaactacgtcgagcaacacgtgctgccaaacgctatcaatcagctgtttgacacctat

SEQ ID NO: 46301 - DNA, 75 bp, synthetic construct
  source 1..75: mol_type = other DNA
ggcacagtctggctcaaattctacgaaaatctcaagaacttttcctcctctttcgagaagtattttagttatttc

SEQ ID NO: 46302 - DNA, 57 bp, synthetic construct
  source 1..57: mol_type = other DNA
ggcaatatcctggaccttctgactaatcactcattttccgggtctcacctcctgatc

SEQ ID NO: 46303 - DNA, 72 bp, synthetic construct
  source 1..72: mol_type = other DNA
ctgaaccgattcaatatcaactactttacttcaccaaacatcgccattcttaaccaactcacgttttacccc

SEQ ID NO: 46304 - DNA, 45 bp, synthetic construct
  source 1..45: mol_type = other DNA
gacttcatcgccataatatcatcgttaatcaacaatgtgcttgtg

SEQ ID NO: 46305 - DNA, 36 bp, synthetic construct
  source 1..36: mol_type = other DNA
gccggaaccacccccatttccgaactgcctccaaca

SEQ ID NO: 46306 - DNA, 39 bp, synthetic construct
  source 1..39: mol_type = other DNA
attacaagcatcgtgaccgccatccccgacaaccctaat

SEQ ID NO: 46307 - DNA, 54 bp, synthetic construct
  source 1..54: mol_type = other DNA
aagattagcgacatcctgtccttcgacgccatcaacgtgctcgatccctacatc

SEQ ID NO: 46308 - DNA, 36 bp, synthetic construct
  source 1..36: mol_type = other DNA
ggctacttcaacaaggagctgctgagcaacatcaat

SEQ ID NO: 46309 - DNA, 66 bp, synthetic construct
  source 1..66: mol_type = other DNA
ctcggcagtttcatgcaacataatatttctaaccccatccaaactctattgacctctagtgacatg

SEQ ID NO: 46310 - DNA, 54 bp, synthetic construct
  source 1..54: mol_type = other DNA
ttcgctgccaactcaatgcaactcgtcgagagcggaaccgggtctatcggtgat

SEQ ID NO: 46311 - DNA, 30 bp, synthetic construct
  source 1..30: mol_type = other DNA
ttctccagcggcaacaccatggactactcc

SEQ ID NO: 46312 - DNA, 30 bp, synthetic construct
  source 1..30: mol_type = other DNA
cccggcgagctgctcttcgacaacctgaat

SEQ ID NO: 46313 - DNA, 33 bp, synthetic construct
  source 1..33: mol_type = other DNA
gcagggtcccacccggtcgctgaattgccagct

SEQ ID NO: 46314 - DNA, 51 bp, synthetic construct
  source 1..51: mol_type = other DNA
atgaccttttccggttttcataccatcaagctcgaaaatgagattccaatc

SEQ ID NO: 46315 - DNA, 201 bp, synthetic construct
  source 1..201: mol_type = other DNA
aagggcgacaatttcaccgtgattatgactaagaacagcgccccactgcttaattttagtcaaatctactttaaagagaacgtgtcattttacaacaatggaaatggttggattgatgcttctcttaccaatcaaaccgctatcctgaaggtctacaccaaggatctggctatatatacggaagatttagtcaaaatatat

SEQ ID NO: 46316 - DNA, 225 bp, synthetic construct
  source 1..225: mol_type = other DNA
aacgcttccaagttcgaggccgagatcggcatcgccaacaagaccgtcacattcgagattaatggaggcaagtataacaggacaagcgacgagaatggcactgcccggatgactatcaacctggagcctgggaactacaccattaagaccacatttaacggcaccaccgtggagaacacagttacggtcctcccaacgctcatcgctgacaacctggtcaaatat

SEQ ID NO: 46317 - DNA, 57 bp, synthetic construct
  source 1..57: mol_type = other DNA
ttctttatatcgctaatcgacggagagggcaatccagtagcgggggttaatataact

SEQ ID NO: 46318 - DNA, 174 bp, synthetic construct
  source 1..174: mol_type = other DNA
aacggcgtcttttacaaccggctgactaacgagaatggcacagccaagctgaacatcaatctcgagcccggcgaatacatactgaccgccaccgatcctctgaccggactgcagatgagctacaacatcaccgtgctccccgtactgttcgctgacaacctggagatgaagtat

SEQ ID NO: 46319 - DNA, 57 bp, synthetic construct
  source 1..57: mol_type = other DNA
ttcaatgccctggtgctcaacggcgagggcaagcccctggctaacgccaaagtgacc

SEQ ID NO: 46320 - DNA, 135 bp, synthetic construct
  source 1..135: mol_type = other DNA
aatggcgtgttctacacccgctatgcaaactcctctggaattgctaagctgaacatcaatctcatggccggcgagtacatcatcacttccgaatacgacgggatgcggatcagcaacaccatcaccatcaaggat

SEQ ID NO: 46321 - DNA, 111 bp, synthetic construct
  source 1..111: mol_type = other DNA
agcataggcgagtattctatttcgtttaccgaaacctacgtccggatctgggagcacattactgggagcatcacccatcctatcgacgacgccgtcgtctggaacatgcgc

SEQ ID NO: 46322 - DNA, 30 bp, synthetic construct
  source 1..30: mol_type = other DNA
gcaggcgtcaccgtgatcggaggagactac

SEQ ID NO: 46323 - DNA, 78 bp, synthetic construct
  source 1..78: mol_type = other DNA
aagctttgggccacggatgaggccctcgccaacgtctacgcatggtccgtcggctccctaacgggcctttcttgggac

SEQ ID NO: 46324 - DNA, 33 bp, synthetic construct
  source 1..33: mol_type = other DNA
ctcggcgtcggacctgtgaacgaaatccctgcc

SEQ ID NO: 46325 - DNA, 33 bp, synthetic construct
  source 1..33: mol_type = other DNA
accgagctggcccacatgattggtatctctgac

SEQ ID NO: 46326 - DNA, 33 bp, synthetic construct
  source 1..33: mol_type = other DNA
atcggggtcgcccctataacacagattcccgcc

SEQ ID NO: 46327 - DNA, 57 bp, synthetic construct
  source 1..57: mol_type = other DNA
gggattatcactggcaacgctaagctggagagcctgttgacacccgcctatacactt

SEQ ID NO: 46328 - DNA, 54 bp, synthetic construct
  source 1..54: mol_type = other DNA
caggataagtccctctatcccatcctgaccggctctctacactattctcaccct

SEQ ID NO: 46329 - DNA, 33 bp, synthetic construct
  source 1..33: mol_type = other DNA
ttcagccatcagcacatcattaacatcgataca

SEQ ID NO: 46330 - DNA, 45 bp, synthetic construct
  source 1..45: mol_type = other DNA
agctctggcacaccctttacttcctccttctccttcaactggagt

SEQ ID NO: 46331 - DNA, 36 bp, synthetic construct
  source 1..36: mol_type = other DNA
ctcaacttaccggtttcgaatctggtgcctcttggg

SEQ ID NO: 46332 - DNA, 33 bp, synthetic construct
  source 1..33: mol_type = other DNA
atcggggtccaacctgtggcccagattcccgct

SEQ ID NO: 46333 - DNA, 33 bp, synthetic construct
  source 1..33: mol_type = other DNA
atcggagccgctcccgtcgcacaaatcccagcc

SEQ ID NO: 46334 - DNA, 36 bp, synthetic construct
  source 1..36: mol_type = other DNA
tctctgattaaccactcgttcaatagctcccatctg

SEQ ID NO: 46335 - DNA, 75 bp, synthetic construct
  source 1..75: mol_type = other DNA
gaccttaatcattttaatatcaactacttccacaacctggacctggccatcctgaaccagttcatcttctatcca

SEQ ID NO: 46336 - DNA, 42 bp, synthetic construct
  source 1..42: mol_type = other DNA
gactttatttccatcataagcgggttcatcaagatcatgctg

SEQ ID NO: 46337 - DNA, 102 bp, synthetic construct
  source 1..102: mol_type = other DNA
ctggccttcaaaaagtataatgtcaagtccggcatattcggctctccgtggaacggatttatcaattttgggttcctgctcaagaacaagactttgcctatc

SEQ ID NO: 46338 - DNA, 90 bp, synthetic construct
  source 1..90: mol_type = other DNA
ttcctcgatcccgaggccggcctgatcaaccacatcattcaatactttggcggcaagaagattatgtggtatgacacccctaagtactgg

SEQ ID NO: 46339 - DNA, 114 bp, synthetic construct
  source 1..114: mol_type = other DNA
gacttcgggctgttttaccaagtccctcaaaatagcggcctcatccaaaatgtaacacagaccatcgatactttcgtgtaccggtccctccttgtacaaaacaacatcggactt

SEQ ID NO: 46340 - DNA, 63 bp, synthetic construct
  source 1..63: mol_type = other DNA
atcaagctgcccgatgtgcctctgcggacagtggccgactttaccgtctttctgcaacaacaa

SEQ ID NO: 46341 - DNA, 36 bp, synthetic construct
  source 1..36: mol_type = other DNA
gtggagctcgcccacatgatcggcattagtgacctg

SEQ ID NO: 46342 - DNA, 48 bp, synthetic construct
  source 1..48: mol_type = other DNA
agcaggtctgatcgggtcgtggacaacgtggtggctggaacggcagaa

SEQ ID NO: 46343 - DNA, 33 bp, synthetic construct
  source 1..33: mol_type = other DNA
gagcttgcccacatgatcggcatttctgatctg

SEQ ID NO: 46344 - DNA, 36 bp, synthetic construct
  source 1..36: mol_type = other DNA
ggagccatcaccacactgggtggttttcaactcggt

SEQ ID NO: 46345 - DNA, 33 bp, synthetic construct
  source 1..33: mol_type = other DNA
ctccggattgaccccttcatggagatccctgcc

SEQ ID NO: 46346 - DNA, 45 bp, synthetic construct
  source 1..45: mol_type = other DNA
tctcggtccgatagggtcatcgacaacgtggtggctggagaaagc

SEQ ID NO: 46347 - DNA, 81 bp, synthetic construct
  source 1..81: mol_type = other DNA
ttccctactgaatttggcttcgaggatgtttggaagaacatcatccccaccttttatacaaaagggcaattctcacgttat

SEQ ID NO: 46348 - DNA, 57 bp, synthetic construct
  source 1..57: mol_type = other DNA
agcctggggctcatcgagaccggcttcggactgtactccttcaactgctatctctcc

SEQ ID NO: 46349 - DNA, 60 bp, synthetic construct
  source 1..60: mol_type = other DNA
atgatcgtcgataaatatgtgctggccaagaagtttgccttcctggctaacatggatccg

SEQ ID NO: 46350 - DNA, 45 bp, synthetic construct
  source 1..45: mol_type = other DNA
agccggtctgaccgcgtgatagataacgtggtcgctggagaatcc

SEQ ID NO: 46351 - DNA, 102 bp, synthetic construct
  source 1..102: mol_type = other DNA
atgaacatattcatcgatccactcttgttcatccaattcctaagacagagcatcggtggaatcttcgactccttctttatttcttgctcattttacggcgag

SEQ ID NO: 46352 - DNA, 105 bp, synthetic construct
  source 1..105: mol_type = other DNA
accctctgcatataccggccctggatcctagatagccgagttaagcctgtcaccgaggccctggctactgccactggctactctttccctagcgggcatacaagc

SEQ ID NO: 46353 - DNA, 66 bp, synthetic construct
  source 1..66: mol_type = other DNA
gctaagggttaccctatggactatgatagcgccggcaaactgatcgtggaccccgcaatcatgacc

SEQ ID NO: 46354 - DNA, 30 bp, synthetic construct
  source 1..30: mol_type = other DNA
ttctccaccgcgaattcgatggactacagc

SEQ ID NO: 46355 - DNA, 33 bp, synthetic construct
  source 1..33: mol_type = other DNA
ggcgtgctcctgtttgagaattttaatagctca

SEQ ID NO: 46356 - DNA, 36 bp, synthetic construct
  source 1..36: mol_type = other DNA
gtgttcagcggcggtgaccgggataataggaacagc

SEQ ID NO: 46357 - DNA, 48 bp, synthetic construct
  source 1..48: mol_type = other DNA
tcccggagcgacagggtcatcgataatgtagtcaatggcgagaacgct

SEQ ID NO: 46358 - DNA, 102 bp, synthetic construct
  source 1..102: mol_type = other DNA
atgaacatcttcatcgatcccatcctgttcattcaatttctgaggcaatctatcggcggcatatttgatagcttcttcatatcgtgtagtttttacggagaa

SEQ ID NO: 46359 - DNA, 105 bp, synthetic construct
  source 1..105: mol_type = other DNA
gccctgtgcatctaccggccttggattttggactcgcgtgtcaagccagtgacagaggccctggctaccgccactggctattctttcccaagtggacatgcttct

SEQ ID NO: 46360 - DNA, 66 bp, synthetic construct
  source 1..66: mol_type = other DNA
gctaagggctaccctatggactatgatagcgccggcaagctgattgtcgaccccgtgatcatgaac

SEQ ID NO: 46361 - DNA, 30 bp, synthetic construct
  source 1..30: mol_type = other DNA
ttctctacggcaaattctcttgactactcc

SEQ ID NO: 46362 - DNA, 42 bp, synthetic construct
  source 1..42: mol_type = other DNA
cactacagatttgatatgctgttcgacatcctggagtcagcc

SEQ ID NO: 46363 - DNA, 54 bp, synthetic construct
  source 1..54: mol_type = other DNA
gtggacataacgagcatcaccgccaagatcttctatgctctgttttaccgattc

SEQ ID NO: 46364 - DNA, 51 bp, synthetic construct
  source 1..51: mol_type = other DNA
aactatattctgagcaacctctatctgcacattcgatcgttgctggtggtt

SEQ ID NO: 46365 - DNA, 93 bp, synthetic construct
  source 1..93: mol_type = other DNA
gacctgaaccacctgaacctggagaacatctacttcaacgaagccctcgactccctcaacctcgctattagcaatcagatggtcttctatcct

SEQ ID NO: 46366 - DNA, 36 bp, synthetic construct
  source 1..36: mol_type = other DNA
attgccatagtctcatcgtacataaagatcctgttc

SEQ ID NO: 46367 - DNA, 48 bp, synthetic construct
  source 1..48: mol_type = other DNA
aagaccctcaagtctagcgacatttcctggaagatactccaatcaact

SEQ ID NO: 46368 - DNA, 36 bp, synthetic construct
  source 1..36: mol_type = other DNA
gccctttgggatgttaccctcatccggaacacaaat

SEQ ID NO: 46369 - DNA, 66 bp, synthetic construct
  source 1..66: mol_type = other DNA
ataggcaacacactgaccaacgacgtgattaatcccatcgagcagataattcaaaactcctccatc

SEQ ID NO: 46370 - DNA, 57 bp, synthetic construct
  source 1..57: mol_type = other DNA
ttctctacctccctgagcaacataactcagaacataaacagtgccaacattggagac

SEQ ID NO: 46371 - DNA, 51 bp, synthetic construct
  source 1..51: mol_type = other DNA
gtatacagcagctttatgatgaacctgggacgggcatctacaacctgccag

SEQ ID NO: 46372 - DNA, 57 bp, synthetic construct
  source 1..57: mol_type = other DNA
gagctgcccgaaacaaatttcacatctggatattccctatatgcattcatgcatagc

SEQ ID NO: 46373 - DNA, 105 bp, synthetic construct
  source 1..105: mol_type = other DNA
atgaacatcctgatcgacccactcctgtttttacaacatttgcgggagatgtccgggggcctgtttgacacattctttacatcctgtagttactacgagtttgcg

SEQ ID NO: 46374 - DNA, 105 bp, synthetic construct
  source 1..105: mol_type = other DNA
ctcacctgcatatatcggccctggattctagactcccgaatcaagcctgtgaaggatgctattcctggagctacaggctattccttcccctctggacacagtgcc

SEQ ID NO: 46375 - DNA, 66 bp, synthetic construct
  source 1..66: mol_type = other DNA
acaaagagctaccccatggactataatgctgccggcaaactgatcgtgaaccctgagaccatgatc

SEQ ID NO: 46376 - DNA, 42 bp, synthetic construct
  source 1..42: mol_type = other DNA
cccaatacatttaactgggtgcttgagaagtttatgggcatc

SEQ ID NO: 46377 - DNA, 81 bp, synthetic construct
  source 1..81: mol_type = other DNA
atgctgtttctgcaaggcttgcgcgaagcatctggcggtttctttgatcaattcttcatgagatgcaccgagttcggaaac

SEQ ID NO: 46378 - DNA, 105 bp, synthetic construct
  source 1..105: mol_type = other DNA
accgcctgcgtgtatcggccctggattgaggaccctaagatccatccttacgaaggcgctctcaaggacgcaacaggctactccctgccaagcggacactctact

SEQ ID NO: 46379 - DNA, 66 bp, synthetic construct
  source 1..66: mol_type = other DNA
ttcaagagctaccctatggactacaacgccgccggcaaactgatcgtggagcccgctaagatggcc

SEQ ID NO: 46380 - DNA, 42 bp, synthetic construct
  source 1..42: mol_type = other DNA
gccctatgggacgttaacttcattaagaacatcaacaaccag

SEQ ID NO: 46381 - DNA, 60 bp, synthetic construct
  source 1..60: mol_type = other DNA
ggcaacgccatcaccaatgagattgtgaaccccatagaagagcttattcaaaacagcagc

SEQ ID NO: 46382 - DNA, 57 bp, synthetic construct
  source 1..57: mol_type = other DNA
tttttcaacctggctaaggagaacatcgtgcacggcatcaccatggccaacattggc

SEQ ID NO: 46383 - DNA, 30 bp, synthetic construct
  source 1..30: mol_type = other DNA
cacgtgcccatcgacttcgtcgatgctcat

SEQ ID NO: 46384 - DNA, 42 bp, synthetic construct
  source 1..42: mol_type = other DNA
tgcgacggcacaccgttcacgtcgggtttctcctttaactgg

SEQ ID NO: 46385 - DNA, 39 bp, synthetic construct
  source 1..39: mol_type = other DNA
ctcaacaagcccgtgtacaatctggttcctcttggagag

SEQ ID NO: 46386 - DNA, 33 bp, synthetic construct
  source 1..33: mol_type = other DNA
ggcgagaactttagctggttccgagccatccag

SEQ ID NO: 46387 - DNA, 45 bp, synthetic construct
  source 1..45: mol_type = other DNA
tccagtggcacacctttcacatctagtttcaacttcaattggagt

SEQ ID NO: 46388 - DNA, 39 bp, synthetic construct
  source 1..39: mol_type = other DNA
ctgaacctgcccgtctacaacctcgtgcctcttaacgag

SEQ ID NO: 46389 - DNA, 30 bp, synthetic construct
  source 1..30: mol_type = other DNA
ggcgagaacttttcctggttccgtgctatc

SEQ ID NO: 46390 - DNA, 36 bp, synthetic construct
  source 1..36: mol_type = other DNA
agcctgatcaaccctcaatatctgggcgacatgaac

SEQ ID NO: 46391 - DNA, 66 bp, synthetic construct
  source 1..66: mol_type = other DNA
ctgagcggcgctatacaaacagacattgctaacccggtacaacaactaatcaactcaaccgacatt

SEQ ID NO: 46392 - DNA, 45 bp, synthetic construct
  source 1..45: mol_type = other DNA
ctcgccgactcaatcatgaattttcaacttaacctgaatcctgtg

SEQ ID NO: 46393 - DNA, 36 bp, synthetic construct
  source 1..36: mol_type = other DNA
agcgccattggccttagagctgggttgagtgccgca

SEQ ID NO: 46394 - DNA, 42 bp, synthetic construct
  source 1..42: mol_type = other DNA
ccccggtcattcaactgggtgctcgaggaatttatgggtatc

SEQ ID NO: 46395 - DNA, 42 bp, synthetic construct
  source 1..42: mol_type = other DNA
cccaattcatttaactgggttatggaagagttcatgggtatc

SEQ ID NO: 46396 - DNA, 48 bp, synthetic construct
  source 1..48: mol_type = other DNA
aacagcaattccgtggccgtcatcattggcgctatgctgatctctcct

SEQ ID NO: 46397 - DNA, 57 bp, synthetic construct
  source 1..57: mol_type = other DNA
agcctgattacaaccaccattcccacggagcagttgcttgcaagaacagaacctacc

SEQ ID NO: 46398 - DNA, 195 bp, synthetic construct
  source 1..195: mol_type = other DNA
gtgtatatggagcatgtggaggaaggcaacgccaacacgatgtacagtgccaacgacagtagtagtataaagatggacacaggcaatggaatccagaagtccatcgatgagaagtctcatatcaaggttctcaattacttttcaaatagcttcatctcctacgaatacaataacctgataagcgcttctttggtg

SEQ ID NO: 46399 - DNA, 60 bp, synthetic construct
  source 1..60: mol_type = other DNA
atcgacaacaccgccctgtggtacggctgggtcatgctggctgcggttcccggcggcgca

SEQ ID NO: 46400 - DNA, 81 bp, synthetic construct
  source 1..81: mol_type = other DNA
atgctgtttcttcaaggcctacggggggcgtccggtggcttctttgaccaattctttatgtcttgtaccgaatttggaaac

SEQ ID NO: 46401 - DNA, 105 bp, synthetic construct
  source 1..105: mol_type = other DNA
accgcttgcgtgtaccggccttggattgaggacccaaagatccatcccttcgaaggcgccctgaaggacgcgacgggatactcactaccttctggccatgcaacc

SEQ ID NO: 46402 - DNA, 63 bp, synthetic construct
  source 1..63: mol_type = other DNA
aagagctaccccatggattataactcagcgggcaaactcgttgtggaacctgccaagatggct

SEQ ID NO: 46403 - DNA, 42 bp, synthetic construct
  source 1..42: mol_type = other DNA
ccaaattcctttaactgggttatggaagagttcatgggtgtg

SEQ ID NO: 46404 - DNA, 39 bp, synthetic construct
  source 1..39: mol_type = other DNA
cggagcatcaacccccatctcctggacgatgctctgact

SEQ ID NO: 46405 - DNA, 72 bp, synthetic construct
  source 1..72: mol_type = other DNA
agcctcatcggaggagtgttgcaatctgaaattatcaaccccgttggagaactgatcaacaatggaggcatc

SEQ ID NO: 46406 - DNA, 60 bp, synthetic construct
  source 1..60: mol_type = other DNA
atgtttactgagtcagccaacaaagtcatgcaaggagtctctggcgctgctcctactgac

SEQ ID NO: 46407 - DNA, 33 bp, synthetic construct
  source 1..33: mol_type = other DNA
ttcttctctagctccaacaccatcgagcttgtc

SEQ ID NO: 46408 - DNA, 33 bp, synthetic construct
  source 1..33: mol_type = other DNA
gagtcccactcacttctgaacaacctggactcc

SEQ ID NO: 46409 - DNA, 204 bp, synthetic construct
  source 1..204: mol_type = other DNA
gacctgtctcccatcaatcctgtgtccgtgtacctcaagggggcagcggtatcagagtcccagcgggctatcctgaacgagtatttcggagtcggcgtcccgctccaaacgaagatctaccactggctgctcaacctgatccaaggcaacctgggcacaagcctaatatatcgcgcgcctgttctcgatgtgattatcgacaag

SEQ ID NO: 46410 - DNA, 120 bp, synthetic construct
  source 1..120: mol_type = other DNA
gccgtgtacctgaagctcttccccatcggattcggcgttcctatcggggtccggagcacagacgcttccttcatcatcggggttcgttccaccgacgcctctttcattgattgggcatcc

SEQ ID NO: 46411 - DNA, 111 bp, synthetic construct
  source 1..111: mol_type = other DNA
gagcaagtgttctcctaccccggcatcggacagactgcggtgaccgccgggctacaaagcgatgtcccactgtggaatcggtctaactgctgctattgccgatcatccaaa

SEQ ID NO: 46412 - DNA, 30 bp, synthetic construct
  source 1..30: mol_type = other DNA
tacgctcccttcgacgtggagacagcacac

SEQ ID NO: 46413 - DNA, 36 bp, synthetic construct
  source 1..36: mol_type = other DNA
agcgtgatcaatcccgagtacctgcacgacattaac

SEQ ID NO: 46414 - DNA, 66 bp, synthetic construct
  source 1..66: mol_type = other DNA
ctcagcggcgcaatgcaaagcgatattgccaatcctgtacaacaactaatcaactctgctgacatc

SEQ ID NO: 46415 - DNA, 48 bp, synthetic construct
  source 1..48: mol_type = other DNA
atcctggccaactctgtttccaatattcagatcaaccccaatcctgtg

SEQ ID NO: 46416 - DNA, 72 bp, synthetic construct
  source 1..72: mol_type = other DNA
acacttcccggggcctacatcggcatcaatgctctgctgacccctgaatgggatttgctcttcgacgttaac

SEQ ID NO: 46417 - DNA, 105 bp, synthetic construct
  source 1..105: mol_type = other DNA
ggatacatgacgtacacaagcggcaccccactcacccctctggtctccgagggcaccggactggtctttgtggttctgccccggattttcgaagcaatgggtcct

SEQ ID NO: 46418 - DNA, 33 bp, synthetic construct
  source 1..33: mol_type = other DNA
cactccagccccttcgaccctgtgactgctaac

SEQ ID NO: 46419 - DNA, 33 bp, synthetic construct
  source 1..33: mol_type = other DNA
cagtacttcatcaacctgggcaccaagatctat

SEQ ID NO: 46420 - DNA, 30 bp, synthetic construct
  source 1..30: mol_type = other DNA
agctcccctttcgaccccatgaccgcaaac

SEQ ID NO: 46421 - DNA, 48 bp, synthetic construct
  source 1..48: mol_type = other DNA
tacggctttgccttgttctcggtgaccggggctgagacatccatcttc

SEQ ID NO: 46422 - DNA, 33 bp, synthetic construct
  source 1..33: mol_type = other DNA
tacatcgctctggccttcggcatgagcgaaacc

SEQ ID NO: 46423 - DNA, 33 bp, synthetic construct
  source 1..33: mol_type = other DNA
gtggctgggttggggcagactgcaattgccggt

SEQ ID NO: 46424 - DNA, 60 bp, synthetic construct
  source 1..60: mol_type = other DNA
cggcccctgctcgagtcctatggggccagcggccagaccctgaacgaagcaatcgcttat

SEQ ID NO: 46425 - DNA, 33 bp, synthetic construct
  source 1..33: mol_type = other DNA
agcatggtcggcggggactacggagtggctacc

SEQ ID NO: 46426 - DNA, 36 bp, synthetic construct
  source 1..36: mol_type = other DNA
tcctacatcgccatggctttcggcatgagcgaaaca

SEQ ID NO: 46427 - DNA, 33 bp, synthetic construct
  source 1..33: mol_type = other DNA
atcaccgaggtttatgttgagcgggaaagtcag

SEQ ID NO: 46428 - DNA, 33 bp, synthetic construct
  source 1..33: mol_type = other DNA
atggactatgttggactttactcgtcccaacca

SEQ ID NO: 46429 - DNA, 39 bp, synthetic construct
  source 1..39: mol_type = other DNA
atgaacatgaccaaccccgagtacctgagcgacatgaat

SEQ ID NO: 46430 - DNA, 66 bp, synthetic construct
  source 1..66: mol_type = other DNA
ctgggcggtgcaatgcagacgaatatcgataatcccgtgcaacagctcatcaacaacacagacctg

SEQ ID NO: 46431 - DNA, 48 bp, synthetic construct
  source 1..48: mol_type = other DNA
ctggccaactccgtgatgaatatccaggctagcatgaacacagttgac

SEQ ID NO: 46432 - DNA, 30 bp, synthetic construct
  source 1..30: mol_type = other DNA
ttcagcaccgccaactctatggactacagc

SEQ ID NO: 46433 - DNA, 30 bp, synthetic construct
  source 1..30: mol_type = other DNA
ggcgagctgctgttcgaaaatctcaactct

SEQ ID NO: 46434 - DNA, 36 bp, synthetic construct
  source 1..36: mol_type = other DNA
agctacattgccatcgctttcggcatgtccgagact

SEQ ID NO: 46435 - DNA, 36 bp, synthetic construct
  source 1..36: mol_type = other DNA
agcctgatcaacccgcaatatctgtccgacatgaat

SEQ ID NO: 46436 - DNA, 66 bp, synthetic construct
  source 1..66: mol_type = other DNA
ctgagcggcgtgatgcagacagacatcgccaacccggtgcaacagctcatcaataacaccgatatt

SEQ ID NO: 46437 - DNA, 48 bp, synthetic construct
  source 1..48: mol_type = other DNA
ctggccgacagcatcatgaatttccaaatgaacctcaaccctgtggat

SEQ ID NO: 46438 - DNA, 36 bp, synthetic construct
  source 1..36: mol_type = other DNA
agctacattgccatcaccttcggcatgtccgaaacc

SEQ ID NO: 46439 - DNA, 30 bp, synthetic construct
  source 1..30: mol_type = other DNA
ttcaacaacaatctgggcgataccgacaca

SEQ ID NO: 46440 - DNA, 105 bp, synthetic construct
  source 1..105: mol_type = other DNA
gcaggcgatagtttccaaacggcggtcattagtgacctgggctccatctccgccggatggcctggattcaacctgccttctgtgctgaccgacacttctgctctg

SEQ ID NO: 46441 - DNA, 60 bp, synthetic construct
  source 1..60: mol_type = other DNA
atctgggagaacttcggccccgtggtccaggaggcctgggagaaaatcaagggaatcgtc

SEQ ID NO: 46442 - DNA, 51 bp, synthetic construct
  source 1..51: mol_type = other DNA
aagaatgtgatctcaacggtttggactgctattaagggggtcatcgagcct

SEQ ID NO: 46443 - DNA, 48 bp, synthetic construct
  source 1..48: mol_type = other DNA
aagaataccctgaccacaatttggaacggcatcaaaagcactatcacc

SEQ ID NO: 46444 - DNA, 231 bp, synthetic construct
  source 1..231: mol_type = other DNA
aagggcacagcaacatctgtttggaatggaattaagtccgcgatagtccgacctgtcgaggccgcccgggatgctgtccgaaacgctattgatagaatgagaagcttcttccatttctcatggtccctgccgcgattaaagctcccccacctgagcatcagcggtcacttctcccttgacccaccaagcgtgcctcacttttccatatcttggtacaaaaaagcaatggaa

SEQ ID NO: 46445 - DNA, 51 bp, synthetic construct
  source 1..51: mol_type = other DNA
aacggggccaccatcttcggcgctaagggaaatcagttagccggggggtta

SEQ ID NO: 46446 - DNA, 45 bp, synthetic construct
  source 1..45: mol_type = other DNA
aacagctatccgactttcatggacgccgtttatggtttgaagaat

SEQ ID NO: 46447 - DNA, 33 bp, synthetic construct
  source 1..33: mol_type = other DNA
tacattgccatcgctttcggcatgtctgagacg

SEQ ID NO: 46448 - DNA, 54 bp, synthetic construct
  source 1..54: mol_type = other DNA
agcagtaataagacaacctttaacatcttcattaaatccatcctggaggtatcc

SEQ ID NO: 46449 - DNA, 33 bp, synthetic construct
  source 1..33: mol_type = other DNA
ggacgcttgttcgtggcccaggcacctgatgct

SEQ ID NO: 46450 - DNA, 36 bp, synthetic construct
  source 1..36: mol_type = other DNA
agcatcatcaaccccgagtacctgcacaacattaac

SEQ ID NO: 46451 - DNA, 66 bp, synthetic construct
  source 1..66: mol_type = other DNA
ctgtctggcgcaatgcaaaacgacattgccaaccccgtgcaccagcttataaactctagcgacatc

SEQ ID NO: 46452 - DNA, 45 bp, synthetic construct
  source 1..45: mol_type = other DNA
ctggccaacagcgtgaccaacattcagatcacacccaatcctgta

SEQ ID NO: 46453 - DNA, 36 bp, synthetic construct
  source 1..36: mol_type = other DNA
agcgctattgccatcgcattcggcatgtccgaaacc

SEQ ID NO: 46454 - DNA, 36 bp, synthetic construct
  source 1..36: mol_type = other DNA
agcgacatcgccattgctttcggcatgtccgaaacc

SEQ ID NO: 46455 - DNA, 36 bp, synthetic construct
  source 1..36: mol_type = other DNA
tcctatatagcgagccttttcggactctctcaagcc

SEQ ID NO: 46456 - DNA, 42 bp, synthetic construct
  source 1..42: mol_type = other DNA
cccaacagcttcaattgggtgctgtccaagtacaacggaatt

SEQ ID NO: 46457 - DNA, 33 bp, synthetic construct
  source 1..33: mol_type = other DNA
tatacaaactattccggcaacctggactgtgag

SEQ ID NO: 46458 - DNA, 33 bp, synthetic construct
  source 1..33: mol_type = other DNA
agcatcgctatggccctcggaatgtcagagacg

SEQ ID NO: 46459 - DNA, 36 bp, synthetic construct
  source 1..36: mol_type = other DNA
gccctgatcgacgtgaatctgatcaagaacatcaac

SEQ ID NO: 46460 - DNA, 63 bp, synthetic construct
  source 1..63: mol_type = other DNA
ggcaacacagtcacggataatattgtcaatcccatcgaaaagctcatcgagaacagctccatc

SEQ ID NO: 46461 - DNA, 57 bp, synthetic construct
  source 1..57: mol_type = other DNA
tttttcaatagcgccatccacaacattaacaaccagatctccatggccaatgctggc

SEQ ID NO: 46462 - DNA, 36 bp, synthetic construct; identical to SEQ ID NO: 46453
  source 1..36: mol_type = other DNA

SEQ ID NO: 46463 - DNA, 60 bp, synthetic construct
  source 1..60: mol_type = other DNA
atccccagctacaaggacctctggtatggctgggttatgctggcaagtgtacctgccggt

SEQ ID NO: 46464 - DNA, 33 bp, synthetic construct
  source 1..33: mol_type = other DNA
gcaatcgccattgctttcggaatgtctgagacc

SEQ ID NO: 46465 - DNA, 87 bp, synthetic construct
  source 1..87: mol_type = other DNA
tcttccatccctagcgtgttcgacactcccgcggtttccatcattatccccggcgtcgagatgccagggagtagcatctacattcca

SEQ ID NO: 46466 - DNA, 75 bp, synthetic construct
  source 1..75: mol_type = other DNA
atgtatatacaatttttacgggaggccagcggaggcctcttcaacgacttctttatgacaatcacctacttcggg

SEQ ID NO: 46467 - DNA, 105 bp, synthetic construct
  source 1..105: mol_type = other DNA
gtggcctgcgtgtaccggccatgggttgtcgaccccaacatccctcctctcgaggacgctttaccggacgctaccggctattccttcccaagcggacatgctacg

SEQ ID NO: 46468 - DNA, 63 bp, synthetic construct
  source 1..63: mol_type = other DNA
tacaaagcctacccaatggactacgatgcagccggcaagctgatcgtggaccctgctaagatg

SEQ ID NO: 46469 - DNA, 33 bp, synthetic construct
  source 1..33: mol_type = other DNA
gccattgctatcgcactgggcatgagcgaaact

SEQ ID NO: 46470 - DNA, 33 bp, synthetic construct
  source 1..33: mol_type = other DNA
aacatcgccatggctctgggcatgagcgaaacc

SEQ ID NO: 46471 - DNA, 36 bp, synthetic construct
  source 1..36: mol_type = other DNA
tccagcatcgccatggctctgggcatgtctgaaacc

SEQ ID NO: 46472 - DNA, 30 bp, synthetic construct
  source 1..30: mol_type = other DNA
acccagaaccccggcaatgtcgacgtgaac

SEQ ID NO: 46473 - DNA, 204 bp, synthetic construct
  source 1..204: mol_type = other DNA
cagctcagcccaatcgacccggttcgcgcatatctgggccagcgcatcgtttcgcaagagcagctggccatcatgggcgagtactggggcaccaacctgagcctaggggaacgcgtgatgggctggatctctacactcgcctccggctccatgggattctctctaatatatagggtacctgtcaccgaagtcatagtacagaag

SEQ ID NO: 46474 - DNA, 87 bp, synthetic construct
  source 1..87: mol_type = other DNA
gtgtacctgggctggttccctatcggactcagcgtgcccattgggcagctggcagatacggtaacattctggcaatggctgcatcgc

SEQ ID NO: 46475 - DNA, 72 bp, synthetic construct
  source 1..72: mol_type = other DNA
gagcaagtcttcgcctaccctgggatcggtcaggccacagtagcggcaggccttagaagcgatgtgcctctc

SEQ ID NO: 46476 - DNA, 207 bp, synthetic construct
  source 1..207: mol_type = other DNA
cagatgtccccaatcgaccctgttcgggcctatctggggcagaggattgtcagccaagaacaactggctattatgggcgagtactggggcaccaacctctccctcggcgagcgcgtagtcgggtggcttagcacactggcgacgggatcgatgggattcagcctgatctaccgcgtccccgtgactgaagtccagatcaaaaaggtt

SEQ ID NO: 46477 - DNA, 90 bp, synthetic construct
  source 1..90: mol_type = other DNA
tctgtctacctgggctggttccccattgggctctccgtgcctatcggacagctgagcgacaccgtgacattttggcaatggttataccgc

SEQ ID NO: 46478 - DNA, 72 bp, synthetic construct
  source 1..72: mol_type = other DNA
gagcaggtcttcgcctaccccggaattgggcaggccacagttgccgctgggctgagatctgatgttcctctt

SEQ ID NO: 46479 - DNA, 30 bp, synthetic construct
  source 1..30: mol_type = other DNA
ttcagcaattccaacaccctgaacatcctg

SEQ ID NO: 46480 - DNA, 33 bp, synthetic construct
  source 1..33: mol_type = other DNA
gaggccagcaacctgttcgacaacatcaatatt

SEQ ID NO: 46481 - DNA, 36 bp, synthetic construct
  source 1..36: mol_type = other DNA
agctccatcgccattaccctgggcatgtctgaaacc

SEQ ID NO: 46482 - DNA, 36 bp, synthetic construct
  source 1..36: mol_type = other DNA
agcgctatcgccattgcactgggaatgtccgaaaca

SEQ ID NO: 46483 - DNA, 36 bp, synthetic construct
  source 1..36: mol_type = other DNA
ctgttcggcggtggacggcgagacgagaataacggt

SEQ ID NO: 46484 - DNA, 33 bp, synthetic construct
  source 1..33: mol_type = other DNA
gccatcgctattgcactgggcatgagcgaaact

SEQ ID NO: 46485 - DNA, 30 bp, synthetic construct
  source 1..30: mol_type = other DNA
acccagacacccggcaacctgaacatcaat

SEQ ID NO: 46486 - DNA, 36 bp, synthetic construct
  source 1..36: mol_type = other DNA
agcgcaatcgccattgctctgggcatgtccgaaacc

SEQ ID NO: 46487 - DNA, 48 bp, synthetic construct
  source 1..48: mol_type = other DNA
tccaacttcatcattagcatgggccagaataaccccatcctgtcctcc

SEQ ID NO: 46488 - DNA, 87 bp, synthetic construct
  source 1..87: mol_type = other DNA
tccaccctgccttccgtgttcgagtctccaagtgtcagcatcgtgatccccggcgtcgacatccctgggagccagatttacgtaccc

SEQ ID NO: 46489 - DNA, 36 bp, synthetic construct
  source 1..36: mol_type = other DNA
agcgccattgcaatcgctttcggcatgtccgaaacc

SEQ ID NO: 46490 - DNA, 36 bp, synthetic construct
  source 1..36: mol_type = other DNA
ctgttcggcggcggacgaagagacgagaataacggg

SEQ ID NO: 46491 - DNA, 33 bp, synthetic construct
  source 1..33: mol_type = other DNA
tacaatagttcgagcattgacttcgacaccaac

SEQ ID NO: 46492 - DNA, 114 bp, synthetic construct
  source 1..114: mol_type = other DNA
ggagaaggaaacccggttagcggtgccattatctccatgaatatcaacggcatcatttacaaccggaccacaaacgagaacgggaccgctaagctcaacatcaatctgcctcag

SEQ ID NO: 46493 - DNA, 264 bp, synthetic construct
  source 1..264: mol_type = other DNA
atcacagtcctgccgacactgaacgccactgaccttgagatgaagtacaaggacggcagcacattcaacgtcactgtgctggataatcagggcaaccctctcgccgatgccgtggtgacattcaatatcaatggagagttttacaatcgcacatctgactctagcggcatcgctcggctgaacatcaaccttatggctggagagtacattattacctccgaatacgatgggttacgtatcagcaacaccgtgaccatcaaagat

SEQ ID NO: 46494 - DNA, 207 bp, synthetic construct
  source 1..207: mol_type = other DNA
agcaccttcaatgtgaccgtcctcgacggacagggcaatcctctcaaggaagccgctgtgacattcaacattaacggtgtcttctacactcgatattctgattccaacggcattgccaaactgaacatcaacctgatggctggcgagtacatcatcactagtgaatacgacgggatgcggattgccaacacaatcaccatcaaggat

SEQ ID NO: 46495 - DNA, 36 bp, synthetic construct
  source 1..36: mol_type = other DNA
agcgcaattgctatcgccttcggcatgtccgaaacc

SEQ ID NO: 46496 - DNA, 36 bp, synthetic construct
  source 1..36: mol_type = other DNA
tccgacatcgccattgctttcggcatgagcgaaacc

SEQ ID NO: 46497 - DNA, 39 bp, synthetic construct
  source 1..39: mol_type = other DNA
gccctgctcgacatccggattatcaataacgtgaactcc

SEQ ID NO: 46498 - DNA, 63 bp, synthetic construct
  source 1..63: mol_type = other DNA
ggccacaccatgactaccaaggtcatcaaccccattgagcagctgatcaatagcaccaacatt

SEQ ID NO: 46499 - DNA, 57 bp, synthetic construct
  source 1..57: mol_type = other DNA
gtcactagctccgtgcacaacctgaccaacggcatcacaatggccaatatgggagac

SEQ ID NO: 46500 - DNA, 42 bp, synthetic construct
  source 1..42: mol_type = other DNA
cccaactcattcaaatgggtgcttagcgaatacaatggcatc

SEQ ID NO: 46501 - DNA, 42 bp, synthetic construct
  source 1..42: mol_type = other DNA
cccaactccttcaaatgggtcctaaacacctacaatggcatc

SEQ ID NO: 46502 - DNA, 42 bp, synthetic construct
  source 1..42: mol_type = other DNA
cccaagtcgttccaatgggtcctgagcaactacaatggcatc

SEQ ID NO: 46503 - DNA, 42 bp, synthetic construct
  source 1..42: mol_type = other DNA
cccgtcaccttcaattgggtgctgggcgagatctctggattt

SEQ ID NO: 46504 - DNA, 33 bp, synthetic construct
  source 1..33: mol_type = other DNA
ttcattgcttctgcttttggtctgagtgacgct

SEQ ID NO: 46505 - DNA, 36 bp, synthetic construct
  source 1..36: mol_type = other DNA
gacggcaatctgattgccgagaacaccatctttgaa

SEQ ID NO: 46506 - DNA, 132 bp, synthetic construct
  source 1..132: mol_type = other DNA
aaggtgcagaatacaacctttgagaataacaacgcaccaaacgcaggaacgatctataccggaggtgacctgaccttggtcaagtcgaatgtgcaatattccactcgggaggacaacaaggcaatcgtttgc

SEQ ID NO: 46507 - DNA, 54 bp, synthetic construct
  source 1..54: mol_type = other DNA
ggcattatcgtcgccgacccctctaccttcgtgtccctgggggctatgacatcc

SEQ ID NO: 46508 - DNA, 117 bp, synthetic construct
  source 1..117: mol_type = other DNA
gggtttggcgctggcgaccccctgatgccatctattccttcccaagtcattagcttcaacttcgacacctcccttgtcggcggctttctggccggcttcggagagctcttcaagaac

SEQ ID NO: 46509 - DNA, 33 bp, synthetic construct
  source 1..33: mol_type = other DNA
ttcatagctagtgctttcggcctgagtgatgtg

SEQ ID NO: 46510 - DNA, 39 bp, synthetic construct
  source 1..39: mol_type = other DNA
cccgtcgccttcaactgggtgctgagcgaagtgaacgga

SEQ ID NO: 46511 - DNA, 30 bp, synthetic construct
  source 1..30: mol_type = other DNA
tacgtggccagaaccagcctgttcgctagc

SEQ ID NO: 46512 - DNA, 54 bp, synthetic construct
  source 1..54: mol_type = other DNA
cggctgaatgacagctccctcgcatgccccgtcgagatcgtgaacgggaaaggc

SEQ ID NO: 46513 - DNA, 93 bp, synthetic construct
  source 1..93: mol_type = other DNA
actgccactgtttgctacgaaggcgacgatacgtttacaccaagcaataagtctactaccttcactgtgaaggaacggatcaaccctaacctc

SEQ ID NO: 46514 - DNA, 63 bp, synthetic construct
  source 1..63: mol_type = other DNA
atggaagtgaaactgaatgagagtagcgcaacgtaccctgtagagatcgtgaacgggaaaggc

SEQ ID NO: 46515 - DNA, 39 bp, synthetic construct
  source 1..39: mol_type = other DNA
cccaactcctttaaatgggtgctgagcaatttcaagggc

SEQ ID NO: 46516 - DNA, 39 bp, synthetic construct
  source 1..39: mol_type = other DNA
gagaagctcctgcaccctacactgatcacgcaacccaca

SEQ ID NO: 46517 - DNA, 30 bp, synthetic construct
  source 1..30: mol_type = other DNA
gtggatctgggcgctatgagcgacacagcc

SEQ ID NO: 46518 - DNA, 39 bp, synthetic construct
  source 1..39: mol_type = other DNA
cacctgatcgtggacggcgaacctgctctgagtgctgag

SEQ ID NO: 46519 - DNA, 39 bp, synthetic construct
  source 1..39: mol_type = other DNA
aatagctttcaatgggtactgagcaactacggtggagtg

SEQ ID NO: 46520 - DNA, 42 bp, synthetic construct
  source 1..42: mol_type = other DNA
cccaagtctttccaatgggtgctgtccaattacaacgggatc

SEQ ID NO: 46521 - DNA, 39 bp, synthetic construct
  source 1..39: mol_type = other DNA
aacgcctttctatgggtgctaggcaacttcaatggtatc

SEQ ID NO: 46522 - DNA, 33 bp, synthetic construct
  source 1..33: mol_type = other DNA
ctgaacaccggcccgatttctgaaattcccgcc

SEQ ID NO: 46523 - DNA, 42 bp, synthetic construct
  source 1..42: mol_type = other DNA
cccaagagtttcgaatgggttttgagcaactacaacggaatc

SEQ ID NO: 46524 - DNA, 42 bp, synthetic construct
  source 1..42: mol_type = other DNA
cccaactcatttcaatgggttttgtcaaattacaacggtatc

SEQ ID NO: 46525 - DNA, 108 bp, synthetic construct
  source 1..108: mol_type = other DNA
ggccggtacccaatctctcccgtggacgtggtcaagaccatcctctcccctatcttcccgcaactcaaagtcagtcaaacaattactaccattgtgttcgagatccga

SEQ ID NO: 46526 - DNA, 69 bp, synthetic construct
  source 1..69: mol_type = other DNA
gtggccgacccacaagacaagctgcctgagatcatttactggctgatgggctcactctctagcgtaacc

SEQ ID NO: 46527 - DNA, 39 bp, synthetic construct
  source 1..39: mol_type = other DNA
agcctgttcaattgggtgctgtccgagtacaacggaatc

SEQ ID NO: 46528 - DNA, 42 bp, synthetic construct
  source 1..42: mol_type = other DNA
cccaatagttttcaatgggtgctgtccaactacaacggcatc

SEQ ID NO: 46529 - DNA, 42 bp, synthetic construct
  source 1..42: mol_type = other DNA
cccgactccttcaaatgggtactcagccaatattccggtatc

SEQ ID NO: 46530 - DNA, 42 bp, synthetic construct
  source 1..42: mol_type = other DNA
cccaatgcattccaatgggtactgtccaacttctacggcatc

SEQ ID NO: 46531 - DNA, 42 bp, synthetic construct
  source 1..42: mol_type = other DNA
cccaacagcttcgcctgggtgctgtccgagtactcaggtatc

SEQ ID NO: 46532 - DNA, 42 bp, synthetic construct
  source 1..42: mol_type = other DNA
cccaattctttcaaatgggtactgagcaactataacggtatc

SEQ ID NO: 46533 - DNA, 39 bp, synthetic construct
  source 1..39: mol_type = other DNA
cccaagtcctttcaatgggttctgagcaacaataacggc

SEQ ID NO: 46534 - DNA, 42 bp, synthetic construct
  source 1..42: mol_type = other DNA
gtggatctcggccacacggtgtctgtcgttgcaactctggac

SEQ ID NO: 46535 - DNA, 45 bp, synthetic construct
  source 1..45: mol_type = other DNA
ctccactaccggttcgacatgatctttgatattctggaaagtgcc

SEQ ID NO: 46536 - DNA, 54 bp, synthetic construct
  source 1..54: mol_type = other DNA
gacatatcatcgatcaccagcaagatcttctacgccgtgtttgctccctttgac

SEQ ID NO: 46537 - DNA, 42 bp, synthetic construct
  source 1..42: mol_type = other DNA
cccaatagcttcaaatgggtccttggcaaatacaacggtatc

SEQ ID NO: 46538 - DNA, 42 bp, synthetic construct
  source 1..42: mol_type = other DNA
cccaattctttccaatgggtcctatcccaatataacggaatc

SEQ ID NO: 46539 - DNA, 42 bp, synthetic construct
  source 1..42: mol_type = other DNA
cccaacagcttcaaatgggtactctccaaatatggcgatatc

SEQ ID NO: 46540 - DNA, 30 bp, synthetic construct
  source 1..30: mol_type = other DNA
ctgaactgggatagctacgctctcactgac

SEQ ID NO: 46541 - DNA, 33 bp, synthetic construct
  source 1..33: mol_type = other DNA
agcatgttcgctgaccgacgggagaacaatggc

SEQ ID NO: 46542 - DNA, 45 bp, synthetic construct
  source 1..45: mol_type = other DNA
tctcggtccgatcgggttgtcgacaacgtggtggctggcgaaagc

SEQ ID NO: 46543 - DNA, 39 bp, synthetic construct
  source 1..39: mol_type = other DNA
aatccaacgctgggcttcaacgtcattacggctggaagc

SEQ ID NO: 46544 - DNA, 36 bp, synthetic construct
  source 1..36: mol_type = other DNA
ctgaccaacatcattggcgactacgcaacaggaatt

SEQ ID NO: 46545 - DNA, 48 bp, synthetic construct
  source 1..48: mol_type = other DNA
gacgagatcattttcctgatctacggccacgaatatgatgctgctagc

SEQ ID NO: 46546 - DNA, 33 bp, synthetic construct
  source 1..33: mol_type = other DNA
atggaccctagcctgtctcacttcaacgaatcc

SEQ ID NO: 46547 - DNA, 147 bp, synthetic construct
  source 1..147: mol_type = other DNA
atcttcatcaacttcacactgattggcggcaataacattgccaacgccatctataataccgcttccactaaagacatctacttctacaacgtgtcttacgtttcctcaaagggacctaagtttaccggcgaggatgagatccatcct

SEQ ID NO: 46548 - DNA, 33 bp, synthetic construct
  source 1..33: mol_type = other DNA
atggaattttacctggagccgggcccaactttt

SEQ ID NO: 46549 - DNA, 63 bp, synthetic construct
  source 1..63: mol_type = other DNA
ggctctaactgcctgccctggtacctatttagccaagtcaaggtggaggactggtcagctttc

SEQ ID NO: 46550 - DNA, 87 bp, synthetic construct
  source 1..87: mol_type = other DNA
ctgtccggggactacgctagctttcaagaggcagtgatgggcctcttctccgacccacaaactttcctgaacaatctgatgaacttt

SEQ ID NO: 46551 - DNA, 33 bp, synthetic construct
  source 1..33: mol_type = other DNA
ctgggagcctcacctgctcttcacgtgttccct

SEQ ID NO: 46552 - DNA, 45 bp, synthetic construct
  source 1..45: mol_type = other DNA
accatcaaaatccccattacaaaggacgtggccatcactatcatg

SEQ ID NO: 46553 - DNA, 30 bp, synthetic construct
  source 1..30: mol_type = other DNA
ggccagagcatttccctgatcttcgacatg

SEQ ID NO: 46554 - DNA, 123 bp, synthetic construct
  source 1..123: mol_type = other DNA
agctttctgcccctgcacccttatgcttttgccatggccagtggagtcggtagcgcaagcatgaacgccgccgcgattgggcctacactggccgcattccccgggatggaaacccagatcgag

SEQ ID NO: 46555 - DNA, 33 bp, synthetic construct
  source 1..33: mol_type = other DNA
ttaggtttttcattaaccacctccatcggaatg

SEQ ID NO: 46556 - DNA, 78 bp, synthetic construct
  source 1..78: mol_type = other DNA
ctggtcgggaccagcgccgagaagctgcaggacgcttacctttggcaaattggtacactcgagaacgtgacatgggac

SEQ ID NO: 46557 - DNA, 36 bp, synthetic construct
  source 1..36: mol_type = other DNA
gccacagtggcaagcaccgacgctgtggctgtctac

SEQ ID NO: 46558 - DNA, 63 bp, synthetic construct
  source 1..63: mol_type = other DNA
cagattgctgggatattcacttactccgggacatctgcaagactgaccccttctcttgtagcc

SEQ ID NO: 46559 - DNA, 39 bp, synthetic construct
  source 1..39: mol_type = other DNA
aaggacatcgccctgtcactgggcatgagcgagactctc

SEQ ID NO: 46560 - DNA, 42 bp, synthetic construct
  source 1..42: mol_type = other DNA
tcccgggccgacaggctgatcgataacgtttcatctggagag

SEQ ID NO: 46561 - DNA, 33 bp, synthetic construct
  source 1..33: mol_type = other DNA
gccctggccttggccgttggcatgagcgaaacc

SEQ ID NO: 46562 - DNA, 57 bp, synthetic construct
  source 1..57: mol_type = other DNA
cagggcttcctggccctgtacaactttaatcggaccgacattgctgatttcgtgatc

SEQ ID NO: 46563 - DNA, 99 bp, synthetic construct
  source 1..99: mol_type = other DNA
atggccgtcgggaattaccacgtgtccctgcccaacgtgttctgggctatcatcggcaagggcgattctggggccgtcagcgtcatacaagacacacgg

SEQ ID NO: 46564 - DNA, 30 bp, synthetic construct
  source 1..30: mol_type = other DNA
ttcggcgtcggagaggcactgtttggaaac

SEQ ID NO: 46565 - DNA, 75 bp, synthetic construct
  source 1..75: mol_type = other DNA
tacgtggccgacgatgacaccctgggctccattgtgtattggaccatgggcagcttcaacaaggtcacatggacc

SEQ ID NO: 46566 - DNA, 30 bp, synthetic construct
  source 1..30: mol_type = other DNA
tactatagcaccggcctggtgctcaagatc

SEQ ID NO: 46567 - DNA, 30 bp, synthetic construct
  source 1..30: mol_type = other DNA
ttcaacgtcggaatggtcaacgaggttgcc

SEQ ID NO: 46568 - DNA, 36 bp, synthetic construct
  source 1..36: mol_type = other DNA
ggcatgaccaaccggagcctgctgaacaacttcaat

SEQ ID NO: 46569 - DNA, 75 bp, synthetic construct
  source 1..75: mol_type = other DNA
actaccgccatcggaggcatttttcatacggatataagcaacccagtccaaaacttaatcaattcttccgacatc

SEQ ID NO: 46570 - DNA, 51 bp, synthetic construct
  source 1..51: mol_type = other DNA
tttgtcgcggaatctgcgcaagcgctactgtctaacacttttactgctaca

SEQ ID NO: 46571 - DNA, 57 bp, synthetic construct
  source 1..57: mol_type = other DNA
ggcgtatactcatcctttatgatcgagctagggaaaggcggtgccatttgcgaagtt

SEQ ID NO: 46572 - DNA, 66 bp, synthetic construct
  source 1..66: mol_type = other DNA
atcactgtaaacagcgcagctgtgaacacagttgaggccggcaatctgtttttctctcatatgtgg

SEQ ID NO: 46573 - DNA, 33 bp, synthetic construct
  source 1..33: mol_type = other DNA
gacatcgagggcattaagaacgtttccatacag

SEQ ID NO: 46574 - DNA, 42 bp, synthetic construct
  source 1..42: mol_type = other DNA
ttcaccaagggctacaactttttcctgtggtggtacgaggag

SEQ ID NO: 46575 - DNA, 36 bp, synthetic construct
  source 1..36: mol_type = other DNA
ggctttaccaatcacaacatcctgaacaacttcaac

SEQ ID NO: 46576 - DNA, 72 bp, synthetic construct
  source 1..72: mol_type = other DNA
tctgccatcggctccctgttccacactgagatcaccaatcccgtccaaactttgatcggtagcacggacatt

SEQ ID NO: 46577 - DNA, 51 bp, synthetic construct
  source 1..51: mol_type = other DNA
gtggtgcaaagcgtgcaggcctttacatctaacacctacgctactatggac

SEQ ID NO: 46578 - DNA, 33 bp, synthetic construct
  source 1..33: mol_type = other DNA
aacagcaccgttggagaacctgtcctgtctgtg

SEQ ID NO: 46579 - DNA, 30 bp, synthetic construct
  source 1..30: mol_type = other DNA
gagatcggactggatcaggcagtggttccc

SEQ ID NO: 46580 - DNA, 90 bp, synthetic construct
  source 1..90: mol_type = other DNA
gggatggttgatttttcgggctttttcgctgcctccatctttgaggtgcccgagttctacatgcctttcgtgaactactctttcaacccc

SEQ ID NO: 46581 - DNA, 30 bp, synthetic construct
  source 1..30: mol_type = other DNA
tacttttcgagcggctacgtgctgaagatc

SEQ ID NO: 46582 - DNA, 51 bp, synthetic construct
  source 1..51: mol_type = other DNA
ggcacctgccctacttccgccatcgacgtaactcccaacgccattatccac

SEQ ID NO: 46583 - DNA, 42 bp, synthetic construct
  source 1..42: mol_type = other DNA
atcagtgcaaacagcgcctctctaaccgttgcgattccttcc

SEQ ID NO: 46584 - DNA, 33 bp, synthetic construct
  source 1..33: mol_type = other DNA
tttttcagcaccggcgtggtcgttcaaatagtc

SEQ ID NO: 46585 - DNA, 30 bp, synthetic construct
  source 1..30: mol_type = other DNA
tttttcagcaccggctacgtgctgaagatc

SEQ ID NO: 46586 - DNA, 42 bp, synthetic construct
  source 1..42: mol_type = other DNA
ataacaatccccattgccaagaacgtggcgattaccatcatg

SEQ ID NO: 46587 - DNA, 30 bp, synthetic construct
  source 1..30: mol_type = other DNA
ggccagagcatcaacctgattttcgacatg

SEQ ID NO: 46588 - DNA, 123 bp, synthetic construct
  source 1..123: mol_type = other DNA
tcattcctgccgctgcacccatacgcattcgccatggccagcggagtcggatccgcaagcatgaacgccgctgctatcggcccaacactggccgcattcccggggctggaaacaagtatcgag

SEQ ID NO: 46589 - DNA, 57 bp, synthetic construct
  source 1..57: mol_type = other DNA
agcctgcccgatatcacaatcacttcttccgccgactttaccctctttatacaagag

SEQ ID NO: 46590 - DNA, 51 bp, synthetic construct
  source 1..51: mol_type = other DNA
gtgtactccgacttcgtcgctagtctgggcaagtcaaatagcctgatcatg

SEQ ID NO: 46591 - DNA, 204 bp, synthetic construct
  source 1..204: mol_type = other DNA
gacctcagtcccattgaccccgtgtctacatatctcaagggagctgcagtttccgaggcccagcggaccattctggagggctacttcgggacaaacgtccctctcccaaccaagatcttcaattggctgatggacctcgttcaaggaaatctcggcacctccctcatttatcgcgcacctgtgctggatgtcatcatcgataag

SEQ ID NO: 46592 - DNA, 90 bp, synthetic construct
  source 1..90: mol_type = other DNA
gtgtacctgaagtggttccctattggcttcggagtgcccatcggcgtatcgtcaacggacgccacctttgctgaatgggcctctagactg

SEQ ID NO: 46593 - DNA, 72 bp, synthetic construct
  source 1..72: mol_type = other DNA
gagcaggttttttcctaccctgggattgggcagactgccgtcgctgccggacttcaaagcgacgtacccttg

SEQ ID NO: 46594 - DNA, 45 bp, synthetic construct
  source 1..45: mol_type = other DNA
actatcaaaattcccctgaccaaggacgtggccatcacaatcatg

SEQ ID NO: 46595 - DNA, 30 bp, synthetic construct
  source 1..30: mol_type = other DNA
ggccagagcattgggctgatcttcgacatg

SEQ ID NO: 46596 - DNA, 123 bp, synthetic construct
  source 1..123: mol_type = other DNA
agctttctgcccctgcatccatacgcctttgcgatggccagcggagtcgggtcagcgtcaatgaacgccgctgccattggacctactttagccgcatttcctggcatggaaacccagatcgag

SEQ ID NO: 46597 - DNA, 36 bp, synthetic construct
  source 1..36: mol_type = other DNA
aacgtgatcaatcccatttacctgaacgacttcaac

SEQ ID NO: 46598 - DNA, 72 bp, synthetic construct
  source 1..72: mol_type = other DNA
accgccatcctttctggcgcgatccaaagcgagattaccaaccccgtgcaccagctgattaacaacaataat

SEQ ID NO: 46599 - DNA, 48 bp, synthetic construct
  source 1..48: mol_type = other DNA
atccagtctagcatttccaacctgaagaccgccatcaacccaatggac

SEQ ID NO: 46600 - DNA, 204 bp, synthetic construct
  source 1..204: mol_type = other DNA
gatctctcacccataaattccgtcaatacctacctgcggggcgctgccgtgtctgaggctcaacgcgccatcctggagtcctatttcggaatgaacgtccccctgccaaccaagatcttccactggctcatggacctggttcaaggcaatcttgggacaagcctgatctaccgcgcccctgtgatcgacgtcatcatcgataaa

SEQ ID NO: 46601 - DNA, 93 bp, synthetic construct
  source 1..93: mol_type = other DNA
gccgtgtacctgggatggttccccatcggcttcggcgtccctattggcgtctcctccaccgacgccacatttaccgaatgggcttctaggttg

SEQ ID NO: 46602 - DNA, 72 bp, synthetic construct
  source 1..72: mol_type = other DNA
gagcaggtcttctcctaccctggtatcggtcagactgccgttgctgctggactccaatctgacgtgcctctg

SEQ ID NO: 46603 - DNA, 33 bp, synthetic construct
  source 1..33: mol_type = other DNA
ttctttagcaccggctacgtgatacaagttcta

SEQ ID NO: 46604 - DNA, 30 bp, synthetic construct
  source 1..30: mol_type = other DNA
tatttcagcaccggctacgtgctgaagatc

SEQ ID NO: 46605 - DNA, 30 bp, synthetic construct
  source 1..30: mol_type = other DNA
tttttcagcaccggctacgtgttcaagatc

SEQ ID NO: 46606 - DNA, 30 bp, synthetic construct; identical to SEQ ID NO: 46604
  source 1..30: mol_type = other DNA

SEQ ID NO: 46607 - DNA, 117 bp, synthetic construct
  source 1..117: mol_type = other DNA
atgtttgagaccgtgttttacttcccctgggaggtctccctgattgtcttccttcaatctagcctgcctggcttcgtgctcggattcttcggggtcatcagcgaagtagtggtttcg

SEQ ID NO: 46608 - DNA, 129 bp, synthetic construct
  source 1..129: mol_type = other DNA
gtgacagtggcgcgtctacgtccatatgcggtggttgacaagattaagtgcatccacgctaacgtcgccgatcagaaccccctggacttcaaaatccagggctactccttcccaagcgggcacacaatg

SEQ ID NO: 46609 - DNA, 57 bp, synthetic construct
  source 1..57: mol_type = other DNA
ggagtgtacagctccttcatgatcgagctgggcaagggaggagccatttgcgaagtg

SEQ ID NO: 46610 - DNA, 108 bp, synthetic construct
  source 1..108: mol_type = other DNA
aactgcaccttcatcgccaatactgctaatttcggcggtgctatgtacgggtgcaccgttaaaaacagcgtgttcatcaacaataacgccaaatacgatggaggagcc

SEQ ID NO: 46611 - DNA, 54 bp, synthetic construct
  source 1..54: mol_type = other DNA
aacacagcctacatcggcggagctatgtacgggtgcaccgtgaagaactcagtc

SEQ ID NO: 46612 - DNA, 123 bp, synthetic construct
  source 1..123: mol_type = other DNA
atcactttttccgggaacaaggccgactatggcggagcaatggccgaatgtactgcctacaactgcatcttctccggaaataccgccaacattaatggaggagctctttacaaatgcattgcc

SEQ ID NO: 46613 - DNA, 30 bp, synthetic construct
  source 1..30: mol_type = other DNA
aactctttccactcgggctggtgcttcatc

SEQ ID NO: 46614 - DNA, 30 bp, synthetic construct
  source 1..30: mol_type = other DNA
tttttcagcaccggcttcgtgctgaagatc

SEQ ID NO: 46615 - DNA, 30 bp, synthetic construct
  source 1..30: mol_type = other DNA
cccaacgtgctatatgcgaacggcgggggc

SEQ ID NO: 46616 - DNA, 72 bp, synthetic construct
  source 1..72: mol_type = other DNA
tccttcaccaagggctggggcgccaaccccgatgtcttcttctcctcaaatgttctacaagcatccgattct

SEQ ID NO: 46617 - DNA, 75 bp, synthetic construct
  source 1..75: mol_type = other DNA
ctcaccctgcccggcgcttccatcgggtacacgcaaatttacacccctgactggagcgccctgctgaacttcaac

SEQ ID NO: 46618 - DNA, 48 bp, synthetic construct
  source 1..48: mol_type = other DNA
atgactttcaccaccggcatcccctttaacgacctggtgacagaaggc

SEQ ID NO: 46619 - DNA, 45 bp, synthetic construct
  source 1..45: mol_type = other DNA
agcgagttcctggagcagatcggccggaacaatccacttaccacc

SEQ ID NO: 46620 - DNA, 36 bp, synthetic construct
  source 1..36: mol_type = other DNA
ggcttctacgacgagaagctgctggggaacgtgaat

SEQ ID NO: 46621 - DNA, 69 bp, synthetic construct
  source 1..69: mol_type = other DNA
tccctcctgagcgccgcaacgcatagcgatatctccaaccccgtggtcgagctgattaatagcagcaac

SEQ ID NO: 46622 - DNA, 51 bp, synthetic construct
  source 1..51: mol_type = other DNA
ttcgtcggagaagcaggacaggccattgctcaaaactcatttaacatgttc

SEQ ID NO: 46623 - DNA, 39 bp, synthetic construct
  source 1..39: mol_type = other DNA
attaacctgaccaatccccaatatcttaccgatattaac

SEQ ID NO: 46624 - DNA, 72 bp, synthetic construct
  source 1..72: mol_type = other DNA
acctccttgctgagtagcacgatgcagtctgacataacaaatccggtgcaagaactcattaacaatgctgga

SEQ ID NO: 46625 - DNA, 45 bp, synthetic construct
  source 1..45: mol_type = other DNA
gtcgccaactccgtgaacaatctgatgagcggcttcaactctctg

SEQ ID NO: 46626 - DNA, 141 bp, synthetic construct
  source 1..141: mol_type = other DNA
ggcatgggacacgtgaacgcagccctcgagaccgaccacctgcatgtcgatgcaattatggtcaatgagaatatcgcttataccgacattgacaacgcagaactgcgcgaaaatctggactatgggtctcgcatcggtggt

SEQ ID NO: 46627 - DNA, 129 bp, synthetic construct
  source 1..129: mol_type = other DNA
tacaggctggctgtgcacaaggacgtgtctgagtgcatcgtggtgcatcaccatggaggcgtcctcgtcttcaatctcgggagcaacgccgcaaccgaagcctttctgaccgacttacaatcacgactg

SEQ ID NO: 46628 - DNA, 30 bp, synthetic construct
  source 1..30: mol_type = other DNA
tttttcagcaccggccaggtgctgaagatc

SEQ ID NO: 46629 - DNA, 36 bp, synthetic construct
  source 1..36: mol_type = other DNA
cacctcaccaatcccacagtgctgcaggacatcaac

SEQ ID NO: 46630 - DNA, 75 bp, synthetic construct
  source 1..75: mol_type = other DNA
accgacctactttcgggcgccatccacaacaacattgctaaccccgtacaaaatcttatcaacaacaccaatata

SEQ ID NO: 46631 - DNA, 48 bp, synthetic construct
  source 1..48: mol_type = other DNA
gtgggccagagcgctatgcatttgcaaacgggtggcactctccttgac

SEQ ID NO: 46632 - DNA, 39 bp, synthetic construct
  source 1..39: mol_type = other DNA
ttctacaaggacatcatcaacggcattaccaacttcggg

SEQ ID NO: 46633 - DNA, 42 bp, synthetic construct
  source 1..42: mol_type = other DNA
tactacgtcaatgtagacggtaccccttccgatgtcagaaat

SEQ ID NO: 46634 - DNA, 204 bp, synthetic construct
  source 1..204: mol_type = other DNA
ctgagccctatcaatcctgttaccgtgtatctcaaaggggccgcggtatctgaagctcagcgcacaatcctgaaccagtacttcggggtcggcgtccccttgcacataaagatctatcactggctgctgaacctcatgcaaggagatttagggacgtcactgatctatagggccccagtgattgatgttacgacccaaaagata

SEQ ID NO: 46635 - DNA, 93 bp, synthetic construct
  source 1..93: mol_type = other DNA
gccgtctacctgggcctcttccccatcggattcggcgtgcctattggggtctcatcaaccgatgccagttttatggactgggcttctagactc

SEQ ID NO: 46636 - DNA, 72 bp, synthetic construct
  source 1..72: mol_type = other DNA
gagcaagttttttcgtaccccggcatcgggcagactgcagtagccgctggactgcagtccgatgttcctctg

SEQ ID NO: 46637 - DNA, 30 bp, synthetic construct
  source 1..30: mol_type = other DNA
tatcggtactacggctacgtgctgaagatc

SEQ ID NO: 46638 - DNA, 57 bp, synthetic construct
  source 1..57: mol_type = other DNA
ggaatctacaacggcttcatggagtctgccggctccgtgaatcccatggctgaatct

SEQ ID NO: 46639 - DNA, 63 bp, synthetic construct
  source 1..63: mol_type = other DNA
ttgctgagcgcgagtctgagtgacagaagttacggcgcccttctcaacccgattcgtaccggg

SEQ ID NO: 46640 - DNA, 57 bp, synthetic construct
  source 1..57: mol_type = other DNA
tggggcatcctgcccgacctcttccttgatgcctacctgagcgtgcaggaccttgca

SEQ ID NO: 46641 - DNA, 51 bp, synthetic construct
  source 1..51: mol_type = other DNA
gacatcgggggcgttttttccctcttctatgatcaggtcctgcactacttc

SEQ ID NO: 46642 - DNA, 66 bp, synthetic construct
  source 1..66: mol_type = other DNA
gaatggggcatactgcctccttcctttatgaacgctttcctcagccttcagaacctggcctctaac

SEQ ID NO: 46643 - DNA, 57 bp, synthetic construct
  source 1..57: mol_type = other DNA
gtcgacctgcacaaccccgtgaccgacatctacgatgttgtatttgccgttttcgat

SEQ ID NO: 46644 - DNA, 36 bp, synthetic construct
  source 1..36: mol_type = other DNA
ggcaccttcaacgccaaactgcttagtgatatcaat

SEQ ID NO: 46645 - DNA, 60 bp, synthetic construct
  source 1..60: mol_type = other DNA
ggcggaaccattaacaaggagatcgccaaccccgtgtccgaactgatcgggtctagcaat

SEQ ID NO: 46646 - DNA, 48 bp, synthetic construct
  source 1..48: mol_type = other DNA
ggccgggccgtccaatccctaatccacaatagcttcaactttgctgac

SEQ ID NO: 46647 - DNA, 84 bp, synthetic construct
  source 1..84: mol_type = other DNA
aagctgagcgccacctaccctacattcatggacgcaattttcggcctgaagaacccgggacaatttattaacgctctcactcat

SEQ ID NO: 46648 - DNA, 42 bp, synthetic construct
  source 1..42: mol_type = other DNA
tcatccagtttcaacccaagcttcagcgtggactggggtaag

SEQ ID NO: 46649 - DNA, 39 bp, synthetic construct
  source 1..39: mol_type = other DNA
ttcaacctgcccgtggtcgagatttacacccctatcgag

SEQ ID NO: 46650 - DNA, 54 bp, synthetic construct
  source 1..54: mol_type = other DNA
gtctattccgggtttatgcaaaactacggcatggaatccgagatcgtgcttacc

SEQ ID NO: 46651 - DNA, 48 bp, synthetic construct
  source 1..48: mol_type = other DNA
tactctagcttcatgcaaggttacgggatggagtccgagatcattctg

SEQ ID NO: 46652 - DNA, 48 bp, synthetic construct
  source 1..48: mol_type = other DNA
tacagccagttcatgcaaaactatggcatggaatccgagatcatcctg

SEQ ID NO: 46653 - DNA, 45 bp, synthetic construct
  source 1..45: mol_type = other DNA
cccatcaagatccctctgagcgagagcgtacaagtatcaatcatg

SEQ ID NO: 46654 - DNA, 30 bp, synthetic construct; identical to SEQ ID NO: 46266
  source 1..30: mol_type = other DNA

SEQ ID NO: 46655 - DNA, 123 bp, synthetic construct
  source 1..123: mol_type = other DNA
agcctgttgcccctgcacccatacgccttcgctatggccagtggcgttggaagcgcatccatgaacgctgccgccctgggccctacactggctgctttccccgcactggagaccaacatcgaa

SEQ ID NO: 46656 - DNA, 30 bp, synthetic construct
  source 1..30: mol_type = other DNA
tacttcagcaccggctatgtgctgaggatc

SEQ ID NO: 46657 - DNA, 54 bp, synthetic construct
  source 1..54: mol_type = other DNA
gtgtatagcgggttcatgcaaaattacggcatggaatccgagatcgttctgact

SEQ ID NO: 46658 - DNA, 51 bp, synthetic construct
  source 1..51: mol_type = other DNA
tattcaggctttatgcaaaattatggcatggactccgagatcattctgact

SEQ ID NO: 46659 - DNA, 30 bp, synthetic construct; identical to SEQ ID NO: 46604
  source 1..30: mol_type = other DNA

SEQ ID NO: 46660 - DNA, 78 bp, synthetic construct
  source 1..78: mol_type = other DNA
atgttcttacaatacctccgcgagatctctggcggcatcttcaacacattcttcacgtcgtgttctttctacggagag

SEQ ID NO: 46661 - DNA, 105 bp, synthetic construct
  source 1..105: mol_type = other DNA
ctgttctctatctaccggccctgggtactggactccaaagtgaagcccgtgaaagaggccctcccacacgccggtggctattccttcccttccggacatagtgct

SEQ ID NO: 46662 - DNA, 63 bp, synthetic construct
  source 1..63: mol_type = other DNA
accaaatcctatcccatcgattatgattccgccggcaagatcattgtcgagcctatcaagaac

SEQ ID NO: 46663 - DNA, 54 bp, synthetic construct
  source 1..54: mol_type = other DNA
gtctatagcggcttcatgcaacgttacggcatggaatccgagatcgtgctgacc

SEQ ID NO: 46664 - DNA, 84 bp, synthetic construct
  source 1..84: mol_type = other DNA
atctctgatgggacagttggggaatgtttccgatttattaccgaccgcatgggcatttcctttggagatagtgcaggctctcgc

SEQ ID NO: 46665 - DNA, 99 bp, synthetic construct
  source 1..99: mol_type = other DNA
atgcccatcgccgtctggactgacctgctcgacgtatcctcactggctcactggtacgatgtctggaacgccggacctggcgtgctgtccatttggaac

SEQ ID NO: 46666 - DNA, 54 bp, synthetic construct
  source 1..54: mol_type = other DNA
gtgtatagcgagtttatgcaaaactacggcatggaatccgagatcattatgacc

SEQ ID NO: 46667 - DNA, 36 bp, synthetic construct
  source 1..36: mol_type = other DNA
agttcttttaatccttcgttctcctttgattggggc

SEQ ID NO: 46668 - DNA, 42 bp, synthetic construct
  source 1..42: mol_type = other DNA
ttcaacctccccgtgattgccatccatccccctatcgagagt

SEQ ID NO: 46669 - DNA, 51 bp, synthetic construct
  source 1..51: mol_type = other DNA
tattctggcttcatgcaaagttacggcatggagtccgagataatcatcacc

SEQ ID NO: 46670 - DNA, 30 bp, synthetic construct
  source 1..30: mol_type = other DNA
tacttcagtaccgggacagtgctgaagatc

SEQ ID NO: 46671 - DNA, 54 bp, synthetic construct
  source 1..54: mol_type = other DNA
gtgtactccggcttcatgcaaagctacgggatggaatctgagatcgtgttgacc

SEQ ID NO: 46672 - DNA, 51 bp, synthetic construct
  source 1..51: mol_type = other DNA
tactcaggatttatgcaagattacggcatggagtccgaaattatcctgacg

SEQ ID NO: 46673 - DNA, 51 bp, synthetic construct
  source 1..51: mol_type = other DNA
tactccagctttatgcaaggctttggcatggagtccgaaattatcatgaca

SEQ ID NO: 46674 - DNA, 51 bp, synthetic construct
  source 1..51: mol_type = other DNA
tactcaagttttatgcaatcatatgggatcgagtccgaaattatcatgacc

SEQ ID NO: 46675 - DNA, 51 bp, synthetic construct
  source 1..51: mol_type = other DNA
tacgctgggttcatggagagctttggccaagtatccgatcttgtagccacg

SEQ ID NO: 46676 - DNA, 36 bp, synthetic construct
  source 1..36: mol_type = other DNA
gccgtttatgatataaagatcctgaacaactacaat

SEQ ID NO: 46677 - DNA, 63 bp, synthetic construct
  source 1..63: mol_type = other DNA
agccagctgatttcgtcggaaataattaaccccatcaagcagatcatcaaccaccagagcatt

SEQ ID NO: 46678 - DNA, 48 bp, synthetic construct
  source 1..48: mol_type = other DNA
ttcattaactccatcaatcacttgatttcctcgactggtactcctctg

SEQ ID NO: 46679 - DNA, 48 bp, synthetic construct
  source 1..48: mol_type = other DNA
tatagcggcttcatgcaaggctacgggatggagtcccagatcatcctg

SEQ ID NO: 46680 - DNA, 51 bp, synthetic construct
  source 1..51: mol_type = other DNA
gtatacagcgggttcatggagtcctttggacaagtaactgacctcgtggcc

SEQ ID NO: 46681 - DNA, 48 bp, synthetic construct
  source 1..48: mol_type = other DNA
tacggcaatttcatccaagagtttagccacaactccgagctgatcgcc

SEQ ID NO: 46682 - DNA, 48 bp, synthetic construct
  source 1..48: mol_type = other DNA
tatgctcaattcatggagtcctttggccaagtaacagatctggtagcc

SEQ ID NO: 46683 - DNA, 48 bp, synthetic construct
  source 1..48: mol_type = other DNA
tacgcacaattcatggagagcttcggacacgtgacagatttggttgcc

SEQ ID NO: 46684 - DNA, 48 bp, synthetic construct
  source 1..48: mol_type = other DNA
tatagctcttttatgcaaggatatgggatggaatccgagatcatcctg

SEQ ID NO: 46685 - DNA, 51 bp, synthetic construct
  source 1..51: mol_type = other DNA
gtgtacagcggcttcatgcaaaactacggaatggagtctgaaattatcctg

SEQ ID NO: 46686 - DNA, 42 bp, synthetic construct
  source 1..42: mol_type = other DNA
accaacttttcacaaataactagcttcatatctatcaaccca

SEQ ID NO: 46687 - DNA, 36 bp, synthetic construct
  source 1..36: mol_type = other DNA
acctaccttaaccaaataacgcacctggacgcaaac

SEQ ID NO: 46688 - DNA, 39 bp, synthetic construct
  source 1..39: mol_type = other DNA
aacctgcctagcatccccggcaagattgtcggatggaaa

SEQ ID NO: 46689 - DNA, 60 bp, synthetic construct
  source 1..60: mol_type = other DNA
aaccccacactggggttcaatgtcatcactgctggttccatcgtgatcattatccaagct

SEQ ID NO: 46690 - DNA, 51 bp, synthetic construct
  source 1..51: mol_type = other DNA
aagaaccccacactgggcttcaacctgatcacaatcggctccattgccgtc

SEQ ID NO: 46691 - DNA, 42 bp, synthetic construct
  source 1..42: mol_type = other DNA
agtagctttggacaaatttcgagctttatctctaccaatcca

SEQ ID NO: 46692 - DNA, 246 bp, synthetic construct
  source 1..246: mol_type = other DNA
ggcacaactcacctgaagttctcctctaagagcctcaccgtgaaccacaactccaagaagaccctgaatatcaaggccacaaactacttcaccaagcatgtgatgaagaacattaagctggctctcaaagtctacactgggaagaagtacaagaccgtcgtccttaaaaccgacaagaatggcatcgctaaatacgacgcttccaagctgagtattggggcccacaaaatcataatcaggcatggc

SEQ ID NO: 46693 - DNA, 48 bp, synthetic construct
  source 1..48: mol_type = other DNA
aattacctgaactccgattcgaagaaagtgaccgtgaaggtcacacgg

SEQ ID NO: 46694 - DNA, 45 bp, synthetic construct
  source 1..45: mol_type = other DNA
cctatcaagatccccattaccaacggcgtcgaggtgtcgatcatg

SEQ ID NO: 46695 - DNA, 30 bp, synthetic construct; identical to SEQ ID NO: 46266
  source 1..30: mol_type = other DNA

SEQ ID NO: 46696 - DNA, 123 bp, synthetic construct
  source 1..123: mol_type = other DNA
acactgctgcccctgcacccatacgccttcgccatggctagcggagtcggcagcgcatctatgaatgctgccgccctgggcccaacgctggctgcatttcctgcactggagactaacatcgaa

SEQ ID NO: 46697 - DNA, 48 bp, synthetic construct
  source 1..48: mol_type = other DNA
ttcgccccttccatcaccaacccgcttcaatctttcgatcaatcgaat

SEQ ID NO: 46698 - DNA, 36 bp, synthetic construct
  source 1..36: mol_type = other DNA
aagctgttctttacccacaacatggtgtcacctagc

SEQ ID NO: 46699 - DNA, 60 bp, synthetic construct
  source 1..60: mol_type = other DNA
aagggagcctaccccgggatgtggtatggctgggttatgctggctgccgttcctagtgga

SEQ ID NO: 46700 - DNA, 45 bp, synthetic construct
  source 1..45: mol_type = other DNA
ggggtcaattttctggggcagcatgcctttaagagccactctaca

SEQ ID NO: 46701 - DNA, 282 bp, synthetic construct
  source 1..282: mol_type = other DNA
ggaaataattcctccatcattggggacgccggggatcgggatgaatactcctgggcctatctcgaggacaactgcatcctggctgctgataacctgaacataaccaaattcaaccatgctatctacaatgatgggggctcctgtatcctgaataatgtgattttttaccacaaccggatggactacaggatcgaacgagactggggcgctgctattctgaacgccggcatttgcatgtgcaccaactgcactttcatggagaactactgttctaatggtggt

SEQ ID NO: 46702 - DNA, 48 bp, synthetic construct
  source 1..48: mol_type = other DNA
atgtgggagtccagcggcgactctttctacatcctgcctagcatcagt

SEQ ID NO: 46703 - DNA, 51 bp, synthetic construct
  source 1..51: mol_type = other DNA
gtgtactccgattttatgcaaaactttggaaaaagcggagacttgatcctc

SEQ ID NO: 46704 - DNA, 36 bp, synthetic construct
  source 1..36: mol_type = other DNA
ggcagcacagtgatgggtgacgtaatatcaggaagc

SEQ ID NO: 46705 - DNA, 39 bp, synthetic construct
  source 1..39: mol_type = other DNA
gacgtcctgtccatccccggcaaggtggttagcaaccag

SEQ ID NO: 46706 - DNA, 45 bp, synthetic construct
  source 1..45: mol_type = other DNA
tcccggagcgacagggtggtcgataacgtggttgctggagaatcc

SEQ ID NO: 46707 - DNA, 42 bp, synthetic construct
  source 1..42: mol_type = other DNA
gatgttttttcgatacccggcaaggtggtgtccgatcatgtt

SEQ ID NO: 46708 - DNA, 51 bp, synthetic construct
  source 1..51: mol_type = other DNA
tactcagagttcatcgggcagatcggccgagaaaaccccctggctactgcc

SEQ ID NO: 46709 - DNA, 174 bp, synthetic construct
  source 1..174: mol_type = other DNA
aaggacgatgagcactactggcgactttcaagcaaagacggcttcgaatgggttgttacatttgacgaccggtctcgcgtaataaatggggaagtgataaataactctgggaaatgcggctatacctacctgaaatccgattccctcgtcaaaaagtccatcatggcttctgcc

SEQ ID NO: 46710 - DNA, 60 bp, synthetic construct
  source 1..60: mol_type = other DNA
tggtacgtgggcgagcacaactatgaccccgattaccaggcctggaagacctacgctatc

SEQ ID NO: 46711 - DNA, 60 bp, synthetic construct
  source 1..60: mol_type = other DNA
accgctagcgtcgcctcctacaacccttaccccgtggaggactttatcttcacaaccttc

SEQ ID NO: 46712 - DNA, 30 bp, synthetic construct
  source 1..30: mol_type = other DNA
ccccagatgggcatcgaccctctgttcacc

SEQ ID NO: 46713 - DNA, 57 bp, synthetic construct
  source 1..57: mol_type = other DNA
aacatcgccgtgtccatgaccaactacaatgctgggatgggcagcatgtactctcgg

SEQ ID NO: 46714 - DNA, 33 bp, synthetic construct
  source 1..33: mol_type = other DNA
aagaacggggatctggacggctacgctttcctg

SEQ ID NO: 46715 - DNA, 132 bp, synthetic construct
  source 1..132: mol_type = other DNA
ctgtcatttcctacaatggttatggcgggagcaggcacggactggtgcgattatttttactgcttttccctaaccggttttgtggacatcgattcactcacctctatcggaaccagctcgcccgactacgga

SEQ ID NO: 46716 - DNA, 75 bp, synthetic construct
  source 1..75: mol_type = other DNA
gctgtcgagggtaacagcaatgtgctgatcctaaccgagtgtaatttcatcaataactccgccaccattcatggc

SEQ ID NO: 46717 - DNA, 69 bp, synthetic construct
  source 1..69: mol_type = other DNA
ctgcagggcaacaacacctatactgttatagacaagagcaagttcgattccaattacgcaccctatggc

SEQ ID NO: 46718 - DNA, 72 bp, synthetic construct
  source 1..72: mol_type = other DNA
gctctcggcaacacagactacctagtaatatctgagagcagcttcaccaaccacataggggcagaggatgac

SEQ ID NO: 46719 - DNA, 72 bp, synthetic construct
  source 1..72: mol_type = other DNA
atttacgtcatcggcaatctgaccaacgccaacatcgtcgactccctgttcgaaaataactcagctagagcc

SEQ ID NO: 46720 - DNA, 45 bp, synthetic construct
  source 1..45: mol_type = other DNA
accatcgagatccccatcgctaaggacgtggccattaccatcatg

SEQ ID NO: 46721 - DNA, 33 bp, synthetic construct
  source 1..33: mol_type = other DNA
ggccagagcattaacctgatctttcaaatgatg

SEQ ID NO: 46722 - DNA, 123 bp, synthetic construct
  source 1..123: mol_type = other DNA
tctttcctgcccctgcacccatacgcgttcgccatggcatctggggttggatcggccagcatgaacgccgccgcaattggacctaccctggccgccttcccgggcatggagacacaaatcgag

SEQ ID NO: 46723 - DNA, 48 bp, synthetic construct
  source 1..48: mol_type = other DNA
accgacttcggcgagatctccggctttgtctctattgaccccgcgatt

SEQ ID NO: 46724 - DNA, 33 bp, synthetic construct
  source 1..33: mol_type = other DNA
gggtctaccgtcatgggcgacgtgattagctcc

SEQ ID NO: 46725 - DNA, 54 bp, synthetic construct
  source 1..54: mol_type = other DNA
gacctgcattactcattcgccaaggcctttaacctgctggagatggctaccgac

SEQ ID NO: 46726 - DNA, 42 bp, synthetic construct
  source 1..42: mol_type = other DNA
gacatgacaagcatcttctacattttatatgatcgaataatc

SEQ ID NO: 46727 - DNA, 36 bp, synthetic construct
  source 1..36: mol_type = other DNA
atgaacttcaagtacatgcccgagctgaacatgcca

SEQ ID NO: 46728 - DNA, 51 bp, synthetic construct
  source 1..51: mol_type = other DNA
ctctcctcaacatacaccacgttcctggacgccgttcgggctttggctaat

SEQ ID NO: 46729 - DNA, 75 bp, synthetic construct
  source 1..75: mol_type = other DNA
atcgggttcagcggctttgacgtacagcaattggggcaggtgctgtctggaacgagtacagatggtgccatcaca

SEQ ID NO: 46730 - DNA, 30 bp, synthetic construct
  source 1..30: mol_type = other DNA
atgaaggagcccattcataatagctttacc

SEQ ID NO: 46731 - DNA, 30 bp, synthetic construct
  source 1..30: mol_type = other DNA
ggcctgacaaccgtgactcacgacgtttca

SEQ ID NO: 46732 - DNA, 51 bp, synthetic construct
  source 1..51: mol_type = other DNA
atcggtaaccccgataacaacgtactcttcctcactcctacctacgcactg

SEQ ID NO: 46733 - DNA, 48 bp, synthetic construct
  source 1..48: mol_type = other DNA
aagtttcccttcaaagttattaatttcaccatcaactacggcaataat

SEQ ID NO: 46734 - DNA, 201 bp, synthetic construct
  source 1..201: mol_type = other DNA
ctgtctccaatagaccccgtaaaatcctacgctgccgagatgggcgccagtgttcaacaaatcgcagcactgcggagctactggcaagtcgatgtgcccacctatcaaaaactgattgattggttgctcgacctgctacaattaaatcttggcgtgtccctgatataccgcattcctgtcatcaaagtcatagcggacaaa

SEQ ID NO: 46735 - DNA, 87 bp, synthetic construct
  source 1..87: mol_type = other DNA
gtgtacctgaagtggttccccatcgggctggctgtccctgttgggactttggcaagcgacgtgaccttctttgactggctgtaccgg

SEQ ID NO: 46736 - DNA, 72 bp, synthetic construct
  source 1..72: mol_type = other DNA
gagcagatcttctcttaccccgggatcggccaagcaactgtggctgctggacttcgaagtgacgtgcctctg

SEQ ID NO: 46737 - DNA, 36 bp, synthetic construct
  source 1..36: mol_type = other DNA
atgaacttcaattacatgcccgagctgaactaccag

SEQ ID NO: 46738 - DNA, 39 bp, synthetic construct
  source 1..39: mol_type = other DNA
gacaagctgttcttcgcgcaagctgtcacggcgccctcc

SEQ ID NO: 46739 - DNA, 36 bp, synthetic construct
  source 1..36: mol_type = other DNA
atgaacttcaagtacatgcccgagctggaatacgcc

SEQ ID NO: 46740 - DNA, 135 bp, synthetic construct
  source 1..135: mol_type = other DNA
atgcttaatcggtttaacaacatgttcggcaccgtcttctacttcccctgggaggtgtctctgatcctctttttgcaaagttcgctgcctgactttgtgtttggagtgttcggggtcattgccgatgtggtttca

SEQ ID NO: 46741 - DNA, 129 bp, synthetic construct
  source 1..129: mol_type = other DNA
gtgtccgtcgctaggctgcggccctatgccgtgatggataatatcaagtgcatttacgccccaaccgccgaccagaacctctttgacttcaagatccagggctacagcttcccttctgggcatgctatg

SEQ ID NO: 46742 - DNA, 33 bp, synthetic construct
  source 1..33: mol_type = other DNA
agctttgagaatggcgagttcaacatgagcaag

SEQ ID NO: 46743 - DNA, 36 bp, synthetic construct
  source 1..36: mol_type = other DNA
ctcaagctgccccttggcgagatcattagtttggaa

SEQ ID NO: 46744 - DNA, 33 bp, synthetic construct
  source 1..33: mol_type = other DNA
gggagcacagtgatgggcgacattatcccatcc

SEQ ID NO: 46745 - DNA, 135 bp, synthetic construct
  source 1..135: mol_type = other DNA
atgtctaatatcttcaattcgatgtttgaaaccgtgttttacttcccctgggaagtttttctgatcatcttcttgcaaagcactctgcctggcctggtcctggggttcttcgaggtcattgccgaagtggtatcc

SEQ ID NO: 46746 - DNA, 129 bp, synthetic construct
  source 1..129: mol_type = other DNA
gtgaccgtcgcccgcctgcggccatacgccgctgtggatacaatcaagtgcatcagggccgacgtggctgaccagaacccttttgacttcaagattcagggctacagcttcccatccggccacaccatg

SEQ ID NO: 46747 - DNA, 45 bp, synthetic construct
  source 1..45: mol_type = other DNA
cccattgagatccctatcgccaagggcgtcgaagtgatcatcatg

SEQ ID NO: 46748 - DNA, 30 bp, synthetic construct
  source 1..30: mol_type = other DNA
ggccagagcatccacctgattttcgagatg

SEQ ID NO: 46749 - DNA, 123 bp, synthetic construct
  source 1..123: mol_type = other DNA
tccatcatccccctgcacccattcgccttcgctatggccagcggggtcgggtcagcatctatgaacgccgcgtcattgggccccacactggctgcatttcccaacctggagacgtccatcgag

SEQ ID NO: 46750 - DNA, 48 bp, synthetic construct
  source 1..48: mol_type = other DNA
gggcccattgagatcaacctgacaaagggcgtcaccgtatctattatg

SEQ ID NO: 46751 - DNA, 30 bp, synthetic construct; identical to SEQ ID NO: 46748
  source 1..30: mol_type = other DNA

SEQ ID NO: 46752 - DNA, 123 bp, synthetic construct
  source 1..123: mol_type = other DNA
tctgtgctgcccctgcacccatacgcatttgcgatggccagcggagtcggctcggcgtcaatgaacgccgctagtctgggccctacccttgccgcttttccaagcctggagacaagcatcgag

SEQ ID NO: 46753 - DNA, 204 bp, synthetic construct
  source 1..204: mol_type = other DNA
tccaaattcatcaacaacagcgctagccgtgatgggggtgccgtgtattcaatcgccaatctgctccttaataactcagatttgaagtataacaacgcctactgtggcggcgctgtgtactccgttaatacccagttgatcttactgaattccaattttacaaacaactatgcgacgtcctacggcggtgcttctatagcaatt

SEQ ID NO: 46754 - DNA, 138 bp, synthetic construct
  source 1..138: mol_type = other DNA
ccctacttctatattatgggcgcccggttcgtcaacgacatcagcaattcttccgccggggcaatctactctatgtactccaagaaccacttttatgattccgtatttgtgaactgcagctccctgatcggaggagct

SEQ ID NO: 46755 - DNA, 150 bp, synthetic construct
  source 1..150: mol_type = other DNA
gacctgcactcctctagtatctactccaacctcaactttactaacaacatggccatcaagggcggagccgtgtacaagatgtataataccacaagcatcagcgggagtactttcaatagcaaccacgctattgagggcggcggattgtat

SEQ ID NO: 46756 - DNA, 87 bp, synthetic construct
  source 1..87: mol_type = other DNA
gaccagatctcctctgctatcctgacaaacctgaccttcaacaagaatattgccgaatacgggggagatatctattgccttggagat

SEQ ID NO: 46757 - DNA, 276 bp, synthetic construct
  source 1..276: mol_type = other DNA
ggctctcacgacgccttcaacctggcctttctgaatctcaatcaaaaggccggagattacaagatcttcgaaattgacgacgtggctcccgtgttcgactccatgtatgacatgcgggactactacaacctgaccgaggttaagaatcagcttgaacgcggcaattgttgggccttcgctgctatggctgccctcgagtcctgcatcctgaaggccaacgggacagcatacgatttttctgaagaaaatctcaagaacatggtcgcccgattcttt

SEQ ID NO: 46758 - DNA, 33 bp, synthetic construct
  source 1..33: mol_type = other DNA
tcgtcaacggttatgggcgacctgatatcaagc

SEQ ID NO: 46759 - DNA, 36 bp, synthetic construct
  source 1..36: mol_type = other DNA
cggctcttcgtcaagaagtcactggctgtgcctgac

SEQ ID NO: 46760 - DNA, 30 bp, synthetic construct
  source 1..30: mol_type = other DNA
aacctgatcggcggagtcgacttcaccaat

SEQ ID NO: 46761 - DNA, 51 bp, synthetic construct
  source 1..51: mol_type = other DNA
gtcgatatttatgacgctaatttcgtcaaggccgccgtgctggggcgatac

SEQ ID NO: 46762 - DNA, 102 bp, synthetic construct
  source 1..102: mol_type = other DNA
cagggactgaacgccgataatatggtttacgacttagtaaaggagaacggcgccgaagggacagtcggaagcgtggtgcaaggtaccatcgcaagagcagag

SEQ ID NO: 46763 - DNA, 48 bp, synthetic construct
  source 1..48: mol_type = other DNA
acagatttcgcaatctacaacaccgacgacgccgctaagtggaatgcc

SEQ ID NO: 46764 - DNA, 45 bp, synthetic construct
  source 1..45: mol_type = other DNA
atccaggacaccctgctgactagcttccaaatgaattttaccaac

SEQ ID NO: 46765 - DNA, 57 bp, synthetic construct
  source 1..57: mol_type = other DNA
ctgggcgaggaggtatccttcgagaactacatcgacctctttttcctgaagcagtac

SEQ ID NO: 46766 - DNA, 45 bp, synthetic construct
  source 1..45: mol_type = other DNA
aacggcggctttctgggaaccttcgaagaggtgcacccttacggg

SEQ ID NO: 46767 - DNA, 57 bp, synthetic construct
  source 1..57: mol_type = other DNA
cacactatcacggacacacataccagctccaccctagtatactacggctatagaagg

SEQ ID NO: 46768 - DNA, 48 bp, synthetic construct
  source 1..48: mol_type = other DNA
atcaattatctggagagcatcggcattaacgtctacgtcttgaacccc

SEQ ID NO: 46769 - DNA, 51 bp, synthetic construct
  source 1..51: mol_type = other DNA
aacatcaacggcatggtctttaatattgccattctcgaggcaggcatgtct

SEQ ID NO: 46770 - DNA, 45 bp, synthetic construct
  source 1..45: mol_type = other DNA
agccgggccgataggctggtcgacaacgttgtgtccggagaaacc

SEQ ID NO: 46771 - DNA, 48 bp, synthetic construct
  source 1..48: mol_type = other DNA
atgtgggatagctccggcgactccttctacattctgccctctatctct

SEQ ID NO: 46772 - DNA, 39 bp, synthetic construct
  source 1..39: mol_type = other DNA
gacaagctgtttttcggcggtgccatcaccattcctagt

SEQ ID NO: 46773 - DNA, 36 bp, synthetic construct
  source 1..36: mol_type = other DNA
aagatctttttcggcgcacccattaccacaccttcc

SEQ ID NO: 46774 - DNA, 48 bp, synthetic construct
  source 1..48: mol_type = other DNA
accgactttgggaagttcggctacttcatcaacgccgatcccatcatg

SEQ ID NO: 46775 - DNA, 51 bp, synthetic construct
  source 1..51: mol_type = other DNA
ttctcggtgtctggagagaccgtgttctccaacctcgaagacgctacccac

SEQ ID NO: 46776 - DNA, 54 bp, synthetic construct
  source 1..54: mol_type = other DNA
gatgagtttaagttcagcttcggcaacatggtggacaccttcgtctccatgtac

SEQ ID NO: 46777 - DNA, 45 bp, synthetic construct
  source 1..45: mol_type = other DNA
acaattaacatccccatcaccaaggacgtcgtgattaccatcatg

SEQ ID NO: 46778 - DNA, 30 bp, synthetic construct; identical to SEQ ID NO: 46748
  source 1..30: mol_type = other DNA

SEQ ID NO: 46779 - DNA, 123 bp, synthetic construct
  source 1..123: mol_type = other DNA
tctttcatccccctgcacccatacgcttacgcgatggcttccggagtcggcagcgcatccatgaacgctgctgccatcgggcccaccctggccgcatttcccactatggagacaaacatcgag

SEQ ID NO: 46780 - DNA, 63 bp, synthetic construct
  source 1..63: mol_type = other DNA
ggcatttacggatgggacattattatttctatactgaatggcggatacgaggtgctgaacacc

SEQ ID NO: 46781 - DNA, 33 bp, synthetic construct
  source 1..33: mol_type = other DNA
atcaagggacccgagggcactgctcacttctca

SEQ ID NO: 46782 - DNA, 30 bp, synthetic construct
  source 1..30: mol_type = other DNA
ggcatccagtcttccacaagcagtcctacc

SEQ ID NO: 46783 - DNA, 30 bp, synthetic construct
  source 1..30: mol_type = other DNA
tccgagaacaagcctagcgaaaacaagccc

SEQ ID NO: 46784 - DNA, 33 bp, synthetic construct
  source 1..33: mol_type = other DNA
ttcttcggcgccagcctgtcctttgacatcgtg

SEQ ID NO: 46785 - DNA, 33 bp, synthetic construct
  source 1..33: mol_type = other DNA
ggaggcgacgatcggacagcacatgctggaaca

SEQ ID NO: 46786 - DNA, 54 bp, synthetic construct
  source 1..54: mol_type = other DNA
ggcatcattgtcgatgatctaagcaccctggtgtctatgggacacctgctttcc

SEQ ID NO: 46787 - DNA, 117 bp, synthetic construct
  source 1..117: mol_type = other DNA
ggctttggcaccggtaacgagctcatgcctagcatctcgccggagatcatcactaccaacattgacacatctcttttcctgggatttgtccgtggattccagggcctgttctccaat

SEQ ID NO: 46788 - DNA, 39 bp, synthetic construct
  source 1..39: mol_type = other DNA
accagccctccaaaccacctgttcggcaagtttcgacgg

SEQ ID NO: 46789 - DNA, 54 bp, synthetic construct
  source 1..54: mol_type = other DNA
ctgtgcagtcactgcattattatcatctactccttttccgactcctgttgtctg

SEQ ID NO: 46790 - DNA, 57 bp, synthetic construct
  source 1..57: mol_type = other DNA
gccaacatcgtggacatttgcatcaagaatgccgacatgccctacatctacgatgct

SEQ ID NO: 46791 - DNA, 36 bp, synthetic construct
  source 1..36: mol_type = other DNA
ttcgaggtgcagaacggcaccctgctaaccggtgta

SEQ ID NO: 46792 - DNA, 33 bp, synthetic construct
  source 1..33: mol_type = other DNA
ggcagcaccgtcatcggagacgtggtgtcttcc

SEQ ID NO: 46793 - DNA, 33 bp, synthetic construct
  source 1..33: mol_type = other DNA
ggcagcaccgtgatgggcgacatcatctcctcc

SEQ ID NO: 46794 - DNA, 36 bp, synthetic construct
  source 1..36: mol_type = other DNA
tacgagtatatgctcaccgccctgcacgaattgcac

SEQ ID NO: 46795 - DNA, 36 bp, synthetic construct
  source 1..36: mol_type = other DNA
cggctgctgaaccccagcctcatcaccacacctgac

SEQ ID NO: 46796 - DNA, 39 bp, synthetic construct
  source 1..39: mol_type = other DNA
gagcggcttgtgaaccctagcctgatcaccatgccttct

SEQ ID NO: 46797 - DNA, 39 bp, synthetic construct
  source 1..39: mol_type = other DNA
cagatcttctttagtcaatctctgaccgttacccctgac

SEQ ID NO: 46798 - DNA, 36 bp, synthetic construct; identical to SEQ ID NO: 46795
  source 1..36: mol_type = other DNA

SEQ ID NO: 46799 - DNA, 42 bp, synthetic construct
  source 1..42: mol_type = other DNA
acagtcaacatccccatcaccaagaatgtggccatcaccatt

SEQ ID NO: 46800 - DNA, 30 bp, synthetic construct; identical to SEQ ID NO: 45216
  source 1..30: mol_type = other DNA

SEQ ID NO: 46801 - DNA, 123 bp, synthetic construct
  source 1..123: mol_type = other DNA
agctttctgccactgcacccctatgcttttgccatggctagcggagtcggctctgcatctatgaacgcagcagccattgggccaacactggccgcattcccgggtctcgaatccagcatcgaa

SEQ ID NO: 46802 - DNA, 90 bp, synthetic construct
  source 1..90: mol_type = other DNA
accgagcacgtcaaccccctggactccttagttatggtatccaatgccttcacctctaacggatataccgttttaggaaattccatcgtc

SEQ ID NO: 46803 - DNA, 39 bp, synthetic construct
  source 1..39: mol_type = other DNA
gaacggctgttctttggcggtactcccgcaattcctgag

SEQ ID NO: 46804 - DNA, 39 bp, synthetic construct
  source 1..39: mol_type = other DNA
gagaagattctcaaccccacactgatcaccacacctgac

SEQ ID NO: 46805 - DNA, 36 bp, synthetic construct; identical to SEQ ID NO: 46795
  source 1..36: mol_type = other DNA

SEQ ID NO: 46806 - DNA, 69 bp, synthetic construct
  source 1..69: mol_type = other DNA
aaccctaccctcgggttcaatgttataaccgccgggagcatcgtgattatcttgcaagcggcgtttccc

SEQ ID NO: 46807 - DNA, 36 bp, synthetic construct
  source 1..36: mol_type = other DNA
gggtccaccgtcatgggcgacattattagctcgagt

SEQ ID NO: 46808 - DNA, 42 bp, synthetic construct
  source 1..42: mol_type = other DNA
accatcgagattcccatcactaaggacgtcgccatcacgatt

SEQ ID NO: 46809 - DNA, 30 bp, synthetic construct
  source 1..30: mol_type = other DNA
ggccagagcatcgggctgattttcgagatg

SEQ ID NO: 46810 - DNA, 123 bp, synthetic construct
  source 1..123: mol_type = other DNA
tccttcttgccgctgcacccttatgccttcgccatggctagcggggttgggtctgcctccatgaatgcagccgcaattgggccaacactggccgcctttcccggactggaaacccaaatcgaa

SEQ ID NO: 46811 - DNA, 45 bp, synthetic construct
  source 1..45: mol_type = other DNA
actaacttctcccaaattacaggctttatctccatcaatccactg

SEQ ID NO: 46812 - DNA, 36 bp, synthetic construct
  source 1..36: mol_type = other DNA
aagttcctgaaccccagcactatcaccgtgcccgac

SEQ ID NO: 46813 - DNA, 39 bp, synthetic construct
  source 1..39: mol_type = other DNA
gataagctgctggaccccagcctcatcaccacacctgac

SEQ ID NO: 46814 - DNA, 54 bp, synthetic construct
  source 1..54: mol_type = other DNA
cccctgatggggatcgtgcatagcattaatcactctaccggcctcaacatctcc

SEQ ID NO: 46815 - DNA, 30 bp, synthetic construct
  source 1..30: mol_type = other DNA
aacctcgacctgtccaccctgagcacactg

SEQ ID NO: 46816 - DNA, 51 bp, synthetic construct
  source 1..51: mol_type = other DNA
ttcgcctttgagggtctcgatcgaatcgtgttgattgtcgactctgccctg

SEQ ID NO: 46817 - DNA, 36 bp, synthetic construct
  source 1..36: mol_type = other DNA
aagctgatcaacccgagcacgataaccgttccggag

SEQ ID NO: 46818 - DNA, 33 bp, synthetic construct
  source 1..33: mol_type = other DNA
tatagctctgacctgtccctcatcccaaagctc

SEQ ID NO: 46819 - DNA, 51 bp, synthetic construct
  source 1..51: mol_type = other DNA
ggactgtcagatttacaatataccgtggctatcgttgaggctgcaatgcca

SEQ ID NO: 46820 - DNA, 30 bp, synthetic construct
  source 1..30: mol_type = other DNA
tacgtagcccgaaccagccttttcgcttct

SEQ ID NO: 46821 - DNA, 51 bp, synthetic construct
  source 1..51: mol_type = other DNA
ggaatcaccggactgaaccacacaattggcctcatcgaggccgctatgtcc

SEQ ID NO: 46822 - DNA, 33 bp, synthetic construct
  source 1..33: mol_type = other DNA
tacagcgcagacctgtctctcatctcccaactc

SEQ ID NO: 46823 - DNA, 54 bp, synthetic construct
  source 1..54: mol_type = other DNA
ctcggcctgatcgacctccaattcaaaattagcatcgtcgaggcagctatgcca

SEQ ID NO: 46824 - DNA, 39 bp, synthetic construct
  source 1..39: mol_type = other DNA
gacaagatcattcaccctgagctgatcaccgttcccgat

SEQ ID NO: 46825 - DNA, 30 bp, synthetic construct
  source 1..30: mol_type = other DNA
ccctacgtgctgtatagcaacggagggggc

SEQ ID NO: 46826 - DNA, 96 bp, synthetic construct
  source 1..96: mol_type = other DNA
ctgagcttcacaaagggatggggagctaaccccgacacattctttgccaccaccctcctacaatcatcagagtccatgtccggcctcacacacttc

SEQ ID NO: 46827 - DNA, 78 bp, synthetic construct
  source 1..78: mol_type = other DNA
ctgacactgcccggcgccagcatcggcctggctgaactgtttaaccctgactggtccctcctgacccacttcgagatt

SEQ ID NO: 46828 - DNA, 84 bp, synthetic construct
  source 1..84: mol_type = other DNA
cacgtgaccagcgtccgcaactcgggatgccgaccttgtaactctggcaaccggccttgcatctgctccgtctcttataggatt

SEQ ID NO: 46829 - DNA, 48 bp, synthetic construct
  source 1..48: mol_type = other DNA
ggccccatcgagatcaagctgaccgacagcgtcgaaattgcagtgatg

SEQ ID NO: 46830 - DNA, 30 bp, synthetic construct
  source 1..30: mol_type = other DNA
ggccagagcatgcacctgctgttcgagatg

SEQ ID NO: 46831 - DNA, 123 bp, synthetic construct
  source 1..123: mol_type = other DNA
tccatcctgccactgcatccctacgccttcgctatggctagcggcgtcggatctgcctccatgaacgcagcatcgttaggcccaacactggccgcgttccctgcattggagaccaacatcgag

SEQ ID NO: 46832 - DNA, 33 bp, synthetic construct
  source 1..33: mol_type = other DNA
tactctgccgacctgtccctgctctctaagctg

SEQ ID NO: 46833 - DNA, 51 bp, synthetic construct
  source 1..51: mol_type = other DNA
ggattggttgatttacaatataaggtctcaatcgttgaggccgccatgcct

SEQ ID NO: 46834 - DNA, 33 bp, synthetic construct
  source 1..33: mol_type = other DNA
tactcctccgacctctctctgatccctaagctg

SEQ ID NO: 46835 - DNA, 51 bp, synthetic construct
  source 1..51: mol_type = other DNA
ctggggctctctgacttgcaatacacggtcgccgtagtcgaggccgccatg

SEQ ID NO: 46836 - DNA, 39 bp, synthetic construct
  source 1..39: mol_type = other DNA
atcaacatcctgaatccaggccaaattacggtgcctaac

SEQ ID NO: 46837 - DNA, 33 bp, synthetic construct
  source 1..33: mol_type = other DNA
tacaccgccgacttaaattcgatttccaatatg

SEQ ID NO: 46838 - DNA, 51 bp, synthetic construct
  source 1..51: mol_type = other DNA
gggttggttaacctggaacacactgtttccgtcatagaggccgctatgccc

SEQ ID NO: 46839 - DNA, 33 bp, synthetic construct
  source 1..33: mol_type = other DNA
tactccgccgacctgagttctatctcaaagctg

SEQ ID NO: 46840 - DNA, 51 bp, synthetic construct
  source 1..51: mol_type = other DNA
ggactggtcgatctgcaatataacgtgtccatcgtcgaggcagccatgcca

SEQ ID NO: 46841 - DNA, 30 bp, synthetic construct
  source 1..30: mol_type = other DNA
agctccgacctgaccctgatccctaagctc

SEQ ID NO: 46842 - DNA, 51 bp, synthetic construct
  source 1..51: mol_type = other DNA
ggactgctcaatttggagtttacggtttccatcgtcgaggccgcaatgcct

SEQ ID NO: 46843 - DNA, 75 bp, synthetic construct
  source 1..75: mol_type = other DNA
agtgccatctacggttccgctgtcattgaccggatcgtgaacggcggatacgagaccctgaacacatctgattca

SEQ ID NO: 46844 - DNA, 39 bp, synthetic construct
  source 1..39: mol_type = other DNA
accgggaaggaaagcggaagtagcacacaggtatctgtc

SEQ ID NO: 46845 - DNA, 36 bp, synthetic construct
  source 1..36: mol_type = other DNA
ctgggcctggggtccctctctagtaccgtagtttct

SEQ ID NO: 46846 - DNA, 30 bp, synthetic construct
  source 1..30: mol_type = other DNA
accgccgacattagcctgatccctaagctg

SEQ ID NO: 46847 - DNA, 51 bp, synthetic construct
  source 1..51: mol_type = other DNA
ggactggttgacctacaatatcaggtttccatcgtcgaggcagctatgcct

SEQ ID NO: 46848 - DNA, 39 bp, synthetic construct
  source 1..39: mol_type = other DNA
gaaaagatcctcaaccctagcctgattatcatccctgag

SEQ ID NO: 46849 - DNA, 45 bp, synthetic construct
  source 1..45: mol_type = other DNA
agtttcaatcaaataacgacatttgtgaacgccgacattttgggg

SEQ ID NO: 46850 - DNA, 33 bp, synthetic construct
  source 1..33: mol_type = other DNA
tactctgctgacctgtccctgctgagcaagctg

SEQ ID NO: 46851 - DNA, 54 bp, synthetic construct
  source 1..54: mol_type = other DNA
atcggcctggtggatctccaattcaaaattagtgtcgtcgaggctgcaatgccc

SEQ ID NO: 46852 - DNA, 39 bp, synthetic construct
  source 1..39: mol_type = other DNA
taccggatcacccaccctaacatgattacatctcctgac

SEQ ID NO: 46853 - DNA, 33 bp, synthetic construct
  source 1..33: mol_type = other DNA
tactctgccgacctgtctctgatctccaagctc

SEQ ID NO: 46854 - DNA, 51 bp, synthetic construct
  source 1..51: mol_type = other DNA
ggtctcgttgatctgcaatttaagatctctattgtggaagcagccatgcca

SEQ ID NO: 46855 - DNA, 36 bp, synthetic construct
  source 1..36: mol_type = other DNA
tacaccgccgatctctcactgttgccacctcaaatg

SEQ ID NO: 46856 - DNA, 51 bp, synthetic construct
  source 1..51: mol_type = other DNA
ggcctggtcgatttacaatatagtgtctctatcgtggaggcagctatgcca

SEQ ID NO: 46857 - DNA, 36 bp, synthetic construct
  source 1..36: mol_type = other DNA
aagattttatacccgtcaaccatcactgtccccgac

SEQ ID NO: 46858 - DNA, 33 bp, synthetic construct
  source 1..33: mol_type = other DNA
tacaacgctgacctgagcctgatccccaagctc

SEQ ID NO: 46859 - DNA, 51 bp, synthetic construct
  source 1..51: mol_type = other DNA
ggcctgatcaacttggaatacagcgtgtctatagtcgaggccgctatgcct

SEQ ID NO: 46860 - DNA, 42 bp, synthetic construct
  source 1..42: mol_type = other DNA
caccacaagctggagcaccctaactccattgccgttcctgac

SEQ ID NO: 46861 - DNA, 99 bp, synthetic construct
  source 1..99: mol_type = other DNA
gcacccagcttcattcacgtcattaaggcttttaccttcgagaatatcatcaactacatagtcggcgcgtggcgggcccagtccatcttcacatcttac

SEQ ID NO: 46862 - DNA, 42 bp, synthetic construct
  source 1..42: mol_type = other DNA
tgcttctcctccacacaaagtatacactacttcgaccgatac

SEQ ID NO: 46863 - DNA, 57 bp, synthetic construct
  source 1..57: mol_type = other DNA
tttaagatcaatggcatggccttcaacatcgggattctcgaagctgccatgtctact

SEQ ID NO: 46864 - DNA, 30 bp, synthetic construct
  source 1..30: mol_type = other DNA
attatcgaggagaacatcgaacctgttagc

SEQ ID NO: 46865 - DNA, 39 bp, synthetic construct
  source 1..39: mol_type = other DNA
aacttcggccaaataacgcacttcgtgaacatcaatatc

SEQ ID NO: 46866 - DNA, 33 bp, synthetic construct
  source 1..33: mol_type = other DNA
tactccgccgacctgagccttctgcctaagctg

SEQ ID NO: 46867 - DNA, 51 bp, synthetic construct
  source 1..51: mol_type = other DNA
gggctggtggatctccaatataatgttagcattatcgaagccgcgatgcca

SEQ ID NO: 46868 - DNA, 36 bp, synthetic construct
  source 1..36: mol_type = other DNA
aagatcttctttggcgcccctattaccacaccttct

SEQ ID NO: 46869 - DNA, 39 bp, synthetic construct
  source 1..39: mol_type = other DNA
gagaagctgctgaaccccagcctcatcaccgttcctgaa

SEQ ID NO: 46870 - DNA, 30 bp, synthetic construct
  source 1..30: mol_type = other DNA
accgccgacatcagcctgattcctaagctg

SEQ ID NO: 46871 - DNA, 51 bp, synthetic construct
  source 1..51: mol_type = other DNA
ggcctagtcaacctagagtaccagatctccgtcgtcgaagcagcaatgccc

SEQ ID NO: 46872 - DNA, 33 bp, synthetic construct
  source 1..33: mol_type = other DNA
tactccgccgacctgtctctgctgagcaagctc

SEQ ID NO: 46873 - DNA, 54 bp, synthetic construct
  source 1..54: mol_type = other DNA
atgggcctgagcgatctgcaatttacaatctccgtcgttgaagctgcaatgcct

SEQ ID NO: 46874 - DNA, 39 bp, synthetic construct
  source 1..39: mol_type = other DNA
gacaagatcctgaaccccaaactcataacggtaccggac

SEQ ID NO: 46875 - DNA, 33 bp, synthetic construct
  source 1..33: mol_type = other DNA
tacgctgccgacctgagccaaattccgaagctc

SEQ ID NO: 46876 - DNA, 51 bp, synthetic construct
  source 1..51: mol_type = other DNA
gggctggtcaacctcgagcacagcgtgtcaatcgtagaggcagccatgcca

SEQ ID NO: 46877 - DNA, 42 bp, synthetic construct
  source 1..42: mol_type = other DNA
gataagattctccaccctagcctgatcaccataaccgacccg

SEQ ID NO: 46878 - DNA, 48 bp, synthetic construct
  source 1..48: mol_type = other DNA
gggcccatcaagattccaatcacgagcggagtcgaggtgtccatcatg

SEQ ID NO: 46879 - DNA, 30 bp, synthetic construct; identical to SEQ ID NO: 46830
  source 1..30: mol_type = other DNA

SEQ ID NO: 46880 - DNA, 123 bp, synthetic construct
  source 1..123: mol_type = other DNA
agcctgatcccatttcatccatacgcgttcgccatggccagtggcgtcggatctgctagcatgaacgctgctagcctcggacctaccctggccgcattccctggacttgaaacacagattgaa

SEQ ID NO: 46881 - DNA, 42 bp, synthetic construct
  source 1..42: mol_type = other DNA
aattttacacaaattacgaatttcgtgtacctgaatactatt

SEQ ID NO: 46882 - DNA, 33 bp, synthetic construct
  source 1..33: mol_type = other DNA
tacaacgccgacgtgtcactcttgcctagactc

SEQ ID NO: 46883 - DNA, 57 bp, synthetic construct
  source 1..57: mol_type = other DNA
ctgcacattaccggcttcaaccacactatcgggtttatcgaggccacaatgtctagc

SEQ ID NO: 46884 - DNA, 33 bp, synthetic construct
  source 1..33: mol_type = other DNA
tactccgcggacctatcgctcatcaaccagctt

SEQ ID NO: 46885 - DNA, 51 bp, synthetic construct
  source 1..51: mol_type = other DNA
gggctggtagacttacaatataatgtgtccatcattgaggctgccatgcca

SEQ ID NO: 46886 - DNA, 42 bp, synthetic construct
  source 1..42: mol_type = other DNA
gacaagattttccaccctaacctgatcaccactccggatatt

SEQ ID NO: 46887 - DNA, 42 bp, synthetic construct
  source 1..42: mol_type = other DNA
gacaagatcctcaaccctgagctgattcctgatccaacggtc

SEQ ID NO: 46888 - DNA, 99 bp, synthetic construct
  source 1..99: mol_type = other DNA
atcgatccggcattcacctctatcttcgactccttctggtacaacatcgtgaccctgactggagtcggatatggagatattactccgattagttaccct

SEQ ID NO: 46889 - DNA, 57 bp, synthetic construct
  source 1..57: mol_type = other DNA
gccattggcatcattccctacgacatcttctatgggctcgagtccatcaccaactgg

SEQ ID NO: 46890 - DNA, 42 bp, synthetic construct
  source 1..42: mol_type = other DNA
gacacctcaacgcaagcttccctgctgttctccctctttgct

SEQ ID NO: 46891 - DNA, 33 bp, synthetic construct
  source 1..33: mol_type = other DNA
tactccgccgacctgagcctaataccagtttta

SEQ ID NO: 46892 - DNA, 54 bp, synthetic construct
  source 1..54: mol_type = other DNA
ttcggcctcgtggatctccaatactctgtatcgatagtcgaagctgctatgccc

SEQ ID NO: 46893 - DNA, 30 bp, synthetic construct
  source 1..30: mol_type = other DNA
tctgcagacttatctctgatctccaagctg

SEQ ID NO: 46894 - DNA, 54 bp, synthetic construct
  source 1..54: mol_type = other DNA
attgggtttaccaacctggagttcaatgtttcgataatcgaagctgcaatgcca

SEQ ID NO: 46895 - DNA, 33 bp, synthetic construct
  source 1..33: mol_type = other DNA
tactctgccgacctgagcatgctctccaagctg

SEQ ID NO: 46896 - DNA, 54 bp, synthetic construct
  source 1..54: mol_type = other DNA
atcggcctggttgacctacaatacacgattagtatcgtcgaagctgctatgcct

SEQ ID NO: 46897 - DNA, 60 bp, synthetic construct
  source 1..60: mol_type = other DNA
ttcatcgccctcgctcctagcgaagcccacaccctgaacgaaggcacagaccctgttggc

SEQ ID NO: 46898 - DNA, 63 bp, synthetic construct
  source 1..63: mol_type = other DNA
gtgggcgagccaatctcggagtcgttcctctccaaatactccacctacgccgttatggctctg

SEQ ID NO: 46899 - DNA, 30 bp, synthetic construct
  source 1..30: mol_type = other DNA
accgccgacctgtcctacctgagcaagctc

SEQ ID NO: 46900 - DNA, 51 bp, synthetic construct
  source 1..51: mol_type = other DNA
ggactggtcgacttgcaattcaagatctcaatcatcgaggcagccatgccc

SEQ ID NO: 46901 - DNA, 39 bp, synthetic construct
  source 1..39: mol_type = other DNA
gaaaagatcctccaccctgagctgatcgtgattcctagc

SEQ ID NO: 46902 - DNA, 30 bp, synthetic construct
  source 1..30: mol_type = other DNA
tacgctgccaagaccagcctgttcgcaagc

SEQ ID NO: 46903 - DNA, 51 bp, synthetic construct
  source 1..51: mol_type = other DNA
ggaatcacgggcctgaatcacaccattggcctgatcgaggcagcaatgagc

SEQ ID NO: 46904 - DNA, 33 bp, synthetic construct
  source 1..33: mol_type = other DNA
tactccgccgacctctccatgctgtctaagctc

SEQ ID NO: 46905 - DNA, 51 bp, synthetic construct
  source 1..51: mol_type = other DNA
gggctggtggaccttcaatttaaaatcagcgtcgtcgaggcggccatgcca

SEQ ID NO: 46906 - DNA, 54 bp, synthetic construct
  source 1..54: mol_type = other DNA
gtggaggctccctcccaatttcacaccctctatgaaggaagtgaacctcctggc

SEQ ID NO: 46907 - DNA, 54 bp, synthetic construct
  source 1..54: mol_type = other DNA
attggcgaagagataacccagtcctttctggacgagtacagcacctacgctatg

SEQ ID NO: 46908 - DNA, 33 bp, synthetic construct
  source 1..33: mol_type = other DNA
tacagcgccgacctttctctcttgccttcactg

SEQ ID NO: 46909 - DNA, 51 bp, synthetic construct
  source 1..51: mol_type = other DNA
gggcttgtgaacctggagttcaatgtcaccgtgatcgaggcagcaatgcct

SEQ ID NO: 46910 - DNA, 33 bp, synthetic construct
  source 1..33: mol_type = other DNA
tactccgccgacctctccctgatctctaagctg

SEQ ID NO: 46911 - DNA, 54 bp, synthetic construct
  source 1..54: mol_type = other DNA
ctgggactgatcgacttgcaattcaagattagcatcgttgaggctgcaatgcca

SEQ ID NO: 46912 - DNA, 39 bp, synthetic construct
  source 1..39: mol_type = other DNA
gataagctgattcaccctggattgatccgggttcctgac

SEQ ID NO: 46913 - DNA, 42 bp, synthetic construct
  source 1..42: mol_type = other DNA
cagaagatccctctgaccggcgacgtggcgatcacgattatg

SEQ ID NO: 46914 - DNA, 30 bp, synthetic construct
  source 1..30: mol_type = other DNA
ggccagagcatctccctgattttcgacatg

SEQ ID NO: 46915 - DNA, 123 bp, synthetic construct
  source 1..123: mol_type = other DNA
tcatttttgcccctgcatccctacgcatttgcaatggctagcggagtcggttcggcgtccatgaacgctgccgccattgggccaaccctggccgcattccctggactggaaagccaaatcgag

SEQ ID NO: 46916 - DNA, 33 bp, synthetic construct
  source 1..33: mol_type = other DNA
tactcttctgacctctccctgatccctaagctg

SEQ ID NO: 46917 - DNA, 51 bp, synthetic construct
  source 1..51: mol_type = other DNA
gggcttgtggaccttcaatacaccgtgaccgtgatcgaggcagccatgcct

SEQ ID NO: 46918 - DNA, 54 bp, synthetic construct
  source 1..54: mol_type = other DNA
ttcaagatttccggcatggcttttaacatcgccatcctcgaagcaggaatgtca

SEQ ID NO: 46919 - DNA, 33 bp, synthetic construct
  source 1..33: mol_type = other DNA
tactccgagaacatgtcactcctgcctgttctg

SEQ ID NO: 46920 - DNA, 51 bp, synthetic construct
  source 1..51: mol_type = other DNA
gggctgacgggatttaactccaccatcgctctggtagagagcgccatgcct

SEQ ID NO: 46921 - DNA, 33 bp, synthetic construct
  source 1..33: mol_type = other DNA
tacaacgccgacctgagcctcatccccaagatt

SEQ ID NO: 46922 - DNA, 54 bp, synthetic construct
  source 1..54: mol_type = other DNA
attaacttgggcaccctcgaggagacaatcgccatctgcgaagctgctatgccc

SEQ ID NO: 46923 - DNA, 39 bp, synthetic construct
  source 1..39: mol_type = other DNA
gacaagctgctgaaccccaacctcatcaccacacctgat

SEQ ID NO: 46924 - DNA, 42 bp, synthetic construct
  source 1..42: mol_type = other DNA
caccataagctgaagcatccgcatagcatcgttgtgcccgac

SEQ ID NO: 46925 - DNA, 54 bp, synthetic construct
  source 1..54: mol_type = other DNA
ctcaacattggcggcaccgccctgaatattgccgtgctagaggctggaatgagc

SEQ ID NO: 46926 - DNA, 33 bp, synthetic construct
  source 1..33: mol_type = other DNA
gggtctaccgtcatgggcgacgtgatcagctcc

SEQ ID NO: 46927 - DNA, 36 bp, synthetic construct
  source 1..36: mol_type = other DNA
agcgccattgctatcgcattcggcatgtccgaaacc

SEQ ID NO: 46928 - DNA, 54 bp, synthetic construct
  source 1..54: mol_type = other DNA
ttcaagatctccgggatggcctttaacatcgccattcttgaggctggaatgagc

SEQ ID NO: 46929 - DNA, 189 bp, synthetic construct
  source 1..189: mol_type = other DNA
ggcaacggcgccatcatcaaaacgtcgtcggatgatcgggacgagaatacatgggtcaagatggagaacgacgggattactttctctgctaacaatctgaccgtcaccggattcaacaccgggctcgagaacatggccggcacctgcatcttcaatagggtgacatttaaggataaccagaaggactat

SEQ ID NO: 46930 - DNA, 258 bp, synthetic construct
  source 1..258: mol_type = other DNA
ggaatcaccatgtgctacaactgccacttcgagaacaatgaagctaagcacggcggcgctatcttcaatcaaggttatctccatctggacaactgttcctttgtgaacaacgatgccgaaaatggcgagggtgacgacatctgcatcggtgacaacggcgagctgatctacgacggacagaatatcccatcaaacatttctaacaacgagctccacgtgaccgtcgccaagtccatgagcctggccgagactacactg

SEQ ID NO: 46931 - DNA, 78 bp, synthetic construct
  source 1..78: mol_type = other DNA
tactacctctacgggtatctgttcaacgactggagcctctttaccatcgccgatggcctgcttctgttctgcgtagat

SEQ ID NO: 46932 - DNA, 78 bp, synthetic construct
  source 1..78: mol_type = other DNA
tatacagacttcggcgtgcccgtcctcaacctgttcttcggttacttcatcggcaccaagggcgggttcactgctttc

SEQ ID NO: 46933 - DNA, 48 bp, synthetic construct
  source 1..48: mol_type = other DNA
atcgagaacggcttcctgaccgacatacaccagtactacttcatgacc

SEQ ID NO: 46934 - DNA, 36 bp, synthetic construct
  source 1..36: mol_type = other DNA
atcgggaacaatagcgagatcgtcggcaatatcaat

SEQ ID NO: 46935 - DNA, 72 bp, synthetic construct
  source 1..72: mol_type = other DNA
gcccttattggcaccgcaatccagtctgatatagctaacccaatccaaaacctgataaatagttccgacatc

SEQ ID NO: 46936 - DNA, 54 bp, synthetic construct
  source 1..54: mol_type = other DNA
ttcgtgatcgagtctgctgacgccctcactcaaggtgcatacacatcgtttgac

SEQ ID NO: 46937 - DNA, 57 bp, synthetic construct
  source 1..57: mol_type = other DNA
gctctgatgtggacgtcctcatccaagcggttttaccaagtcgcaacactgtctcca

SEQ ID NO: 46938 - DNA, 42 bp, synthetic construct
  source 1..42: mol_type = other DNA
aaggacaagctccttgatccctctctcatccacgttcctaca

SEQ ID NO: 46939 - DNA, 54 bp, synthetic construct
  source 1..54: mol_type = other DNA
ctgaacgtgaccggcctcatcttcaaggtggctgtcctcgagtcaggaatgagt

SEQ ID NO: 46940 - DNA, 42 bp, synthetic construct
  source 1..42: mol_type = other DNA
gagaagctcatgaaccctgccctgatcacctctcccgataca

SEQ ID NO: 46941 - DNA, 33 bp, synthetic construct
  source 1..33: mol_type = other DNA
gggtcaaccgtattgggcgacgtgatctcttcc

SEQ ID NO: 46942 - DNA, 33 bp, synthetic construct
  source 1..33: mol_type = other DNA
ttcctcaaccccgacctgatcactgtccctagc

SEQ ID NO: 46943 - DNA, 54 bp, synthetic construct
  source 1..54: mol_type = other DNA
atcgggttcggaggcctgagcttcaaggtagccgtgcttgaggccggcatgacc

SEQ ID NO: 46944 - DNA, 51 bp, synthetic construct
  source 1..51: mol_type = other DNA
atcggatgcggagggctgcttctacaagtcagtgtactggagtccgcgatg

SEQ ID NO: 46945 - DNA, 30 bp, synthetic construct
  source 1..30: mol_type = other DNA
tctaccgtgatgggcgatgtaatatctagc

SEQ ID NO: 46946 - DNA, 66 bp, synthetic construct
  source 1..66: mol_type = other DNA
gagagcgggctgctgccctacggcttcgtgaacttctacatgatcattcaaaacctagtcaataat

SEQ ID NO: 46947 - DNA, 51 bp, synthetic construct
  source 1..51: mol_type = other DNA
gttgacgctggcaatgtcatcactaacctttatgatgtggttttccggtac

SEQ ID NO: 46948 - DNA, 36 bp, synthetic construct
  source 1..36: mol_type = other DNA
aagattatcaaccccaatctgatcaccgttcctgat

SEQ ID NO: 46949 - DNA, 45 bp, synthetic construct
  source 1..45: mol_type = other DNA
accatccggattcccatcactaaggacgtggccatcacaatcatg

SEQ ID NO: 46950 - DNA, 30 bp, synthetic construct
  source 1..30: mol_type = other DNA
ggccaatcaatctcgctgattttcgagatg

SEQ ID NO: 46951 - DNA, 123 bp, synthetic construct
  source 1..123: mol_type = other DNA
agcttcattcccctgcacccatacgcatatgccatggcttctggggttggtagcgccagcatgaacgccgccgctattggccccaccctggctgccttccccggtctggaaacccagatcgaa

SEQ ID NO: 46952 - DNA, 57 bp, synthetic construct
  source 1..57: mol_type = other DNA
gctctgcccgagaccgccattgccaatcacatcgactttaccaacttcatcatctca

SEQ ID NO: 46953 - DNA, 39 bp, synthetic construct
  source 1..39: mol_type = other DNA
gaccggctcttctttggcggaacactggctgtacctggg

SEQ ID NO: 46954 - DNA, 33 bp, synthetic construct
  source 1..33: mol_type = other DNA
tacctggacggaggctctacggttttctctttt

SEQ ID NO: 46955 - DNA, 45 bp, synthetic construct
  source 1..45: mol_type = other DNA
gactggggcatctttgccgagtacctgaccacaaacagctccttc

SEQ ID NO: 46956 - DNA, 42 bp, synthetic construct
  source 1..42: mol_type = other DNA
atcaccattcccatcgcgaaggacgttgagatcaccataatg

SEQ ID NO: 46957 - DNA, 30 bp, synthetic construct
  source 1..30: mol_type = other DNA
ggccagtccattagcctgatcttcgacatg

SEQ ID NO: 46958 - DNA, 123 bp, synthetic construct
  source 1..123: mol_type = other DNA
tcttttctgcctttgcacccatacgccttcgccatggctagtggcgtcggctccgctagcatgaacgcagcagccattgggccaaccctggccgcattccccggaatggaaacacagatcgag

SEQ ID NO: 46959 - DNA, 54 bp, synthetic construct
  source 1..54: mol_type = other DNA
gggatttactcatcattcatgatgaaccttggccgagcctctaccacatgtcag

SEQ ID NO: 46960 - DNA, 30 bp, synthetic construct
  source 1..30: mol_type = other DNA
tacgtggccaggactagcctgttcgcttcc

SEQ ID NO: 46961 - DNA, 51 bp, synthetic construct
  source 1..51: mol_type = other DNA
ggaattactgggttgaatcacacaattggcctgatcgaggcagccatgagc

SEQ ID NO: 46962 - DNA, 30 bp, synthetic construct
  source 1..30: mol_type = other DNA
ctgggcggagccgaaatcgagttccataca

SEQ ID NO: 46963 - DNA, 123 bp, synthetic construct
  source 1..123: mol_type = other DNA
atgaagaagtacatcaatctgattaatgattacttcgatataaactacatgcgcaagaatatggtggtggagtacatctcaccaatatttgacggaatcatggacattttcactcaaggaggc

SEQ ID NO: 46964 - DNA, 48 bp, synthetic construct
  source 1..48: mol_type = other DNA
ttcaagtccctgggggttaaccccaattccgccgcgatggctgagggt

SEQ ID NO: 46965 - DNA, 60 bp, synthetic construct
  source 1..60: mol_type = other DNA
acacacaaccagacctttgcgcaatttatacacctgaaggacattttctactaccttggc

SEQ ID NO: 46966 - DNA, 36 bp, synthetic construct
  source 1..36: mol_type = other DNA
gaccggttcaacggcgtcggtatcccctctgttact

SEQ ID NO: 46967 - DNA, 36 bp, synthetic construct
  source 1..36: mol_type = other DNA
tatgagtacatgctcaccgccctgcacgaaatgcac

SEQ ID NO: 46968 - DNA, 33 bp, synthetic construct
  source 1..33: mol_type = other DNA
cacattgcttcgagcatatcattcaacttctcc

SEQ ID NO: 46969 - DNA, 36 bp, synthetic construct
  source 1..36: mol_type = other DNA
ggccagtacaagtataacgggtttgatctctcgtcg

SEQ ID NO: 46970 - DNA, 93 bp, synthetic construct
  source 1..93: mol_type = other DNA
ttcggatttaacgtcagcggaactgtgaccccttccctgctgaagttttctcaaacgtctagcaacctcatcggcggtggcgaatttggtccc

SEQ ID NO: 46971 - DNA, 69 bp, synthetic construct
  source 1..69: mol_type = other DNA
ttcaacggctctttcaccctgaataatttcctgtctatactgtttgtgaagcctctgtccacaagccat

SEQ ID NO: 46972 - DNA, 51 bp, synthetic construct
  source 1..51: mol_type = other DNA
accacttccaaccacgggtttggcttcccccctgccaaattcctcctgaac

SEQ ID NO: 46973 - DNA, 45 bp, synthetic construct
  source 1..45: mol_type = other DNA
gagaaaggccacctgttctaccaatttactgttgggaagggtgcg

SEQ ID NO: 46974 - DNA, 33 bp, synthetic construct
  source 1..33: mol_type = other DNA
ggcagcaccgtgatgggcgacatcatctcctct

SEQ ID NO: 46975 - DNA, 45 bp, synthetic construct
  source 1..45: mol_type = other DNA
acaattaaaatccccatcactaaggacgtggccatcaccatcatg

SEQ ID NO: 46976 - DNA, 30 bp, synthetic construct
  source 1..30: mol_type = other DNA
ggccagagcattgggctgatcttcaagatg

SEQ ID NO: 46977 - DNA, 123 bp, synthetic construct
  source 1..123: mol_type = other DNA
tccttcctgcctctgcatccatacgccttcgccatggctagtggagttggatccgcctctatgaatgctgctgcgatcggcccaaccctggcggcatttcctggtctggaaacacagatcgag

SEQ ID NO: 46978 - DNA, 63 bp, synthetic construct
  source 1..63: mol_type = other DNA
ctgtataactactttggcggcaaactgttcaccgacctcatcaaacttgtgaagcctgaaccc

SEQ ID NO: 46979 - DNA, 45 bp, synthetic construct
  source 1..45: mol_type = other DNA
cccatcgagattgaactgaccaagggcatgaccgtttcgatcatg

SEQ ID NO: 46980 - DNA, 30 bp, synthetic construct; identical to SEQ ID NO: 46830
  source 1..30: mol_type = other DNA

SEQ ID NO: 46981 - DNA, 123 bp, synthetic construct
  source 1..123: mol_type = other DNA
agtgtgctgcccctgcatccatttgcttttgccatggcatctggggtcggcagcgcatctatgaacgcggcctcaattggacctaccctggccgcttttcctgcactcgagacacagatcgaa

SEQ ID NO: 46982 - DNA, 36 bp, synthetic construct
  source 1..36: mol_type = other DNA
cagatcttttttaatcaaacattgacggtacccgac

SEQ ID NO: 46983 - DNA, 30 bp, synthetic construct
  source 1..30: mol_type = other DNA
ctggagacatccctgagctctatccctacc

SEQ ID NO: 46984 - DNA, 45 bp, synthetic construct
  source 1..45: mol_type = other DNA
acctccttcaaccaagtatcgacttttgtggccatcaaccctacc

SEQ ID NO: 46985 - DNA, 36 bp, synthetic construct
  source 1..36: mol_type = other DNA
ggacagtacaagtttaacggattcggttcatcttcc

SEQ ID NO: 46986 - DNA, 96 bp, synthetic construct
  source 1..96: mol_type = other DNA
ttcgggtttgccgtttctggaaagacagcctaccctaccatcctatccttttcccaaaagaattttagtattctcggaggcggatctttcggaccg

SEQ ID NO: 46987 - DNA, 114 bp, synthetic construct
  source 1..114: mol_type = other DNA
atgtataacctgctcttctcctattcctgggaggtgtcattcatcgtctttttgcaaacgttcatgaagggatttgtgcttagctttttcaagttcctgagcgacttcgctacc

SEQ ID NO: 46988 - DNA, 132 bp, synthetic construct
  source 1..132: mol_type = other DNA
ggcttcgtcggtagaatgaggccttatgcgacacacacgcaaatcaaatgccttcatcctccggcgccagacgtatcaattaacgatccgacggcgcgtggatttagctttcctagtggcgatgcatctgcc

SEQ ID NO: 46989 - DNA, 36 bp, synthetic construct
  source 1..36: mol_type = other DNA
tccgccggcttcgcatttagctaccagatgttttcc

SEQ ID NO: 46990 - DNA, 72 bp, synthetic construct
  source 1..72: mol_type = other DNA
aacagcaataaatatgacgttaatttcaatagactcaaaatggctctgacgtgcatcgtcggatctgtggtg

SEQ ID NO: 46991 - DNA, 105 bp, synthetic construct
  source 1..105: mol_type = other DNA
gatatggcttgggagatggccaacagccctaccatccccattgacaatataatcgaccggccatctgactactgccactacgagctgctctccttcacacatgac

SEQ ID NO: 46992 - DNA, 45 bp, synthetic construct
  source 1..45: mol_type = other DNA
acaattaaaatccccctgaccaaggacgtggccatcactatcatg

SEQ ID NO: 46993 - DNA, 30 bp, synthetic construct
  source 1..30: mol_type = other DNA
ggccagtcaattagcttgattttcaccatg

SEQ ID NO: 46994 - DNA, 123 bp, synthetic construct
  source 1..123: mol_type = other DNA
agcttcctgccactgcacccatacgcattcgctatggcatcaggcgttggtagcgcttctatgaacgctgctgctattggacccacactggctgcattccctggcctggaaacccagatcgag

SEQ ID NO: 46995 - DNA, 42 bp, synthetic construct
  source 1..42: mol_type = other DNA
agttctttttcgcaaatttcgagctttataactatatcgccg

SEQ ID NO: 46996 - DNA, 33 bp, synthetic construct
  source 1..33: mol_type = other DNA
gggtccaccgtcatgggcgacgtgatctcttcc

SEQ ID NO: 46997 - DNA, 42 bp, synthetic construct
  source 1..42: mol_type = other DNA
atcactatacccgtgactaaggacgtggcgatcaccattatg

SEQ ID NO: 46998 - DNA, 30 bp, synthetic construct
  source 1..30: mol_type = other DNA
ggccagtccattagcctgatcttcgagatg

SEQ ID NO: 46999 - DNA, 123 bp, synthetic construct
  source 1..123: mol_type = other DNA
agcttcctgccactccacccttatgcttacgccatggctagcggtgtcgggtcggcatcaatgaacgcagctgctatcgggccaaccctggccgcattccctggattggagacacagatcgag

SEQ ID NO: 47000 - DNA, 42 bp, synthetic construct
  source 1..42: mol_type = other DNA
acagatttcaatcaaataggcaattttgttggcattgatccc

SEQ ID NO: 47001 - DNA, 45 bp, synthetic construct
  source 1..45: mol_type = other DNA
cccatcgagatagaaattgccaagggcgtgaccgtcagcatcatg

SEQ ID NO: 47002 - DNA, 30 bp, synthetic construct; identical to SEQ ID NO: 46830
  source 1..30: mol_type = other DNA

SEQ ID NO: 47003 - DNA, 123 bp, synthetic construct
  source 1..123: mol_type = other DNA
tccatcctgcctctgcacccatatgcattcgccatggcatctggagttgggtctgcgtccatgaacgccgctgccattggcccgaccctggctgccttccctgggttcgagacacagatcgag

SEQ ID NO: 47004 - DNA, 33 bp, synthetic construct
  source 1..33: mol_type = other DNA
gtaagcggactgggcgcagatgccttggctgga

SEQ ID NO: 47005 - DNA, 54 bp, synthetic construct
  source 1..54: mol_type = other DNA
aaggacatcctcctgggaatgggggccggcagcaccatcgattacgctatggac

SEQ ID NO: 47006 - DNA, 54 bp, synthetic construct
  source 1..54: mol_type = other DNA
gtggtcgtggccagcaccgacgctgtggccgtctactcccactgcaactcttac

SEQ ID NO: 47007 - DNA, 213 bp, synthetic construct
  source 1..213: mol_type = other DNA
atgattcagctgtctccaatcgatcccgttagggcctacttaggtcaacggattgtcagtcaggaacagctggctatcattggccgatactggggcaccgacctttccctgactgagcgagtgttcggatggctacaaactttagcatcaggatctatggggtttagcctgatttatcgcgtgcctgtgaccgaggtcatcgtgaaagtacaa

SEQ ID NO: 47008 - DNA, 90 bp, synthetic construct
  source 1..90: mol_type = other DNA
tctgtctacctgggctggttccctattggactctccgtgcccatcggccagctgagcgacacagtgaccttttggcaatggttgcataga

SEQ ID NO: 47009 - DNA, 72 bp, synthetic construct
  source 1..72: mol_type = other DNA
gagcaggttttcgcctatcctgggattgggcaggccacggtggctgctggactgcggtctgacgttcctctg

SEQ ID NO: 47010 - DNA, 30 bp, synthetic construct
  source 1..30: mol_type = other DNA
tctaccgtgatgggagacgtgatatcgtcc

SEQ ID NO: 47011 - DNA, 45 bp, synthetic construct
  source 1..45: mol_type = other DNA
cccatcgacattaagctgagcaaagatgtgaccgtctccatcatg

SEQ ID NO: 47012 - DNA, 30 bp, synthetic construct
  source 1..30: mol_type = other DNA
ggccagagcatggacctgctgttcaagatg

SEQ ID NO: 47013 - DNA, 123 bp, synthetic construct
  source 1..123: mol_type = other DNA
tctatcctgccattgcacccatttgcattcgccatggccagtggcgtcgggtccgcaagcatgaacgctgctgcactgggccctacattggccgcattccccggactggagacacaagtggag

SEQ ID NO: 47014 - DNA, 150 bp, synthetic construct
  source 1..150: mol_type = other DNA
ggcaaccctctctacggcacagccgattcggttcgcaaggaaaccgccatgaacattgggaaaatgatcagggacggctaccccgctaccacaatcctctctgaggccatggggcaggtggccaatgagtccggcgaaaaatacgggggg

SEQ ID NO: 47015 - DNA, 63 bp, synthetic construct
  source 1..63: mol_type = other DNA
aatctggttagcggcatttcaactgaagacatgtttaccccccaagagatgaaccagacaggg

SEQ ID NO: 47016 - DNA, 33 bp, synthetic construct
  source 1..33: mol_type = other DNA
gagctgaagaccatctacgcctatcacctcaaa

SEQ ID NO: 47017 - DNA, 117 bp, synthetic construct
  source 1..117: mol_type = other DNA
atgttcgagaccgtcttctactttccttgggaagtcagcctcatcatcttcctccaatctacgctgcccggctttgtgctgggatttttcgaagtcatagcggaagttgtcagctca

SEQ ID NO: 47018 - DNA, 129 bp, synthetic construct
  source 1..129: mol_type = other DNA
gtcaccgtggccaggctgcgaccatacgccgctgtggacaccattaagtgcatccgggccgacgtggctgaccagaacccactcgatttcaagatccagggctacagcttcccttccgggcacacaatg

SEQ ID NO: 47019 - DNA, 114 bp, synthetic construct
  source 1..114: mol_type = other DNA
atgatcgagaccgtgttctactttccctgggaggtccagctgattctgttccttcaaagctctcttcctagttttgtgctcggcttcttcgagatcattgccaatgttgtctct

SEQ ID NO: 47020 - DNA, 129 bp, synthetic construct
  source 1..129: mol_type = other DNA
atgaccgtcgcccggctgaggccctacgctgtcgtggacaaggtcaaatgcatctacgccaatgtgcctgaccaaaacccgctcgattttaaaattcagggctattccttcccctctggccatagcatg

SEQ ID NO: 47021 - DNA, 60 bp, synthetic construct
  source 1..60: mol_type = other DNA
ttccccgagctgttttcgaattcactgttatacgacccaaattctagtcctggactcgaa

SEQ ID NO: 47022 - DNA, 30 bp, synthetic construct
  source 1..30: mol_type = other DNA
ttcggcgtggagtttgacaacaagttcacc

SEQ ID NO: 47023 - DNA, 39 bp, synthetic construct
  source 1..39: mol_type = other DNA
ggcttgaccgcaactgagctgagcaacaatatcaccatt

SEQ ID NO: 47024 - DNA, 114 bp, synthetic construct
  source 1..114: mol_type = other DNA
atgatcggcaccgtgttttacttcccctgggaagtatctctgatcctgttcttacaaagttctctccctgacttcgcctttgggttcttcaaggtcattgcggaggtggtctcc

SEQ ID NO: 47025 - DNA, 129 bp, synthetic construct
  source 1..129: mol_type = other DNA
gtgtccgtggctcggctgaggccttacgccgtggtcgacaagattaaatgcctgtatcccaattcgccgggccagaacccaatggacttcaagatccagggatactctcttccttccgggcatagcatg

SEQ ID NO: 47026 - DNA, 36 bp, synthetic construct
  source 1..36: mol_type = other DNA
ctcgggacaagtggtcccctgcacgtattccctctg

SEQ ID NO: 47027 - DNA, 30 bp, synthetic construct
  source 1..30: mol_type = other DNA
aacaaggccaccaatggtggagctgtgtac

SEQ ID NO: 47028 - DNA, 288 bp, synthetic construct
  source 1..288: mol_type = other DNA
gaggacggctctaaagtcaccaattgctccttcactggtaacaaggccgtgatcgggagtgccatttacttctacaagttcctgcccactgacaccctcaccatttctaactccatcttcctcaacaatcgggcaaacgccaaggacttgcaagtgacaaggaacgaaaagatcatcaccatcacttttaccggccagaacaacctgctgaatgcgatctatagtcgcgacgacgccgaggtcacattcaccaacgtgacatactggggcgctaacgggatcagcaac

SEQ ID NO: 47029 - DNA, 117 bp, synthetic construct
  source 1..117: mol_type = other DNA
atgctggagaccgtgttctacttcccttgggaagttaatctgatcctgtttatgcaatcttcttttcccggattcgtctttcggttcttcgaaatcatcgcctctgtcgttagtgtg

SEQ ID NO: 47030 - DNA, 129 bp, synthetic construct
  source 1..129: mol_type = other DNA
gtgaccgtggcaagattacggccatacgctgtggtcgacaagatcaagtgcattcacccaaacgtccccggcgagaaccccctgaatttcaaaatccagggctactctctgccttccgggcactccatg

SEQ ID NO: 47031 - DNA, 63 bp, synthetic construct
  source 1..63: mol_type = other DNA
tttcccgaactctttagctcgtctcttctttacaacccaaatagctctcctggcctggaaacc

SEQ ID NO: 47032 - DNA, 30 bp, synthetic construct; identical to SEQ ID NO: 47022
  source 1..30: mol_type = other DNA

SEQ ID NO: 47033 - DNA, 42 bp, synthetic construct
  source 1..42: mol_type = other DNA
ggcctgaccgccaccgagctgagtaataacatcaccttcgaa

SEQ ID NO: 47034 - DNA, 75 bp, synthetic construct
  source 1..75: mol_type = other DNA
caggccgtttatggaaccaacgtcattgacgggatcatgaagggaggatacgagacactgaattcttctgatgtg

SEQ ID NO: 47035 - DNA, 33 bp, synthetic construct
  source 1..33: mol_type = other DNA
ttcaacgaatatggtggcgtatcacaagtttct

SEQ ID NO: 47036 - DNA, 33 bp, synthetic construct
  source 1..33: mol_type = other DNA
ctgaacctcagctcgatatcaagtaccgttaca

SEQ ID NO: 47037 - DNA, 84 bp, synthetic construct
  source 1..84: mol_type = other DNA
atttacgactctctcatggttattgagtcccgggcacctctcgagacataccaggctcttatgggcgctatcccaccttctaat

SEQ ID NO: 47038 - DNA, 33 bp, synthetic construct
  source 1..33: mol_type = other DNA
atcaatcaggccgttggccctgttgtgaactct

SEQ ID NO: 47039 - DNA, 114 bp, synthetic construct
  source 1..114: mol_type = other DNA
atgatcgagaccgtgttttacttcccttgggaggtcaacctcatcctgttcatgcaatctatcctgcccggctttatattttcatttttcgaaatcattgccaacgtggtttct

SEQ ID NO: 47040 - DNA, 129 bp, synthetic construct
  source 1..129: mol_type = other DNA
gtgaccgtggctcggctgaggccatacgccgtggtcgataagatcaaatgcatctatcccaatgtcccgggtcaaaatcccctggacttcaagattcagggctacagcctgccatccggacactctatg

SEQ ID NO: 47041 - DNA, 33 bp, synthetic construct
  source 1..33: mol_type = other DNA
tctgaatacgtgaccgaggagatcgacaacgcc

SEQ ID NO: 47042 - DNA, 36 bp, synthetic construct
  source 1..36: mol_type = other DNA
acatccggcaccgacatcagcgttcaatccgacgat

SEQ ID NO: 47043 - DNA, 30 bp, synthetic construct
  source 1..30: mol_type = other DNA
cacttccaatacgttcgaggatgggatgca

SEQ ID NO: 47044 - DNA, 51 bp, synthetic construct
  source 1..51: mol_type = other DNA
gtgatgggatatctcgagttggctcctaaatacgccctgatgattgttcag

SEQ ID NO: 47045 - DNA, 114 bp, synthetic construct
  source 1..114: mol_type = other DNA
atgctcgaaaccgtgttctacttcccttgggaggtctccctgatcctgtttatccaaagcacgtttcccgacttagttatggggcttttcaaagtcatcgctgacgtcatcaac

SEQ ID NO: 47046 - DNA, 129 bp, synthetic construct
  source 1..129: mol_type = other DNA
gtcaccgtggctcggctgaggccatacgccgtggtcgacaagatcaagtgcatccacgccaacgtgccagatcaaaaccccctgaacctcaaaattcagggctacagcctgccttctgggcattccatg

SEQ ID NO: 47047 - DNA, 45 bp, synthetic construct
  source 1..45: mol_type = other DNA
ccgaaacaaatccccatcgccaacggcgtcgaagtcagcataatg

SEQ ID NO: 47048 - DNA, 30 bp, synthetic construct; identical to SEQ ID NO: 46748
  source 1..30: mol_type = other DNA

SEQ ID NO: 47049 - DNA, 123 bp, synthetic construct
  source 1..123: mol_type = other DNA
agcctgatcccactgcacccattcgcgttcgcaatggccagcggagtcgggtctgcatccatgaacgccgctagtctgggccctacactggccgcttttcccgcactggagacctcaatagag

SEQ ID NO: 47050 - DNA, 114 bp, synthetic construct
  source 1..114: mol_type = other DNA
atgttcgagaccgtgttctactttcaatgggaagtttggcttatcctcttcatgcaatcttcattccccgactgggtctttggcttcttcaagctggtggcaaacgtagtgtcc

SEQ ID NO: 47051 - DNA, 129 bp, synthetic construct
  source 1..129: mol_type = other DNA
gtgaccgtcgcgagactgcggccctatgccgccgtggacaaaatcaagtgcatttaccctaacgagccagggcaggaccccctgaacttcaagatccagggatacagcttcccttccggccactctatg

SEQ ID NO: 47052 - DNA, 36 bp, synthetic construct
  source 1..36: mol_type = other DNA
acctccggcgccacaatcagcgtgcagtctgatgac

SEQ ID NO: 47053 - DNA, 39 bp, synthetic construct
  source 1..39: mol_type = other DNA
cagctgtccctggcctttcctttcgagtttttcccaagc

SEQ ID NO: 47054 - DNA, 114 bp, synthetic construct
  source 1..114: mol_type = other DNA
atgatcgagaccgtcttttacttcccttgggaagtaaacctaattctgttcatgcaaagctctctgcccgacttcatcttcggcttctttaagatcattgccaacctgatctct

SEQ ID NO: 47055 - DNA, 126 bp, synthetic construct
  source 1..126: mol_type = other DNA
tttgtcgcccggctgcggccctatgctgtcgttaataaaatcaagtgcatctaccccaacaagccagggcagaaccctttcgacttcaagattcaggagtactccttccctagcggccactctatg

SEQ ID NO: 47056 - DNA, 114 bp, synthetic construct
  source 1..114: mol_type = other DNA
atgttcgagaccgtgttctactttccttgggagtcttctctgataatctttttgcaaaatagcctgcccggctttgtgctggagtttttcggcattgtggccgaggttgtatcc

SEQ ID NO: 47057 - DNA, 129 bp, synthetic construct
  source 1..129: mol_type = other DNA
gtcaccgtggctcggctgaggccctacgctgccgtggacaatatccgctgcattcacgccaacgtggccggccagaaccctttcgacttcaagatccagggatactccttcccaagcgggcattccatg

SEQ ID NO: 47058 - DNA, 39 bp, synthetic construct
  source 1..39: mol_type = other DNA
cccacactgggcttcaacatcatcaccgctggtagcata

SEQ ID NO: 47059 - DNA, 30 bp, synthetic construct
  source 1..30: mol_type = other DNA
gaggacgcaagtagtctcgattgcggttac

SEQ ID NO: 47060 - DNA, 168 bp, synthetic construct
  source 1..168: mol_type = other DNA
atgggtggcatttcccacgctgtggacacctatgcccctgaacattccggagacgagcagttccatcaagacgtatacgactacttccaaaagatgggaaacatggacgacatcaagtctcagggttctacggtggtaaccatcgtggacggcatctttcaagatgcg

SEQ ID NO: 47061 - DNA, 42 bp, synthetic construct
  source 1..42: mol_type = other DNA
tccgacttcgggcaaatctcgaacttcgtctctatcaatcca

SEQ ID NO: 47062 - DNA, 60 bp, synthetic construct
  source 1..60: mol_type = other DNA
atgggcttcctgcctcatggattcgtcaatttctacatgagcatccagaatctggctgac

SEQ ID NO: 47063 - DNA, 48 bp, synthetic construct
  source 1..48: mol_type = other DNA
gacagcggcctgtccatcaccgagctctataaccccatcttctcttac

SEQ ID NO: 47064 - DNA, 33 bp, synthetic construct
  source 1..33: mol_type = other DNA
gtcgctggcctcggcgccgatcctttggccgcc

SEQ ID NO: 47065 - DNA, 48 bp, synthetic construct
  source 1..48: mol_type = other DNA
atcattgctatgggcggcaaggatgtgctgacccacgccgtagactac

SEQ ID NO: 47066 - DNA, 48 bp, synthetic construct
  source 1..48: mol_type = other DNA
gcatgcagctccggttggaacaattcgggaagttcactttactgtagg

SEQ ID NO: 47067 - DNA, 45 bp, synthetic construct
  source 1..45: mol_type = other DNA
accgacttttctcaaatcaatgggtttatctcgataaatccaagc

SEQ ID NO: 47068 - DNA, 102 bp, synthetic construct
  source 1..102: mol_type = other DNA
ataactgacgagaatacattgctgatcaacggctattccatctttccgaagaagatcaattttcaagcatatcggtacatctggagcagcaagagcactgtg

SEQ ID NO: 47069 - DNA, 57 bp, synthetic construct
  source 1..57: mol_type = other DNA
ggaggcctggtgcccacttacatgatctataccaatgtcctccacatcaagaacaca

SEQ ID NO: 47070 - DNA, 129 bp, synthetic construct
  source 1..129: mol_type = other DNA
ctgtactatatctcggaccagtctaaatacagcatacaacaaatgttgaacgtcatggttaagaatatccagtacttaacgcaatacggccactctagcggcaacggcgaggctctgccctctatttcc

SEQ ID NO: 47071 - DNA, 69 bp, synthetic construct
  source 1..69: mol_type = other DNA
acactgcctggggccggggttggcattcaggctttgctgcaacctgactggaccaagctgactgacatc

SEQ ID NO: 47072 - DNA, 105 bp, synthetic construct
  source 1..105: mol_type = other DNA
ggctttatgagctccaccaccggaatccccatggtgcagcttgtgtctgaagggacgggactcattttcatcgtgttccccactatcttcaacgtgatgggttct

SEQ ID NO: 47073 - DNA, 42 bp, synthetic construct
  source 1..42: mol_type = other DNA
accaacttcaatcaaataaataatttcgtatccatcgacccc

SEQ ID NO: 47074 - DNA, 42 bp, synthetic construct
  source 1..42: mol_type = other DNA
tccgacttcggagagattagcaatttcatctctatcaacccc

SEQ ID NO: 47075 - DNA, 30 bp, synthetic construct
  source 1..30: mol_type = other DNA
agcaccgtgatgggcgacgtcatctctggc

SEQ ID NO: 47076 - DNA, 33 bp, synthetic construct
  source 1..33: mol_type = other DNA
cgattctttaaccacgtgatccccgagattagc

SEQ ID NO: 47077 - DNA, 33 bp, synthetic construct
  source 1..33: mol_type = other DNA
acaatggccaccatatcctctaatgtcagctac

SEQ ID NO: 47078 - DNA, 30 bp, synthetic construct
  source 1..30: mol_type = other DNA
gtgctggaaatcaatttcgagaacattcct

SEQ ID NO: 47079 - DNA, 42 bp, synthetic construct
  source 1..42: mol_type = other DNA
agtgacttttccgagatctccaatttcatctccattaaccct

SEQ ID NO: 47080 - DNA, 42 bp, synthetic construct
  source 1..42: mol_type = other DNA
tacgagcggatggtcaaccccggccacgtgatggtccccgat

SEQ ID NO: 47081 - DNA, 60 bp, synthetic construct
  source 1..60: mol_type = other DNA
ttccctcaagctttggctagtttatacgttccgggctccaactcgtctcccggcctagag

SEQ ID NO: 47082 - DNA, 30 bp, synthetic construct
  source 1..30: mol_type = other DNA
tttggcgccaagattgacatcaagttcact

SEQ ID NO: 47083 - DNA, 36 bp, synthetic construct
  source 1..36: mol_type = other DNA
ggcattactacaacccagatcagcaacaatgttggc

SEQ ID NO: 47084 - DNA, 39 bp, synthetic construct
  source 1..39: mol_type = other DNA
cctgtatatgctgctggtggttcagccgagcaattgagg

SEQ ID NO: 47085 - DNA, 72 bp, synthetic construct
  source 1..72: mol_type = other DNA
tccggcatttatggcatggataaagtcaacctcatcctgtctggtggatacgatgtgatcgatactagcgac

SEQ ID NO: 47086 - DNA, 33 bp, synthetic construct
  source 1..33: mol_type = other DNA
aacaatggcaaagcccacaccacaaagatcaca

SEQ ID NO: 47087 - DNA, 36 bp, synthetic construct
  source 1..36: mol_type = other DNA
ctgggctacgacattctacaaaataatatcaccaac

SEQ ID NO: 47088 - DNA, 33 bp, synthetic construct
  source 1..33: mol_type = other DNA
gggcagtacaagtataacggcttcgaccttagt

SEQ ID NO: 47089 - DNA, 96 bp, synthetic construct
  source 1..96: mol_type = other DNA
ttcggcttcgccgtgtcgggccagaccggcacaccttccctgctcaagtgctcccaagttggccagaatatcatttctggtggacagtttggacca

SEQ ID NO: 47090 - DNA, 75 bp, synthetic construct
  source 1..75: mol_type = other DNA
agccagtcttccaaatatgtcatcaaggaggtgcagaaggcctacattaacaataagggcatcctgcccatcaac

SEQ ID NO: 47091 - DNA, 45 bp, synthetic construct
  source 1..45: mol_type = other DNA
accgacttcgcacaaatttctaacttcatatctatcaatccaagc

SEQ ID NO: 47092 - DNA, 42 bp, synthetic construct
  source 1..42: mol_type = other DNA
aatttcaatcaaataacgaccttcatcaataggaacaccggc

SEQ ID NO: 47093 - DNA, 42 bp, synthetic construct
  source 1..42: mol_type = other DNA
accaactttacccaaatagcgaacttcgtcaatctctctccc

SEQ ID NO: 47094 - DNA, 48 bp, synthetic construct
  source 1..48: mol_type = other DNA
ctcaccctgttcaacattgtggacccttattactctgaggtcatctgc

SEQ ID NO: 47095 - DNA, 42 bp, synthetic construct
  source 1..42: mol_type = other DNA
accgacttcggccaaatcaataattttatatcgattaacccc

SEQ ID NO: 47096 - DNA, 42 bp, synthetic construct
  source 1..42: mol_type = other DNA
accgacttcggtcaaatctcgagctttgtctctatcaaccct

SEQ ID NO: 47097 - DNA, 48 bp, synthetic construct
  source 1..48: mol_type = other DNA
ctgaacattgactttctgaatatcttcccgcaaatgtcaatctacccc

SEQ ID NO: 47098 - DNA, 39 bp, synthetic construct
  source 1..39: mol_type = other DNA
atcatgatgctcttcaccaagaacctggtgctggtcatc

SEQ ID NO: 47099 - DNA, 75 bp, synthetic construct
  source 1..75: mol_type = other DNA
ggcgccgcttacggcgacaacatcatcgatagcgtggccaacggcggatacgagacactgaatactaccgatgtc

SEQ ID NO: 47100 - DNA, 33 bp, synthetic construct
  source 1..33: mol_type = other DNA
ggaatggagactgggggctcctcacatgtgtct

SEQ ID NO: 47101 - DNA, 33 bp, synthetic construct
  source 1..33: mol_type = other DNA
ctggggttcggctccatttcttctactctctca

SEQ ID NO: 47102 - DNA, 39 bp, synthetic construct
  source 1..39: mol_type = other DNA
agcgtggaagacggcgtgtacaccgttactgaatacgac

SEQ ID NO: 47103 - DNA, 30 bp, synthetic construct
  source 1..30: mol_type = other DNA
agcaccgtgatgggagacatccttcctagc

SEQ ID NO: 47104 - DNA, 108 bp, synthetic construct
  source 1..108: mol_type = other DNA
atggtgctcagcaacctgaccatgcatgagagggctgagtacttcgtcgaggtgcaccactccgatacatacgagaaggggcaggcccagatgtactggagagacttc

SEQ ID NO: 47105 - DNA, 45 bp, synthetic construct
  source 1..45: mol_type = other DNA
aacttcaaccaaataacaaccttcatcaacatcaatactggaaca

SEQ ID NO: 47106 - DNA, 45 bp, synthetic construct
  source 1..45: mol_type = other DNA
accaactttaaccaaataaccgcctttgtctcaatcaaccctacc

SEQ ID NO: 47107 - DNA, 30 bp, synthetic construct
  source 1..30: mol_type = other DNA
agcaccgtgatgggcgacattatcccttcc

SEQ ID NO: 47108 - DNA, 39 bp, synthetic construct
  source 1..39: mol_type = other DNA
aaccccacactcggctacaatctgatcaccgcgggatct

SEQ ID NO: 47109 - DNA, 54 bp, synthetic construct
  source 1..54: mol_type = other DNA
ttctttagttctgactttagcgtgctcttctctcggctggaaggagtcacatca

SEQ ID NO: 47110 - DNA, 48 bp, synthetic construct
  source 1..48: mol_type = other DNA
gttgacctgaataaccccgtgtctaacgtgttgggcgatgtcctgcag

SEQ ID NO: 47111 - DNA, 69 bp, synthetic construct
  source 1..69: mol_type = other DNA
aatcctaccctggggttcaacggaattagcatcggcgtgtccatcatcatcctacaaagcgcatttccc

SEQ ID NO: 47112 - DNA, 168 bp, synthetic construct
  source 1..168: mol_type = other DNA
cggattattgtcatcatcaacgctataatagacagcttcctcatctacatcggagccatgatcggcgagatgttcgatgagctcatctatttcctgatcggggccaataccacaaacaccggcaacctgccgcctatgatctacgtgccagacgccctgattgctgac

SEQ ID NO: 47113 - DNA, 36 bp, synthetic construct
  source 1..36: mol_type = other DNA
ctgggcttctggggggaacccttacacgtgtttcca

SEQ ID NO: 47114 - DNA, 171 bp, synthetic construct
  source 1..171: mol_type = other DNA
aggatcatcgtgattatcaatgccatcattgatagcttcctgatatatattggcgccatgatcggagagatgtttgatgagcttatttactttctgatcggcgccaatacaacatcagccgagaccctgccgcccatgttctacgtgccagacgcactcatcgctgatctg

SEQ ID NO: 47115 - DNA, 36 bp, synthetic construct
  source 1..36: mol_type = other DNA
ggcttcaccaaccacaatatcctgaacaacttcaat

SEQ ID NO: 47116 - DNA, 72 bp, synthetic construct
  source 1..72: mol_type = other DNA
tctgccatcggctccttatttcaaacggaaatcactaacccggtacaaaaattaattgactccacggacata

SEQ ID NO: 47117 - DNA, 51 bp, synthetic construct
  source 1..51: mol_type = other DNA
gtggtgcagagcgtccaggccttcatctctaacactggcactactatggac

SEQ ID NO: 47118 - DNA, 66 bp, synthetic construct
  source 1..66: mol_type = other DNA
gagattggcatcctgccacacacattccttaatgcctacatgtccctgcaatcgttgaccgacaac

SEQ ID NO: 47119 - DNA, 54 bp, synthetic construct
  source 1..54: mol_type = other DNA
gtggacatgggcaacgtggtcaccgacatctacgatacaatcttcattcacttc

SEQ ID NO: 47120 - DNA, 30 bp, synthetic construct
  source 1..30: mol_type = other DNA
aattggattagcatctttgccaacgtgttc

SEQ ID NO: 47121 - DNA, 66 bp, synthetic construct
  source 1..66: mol_type = other DNA
gagatcgggattctgccgcataccttcctgtccgcctacatgtcactacaagggatagctgacaac

SEQ ID NO: 47122 - DNA, 51 bp, synthetic construct
  source 1..51: mol_type = other DNA
gacctggggaatgtcgtgactgatatctacgacgacattttcatccacttc

SEQ ID NO: 47123 - DNA, 159 bp, synthetic construct
  source 1..159: mol_type = other DNA
gggttatattcgaacacctacaacctgattaacgcatacgacgccaactattccaccctggtggctaacgggactagcaatgtggatgctttcatatccgtaatctctggaaacagtaccgtaatcccttcaaatatcgtctctagcttcatgagctcc

SEQ ID NO: 47124 - DNA, 66 bp, synthetic construct
  source 1..66: mol_type = other DNA
agcggactgttcggcgaggccttcatcaacaacctgattaatggtggctacgaggtgctcaacaat

SEQ ID NO: 47125 - DNA, 33 bp, synthetic construct
  source 1..33: mol_type = other DNA
atcaccgggcccgagggcacattcaagttgtcc

SEQ ID NO: 47126 - DNA, 30 bp, synthetic construct
  source 1..30: mol_type = other DNA
ggcattatcacacccacaagctcacctcag

SEQ ID NO: 47127 - DNA, 123 bp, synthetic construct
  source 1..123: mol_type = other DNA
cccggcaatagcattcggttcgcccacgaagccgctttttggtaccccgagttcgtgaacttcaccatcatcgagaagtcctatctcggcctcgtcaccacattcggcactctcatcgaacag

SEQ ID NO: 47128 - DNA, 240 bp, synthetic construct
  source 1..240: mol_type = other DNA
ttcatcgatatcagcatcctggactctagcgttaagtccctgggctccattacaatcttcaatgccttcatcgacatctctattctcgactcctctgtgaaaagtcttgggtcgttctcgaacgtgatcaaatccagccctctgatcgtgattccaaagatgttcaagcacgtagtcggtgcaacaccctacctgaccgagactctgaagctctttacctacgaaggcgtaccagcactg

SEQ ID NO: 47129 - DNA, 33 bp, synthetic construct
  source 1..33: mol_type = other DNA
agccccgtggtcttccctagtggtgcaagagtg

SEQ ID NO: 47130 - DNA, 42 bp, synthetic construct
  source 1..42: mol_type = other DNA
caccacaagctggacaacccagccgctatccccgtacctgat

SEQ ID NO: 47131 - DNA, 54 bp, synthetic construct
  source 1..54: mol_type = other DNA
ggtgtctattcttctttcatgatgaacctgggccgagcctctaccacatgtcag

SEQ ID NO: 47132 - DNA, 36 bp, synthetic construct
  source 1..36: mol_type = other DNA
tacgagcacatgctgaatgccctgcataaccttgtg

SEQ ID NO: 47133 - DNA, 30 bp, synthetic construct
  source 1..30: mol_type = other DNA
gtggtcagcaacgtgaccttcgacatccag

SEQ ID NO: 47134 - DNA, 63 bp, synthetic construct
  source 1..63: mol_type = other DNA
gccatctatggcgagaatatcatggcgcagctgctgcgcggcggatatgaagtgatgaacagt

SEQ ID NO: 47135 - DNA, 30 bp, synthetic construct
  source 1..30: mol_type = other DNA
ctggggaacgttggtaactaccacttcacc

SEQ ID NO: 47136 - DNA, 30 bp, synthetic construct
  source 1..30: mol_type = other DNA
ggcattcagagcacaacttccaccatcgtg

SEQ ID NO: 47137 - DNA, 72 bp, synthetic construct
  source 1..72: mol_type = other DNA
ggcttgcctgcggtcaattggacctttctgacatccgaccctatcgactctggccggtctggtggtatcttc

SEQ ID NO: 47138 - DNA, 105 bp, synthetic construct
  source 1..105: mol_type = other DNA
gtgggctctgctgtgaccactcccatttccatcatggacccaggccgcccactgcctctgcacctttacgttctggcgacagagggcgtttccttgcaaaatgcc

SEQ ID NO: 47139 - DNA, 66 bp, synthetic construct
  source 1..66: mol_type = other DNA
gaggccggcatccttccccataccttcctccaagcattcctcagcctgcagcactttgctgacaat

SEQ ID NO: 47140 - DNA, 54 bp, synthetic construct
  source 1..54: mol_type = other DNA
gtggatgagggcaacatgattaccagcatctatgacgccgtgttcatctacttt

SEQ ID NO: 47141 - DNA, 72 bp, synthetic construct
  source 1..72: mol_type = other DNA
tccggagtctacggaaataacacagtcgagcgcatcctgtctggaggctacgacgtaattgacaccagtgat

SEQ ID NO: 47142 - DNA, 33 bp, synthetic construct
  source 1..33: mol_type = other DNA
agcaacggcaagattcagaatacaaccatcacc

SEQ ID NO: 47143 - DNA, 36 bp, synthetic construct
  source 1..36: mol_type = other DNA
ctgggcttcgacattttgcaatcgaacatcaccaac

SEQ ID NO: 47144 - DNA, 276 bp, synthetic construct
  source 1..276: mol_type = other DNA
atctttggaatcgagcccggcgtggacctcaagggcggcacaatggccgagattaccctgaaccacgacatgaattctaacgagattgcctccttattgcaaaagtctctccatatcgaggaagtgaaaattatcagtaacaacaatcggcacgttaccgtggagttctccgatagcgtggacatcggcgagttcaggaaggccaccgaatccatcggaacagtcagcagtttcaacactgtcggccctgtgctgagcgaggaagctatgggtcaa

SEQ ID NO: 47145 - DNA, 30 bp, synthetic construct
  source 1..30: mol_type = other DNA
ctgaccatgccccaagctagaacactcagc

SEQ ID NO: 47146 - DNA, 33 bp, synthetic construct
  source 1..33: mol_type = other DNA
tctaccgtgatgggcgacattatctcgtcaatt

SEQ ID NO: 47147 - DNA, 189 bp, synthetic construct
  source 1..189: mol_type = other DNA
tccctgctggacggccagggccggtcttacgctaaccagaatatcaagttcaacattaacggagtcttctacgataagaccaccgacatcaacggcgaggcaaagctgaacatcaacctcttgcccggccaatatattatcacctcgtcatacaatgggtacaacgccgccaacaaggtgaccatctct

SEQ ID NO: 47148 - DNA, 72 bp, synthetic construct
  source 1..72: mol_type = other DNA
agcgccatctacggggccgacactgtaaacgggattctgaacggcggatacgagaccctgaacacttctgac

SEQ ID NO: 47149 - DNA, 39 bp, synthetic construct
  source 1..39: mol_type = other DNA
ctggggaacgagagtggaggctcttcctcggttgttcaa

SEQ ID NO: 47150 - DNA, 33 bp, synthetic construct
  source 1..33: mol_type = other DNA
ctgggcatttcaagcatcagttccaacgtgtcc

SEQ ID NO: 47151 - DNA, 39 bp, synthetic construct
  source 1..39: mol_type = other DNA
atcggaaacggccgagacaccgagcttggacacagtgca

SEQ ID NO: 47152 - DNA, 36 bp, synthetic construct
  source 1..36: mol_type = other DNA
tttacagccttcaccgactcaatctcaaatatggac

SEQ ID NO: 47153 - DNA, 63 bp, synthetic construct
  source 1..63: mol_type = other DNA
gccatctgcggcgaaaatatcatggtccagctgctgcacggtagatacgaagttatgaattct

SEQ ID NO: 47154 - DNA, 30 bp, synthetic construct
  source 1..30: mol_type = other DNA
ctgggcaacggcggaaattaccacttcacc

SEQ ID NO: 47155 - DNA, 30 bp, synthetic construct
  source 1..30: mol_type = other DNA
ggcattcagtccacaaccagcactatcgtg

SEQ ID NO: 47156 - DNA, 66 bp, synthetic construct
  source 1..66: mol_type = other DNA
gccatctacggcgaacacattaccgggcagctgctccggggcggatatgaagtcatgaattctgag

SEQ ID NO: 47157 - DNA, 33 bp, synthetic construct
  source 1..33: mol_type = other DNA
atcctgggcaacgccggagactaccacttcacc

SEQ ID NO: 47158 - DNA, 30 bp, synthetic construct
  source 1..30: mol_type = other DNA
ggcatccagagcaccacatccaccattcag

SEQ ID NO: 47159 - DNA, 114 bp, synthetic construct
  source 1..114: mol_type = other DNA
ttcattaaggatattcccacgagtttcgtgaatgccaaccagatgccttccctggagcacctcttcggaaccgactggatgggcagggacatgtttcaacggaccatcgctggc

SEQ ID NO: 47160 - DNA, 90 bp, synthetic construct
  source 1..90: mol_type = other DNA
accttccttgggtttggcctgccaccacacgagcctgctatcggagtgattctggccgagtccatgaactacctgagctctggctattgg

SEQ ID NO: 47161 - DNA, 51 bp, synthetic construct
  source 1..51: mol_type = other DNA
aagaaccctacgcttggcttcaatataattacaattggttctatcgctgtg

SEQ ID NO: 47162 - DNA, 63 bp, synthetic construct
  source 1..63: mol_type = other DNA
atgcctaccgtggactccttcctgcccgatataattcaaactacatttttttccggttatacc

SEQ ID NO: 47163 - DNA, 54 bp, synthetic construct
  source 1..54: mol_type = other DNA
acacgggccctggtcgacaacggcattctgcccaagaccgtgttcctcatcact

SEQ ID NO: 47164 - DNA, 72 bp, synthetic construct
  source 1..72: mol_type = other DNA
gctgtggagtacttcaactacgccgaacagcacgttctcccgaacgcactgaaccagctcttcaacacctat

SEQ ID NO: 47165 - DNA, 81 bp, synthetic construct
  source 1..81: mol_type = other DNA
atctacaaccccgatgaactggagctcggctacggggagggatacatggagcttctggctcctatatcctccattttgcct

SEQ ID NO: 47166 - DNA, 30 bp, synthetic construct
  source 1..30: mol_type = other DNA
cggctgttcattagtcagtcccccgatgct

SEQ ID NO: 47167 - DNA, 36 bp, synthetic construct
  source 1..36: mol_type = other DNA
cccattaacggtagcgccctgcacatcttccctctg

SEQ ID NO: 47168 - DNA, 42 bp, synthetic construct
  source 1..42: mol_type = other DNA
ttgaatagagagttcagctacacaatctttacctataactgg

SEQ ID NO: 47169 - DNA, 81 bp, synthetic construct
  source 1..81: mol_type = other DNA
accggcgccgtgctcccaaagaactctattctgaattatgtggctacccaaaccgccatcgttggctcttgggtcgatatg

SEQ ID NO: 47170 - DNA, 30 bp, synthetic construct
  source 1..30: mol_type = other DNA
atcttcacccctattccgagcaatggaatc

SEQ ID NO: 47171 - DNA, 63 bp, synthetic construct
  source 1..63: mol_type = other DNA
gccatctgcggcgagaatatcatggtgcaactattacaaggcggctacgaggtcatgaacagc

SEQ ID NO: 47172 - DNA, 30 bp, synthetic construct
  source 1..30: mol_type = other DNA
ctgggaaatggtggcaactaccacttcacc

SEQ ID NO: 47173 - DNA, 30 bp, synthetic construct
  source 1..30: mol_type = other DNA
ggcatccagtctagcacatccaccattcag

SEQ ID NO: 47174 - DNA, 60 bp, synthetic construct
  source 1..60: mol_type = other DNA
tggggcatcctcccacaaacgttcctcaacgctttcctttccctccaaaatcttgctaat

SEQ ID NO: 47175 - DNA, 54 bp, synthetic construct
  source 1..54: mol_type = other DNA
gtggacgccggcaatgtgattaccaacatctacgatggcgtcttcgctaggttc

SEQ ID NO: 47176 - DNA, 66 bp, synthetic construct
  source 1..66: mol_type = other DNA
ctgaaccctggctataccatccccgagttcacaaccaagggactctacctgactgacaagagcatc

SEQ ID NO: 47177 - DNA, 42 bp, synthetic construct
  source 1..42: mol_type = other DNA
cagagtccatggcacttctcaatggcttctcatagcttgcag

SEQ ID NO: 47178 - DNA, 39 bp, synthetic construct
  source 1..39: mol_type = other DNA
ccaaccggcacacagggcccactgcacgttttccctctg

SEQ ID NO: 47179 - DNA, 51 bp, synthetic construct
  source 1..51: mol_type = other DNA
ccccaaattgacttcacccttgcggatacactcctggaagtgatcgagatg

SEQ ID NO: 47180 - DNA, 36 bp, synthetic construct
  source 1..36: mol_type = other DNA
tatgagtacatgctgaccgccctccatgaactgcat

SEQ ID NO: 47181 - DNA, 30 bp, synthetic construct
  source 1..30: mol_type = other DNA
atcattaatagcgccggcctgaacttcagt

SEQ ID NO: 47182 - DNA, 63 bp, synthetic construct
  source 1..63: mol_type = other DNA
tggggcttcctgcccaagatctttctcaatatctacctgagcatacagggcgtggctagtaac

SEQ ID NO: 47183 - DNA, 48 bp, synthetic construct
  source 1..48: mol_type = other DNA
gacatgggcaacagcgtatctcaagtttttaggctggtctactcttac

SEQ ID NO: 47184 - DNA, 63 bp, synthetic construct
  source 1..63: mol_type = other DNA
gccatctacggcgaatccgctatggacattatcaccggcggtggttatgaggtgctgaacact

SEQ ID NO: 47185 - DNA, 33 bp, synthetic construct
  source 1..33: mol_type = other DNA
atcaacggcgccgacggtacataccacttctca

SEQ ID NO: 47186 - DNA, 39 bp, synthetic construct
  source 1..39: mol_type = other DNA
ttcggccttaggagtgccacatcatttcccgcaccccag

SEQ ID NO: 47187 - DNA, 33 bp, synthetic construct
  source 1..33: mol_type = other DNA
gggagcaccgtaatgggtgacgtgatcagtggc

SEQ ID NO: 47188 - DNA, 81 bp, synthetic construct
  source 1..81: mol_type = other DNA
tggccagccttcgccgactatggttttttcaagtttctgttcggcctcaaatgggatcccacaaagaacgtgttcggagta

SEQ ID NO: 47189 - DNA, 36 bp, synthetic construct
  source 1..36: mol_type = other DNA
ttccggagctggttcggcggcaccggattttccatc

SEQ ID NO: 47190 - DNA, 105 bp, synthetic construct
  source 1..105: mol_type = other DNA
gctgggaacgtcagccagatccccaactccattttctctccggttcgcacactaacaagcaatatcgccctggagatgggatacgccactggcctgcactacaac

SEQ ID NO: 47191 - DNA, 69 bp, synthetic construct
  source 1..69: mol_type = other DNA
ggaatattttcccccgaggccgctaagaccttcttcatctctcctgggacaaacattccgggctttgac

SEQ ID NO: 47192 - DNA, 33 bp, synthetic construct
  source 1..33: mol_type = other DNA
gtgcggggcattcagctcgacatcaagctgacc

SEQ ID NO: 47193 - DNA, 36 bp, synthetic construct
  source 1..36: mol_type = other DNA
ggcatttctaccgtgaacatcagcacaaatgccagc

SEQ ID NO: 47194 - DNA, 30 bp, synthetic construct
  source 1..30: mol_type = other DNA
cccaacaatctgtacaccggtggaatcttg

SEQ ID NO: 47195 - DNA, 30 bp, synthetic construct
  source 1..30: mol_type = other DNA
atcgacatcttcaacatcaagaacaacttt

SEQ ID NO: 47196 - DNA, 60 bp, synthetic construct
  source 1..60: mol_type = other DNA
atttggggatgggatttcgtggacctgatcgtgaccggtggctacgaggtcctgaacaac

SEQ ID NO: 47197 - DNA, 33 bp, synthetic construct
  source 1..33: mol_type = other DNA
atcaacggaggcgagggcacataccacttcacc

SEQ ID NO: 47198 - DNA, 33 bp, synthetic construct
  source 1..33: mol_type = other DNA
ttcggtttgcaatccacatcgagcacagtccag

SEQ ID NO: 47199 - DNA, 45 bp, synthetic construct
  source 1..45: mol_type = other DNA
ctgcccagcatcgagcagagtttcaacctgacgtcacgggaatct

SEQ ID NO: 47200 - DNA, 39 bp, synthetic construct
  source 1..39: mol_type = other DNA
attgattcctcatctttcatctcttcattaacttctctt

SEQ ID NO: 47201 - DNA, 36 bp, synthetic construct
  source 1..36: mol_type = other DNA
tctctggttatcctttccatgggactgagcgatcag

SEQ ID NO: 47202 - DNA, 33 bp, synthetic construct
  source 1..33: mol_type = other DNA
gcccacgaggctgagattattttccccgaaatc

SEQ ID NO: 47203 - DNA, 132 bp, synthetic construct
  source 1..132: mol_type = other DNA
accggcttgttttcctccttcactgaaattgtgtatatcagtattgatgcgatcgctaatgagaccacaaatgctagcatgataatagcagctattcccaagagtactatgaacactttcaccaacgctctg

SEQ ID NO: 47204 - DNA, 60 bp, synthetic construct
  source 1..60: mol_type = other DNA
atcgccgggcccgactttctgatgagcgtcttcaagggcggatacgaggtgctcaacacc

SEQ ID NO: 47205 - DNA, 33 bp, synthetic construct
  source 1..33: mol_type = other DNA
atcgagggacccgacggcacaagtcacttgagc

SEQ ID NO: 47206 - DNA, 33 bp, synthetic construct
  source 1..33: mol_type = other DNA
ctcggcctgaagaccagcacatcttcccctaaa

SEQ ID NO: 47207 - DNA, 66 bp, synthetic construct
  source 1..66: mol_type = other DNA
atgatcgagtacaacaagttcattaatgacatagtgttctccaacggcggcaacatcaactctctg

SEQ ID NO: 47208 - DNA, 66 bp, synthetic construct
  source 1..66: mol_type = other DNA
gtgaccttcggcactgagctgattacatccatcgccaatggcggctacgaggcgctgaatagcgaa

SEQ ID NO: 47209 - DNA, 36 bp, synthetic construct
  source 1..36: mol_type = other DNA
atcgacggccccgagaacgggacctttcacttcacc

SEQ ID NO: 47210 - DNA, 33 bp, synthetic construct
  source 1..33: mol_type = other DNA
ggcatccaactaacatcctcctcgcctgagcaa

SEQ ID NO: 47211 - DNA, 36 bp, synthetic construct
  source 1..36: mol_type = other DNA
tacgagtatatgctcgacgccctgcatggacttcac

SEQ ID NO: 47212 - DNA, 114 bp, synthetic construct
  source 1..114: mol_type = other DNA
acagggatcatgagcgccgaccccttcaaggctggcgccgtcaccgtggcaactaccaaggccctcggcggcgccaaattcatggctgcggggaaagccaccgcatcattgact

SEQ ID NO: 47213 - DNA, 33 bp, synthetic construct
  source 1..33: mol_type = other DNA
attttctgcggcgccaagatcacttgggctgac

SEQ ID NO: 47214 - DNA, 30 bp, synthetic construct
  source 1..30: mol_type = other DNA
gactacatcatcggcgtttctgtcaacatt

SEQ ID NO: 47215 - DNA, 39 bp, synthetic construct
  source 1..39: mol_type = other DNA
acaattccaatcaacggcacccctttgcacgtgttcccc

SEQ ID NO: 47216 - DNA, 30 bp, synthetic construct
  source 1..30: mol_type = other DNA
ctgcggaacaagcccagaatccaggcttac

SEQ ID NO: 47217 - DNA, 42 bp, synthetic construct
  source 1..42: mol_type = other DNA
cagaagattcccatcactgaggacgtggcaattaccatcatg

SEQ ID NO: 47218 - DNA, 30 bp, synthetic construct
  source 1..30: mol_type = other DNA
ggccagagcattcacctgatcttcaccatg

SEQ ID NO: 47219 - DNA, 123 bp, synthetic construct
  source 1..123: mol_type = other DNA
tcatttctgccactgcacccatacgcattcgccatggccagtggtgtcggctccgcgtccatgaacgccgccgctatcggccctaccctggctgcatttccgggaatggaaagccagatcgaa

SEQ ID NO: 47220 - DNA, 42 bp, synthetic construct
  source 1..42: mol_type = other DNA
acagacttcgggcaaattaacgccttcgtctctatcaatccc

SEQ ID NO: 47221 - DNA, 33 bp, synthetic construct
  source 1..33: mol_type = other DNA
ggcagcaccgtgatgggagacgtgatcagtgga

SEQ ID NO: 47222 - DNA, 84 bp, synthetic construct
  source 1..84: mol_type = other DNA
ttccctgccatccacgaatacggggttgttaagtttctgttcggcaacgtctgggctcccaacgacggcgaatttggagtcttt

SEQ ID NO: 47223 - DNA, 33 bp, synthetic construct
  source 1..33: mol_type = other DNA
gtgcgcctgcacttcggcggtaccggatttagc

SEQ ID NO: 47224 - DNA, 102 bp, synthetic construct
  source 1..102: mol_type = other DNA
gggaacgtggccaaggtcccggactctattttcgcacctgcccggaccctgacaagcaacatcgccctcgagatgtcctacgcgactggcattcactataat

SEQ ID NO: 47225 - DNA, 36 bp, synthetic construct
  source 1..36: mol_type = other DNA
gggtctaccgtgatgggcgacatcagcatttcaatt

SEQ ID NO: 47226 - DNA, 45 bp, synthetic construct
  source 1..45: mol_type = other DNA
accaattttaaccaaatttccggcttcatttccgtgaaccctacc

SEQ ID NO: 47227 - DNA, 30 bp, synthetic construct
  source 1..30: mol_type = other DNA
ttcgagaacggcgagtttaacatgagcaag

SEQ ID NO: 47228 - DNA, 33 bp, synthetic construct
  source 1..33: mol_type = other DNA
aagctccagctgggcgagatcattagccttgaa

SEQ ID NO: 47229 - DNA, 39 bp, synthetic construct
  source 1..39: mol_type = other DNA
caggtttatttgatctctcaaattaagctgccaatcacc

SEQ ID NO: 47230 - DNA, 69 bp, synthetic construct
  source 1..69: mol_type = other DNA
tctgccatttatggcgagtccctggtcgctagcatcgtgaatggcggatacgaagtgctgaacaacaac

SEQ ID NO: 47231 - DNA, 33 bp, synthetic construct
  source 1..33: mol_type = other DNA
atcggcggcaccgacggaacataccacttctca

SEQ ID NO: 47232 - DNA, 33 bp, synthetic construct
  source 1..33: mol_type = other DNA
ttcgggctccagtctacttcctcaaccatcggt

SEQ ID NO: 47233 - DNA, 84 bp, synthetic construct
  source 1..84: mol_type = other DNA
ttccctgccatacaagaatatggaattgctcaatttctcttcggcaacatttgggcacccaacgagggccagttcggagtgttc

SEQ ID NO: 47234 - DNA, 33 bp, synthetic construct
  source 1..33: mol_type = other DNA
atcagaagccagtttggcggaactggattcggg

SEQ ID NO: 47235 - DNA, 102 bp, synthetic construct
  source 1..102: mol_type = other DNA
gggaacgtggccaagattcccgcgagcattctgtcccctgcccggacactgacctctaacatcgccctcgagatgaattacgctattggcatacactataat

SEQ ID NO: 47236 - DNA, 30 bp, synthetic construct
  source 1..30: mol_type = other DNA
ttctacgacatgaacgctcaggtgcaaacc

SEQ ID NO: 47237 - DNA, 33 bp, synthetic construct
  source 1..33: mol_type = other DNA
ggccagttcaagtactccggcatggacctgagc

SEQ ID NO: 47238 - DNA, 93 bp, synthetic construct
  source 1..93: mol_type = other DNA
tttggcctgaacgtctcgggttcagccacccactcactgctgaagtttaccaccgcctcccctagcatcctgaacggcggaacattcggacct

SEQ ID NO: 47239 - DNA, 36 bp, synthetic construct
  source 1..36: mol_type = other DNA
gtggccggtctgggacctgctctacttgctgcaccc

SEQ ID NO: 47240 - DNA, 45 bp, synthetic construct
  source 1..45: mol_type = other DNA
ctgaaaatcatgggcgccagcgatgtgctcaaatatgcgatggac

SEQ ID NO: 47241 - DNA, 39 bp, synthetic construct
  source 1..39: mol_type = other DNA
ctcgtcagcggctccctgctgtggttccaagtacaactt

SEQ ID NO: 47242 - DNA, 60 bp, synthetic construct
  source 1..60: mol_type = other DNA
gcttttggcaaggacttcttcatgagcctggcctccggcggatacgaggttctcaacacc

SEQ ID NO: 47243 - DNA, 33 bp, synthetic construct
  source 1..33: mol_type = other DNA
atcagcggccccaaggggaccaaccacttctcc

SEQ ID NO: 47244 - DNA, 36 bp, synthetic construct
  source 1..36: mol_type = other DNA
ggcattcagagcacgacctctagcatccagcaacta

SEQ ID NO: 47245 - DNA, 87 bp, synthetic construct
  source 1..87: mol_type = other DNA
gggatgcctgccatcgagcagatcggcttctttaacttcattttcggaatgaaatgggcgccaaaggacgaagtctacggagtgttc

SEQ ID NO: 47246 - DNA, 33 bp, synthetic construct
  source 1..33: mol_type = other DNA
atcagggaccacttcggcggaacaggctttagc

SEQ ID NO: 47247 - DNA, 105 bp, synthetic construct
  source 1..105: mol_type = other DNA
gcaggcaacgtggctcagatccctggctccattttcgagcccgtccgggtactcacgagcaatatcgccctggagatgggctatgcgattgacctgcactacaac

SEQ ID NO: 47248 - DNA, 60 bp, synthetic construct
  source 1..60: mol_type = other DNA
gatgggctgctgatcttctttaagctccatcaagtgccgaatgacggccttgtggagaac

SEQ ID NO: 47249 - DNA, 63 bp, synthetic construct
  source 1..63: mol_type = other DNA
gccggcgaatttgatcgggatagtattaagatcttcgcttccttcaaaatggacgagaagctg

SEQ ID NO: 47250 - DNA, 39 bp, synthetic construct
  source 1..39: mol_type = other DNA
accaaagtggattatttttcgaaagacttaaattcctgc

SEQ ID NO: 47251 - DNA, 45 bp, synthetic construct
  source 1..45: mol_type = other DNA
acccacctgaaccagatcacaaacttcattgccccaaatcctcca

SEQ ID NO: 47252 - DNA, 30 bp, synthetic construct
  source 1..30: mol_type = other DNA
catctccaattagtaatgggcgtagacagt

SEQ ID NO: 47253 - DNA, 51 bp, synthetic construct
  source 1..51: mol_type = other DNA
tatgtcggtaacatggaggttcataacaacatcagcggcttggtccaaagc

SEQ ID NO: 47254 - DNA, 51 bp, synthetic construct
  source 1..51: mol_type = other DNA
gggctcaacatcgacttcttgaacgtgttccctctgctgtctgtgtacccc

SEQ ID NO: 47255 - DNA, 39 bp, synthetic construct
  source 1..39: mol_type = other DNA
atgatctttaccaagaacctgttcctgggcatgatcctc

SEQ ID NO: 47256 - DNA, 39 bp, synthetic construct
  source 1..39: mol_type = other DNA
aataaccccacactgggctacaacattatcaccttcggc

SEQ ID NO: 47257 - DNA, 45 bp, synthetic construct
  source 1..45: mol_type = other DNA
aagaaccccacactgggcaccaatctcatcacggcggggtccatc

SEQ ID NO: 47258 - DNA, 39 bp, synthetic construct
  source 1..39: mol_type = other DNA
gggcagtaccggttcgccggcttcgactttagctgtagc

SEQ ID NO: 47259 - DNA, 90 bp, synthetic construct
  source 1..90: mol_type = other DNA
gggttcaatgtttcggggatcgagacatccagcattatcaagttcacgcaaacgtcgtctagcctgatcgctggcggttcctttggaccc

SEQ ID NO: 47260 - DNA, 30 bp, synthetic construct
  source 1..30: mol_type = other DNA
atcttcgccaacaacgacaatggcatgatg

SEQ ID NO: 47261 - DNA, 66 bp, synthetic construct
  source 1..66: mol_type = other DNA
agcgcaatctatggcggcaatgctctgagtctcgtgtccggcggatacgagagtgcaaacaacttg

SEQ ID NO: 47262 - DNA, 36 bp, synthetic construct
  source 1..36: mol_type = other DNA
atcaagggccccgagggcacataccatttctcttat

SEQ ID NO: 47263 - DNA, 30 bp, synthetic construct
  source 1..30: mol_type = other DNA
ggcctgaagagcaccacttccacacctttg

SEQ ID NO: 47264 - DNA, 42 bp, synthetic construct
  source 1..42: mol_type = other DNA
atggcccacgatgtctatatctgctacgacgagagagacctg

SEQ ID NO: 47265 - DNA, 57 bp, synthetic construct
  source 1..57: mol_type = other DNA
aaccgggacaccggcgccaaacggatggtggacgagattatggatgctatcaagaag

SEQ ID NO: 47266 - DNA, 69 bp, synthetic construct
  source 1..69: mol_type = other DNA
ttgctattctccaagaactccaaggactctaactttgtcaacaatgaggtggatatcgcctttgctcag

SEQ ID NO: 47267 - DNA, 87 bp, synthetic construct
  source 1..87: mol_type = other DNA
aagctggatggaggacttgagttctttctccgcaacaagccacgcatcgaagctttccccaaccccgaggacttccgtgacgatgaa

SEQ ID NO: 47268 - DNA, 36 bp, synthetic construct
  source 1..36: mol_type = other DNA
atacagcagatcggcctggacctgaccttcgttccc

SEQ ID NO: 47269 - DNA, 87 bp, synthetic construct
  source 1..87: mol_type = other DNA
ggcatcgtcgacttcgctccactctggagcgcccacctgatcgaggtgcccaagttcaacctgcctatcattaactacgacctgaac

SEQ ID NO: 47270 - DNA, 42 bp, synthetic construct
  source 1..42: mol_type = other DNA
tccctctcaattgtttacggcgacctgagtatctctattagt

SEQ ID NO: 47271 - DNA, 30 bp, synthetic construct
  source 1..30: mol_type = other DNA
ctggacggactcggccatccctttcctctg

SEQ ID NO: 47272 - DNA, 66 bp, synthetic construct
  source 1..66: mol_type = other DNA
gtcactgggacaatgaacattggcgagatcatcacatatcaatcggtacacggacccctgatctat

SEQ ID NO: 47273 - DNA, 45 bp, synthetic construct
  source 1..45: mol_type = other DNA
acccagaagattcccatcactggcgacgtggccatcacaatcatg

SEQ ID NO: 47274 - DNA, 30 bp, synthetic construct; identical to SEQ ID NO: 46748
  source 1..30: mol_type = other DNA

SEQ ID NO: 47275 - DNA, 123 bp, synthetic construct
  source 1..123: mol_type = other DNA
tccttcctcccactgcatccatacgccttcgcaatggctagcggcgttgggtccgcgagcatgaacgctgccgccatcggccctactcttgctgcttttcccggactggaaagtcagatcgag

SEQ ID NO: 47276 - DNA, 276 bp, synthetic construct
  source 1..276: mol_type = other DNA
accatcggaatcgacgagggcgtggacctcaagggaggaacaatggccgaggtgaccctgaaccaccagatgtccaacgatcagatcacctcccaactccaatctgctcttcacgtcaacgaggtcaaaataatttccaatagcaacaacaaggccacaatcgagctcagcgacaaggtcgatgttggtcaatttaagcaagccttaaacgggatgggcaccgtgacatcttacaataccgttggaccagtcctgagccaggaagccatgaaccag

SEQ ID NO: 47277 - DNA, 33 bp, synthetic construct
  source 1..33: mol_type = other DNA
gacatcttcatgccccaagctaagacactttct

SEQ ID NO: 47278 - DNA, 51 bp, synthetic construct
  source 1..51: mol_type = other DNA
ggcctcaacgtggactttcttcacatttttcccgaactatccgtgtacccc

SEQ ID NO: 47279 - DNA, 33 bp, synthetic construct
  source 1..33: mol_type = other DNA
atgctggtgaccaagaatatcttcctcgtcgtt

SEQ ID NO: 47280 - DNA, 63 bp, synthetic construct
  source 1..63: mol_type = other DNA
gtcaccgggactatgaacatcggagagatcattacgtaccagtctgttaatggtcctctgata

SEQ ID NO: 47281 - DNA, 33 bp, synthetic construct
  source 1..33: mol_type = other DNA
cctcggctcttcaagcctgaaggagtagatagc

SEQ ID NO: 47282 - DNA, 63 bp, synthetic construct
  source 1..63: mol_type = other DNA
gtgaccgggactatgaacatcggcgaaattattacataccagagcgtccacggacctctgatt

SEQ ID NO: 47283 - DNA, 33 bp, synthetic construct
  source 1..33: mol_type = other DNA
cctagaattttctcgcctgaaggggtagactca

SEQ ID NO: 47284 - DNA, 66 bp, synthetic construct
  source 1..66: mol_type = other DNA
ggcggcatctacggatgggacgtgatcgatagcattgacactggtggctacgaggccctgaacacc

SEQ ID NO: 47285 - DNA, 33 bp, synthetic construct
  source 1..33: mol_type = other DNA
atgggcgaggccgaaggaaccaaccacttcacc

SEQ ID NO: 47286 - DNA, 33 bp, synthetic construct
  source 1..33: mol_type = other DNA
ttcggcctgggagtcacttctagtaccacgact

SEQ ID NO: 47287 - DNA, 66 bp, synthetic construct
  source 1..66: mol_type = other DNA
gtgaccggctcaatgaacattggcgagatcatcgcgtatcaatctgctcatggacctctggtcttc

SEQ ID NO: 47288 - DNA, 33 bp, synthetic construct
  source 1..33: mol_type = other DNA
aacataatcgagaatatcggtggcaacatctca

SEQ ID NO: 47289 - DNA, 30 bp, synthetic construct
  source 1..30: mol_type = other DNA
ctcagcggactggggcacccttttcctctg

SEQ ID NO: 47290 - DNA, 63 bp, synthetic construct
  source 1..63: mol_type = other DNA
atgggcttcctgccctacacctttctgagcgtgttcctgagtatccaaaactttgctgacaat

SEQ ID NO: 47291 - DNA, 51 bp, synthetic construct
  source 1..51: mol_type = other DNA
gtcgatgtcgaaaaccggatcactgacctatacgacgcagtgttcgcctat

SEQ ID NO: 47292 - DNA, 66 bp, synthetic construct
  source 1..66: mol_type = other DNA
atagtcggctctatgaacatcggcgaaattatcgcatatcaatcaatacacggagccctgatcttc

SEQ ID NO: 47293 - DNA, 63 bp, synthetic construct
  source 1..63: mol_type = other DNA
atcactgggacaatgaacatcggcgagatcattacatatcagtccgttcacggacctctcatt

SEQ ID NO: 47294 - DNA, 60 bp, synthetic construct
  source 1..60: mol_type = other DNA
ttcggtatcctgccccatggctttctgtccgcctacctgagcttgcaacatctcgctgag

SEQ ID NO: 47295 - DNA, 51 bp, synthetic construct
  source 1..51: mol_type = other DNA
gtggacgccggcaacgtgatcactaatatgtacgatatcattttcgcctat

SEQ ID NO: 47296 - DNA, 30 bp, synthetic construct
  source 1..30: mol_type = other DNA
gcccaggcttacggaatggacttgggaatc

SEQ ID NO: 47297 - DNA, 39 bp, synthetic construct
  source 1..39: mol_type = other DNA
aatatccccctgattaacctcaacaatttcgacctgagc

SEQ ID NO: 47298 - DNA, 66 bp, synthetic construct
  source 1..66: mol_type = other DNA
ctgcccgtcattagctgggagttcttgacaacagctcccgtggactttggagcttctggtggaatc

SEQ ID NO: 47299 - DNA, 102 bp, synthetic construct
  source 1..102: mol_type = other DNA
gtggggagcagcatcgccgttccggtcactatcttcgacccggcccggcccctgccactgcacctgtacattctggctaccgaaggcatctctatagagaac

SEQ ID NO: 47300 - DNA, 54 bp, synthetic construct
  source 1..54: mol_type = other DNA
tttggcaacatgacctacgaggacttcgtcgccgtgcttaaggagaatggtatc

SEQ ID NO: 47301 - DNA, 45 bp, synthetic construct
  source 1..45: mol_type = other DNA
agcctcttcattgagatcaacaacaatcagacactcaccgtcggc

SEQ ID NO: 47302 - DNA, 63 bp, synthetic construct
  source 1..63: mol_type = other DNA
gaggccggcatcctgccacatacctttctgagcgtcttcctctctttgcaaaacctagctaat

SEQ ID NO: 47303 - DNA, 48 bp, synthetic construct
  source 1..48: mol_type = other DNA
gtggacctggagaaccggatcaccaatctctacgatgtggtcttcacc

SEQ ID NO: 47304 - DNA, 39 bp, synthetic construct
  source 1..39: mol_type = other DNA
atcggcgaagttggggaggccaatgtcgaacacaacgcc

SEQ ID NO: 47305 - DNA, 33 bp, synthetic construct
  source 1..33: mol_type = other DNA
agcacattcaccgccgccataagtgatttggat

SEQ ID NO: 47306 - DNA, 63 bp, synthetic construct
  source 1..63: mol_type = other DNA
gtcaccgggagcatgaacatcgacgctataattaattaccaggcagtgcacggaccactcatc

SEQ ID NO: 47307 - DNA, 36 bp, synthetic construct
  source 1..36: mol_type = other DNA
gggcagacaggcaacgtgaccatcgagcacaatgcc

SEQ ID NO: 47308 - DNA, 33 bp, synthetic construct
  source 1..33: mol_type = other DNA
tcttccttcaccgccgctatctccgatttggac

SEQ ID NO: 47309 - DNA, 33 bp, synthetic construct
  source 1..33: mol_type = other DNA
agctacctgcttggcgactacgccactggattg

SEQ ID NO: 47310 - DNA, 48 bp, synthetic construct
  source 1..48: mol_type = other DNA
tctctgatctcattaatttattcaaatcagtattctttggcctcggcg

SEQ ID NO: 47311 - DNA, 63 bp, synthetic construct
  source 1..63: mol_type = other DNA
gtgaccggcaccatgaacataggggaaataatagtgtaccagtctgtccacggacctctcata

SEQ ID NO: 47312 - DNA, 54 bp, synthetic construct
  source 1..54: mol_type = other DNA
gagaagatgaactacgagaaccagatcctcgagatcattctgaacttcttcgac

SEQ ID NO: 47313 - DNA, 69 bp, synthetic construct
  source 1..69: mol_type = other DNA
aatgtggcctacgacactaacaccattacgcaactgatgaccggcggctatgaagctctgaactccgaa

SEQ ID NO: 47314 - DNA, 33 bp, synthetic construct
  source 1..33: mol_type = other DNA
tttggtcaaaagtcagccaacaccctgactccc

SEQ ID NO: 47315 - DNA, 33 bp, synthetic construct
  source 1..33: mol_type = other DNA
ctcggcttcgaagtgtcgagctctctgatcact

SEQ ID NO: 47316 - DNA, 69 bp, synthetic construct
  source 1..69: mol_type = other DNA
ggcatggcctacggctggaataccatatttcaactgatgacacagggatacgaggctctcaactctgag

SEQ ID NO: 47317 - DNA, 33 bp, synthetic construct
  source 1..33: mol_type = other DNA
atccacggcccagtcgggcctaacacacttacc

SEQ ID NO: 47318 - DNA, 33 bp, synthetic construct
  source 1..33: mol_type = other DNA
atcggttttgaggtgactagcagcatcattggc

SEQ ID NO: 47319 - DNA, 36 bp, synthetic construct
  source 1..36: mol_type = other DNA
tacgagtatatgctcaccgccctgcacgaattgcat

SEQ ID NO: 47320 - DNA, 36 bp, synthetic construct
  source 1..36: mol_type = other DNA
atgattgacccatccacgaaggtgctgattaacccc

SEQ ID NO: 47321 - DNA, 87 bp, synthetic construct
  source 1..87: mol_type = other DNA
gagggagtggacctgctcgacgccttagtgatggtttctaatgctttcacatccaacggctacgctgtcctcgggacctctagtctg

SEQ ID NO: 47322 - DNA, 36 bp, synthetic construct
  source 1..36: mol_type = other DNA
tacgaatatatgctgactgccctgcatgagttccac

SEQ ID NO: 47323 - DNA, 30 bp, synthetic construct
  source 1..30: mol_type = other DNA
ataattgactctgctggactgaacttcgcc

SEQ ID NO: 47324 - DNA, 66 bp, synthetic construct
  source 1..66: mol_type = other DNA
gtggcttacggctggaacacaatctttcaattgatgacccagggctatggggcccttaataccgag

SEQ ID NO: 47325 - DNA, 30 bp, synthetic construct
  source 1..30: mol_type = other DNA
cacgggcagacaggccccaacactcttacg

SEQ ID NO: 47326 - DNA, 33 bp, synthetic construct
  source 1..33: mol_type = other DNA
ctgggctttggcgcggtctcgtccttcatcact

SEQ ID NO: 47327 - DNA, 69 bp, synthetic construct
  source 1..69: mol_type = other DNA
gggatggcctacggatggaacaccatattccaactgatgacacagggctacgaggctctcaactctgaa

SEQ ID NO: 47328 - DNA, 33 bp, synthetic construct
  source 1..33: mol_type = other DNA
atcaccgggcgagtcggccctaacactctgaca

SEQ ID NO: 47329 - DNA, 33 bp, synthetic construct
  source 1..33: mol_type = other DNA
ctcggcttcggcgccacaagctccctgatcacc

SEQ ID NO: 47330 - DNA, 30 bp, synthetic construct
  source 1..30: mol_type = other DNA
agcatgggttgtggacctaaaacatctctc

SEQ ID NO: 47331 - DNA, 42 bp, synthetic construct
  source 1..42: mol_type = other DNA
tggggcgtgcagggcttgcctgatttctccctcggttacgtg

SEQ ID NO: 47332 - DNA, 45 bp, synthetic construct
  source 1..45: mol_type = other DNA
gatgtttggatgattgatcccacaaccaaggtcctgatcaacccc

SEQ ID NO: 47333 - DNA, 87 bp, synthetic construct
  source 1..87: mol_type = other DNA
gagggagtggacctgctggacgccctcgtgatggtctccaacgccttcacgtctaacggctacgctgtgttgggcacatctacactc

SEQ ID NO: 47334 - DNA, 48 bp, synthetic construct
  source 1..48: mol_type = other DNA
atcaacagctccttcttcaatattagtcctgtgctgagcttctacccc

SEQ ID NO: 47335 - DNA, 33 bp, synthetic construct
  source 1..33: mol_type = other DNA
atgatcatcctgaagaacctcatcttcgttatc

SEQ ID NO: 47336 - DNA, 36 bp, synthetic construct
  source 1..36: mol_type = other DNA
tacaagtatatgctgaacgctttgcatcaacttcac

SEQ ID NO: 47337 - DNA, 30 bp, synthetic construct
  source 1..30: mol_type = other DNA
gagatcgtcaaggccaccgtgctgaacatt

SEQ ID NO: 47338 - DNA, 63 bp, synthetic construct
  source 1..63: mol_type = other DNA
ggcctctacggatgggacttcgtgctttctctgtcccggcggagctatgaggccatgaacact

SEQ ID NO: 47339 - DNA, 33 bp, synthetic construct
  source 1..33: mol_type = other DNA
atcaagaaccccaatggcattaaccacttcacc

SEQ ID NO: 47340 - DNA, 30 bp, synthetic construct
  source 1..30: mol_type = other DNA
ggcctggagatgaccacaagctcacctact

SEQ ID NO: 47341 - DNA, 69 bp, synthetic construct
  source 1..69: mol_type = other DNA
agccagatcgttggactcgatttctttgactccattgtcaacggcggctacgaggccatgaataccgaa

SEQ ID NO: 47342 - DNA, 36 bp, synthetic construct
  source 1..36: mol_type = other DNA
atgggcgggtttcagggcacctaccatttctattca

SEQ ID NO: 47343 - DNA, 30 bp, synthetic construct
  source 1..30: mol_type = other DNA
ggcctccaatctagtgccacaaacatcacc

SEQ ID NO: 47344 - DNA, 48 bp, synthetic construct
  source 1..48: mol_type = other DNA
atcaacattagcttcctgaacaattctcctctgctgtccttttaccct

SEQ ID NO: 47345 - DNA, 33 bp, synthetic construct
  source 1..33: mol_type = other DNA
atgctcatcctgaagaacatcatcttcgtgatt

SEQ ID NO: 47346 - DNA, 99 bp, synthetic construct
  source 1..99: mol_type = other DNA
gggatgcccatcttcgactccgtctgcaatacattcaccattatctctaccggcggcatgagcattaagaatgccaacatcggattttaccaaaacgac

SEQ ID NO: 47347 - DNA, 99 bp, synthetic construct
  source 1..99: mol_type = other DNA
tccgacatcgtgcctattgagatcctgttcaccgtggtgtctgcggtcacgaccactggtgctagcgttcagagttcaaccgtgatgggaaactggcct

SEQ ID NO: 47348 - DNA, 96 bp, synthetic construct
  source 1..96: mol_type = other DNA
tacggtcacgaccccattgaaggcctgttcttcaccatgtcccttcaaggaaacgtcggcctcgagatcggccatgtgacaagtgcactgcaaccc

SEQ ID NO: 47349 - DNA, 75 bp, synthetic construct
  source 1..75: mol_type = other DNA
atgcagagcttctttaaatactacggcctgatcttcaagtataccgtgaagtggcgggtcaagtatatggacatc

SEQ ID NO: 47350 - DNA, 96 bp, synthetic construct
  source 1..96: mol_type = other DNA
tttgatccatctattaactctctgttcgactctctatggttcgtgctgagcaccataacgacagttggctacggcgatatcttacctcaaagtggg

SEQ ID NO: 47351 - DNA, 36 bp, synthetic construct
  source 1..36: mol_type = other DNA
tacaagtatatgctgaacgctctccacgaactgcat

SEQ ID NO: 47352 - DNA, 60 bp, synthetic construct
  source 1..60: mol_type = other DNA
agccacaacggcaccaccgagatcgtgctgttctctaacttcacaattactctcgaatcc

SEQ ID NO: 47353 - DNA, 60 bp, synthetic construct
  source 1..60: mol_type = other DNA
aacggctacgggctgatatccatctatcctactattagcaaggactttatccaaatgaat

SEQ ID NO: 47354 - DNA, 105 bp, synthetic construct
  source 1..105: mol_type = other DNA
attgcctgcatctaccggccttgggtgctggacccaaaggtccatccactcaaggagatcatggtcggggcgaccgggtactccttccctagcggacacgttaca

SEQ ID NO: 47355 - DNA, 66 bp, synthetic construct
  source 1..66: mol_type = other DNA
accaagagctatcccatggattacgacgctgctggcaagctgctcgtggaccctgcaatcttgacc

SEQ ID NO: 47356 - DNA, 48 bp, synthetic construct
  source 1..48: mol_type = other DNA
ctgaatatcaacttcctgaacatcttcccgcaactgtctatctacccc

SEQ ID NO: 47357 - DNA, 39 bp, synthetic construct
  source 1..39: mol_type = other DNA
gtcatgatgatgttcatcaagaacttctacttggtcata

SEQ ID NO: 47358 - DNA, 51 bp, synthetic construct
  source 1..51: mol_type = other DNA
ggactgaatatcgactttctgaacatctttcctgtgctctccatttacccc

SEQ ID NO: 47359 - DNA, 39 bp, synthetic construct
  source 1..39: mol_type = other DNA
attatgatgctggtgaccaagaacctcgccctggttatc

SEQ ID NO: 47360 - DNA, 30 bp, synthetic construct
  source 1..30: mol_type = other DNA
gacaacaatatcgtgatgagcaactcaccc

SEQ ID NO: 47361 - DNA, 90 bp, synthetic construct
  source 1..90: mol_type = other DNA
gagaacaaggaccctctgaatgccgtggtcctggtgtccaacgcctttacgagcaacggctacgttatcatgggcgagtctattggcggc

SEQ ID NO: 47362 - DNA, 51 bp, synthetic construct
  source 1..51: mol_type = other DNA
ggaatcgacaatcaattcttcaacatcagtcccctgctgagcttctacccc

SEQ ID NO: 47363 - DNA, 33 bp, synthetic construct
  source 1..33: mol_type = other DNA
atgatcatcctgaagaacatcatcttcgtcatt

SEQ ID NO: 47364 - DNA, 33 bp, synthetic construct
  source 1..33: mol_type = other DNA
gtcttttttgcaacggacgatgatgcaggaagc

SEQ ID NO: 47365 - DNA, 48 bp, synthetic construct
  source 1..48: mol_type = other DNA
atcaatatttccttcctgaacatctctcctaccctgagcttctatccc

SEQ ID NO: 47366 - DNA, 30 bp, synthetic construct
  source 1..30: mol_type = other DNA
ctgattctcaagaacatcatcttcgtgatc

SEQ ID NO: 47367 - DNA, 48 bp, synthetic construct
  source 1..48: mol_type = other DNA
ctcaatatcggcttcctgaacatcttccccgagctgagcatctaccct

SEQ ID NO: 47368 - DNA, 39 bp, synthetic construct
  source 1..39: mol_type = other DNA
atcatgatgatcttcgccaagaacctgtttctcgtgatc

SEQ ID NO: 47369 - DNA, 57 bp, synthetic construct
  source 1..57: mol_type = other DNA
gagggctttctggctctctacaatttcaacgagatcgacatcgccgatttcgtgatc

SEQ ID NO: 47370 - DNA, 36 bp, synthetic construct
  source 1..36: mol_type = other DNA
tacgagtatatgctgaacgccctgcatcaactccac

SEQ ID NO: 47371 - DNA, 30 bp, synthetic construct
  source 1..30: mol_type = other DNA
atcagcaacgccgtgtctatgaacttctcc

SEQ ID NO: 47372 - DNA, 69 bp, synthetic construct
  source 1..69: mol_type = other DNA
gggcaggcctatggattcgacaatatctttacactcgccacccaaggatacgagtccttaaactccgag

SEQ ID NO: 47373 - DNA, 30 bp, synthetic construct
  source 1..30: mol_type = other DNA
tacggccagaagggaccaaacaccttgacc

SEQ ID NO: 47374 - DNA, 33 bp, synthetic construct
  source 1..33: mol_type = other DNA
ctgggcttcgaagttagtagcagcgtcatcacc

SEQ ID NO: 47375 - DNA, 66 bp, synthetic construct
  source 1..66: mol_type = other DNA
gagtccgggtttctaccaagtacattcctgaacgcctacctctcactacaagggcttgctaacaat

SEQ ID NO: 47376 - DNA, 48 bp, synthetic construct
  source 1..48: mol_type = other DNA
gatgtcgggaacgcgatcacgtcaatctacaaggacgtgttcgtcgtg

SEQ ID NO: 47377 - DNA, 36 bp, synthetic construct
  source 1..36: mol_type = other DNA
tatgagtacatgctcaacgccctacatcaactacac

SEQ ID NO: 47378 - DNA, 30 bp, synthetic construct
  source 1..30: mol_type = other DNA
attgccaactcggtgtctgtgaacttctcc

SEQ ID NO: 47379 - DNA, 72 bp, synthetic construct
  source 1..72: mol_type = other DNA
gggcaagcctatggcttcgacaacatctttgccctggtcacccaaggatacgagtccctgaactctgaagtg

SEQ ID NO: 47380 - DNA, 33 bp, synthetic construct
  source 1..33: mol_type = other DNA
catggccagagaggtcctaacacccttactccg

SEQ ID NO: 47381 - DNA, 36 bp, synthetic construct
  source 1..36: mol_type = other DNA
ctgggcttcgaggtatcatcttccgtgatcacaccc

SEQ ID NO: 47382 - DNA, 48 bp, synthetic construct
  source 1..48: mol_type = other DNA
ctcaagaatcccacactgggcatgaacctgattaccgccggttctatc

SEQ ID NO: 47383 - DNA, 51 bp, synthetic construct
  source 1..51: mol_type = other DNA
ggaattaacgtggacttcctgaatatctttcccgagttgtctatctatccc

SEQ ID NO: 47384 - DNA, 36 bp, synthetic construct
  source 1..36: mol_type = other DNA
atcatgctgtttaccaagaacattttcctggtggtt

SEQ ID NO: 47385 - DNA, 48 bp, synthetic construct
  source 1..48: mol_type = other DNA
ctgaacatcgacttcctcaatgtgtttccgcaactgtcaatttacccc

SEQ ID NO: 47386 - DNA, 36 bp, synthetic construct
  source 1..36: mol_type = other DNA
atcatgctgttcgccaagaacctcgtgttggtcgtg

SEQ ID NO: 47387 - DNA, 66 bp, synthetic construct
  source 1..66: mol_type = other DNA
aagaacgacacacttgggatgaatctgatcactgcgggctctattcttgtgatacttcaagccgct

SEQ ID NO: 47388 - DNA, 66 bp, synthetic construct
  source 1..66: mol_type = other DNA
gagagcggcatcctgccaagtaccttcctgaatgcttacctgtcgttgcaatccttggccaacaac

SEQ ID NO: 47389 - DNA, 51 bp, synthetic construct
  source 1..51: mol_type = other DNA
gtggacatgggcaacgcgatcaccgccctttatgatgatctgttcgtggct

SEQ ID NO: 47390 - DNA, 93 bp, synthetic construct
  source 1..93: mol_type = other DNA
attatcaacgccaccattcaaacgcttatgtttggcggccagcagctgatggcgtatagcctgtaccaattccttctgatcttgagtcaacct

SEQ ID NO: 47391 - DNA, 30 bp, synthetic construct
  source 1..30: mol_type = other DNA
cggctgttcagcgtggtgacccccgacgcc

SEQ ID NO: 47392 - DNA, 36 bp, synthetic construct
  source 1..36: mol_type = other DNA
gggcagttcacctttcggggcttcgacttctcgcaa

SEQ ID NO: 47393 - DNA, 93 bp, synthetic construct
  source 1..93: mol_type = other DNA
ttcgggttcagcgtctccggtaaccctactccaagcctgctcaagttcgagcaagtcggccaaaacatcgtaaccggcggtacttttggacct

SEQ ID NO: 47394 - DNA, 33 bp, synthetic construct
  source 1..33: mol_type = other DNA
gggagcaccgttatgggtgacgtgatctctggc

SEQ ID NO: 47395 - DNA, 48 bp, synthetic construct
  source 1..48: mol_type = other DNA
ctgaatatcgacttcctgaacattttcccacaactctccctctacccc

SEQ ID NO: 47396 - DNA, 39 bp, synthetic construct
  source 1..39: mol_type = other DNA
attttcctcttcaccaagaactttgctctggttattctt

SEQ ID NO: 47397 - DNA, 111 bp, synthetic construct
  source 1..111: mol_type = other DNA
aagaacgctgtgacaatctaccgaccttttataatgaacccaaatatccacccgcttgaggaggccatggaggaagctacgggctatagctttccctctgggcacaccacc

SEQ ID NO: 47398 - DNA, 69 bp, synthetic construct
  source 1..69: mol_type = other DNA
ttcaaaggctaccctatggactatgactccgccggcaaactgatcgtagatccttccaaaatggctctg

SEQ ID NO: 47399 - DNA, 96 bp, synthetic construct
  source 1..96: mol_type = other DNA
ctcgtgataaatgccacgatacaaacgcttatgctcggtggccagcagctgatggcatacagtctatatcaatttctgcttgtcctctcccaacct

SEQ ID NO: 47400 - DNA, 36 bp, synthetic construct
  source 1..36: mol_type = other DNA
tacgaatatatgctgaccgccctgcatgagttccat

SEQ ID NO: 47401 - DNA, 48 bp, synthetic construct
  source 1..48: mol_type = other DNA
ctgaacggcgagtttttcaacgtgttcccgcttttaagcatatacccc

SEQ ID NO: 47402 - DNA, 30 bp, synthetic construct
  source 1..30: mol_type = other DNA
ctcatcaccaagcacttcgtgctggtcatt

SEQ ID NO: 47403 - DNA, 48 bp, synthetic construct
  source 1..48: mol_type = other DNA
gccagcatcgacttcctgaacatctttcctgtgctgtccatttaccca

SEQ ID NO: 47404 - DNA, 33 bp, synthetic construct
  source 1..33: mol_type = other DNA
atgctcatcaccaagaacctggtgctggtcatt

SEQ ID NO: 47405 - DNA, 36 bp, synthetic construct
  source 1..36: mol_type = other DNA
gggagctgggatggaattggagccatcgatatttcg

SEQ ID NO: 47406 - DNA, 48 bp, synthetic construct
  source 1..48: mol_type = other DNA
ctgaacatcggcttcctcaatatcttccccgagctgagcatctaccct

SEQ ID NO: 47407 - DNA, 36 bp, synthetic construct
  source 1..36: mol_type = other DNA
atcatgcttctgaccaagaacctggttttggtggtg

SEQ ID NO: 47408 - DNA, 63 bp, synthetic construct
  source 1..63: mol_type = other DNA
aagaatccgacactgggcatgaacctcattacggctggaagcatcatcgtgatactccaatca

SEQ ID NO: 47409 - DNA, 36 bp, synthetic construct
  source 1..36: mol_type = other DNA
gggcagttcacctttgacggctacgatctgtctagc

SEQ ID NO: 47410 - DNA, 93 bp, synthetic construct
  source 1..93: mol_type = other DNA
tacggcttcaatgtctcgggcatcagcactcctaccctcctgaagtgctctcacaccgggcagaacctgattaacggcggcgtatttggccca

SEQ ID NO: 47411 - DNA, 66 bp, synthetic construct
  source 1..66: mol_type = other DNA
ggaatgacctacgggctcgacgccgtgatccagttgactcaaggttacgagagcctgaactccgag

SEQ ID NO: 47412 - DNA, 33 bp, synthetic construct
  source 1..33: mol_type = other DNA
atccgaggacctgtcggacccaacacattgacc

SEQ ID NO: 47413 - DNA, 33 bp, synthetic construct
  source 1..33: mol_type = other DNA
atcggcttcgaaatcagctcatccgtcatatca

SEQ ID NO: 47414 - DNA, 48 bp, synthetic construct
  source 1..48: mol_type = other DNA
ctgaatggcgacatctttaacatcttccctcttctgtcaatctacccc

SEQ ID NO: 47415 - DNA, 36 bp, synthetic construct
  source 1..36: mol_type = other DNA
atgctgatcaccaagaacttcgtgatggtggtactc

SEQ ID NO: 47416 - DNA, 66 bp, synthetic construct
  source 1..66: mol_type = other DNA
gagtttggctatctgccgagttccttccttaacgcttacctctccttgcaatctatcgccaataac

SEQ ID NO: 47417 - DNA, 45 bp, synthetic construct
  source 1..45: mol_type = other DNA
ggcaacgccatcaccgacatttacgaggatgtgttcatcctgttt

SEQ ID NO: 47418 - DNA, 33 bp, synthetic construct
  source 1..33: mol_type = other DNA
cctaggctcttctctcccgagggcgttgacgca

SEQ ID NO: 47419 - DNA, 66 bp, synthetic construct
  source 1..66: mol_type = other DNA
gagttcggctatctgccctcttccttcctgaacgcctacctgagcctgcaatcaatagctaataac

SEQ ID NO: 47420 - DNA, 45 bp, synthetic construct
  source 1..45: mol_type = other DNA
gatctgggcaacgccatcaccaatatctacgacgacgtgttcatt

SEQ ID NO: 47421 - DNA, 48 bp, synthetic construct
  source 1..48: mol_type = other DNA
ctcaatatcgacttcctgaacatcttccctcaattgtcgatctaccct

SEQ ID NO: 47422 - DNA, 36 bp, synthetic construct
  source 1..36: mol_type = other DNA
atgatgctcttcaccaagaacctggtgctggtcatt

SEQ ID NO: 47423 - DNA, 57 bp, synthetic construct
  source 1..57: mol_type = other DNA
ttcggcgagccctttatctatagtctgacggggaattacgaatccctcaacaccatc

SEQ ID NO: 47424 - DNA, 36 bp, synthetic construct
  source 1..36: mol_type = other DNA
gtgaatcccaacatcaagtttaacaaccagttcaca

SEQ ID NO: 47425 - DNA, 33 bp, synthetic construct
  source 1..33: mol_type = other DNA
ttcggcctatcacaactgtcctccaacgttagt

SEQ ID NO: 47426 - DNA, 33 bp, synthetic construct
  source 1..33: mol_type = other DNA
agcttcctggacacaggcaccgtgctgaagatt

SEQ ID NO: 47427 - DNA, 48 bp, synthetic construct
  source 1..48: mol_type = other DNA
ctgaacattgactttctccacatcttccctgtcctgagcgtgtacccc

SEQ ID NO: 47428 - DNA, 39 bp, synthetic construct
  source 1..39: mol_type = other DNA
atgatgatcttcgccaagaacatcatgcttgtaatcata

SEQ ID NO: 47429 - DNA, 33 bp, synthetic construct
  source 1..33: mol_type = other DNA
tcaagcaccgtgatgggcgatatcgtctctggc

SEQ ID NO: 47430 - DNA, 51 bp, synthetic construct
  source 1..51: mol_type = other DNA
ggtttcaatctcgagtatctgaacatttttccggaactgtccatctatccc

SEQ ID NO: 47431 - DNA, 39 bp, synthetic construct
  source 1..39: mol_type = other DNA
atgatgatcttcaccaagaacgtcatcctggtcatcctt

SEQ ID NO: 47432 - DNA, 48 bp, synthetic construct
  source 1..48: mol_type = other DNA
ctgaacatcgacttcctgaatatcttccctcaactttcgatctacccc

SEQ ID NO: 47433 - DNA, 33 bp, synthetic construct
  source 1..33: mol_type = other DNA
atcctcttcactaagaacctggttcttgtcgtg

SEQ ID NO: 47434 - DNA, 51 bp, synthetic construct
  source 1..51: mol_type = other DNA
gggattaatatccccttcttcaacatttcccctacgctgtcattttacccc

SEQ ID NO: 47435 - DNA, 33 bp, synthetic construct
  source 1..33: mol_type = other DNA
gtgctgatcctcaagaacttggttttcgtcatg

SEQ ID NO: 47436 - DNA, 48 bp, synthetic construct
  source 1..48: mol_type = other DNA
ctgaacattgacttcctcaacgtgttcccgcaaatgagtatctacccc

SEQ ID NO: 47437 - DNA, 36 bp, synthetic construct
  source 1..36: mol_type = other DNA
atcatgctcttcgccaagaacctggttctggtggtg

SEQ ID NO: 47438 - DNA, 66 bp, synthetic construct
  source 1..66: mol_type = other DNA
tacaatatgctgtctgaggccctggaacagcctgtatcaagcgctaccttctccaccaacttcgag

SEQ ID NO: 47439 - DNA, 66 bp, synthetic construct
  source 1..66: mol_type = other DNA
gagagcggcatattgccggcaacgttccttaaggcctacctgtcgttacaaaacttagctaacaat

SEQ ID NO: 47440 - DNA, 51 bp, synthetic construct
  source 1..51: mol_type = other DNA
gtcgatatggggaacgccattaccgatctctacgacgacgtcttcgtggtg

SEQ ID NO: 47441 - DNA, 30 bp, synthetic construct
  source 1..30: mol_type = other DNA
gtatatgctaatgagctggagctcgaaagc

SEQ ID NO: 47442 - DNA, 36 bp, synthetic construct
  source 1..36: mol_type = other DNA
gggcagtttacgttttctggtttcgacttctctcag

SEQ ID NO: 47443 - DNA, 93 bp, synthetic construct
  source 1..93: mol_type = other DNA
ttcggcttttcggtttcgggggctcctacacctagtctgctcaagtttagccaagctggtcagaacatgatagcgggtggcatctttggtccc

SEQ ID NO: 47444 - DNA, 66 bp, synthetic construct
  source 1..66: mol_type = other DNA
gtgaccggcacaatgaacatagggcagatcatcgcataccagagtgtccacggacccctgatcttc

SEQ ID NO: 47445 - DNA, 36 bp, synthetic construct
  source 1..36: mol_type = other DNA
taccagtatatgctgaactgtttgagtaatctgaag

SEQ ID NO: 47446 - DNA, 66 bp, synthetic construct
  source 1..66: mol_type = other DNA
gagacacacaccatgaacattgggcagattatcagctaccagtccgcccatggccctctgatcttc

SEQ ID NO: 47447 - DNA, 33 bp, synthetic construct
  source 1..33: mol_type = other DNA
gaggaaagcgtgctgaaggaccggaaaatcgac

SEQ ID NO: 47448 - DNA, 30 bp, synthetic construct
  source 1..30: mol_type = other DNA
gtgatttctcccgtaaatctgggcgtgtca

SEQ ID NO: 47449 - DNA, 96 bp, synthetic construct
  source 1..96: mol_type = other DNA
ctcgtgatcaacgctacaattcagaccctggtcttcggaggccagcaggaggtggcctacactttctatcaattgctactgatcctgagccaaccc

SEQ ID NO: 47450 - DNA, 120 bp, synthetic construct
  source 1..120: mol_type = other DNA
ttcattaatagcgctgatatcaccaccaatttccaagcaatgaacaagccacctagcttcgagcacctgtttgggacagattggatgggtcgcgacatgttcacacggaccctcaaagga

SEQ ID NO: 47451 - DNA, 90 bp, synthetic construct
  source 1..90: mol_type = other DNA
accttcctcggattcggcctgtcccctcacgagcccgctattggcatcatcctctctgagtccatgaagtacctcgccacgggcaattgg

SEQ ID NO: 47452 - DNA, 81 bp, synthetic construct
  source 1..81: mol_type = other DNA
gtgttcgataacatgcgcatattggcaaacgtcgctcccgtggatacagtacaggcggcgatctctgccatgccaccttct

SEQ ID NO: 47453 - DNA, 33 bp, synthetic construct
  source 1..33: mol_type = other DNA
gtcaatgagtccgtcggggcatctgtgaatgtg

SEQ ID NO: 47454 - DNA, 117 bp, synthetic construct
  source 1..117: mol_type = other DNA
atcaactccgctgatattaccaccaacttcaacgccatgaatcagccaccgagctttgagcacctgttcgggacagactggatgggccgggacatgttcacaaggactatgaagggc

SEQ ID NO: 47455 - DNA, 90 bp, synthetic construct
  source 1..90: mol_type = other DNA
accttcctggggttcggcctgtcacctcacgagcctgccattggagtgatcctgtctgagagcatgaagtacctcgcgacgggtaactgg

SEQ ID NO: 47456 - DNA, 51 bp, synthetic construct
  source 1..51: mol_type = other DNA
ggcacctgccccacttctgctatcgaggtgacgcctaatagcattatccac

SEQ ID NO: 47457 - DNA, 36 bp, synthetic construct
  source 1..36: mol_type = other DNA
gccatcaccctcgaggaagttggcagccctgttacc

SEQ ID NO: 47458 - DNA, 42 bp, synthetic construct
  source 1..42: mol_type = other DNA
ggcgacttcatctccgctaactccgcatcactcactgtagcc

SEQ ID NO: 47459 - DNA, 42 bp, synthetic construct
  source 1..42: mol_type = other DNA
atgtacacactcaaccttggcggaatcagaatcgtgctgatg

SEQ ID NO: 47460 - DNA, 30 bp, synthetic construct
  source 1..30: mol_type = other DNA
ggccagaacatcgagatcatcttcaatgcc

SEQ ID NO: 47461 - DNA, 120 bp, synthetic construct
  source 1..120: mol_type = other DNA
ctgttgcctctgcacccttacgcttacggcatggcctgcgggattgggtctgcctcgatgaacgccgcggccgtggccagtctgtctgctatcttcccatccatgtccactcaacttcag

SEQ ID NO: 47462 - DNA, 36 bp, synthetic construct
  source 1..36: mol_type = other DNA
tttaacctgaacattaccaatatcatccccatcttc

SEQ ID NO: 47463 - DNA, 63 bp, synthetic construct
  source 1..63: mol_type = other DNA
gtcacagggaccatgaacatcggcgagattattgcgtatcaaagtgtccatggacctcttatc

SEQ ID NO: 47464 - DNA, 39 bp, synthetic construct
  source 1..39: mol_type = other DNA
caatatgagttcatgctgagcgccctcaacgagctgaag

SEQ ID NO: 47465 - DNA, 120 bp, synthetic construct
  source 1..120: mol_type = other DNA
tttatcgatcacactgcggttctcacctccaacttctacaacgtgaatcagccaccgagcttcgagcactggttcgggaccgactggatgggccgggacatgttcatgcgcactctgctg

SEQ ID NO: 47466 - DNA, 90 bp, synthetic construct
  source 1..90: mol_type = other DNA
tccttccttggctttggactgccagcccacgagcctgctatcgggatcattttatcggagagcatgaagtacctgagcatgggatactgg

SEQ ID NO: 47467 - DNA, 42 bp, synthetic construct
  source 1..42: mol_type = other DNA
gtgatcgccctcgacatcatgggcgttaatattgtcctgatg

SEQ ID NO: 47468 - DNA, 30 bp, synthetic construct
  source 1..30: mol_type = other DNA
ggccagaacctggccatcgtgttcgatgtg

SEQ ID NO: 47469 - DNA, 123 bp, synthetic construct
  source 1..123: mol_type = other DNA
tacgtggtcccactgcacccattcgcctacgggatggcatgcggaatcggcagcgcatctatgaacgccgctgctgtggccagtctgtccgctgtgtacccccaatacgcagtacagttggag

SEQ ID NO: 47470 - DNA, 39 bp, synthetic construct
  source 1..39: mol_type = other DNA
cagtaccagtatatgctgaacaccctgaatgctctcaac

SEQ ID NO: 47471 - DNA, 117 bp, synthetic construct
  source 1..117: mol_type = other DNA
acaatcgacccaaaatccatcaccacaaactggtccatgatgaatcagcctcctagcttcgagcacatcttcgggactgattggctgggcagggacatgttcattcggacactcaag

SEQ ID NO: 47472 - DNA, 90 bp, synthetic construct
  source 1..90: mol_type = other DNA
accttcctgggctttggcctgagccctcacgagcccgctatcgggattatcctctctgagtccatgaagtacctcgcaactggtaactgg

SEQ ID NO: 47473 - DNA, 120 bp, synthetic construct
  source 1..120: mol_type = other DNA
tttattaatagcggcgatattaccacaaatttccaagcgatgaacaagccaccttcctttgagcacttcttcggaaccgactggatgggccgggacatgttcactaggacactgaagggg

SEQ ID NO: 47474 - DNA, 90 bp, synthetic construct
  source 1..90: mol_type = other DNA
accttcctgggattcgggttatcgcctcatgagcctgccatcgggatcattctgtctgagtccatgaagtacttagctaccgggaactgg

SEQ ID NO: 47475 - DNA, 66 bp, synthetic construct
  source 1..66: mol_type = other DNA
ctgaagaatcccagcctcgggttcaacattatcaccgccggctccacaatcattatcctgcaagcc

SEQ ID NO: 47476 - DNA, 96 bp, synthetic construct
  source 1..96: mol_type = other DNA
ctgtttacctccgtgatccagacactgatgttcaccggccaggcaaccctcgcctacgggatataccagttgctagctatcctccaaccgcttagc

SEQ ID NO: 47477 - DNA, 39 bp, synthetic construct
  source 1..39: mol_type = other DNA
caatatgaatacatgatcaccgtgctgcacaagcttcag

SEQ ID NO: 47478 - DNA, 114 bp, synthetic construct
  source 1..114: mol_type = other DNA
tttatccgcgatatccccacaagtttcgtgaatgctaatcagatgccttccctcgagcacctgttcgggaccgactggatgggccgcgacatgttccaacgaacggttgctggc

SEQ ID NO: 47479 - DNA, 96 bp, synthetic construct
  source 1..96: mol_type = other DNA
attaccttcctgggcttcggactccctccacacgagcctgccatcggcgtgatcctggctgaatctatgcactacctgagctccggctattggtgg

SEQ ID NO: 47480 - DNA, 69 bp, synthetic construct
  source 1..69: mol_type = other DNA
ctgaagaccgggtccatgaatatcgggaacatcattagttatcaagtaaataacggacctctggctttc

SEQ ID NO: 47481 - DNA, 63 bp, synthetic construct
  source 1..63: mol_type = other DNA
gagatgggcatcctgccacatattttcgtgaacttcttcttgagtcttcaacacttaacggac

SEQ ID NO: 47482 - DNA, 51 bp, synthetic construct
  source 1..51: mol_type = other DNA
gctgatctcggcaacgctataactaatatgtacgacgccgtgttcgtgtat

SEQ ID NO: 47483 - DNA, 39 bp, synthetic construct
  source 1..39: mol_type = other DNA
aagaccaacacaaagctgatcactaaggacctgagcaaa

SEQ ID NO: 47484 - DNA, 123 bp, synthetic construct
  source 1..123: mol_type = other DNA
cttgaggtgtcactaactgacaaacacaacactccgctgaccggaaagaacgtgaccatcgagattaacggcgtcccttactcccgcaagaccgacgacaacggcatcgccggactgaacatc

SEQ ID NO: 47485 - DNA, 210 bp, synthetic construct
  source 1..210: mol_type = other DNA
accgcccactgcatggtctatgtcaacgccaaagtcgccgttgatgacctcaatatgaactatcacgacggaagccggtttaccgcaaccctgaccgacgctgaggacaaggctctgcccaatactaacgtgacattcaatatcaactccgtggattacattaggacaactaacaacgacggcgtggccgggctgaacatcaaccttaac

SEQ ID NO: 47486 - DNA, 252 bp, synthetic construct
  source 1..252: mol_type = other DNA
ggggactataagatatctaccaaagtggccgacgtaaacatcgtaaagaatattcatattaataaggcagctactcggatggaaggcaccgatatcgtgaaaacagccagtcagtcctctgtctatcaatgtgccgtttatgattctagcaataatcgcgttaaaggggacgttgacataactgtcaatggaaagacctactcccggaacatcggcgatgacggtttggctcggctgaacatcaatctgggt

SEQ ID NO: 47487 - DNA, 51 bp, synthetic construct
  source 1..51: mol_type = other DNA
ccatctaatgtcgtgaataggatcaccgtaaatgatgaccctgcccccgtg

SEQ ID NO: 47488 - DNA, 69 bp, synthetic construct
  source 1..69: mol_type = other DNA
ctgaagacagggtccatgaacatcggagacatcattagctaccaggccaccaatggcccactgatcttc

SEQ ID NO: 47489 - DNA, 114 bp, synthetic construct
  source 1..114: mol_type = other DNA
attgacccatcctctataaccaccgactggagcgtgatgaacaagccaccaagtctggagcacctgttcggcaccgactggatgggcagggatatgttcactcggactctgaaa

SEQ ID NO: 47490 - DNA, 90 bp, synthetic construct
  source 1..90: mol_type = other DNA
acattcctgggcttcggactctctcctcatgagcctgccattgggatcatcctgtccgaatccatgaagtacctggctaccggcaattgg

SEQ ID NO: 47491 - DNA, 33 bp, synthetic construct
  source 1..33: mol_type = other DNA
tttaacctcaacgtgcccaatatctaccctttc

SEQ ID NO: 47492 - DNA, 36 bp, synthetic construct
  source 1..36: mol_type = other DNA
gtgcagggctccgacgtgacagtcagccacgatgct

SEQ ID NO: 47493 - DNA, 33 bp, synthetic construct
  source 1..33: mol_type = other DNA
accgccttcctggacgctatctcggatgtcgac

SEQ ID NO: 47494 - DNA, 63 bp, synthetic construct
  source 1..63: mol_type = other DNA
ctgacagggacgatggacatcagcgggatcattgcataccaggccgctaacggacctcttgtt

SEQ ID NO: 47495 - DNA, 36 bp, synthetic construct
  source 1..36: mol_type = other DNA
taccagtacatgctgaatagcctgaacaccctcaac

SEQ ID NO: 47496 - DNA, 63 bp, synthetic construct
  source 1..63: mol_type = other DNA
ctgaccggcacaatggacatttctggaataatcgcctaccaagctgcaaacggtcctttggtc

SEQ ID NO: 47497 - DNA, 57 bp, synthetic construct
  source 1..57: mol_type = other DNA
aacgagatcttcgtgctgatgaagatccgcgagtccctcgaccttgtcgtgctgtat

SEQ ID NO: 47498 - DNA, 30 bp, synthetic construct
  source 1..30: mol_type = other DNA
atcgaagagctgggcaccaaggggattgtc

SEQ ID NO: 47499 - DNA, 51 bp, synthetic construct
  source 1..51: mol_type = other DNA
atttacaacgccttctcaatcctcgacatggagccatctgtatttgtcatc

SEQ ID NO: 47500 - DNA, 42 bp, synthetic construct
  source 1..42: mol_type = other DNA
agagtgtttttatctgatgtgaacctcgacctttcctttgag

SEQ ID NO: 47501 - DNA, 51 bp, synthetic construct
  source 1..51: mol_type = other DNA
ggccagtctctggaccagttctccctcactgagaacttttcctttaccggt

SEQ ID NO: 47502 - DNA, 33 bp, synthetic construct
  source 1..33: mol_type = other DNA
agcggcacttaccaagctggactgatggttaac

SEQ ID NO: 47503 - DNA, 66 bp, synthetic construct
  source 1..66: mol_type = other DNA
atcaacctatacgggctaagcttcgtcgacaacctcgtaaatggtggctacgaggtgctcaacaat

SEQ ID NO: 47504 - DNA, 36 bp, synthetic construct
  source 1..36: mol_type = other DNA
atcacaggccctgagggtacctttttctcgcaactt

SEQ ID NO: 47505 - DNA, 30 bp, synthetic construct
  source 1..30: mol_type = other DNA
ggcatcatcacccctacaagctcacctcag

SEQ ID NO: 47506 - DNA, 36 bp, synthetic construct
  source 1..36: mol_type = other DNA
taccagtatatgctcaacgcattaaattcgcgtaat

SEQ ID NO: 47507 - DNA, 72 bp, synthetic construct
  source 1..72: mol_type = other DNA
ctgaagacaggcagcatgaacatcggcaatattatcgggtaccagtccaccaacggacctttcgtctttctt

SEQ ID NO: 47508 - DNA, 48 bp, synthetic construct
  source 1..48: mol_type = other DNA
accggcggaaacaatttatctggtatcatcattgacctgtccttcgag

SEQ ID NO: 47509 - DNA, 93 bp, synthetic construct
  source 1..93: mol_type = other DNA
ctcttatccaccgcaatgcagaccctgctgtactccggccaacaagtaatcgcttacgagatatatcagctcctagtgttcatttcacaaccc

SEQ ID NO: 47510 - DNA, 39 bp, synthetic construct
  source 1..39: mol_type = other DNA
caatacgaatacatgatcaacgctctgcataccttggcc

SEQ ID NO: 47511 - DNA, 72 bp, synthetic construct
  source 1..72: mol_type = other DNA
ctgaagaccaacacaatgaatattggcggaatcatcagctaccagtccgtgaacggagcgagtgttgtgttg

SEQ ID NO: 47512 - DNA, 36 bp, synthetic construct
  source 1..36: mol_type = other DNA
acaatcctgagcggcacggtagccgttgccgcttac

SEQ ID NO: 47513 - DNA, 63 bp, synthetic construct
  source 1..63: mol_type = other DNA
agcctgagctacatcttttcctactccgcggacagtgtcatcctgggccccaagattgtggaa

SEQ ID NO: 47514 - DNA, 54 bp, synthetic construct
  source 1..54: mol_type = other DNA
caattcacccgccaagagaacattattctgaaacacaagtttggggtagtagtc

SEQ ID NO: 47515 - DNA, 69 bp, synthetic construct
  source 1..69: mol_type = other DNA
gtgaccggcagcatgaacatcggcgagatcattgcgtaccagtcggttcacgggagtctgctagtatac

SEQ ID NO: 47516 - DNA, 63 bp, synthetic construct
  source 1..63: mol_type = other DNA
ctgccagagtacctgatggagccaaacggcaatgtgcccgacatcctcatgaaggtcttctcc

SEQ ID NO: 47517 - DNA, 69 bp, synthetic construct
  source 1..69: mol_type = other DNA
ctgaagaccgggagcatgaatatcggcgagattatcagctaccaagcagttaacggacctctcgctttt

SEQ ID NO: 47518 - DNA, 33 bp, synthetic construct
  source 1..33: mol_type = other DNA
ttcaacctgaatgttggtaacatctacccattt

SEQ ID NO: 47519 - DNA, 60 bp, synthetic construct
  source 1..60: mol_type = other DNA
gcctttggcgaacacttcacaaccagcctgatggacggcggatacgaagttatgaacggg

SEQ ID NO: 47520 - DNA, 33 bp, synthetic construct
  source 1..33: mol_type = other DNA
ttcaacggcgccgaaggcacaagccactttagt

SEQ ID NO: 47521 - DNA, 36 bp, synthetic construct
  source 1..36: mol_type = other DNA
ttcggactaactgtaaccagcagcaccggaggggtg

SEQ ID NO: 47522 - DNA, 66 bp, synthetic construct
  source 1..66: mol_type = other DNA
ctccctgagttcctgatgaaccccaacggcaatgtgccagacatcctgacctttgtattctctaaa

SEQ ID NO: 47523 - DNA, 63 bp, synthetic construct
  source 1..63: mol_type = other DNA
cagacccacaccatgatcatcagcgacatcattacataccagtccatcaacggacctctcatc

SEQ ID NO: 47524 - DNA, 33 bp, synthetic construct
  source 1..33: mol_type = other DNA
ttcgctgtcgccgtacctggctctgttgggata

SEQ ID NO: 47525 - DNA, 90 bp, synthetic construct
  source 1..90: mol_type = other DNA
attctcaatagcatgctgaccgtgctgatgtactctgctcaaaacgaagccgcactggccttataccaaataatgatgatcctgaactcc

SEQ ID NO: 47526 - DNA, 33 bp, synthetic construct
  source 1..33: mol_type = other DNA
ctgttcaacctcaatgtcggcaacatctacccc

SEQ ID NO: 47527 - DNA, 66 bp, synthetic construct
  source 1..66: mol_type = other DNA
ctcaagaccggctctatgaatattagtagtatcatcgcctaccaaagcgttaacggccctctgatt

SEQ ID NO: 47528 - DNA, 42 bp, synthetic construct
  source 1..42: mol_type = other DNA
caatacgaatatatgatcaacgtgctgacgtttttccattca

SEQ ID NO: 47529 - DNA, 114 bp, synthetic construct
  source 1..114: mol_type = other DNA
ttcatgcgggacatccccacatctttcataagcgccaaccagatgccgagcctggagcacatattcgggaccgactggatgggcagggatatgttccaacgcactattgctggc

SEQ ID NO: 47530 - DNA, 93 bp, synthetic construct
  source 1..93: mol_type = other DNA
acctttctgggcttcgggcttccgccacacgagcccgcgattggagtgatcctcgccgaatccatgcactacttgtcctctggttactggtgg

SEQ ID NO: 47531 - DNA, 114 bp, synthetic construct
  source 1..114: mol_type = other DNA
ttcattaaagacctgcctacccattttatcaacgccaaccaaatgcccagttttgagcaccctttcggcaccgactggatgggacgcgacatgtttcaacgcacgatcgctggc

SEQ ID NO: 47532 - DNA, 93 bp, synthetic construct
  source 1..93: mol_type = other DNA
accttcctggggttcggcctgcctccgcacgaaccggcaattggagtgatcctttctgagagcatgaactacctggcttccggttcttggtgg

SEQ ID NO: 47533 - DNA, 66 bp, synthetic construct
  source 1..66: mol_type = other DNA
cagctggctttcggcgatatatccgcgggattgtccgattcctacgaatccctgaacacccttggc

SEQ ID NO: 47534 - DNA, 36 bp, synthetic construct
  source 1..36: mol_type = other DNA
accgacggcagcgccatcaacatacaacaaatctct

SEQ ID NO: 47535 - DNA, 33 bp, synthetic construct
  source 1..33: mol_type = other DNA
ttcggccttgcacggacaagcaccaacgtagac

SEQ ID NO: 47536 - DNA, 39 bp, synthetic construct
  source 1..39: mol_type = other DNA
atcgaaatctaccacaacgagaccctgacgattcagagt

SEQ ID NO: 47537 - DNA, 114 bp, synthetic construct
  source 1..114: mol_type = other DNA
attggagaaattcccacgtcctttacctctgcaaatcagatgccgtcgcttcaacatcttttcgggactgattggatgggtcgcgatatgtttctccgaactattatcgggagc

SEQ ID NO: 47538 - DNA, 96 bp, synthetic construct
  source 1..96: mol_type = other DNA
attacctttctgggcttcgggctgcctccacacgagcctgccatcggcgtgatccttagtgaatcaatgcactacctgtcctctggatactggtgg

SEQ ID NO: 47539 - DNA, 114 bp, synthetic construct
  source 1..114: mol_type = other DNA
tttatccgggacattccctctaacttcgcctctgctaaccagatgccaagcctggagcacctcttcgggaccgattggatgggccgggacatgtttcaacgaacgatcgctggt

SEQ ID NO: 47540 - DNA, 93 bp, synthetic construct
  source 1..93: mol_type = other DNA
accttcctcggctttggactgcctccgcatgagcctgcaatcggagtgattctttccgaaagcatgcactatctgagctcagggtactggtgg

SEQ ID NO: 47541 - DNA, 36 bp, synthetic construct
  source 1..36: mol_type = other DNA
tacaagtacatgctgaacgccctccatgagcttcac

SEQ ID NO: 47542 - DNA, 36 bp, synthetic construct
  source 1..36: mol_type = other DNA
ctgtccgctggcttcgcctttagctaccagatgttc

SEQ ID NO: 47543 - DNA, 66 bp, synthetic construct
  source 1..66: mol_type = other DNA
gagttcggcatcctgcctagcacctttttaacggcatatctgtccttgcaaaatctggctaacaat

SEQ ID NO: 47544 - DNA, 51 bp, synthetic construct
  source 1..51: mol_type = other DNA
gacctgggtaacaccatcaccgacatttatgatgatgtcttcatcgctttt

SEQ ID NO: 47545 - DNA, 42 bp, synthetic construct
  source 1..42: mol_type = other DNA
cccaacagcttcaaatgggtcctgagcgagtacaatggtatc

SEQ ID NO: 47546 - DNA, 114 bp, synthetic construct
  source 1..114: mol_type = other DNA
tttatcagagatatccccacatcattcaagtctgcaaaccagatgccttctctcgagcacctgttcgggaccgactggatgggcagggacatgtttcaacgaaccattgctgga

SEQ ID NO: 47547 - DNA, 93 bp, synthetic construct
  source 1..93: mol_type = other DNA
acctttctgggattcggtctgccgccccatgagcctgccatcggagtgattctggccgaaagcatgcactatctgtcttccggatattggtgg

SEQ ID NO: 47548 - DNA, 96 bp, synthetic construct
  source 1..96: mol_type = other DNA
ctgctcattaacgctgtaattcagacgcttatgctgtctggacaacaaatactcgcctacggcttataccaatttatgctggtgctgagccaaccc

SEQ ID NO: 47549 - DNA, 111 bp, synthetic construct
  source 1..111: mol_type = other DNA
atcggggatattccaacaagcttcgcctccgccaatcaaatgccatccttccaacacttatttgggaccgactggatgggtcgcgacatgttcctgcgcacgattgccgga

SEQ ID NO: 47550 - DNA, 96 bp, synthetic construct
  source 1..96: mol_type = other DNA
atcaccttcctgggcttcggactgccacctcacgaacctgctattggcgttatcctgtccgagtcgatgcaatatctttcaagtggatactggtgg

SEQ ID NO: 47551 - DNA, 111 bp, synthetic construct
  source 1..111: mol_type = other DNA
atcagagacattccgacttcgttcataagcgccaaccagatgccttctttcgagcatattttcgggaccgactggatgggcagggacatgttccaacgaactgttgccggg

SEQ ID NO: 47552 - DNA, 93 bp, synthetic construct
  source 1..93: mol_type = other DNA
accttccttggatttggcctgccaccacacgagccagccatcggcgtcatcctatccgaatccatgcactacctgtcctctggatattactgg

SEQ ID NO: 47553 - DNA, 42 bp, synthetic construct
  source 1..42: mol_type = other DNA
atgagatgtatcaaactcgagaattggttcatgagctctacc

SEQ ID NO: 47554 - DNA, 90 bp, synthetic construct
  source 1..90: mol_type = other DNA
gaggccaagactcccctggacgccatcgtcatggtttccaatgctttcacctccaatggatacgtggtgctcggcaacacagatgttggc

SEQ ID NO: 47555 - DNA, 111 bp, synthetic construct
  source 1..111: mol_type = other DNA
atgcgggacatatccacttcttttgcctctgccaatcagatgccttcactggagcacattttcggaacagattggatgggacgggacatgtttcaacgcacaattgccggt

SEQ ID NO: 47556 - DNA, 93 bp, synthetic construct
  source 1..93: mol_type = other DNA
ataaccttcctcgggtttggcctgccgccccatgagcctgcgatcggagtgattttgtccgagtctatgcattacctgtcctctggcttttgg

SEQ ID NO: 47557 - DNA, 57 bp, synthetic construct
  source 1..57: mol_type = other DNA
attagcgagctgcagatcgtcaactactctgactttttggttttcatatctaccctg

SEQ ID NO: 47558 - DNA, 144 bp, synthetic construct
  source 1..144: mol_type = other DNA
ggggatacagtgaccattggctacctgccaagtgaccacgacgctgccctcttcgtggccgactcgcaaggcaagtttcaggaaaatgggatcaatgctaagttagtgatgtttaacaacggcggcgatctgatgaccgctatg

SEQ ID NO: 47559 - DNA, 126 bp, synthetic construct
  source 1..126: mol_type = other DNA
gctaagggcgtccctgtgaaggtcatctccgcggctcagactgaggggagcggaatagtggtcgcatctgattccggcattgacgacatcaaggatctggctggcaagaagatcgctacacctggg

SEQ ID NO: 47560 - DNA, 42 bp, synthetic construct
  source 1..42: mol_type = other DNA
ccaaactcgttccaatgggtgctgtcaaattacggtggagtt

SEQ ID NO: 47561 - DNA, 39 bp, synthetic construct
  source 1..39: mol_type = other DNA
acccacacataccttggcgatggatgcgaggtcataatc

SEQ ID NO: 47562 - DNA, 45 bp, synthetic construct
  source 1..45: mol_type = other DNA
aataaccccacactgggctacaacatcattaccgtcggttcaatc

SEQ ID NO: 47563 - DNA, 42 bp, synthetic construct
  source 1..42: mol_type = other DNA
ggcggcaactttatcaatgagattaatttcaacctgtccttt

SEQ ID NO: 47564 - DNA, 120 bp, synthetic construct
  source 1..120: mol_type = other DNA
ctgatcaatagtacagatatcacaaccaacttccaagccatgaatcaggccccctccctcgagcacctgtttggaactgattggatgggcagggacatgttcacccggaccctgaaaggc

SEQ ID NO: 47565 - DNA, 90 bp, synthetic construct
  source 1..90: mol_type = other DNA
accttcctcggcttcggcctgagcccacatgagcctgccatcggaatcattctgtctgaatccatgaagtacctagccaccggaaactgg

SEQ ID NO: 47566 - DNA, 93 bp, synthetic construct
  source 1..93: mol_type = other DNA
ctgctgactagcgtgatccagacactcatgttcaccgggcagtccaccctcgcctacggcatatatcaattattgggcattctgtctcaacct

SEQ ID NO: 47567 - DNA, 36 bp, synthetic construct
  source 1..36: mol_type = other DNA
gggtctcagtccggcatctccggaattagcagcaat

SEQ ID NO: 47568 - DNA, 30 bp, synthetic construct
  source 1..30: mol_type = other DNA
gccgtcagcgttccgaattcattcggagtg

SEQ ID NO: 47569 - DNA, 96 bp, synthetic construct
  source 1..96: mol_type = other DNA
ctgatcctgtcttccttcatgacactcctgatgtacagtgctcagactggcattgccaccgtgatgtaccagaccatgatgttgattagtaacccc

SEQ ID NO: 47570 - DNA, 114 bp, synthetic construct
  source 1..114: mol_type = other DNA
ttcatcggcgagattcccacatcattcacaagcgctaaccagatgcctagcttcgctcaccttttcgggaccgattggatgggacgggacatgtttcaacggacggtagcaggt

SEQ ID NO: 47571 - DNA, 96 bp, synthetic construct
  source 1..96: mol_type = other DNA
atcaccttcctgggcttcggcctgccgcctcacgaacctgccatcggagtgattctgtctgagtccatgcactacttaagctcaggctactggtgg

SEQ ID NO: 47572 - DNA, 39 bp, synthetic construct
  source 1..39: mol_type = other DNA
gataagatcatccaccctgagctgattagagtgcctgac

SEQ ID NO: 47573 - DNA, 117 bp, synthetic construct
  source 1..117: mol_type = other DNA
atcgacagcaaggagattacaactaattttctgattatcaaccagccaccatccttcgagcacctcttcggcaccgactggctgggccgcgatatgtttacgcggaccatcaaggga

SEQ ID NO: 47574 - DNA, 90 bp, synthetic construct
  source 1..90: mol_type = other DNA
accttcctgggctttggtctctcaccgcacgaacccgcaatcggaattatcctggccgagtccatgaagtaccttgcgactgggaattgg

SEQ ID NO: 47575 - DNA, 33 bp, synthetic construct
  source 1..33: mol_type = other DNA
gctcaggcctacggcatcgacttgggtgcaagc

SEQ ID NO: 47576 - DNA, 114 bp, synthetic construct
  source 1..114: mol_type = other DNA
ttcatcaaggatattcctacctccttcatcgatgccaaccaaatgcctagcttcgagcacctgttcgggactgactggatgggccgggacatgtttcaaaggacgattgctgga

SEQ ID NO: 47577 - DNA, 93 bp, synthetic construct
  source 1..93: mol_type = other DNA
accttcctcggctttgggcttcctccccacgaacctgcaatcggcgtgattctggccgagtctatgcaatacctgtcttccggatattggtgg

SEQ ID NO: 47578 - DNA, 114 bp, synthetic construct
  source 1..114: mol_type = other DNA
atgatcgacgccaacttacccactgacttctccatcaagatgaggccacctagcttcgaccatatcttcgggaccgactggatgggccgggacatgttcattcgcactctcaaa

SEQ ID NO: 47579 - DNA, 90 bp, synthetic construct
  source 1..90: mol_type = other DNA
accttcctgggattcggcctgtctccacatgagcctgccatcgggatcatactgtccgagtccatgacatacctggctatgggtgcttgg

SEQ ID NO: 47580 - DNA, 117 bp, synthetic construct
  source 1..117: mol_type = other DNA
atcaacgctggcgatattactaccaattttcaagcaatgaataagccacctagcttcgagcacctgtttggcaccgactggatgggacgggacatgttcacaaggacactgaagggt

SEQ ID NO: 47581 - DNA, 90 bp, synthetic construct
  source 1..90: mol_type = other DNA
accttcctcggcttcggactgagccctcacgagcccgctatcgggattatcctgtctgagtccatgaagtacctagcaacagggaattgg

SEQ ID NO: 47582 - DNA, 114 bp, synthetic construct
  source 1..114: mol_type = other DNA
ttcatccgggatatccctacgaattttgtgaacgccaatcagatgcctagcctggagcacctgtttgggactgattggatgggccgcgacatgttccaacggacaatttctggc

SEQ ID NO: 47583 - DNA, 96 bp, synthetic construct
  source 1..96: mol_type = other DNA
atcaccttcctggggttcggactcccacctcacgagcccgctattggcgtgatcctggctgaatctatgaactacctgtcttccggctattggtgg

SEQ ID NO: 47584 - DNA, 30 bp, synthetic construct
  source 1..30: mol_type = other DNA
atcattggcgctgagacacacaccactctc

SEQ ID NO: 47585 - DNA, 114 bp, synthetic construct
  source 1..114: mol_type = other DNA
ttcattcgcgacatcccgacaaacttcgcaaacgcgatgcagatgccatctctggaacacctgttcggcaccgactggatgggacgggatatgtttcaacggaccatcgctgga

SEQ ID NO: 47586 - DNA, 90 bp, synthetic construct
  source 1..90: mol_type = other DNA
accttcctgggctttggcctgcctccgcacgagccagccattggagtgatcctcgctgagtccatgcactacctttctagcggatgttgg

SEQ ID NO: 47587 - DNA, 114 bp, synthetic construct
  source 1..114: mol_type = other DNA
tttataccggatattccgacttccttcgtgaatgccaaccagatgccatccctggagcacatcttcgggaccgactggatgggacgggacatgttccaacgcaccattgctggc

SEQ ID NO: 47588 - DNA, 96 bp, synthetic construct
  source 1..96: mol_type = other DNA
atcacctttctggggttcggccttcctccacacgagcctgccatcggagtgattctgagcgagtctatgcactaccttagctctggctattggtgg

SEQ ID NO: 47589 - DNA, 48 bp, synthetic construct
  source 1..48: mol_type = other DNA
aagaatcccacactgggctggaacctgattacgtttggaagtattatc

SEQ ID NO: 47590 - DNA, 72 bp, synthetic construct
  source 1..72: mol_type = other DNA
gacaacaatacactcggatacaacatcatcaccttcgggtccattattatcataattcaagcggcggtgcca

SEQ ID NO: 47591 - DNA, 114 bp, synthetic construct
  source 1..114: mol_type = other DNA
ttcatcaaagacattccttctaattttgcctctgcaaaccaaatgccctccttacaacacttgttcgggaccgactggatgggacgggacatgtttcaaaggactatcgctgga

SEQ ID NO: 47592 - DNA, 96 bp, synthetic construct
  source 1..96: mol_type = other DNA
atcaccttcctggggttcggcctgcctccacatgaaccagccattggcgtgatcctgtccgaatctatgcattacctctctagcggatattggtgg

SEQ ID NO: 47593 - DNA, 111 bp, synthetic construct
  source 1..111: mol_type = other DNA
atccgcgacatccctaccaactttgctaatgccagccagatgccatccctggaacacctgttcggaacagattggatgggacgggacatgtttcaacggacgattgctggt

SEQ ID NO: 47594 - DNA, 90 bp, synthetic construct
  source 1..90: mol_type = other DNA
acctttctggggttcggcctgccgccacacgagcctgccatcggcgtgattcttgctgagtccatgcattacctgtcttccggatattgg

SEQ ID NO: 47595 - DNA, 36 bp, synthetic construct
  source 1..36: mol_type = other DNA
aactttttcaatggcatcaacatcgacctgagcatc

SEQ ID NO: 47596 - DNA, 117 bp, synthetic construct
  source 1..117: mol_type = other DNA
ttcgttcgcgacatccccacttcgttcatttctgctaaccagatgccatccctggagcacatctttggaaccgactggatgggccgggatatgtttcaacgtataattgcgaccggg

SEQ ID NO: 47597 - DNA, 96 bp, synthetic construct
  source 1..96: mol_type = other DNA
atcaccttcctcggctttggccttcctccacacgagcctgccatcggcgtcattttatctgagtctatgaactacctgtctagcggatactggtgg

SEQ ID NO: 47598 - DNA, 90 bp, synthetic construct
  source 1..90: mol_type = other DNA
atggctcacgacgtgtacatctgttatgacgagaaggatgtcgagaccgccaaggatgtttgcgaagtgctcgagaacgatggactggaa

SEQ ID NO: 47599 - DNA, 57 bp, synthetic construct
  source 1..57: mol_type = other DNA
aaccgggacgccggagtcaaagacatcgtcaccgagattatggatgctatcaaacgc

SEQ ID NO: 47600 - DNA, 201 bp, synthetic construct
  source 1..201: mol_type = other DNA
gtcatggttctcctgtactccaaaaactcaaaaaatagtaattatgtgaacaacgaagtcaacagggctttctcgcaaaagaagccaattctagtcttccaaatcgatgactctaagcttgaaggcagccttgagtttttcttgcgcaataaaccttggataaaggcctatccgaacccagaggacaagtttgacgaactg

SEQ ID NO: 47601 - DNA, 96 bp, synthetic construct
  source 1..96: mol_type = other DNA
gaccccagcatcaactccctgttcgatagcctgtggttcgtcctgtctaccattacaactgtcggttacggagacgtgttacctcaaagcggccct

SEQ ID NO: 47602 - DNA, 33 bp, synthetic construct
  source 1..33: mol_type = other DNA
cctcgcctcttcgcacccgagggggtcgacgcg

SEQ ID NO: 47603 - DNA, 96 bp, synthetic construct
  source 1..96: mol_type = other DNA
ttcgacccttcaataaattcgctgtttgattctctatggttcgtcttatcgacaatcactaccgtcggatacggcgatatcctgccccaatctggc

SEQ ID NO: 47604 - DNA, 30 bp, synthetic construct
  source 1..30: mol_type = other DNA
acaaccgtgatgggcagcattatcaagccc

SEQ ID NO: 47605 - DNA, 66 bp, synthetic construct
  source 1..66: mol_type = other DNA
ctgaccgacttcttctttaacggggctagctactatgccatcggaatggactccggcttcggaatt

SEQ ID NO: 47606 - DNA, 36 bp, synthetic construct
  source 1..36: mol_type = other DNA
gagaccggcatccccgacctgctgtttagcttccag

SEQ ID NO: 47607 - DNA, 117 bp, synthetic construct
  source 1..117: mol_type = other DNA
tttatcaaggagatccctacctcattcgtgaatgctaaccagctgccctctctcgagcacctcttcgggacagattggatgggacgggacatgtttcaaagaaccatcgcgggtatt

SEQ ID NO: 47608 - DNA, 93 bp, synthetic construct
  source 1..93: mol_type = other DNA
ataacattcctcggcttcggactgccgccgcacgagcctgcaataggagtcatacttgccgaaagcatgaactacctctcctctggatattgg

SEQ ID NO: 47609 - DNA, 114 bp, synthetic construct
  source 1..114: mol_type = other DNA
ttcgtcggatcgatcgagacaaacttcgtgaatgcaaaccagctgccgagctttgagcacctgtttggcactgactggatggggcgtgacatgttctcacgtactgtggccgga

SEQ ID NO: 47610 - DNA, 96 bp, synthetic construct
  source 1..96: mol_type = other DNA
atcaccttcctgggcttcgggctgcctccacacgacccagccatcggcgttattctgagcgaatcaatgaactacctgtcttccggatactggtgg

SEQ ID NO: 47611 - DNA, 30 bp, synthetic construct
  source 1..30: mol_type = other DNA
accacagtgatgggcagcatcattgaaccc

SEQ ID NO: 47612 - DNA, 60 bp, synthetic construct
  source 1..60: mol_type = other DNA
ccagcgcaacctctaagcttcaacatcttcaccgttggcggctttctgctcatgctgcag

SEQ ID NO: 47613 - DNA, 30 bp, synthetic construct
  source 1..30: mol_type = other DNA
gggacaccaatgatcatgggctggaacgac

SEQ ID NO: 47614 - DNA, 48 bp, synthetic construct
  source 1..48: mol_type = other DNA
ctgaagaatcccacactcggctttaacttcataactgcgggagctatt

SEQ ID NO: 47615 - DNA, 30 bp, synthetic construct
  source 1..30: mol_type = other DNA
gctgcctccgtgcctaactcaatctctgtg

SEQ ID NO: 47616 - DNA, 96 bp, synthetic construct
  source 1..96: mol_type = other DNA
ccactgctaattagttcgcttatgacaatcctgatgtacgctagccagaaccaggtcgccaccgtagtgtatcaactcatgatcattatctccaat

SEQ ID NO: 47617 - DNA, 39 bp, synthetic construct
  source 1..39: mol_type = other DNA
ggcatcagcgtatcagccatctcaagccaattgagcaac

SEQ ID NO: 47618 - DNA, 78 bp, synthetic construct
  source 1..78: mol_type = other DNA
atgatgtctaccgattccgagaccctcgcaaccgtctaccggtggcaggtcggctccgtggctgaaatcacttggcca

SEQ ID NO: 47619 - DNA, 48 bp, synthetic construct
  source 1..48: mol_type = other DNA
accggcagttcttccgtcaacctgaacaatctggacgtcagttatgag

SEQ ID NO: 47620 - DNA, 39 bp, synthetic construct
  source 1..39: mol_type = other DNA
tacgtggtcaacttcaacaatatcgacctgagcttcgag

SEQ ID NO: 47621 - DNA, 111 bp, synthetic construct
  source 1..111: mol_type = other DNA
attaacgcaaatctgcccactgattttagcataaagatgcaaggtccgagctttgagcacatcttcgggacggattggatgggaagagatatgttcattagaacactcaaa

SEQ ID NO: 47622 - DNA, 90 bp, synthetic construct
  source 1..90: mol_type = other DNA
accttcctgggcttcgggctgtctccacatgagcctgccattggaattatcttatccgagtctatgtcctacctggctatgggtgcttgg

SEQ ID NO: 47623 - DNA, 57 bp, synthetic construct
  source 1..57: mol_type = other DNA
gccgtgcccgaggtcgcgttttcaagttacggcgactatatctccttcttctctgcc

SEQ ID NO: 47624 - DNA, 66 bp, synthetic construct
  source 1..66: mol_type = other DNA
tggaagaaccccacactcggattcaatgtgatcacggttgggtcgatcggggtcattctgcaagcc

SEQ ID NO: 47625 - DNA, 69 bp, synthetic construct
  source 1..69: mol_type = other DNA
gccggcatttacggggatgctttcatcaccaacatgagcgctacatacgaggccatgaatatggctgac

SEQ ID NO: 47626 - DNA, 33 bp, synthetic construct
  source 1..33: mol_type = other DNA
cagggccagagccacggggttaaccggttgacg

SEQ ID NO: 47627 - DNA, 39 bp, synthetic construct
  source 1..39: mol_type = other DNA
ttcagcggcatacaacaaatagcgaccaacgctacaccc

SEQ ID NO: 47628 - DNA, 51 bp, synthetic construct
  source 1..51: mol_type = other DNA
ctcggcaaatttgacttctccctcatctttttcaagaccgatttcgccctc

SEQ ID NO: 47629 - DNA, 45 bp, synthetic construct
  source 1..45: mol_type = other DNA
ttcgactttcggatcttcacatttcgaaaaggctacagcggaaac

SEQ ID NO: 47630 - DNA, 33 bp, synthetic construct
  source 1..33: mol_type = other DNA
aaatacattcctcatagcatcgccatgaacaag

SEQ ID NO: 47631 - DNA, 30 bp, synthetic construct
  source 1..30: mol_type = other DNA
ggagttagcagtccccaagctatgggaggc

SEQ ID NO: 47632 - DNA, 96 bp, synthetic construct
  source 1..96: mol_type = other DNA
ctgctcctgaactccttgatccaaactcttatgtatagcggtcagcagttgatggcgtattctgtataccagttcatgatgcttctgagtcaaccc

SEQ ID NO: 47633 - DNA, 63 bp, synthetic construct
  source 1..63: mol_type = other DNA
ctgactggtacaatggacatcaacggaattatcagttatcaggccgcgcatggccctcttgtg

SEQ ID NO: 47634 - DNA, 39 bp, synthetic construct
  source 1..39: mol_type = other DNA
caatacgagtatatgctgaatagcctgaactccctcaac

SEQ ID NO: 47635 - DNA, 63 bp, synthetic construct
  source 1..63: mol_type = other DNA
ggcatttccctgatccaatttgactcgcatctctttggagacttctccgccctcgactttgat

SEQ ID NO: 47636 - DNA, 114 bp, synthetic construct
  source 1..114: mol_type = other DNA
attaacagcaatttaccgaccgattttaccatcaagatgcagcccccttccttcgcacacatctttggcaccgactggatgggcagggacatgttcgaacggactataaagggt

SEQ ID NO: 47637 - DNA, 90 bp, synthetic construct
  source 1..90: mol_type = other DNA
accttcctggggttcggactgtcccctcacgaacctgcaatcggcatcattctgtctgagagcatgaagtacctcgctatgggagcatgg

SEQ ID NO: 47638 - DNA, 54 bp, synthetic construct
  source 1..54: mol_type = other DNA
ctgagcccacctccaaccttcttccaccaatttggggcctttaagggaggttac

SEQ ID NO: 47639 - DNA, 75 bp, synthetic construct
  source 1..75: mol_type = other DNA
attaactaccaccgcctacaattaagcatcggcaatgtacaatgcagcacattcaacgtgcagtgttctatgttc

SEQ ID NO: 47640 - DNA, 48 bp, synthetic construct
  source 1..48: mol_type = other DNA
ctgcctcacgctaaccggctccttgccaccatccccttttggctgctg

SEQ ID NO: 47641 - DNA, 54 bp, synthetic construct
  source 1..54: mol_type = other DNA
acgggatcatccctcgttaacctgaataaccttgatctgtctagtgaaagctcg

SEQ ID NO: 47642 - DNA, 114 bp, synthetic construct
  source 1..114: mol_type = other DNA
atagacgccaacctgcccactgatttcacaatcaagatgcagccgccaagttttcaacacccgttcggcaccgactggatgggacgggacatgttcattcggaccatcaaaggc

SEQ ID NO: 47643 - DNA, 90 bp, synthetic construct
  source 1..90: mol_type = other DNA
acattcctgggcttcgggctctctcctcacgagcccgctatcggcatcattctgagcgagtccatgacctacttggctatgggagcatgg

SEQ ID NO: 47644 - DNA, 111 bp, synthetic construct
  source 1..111: mol_type = other DNA
attgacgcaaaccttcccactgactttacaatcaagattcagccgccatcatttgagcacatcttcggcacggattggatgggcagggacatgttcattcggactctcaaa

SEQ ID NO: 47645 - DNA, 90 bp, synthetic construct
  source 1..90: mol_type = other DNA
accttcctggggttcggcctgagccctcacgagcccgctattggcatcatcctgtctgagtccatgaagtacctcgctatgggagcttgg

SEQ ID NO: 47646 - DNA, 114 bp, synthetic construct
  source 1..114: mol_type = other DNA
atgattgacgctaacctgccaactgacttcgccatcaagatgaagccacctagcttcgagcacccatttgggaccgattggatgggccgggacatgttcatccggacactgaaa

SEQ ID NO: 47647 - DNA, 90 bp, synthetic construct
  source 1..90: mol_type = other DNA
acattcctgggctttgggctatccccccacgaaccggcaatcggaatcattctgtctgagtccatgacctacctggcaatgggtgcttgg

SEQ ID NO: 47648 - DNA, 36 bp, synthetic construct
  source 1..36: mol_type = other DNA
atgctgactcccaactggagcgctctatgggatgtc

SEQ ID NO: 47649 - DNA, 102 bp, synthetic construct
  source 1..102: mol_type = other DNA
tacatgtccgttacttcttcaatcccaatcactgagctgataagcgagggcacttccctgatcttcgtcgtccttcccgagatcttcgatgtgatgggcccc

SEQ ID NO: 47650 - DNA, 111 bp, synthetic construct
  source 1..111: mol_type = other DNA
atcgacgcaaacttgccaaccgatttcgcgatcaaaatgaagccaccgtcatttgagcacccctttggaactgactggatgggcagggatatgttcattagaacactcaag

SEQ ID NO: 47651 - DNA, 90 bp, synthetic construct
  source 1..90: mol_type = other DNA
acctttctgggcttcggcctgagccctcatgagcctgccatcggaatcattctctctgagtccatgacataccttgctatgggagcatgg

SEQ ID NO: 47652 - DNA, 114 bp, synthetic construct
  source 1..114: mol_type = other DNA
attaatgccaacctgcccaccgactttagcattaagatgcaggccccaagcctggctcatccattcgggaccgattggatgggccgggacatgttcatccgtacaatcaaaggc

SEQ ID NO: 47653 - DNA, 90 bp, synthetic construct
  source 1..90: mol_type = other DNA
accttcctgggcttcggactgagcccacacgagcctgccatcgggattatcctttctgaatcaatgagctacctcgctatgggagcttgg

SEQ ID NO: 47654 - DNA, 33 bp, synthetic construct
  source 1..33: mol_type = other DNA
agcatgttctccaagggcggcatggacccatcc

SEQ ID NO: 47655 - DNA, 54 bp, synthetic construct
  source 1..54: mol_type = other DNA
cggctcatcgtgtccgaccccttcactcttgtatctataggcaacctgcttacc

SEQ ID NO: 47656 - DNA, 117 bp, synthetic construct
  source 1..117: mol_type = other DNA
ggcctcggcgacgggcactacttcatgccgagtattccaagccaagtcatcagcgccaacctggactggtccatcttcggcggactgctgcggggatttggccaacttttttcaaat

SEQ ID NO: 47657 - DNA, 102 bp, synthetic construct
  source 1..102: mol_type = other DNA
ctgctgttgaattccctgattcaaaccttgatgtacagtggccagcagctcatggcattctctatatatcagttcatgatgctgctctcgcaaccagttccg

SEQ ID NO: 47658 - DNA, 72 bp, synthetic construct
  source 1..72: mol_type = other DNA
gttaatcccacacttggtttgaacctcatcaccatcggatcaatcgctgtgatcctccaagctgcgtttcct

SEQ ID NO: 47659 - DNA, 114 bp, synthetic construct
  source 1..114: mol_type = other DNA
ataaacgccaatctcccaaccgacttcactattaagatgcagccgccgagctttgagcacccattcgggacagactggatgggccgggacatgctgatccggactatcaaagga

SEQ ID NO: 47660 - DNA, 90 bp, synthetic construct
  source 1..90: mol_type = other DNA
acattcctggggttcggactgagccctcatgagcctgccattggcatcatcctctccgagtctatgacctacctggctatgggtgcttgg

SEQ ID NO: 47661 - DNA, 42 bp, synthetic construct
  source 1..42: mol_type = other DNA
aagaatcctacactcggcttcaacataatcacggccggtagc

SEQ ID NO: 47662 - DNA, 114 bp, synthetic construct
  source 1..114: mol_type = other DNA
atcgatgccaacctcccaaccgacttcactgctaggatgaagccaccgagcttcgagcacatattcggaacagactggatggggcgcgacatgttcattcggaccatcaaagga

SEQ ID NO: 47663 - DNA, 90 bp, synthetic construct
  source 1..90: mol_type = other DNA
accttcctgggcttcgggctgagcccacacgagcctgccattggaatcatcctgagcgagtcgatgtcgtatctcgctatgggagcttgg

SEQ ID NO: 47664 - DNA, 69 bp, synthetic construct
  source 1..69: mol_type = other DNA
ctgcccgtcattaatctggagttcatctttggacaagttgaaaaccagggtgccagcggtggaattttc

SEQ ID NO: 47665 - DNA, 102 bp, synthetic construct
  source 1..102: mol_type = other DNA
gtcgggtcttccatcaccatgcctatatctatactggaccctggacggcccctgccactgcacctgtacatattggcgactgaaggcatttcattgcccaac

SEQ ID NO: 47666 - DNA, 117 bp, synthetic construct
  source 1..117: mol_type = other DNA
atgattgacgctaacctgcccactgatttcaccatgaagatgcaggccccctctttttcacacccattcggaaccgactggatgggccgcgatatgttcattagaacaatcaagggc

SEQ ID NO: 47667 - DNA, 93 bp, synthetic construct
  source 1..93: mol_type = other DNA
accttcctggggttcggcctctctcctcatgagcctgccatcggaattatcctgagcgaatcaatgtcctacctggctatgggggcctggatg

SEQ ID NO: 47668 - DNA, 87 bp, synthetic construct
  source 1..87: mol_type = other DNA
gtcttcgataacatgcggacactggccaatgccgcccctattgacacggttcaagcggcaatttctgctctcccaccatctccttcg

SEQ ID NO: 47669 - DNA, 36 bp, synthetic construct
  source 1..36: mol_type = other DNA
accgtgaacgaggccgtatcctcgtcggtcaacacc

SEQ ID NO: 47670 - DNA, 48 bp, synthetic construct
  source 1..48: mol_type = other DNA
ggcatcgccgctctgctcaatcccgactggagcatgctgtggaacgtt

SEQ ID NO: 47671 - DNA, 105 bp, synthetic construct
  source 1..105: mol_type = other DNA
ggatacatgtctttcactagcggcacacccatggtggagctcgtctccgagggcaccgggcttgtgttcgtagtgttcccacggattttcaacatcatgggtcca

SEQ ID NO: 47672 - DNA, 117 bp, synthetic construct
  source 1..117: mol_type = other DNA
atgacaaacgctaacttgcctaccgacttctccatcaagatgcaggcccctagcctggtgcacccattcgggacagactggatgggacgggatatgtttacccggaccattaagggc

SEQ ID NO: 47673 - DNA, 90 bp, synthetic construct
  source 1..90: mol_type = other DNA
accttcctgggcttcggcctgagcccacatgagcctgccatcgggattatcctctctgaatcaatgtcctacctggctatgggagcttgg

SEQ ID NO: 47674 - DNA, 30 bp, synthetic construct
  source 1..30: mol_type = other DNA
ttctctgaccctgccgctgtgacaaggaac

SEQ ID NO: 47675 - DNA, 111 bp, synthetic construct
  source 1..111: mol_type = other DNA
ggcggtacagacctggcacatgtgatcttcggggctgggggtcccctcgagagctcccggggattcgattccgcctcaatgagcggtagtctgagtgacaacatcgggcca

SEQ ID NO: 47676 - DNA, 30 bp, synthetic construct
  source 1..30: mol_type = other DNA
atgaggagctacgctggaggcagtagaccg

SEQ ID NO: 47677 - DNA, 30 bp, synthetic construct
  source 1..30: mol_type = other DNA
aagtacttcgctagcgctggcgtatctcta

SEQ ID NO: 47678 - DNA, 114 bp, synthetic construct
  source 1..114: mol_type = other DNA
attgacgccaacctgccaacggatttctccatcaagatgcagccgccaagctttgcccacatattcggaactgattggatgggccgggacatgtttgttaggaccatcaaagga

SEQ ID NO: 47679 - DNA, 90 bp, synthetic construct
  source 1..90: mol_type = other DNA
acattcctgggcttcggcctgagcccacatgagcctgccatcgggatcattctctctgaatccatgacctacctggctatgggagcttgg

SEQ ID NO: 47680 - DNA, 105 bp, synthetic construct
  source 1..105: mol_type = other DNA
gccaactcctacactatccccaatcctgccgacacatgggacgctctggtggatttctactccaatggcgataccatgtctggcggcaaatccatgtggagctac

SEQ ID NO: 47681 - DNA, 69 bp, synthetic construct
  source 1..69: mol_type = other DNA
tacgcttctcctctcggcggaatcggattctacctgagcgagcaagctacggcggggttttggccaagc

SEQ ID NO: 47682 - DNA, 273 bp, synthetic construct
  source 1..273: mol_type = other DNA
gccttcgggctgaacgaaggtgtcgacctcaagggcggaaccatggtgaccgtcgagctgaaacagagcatgacagagtcccagattaccgaccttgtacaatccaacctcggcgtgtccgacgtcgagacaagtctgagcggcaatacagccaccatcacaatctctggtgacgtggaccaggcagagttcgaccaaaaatttagcaaccagttcaacatccttagtttccggagcgtcggggcacttctttcccaagccgcgatggatcaa

SEQ ID NO: 47683 - DNA, 30 bp, synthetic construct
  source 1..30: mol_type = other DNA
gtgttcatcccctctgctcaagtcttggag

SEQ ID NO: 47684 - DNA, 96 bp, synthetic construct
  source 1..96: mol_type = other DNA
tttgatagcagtattaataacgtgttcgatgccctctggttcaacattgtcacaatctctaccgttggctatggcgatgtggtgcctctgcatctg

SEQ ID NO: 47685 - DNA, 120 bp, synthetic construct
  source 1..120: mol_type = other DNA
tttattaatagcaacgatatcaccacaaacttctctgccatcaaccagccaccgtccttcgagcacctcttcgggactgactggatgggcagggacatgttcacccggacactgaagggc

SEQ ID NO: 47686 - DNA, 90 bp, synthetic construct
  source 1..90: mol_type = other DNA
accttcctgggcttcggcctctctcctcatgagcctgccatcgggatcattctgtccgagtcaatgaagtaccttgccacgggcaactgg

SEQ ID NO: 47687 - DNA, 57 bp, synthetic construct
  source 1..57: mol_type = other DNA
ttcgggcaacctttgtcccaatttagctttactgagtcattctccttcgggtccacg

SEQ ID NO: 47688 - DNA, 33 bp, synthetic construct
  source 1..33: mol_type = other DNA
tctgggacatatcaggcaggactgatggttaat

SEQ ID NO: 47689 - DNA, 114 bp, synthetic construct
  source 1..114: mol_type = other DNA
attgacgccaacctgagcacagatttcaccaagactatgaagccaccttcattcgagcacatatttgggaccgactggatgggccgcgatatgttccttaggactgtaaaaggc

SEQ ID NO: 47690 - DNA, 90 bp, synthetic construct
  source 1..90: mol_type = other DNA
accttcctcggcttcggcctgtctcctcatgaacctgccattgggatcatcctctccgaatccatgagctacctggcaatgggagcttgg

SEQ ID NO: 47691 - DNA, 114 bp, synthetic construct
  source 1..114: mol_type = other DNA
atcgacgccaacctgcccactgatttcaccacgcgcatgaagccaccatcattcgagcatctttttggcacggactggatgggtcgggacatgttcctgcgcaccgtgaaagga

SEQ ID NO: 47692 - DNA, 90 bp, synthetic construct
  source 1..90: mol_type = other DNA
accttcctcggattcggcctgtcccctcacgagcccgctattgggatcatcctgtctgaatctatgagttacctggctatgggtgcttgg

SEQ ID NO: 47693 - DNA, 48 bp, synthetic construct
  source 1..48: mol_type = other DNA
ctgaagaatcccacactgggccttaacctcattaccgctggaagcatc

SEQ ID NO: 47694 - DNA, 117 bp, synthetic construct
  source 1..117: mol_type = other DNA
atcaattctagcgacatcaccaccaacttcaagattatgaaccagccgccatccttcgagcacctgttcgggacagattggatgggccgagacatgtttactcgcaccctcaagggc

SEQ ID NO: 47695 - DNA, 90 bp, synthetic construct
  source 1..90: mol_type = other DNA
accttccttggctttggactcagccctcacgagcccgctatcggcattatcctgtctgagtccatgaagtacctcgcgactggcgactgg

SEQ ID NO: 47696 - DNA, 60 bp, synthetic construct
  source 1..60: mol_type = other DNA
agcatttatggctggaacttcatcctgtccatgacccacggttacgaagttatgaacacc

SEQ ID NO: 47697 - DNA, 33 bp, synthetic construct
  source 1..33: mol_type = other DNA
gtgaacggcgccaagggcaccaatcacttctcc

SEQ ID NO: 47698 - DNA, 30 bp, synthetic construct
  source 1..30: mol_type = other DNA
ggcctggagatgacctcaagcactgctaag

SEQ ID NO: 47699 - DNA, 93 bp, synthetic construct
  source 1..93: mol_type = other DNA
atggacaagttccggaccggctgggcccaagatgtccccctgagctacaaacggaaggctaaggagcaggggaaggtggagcagatcgaatac

SEQ ID NO: 47700 - DNA, 48 bp, synthetic construct
  source 1..48: mol_type = other DNA
ggcgacttctttgagtacagcaacatcctgaatattctggacaacatg

SEQ ID NO: 47701 - DNA, 111 bp, synthetic construct
  source 1..111: mol_type = other DNA
gacatcgaccctctcatcgtcgtcgccgcgacctttgacgctgaaaacaaggggcagggctggagccgatcagttgaggaactggagccattccatctcgattttgagaac

SEQ ID NO: 47702 - DNA, 114 bp, synthetic construct
  source 1..114: mol_type = other DNA
acaaatgccaacctaccgacggacttcagtatcaagatgcaggcgccatcatttcaacatccttttggaaccgactggatgggccgggacatgttcgctaggacactgaagggc

SEQ ID NO: 47703 - DNA, 90 bp, synthetic construct
  source 1..90: mol_type = other DNA
accttcctgggattcgggctgtcccctcacgagcccgctatcggcataattcttagcgaatccatgtcttacctggcaatgggagcatgg

SEQ ID NO: 47704 - DNA, 273 bp, synthetic construct
  source 1..273: mol_type = other DNA
gtgttcggcctcaacgagggcgtggatctcaagggcggtactctcgtgaccctcgaactcaaggagcccatgtccgaaacccaggtgtctaacatcattactcaaggcctaggagcgtcggaagtagatactagcatcagcgggaacaccgctaccgtgacaatcagcggcgacgtggaccaggccgacttcgagtccaagttcaacaatcagttcggcattctttccttcaagtccgtcggggctcttcttagcgaagcagcaatgggtcag

SEQ ID NO: 47705 - DNA, 30 bp, synthetic construct
  source 1..30: mol_type = other DNA
ttcttcattccaagcgcacaggttttggcc

SEQ ID NO: 47706 - DNA, 96 bp, synthetic construct
  source 1..96: mol_type = other DNA
ctggacgattctgtgaccaacctcggcgaagctctgtggttcattattgttactgctagcaccgtcggatacggcgacatcactcccatttctcct

SEQ ID NO: 47707 - DNA, 114 bp, synthetic construct
  source 1..114: mol_type = other DNA
attaacgccaacctgccaaccgactttagcatcaagatgcagcctccctcatttgagcacatctttggaaccgactggatgggcagggacatgttcatccgaactatcaaggga

SEQ ID NO: 47708 - DNA, 90 bp, synthetic construct
  source 1..90: mol_type = other DNA
acattcctcggctttggcctgtctccacatgagcctgccatcggaatcattcttagcgaatccatgacctacctggctatgggagcttgg

SEQ ID NO: 47709 - DNA, 159 bp, synthetic construct
  source 1..159: mol_type = other DNA
cagcagctcactggcgacaccaaggccctgatggagaccaacgaaggcctggacgctcggctggggaaggccttctcctccgccggaaagaagatcggcaacgagttcctccctcaaattaaggacgtgaaacagggcttcctggaccttaatgatgcc

SEQ ID NO: 47710 - DNA, 78 bp, synthetic construct
  source 1..78: mol_type = other DNA
ggtggcatcatcacctccgaccccgcaatccaggctggcgccattaaggtggccaccggcaaatcgggcgtctccatg

SEQ ID NO: 47711 - DNA, 33 bp, synthetic construct
  source 1..33: mol_type = other DNA
ttcctgggcgctaagggcgtgacatggtctacc

SEQ ID NO: 47712 - DNA, 39 bp, synthetic construct
  source 1..39: mol_type = other DNA
cagtacaattacatcctcaactccctgtctagcctgaac

SEQ ID NO: 47713 - DNA, 45 bp, synthetic construct
  source 1..45: mol_type = other DNA
tcttacggcattaatttcaacaacatctatttttcgtttgaatcc

SEQ ID NO: 47714 - DNA, 33 bp, synthetic construct
  source 1..33: mol_type = other DNA
cctagactcttctctcccgagggcgttgacgca

SEQ ID NO: 47715 - DNA, 99 bp, synthetic construct
  source 1..99: mol_type = other DNA
cctgggttcgcgtcgagtgtattacaaaccttgatggcttcgggccagatgaacctggccctgatcgtgtacaacttcctggtgctgatgctcagtccc

SEQ ID NO: 47716 - DNA, 33 bp, synthetic construct
  source 1..33: mol_type = other DNA
ccccgactatttagcccggagggcgttgacgca

SEQ ID NO: 47717 - DNA, 96 bp, synthetic construct
  source 1..96: mol_type = other DNA
cccttcatggcctctgccttgctacaaatattaatgctgaccggccagatgggcgtcgctctgttggtctataacattatttctctcctctactca

SEQ ID NO: 47718 - DNA, 33 bp, synthetic construct
  source 1..33: mol_type = other DNA
cctcggctcttctcacccgagggcgtcgacgca

SEQ ID NO: 47719 - DNA, 30 bp, synthetic construct
  source 1..30: mol_type = other DNA
ggcatcagcaaccccaatggagctggagtc

SEQ ID NO: 47720 - DNA, 96 bp, synthetic construct
  source 1..96: mol_type = other DNA
ctgctgatcaacgctgtgatgcagaccctcatttacgccggccagcaggtcctcgcctatagcttataccaatttatgatcctgatctcccaacca

SEQ ID NO: 47721 - DNA, 33 bp, synthetic construct
  source 1..33: mol_type = other DNA
cctcggctgttcgcgcccgagggcgtagatgca

SEQ ID NO: 47722 - DNA, 30 bp, synthetic construct
  source 1..30: mol_type = other DNA
cctcggctgttcctgcccgaggaagttgac

SEQ ID NO: 47723 - DNA, 108 bp, synthetic construct
  source 1..108: mol_type = other DNA
atcaacaacatccccacaaattttgacactaagatgcaggcccctagcttcgtgcacatcttcgggaccgactggatgggccgggatatgtttttccgcactatcaag

SEQ ID NO: 47724 - DNA, 90 bp, synthetic construct
  source 1..90: mol_type = other DNA
accttcctggggttcggtctttcaccacacgagcccgctatcggaatcattttgagcgaatctatgtcttacttggctatgggagcttgg

SEQ ID NO: 47725 - DNA, 30 bp, synthetic construct
  source 1..30: mol_type = other DNA
cggctgttcagccccgagggcgtggacgcc

SEQ ID NO: 47726 - DNA, 72 bp, synthetic construct
  source 1..72: mol_type = other DNA
atgataaagatggttttcgaatatattagtccgctcttggatggcatcgtggacatctttacgcaaggagga

SEQ ID NO: 47727 - DNA, 45 bp, synthetic construct
  source 1..45: mol_type = other DNA
aagtccctgggagtgcacccggatagcgcggcaatggccgaagga

SEQ ID NO: 47728 - DNA, 33 bp, synthetic construct
  source 1..33: mol_type = other DNA
cctcgactcttcgctcccgagggcgtcgacgca

SEQ ID NO: 47729 - DNA, 33 bp, synthetic construct
  source 1..33: mol_type = other DNA
ccccgactgttccaccctgagggagtcgatgca

SEQ ID NO: 47730 - DNA, 33 bp, synthetic construct
  source 1..33: mol_type = other DNA
cctagactgttctcacccgaggaagtggatgcc

SEQ ID NO: 47731 - DNA, 63 bp, synthetic construct
  source 1..63: mol_type = other DNA
gtgtccctcttctctgtgaacgttaatacaatggaggccggcaacctatttttttcccatatg

SEQ ID NO: 47732 - DNA, 36 bp, synthetic construct
  source 1..36: mol_type = other DNA
atccggggctatcccttcctgctgtggtacgaggag

SEQ ID NO: 47733 - DNA, 39 bp, synthetic construct
  source 1..39: mol_type = other DNA
ggcctcgggttcaccaagcacttcgagctgtttggaagc

SEQ ID NO: 47734 - DNA, 96 bp, synthetic construct
  source 1..96: mol_type = other DNA
tccgccgagatgcaccatgatcccctgcggagccagtggttcgtgatcgtcacactgaccacggttggatatggggacatcaccattacgaacttc

SEQ ID NO: 47735 - DNA, 33 bp, synthetic construct
  source 1..33: mol_type = other DNA
cctagactctttgcaccggagagcgtcgatgcc

SEQ ID NO: 47736 - DNA, 33 bp, synthetic construct
  source 1..33: mol_type = other DNA
atggaccggatctttagcttcctgggaccatac

SEQ ID NO: 47737 - DNA, 84 bp, synthetic construct
  source 1..84: mol_type = other DNA
gaaggcaaggaccttctcgattcccttgtcatggtttctaacgcctttacatctaatggctacgctgttctgggagacagtgtg

SEQ ID NO: 47738 - DNA, 30 bp, synthetic construct
  source 1..30: mol_type = other DNA
aacggcctgcacctgatcgactatgcggga

SEQ ID NO: 47739 - DNA, 36 bp, synthetic construct
  source 1..36: mol_type = other DNA
atcgccctgctcggctctagctccaagttcctgaac

SEQ ID NO: 47740 - DNA, 90 bp, synthetic construct
  source 1..90: mol_type = other DNA
ggcgagactaagaacgtgtccgactccctgtacttcgtgctcatcacactgaccaccgtcggctatggtaacgacggatttaacgatcct

SEQ ID NO: 47741 - DNA, 60 bp, synthetic construct
  source 1..60: mol_type = other DNA
gctctgcccgagatggaactcttgacggcgggagatttcaacgcccagttccaaagtatc

SEQ ID NO: 47742 - DNA, 30 bp, synthetic construct; identical to SEQ ID NO: 47725
  source 1..30: mol_type = other DNA

SEQ ID NO: 47743 - DNA, 30 bp, synthetic construct
  source 1..30: mol_type = other DNA
tccgtgatgatccccaatagtttctctatt

SEQ ID NO: 47744 - DNA, 99 bp, synthetic construct
  source 1..99: mol_type = other DNA
cctctcctgctctccaccatcatacaaattctcatgatgtctggccaaatggccgtggccagcatcctctaccaagggttgatcctgatcaataacccc

SEQ ID NO: 47745 - DNA, 48 bp, synthetic construct
  source 1..48: mol_type = other DNA
gagaagcccgtcaacgatgtgaacatcagccacgacttcgaatgggac

SEQ ID NO: 47746 - DNA, 60 bp, synthetic construct
  source 1..60: mol_type = other DNA
gggctgctgccccggatcttcctgaacatctatttgagtatccagggggtagctgacaat

SEQ ID NO: 47747 - DNA, 54 bp, synthetic construct
  source 1..54: mol_type = other DNA
agcgacatcgggacaaccattacctccacttacggcctcgttttccattacttc

SEQ ID NO: 47748 - DNA, 117 bp, synthetic construct
  source 1..117: mol_type = other DNA
ggattcgggaccggcgacgtgctcatgcctgctatccccggccattttatttccttcaatttcgacatgtccctggtcggcgccttcattcgcggcttcggccaactcttctctaac

SEQ ID NO: 47749 - DNA, 39 bp, synthetic construct
  source 1..39: mol_type = other DNA
aagaatcccacactgggcttcaacattatcactgctggc

SEQ ID NO: 47750 - DNA, 33 bp, synthetic construct
  source 1..33: mol_type = other DNA
cctagactttttgcccctgagggcatcgacgcg

SEQ ID NO: 47751 - DNA, 33 bp, synthetic construct
  source 1..33: mol_type = other DNA
cccagactcttcgcacctgagggggtcgacgcg

SEQ ID NO: 47752 - DNA, 90 bp, synthetic construct
  source 1..90: mol_type = other DNA
ggccccgagacaaacggcctgaataggtttatttcggggttctactggttcattagtcggtctgggctcgaaatcacgctttattcaaca

SEQ ID NO: 47753 - DNA, 30 bp, synthetic construct
  source 1..30: mol_type = other DNA
aaccccgtgtttttgcaaacgatagactac

SEQ ID NO: 47754 - DNA, 33 bp, synthetic construct
  source 1..33: mol_type = other DNA
cctagactcttcgcacccgagggcgtcgatgcc

SEQ ID NO: 47755 - DNA, 33 bp, synthetic construct
  source 1..33: mol_type = other DNA
ccccgcctcttctcacctgaggctgttgacgcc

SEQ ID NO: 47756 - DNA, 33 bp, synthetic construct
  source 1..33: mol_type = other DNA
cctcggctcttcgctcccgaaggggttgatgcc

SEQ ID NO: 47757 - DNA, 33 bp, synthetic construct; identical to SEQ ID NO: 42294
  source 1..33: mol_type = other DNA

SEQ ID NO: 47758 - DNA, 51 bp, synthetic construct
  source 1..51: mol_type = other DNA
ctgaatatatacaacttgagcgctcagactgccgctatgacatcagagatg

SEQ ID NO: 47759 - DNA, 123 bp, synthetic construct
  source 1..123: mol_type = other DNA
tacagcatcgacactacaaatatggtgaccaatttcgcgcttcgcaaccaggcccctagcttcgagcacctgtttgggacagattggctgggacgagacatgttttcccgcaccattaagggg

SEQ ID NO: 47760 - DNA, 90 bp, synthetic construct
  source 1..90: mol_type = other DNA
acattcctcggcttcgggctgagccctcatgaacctgccatcggaattatcctgtccgagtctatgaagtacctcaccatgggagattgg

SEQ ID NO: 47761 - DNA, 33 bp, synthetic construct
  source 1..33: mol_type = other DNA
ggaaccgcccctattgacgagcttcctgctacc

SEQ ID NO: 47762 - DNA, 33 bp, synthetic construct
  source 1..33: mol_type = other DNA
cccagacttttcgcacctgagggcgtggatgcc

SEQ ID NO: 47763 - DNA, 102 bp, synthetic construct
  source 1..102: mol_type = other DNA
cctatgataatgaatgccgcgattcagacacttatgttctctggtcaacaaatcatggcctatagcctgtaccaaatgatgatggttatgacacagcccatg

SEQ ID NO: 47764 - DNA, 123 bp, synthetic construct
  source 1..123: mol_type = other DNA
aacgtcttcggcaatgcgatgatcgtgatccagggcatctatctccaagtagctaatgcctacatgggcagttctagcgcgattgctgtggacgccataagccaggccttcatcaacttggtg

SEQ ID NO: 47765 - DNA, 30 bp, synthetic construct
  source 1..30: mol_type = other DNA
ctgaatagcaacattatcgacaacttcaac

SEQ ID NO: 47766 - DNA, 72 bp, synthetic construct
  source 1..72: mol_type = other DNA
gccgccatcaactccttcacaccctttgacgtgatcaatcccgttcaaacattgattaactccaccgatatc

SEQ ID NO: 47767 - DNA, 48 bp, synthetic construct
  source 1..48: mol_type = other DNA
gtgggcaagtcagctcaaaacctgataagcggtgctattcaacctctg

SEQ ID NO: 47768 - DNA, 123 bp, synthetic construct
  source 1..123: mol_type = other DNA
gatatcgttggcaacttcgttatcgtctgcgaagaaatatacctccaagcctccggagtctatatgggtgcctctagtgacatagcagtaaacgctgtttcccaagctctgaccaacctggct

SEQ ID NO: 47769 - DNA, 87 bp, synthetic construct
  source 1..87: mol_type = other DNA
atgcagcatccacaatttaggatgtgggtcattgaagtctacatagtgatcctcaaggtcaacgagctggactacctgctcatctct

SEQ ID NO: 47770 - DNA, 93 bp, synthetic construct
  source 1..93: mol_type = other DNA
ctcgagtctggcaaccccctggactcactcgtcatggtcagcaatgccttcactagcaacggatacgctgtcctcgggagtaccattcccgga

SEQ ID NO: 47771 - DNA, 30 bp, synthetic construct
  source 1..30: mol_type = other DNA
aacaatttcgttaagatggacatcaacctg

SEQ ID NO: 47772 - DNA, 33 bp, synthetic construct
  source 1..33: mol_type = other DNA
gaaggaggcgaccagtttaagaacaccttcacc

SEQ ID NO: 47773 - DNA, 33 bp, synthetic construct
  source 1..33: mol_type = other DNA
ttcaccctcactactgtaccctacgagatcccc

SEQ ID NO: 47774 - DNA, 120 bp, synthetic construct
  source 1..120: mol_type = other DNA
gatatcttcggcaactttatgatcctatgccaagagatatacttacaaagccaacacatttacaccggagcaagctcgaccattcttgtggacgctatttctcaagcctttgtcaacctg

SEQ ID NO: 47775 - DNA, 48 bp, synthetic construct
  source 1..48: mol_type = other DNA
atgaacgtggcctccctggctaacattgatattttctcaaattacaat

SEQ ID NO: 47776 - DNA, 66 bp, synthetic construct
  source 1..66: mol_type = other DNA
ctgggcggacttactcaaacgtccatctccaaccctgtacaagacatgatcaactctactaacatt

SEQ ID NO: 47777 - DNA, 51 bp, synthetic construct
  source 1..51: mol_type = other DNA
ttcgtgaccacatccgtcgaaacgatcactagtggcaccgtgtaccctgca

SEQ ID NO: 47778 - DNA, 57 bp, synthetic construct
  source 1..57: mol_type = other DNA
gccctgcccaacttcaatattctgacggacactgacctgagctacgctatcgaaagc

SEQ ID NO: 47779 - DNA, 48 bp, synthetic construct
  source 1..48: mol_type = other DNA
aaccccacactgggctacaacgtgatcaccttcgggagcatcattata

SEQ ID NO: 47780 - DNA, 81 bp, synthetic construct
  source 1..81: mol_type = other DNA
attctgggagacaagtcacaacctgcccttatggagggaaaactgctctggtttgacatgtacatgactgaggattccttc

SEQ ID NO: 47781 - DNA, 57 bp, synthetic construct
  source 1..57: mol_type = other DNA
gccgtggactggaacggcatggctgagctgtttagccctctgttcggatggggtctc

SEQ ID NO: 47782 - DNA, 33 bp, synthetic construct
  source 1..33: mol_type = other DNA
tattttcttcaaactgttagccatatctacacc

SEQ ID NO: 47783 - DNA, 30 bp, synthetic construct; identical to SEQ ID NO: 47725
  source 1..30: mol_type = other DNA

SEQ ID NO: 47784 - DNA, 57 bp, synthetic construct
  source 1..57: mol_type = other DNA
ttcggtcaaccccttagtcaatttagtttcaccgagtcattcgggtcaacgggcttt

SEQ ID NO: 47785 - DNA, 39 bp, synthetic construct
  source 1..39: mol_type = other DNA
atcagcggcacataccaagccgggctgatggtcaacgtc

SEQ ID NO: 47786 - DNA, 30 bp, synthetic construct
  source 1..30: mol_type = other DNA
gccctgacacccgaaaccaagtgccttgag

SEQ ID NO: 47787 - DNA, 132 bp, synthetic construct
  source 1..132: mol_type = other DNA
gccgcaaagagagtggatcaaacaacgcaagacgagatcgctgggcaggccgatggcgacgatgatacatttgatctgaacattacatccaaccttgggtcaactcgcctggaatccactttgcaaattctc

SEQ ID NO: 47788 - DNA, 240 bp, synthetic construct
  source 1..240: mol_type = other DNA
atgacgcctgtgtttacacaagtatatgatgacggagtcaaaccatatacgcaaggtcaggtgacagagaaggacgctctcgacgccggactggcacctctccgcaagttcatgctgggccagacacgggacaaggacctgaagttgttcatggagatcaacaagaccagtagcgacgagattaaggactacgacgacctgtccattactaccattataccggctttcatcatctctgag

SEQ ID NO: 47789 - DNA, 36 bp, synthetic construct
  source 1..36: mol_type = other DNA
aacctgatcgtggaccagctcgtccggagtttccag

SEQ ID NO: 47790 - DNA, 33 bp, synthetic construct
  source 1..33: mol_type = other DNA
atcatcaatcccgacatcgtgaagaacttcaac

SEQ ID NO: 47791 - DNA, 72 bp, synthetic construct
  source 1..72: mol_type = other DNA
agcgccctggggtctcttttcggcatcgacatcaacaaccctgtgcacacccttttaaatagcactgatatt

SEQ ID NO: 47792 - DNA, 54 bp, synthetic construct
  source 1..54: mol_type = other DNA
gccatcaagtccttacaagcactcattagtaactcctacggcgcaatcgatctt

SEQ ID NO: 47793 - DNA, 54 bp, synthetic construct
  source 1..54: mol_type = other DNA
aacaccagcatcgagattagcagtggctttaagtattcctacgaactgttctcc

SEQ ID NO: 47794 - DNA, 129 bp, synthetic construct
  source 1..129: mol_type = other DNA
aacatctacgacaacctgttcatcgtgtcccgagagatctatcttcaaacccattatgcttacatgggctcttctagtgccgtggccttcaatacaataagccaagccttggctaatctggtagtttcc

SEQ ID NO: 47795 - DNA, 54 bp, synthetic construct
  source 1..54: mol_type = other DNA
ctgcctgctagccagctggtgaccgagggcgactttgtcaccttcctccaatca

SEQ ID NO: 47796 - DNA, 66 bp, synthetic construct
  source 1..66: mol_type = other DNA
atggacatcatcggccccattattggcggattcgagatgatcatggaaatgttacaatcaggaggc

SEQ ID NO: 47797 - DNA, 45 bp, synthetic construct
  source 1..45: mol_type = other DNA
aagaacctgggaatcgacccaagcgccaccgcaatggctgaaggg

SEQ ID NO: 47798 - DNA, 129 bp, synthetic construct
  source 1..129: mol_type = other DNA
gacatctacgggaagatttggatcgtgttcgagggcctgttagcccaaatattgtccgtgatcacaactggggacttctccgttctggtctttggggccatggccgatgcaattgtcggcttgattatc

SEQ ID NO: 47799 - DNA, 66 bp, synthetic construct
  source 1..66: mol_type = other DNA
gagatgggcgtgctgccacacgcctttgtccggttctacctggctatacaaggactggcagacaat

SEQ ID NO: 47800 - DNA, 57 bp, synthetic construct
  source 1..57: mol_type = other DNA
gtggacatgggcaacattatcaccaagatctacgacacaatcttcatccacttcgat

SEQ ID NO: 47801 - DNA, 33 bp, synthetic construct
  source 1..33: mol_type = other DNA
atccccgagatacacctgctggactacactggg

SEQ ID NO: 47802 - DNA, 39 bp, synthetic construct
  source 1..39: mol_type = other DNA
ttcgacctcctgcccatccattcactgttcaacttgacc

SEQ ID NO: 47803 - DNA, 87 bp, synthetic construct
  source 1..87: mol_type = other DNA
gggataaagaacctgacggatagcttctacttcgtcattatcaccctgaccaccgttggttataacgacaatgccatcaatacaccg

SEQ ID NO: 47804 - DNA, 147 bp, synthetic construct
  source 1..147: mol_type = other DNA
ggggctcccggcgccctgatgaagatctttaattttttcgccgagaacgaagccctgttgaaccaaacattaaactcaactggagctgtgaacacacagatattccaaatgattccacaagaatatgtggctgggctgatcaacggg

SEQ ID NO: 47805 - DNA, 48 bp, synthetic construct
  source 1..48: mol_type = other DNA
agccacgaaaacatgatgatcgagggcttttggtactacctgttcctc

SEQ ID NO: 47806 - DNA, 30 bp, synthetic construct
  source 1..30: mol_type = other DNA
ctgttcggccgcggatggtgtggatatgcc

SEQ ID NO: 47807 - DNA, 36 bp, synthetic construct
  source 1..36: mol_type = other DNA
gacaaccgggccttctgcaagtacatctgtcctact

SEQ ID NO: 47808 - DNA, 33 bp, synthetic construct
  source 1..33: mol_type = other DNA
atggtcaacttcgtgctgtttgagctgacacct

SEQ ID NO: 47809 - DNA, 90 bp, synthetic construct
  source 1..90: mol_type = other DNA
gagaacaagaaccccctggacgccatcgtcatggtgtccaatacattcgctaccaacggctacactgtatatggaacgagcgacattgga

SEQ ID NO: 47810 - DNA, 63 bp, synthetic construct
  source 1..63: mol_type = other DNA
gtctatcctgaactaggttttggagtgttctccggcaacggagttctcgagagtctgatggtg

SEQ ID NO: 47811 - DNA, 51 bp, synthetic construct
  source 1..51: mol_type = other DNA
ggacagccccttaaccaattttctttcaccgagtcattttccttcaccgga

SEQ ID NO: 47812 - DNA, 39 bp, synthetic construct
  source 1..39: mol_type = other DNA
atccacggcacatatcaagccggtctgatggtagtaaat

SEQ ID NO: 47813 - DNA, 66 bp, synthetic construct
  source 1..66: mol_type = other DNA
gagatgggcatcctgcctcatgcctttgttcggttctacctcgcaatccaaggattggcagacaat

SEQ ID NO: 47814 - DNA, 57 bp, synthetic construct
  source 1..57: mol_type = other DNA
gtggacatgcggaatatcatcaccaacgtctacgacacaatcttcattcacttcgac

SEQ ID NO: 47815 - DNA, 33 bp, synthetic construct
  source 1..33: mol_type = other DNA
ggcatgctgaaggctggagctccagttggccct

SEQ ID NO: 47816 - DNA, 78 bp, synthetic construct
  source 1..78: mol_type = other DNA
ggcggactgttccccgctgactccgcatttgctactaaggccacaagcgtggcgacggccaaggtcggtctagcatgg

SEQ ID NO: 47817 - DNA, 33 bp, synthetic construct
  source 1..33: mol_type = other DNA
ttcctcggcgccaagggcgttacttggagcacc

SEQ ID NO: 47818 - DNA, 63 bp, synthetic construct
  source 1..63: mol_type = other DNA
ctgggccacgagaacctgagcctgtccgggttttggtactatctgtctctgggcgtgttcgag

SEQ ID NO: 47819 - DNA, 33 bp, synthetic construct
  source 1..33: mol_type = other DNA
aaccgggccttctgcaaatacgtctgtccaatc

SEQ ID NO: 47820 - DNA, 30 bp, synthetic construct
  source 1..30: mol_type = other DNA
atggacgatattaccatatttttccgcggg

SEQ ID NO: 47821 - DNA, 87 bp, synthetic construct
  source 1..87: mol_type = other DNA
gaggacgtgtaccccctggactcccttgtcatggtgtctaacgccttcacaagcaacggatatgccgtcctcggcaccactatcgcc

SEQ ID NO: 47822 - DNA, 36 bp, synthetic construct
  source 1..36: mol_type = other DNA
aacatttccggcctgagctctatcaaggactccagt

SEQ ID NO: 47823 - DNA, 30 bp, synthetic construct
  source 1..30: mol_type = other DNA
aagggcggcaccatcaacaataacctgaat

SEQ ID NO: 47824 - DNA, 33 bp, synthetic construct
  source 1..33: mol_type = other DNA
ctcggcctgggtagtgcatccggcattctccca

SEQ ID NO: 47825 - DNA, 51 bp, synthetic construct
  source 1..51: mol_type = other DNA
ataagccacgaaaacatgatgatcgagggattctggtactatttatttctg

SEQ ID NO: 47826 - DNA, 30 bp, synthetic construct
  source 1..30: mol_type = other DNA
ttgttcggtagagggtggtgtggatacgcc

SEQ ID NO: 47827 - DNA, 39 bp, synthetic construct
  source 1..39: mol_type = other DNA
aaggacaaccgggccttctgcaaatacatctgtcctacc

SEQ ID NO: 47828 - DNA, 66 bp, synthetic construct
  source 1..66: mol_type = other DNA
atggatattattggaatcataggttccacgctgaacgacgtgatctctatgttccaatcggggggc

SEQ ID NO: 47829 - DNA, 42 bp, synthetic construct
  source 1..42: mol_type = other DNA
aagcagctgggcatcaactccgacattaccctcatggccaat

SEQ ID NO: 47830 - DNA, 81 bp, synthetic construct
  source 1..81: mol_type = other DNA
ttccctgcctttcaacacatcggcatttcaaacattctcttcggaatcaactgggcccccgacaacggcttctatgggatc

SEQ ID NO: 47831 - DNA, 36 bp, synthetic construct
  source 1..36: mol_type = other DNA
atcagccgggacttcttcggcggaagtggctttaca

SEQ ID NO: 47832 - DNA, 105 bp, synthetic construct
  source 1..105: mol_type = other DNA
gcaggcaacgtggctgagatccccacaagcattctctctcctgtccggaccctgacctccaacattgccctggagatgggctatgccatagacatccactacaac

SEQ ID NO: 47833 - DNA, 48 bp, synthetic construct
  source 1..48: mol_type = other DNA
ggccccatctacattcctctgtctgactccgtgaccgtttctgtaatg

SEQ ID NO: 47834 - DNA, 30 bp, synthetic construct
  source 1..30: mol_type = other DNA
ggccagagcatgcacatcctgttcgagatg

SEQ ID NO: 47835 - DNA, 123 bp, synthetic construct
  source 1..123: mol_type = other DNA
tctatcctgccactgcatccatacgcatttgctatggctagcggtgtcggatcggcgagcatgaacgctgcatccctggggcctacattggccgccttcccggcgctcgaaacccagatcgaa

SEQ ID NO: 47836 - DNA, 36 bp, synthetic construct
  source 1..36: mol_type = other DNA
tatgagtacatgctgaacgccctgcaccaactacat

SEQ ID NO: 47837 - DNA, 30 bp, synthetic construct
  source 1..30: mol_type = other DNA
gagatcattaactccaccggtctgagcttc

SEQ ID NO: 47838 - DNA, 54 bp, synthetic construct
  source 1..54: mol_type = other DNA
tttggtcaatcgttaaaccagttctccctgaccgagtccttctccttcaccggc

SEQ ID NO: 47839 - DNA, 39 bp, synthetic construct
  source 1..39: mol_type = other DNA
atccctgggacttatcaagctggcctgatgaacatggtg

SEQ ID NO: 47840 - DNA, 66 bp, synthetic construct
  source 1..66: mol_type = other DNA
atggatattatcgccacactcttttctaccgggaatgacctgatcaccatgtttcaaagtggaggc

SEQ ID NO: 47841 - DNA, 42 bp, synthetic construct
  source 1..42: mol_type = other DNA
aaggagctgggcaccagctccgacatcactctcatggccaac

SEQ ID NO: 47842 - DNA, 285 bp, synthetic construct
  source 1..285: mol_type = other DNA
atgttcgtcgacgacgcccagggcctcttcaaggataagaatatgagcgttgatctgattaagcacaacaatggcgccgacatgatggctgctatggcaaagggcgagatcgatgttggttacgtcggcattgcgcctgtctcgtcctctattaacgatgcggtcggcgttaagataatctcgagtgcacagaacgaagggtctgggatcgtggtggccaaggactccgatattacttctgctaagaaacttaaaggcaagaacgtggctacattgggagaggga

SEQ ID NO: 47843 - DNA, 36 bp, synthetic construct
  source 1..36: mol_type = other DNA
ggcaccttcattggcaagcacgctgtggctgcaatc

SEQ ID NO: 47844 - DNA, 57 bp, synthetic construct
  source 1..57: mol_type = other DNA
gagctggccaccgcactgggctccactgcggcgaccaagagcctcgtgatccagtat

SEQ ID NO: 47845 - DNA, 63 bp, synthetic construct
  source 1..63: mol_type = other DNA
atgattatcgagtacatcatgccattcgtggacggcatagtggacatcttcacccaaggggga

SEQ ID NO: 47846 - DNA, 45 bp, synthetic construct
  source 1..45: mol_type = other DNA
aagtccctgggcgtgcaccctgactctgccgctatggctgaaggc

SEQ ID NO: 47847 - DNA, 63 bp, synthetic construct
  source 1..63: mol_type = other DNA
atgattatcgaatatgtcagcccctttttcgacggcatgatggacatcttcacacaagggggc

SEQ ID NO: 47848 - DNA, 45 bp, synthetic construct
  source 1..45: mol_type = other DNA
aagagcctgggcgtgcatcctgactctgctgctatggctgaaggt

SEQ ID NO: 47849 - DNA, 63 bp, synthetic construct
  source 1..63: mol_type = other DNA
atgatcatcgaggccatcaccggcctgattagcggattcgttgacttcttccaacaaggtgga

SEQ ID NO: 47850 - DNA, 42 bp, synthetic construct
  source 1..42: mol_type = other DNA
ggctcacttggagttaaccccgatcctaccgccatggcaagg

SEQ ID NO: 47851 - DNA, 48 bp, synthetic construct
  source 1..48: mol_type = other DNA
tacttctactacaatgagctgttcaccaacaagtatctgttcatcccc

SEQ ID NO: 47852 - DNA, 69 bp, synthetic construct
  source 1..69: mol_type = other DNA
atcattctgaatttcagcaacttacaaaaccctgtgattaccatcaacacaatcctctctctgatctct

SEQ ID NO: 47853 - DNA, 63 bp, synthetic construct
  source 1..63: mol_type = other DNA
atgattttcgagatatttaatggatttctgagcggaatcgcggacttcttccggaatggtggc

SEQ ID NO: 47854 - DNA, 45 bp, synthetic construct
  source 1..45: mol_type = other DNA
aagtctctgggcgttgacccaagcccttccgcaatggccgaggga

SEQ ID NO: 47855 - DNA, 63 bp, synthetic construct
  source 1..63: mol_type = other DNA
atgattatcgagtttatcggcccttttatagactcgatagtggatatattctcccaaggaggc

SEQ ID NO: 47856 - DNA, 45 bp, synthetic construct
  source 1..45: mol_type = other DNA
aagagcctcggcgtgcatcctgattccgccgcaatggctgaaggg

SEQ ID NO: 47857 - DNA, 93 bp, synthetic construct
  source 1..93: mol_type = other DNA
ctcttcctgtctagcctgatgacaatcctgatgtatggaagccaaaccaacctcgctgccgccttgtatcaaataatgttccttattagcaac

SEQ ID NO: 47858 - DNA, 63 bp, synthetic construct
  source 1..63: mol_type = other DNA
atgatcatcgagtacatttcccctatcttcacggggatcatggatatattttctcaaggcggc

SEQ ID NO: 47859 - DNA, 48 bp, synthetic construct
  source 1..48: mol_type = other DNA
ttcaagtccctgggggttaacccaaatagcagcgctatggctgaaggg

SEQ ID NO: 47860 - DNA, 105 bp, synthetic construct
  source 1..105: mol_type = other DNA
actgcttgtatctaccgcccgtggatcctggactctcggattcaccctgtgaaggaggccatcgccggggcaacaggctatagcttcccatccggacacactaca

SEQ ID NO: 47861 - DNA, 66 bp, synthetic construct
  source 1..66: mol_type = other DNA
accaagtcttatcctctcgattacgacacagccggcaggctgattgtgaaccccgctatcatggcc

SEQ ID NO: 47862 - DNA, 33 bp, synthetic construct
  source 1..33: mol_type = other DNA
acaagccaagttaagataaccaataaccttccc

SEQ ID NO: 47863 - DNA, 30 bp, synthetic construct
  source 1..30: mol_type = other DNA
gggttacaaaaagaagttgctaactcaagc

SEQ ID NO: 47864 - DNA, 96 bp, synthetic construct
  source 1..96: mol_type = other DNA
cccgtgatcctctctaccatgatctccatcctgatgtacgctagtcaggccattattgctacacaactataccaaattatgctgatcattagcaac

SEQ ID NO: 47865 - DNA, 90 bp, synthetic construct
  source 1..90: mol_type = other DNA
gctgagggcaagaatttactagacagcctggtcatggtgtccaacgccttcacctctaacggatacgccgtgcttggggatacacctatc

SEQ ID NO: 47866 - DNA, 135 bp, synthetic construct
  source 1..135: mol_type = other DNA
atcaacattaacgacaagctgatggccgtggcccaggagatatcgagcttgtaccccaatattttcctgacctcatctcccgacatagctttcgaggccctaagccaagccataatcgaactcatcgttcctctg

SEQ ID NO: 47867 - DNA, 57 bp, synthetic construct
  source 1..57: mol_type = other DNA
gcattgccggagctacagatcgctaattatagcgatttcatcttcttcattacgacc

SEQ ID NO: 47868 - DNA, 30 bp, synthetic construct
  source 1..30: mol_type = other DNA
gatgaagacgaggccagcaggtaccttgac

SEQ ID NO: 47869 - DNA, 48 bp, synthetic construct
  source 1..48: mol_type = other DNA
accatccggaacgttagcttgaagggcggactctccaaaggtaacggg

SEQ ID NO: 47870 - DNA, 63 bp, synthetic construct
  source 1..63: mol_type = other DNA
atgattatcgagtcactcatcaacggcttcgacatgattatggaaatgttgcaatccggggga

SEQ ID NO: 47871 - DNA, 45 bp, synthetic construct
  source 1..45: mol_type = other DNA
aagaatctgggcgttaacccggacgccgctgcaatggctgaagga

SEQ ID NO: 47872 - DNA, 99 bp, synthetic construct
  source 1..99: mol_type = other DNA
aagtctctcgatattttccgggccgctgtccacatcgccgagaagaccaacgggacagtctcacacatccccatatctcaacttcctgttggcgatatg

SEQ ID NO: 47873 - DNA, 63 bp, synthetic construct
  source 1..63: mol_type = other DNA
atgattgtggagtacatcgtgccgtttattgacggcataatggatatcttcacacaaggtggc

SEQ ID NO: 47874 - DNA, 45 bp, synthetic construct
  source 1..45: mol_type = other DNA
aagtctctcggcgtacaccctgacaccgctgcaatggctgaaggg

SEQ ID NO: 47875 - DNA, 63 bp, synthetic construct
  source 1..63: mol_type = other DNA
atgatcattgagtacatcaccccaatcttcaatgggattatggacatattcactcaaggaggc

SEQ ID NO: 47876 - DNA, 45 bp, synthetic construct
  source 1..45: mol_type = other DNA
aagtcactgggcgtgcatcccgatacggcggctatggctgaaggc

SEQ ID NO: 47877 - DNA, 63 bp, synthetic construct
  source 1..63: mol_type = other DNA
atgatagtggagtacatcatgccttttatcgatgggatcgtggatatcttctctcaaggcggc

SEQ ID NO: 47878 - DNA, 45 bp, synthetic construct
  source 1..45: mol_type = other DNA
aagagtctgggcgtgcaccccgattctgctgcaatggctgaagga

SEQ ID NO: 47879 - DNA, 63 bp, synthetic construct
  source 1..63: mol_type = other DNA
atgttcattgaaagcatcacccccttctttgagggcattatcgatatattttctcaaggggga

SEQ ID NO: 47880 - DNA, 45 bp, synthetic construct
  source 1..45: mol_type = other DNA
aagagcctgggcgttaaccccaataccgccgcaatggctgaagga

SEQ ID NO: 47881 - DNA, 63 bp, synthetic construct
  source 1..63: mol_type = other DNA
atgttcatcgatagcattacctctatcctgaacggaatcgtggacatattttcacaaggtggc

SEQ ID NO: 47882 - DNA, 45 bp, synthetic construct
  source 1..45: mol_type = other DNA
aagagcttaggagtcaacccggactccgcggcaatggctgaaggc

SEQ ID NO: 47883 - DNA, 63 bp, synthetic construct
  source 1..63: mol_type = other DNA
atgattatcgagttcctgaccaatggatttggcacaatcctcgaaatgtttcaaaaagggggt

SEQ ID NO: 47884 - DNA, 45 bp, synthetic construct
  source 1..45: mol_type = other DNA
aaagttatggggattcagggcaacatcaccggaatggctgaaggc

SEQ ID NO: 47885 - DNA, 63 bp, synthetic construct
  source 1..63: mol_type = other DNA
atgatcgtggagtactttacgcaaattttcgaaggcatgatggacatcttctcacaaggaggc

SEQ ID NO: 47886 - DNA, 45 bp, synthetic construct
  source 1..45: mol_type = other DNA
aagagcctgggagttaatccaaattccgccgcaatggccgaaggg

SEQ ID NO: 47887 - DNA, 105 bp, synthetic construct
  source 1..105: mol_type = other DNA
agcgagatagacccatctttcgcttctgtgttcgacgccttctggttcaacatggtgacgatttcgtctgttggctacggggatctgacccccctcaccgattcc

SEQ ID NO: 47888 - DNA, 45 bp, synthetic construct
  source 1..45: mol_type = other DNA
ctgcccagtatcgagcagtccttcaacctgacctctagagaaagc

SEQ ID NO: 47889 - DNA, 42 bp, synthetic construct
  source 1..42: mol_type = other DNA
atcgacagctccaacttcattagttcttcactttcctctctt

SEQ ID NO: 47890 - DNA, 96 bp, synthetic construct
  source 1..96: mol_type = other DNA
aagacggtggacgtcaccaagatgattatcggcaccctggagaagacaaacgccaccgggttcaatttgaacttttctcaattacccaacggagac

SEQ ID NO: 47891 - DNA, 87 bp, synthetic construct
  source 1..87: mol_type = other DNA
gagcaagtgaaccctctgaacgcccttgttatggtctctaatgccttcacctccaacggttacgctgtactcgggaccacagctatt

SEQ ID NO: 47892 - DNA, 93 bp, synthetic construct
  source 1..93: mol_type = other DNA
agcctggacctgtaccgggcgacattacggattctggagaagcgcaacggtggcgtgctctctctgaagttttcacaattgccttctggtgaa

SEQ ID NO: 47893 - DNA, 33 bp, synthetic construct
  source 1..33: mol_type = other DNA
cctcggttattctcaccggagggcgttgacgcg

SEQ ID NO: 47894 - DNA, 99 bp, synthetic construct
  source 1..99: mol_type = other DNA
aataccttcgacatgtaccgggtggtcatccacgtgctcgagaacacaaccgtgcccctgtcctctctgaacatgagcatcattcctagtgccaacatt

SEQ ID NO: 47895 - DNA, 60 bp, synthetic construct
  source 1..60: mol_type = other DNA
atcctggggcacgagaacctgagcatgtccggcttttggtactacctattccttggagtg

SEQ ID NO: 47896 - DNA, 90 bp, synthetic construct
  source 1..90: mol_type = other DNA
tctctcgacctttatagagcgaccctgagaatcctggagaaacgcaacggcggcgagctttccctgaagttttctcaactcccttctggt

SEQ ID NO: 47897 - DNA, 33 bp, synthetic construct
  source 1..33: mol_type = other DNA
agctccggtgtcaaccccgacctggcaatgatg

SEQ ID NO: 47898 - DNA, 45 bp, synthetic construct
  source 1..45: mol_type = other DNA
ggctatggcgtcaaccccataccgtactctttaggctatgtagtg

SEQ ID NO: 47899 - DNA, 36 bp, synthetic construct
  source 1..36: mol_type = other DNA
tttgaccccattatgttccttgttggactaatgatc

SEQ ID NO: 47900 - DNA, 96 bp, synthetic construct
  source 1..96: mol_type = other DNA
aaaaccgtcgacgtgaccaagatgatcattggcacactggagaagactaacgcgaccgcctttaatctgaacttttcgcaacttccaaacggagac

SEQ ID NO: 47901 - DNA, 30 bp, synthetic construct
  source 1..30: mol_type = other DNA
cctcttataagcccggacgcaattcctgtg

SEQ ID NO: 47902 - DNA, 93 bp, synthetic construct
  source 1..93: mol_type = other DNA
tcccctagctacaacggctttgacgacttttacttcgtgatcgtcaccctgaccaccgttggatatggagatgtgacacccactacctataac

SEQ ID NO: 47903 - DNA, 42 bp, synthetic construct
  source 1..42: mol_type = other DNA
cccaactccttcaattgggtgcttgaagagtttatgggcatc

SEQ ID NO: 47904 - DNA, 96 bp, synthetic construct
  source 1..96: mol_type = other DNA
aagaccgtggacgtcacacggatgattatccacactctcgagaagaccaacgtgacaagctccaccctgggctactctcacctgcctcattgggat

SEQ ID NO: 47905 - DNA, 66 bp, synthetic construct
  source 1..66: mol_type = other DNA
cccgagctcttctacccttccatgtctagcacctacatcctgccaagctggaagccagcatggtca

SEQ ID NO: 47906 - DNA, 93 bp, synthetic construct
  source 1..93: mol_type = other DNA
ggcagtagcaactccctcttcgagagcttctacttcgtcatcgtgacactgaccacggtcggatatggggacatcgtgcccaagactttcaac

SEQ ID NO: 47907 - DNA, 99 bp, synthetic construct
  source 1..99: mol_type = other DNA
ctgaagaccgtcgacgtgaccaagggaatcattaatactctggagaagaccaacgtgacagccagcacccttggatactcccacctccctcatggtgac

SEQ ID NO: 47908 - DNA, 144 bp, synthetic construct
  source 1..144: mol_type = other DNA
acaaacatccctggccaaattatggacatcgtgcaaaagacagccgtcagccacgccaatgccaccgctatggccggctcatcaagcactgtggtcaccggggtcagcgacgcagctatcgcttccctgaccggatctatcact

SEQ ID NO: 47909 - DNA, 96 bp, synthetic construct
  source 1..96: mol_type = other DNA
aagtccttcgacatcttccggatgagcatccacctggtcgagaataccaactctactgtttcgcaaattccttttagtcaattgccggcgggcgat

SEQ ID NO: 47910 - DNA, 276 bp, synthetic construct
  source 1..276: mol_type = other DNA
gtgaacggactggacaaatccgtggatctgaagggcggatctatcgccgtgctcgagcttgataagaacattacctctaatgagatcacaacactcatcaatgagaagctcgggatcagcgacgccaaggtcatttccttcgtcgacaacaaggtgaccgtggagttcggcgacaccgtcgacgtcactaacctgaccaacagcctcaagggcacagcttcgctgatttcgttctcatccgttggacccgtgctgagcgaagccgctctgaaccaa

SEQ ID NO: 47911 - DNA, 30 bp, synthetic construct
  source 1..30: mol_type = other DNA
atctttatacctgaagccgacgttctttcc

SEQ ID NO: 47912 - DNA, 66 bp, synthetic construct
  source 1..66: mol_type = other DNA
agcaatcctactctggggtacaacattattaccgtcgggtctatcatcataatcgtgcaatcctct

SEQ ID NO: 47913 - DNA, 99 bp, synthetic construct
  source 1..99: mol_type = other DNA
ctcaagaccgtcgatgtgacccggatgatcgtggacacactggagaagacaaacgccaccgcttccactctgagctactcccaacttccgaacggagac

SEQ ID NO: 47914 - DNA, 33 bp, synthetic construct
  source 1..33: mol_type = other DNA
ccacttctcttctctccggaggacgtagatgcc

SEQ ID NO: 47915 - DNA, 99 bp, synthetic construct
  source 1..99: mol_type = other DNA
atcaagagtttcgacatcttccggatgtctgtccatactgtggagaacgctaataccacactctcccacctgcctctgagccagctaccggccggagac

SEQ ID NO: 47916 - DNA, 36 bp, synthetic construct
  source 1..36: mol_type = other DNA
gggatcgtgacaaccttaggcggcttcgaacttggg

SEQ ID NO: 47917 - DNA, 30 bp, synthetic construct
  source 1..30: mol_type = other DNA
agccacgtggacgccttgttcgctggagag

SEQ ID NO: 47918 - DNA, 30 bp, synthetic construct
  source 1..30: mol_type = other DNA
agccaggtggacgctctgtttgcgggcgcg

SEQ ID NO: 47919 - DNA, 57 bp, synthetic construct
  source 1..57: mol_type = other DNA
ggcgacatcctgaaactgttcattggggccaagcaggtcccctacgtgtacatctac

SEQ ID NO: 47920 - DNA, 51 bp, synthetic construct
  source 1..51: mol_type = other DNA
tctactaagaaattttgcccccgggtctgctactgctgtatctgttacaac

SEQ ID NO: 47921 - DNA, 30 bp, synthetic construct
  source 1..30: mol_type = other DNA
aatgcctttggcctgttcgacaacgagaac

SEQ ID NO: 47922 - DNA, 147 bp, synthetic construct
  source 1..147: mol_type = other DNA
tatgacactaagctctttgataatattaccggggttgtggtggagtttatttcacaaatcgtcaacgtgtacatcctgggcggatccactgacctagccgtgaacgccctgtcccacgcaatgaccgaactggtcggaagtttggcc

SEQ ID NO: 47923 - DNA, 96 bp, synthetic construct
  source 1..96: mol_type = other DNA
aaaagcttcgacatcttccggacgtccgtgcacatcgccgagaagaccaacacaactgccagccacatcccctttagtcaattgcctgctggagac

SEQ ID NO: 47924 - DNA, 96 bp, synthetic construct
  source 1..96: mol_type = other DNA
ttcgatcctagcattaataacctcttcgactccctctggttcgtgctgtccaccatcacaactgtcggatacggcgacatcctgccacaatctggc

SEQ ID NO: 47925 - DNA, 237 bp, synthetic construct
  source 1..237: mol_type = other DNA
atcaagctgtccctgaccggcatggactctccaatcaatcacggcacagtctccattaccctgaacgacacaccgtatactgcgaatgtcagcggaggcattgccactatcgaaattcctgacctcgatcctgggatctacgagggcaccgtgacatacgaaggcggaaagggctacgactcgccgtcaatcgatgtcaaattcaaagtaatgggactcactgacatccagatcatc

SEQ ID NO: 47926 - DNA, 81 bp, synthetic construct
  source 1..81: mol_type = other DNA
aacatcaccgttgctgtgactagcaatggcaaaccagtcaacaatggcataatcataattcgtcgggagaatagaacctcc

SEQ ID NO: 47927 - DNA, 60 bp, synthetic construct
  source 1..60: mol_type = other DNA
ggcataatccaaatccccgagctcgacgtcggcctctacgaagagaccatcatctacacc

SEQ ID NO: 47928 - DNA, 57 bp, synthetic construct
  source 1..57: mol_type = other DNA
ggcaagaaatacatcgccaacgtgacaaatgggattgctaccatcgagatcccagac

SEQ ID NO: 47929 - DNA, 87 bp, synthetic construct
  source 1..87: mol_type = other DNA
agtgccgggacttacgagggcaccattcgatatgatggaggctccaagtacagcaacccctctaaggatatcacattctacgtgaag

SEQ ID NO: 47930 - DNA, 33 bp, synthetic construct
  source 1..33: mol_type = other DNA
tacccctggggctttttcaatgtggacaactat

SEQ ID NO: 47931 - DNA, 126 bp, synthetic construct
  source 1..126: mol_type = other DNA
aacgtcttcggcaacgcaatcgccacggtacaacagatacgtctccaaatcagcaatgtgttcttcatggtcaactccgccgacatcgccgtggatgcaatttcgaacgctgtgttcaacttcatt

SEQ ID NO: 47932 - DNA, 150 bp, synthetic construct
  source 1..150: mol_type = other DNA
tacgacacaaacctctttagcaacgctgtcgctatcgtcgaggaagttttcacccaaatttttaacatgctgattatggggagctccgccgacaccgccgtgaatgccctgagtcacaccgtgtctaacttcatgggctccttgaccatc

SEQ ID NO: 47933 - DNA, 57 bp, synthetic construct
  source 1..57: mol_type = other DNA
aagaatcccacactggggatcaacctcatcaccgctggtagcattctggtcatcttg

SEQ ID NO: 47934 - DNA, 54 bp, synthetic construct
  source 1..54: mol_type = other DNA
aagaaccccacattgggcataaatttaattactgcgggaagcattctcgtcatc

SEQ ID NO: 47935 - DNA, 147 bp, synthetic construct
  source 1..147: mol_type = other DNA
tacgacaccaacctgtttagcaatgctatggccatcatccaagatgtcttcacgcaagctttcaacgtcttcatcatgggcggaagcgagaacaccgccgtgaacgctctgagtcatactgtatccaacttcatgggatctttgact

SEQ ID NO: 47936 - DNA, 30 bp, synthetic construct
  source 1..30: mol_type = other DNA
agccacgtggacgcactgttcgctggagcc

SEQ ID NO: 47937 - DNA, 69 bp, synthetic construct
  source 1..69: mol_type = other DNA
ggcatccccgtgatctccttcgagtttctcttcgccaataccctgaactcaggtcgggaagggggaatt

SEQ ID NO: 47938 - DNA, 99 bp, synthetic construct
  source 1..99: mol_type = other DNA
ggaagcacgttccaaatccctctgtccatcttcgacaccggccggccactgcccctgcacctctacatcctcgcctctgaaggcatcagtttcgagaat

SEQ ID NO: 47939 - DNA, 48 bp, synthetic construct
  source 1..48: mol_type = other DNA
atgggccgcattgttggacagagccagtttgaacaacctctattcatg

SEQ ID NO: 47940 - DNA, 39 bp, synthetic construct
  source 1..39: mol_type = other DNA
attcccatcaacttcggcgagccactgcacgtgtttccc

SEQ ID NO: 47941 - DNA, 54 bp, synthetic construct
  source 1..54: mol_type = other DNA
ctgagctccgagaacatgatgctcgagggtttttggtactatctgttccttggc

SEQ ID NO: 47942 - DNA, 33 bp, synthetic construct
  source 1..33: mol_type = other DNA
caatacgttgggagcattgctagctatctgggg

SEQ ID NO: 47943 - DNA, 99 bp, synthetic construct
  source 1..99: mol_type = other DNA
accaagaatctcgacatttaccgggtcatagtccgtcaagccaagcagaccaacgctagcatgttctccctgaagttcacgcaactccccactaacgac

SEQ ID NO: 47944 - DNA, 30 bp, synthetic construct
  source 1..30: mol_type = other DNA
agccaggtggacgctttgtttgctggggcc

SEQ ID NO: 47945 - DNA, 150 bp, synthetic construct
  source 1..150: mol_type = other DNA
gacaccaacctgttctccaatgcgacggcgcttgtcgaggaggtcataatgcaagcctacaacgtatatgtgatgggcggctccctgaatctcgccactaacgctatttcccaaagtcttagcgtgctcatgggaagtctgaccatcact

SEQ ID NO: 47946 - DNA, 30 bp, synthetic construct
  source 1..30: mol_type = other DNA
tcccacattgactcactcttcgctggagag

SEQ ID NO: 47947 - DNA, 33 bp, synthetic construct
  source 1..33: mol_type = other DNA
tggagcgacccttccgtgttcaccacacctctc

SEQ ID NO: 47948 - DNA, 96 bp, synthetic construct
  source 1..96: mol_type = other DNA
cagagttttgaagtgtccaccatcactatgaacttcgtggagaacgccaacggcaccgtgtcacaaatggctagcagccagcttcccacgggtaat

SEQ ID NO: 47949 - DNA, 132 bp, synthetic construct
  source 1..132: mol_type = other DNA
aacctgttcgggatggccagcatcatgtttacccggatgatgtacgcttctatggccgcccctgctaatgcaacagtgaccattgccgacgtggtaccgcaatcgatgatcatcagcttctctttcaatggc

SEQ ID NO: 47950 - DNA, 132 bp, synthetic construct
  source 1..132: mol_type = other DNA
accaatctcttcggcatcagcgccgaagtgtttaacaagatgatgatcgcctcaatgaacgcacctgcgaacaccaccgttgtagttggaaatgttgtacctcaaagcacgctcaccgatttaggtacagcc

SEQ ID NO: 47951 - DNA, 33 bp, synthetic construct
  source 1..33: mol_type = other DNA
cacgttggaatagatccttcgctggcaatgatg

SEQ ID NO: 47952 - DNA, 42 bp, synthetic construct
  source 1..42: mol_type = other DNA
ggtctcggcgttaaccccatgccatattctatcggctacatt

SEQ ID NO: 47953 - DNA, 132 bp, synthetic construct
  source 1..132: mol_type = other DNA
accaacctctttggcctcgcctatgacatgttctacaaaatggccatggcttctatggctgcacctgccaacactacggtcgtgatcaatgacgtcgttcctcaatctcaaataattcaacttggtaccgcg

SEQ ID NO: 47954 - DNA, 33 bp, synthetic construct
  source 1..33: mol_type = other DNA
tccgtcggcgtggaccccagcttggcaatgatg

SEQ ID NO: 47955 - DNA, 42 bp, synthetic construct
  source 1..42: mol_type = other DNA
ggctggtccgtgaaccccatgccttatagcctgggatatgtg

SEQ ID NO: 47956 - DNA, 33 bp, synthetic construct
  source 1..33: mol_type = other DNA
agcgagggtatcgacccttccctggcaatgatg

SEQ ID NO: 47957 - DNA, 42 bp, synthetic construct
  source 1..42: mol_type = other DNA
gggtttggtgtcaatcccatgccttactccttgggatatgtg

SEQ ID NO: 47958 - DNA, 135 bp, synthetic construct
  source 1..135: mol_type = other DNA
accaacctcttcggcctggccgccgaggtcatcagcaagacagtgaacgcctctgtgcaagcgcaggccaattccactgtggtggcatctaacgttgttccacaagcaactatgaccagcttcctgaccgctttc

SEQ ID NO: 47959 - DNA, 132 bp, synthetic construct
  source 1..132: mol_type = other DNA
acaaacctcttcggcatgtcctacgatatgatgactaagatgatgatcgctagcatgaacgctccggccaatacaacagttctcataaccgatctttttccccaaagtgcctttattcaactcggcaatgcc

SEQ ID NO: 47960 - DNA, 66 bp, synthetic construct
  source 1..66: mol_type = other DNA
ctgggtcacgagaatctgagcctgtccgggttttggtactatctgggattgggcgtgttcgaagga

SEQ ID NO: 47961 - DNA, 36 bp, synthetic construct
  source 1..36: mol_type = other DNA
aaccgggccttctgcaaatatgtctgccctgttcca

SEQ ID NO: 47962 - DNA, 132 bp, synthetic construct
  source 1..132: mol_type = other DNA
aacgtagtcggaaactttatgaatgtggcgagagagatctttacacaagtcatggacgtctacgtgatggggactagtaccaacgtcgcgatgggagcgatttcacaagctatggccgggcttatcctgagc

SEQ ID NO: 47963 - DNA, 33 bp, synthetic construct
  source 1..33: mol_type = other DNA
tcagttggcgtagaccccagcctggcaatgatg

SEQ ID NO: 47964 - DNA, 45 bp, synthetic construct
  source 1..45: mol_type = other DNA
ggccttggcgttaaccccatgccctactccttaggttatgtggtg

SEQ ID NO: 47965 - DNA, 63 bp, synthetic construct
  source 1..63: mol_type = other DNA
atggccaccgtggacaccttcctgcccgatataatacaaacaacattctttagcggttacact

SEQ ID NO: 47966 - DNA, 45 bp, synthetic construct
  source 1..45: mol_type = other DNA
gtcgacaacggcttctaccccaagaccgtgtttctgatcacacct

SEQ ID NO: 47967 - DNA, 72 bp, synthetic construct
  source 1..72: mol_type = other DNA
gccgtcgagtatttcaactactcggagcagcacgtgctgccaaacgcactgaaccagctcttcgacacatac

SEQ ID NO: 47968 - DNA, 132 bp, synthetic construct
  source 1..132: mol_type = other DNA
actaacctctttgggatgtcttacgatatgatgaccaagatgattatagccagcatgaacgcacccgcaaacaccaccgtccttatcacggacctcttcccccaaagtgccttcatccaactgggaaatgcc

SEQ ID NO: 47969 - DNA, 78 bp, synthetic construct
  source 1..78: mol_type = other DNA
gatccttgtcccgtgaacgccattacactcgaagaggttgggtcaccaatcaccgtcaacgacgattgccgctgtatc

SEQ ID NO: 47970 - DNA, 72 bp, synthetic construct
  source 1..72: mol_type = other DNA
ccttggaacgccatctacattagcgagaaggtgcccatcaagcggtctaaggaaatcgagagtttcaccttt

SEQ ID NO: 47971 - DNA, 87 bp, synthetic construct
  source 1..87: mol_type = other DNA
acatgtgtcgaggcctgccccggcgacttcattgccgccaacggcgcaagcctaactgtagccattcctagcgtttgcgcggcagcc

SEQ ID NO: 47972 - DNA, 69 bp, synthetic construct
  source 1..69: mol_type = other DNA
aagctgtgccccgtggacgctctcgatatcagcgtggaatggggcgaaggcgcacctgttgatgctgaa

SEQ ID NO: 47973 - DNA, 60 bp, synthetic construct
  source 1..60: mol_type = other DNA
aacaagtgtcccactgaggcgatccgggtcgtgactaaaaccggcatgctgtgtcctgcc

SEQ ID NO: 47974 - DNA, 75 bp, synthetic construct
  source 1..75: mol_type = other DNA
gtctgtggaaacgacgcactatcggttggctccatcgaactgacaattgacggagaggctgtgaccagggatagg

SEQ ID NO: 47975 - DNA, 69 bp, synthetic construct
  source 1..69: mol_type = other DNA
gacgcttgcggcgattgcatcgccacatgtccctacgacatgctgcacaagaccgataaccctaagctg

SEQ ID NO: 47976 - DNA, 138 bp, synthetic construct
  source 1..138: mol_type = other DNA
actaacgtgcctggcaacgtcgtcaacgtgatgggctacgtcaaccagaccgtggctaatagcaatgggaccgtggtggcaaatacagtactggagatggtgcccaaggacgtcatgggtaacctggttggttccctg

SEQ ID NO: 47977 - DNA, 57 bp, synthetic construct
  source 1..57: mol_type = other DNA
gcgttacccgaaatcgtgattagtagcagcgccgacttcgcttccttcctgcaatct

SEQ ID NO: 47978 - DNA, 114 bp, synthetic construct
  source 1..114: mol_type = other DNA
ttcataagagacatcccaactagctttgtgaacgccaatcagatgcctagtctccaacacatattcggcaccgattggatgggacgggacatgtttcaacggaccatcgctggt

SEQ ID NO: 47979 - DNA, 90 bp, synthetic construct
  source 1..90: mol_type = other DNA
accttcctggggttcggactgcctccacacgaacccgctattggcgtgatcctggccgagtccatgcactacctctcatctggatactgg

SEQ ID NO: 47980 - DNA, 126 bp, synthetic construct
  source 1..126: mol_type = other DNA
aatgtgttcggcaacctgtggctagtttatcaagagatcttccttcaagctcaaaacctctacaccggcgccgcatccacatttgtcgtctctgatgcgctaagccacgccatggtcaacctagcc

SEQ ID NO: 47981 - DNA, 129 bp, synthetic construct
  source 1..129: mol_type = other DNA
aacctgttcggcatggcttacactatcgtctctcggatgatgctggcatccatggctgctcctgccaatgccacaatcgtgatcaccgacgtggtgccacaaagtctgattattaacttcggaactgca

SEQ ID NO: 47982 - DNA, 93 bp, synthetic construct
  source 1..93: mol_type = other DNA
ctgaaaaccctcgacatcacacggattgtgatgggcactctggataagacaaacgccacgaccatgggcttttctcaaatgcccagtggagat

SEQ ID NO: 47983 - DNA, 135 bp, synthetic construct
  source 1..135: mol_type = other DNA
gagatcattgccaacatcaagaaccccaacaataaccctgtgaacagcggatacgtgactttcaatctgggggacaagacctacaccgtgaacgtcaccaacggcattgctaagatcacccacctcttcaccact

SEQ ID NO: 47984 - DNA, 66 bp, synthetic construct
  source 1..66: mol_type = other DNA
ctggggcacgagaacttgtcactgtctggattctggtactacctgggccttggagtgttcgaaggc

SEQ ID NO: 47985 - DNA, 30 bp, synthetic construct
  source 1..30: mol_type = other DNA
ttgttcgggagaggttggtgcggatacgcg

SEQ ID NO: 47986 - DNA, 33 bp, synthetic construct
  source 1..33: mol_type = other DNA
agcatcggatgcgaccctaagacctccctgacg

SEQ ID NO: 47987 - DNA, 42 bp, synthetic construct
  source 1..42: mol_type = other DNA
tggggcgtgcaagggctgcccgatttctcattgggatacgtt

SEQ ID NO: 47988 - DNA, 126 bp, synthetic construct
  source 1..126: mol_type = other DNA
aacatcttcggcaatgtgatggtggtctaccacggcatagttagccaagcccacaacgcctatgttggtaactccaccgtgttggtgtccgatgctctttcgcaagcaattgtcaatttggctgtg

SEQ ID NO: 47989 - DNA, 126 bp, synthetic construct
  source 1..126: mol_type = other DNA
aatgtttacgggaatgctatgattgtagcacaggaaatctatctgcaagccgcatactcctacatgggtagcagttctgccatcgcattcgacgccatctatcaagcattagtgaacctgctgttt

SEQ ID NO: 47990 - DNA, 33 bp, synthetic construct
  source 1..33: mol_type = other DNA
ggcagtcgcggagttagccacctggctgaagtg

SEQ ID NO: 47991 - DNA, 30 bp, synthetic construct
  source 1..30: mol_type = other DNA
tttattcaaggggtagcttacaactctgcc

SEQ ID NO: 47992 - DNA, 45 bp, synthetic construct
  source 1..45: mol_type = other DNA
gccggaggcgccatcgagcacaacactgcatctgtcgtggctttc

SEQ ID NO: 47993 - DNA, 105 bp, synthetic construct
  source 1..105: mol_type = other DNA
ggctatatgagccttcactcgggcgctcccgtctctgagattgtttcccaaggcaccactctgatcttcgtggcctaccctcaagttttcaatatcctcggaacc

SEQ ID NO: 47994 - DNA, 63 bp, synthetic construct
  source 1..63: mol_type = other DNA
atggccacgatagatagctttctgcccgatttcattcaaagctactttttctccggctacact

SEQ ID NO: 47995 - DNA, 39 bp, synthetic construct
  source 1..39: mol_type = other DNA
gacaacggcattttccccaagacagtgtttctgatcacc

SEQ ID NO: 47996 - DNA, 72 bp, synthetic construct
  source 1..72: mol_type = other DNA
gccgtggagcacttcaactactatgaacagcatgtcctgccgaacgtgctgaaccagctctttgacacttac

SEQ ID NO: 47997 - DNA, 96 bp, synthetic construct
  source 1..96: mol_type = other DNA
gttgagaccaagacaccgctggacgcaatcgtgatggtttctaatgcctttactagtaatggatacgctgtgctcgggcacagcggcgtagttgag

SEQ ID NO: 47998 - DNA, 72 bp, synthetic construct
  source 1..72: mol_type = other DNA
gacaatccaactctcggttacaaccttatcacacttgcctcaataatcattattctgcaagcggctgcccct

SEQ ID NO: 47999 - DNA, 42 bp, synthetic construct
  source 1..42: mol_type = other DNA
cccaatgcgtttttatgggtacttggcaacttcaatggtatc

SEQ ID NO: 48000 - DNA, 51 bp, synthetic construct
  source 1..51: mol_type = other DNA
tggcagaacctggccggatctatcctggcctacgtcttccgaaggtatctg

SEQ ID NO: 48001 - DNA, 33 bp, synthetic construct
  source 1..33: mol_type = other DNA
tcccagatgaacgccgagagcttcttcgctatc

SEQ ID NO: 48002 - DNA, 54 bp, synthetic construct
  source 1..54: mol_type = other DNA
gacatcctcacctacatgggcgccacctcctctatggagctgagcatgcagtat

SEQ ID NO: 48003 - DNA, 75 bp, synthetic construct
  source 1..75: mol_type = other DNA
cccaactggtgcactgcgctctttaactgcatcaagaaccggattctggaccacttccctagcaagggactttgg

SEQ ID NO: 48004 - DNA, 141 bp, synthetic construct
  source 1..141: mol_type = other DNA
accaacataacaggcaatattatggccgtggccgccgagatcagcagtcaggcagtaaacgtatacactggcgccagtgcctccattgcgactgacgctttgtctcaagcgtttgccggtttagctgttagtttggccaca

SEQ ID NO: 48005 - DNA, 87 bp, synthetic construct
  source 1..87: mol_type = other DNA
gagaacgtgaaccctctgaacgctttggtcatggtatccaacgcattcacgtcaaacggatacgcagtgcttgggtccagtgtcatc

SEQ ID NO: 48006 - DNA, 39 bp, synthetic construct
  source 1..39: mol_type = other DNA
agctatattggcatccagtcccaatatggtttgcttact

SEQ ID NO: 48007 - DNA, 42 bp, synthetic construct
  source 1..42: mol_type = other DNA
ggctggggaagcaatcccatcccttacaccattgggttcgtc

SEQ ID NO: 48008 - DNA, 207 bp, synthetic construct
  source 1..207: mol_type = other DNA
cagctgtcccctatcgaccccgttaaagcttacctgggccagaggattgttagtcaagagcagctggccatcatgggcgaatattggggcaccaacctcaccctgggcgagcgggtgctcggatggctacaaacgctagcctctgggtccatggggttcagcctgatttaccgtgcaccggtgactgaggtcgccgctatacaaaag

SEQ ID NO: 48009 - DNA, 72 bp, synthetic construct
  source 1..72: mol_type = other DNA
gagcaagtgttcgcctaccctggaatcggccaggcaaccgtcgccgctggacttcggtctgatgttcctctg

SEQ ID NO: 48010 - DNA, 294 bp, synthetic construct
  source 1..294: mol_type = other DNA
aatgacgccaactctattaagaccgaaacaagcgatgacctcgaggagtctatcgacgacatgatcgaggaacggctgaaagacaccagcggcgtggtcatggctaacgacaactactcctgcggccccgcatccctggctactgtgctgaacagatacggactgaacctcagtctgaacgaggttagcaagcagaccaacacctctgtcaacgggaccacaatgcagagccttattgatgctgctcaatattatggcttctccgcctacggagtcgagatcgacacccagaac

SEQ ID NO: 48011 - DNA, 81 bp, synthetic construct
  source 1..81: mol_type = other DNA
aagtataaggtcaaagagccaatctacaagtactattacgtgtcagatgatagtctgacgtcagccaagcttaaaaggaag

SEQ ID NO: 48012 - DNA, 90 bp, synthetic construct
  source 1..90: mol_type = other DNA
ctcggcctgttctcttcctacatcctgcctgggcccatcgacgtcatcaatagcgcctgggtagtcatccaaaacggcaaactgttgacc

SEQ ID NO: 48013 - DNA, 60 bp, synthetic construct
  source 1..60: mol_type = other DNA
ggctcctctagcgggctgggctacatgattcttactgctactaacctcttcgacactggc

SEQ ID NO: 48014 - DNA, 36 bp, synthetic construct
  source 1..36: mol_type = other DNA
gaggtggccaacggctttagcttctcctacgaaatg

SEQ ID NO: 48015 - DNA, 42 bp, synthetic construct
  source 1..42: mol_type = other DNA
atttcaacgtctttcaagtactctttcatcttcttctccgaa

SEQ ID NO: 48016 - DNA, 117 bp, synthetic construct
  source 1..117: mol_type = other DNA
gtgaagaaccagctggactttaacaactcccctctggcctccccccaagattctttcgccgcacttgctgacctgatcaataatggcgatcccatggaacacagatcactctggagc

SEQ ID NO: 48017 - DNA, 69 bp, synthetic construct
  source 1..69: mol_type = other DNA
tacaacacaaccctgtctgggattggctactacgtgaagttcatgatcgacaacagctcctatgactac

SEQ ID NO: 48018 - DNA, 78 bp, synthetic construct
  source 1..78: mol_type = other DNA
atcatgggcgatacagacgaccccgctctctgggagggccagctgctgtggttcaacgtgcacatgactgatgctagc

SEQ ID NO: 48019 - DNA, 45 bp, synthetic construct
  source 1..45: mol_type = other DNA
gattggatcgacatgaccgctctgttcgcacccgttttgggttgg

SEQ ID NO: 48020 - DNA, 117 bp, synthetic construct
  source 1..117: mol_type = other DNA
gtcttcggcggcattatgaccctcgtcgaggaaatcctgctgctcgcccctaacgctctcattcaaaattccggttcgtttagcgacgctgtgtacaatgctgctcttcctctgttc

SEQ ID NO: 48021 - DNA, 123 bp, synthetic construct
  source 1..123: mol_type = other DNA
aatatctacgggaactttatgaccgtattccaacaaattgtactgatcgccagcgacacgtacaccgggtcctctgccgtcgtttatgatgggctggcacaagcgattgtgaacctggctgtg

SEQ ID NO: 48022 - DNA, 30 bp, synthetic construct
  source 1..30: mol_type = other DNA
ctgctcgacctgaccaacgtgcacaatgag

SEQ ID NO: 48023 - DNA, 30 bp, synthetic construct
  source 1..30: mol_type = other DNA
accggagcgatagccggaggcgtccctgtt

SEQ ID NO: 48024 - DNA, 114 bp, synthetic construct
  source 1..114: mol_type = other DNA
accgggattatggtgccagaggccttcgccggcggcgctatgacaatagcccagacaaaagctctcggcggagcaactttcatggccgctggcaagagcacagctagtcttacc

SEQ ID NO: 48025 - DNA, 30 bp, synthetic construct
  source 1..30: mol_type = other DNA
ttcctgggcgcccccgtgagctgggcccag

SEQ ID NO: 48026 - DNA, 36 bp, synthetic construct
  source 1..36: mol_type = other DNA
ccaacaggcaccactgggcctttgcacgtgttccca

SEQ ID NO: 48027 - DNA, 45 bp, synthetic construct
  source 1..45: mol_type = other DNA
attttccatatccacctgataaagggcgttagcctcgtgatcctg

SEQ ID NO: 48028 - DNA, 30 bp, synthetic construct
  source 1..30: mol_type = other DNA
ggccagaatattaccctgctgatcaacaca

SEQ ID NO: 48029 - DNA, 123 bp, synthetic construct
  source 1..123: mol_type = other DNA
accctgatccccctgcacccatacgcttacgccctcgcatgcggggttggatccacatccatgaacgtcgccgccgtgtcttccctggctacaatctaccctgctattagccagcagctctac

SEQ ID NO: 48030 - DNA, 78 bp, synthetic construct
  source 1..78: mol_type = other DNA
atcatgggggacgccaaccagcccgcattatgggacggaaagttcctgtggttcaccgttcacatgactgacgcttca

SEQ ID NO: 48031 - DNA, 48 bp, synthetic construct
  source 1..48: mol_type = other DNA
gccggctggatcgacatgaccgccattttcgctccctacatgggatgg

SEQ ID NO: 48032 - DNA, 120 bp, synthetic construct
  source 1..120: mol_type = other DNA
catattttcgagaacctggccattatcgcccacgagatcagcagtcaggcttggctgacctaccttggctctacaatcgtgatcactgacgctctgtcccacgccctggtcaatctgctc

SEQ ID NO: 48033 - DNA, 33 bp, synthetic construct
  source 1..33: mol_type = other DNA
gccattggtctggattcgagtctcgcactgcgg

SEQ ID NO: 48034 - DNA, 45 bp, synthetic construct
  source 1..45: mol_type = other DNA
ctgtctcttcaaaaccttcccgagtacagcctgggctacatcaat

SEQ ID NO: 48035 - DNA, 39 bp, synthetic construct
  source 1..39: mol_type = other DNA
gcctacagcttctccggcctgtctgctgagctcatcacc

SEQ ID NO: 48036 - DNA, 51 bp, synthetic construct
  source 1..51: mol_type = other DNA
ctcggccgcgagaacctgcttctgtccggattttggtactatcttttcctc

SEQ ID NO: 48037 - DNA, 54 bp, synthetic construct
  source 1..54: mol_type = other DNA
ttcggaggcgaaaatctcctgctgagcggattctggtactaccttttccttggt

SEQ ID NO: 48038 - DNA, 30 bp, synthetic construct
  source 1..30: mol_type = other DNA
atcttcgggagagggtggtgcggatacgcc

SEQ ID NO: 48039 - DNA, 39 bp, synthetic construct
  source 1..39: mol_type = other DNA
cacgacaaccgggccttctgcaaatatgtttgccctatc

SEQ ID NO: 48040 - DNA, 33 bp, synthetic construct
  source 1..33: mol_type = other DNA
tcccagatgaacgctgagtcctttttcgccatc

SEQ ID NO: 48041 - DNA, 54 bp, synthetic construct
  source 1..54: mol_type = other DNA
gacatcctcacctacatcggcgccacatcttccatggagctgagcatccagtat

SEQ ID NO: 48042 - DNA, 51 bp, synthetic construct
  source 1..51: mol_type = other DNA
aacagcataaagaataggaacccaaatgacatttccaccaaaggaatctgg

SEQ ID NO: 48043 - DNA, 57 bp, synthetic construct
  source 1..57: mol_type = other DNA
atcctcggccgcgagaatctcctgctgagcggattctggtactgcctgttcttgggc

SEQ ID NO: 48044 - DNA, 42 bp, synthetic construct
  source 1..42: mol_type = other DNA
atcgccgcattttccgacaacacttccgcttctttcgtgtcc

SEQ ID NO: 48045 - DNA, 33 bp, synthetic construct
  source 1..33: mol_type = other DNA
gcgatctgtggcggagtggctggtaaccactgg

SEQ ID NO: 48046 - DNA, 123 bp, synthetic construct
  source 1..123: mol_type = other DNA
tttgaaatcggtggaatcgaggacccctggtacctgctggagtattgtagcgatgacatcgtgttcgccattgatggaaccttcgacatgatgggcacacaatatgttcgggatgtcgatctg

SEQ ID NO: 48047 - DNA, 102 bp, synthetic construct
  source 1..102: mol_type = other DNA
gccgacaagcccgcaatcccaacaccctacgacaccttcgtcgccctgatagatctcttcaaatacggcgaccctatccatgatgtggctatcagcgtgtac

SEQ ID NO: 48048 - DNA, 33 bp, synthetic construct
  source 1..33: mol_type = other DNA
ctgttcaccggagcagacggcgatacaacttgg

SEQ ID NO: 48049 - DNA, 66 bp, synthetic construct
  source 1..66: mol_type = other DNA
tacgacggattcaaccccgggctgggcagctacctctccctgatgatcagcaacagtagctacgag

SEQ ID NO: 48050 - DNA, 30 bp, synthetic construct
  source 1..30: mol_type = other DNA
atcctgatcaccgccgtgcccggcagcggc

SEQ ID NO: 48051 - DNA, 93 bp, synthetic construct
  source 1..93: mol_type = other DNA
gggcccacatacaacctcttcgatgacttctactttgtgatcgtcaccttaactactgttggttatggagacgtcgtccctcaaacctataat

SEQ ID NO: 48052 - DNA, 66 bp, synthetic construct
  source 1..66: mol_type = other DNA
ctgggacacgagaacctcagcctgtctggcttctggtactatctgtccctcggcgtgttcgaaggc

SEQ ID NO: 48053 - DNA, 30 bp, synthetic construct
  source 1..30: mol_type = other DNA
ctgttcggaaggggctggtgtggatacgcg

SEQ ID NO: 48054 - DNA, 33 bp, synthetic construct
  source 1..33: mol_type = other DNA
aaccgggccttctgcaaatatgtttgccccatc

SEQ ID NO: 48055 - DNA, 63 bp, synthetic construct
  source 1..63: mol_type = other DNA
atcggacacgagaacctgtcactgtccgggttttggtactatctaagcctgggcgtgtttgaa

SEQ ID NO: 48056 - DNA, 33 bp, synthetic construct
  source 1..33: mol_type = other DNA
aaccgggccttttgcaaatatatatgccctatc

SEQ ID NO: 48057 - DNA, 30 bp, synthetic construct
  source 1..30: mol_type = other DNA
accggagccgtagctggcggggttcctatc

SEQ ID NO: 48058 - DNA, 114 bp, synthetic construct
  source 1..114: mol_type = other DNA
accggcatcatggtgcctgaggcctttgccggcggagccattacaatcgccaacaccaaagctcttggcggagctaccttcatggccgctgggaaaagcacagcatcccttacc

SEQ ID NO: 48059 - DNA, 30 bp, synthetic construct
  source 1..30: mol_type = other DNA
ttcctgggtgccgaagtgacttgggctcag

SEQ ID NO: 48060 - DNA, 129 bp, synthetic construct
  source 1..129: mol_type = other DNA
agcggcaccttctcctctctgatgaagattgttcgacttgtcggacgcgacgtggtcaacactaccgtgaacgcgacagccatggctcatagtgtaccccatgagtactatgttgcactctttaacggc

SEQ ID NO: 48061 - DNA, 114 bp, synthetic construct
  source 1..114: mol_type = other DNA
atctttggaaacattatgaaattcgcacaagagctctatctccaagcaccacacatcctgatggggaccgcttctgttcgtgacgccatctaccacgctgcctttccactcctt

SEQ ID NO: 48062 - DNA, 87 bp, synthetic construct
  source 1..87: mol_type = other DNA
gagaaccagaatcccatcaacgccctcggcatggtcagcaatgccttcacctccaacggatacgcagtcctgggcaagacagctgga

SEQ ID NO: 48063 - DNA, 87 bp, synthetic construct
  source 1..87: mol_type = other DNA
aagaacatcaacatagttagaatcttctcttccgccaatggcaacaccctcgctctgaagagtagccagatcccacctattgacgtg

SEQ ID NO: 48064 - DNA, 48 bp, synthetic construct
  source 1..48: mol_type = other DNA
tccatcagcctgcccctgctcgacgtggtcacgggaacaaacgatcct

SEQ ID NO: 48065 - DNA, 42 bp, synthetic construct
  source 1..42: mol_type = other DNA
tacacgccactacaatatctaattctgggaggagagttcagt

SEQ ID NO: 48066 - DNA, 39 bp, synthetic construct
  source 1..39: mol_type = other DNA
agcttcaaccaaatcactacattcgtgaatgcagacatt

SEQ ID NO: 48067 - DNA, 30 bp, synthetic construct
  source 1..30: mol_type = other DNA
agcaccgtgatgggcgacatcgttccttcc

SEQ ID NO: 48068 - DNA, 42 bp, synthetic construct
  source 1..42: mol_type = other DNA
accatccccatcaacggcacaccactgcacgtgttccctatc

SEQ ID NO: 48069 - DNA, 57 bp, synthetic construct
  source 1..57: mol_type = other DNA
attggccacgagaacatgctgatcagcggattctggtactatctgttccttggtgtg

SEQ ID NO: 48070 - DNA, 30 bp, synthetic construct
  source 1..30: mol_type = other DNA
ctgttcggacgaggctggtgtggatacgcc

SEQ ID NO: 48071 - DNA, 30 bp, synthetic construct
  source 1..30: mol_type = other DNA
ttcaagatccccaaccttgagatcatcatg

SEQ ID NO: 48072 - DNA, 69 bp, synthetic construct
  source 1..69: mol_type = other DNA
atcctgggccacgagaacctctccctgagcgggttttggtactacctctctctgggagtgttcgaaggc

SEQ ID NO: 48073 - DNA, 45 bp, synthetic construct
  source 1..45: mol_type = other DNA
ggcagcacctcccgtcaaatgttatttgagttcaagatcctggaa

SEQ ID NO: 48074 - DNA, 51 bp, synthetic construct
  source 1..51: mol_type = other DNA
ctgggccacgaaaaccttctgatctctggcttctggtactatctgtttctc

SEQ ID NO: 48075 - DNA, 30 bp, synthetic construct
  source 1..30: mol_type = other DNA
gccatgggtagcgacatcgctgatgaagca

SEQ ID NO: 48076 - DNA, 33 bp, synthetic construct
  source 1..33: mol_type = other DNA
tacattggcgtggaacctgacctcgctatcctg

SEQ ID NO: 48077 - DNA, 45 bp, synthetic construct
  source 1..45: mol_type = other DNA
ggctggggagtgtccacttttccctattcaatcggttacgtctat

SEQ ID NO: 48078 - DNA, 30 bp, synthetic construct
  source 1..30: mol_type = other DNA
atcggcgtagagccagacctcgcaatgctg

SEQ ID NO: 48079 - DNA, 42 bp, synthetic construct
  source 1..42: mol_type = other DNA
ggctggggagtcaacacctttccctatagcattggatacgtc

SEQ ID NO: 48080 - DNA, 36 bp, synthetic construct
  source 1..36: mol_type = other DNA
tacgagtatatgctcaacgcactacaccaattgcac

SEQ ID NO: 48081 - DNA, 30 bp, synthetic construct
  source 1..30: mol_type = other DNA
atcgtccactccgtgtcggtcaactttagc

SEQ ID NO: 48082 - DNA, 87 bp, synthetic construct
  source 1..87: mol_type = other DNA
gagcacgtggacccactgaacagcctagtgatggtatccaatgcattcacttccaacggctatgctgtactgggcagctctgttatc

SEQ ID NO: 48083 - DNA, 36 bp, synthetic construct
  source 1..36: mol_type = other DNA
tacaagtacatgctgaccgccctccatgagttccac

SEQ ID NO: 48084 - DNA, 33 bp, synthetic construct
  source 1..33: mol_type = other DNA
gagattgtctcgtcggcctctgtggacgtcttc

SEQ ID NO: 48085 - DNA, 36 bp, synthetic construct
  source 1..36: mol_type = other DNA
tatgagtacatgctgaacgccctccatcaatttcat

SEQ ID NO: 48086 - DNA, 87 bp, synthetic construct
  source 1..87: mol_type = other DNA
gaggacgtatcgcctctggatagcattgtcatggtttctaatgctttcacctccaacggctacgctgtgctgggaagctccggaatc

SEQ ID NO: 48087 - DNA, 39 bp, synthetic construct
  source 1..39: mol_type = other DNA
aaacccgtgaagaactacggcaagcctaaggctaggagg

SEQ ID NO: 48088 - DNA, 36 bp, synthetic construct
  source 1..36: mol_type = other DNA
ctgaacaacaatatcggcgtcatggtggaggagttc

SEQ ID NO: 48089 - DNA, 93 bp, synthetic construct
  source 1..93: mol_type = other DNA
agtgagcacgtgaaccccctggacgcgctcgtcatggtgtccaatagttttacttcaaacggatacgcagtactgggcagttctgtgcccggc

SEQ ID NO: 48090 - DNA, 36 bp, synthetic construct
  source 1..36: mol_type = other DNA
tacaagtatatgctcaacgccttgcaccaactacat

SEQ ID NO: 48091 - DNA, 33 bp, synthetic construct
  source 1..33: mol_type = other DNA
gagatcatctcctccgtctctgttaacatgtcc

SEQ ID NO: 48092 - DNA, 33 bp, synthetic construct
  source 1..33: mol_type = other DNA
tacatcggcgtggaacctgacctggctattctg

SEQ ID NO: 48093 - DNA, 42 bp, synthetic construct
  source 1..42: mol_type = other DNA
ggatggggcgtgtccacctttccatactctataggctacgtc

SEQ ID NO: 48094 - DNA, 33 bp, synthetic construct
  source 1..33: mol_type = other DNA
gcttacatgctggacgccatccacgaactcagg

SEQ ID NO: 48095 - DNA, 30 bp, synthetic construct
  source 1..30: mol_type = other DNA
gagatcatgtcctcggtgtcattaaacttc

SEQ ID NO: 48096 - DNA, 99 bp, synthetic construct
  source 1..99: mol_type = other DNA
ctgagcacacggttccacctgcccgagtttcatcttaggttcgccctgtcccacctcatcgagaccctgaagctctactactggcacaaccctgtgtca

SEQ ID NO: 48097 - DNA, 33 bp, synthetic construct
  source 1..33: mol_type = other DNA
accgaatacgctacctccatgggaagcacagcc

SEQ ID NO: 48098 - DNA, 48 bp, synthetic construct
  source 1..48: mol_type = other DNA
ctctacgctgtggaggtcaatctagtatcggacttccactgctccttc

SEQ ID NO: 48099 - DNA, 36 bp, synthetic construct
  source 1..36: mol_type = other DNA
tacaagtatatgctgaacgccctgcaccaactccat

SEQ ID NO: 48100 - DNA, 30 bp, synthetic construct
  source 1..30: mol_type = other DNA
attataaactcagctggactgtctttcgcc

SEQ ID NO: 48101 - DNA, 36 bp, synthetic construct
  source 1..36: mol_type = other DNA
tataagtacatgctggacgtgctgcatgaactccac

SEQ ID NO: 48102 - DNA, 30 bp, synthetic construct
  source 1..30: mol_type = other DNA
atagccaatagcgttggcctgaatttcgcc

SEQ ID NO: 48103 - DNA, 36 bp, synthetic construct
  source 1..36: mol_type = other DNA
tataagtacatgctgaatgccctgcataacctccag

SEQ ID NO: 48104 - DNA, 36 bp, synthetic construct
  source 1..36: mol_type = other DNA
tatgaatacatgctgaccgccctgcatgagttccac

SEQ ID NO: 48105 - DNA, 30 bp, synthetic construct
  source 1..30: mol_type = other DNA
gataacgacattatcatgcacaatagtccc

SEQ ID NO: 48106 - DNA, 84 bp, synthetic construct
  source 1..84: mol_type = other DNA
gaaaacgaggaccccctgaatgctctcgtcatggtgtccaacgcattcacgagcaatgggtactccatcaccggcgaatctgtc

SEQ ID NO: 48107 - DNA, 87 bp, synthetic construct
  source 1..87: mol_type = other DNA
gagaacgtcaaccccctgaacgccttagttatggtatccaatgcctttacttccaacggttacgctgttctcggctctagcatcata

SEQ ID NO: 48108 - DNA, 36 bp, synthetic construct
  source 1..36: mol_type = other DNA
taccagtatatgctcaccgccctgcatgagcttcac

SEQ ID NO: 48109 - DNA, 90 bp, synthetic construct
  source 1..90: mol_type = other DNA
gagaatgtggaccctcttaacgccctagtgatggtctctaacgcattcacaagtaatggatacgctgtgctgggcaagtccacaatcggc

SEQ ID NO: 48110 - DNA, 45 bp, synthetic construct
  source 1..45: mol_type = other DNA
gagttcacctatggggctttcgtggccggcttttacgagggattt

SEQ ID NO: 48111 - DNA, 171 bp, synthetic construct
  source 1..171: mol_type = other DNA
tctagtagcaacatactgggccacaattatcgggacgcttatctctacctcatccaagcataccattttgcgggaactcctattggaggatatgattacgtgaactattattccccactgattcctttcctgacctcactcctcttccggctcggatttgttagcgaagcg

SEQ ID NO: 48112 - DNA, 123 bp, synthetic construct
  source 1..123: mol_type = other DNA
tccataagacaaggtcgattccaattaaaactgtttccccaaacacaaccgcaactgccattgatgatatgcagttctatcttcccagtcttccaggggtcctacaccgccctgaagagaagc

SEQ ID NO: 48113 - DNA, 36 bp, synthetic construct
  source 1..36: mol_type = other DNA
tatgagtacatgctgaacgccctgcatcaactgcac

SEQ ID NO: 48114 - DNA, 30 bp, synthetic construct
  source 1..30: mol_type = other DNA
atcgccaatagcgtgtccgtcaacattggc

SEQ ID NO: 48115 - DNA, 33 bp, synthetic construct
  source 1..33: mol_type = other DNA
ctgattttacccgcgatattttcgtctgcacgc

SEQ ID NO: 48116 - DNA, 93 bp, synthetic construct
  source 1..93: mol_type = other DNA
ggccccagctacggactctttgacgacttctacttcgtcgtggtcaccctgacaacagttggctacggagatatcacgcctgtgactttcaac

SEQ ID NO: 48117 - DNA, 36 bp, synthetic construct
  source 1..36: mol_type = other DNA
tacagctacatgctcgacgcccttcaccaactgaat

SEQ ID NO: 48118 - DNA, 30 bp, synthetic construct
  source 1..30: mol_type = other DNA
atcatgaacagcgtgtccatcaacatctct

SEQ ID NO: 48119 - DNA, 54 bp, synthetic construct
  source 1..54: mol_type = other DNA
ttccatgagcactccatgatcattcccgtgataatcggcgactttagcgttacg

SEQ ID NO: 48120 - DNA, 42 bp, synthetic construct
  source 1..42: mol_type = other DNA
atcgactacgctaagcttggtctgatcgagctcatatatcag

SEQ ID NO: 48121 - DNA, 51 bp, synthetic construct
  source 1..51: mol_type = other DNA
gccgcactcgaccctttctccgacgaggatgataaaaagcggctgacagaa

SEQ ID NO: 48122 - DNA, 90 bp, synthetic construct
  source 1..90: mol_type = other DNA
gagacaggcgctggctccgggaccgccttctggatgattgaccgggcctctaatggcatcgtgaactgcctgagtgatagctacgacgac

SEQ ID NO: 48123 - DNA, 108 bp, synthetic construct
  source 1..108: mol_type = other DNA
actggcatcatgaccggagaagccttcgccaagggggccatcaccatcgctaacaccaaagctcttggcggcgctgcattcggggctgaggccaccaagagccttacc

SEQ ID NO: 48124 - DNA, 30 bp, synthetic construct
  source 1..30: mol_type = other DNA
ttcctgggtgctgaggtgacttgggcacag

SEQ ID NO: 48125 - DNA, 120 bp, synthetic construct
  source 1..120: mol_type = other DNA
gtgtttggaaatttcatgatcgtagcgcaaggcataatgctgcaagccgagggctcctacctggggtactctacctcatttatgtccggtgcaatatcacaagcccttatcaaccttgca

SEQ ID NO: 48126 - DNA, 30 bp, synthetic construct
  source 1..30: mol_type = other DNA
attgctgggtcttatgacatggcttccatc

SEQ ID NO: 48127 - DNA, 30 bp, synthetic construct
  source 1..30: mol_type = other DNA
attgccggcaccttcgacatgacagctatc

SEQ ID NO: 48128 - DNA, 132 bp, synthetic construct
  source 1..132: mol_type = other DNA
accggcctgttctcttcctttactaaaatcatttatgcatctgtggacgccatggcaaataacgcttctaacctgacaatgatcatggccgccattccacaaagtaccatgaacacgttcacgaacgctctg

SEQ ID NO: 48129 - DNA, 117 bp, synthetic construct
  source 1..117: mol_type = other DNA
gtcgtcggcaatatcctgaacgttttcgacgctattgcccttgaagctagcacactgttcatgggcacctacgagaacgcagtgtccatcgcctcattccaattgttcgcaagtctg

SEQ ID NO: 48130 - DNA, 39 bp, synthetic construct
  source 1..39: mol_type = other DNA
ttcgactttatcctgattgagacagtgtcaggcttcacc

SEQ ID NO: 48131 - DNA, 93 bp, synthetic construct
  source 1..93: mol_type = other DNA
gggcccagctacaacctcttcgatgacttctacttcgtggtcgtgaccctgacaacagtcggatacggcgacgtgaccccccaaacgtacaat

SEQ ID NO: 48132 - DNA, 42 bp, synthetic construct
  source 1..42: mol_type = other DNA
ttctggctcggtatctacgccgctgccgcttacgagtggctg

SEQ ID NO: 48133 - DNA, 84 bp, synthetic construct
  source 1..84: mol_type = other DNA
gaaggcgtcgagccattgaactctgctgtgatggtgtctaatgcatttactagcaatggatacgctatccttggaaacagtggt

SEQ ID NO: 48134 - DNA, 33 bp, synthetic construct
  source 1..33: mol_type = other DNA
atgcagttcaactttagctacaacttcaacctc

SEQ ID NO: 48135 - DNA, 90 bp, synthetic construct
  source 1..90: mol_type = other DNA
gtggagtccaagaacctattagatagcctagtgatggtctctaatgctttcacctccaacggatacgcaattttggggtctacgacactt

SEQ ID NO: 48136 - DNA, 81 bp, synthetic construct
  source 1..81: mol_type = other DNA
agctccgtaaatgcattccatatgcctctggccaatgcatttcacgtgcccctggccaacgcatccatggggggtggcctg

SEQ ID NO: 48137 - DNA, 36 bp, synthetic construct
  source 1..36: mol_type = other DNA
tacactcctatctttagcattttccaaatggagccc

SEQ ID NO: 48138 - DNA, 48 bp, synthetic construct
  source 1..48: mol_type = other DNA
gtcgagttcacctacggcgcctttgtggctgggttctatgagggattc

SEQ ID NO: 48139 - DNA, 63 bp, synthetic construct
  source 1..63: mol_type = other DNA
ggcctctccatcattagctttgatagtcccctgttcggtgacttttctagtctctctgctgaa

SEQ ID NO: 48140 - DNA, 84 bp, synthetic construct
  source 1..84: mol_type = other DNA
atcctatacggatcagtgtaccctgatatggagccactgctcgatttcacccctaacgcccttgaccctctgtcactcgatcct

SEQ ID NO: 48141 - DNA, 36 bp, synthetic construct
  source 1..36: mol_type = other DNA
gtgaacgctgacgcctttctgttccaaatgcctgtg

SEQ ID NO: 48142 - DNA, 75 bp, synthetic construct
  source 1..75: mol_type = other DNA
accgccagcgaccgggtcgtggataacgtgctgtccggcgagacaatcattcacttcttcaagaaggtttttaag

SEQ ID NO: 48143 - DNA, 30 bp, synthetic construct
  source 1..30: mol_type = other DNA
atagctggatcctatgacatggtgtccatc

SEQ ID NO: 48144 - DNA, 33 bp, synthetic construct
  source 1..33: mol_type = other DNA
cacatcggcgttaatagtgacctggcaatgctc

SEQ ID NO: 48145 - DNA, 42 bp, synthetic construct
  source 1..42: mol_type = other DNA
ggctggggcgtgtccacgttcccttactctataggatatgtt

SEQ ID NO: 48146 - DNA, 60 bp, synthetic construct
  source 1..60: mol_type = other DNA
gccctgcccgagatggaactcctgtcgtctggtgacttctacaactttgtcgtgtccatc

SEQ ID NO: 48147 - DNA, 48 bp, synthetic construct
  source 1..48: mol_type = other DNA
aacgacgtggttagagttagcgatcacgtcatgtacggcgaacatgag

SEQ ID NO: 48148 - DNA, 54 bp, synthetic construct
  source 1..54: mol_type = other DNA
ttcggcaccaacgtggactttctggatattttcccccaattgtccatctaccct

SEQ ID NO: 48149 - DNA, 36 bp, synthetic construct
  source 1..36: mol_type = other DNA
attatgctcttcaccaagaacatcttcctggtggtc

SEQ ID NO: 48150 - DNA, 33 bp, synthetic construct
  source 1..33: mol_type = other DNA
gtcaagttcctcggcggactaagcgcggagttc

SEQ ID NO: 48151 - DNA, 30 bp, synthetic construct
  source 1..30: mol_type = other DNA
atagctgggtccttcgacatgctggctatc

SEQ ID NO: 48152 - DNA, 33 bp, synthetic construct
  source 1..33: mol_type = other DNA
tacatcggagtggagcccaacttggctatgctg

SEQ ID NO: 48153 - DNA, 42 bp, synthetic construct
  source 1..42: mol_type = other DNA
ggctggggggtatcaaccttcccctattctattggatacgtg

SEQ ID NO: 48154 - DNA, 30 bp, synthetic construct
  source 1..30: mol_type = other DNA
gccatgggcagcgacatcgctgataacacc

SEQ ID NO: 48155 - DNA, 30 bp, synthetic construct
  source 1..30: mol_type = other DNA
attggcgtagctcccgacttagccatcctg

SEQ ID NO: 48156 - DNA, 45 bp, synthetic construct
  source 1..45: mol_type = other DNA
ggctggggcgtgtcaacgttcccctatagcatcggggttgtttac

SEQ ID NO: 48157 - DNA, 33 bp, synthetic construct
  source 1..33: mol_type = other DNA
accctggtgtcaggacctgtcgctgttgccgtg

SEQ ID NO: 48158 - DNA, 63 bp, synthetic construct
  source 1..63: mol_type = other DNA
cagatagccttcgtcttttcatactctgagtcctccgcgcaactggaacccctgattgcaagc

SEQ ID NO: 48159 - DNA, 75 bp, synthetic construct
  source 1..75: mol_type = other DNA
tccaagagcacccagattatcatctacgctaaccggcaaggcgaagtattagcgctgaatctccccaccggagat

SEQ ID NO: 48160 - DNA, 123 bp, synthetic construct
  source 1..123: mol_type = other DNA
gggacctactccgccgtctttaagatcgttgagttcatggggcaggaggtgaccaacactaccgtcaacgcaaccaccatggtcaacactgtcccgcaagagtattggtccgcccttttcgct

SEQ ID NO: 48161 - DNA, 30 bp, synthetic construct; identical to SEQ ID NO: 48154
  source 1..30: mol_type = other DNA

SEQ ID NO: 48162 - DNA, 75 bp, synthetic construct
  source 1..75: mol_type = other DNA
tccaagtccaccgaaattatcttatatgcaaaccggcagggcgaggtgcttgctctgaacctgcctgcgggcgac

SEQ ID NO: 48163 - DNA, 96 bp, synthetic construct
  source 1..96: mol_type = other DNA
atcgacgatagcttctcctccatcttcgattcattctggtatggcctggtgaccattacgggcgtcggctacggagacttcacccccgtttcggac

SEQ ID NO: 48164 - DNA, 48 bp, synthetic construct
  source 1..48: mol_type = other DNA
tactccagcttcatgcaacgatatggcatggaatctgagatcatcctg

SEQ ID NO: 48165 - DNA, 57 bp, synthetic construct
  source 1..57: mol_type = other DNA
ggcatcgggatcagcggctccggcctggactttcaaatttcttacgcgcttagctcg

SEQ ID NO: 48166 - DNA, 93 bp, synthetic construct
  source 1..93: mol_type = other DNA
gacgagtccttcaaatctgtgttcgattcattctggtacaacttagtgacaatcactggtgtcggatatggggactttaccccacaaacctcc

SEQ ID NO: 48167 - DNA, 63 bp, synthetic construct
  source 1..63: mol_type = other DNA
ggccggaccggaatcctcaactttgatagctacctgtttggcaaccttggggctctgaacatg

SEQ ID NO: 48168 - DNA, 39 bp, synthetic construct
  source 1..39: mol_type = other DNA
ctgtttgggagcctagtagcgggaatataccagggattc

SEQ ID NO: 48169 - DNA, 96 bp, synthetic construct
  source 1..96: mol_type = other DNA
tctagccccttcggcttccctccattcgatcttgaggatctgctgatggacgtgcccgagaccgtgcacctgctcttaagccattcgtttgtggac

SEQ ID NO: 48170 - DNA, 69 bp, synthetic construct
  source 1..69: mol_type = other DNA
ttcggcatgggcgatcccacatgggtcagcatcatggacattgactccgtgaacctgacacctggagca

SEQ ID NO: 48171 - DNA, 30 bp, synthetic construct
  source 1..30: mol_type = other DNA
attactcctttcgatagcatcgtgacaacc

SEQ ID NO: 48172 - DNA, 39 bp, synthetic construct
  source 1..39: mol_type = other DNA
ttcatgtttatccccatcgacttcccggttggcattctg

SEQ ID NO: 48173 - DNA, 96 bp, synthetic construct
  source 1..96: mol_type = other DNA
gttgggactagctacaacacatttgactatctctacttcgtgatcgtgaccctgactactgttggctacggcgatattacacccgtcacctataat

SEQ ID NO: 48174 - DNA, 33 bp, synthetic construct
  source 1..33: mol_type = other DNA
tacatcggcgtagagcctgacctggctatgctg

SEQ ID NO: 48175 - DNA, 42 bp, synthetic construct
  source 1..42: mol_type = other DNA
ggctggggtgtcaacactttcccatattctataggatatgta

SEQ ID NO: 48176 - DNA, 99 bp, synthetic construct
  source 1..99: mol_type = other DNA
atcgatgactccttcacgtcaatattcaattctttctggtacgggctggtcaccatcactggcgttggttacggcgacatcacacccattagcaaccag

SEQ ID NO: 48177 - DNA, 30 bp, synthetic construct
  source 1..30: mol_type = other DNA
ctgaccattgacggcacacccatcaaggag

SEQ ID NO: 48178 - DNA, 51 bp, synthetic construct
  source 1..51: mol_type = other DNA
gcctatcctcactataatgcattttccgaaattgatgacgacgagtgtatc

SEQ ID NO: 48179 - DNA, 75 bp, synthetic construct
  source 1..75: mol_type = other DNA
cccagggacgccatcgtgatcgagcgcatcctgcctgcccgggctgatctagtcacgggagaaattgacgtagac

SEQ ID NO: 48180 - DNA, 75 bp, synthetic construct
  source 1..75: mol_type = other DNA
ctgtgtccggcggaagctatcgtggtggacaaagagacggggaaagaaagtattgtcatcgacaaggatgcttgc

SEQ ID NO: 48181 - DNA, 63 bp, synthetic construct
  source 1..63: mol_type = other DNA
accaatgccattaaggccatctgtcgggcatgcaactatggcgaatacgacttagatccttcc

SEQ ID NO: 48182 - DNA, 39 bp, synthetic construct
  source 1..39: mol_type = other DNA
agcgtgatcgactccgagctttgcgtgtattgtggatgg

SEQ ID NO: 48183 - DNA, 81 bp, synthetic construct
  source 1..81: mol_type = other DNA
gaaggggtctgccccactgatgcggcgaaacataaaaagcccttcgagggttccatcgaagtggatcaggacaagtgccag

SEQ ID NO: 48184 - DNA, 93 bp, synthetic construct
  source 1..93: mol_type = other DNA
atctgcagttgtaacgccctggccttcccggtatccagtggccccgggtcccggatggagcacgtgattgctaataacgactactgcgtcaaa

SEQ ID NO: 48185 - DNA, 66 bp, synthetic construct
  source 1..66: mol_type = other DNA
gccaacgcttgccccaacggcgccatcaccgtcaagcggacagaggtggaccacacccctactaat

SEQ ID NO: 48186 - DNA, 33 bp, synthetic construct
  source 1..33: mol_type = other DNA
tacatcggagtcaatcccgacctggctatgctg

SEQ ID NO: 48187 - DNA, 45 bp, synthetic construct
  source 1..45: mol_type = other DNA
ggctggggcgtgtctacgttcccctactccatctatgtagtcggg

SEQ ID NO: 48188 - DNA, 60 bp, synthetic construct
  source 1..60: mol_type = other DNA
acatccgtggaccccagctcttccgtcaccctggatttcagcactgtggacgttggtccc

SEQ ID NO: 48189 - DNA, 36 bp, synthetic construct
  source 1..36: mol_type = other DNA
tttggaagcatagtcgccggcttccaagggggttat

SEQ ID NO: 48190 - DNA, 69 bp, synthetic construct
  source 1..69: mol_type = other DNA
ggcgtccccgtgatgaacctggagtttatcttcggacaagtggagaatcagggacggagtggtggaatt

SEQ ID NO: 48191 - DNA, 102 bp, synthetic construct
  source 1..102: mol_type = other DNA
gtcgggtcgtccattgcaataccgatctcaatgttcgaccctggacgaccactgccccttcacctctacgtgctcgccaccgagggtatctccttgccaaac

SEQ ID NO: 48192 - DNA, 33 bp, synthetic construct
  source 1..33: mol_type = other DNA
tacatcggcgtcgaacccgacctcgctcttctg

SEQ ID NO: 48193 - DNA, 39 bp, synthetic construct
  source 1..39: mol_type = other DNA
tggggtgtcaacacattcccctttagcatcggttacgtg

SEQ ID NO: 48194 - DNA, 30 bp, synthetic construct
  source 1..30: mol_type = other DNA
tacatcggcgtggagcctggacttgcaatg

SEQ ID NO: 48195 - DNA, 42 bp, synthetic construct
  source 1..42: mol_type = other DNA
ggatggggtgtcaacactttcccctactccctgggttatgtg

SEQ ID NO: 48196 - DNA, 33 bp, synthetic construct
  source 1..33: mol_type = other DNA
tacatcggcgtggaacccgacctggctattctg

SEQ ID NO: 48197 - DNA, 45 bp, synthetic construct
  source 1..45: mol_type = other DNA
ggctggggagtgtccacattcccctatagtatcgtatatgttgga

SEQ ID NO: 48198 - DNA, 33 bp, synthetic construct
  source 1..33: mol_type = other DNA
atgctgtttcctgtgaacttccccattagcatc

SEQ ID NO: 48199 - DNA, 96 bp, synthetic construct
  source 1..96: mol_type = other DNA
gtgggaaccagctacaacacatttgactacttctacttcgtcatcgtgacactgaccactgttggttacggggacattacaccggtcacctataat

SEQ ID NO: 48200 - DNA, 30 bp, synthetic construct
  source 1..30: mol_type = other DNA
atgctgcccttcgtgctgaactacactagg

SEQ ID NO: 48201 - DNA, 93 bp, synthetic construct
  source 1..93: mol_type = other DNA
gaccctagcattaacaacctcttcaatagcctgtggttcgtgatcgccacaatcaccaccgtcggctacggggacgttgtgcctaacaccacc

SEQ ID NO: 48202 - DNA, 90 bp, synthetic construct
  source 1..90: mol_type = other DNA
ggcatgttcgaactgcccgatttcgagctggaggaagtttttttgcatatcgggcacattatcggatacttctacgaacacgatcctgtg

SEQ ID NO: 48203 - DNA, 66 bp, synthetic construct
  source 1..66: mol_type = other DNA
ttcagcaaccctatcgccgaacccatttccgagatggtggaggcttctagtggctatatgggtacc

SEQ ID NO: 48204 - DNA, 30 bp, synthetic construct
  source 1..30: mol_type = other DNA
ttcaccacactgcccgacatcctcatggag

SEQ ID NO: 48205 - DNA, 48 bp, synthetic construct
  source 1..48: mol_type = other DNA
cagttctgctggggcaagctggccgctcggttttacgagtggttcttc

SEQ ID NO: 48206 - DNA, 45 bp, synthetic construct
  source 1..45: mol_type = other DNA
cccatcgtgtcgaattcttcatacggaagcaaggataatctgctg

SEQ ID NO: 48207 - DNA, 33 bp, synthetic construct
  source 1..33: mol_type = other DNA
ttcaccgaacccgggagcttttcgaccggggcc

SEQ ID NO: 48208 - DNA, 135 bp, synthetic construct
  source 1..135: mol_type = other DNA
actttcgcacacatcgatacatggtggtccatcaacgatgcccccgggtatctgggatatgtattcaccggaatccggcccgaggtcattgacgtttctccatatgtggtcgacgtggccataacaaccgcggac

SEQ ID NO: 48209 - DNA, 33 bp, synthetic construct
  source 1..33: mol_type = other DNA
atgggcgtgtctaaggtcgagactgtggaactc

SEQ ID NO: 48210 - DNA, 90 bp, synthetic construct
  source 1..90: mol_type = other DNA
gagtccgtgaatcctctggatagtcttgtaatggtaaccaaccagttcacatccaacggctatagcataagtggtcacaccatctctagc

SEQ ID NO: 48211 - DNA, 33 bp, synthetic construct
  source 1..33: mol_type = other DNA
tacattggagtcgagcccgatctggctatcctg

SEQ ID NO: 48212 - DNA, 42 bp, synthetic construct
  source 1..42: mol_type = other DNA
ggttggggagtcagcaccttcccctatagcattggctacgtg

SEQ ID NO: 48213 - DNA, 30 bp, synthetic construct
  source 1..30: mol_type = other DNA
ttctttgaccccaacgcccagatccaaacc

SEQ ID NO: 48214 - DNA, 36 bp, synthetic construct
  source 1..36: mol_type = other DNA
gggcagttcaagtacaacggcatagacttctcttcc

SEQ ID NO: 48215 - DNA, 93 bp, synthetic construct
  source 1..93: mol_type = other DNA
ttcggactcaatgtatccggctccacaacttactcgctgctgaagttcagcgctatatcgcctaacattctgaacggaagaacattcggaccc

SEQ ID NO: 48216 - DNA, 42 bp, synthetic construct
  source 1..42: mol_type = other DNA
gagctctccgctggcttcgcctttagctaccagatgttcttt

SEQ ID NO: 48217 - DNA, 42 bp, synthetic construct
  source 1..42: mol_type = other DNA
tttggcaagctggtcgccgtcgtatatgactggttgttcggg

SEQ ID NO: 48218 - DNA, 33 bp, synthetic construct
  source 1..33: mol_type = other DNA
tacattggcgtagaacccgatctggctatcctg

SEQ ID NO: 48219 - DNA, 42 bp, synthetic construct
  source 1..42: mol_type = other DNA
ggctggggagtttcgacctttccctatagcatcggctacgtg

SEQ ID NO: 48220 - DNA, 69 bp, synthetic construct
  source 1..69: mol_type = other DNA
agcggcctgaacgaccccaattggatctccatgctcgacgtggacaccgtcgatatggacagttctatc

SEQ ID NO: 48221 - DNA, 33 bp, synthetic construct
  source 1..33: mol_type = other DNA
tacatcggcgtggactccaacttggctatgctg

SEQ ID NO: 48222 - DNA, 42 bp, synthetic construct
  source 1..42: mol_type = other DNA
ggctggggcgtctccacctttccgtatagcataggatacgtg

SEQ ID NO: 48223 - DNA, 126 bp, synthetic construct
  source 1..126: mol_type = other DNA
agcggaacttactctgcgttcgctgagattctcgcattcatcggcaacacagtctccgataccgtggaccccagcatggccatctctgccgttcctcaagacctctgggctcctctgtttactggc

SEQ ID NO: 48224 - DNA, 57 bp, synthetic construct
  source 1..57: mol_type = other DNA
gtgctgcccgacaaggagatcctgaactacaccggcttcattaatttcctcggaagc

SEQ ID NO: 48225 - DNA, 33 bp, synthetic construct
  source 1..33: mol_type = other DNA
tacattggcgtggagcctgaccttgctatcctg

SEQ ID NO: 48226 - DNA, 42 bp, synthetic construct
  source 1..42: mol_type = other DNA
ggctggggcgtttccacattcccctactcggtcggttatgtc

SEQ ID NO: 48227 - DNA, 30 bp, synthetic construct
  source 1..30: mol_type = other DNA
tacatcggcgtgtctcctgacctggcaatg

SEQ ID NO: 48228 - DNA, 42 bp, synthetic construct
  source 1..42: mol_type = other DNA
ggctggggcgtcaacacattcccctactctctgggctatgtc

SEQ ID NO: 48229 - DNA, 33 bp, synthetic construct
  source 1..33: mol_type = other DNA
tacatcggggtcaatcctgatctggctatgctg

SEQ ID NO: 48230 - DNA, 42 bp, synthetic construct
  source 1..42: mol_type = other DNA
ggctggggagtttgcactttcccttactcaataggttatgtc

SEQ ID NO: 48231 - DNA, 33 bp, synthetic construct
  source 1..33: mol_type = other DNA
tacattggagtggagcccgatctcgccatcctg

SEQ ID NO: 48232 - DNA, 45 bp, synthetic construct
  source 1..45: mol_type = other DNA
ggttggggcgtgtctaccttcccctactctatcggggtcggctac

SEQ ID NO: 48233 - DNA, 30 bp, synthetic construct
  source 1..30: mol_type = other DNA
tacatcggcgttagccccgacttggcaatg

SEQ ID NO: 48234 - DNA, 39 bp, synthetic construct
  source 1..39: mol_type = other DNA
tggggtgtcaatacattccccttttcactgggatacgta

SEQ ID NO: 48235 - DNA, 33 bp, synthetic construct
  source 1..33: mol_type = other DNA
tacattggagtcgaacccgacttggctatcctg

SEQ ID NO: 48236 - DNA, 45 bp, synthetic construct
  source 1..45: mol_type = other DNA
ggctggggagtgtcaacattcccctactctatcggctacgttggt

SEQ ID NO: 48237 - DNA, 48 bp, synthetic construct
  source 1..48: mol_type = other DNA
cctatcgtgtttaatagcccctacgactctaagggcgacgtgttgtca

SEQ ID NO: 48238 - DNA, 36 bp, synthetic construct
  source 1..36: mol_type = other DNA
ctgacggcaccgggggcgttcgactcggtagccttc

SEQ ID NO: 48239 - DNA, 138 bp, synthetic construct
  source 1..138: mol_type = other DNA
aactcctttgcccacatcgagacctggtggtctatcgacgacgctagtggatacattagctatgtgttcaagggcacacggcccatcgtcctcgacgccgccccttacgtggattacattgcactgactggagctgac

SEQ ID NO: 48240 - DNA, 123 bp, synthetic construct
  source 1..123: mol_type = other DNA
ttcgggcccatatccacgatcttctctagccggaatatggacaaatttgctcaactcaacgctgggtccacaacggcggatatgtactccatcgtaccccaagaggtctggaactctctgttg

SEQ ID NO: 48241 - DNA, 36 bp, synthetic construct
  source 1..36: mol_type = other DNA
ctttttgggtcttttgtggctggactgtaccaagga

SEQ ID NO: 48242 - DNA, 33 bp, synthetic construct
  source 1..33: mol_type = other DNA
tacattggcgtggaacccgacttggctatcctg

SEQ ID NO: 48243 - DNA, 42 bp, synthetic construct
  source 1..42: mol_type = other DNA
ggctggggcgtgtccactttcccttattcgataggatatgtg

SEQ ID NO: 48244 - DNA, 129 bp, synthetic construct
  source 1..129: mol_type = other DNA
ggagctgggcctctggtgaccattttctcaaaacagactatggactccctcaccaacgccaacacaagtagccaggtcacccaagctttttcctccgtgcctcaagaagcgtggacaggcctgatcaca

SEQ ID NO: 48245 - DNA, 30 bp, synthetic construct
  source 1..30: mol_type = other DNA
tacataggcgtggcaccggatcttgctatg

SEQ ID NO: 48246 - DNA, 39 bp, synthetic construct
  source 1..39: mol_type = other DNA
tggggcgtcaacaccttcccctttagcttgggatacgtg

SEQ ID NO: 48247 - DNA, 30 bp, synthetic construct
  source 1..30: mol_type = other DNA
gggatgctcaaggctggagctccattgggc

SEQ ID NO: 48248 - DNA, 90 bp, synthetic construct
  source 1..90: mol_type = other DNA
ggcggaatcactcctaccgacgcctctgctcccgcctatgctattagcgccaaggctatctctgtggccgagggcaaggtcacaatgccc

SEQ ID NO: 48249 - DNA, 33 bp, synthetic construct
  source 1..33: mol_type = other DNA
ttcctgggcgctaagggagtcacgtggtccacc

SEQ ID NO: 48250 - DNA, 72 bp, synthetic construct
  source 1..72: mol_type = other DNA
cggatcgtgaaccttgacaacaattatttgggcctgttcttctcctctatgactctgaactccgagattttg

SEQ ID NO: 48251 - DNA, 33 bp, synthetic construct
  source 1..33: mol_type = other DNA
catctagactcgagccagatcctgttcaagaac

SEQ ID NO: 48252 - DNA, 93 bp, synthetic construct
  source 1..93: mol_type = other DNA
ggatcttccgatgatctctttgactcgttctactttgtgatcgtgactctgaccaccgtcggctatggggacatcgtacctcaaacatttaac

SEQ ID NO: 48253 - DNA, 30 bp, synthetic construct
  source 1..30: mol_type = other DNA
gggatgctcaaggctggtgctcctgttggc

SEQ ID NO: 48254 - DNA, 90 bp, synthetic construct
  source 1..90: mol_type = other DNA
ggcggaatcaccccaaccgacgccactgcacctgcctacgccattagcgccaaggctatcgctgtcgctgagggcaaggtgacaatgcct

SEQ ID NO: 48255 - DNA, 33 bp, synthetic construct
  source 1..33: mol_type = other DNA
ttcctgggcgctaagggggtgacatggagcacc

SEQ ID NO: 48256 - DNA, 132 bp, synthetic construct
  source 1..132: mol_type = other DNA
accgggctgatctcttccttcactaaaattgtctatatctctattgatgccattgccaatgacgcaaacaacctgaccgctattatcggcaccgtgcctaagcccatcatgaacacctttaccaattctctg

SEQ ID NO: 48257 - DNA, 96 bp, synthetic construct
  source 1..96: mol_type = other DNA
tccagccctctggacttccctgagttcgacctcgaggatatgctgatgaatatgcccgagaccatccacatgctctactctcataaccctgttcac

SEQ ID NO: 48258 - DNA, 30 bp, synthetic construct
  source 1..30: mol_type = other DNA
gggatgctcaaggctggagctcctttgggc

SEQ ID NO: 48259 - DNA, 90 bp, synthetic construct
  source 1..90: mol_type = other DNA
ggcggaatcacccctactgacaccgcggcacccgcatatgctattagcgccaaagccattgcggtcgcggagggcaaggtgacaatgcct

SEQ ID NO: 48260 - DNA, 33 bp, synthetic construct
  source 1..33: mol_type = other DNA
ttcctcggcgctgagggcgtgacctggtctaca

SEQ ID NO: 48261 - DNA, 87 bp, synthetic construct
  source 1..87: mol_type = other DNA
gagggcaagacacctattgattctctcgtaatggtctccaatgccttcacttctaacggatacgctgtgctcggcaagactggactc

SEQ ID NO: 48262 - DNA, 132 bp, synthetic construct
  source 1..132: mol_type = other DNA
acgggcctgttctctagcttcaccaaaatcgtctatgcgtccatcgatgccgtcgccaatgacgctaacaatctcaccatgatcatggctgctatcccgaagagcacaatgaacacctttaccaatgcactc

SEQ ID NO: 48263 - DNA, 126 bp, synthetic construct
  source 1..126: mol_type = other DNA
accggcgtattttccaatatcttcaagattgttacttttatgtccgagaaccccgacgtgatgcagaacgcaaccagcttcacacaagccgtcccccaagaactgctctctggattggctggcggg

SEQ ID NO: 48264 - DNA, 33 bp, synthetic construct
  source 1..33: mol_type = other DNA
ctcctgagcggcaagcccttcaactacgacact

SEQ ID NO: 48265 - DNA, 75 bp, synthetic construct
  source 1..75: mol_type = other DNA
aaatccgacatgtctaagatcgacctcgccattagcgtgctgaagagcctggatttctccaacctgaaccagaat

SEQ ID NO: 48266 - DNA, 30 bp, synthetic construct
  source 1..30: mol_type = other DNA
atcctgatcaccgccattcctggatctggc

SEQ ID NO: 48267 - DNA, 93 bp, synthetic construct
  source 1..93: mol_type = other DNA
ggcaatagctttggccaatttgacgatctgtacttcgtgatcgtgaccctcacaaccgtcggctacggagacgtgactcccaagacatacaac

SEQ ID NO: 48268 - DNA, 33 bp, synthetic construct
  source 1..33: mol_type = other DNA
agcatgggcgttgacgcatcaactgcactccca

SEQ ID NO: 48269 - DNA, 42 bp, synthetic construct
  source 1..42: mol_type = other DNA
tggaacgtccccggactgcccgcatactccctaggatatgtg

SEQ ID NO: 48270 - DNA, 72 bp, synthetic construct
  source 1..72: mol_type = other DNA
gactctctcctgaacatggtcaattccatctcccttcctcttctcgatgtcgtgacggggaccaacgatcct

SEQ ID NO: 48271 - DNA, 39 bp, synthetic construct
  source 1..39: mol_type = other DNA
acaccactacaatatttaatcctgggtggagaatttagt

SEQ ID NO: 48272 - DNA, 57 bp, synthetic construct
  source 1..57: mol_type = other DNA
gctctgcccgagatgcagatcgccaactactccgattttatctcgttcatcacatct

SEQ ID NO: 48273 - DNA, 132 bp, synthetic construct
  source 1..132: mol_type = other DNA
accggcctattttcctcattcaccgagatcgttaacgtcggtatcaactccctggccaacgagaccacgaatgtgaccaccatcatcgccgctgtccccaagtctaccatgaacacattcactaacgccctt

SEQ ID NO: 48274 - DNA, 39 bp, synthetic construct
  source 1..39: mol_type = other DNA
atgagcgctgggttcagttttagttaccaaatgttcagc

SEQ ID NO: 48275 - DNA, 33 bp, synthetic construct
  source 1..33: mol_type = other DNA
tacatcggcgtctcccaagatgtggcaatgctc

SEQ ID NO: 48276 - DNA, 42 bp, synthetic construct
  source 1..42: mol_type = other DNA
ggctggaacgtgaatcccttcccttatagcatcggctacatt

SEQ ID NO: 48277 - DNA, 36 bp, synthetic construct
  source 1..36: mol_type = other DNA
gaagcttgcggcgtggagcctggagttgctttgaca

SEQ ID NO: 48278 - DNA, 45 bp, synthetic construct
  source 1..45: mol_type = other DNA
ggctggaacgtggtcgggctgccagcatacagcgttggatatgtg

SEQ ID NO: 48279 - DNA, 42 bp, synthetic construct
  source 1..42: mol_type = other DNA
ataaacatccacatcgttggttcattcaatctgatcttgctg

SEQ ID NO: 48280 - DNA, 30 bp, synthetic construct
  source 1..30: mol_type = other DNA
ggcgagaatattgacatcctgttcaacgtg

SEQ ID NO: 48281 - DNA, 120 bp, synthetic construct
  source 1..120: mol_type = other DNA
tacgttgtgccactgcacccttatagctacgccctggcaactgggatcggttcaacctctatgaacgtggtcgctctgagtagcctaacggcaatgtaccccgacctctcctctaagctg

SEQ ID NO: 48282 - DNA, 33 bp, synthetic construct
  source 1..33: mol_type = other DNA
atgaacgacgtcatgttttggttcgtgatgctg

SEQ ID NO: 48283 - DNA, 96 bp, synthetic construct
  source 1..96: mol_type = other DNA
gtggagaatgtttctcccatcgactcatgggcaatggtcagcaacgccttcacttccaatgggtacagcgttctgggcaagtccccatcgggactt

SEQ ID NO: 48284 - DNA, 69 bp, synthetic construct
  source 1..69: mol_type = other DNA
ctgaccgtgttcgacccaacatggataccatcattggacctctctcctgtctattacggcgattccatc

SEQ ID NO: 48285 - DNA, 30 bp, synthetic construct
  source 1..30: mol_type = other DNA
tttaacatggagtcattcctgttcggaacc

SEQ ID NO: 48286 - DNA, 132 bp, synthetic construct
  source 1..132: mol_type = other DNA
accggcctcttctcctccttcaccaaaattgtgtacatttctattgatgcaatggctaacaacacgtcaaatatgaccaagatcatggccgctatcccccaaagcactatgaacactttcaccaattctctc

SEQ ID NO: 48287 - DNA, 90 bp, synthetic construct
  source 1..90: mol_type = other DNA
gggagcacctacggactgtttgacgacttctatttcgtgatcgtcaccctcacaaccgtcggttatggcgatgtggtcccacaaacgtac

SEQ ID NO: 48288 - DNA, 132 bp, synthetic construct
  source 1..132: mol_type = other DNA
accggcctgttcacatccttcacaaaaatcgtgtacatctctattgatgcaatgtcaaagaacgcgaataatctcactaccatcatggctgccgtccctaagacgaccatgaatactttcaccaacgcactg

SEQ ID NO: 48289 - DNA, 69 bp, synthetic construct
  source 1..69: mol_type = other DNA
atcggcatgaacgaccccacatggatctccggggtcgacatcgattctgtatcgttgaccccttctgcc

SEQ ID NO: 48290 - DNA, 30 bp, synthetic construct
  source 1..30: mol_type = other DNA
gtgaccgctttcgacgccatcattacctcc

SEQ ID NO: 48291 - DNA, 90 bp, synthetic construct
  source 1..90: mol_type = other DNA
ggcaccacttacgggctcttcgacgatttctacttcgtgatcgttaccctgaccacggttggttatggagacgtggtgccccaaacgtac

SEQ ID NO: 48292 - DNA, 132 bp, synthetic construct
  source 1..132: mol_type = other DNA
accggcctgttttcctccctcactaagatcgtctatatctcaattgacgccatctctaaggatgccaacaatatgaccaccatcatggctgcaattcccaagtccacgatgaatacattcactaacgcactc

SEQ ID NO: 48293 - DNA, 132 bp, synthetic construct
  source 1..132: mol_type = other DNA
agcggcctgttctctagtttcaccaagatcgcccacacttccattaatgccatagtgaacggagccaacaacctgactgctatcaccgcggcgatccctcaaagcaccattaacacctttaccaatgccctg

SEQ ID NO: 48294 - DNA, 69 bp, synthetic construct
  source 1..69: mol_type = other DNA
atcggcatgtctgaccctacctggatcaacgggattgacatcgactccgtttccctgacaccaagtgcc

SEQ ID NO: 48295 - DNA, 132 bp, synthetic construct
  source 1..132: mol_type = other DNA
agcggcctgttcactagcttcacaaagattgtgtacattagcattgacgccatctccaaggacgcaaataaccttaccaccgttatggcggcgatcccgaaatccactatgaatacattcacgaacgccctc

SEQ ID NO: 48296 - DNA, 39 bp, synthetic construct
  source 1..39: mol_type = other DNA
gacctgtttgtgcccatcaacttcgttggctcggtgccc

SEQ ID NO: 48297 - DNA, 93 bp, synthetic construct
  source 1..93: mol_type = other DNA
ggcaccacatacgagcccttcgactacttttacttcgtcatcgtgaccctgaccaccgtcggatacggagacatcacgccccaaacttataac

SEQ ID NO: 48298 - DNA, 132 bp, synthetic construct
  source 1..132: mol_type = other DNA
actggcctgttcactagctttaccaagatcgtttatgcatccattgacgcaatggccaatggggctgagaacgccactatgatcatgtccgcgatccccaaggctactatgagctccttcaccaacgcactc

SEQ ID NO: 48299 - DNA, 132 bp, synthetic construct
  source 1..132: mol_type = other DNA
acgaaactgttctcttcacttaccgagattgtgaacgtcggaatcaacagtttggctaacgagactaccaacatgacgacaattatcgccgctgtccctaaatctaccatgaacacctttaccaatgccctg

SEQ ID NO: 48300 - DNA, 132 bp, synthetic construct
  source 1..132: mol_type = other DNA
agcggtttattttcttctttcactgagatcgtgtacatcagcatggacgctatcgccaatgaaacaactaacatgaccatgattctggccgctgtgcctaaatcaacgatgaatacattcactaacgcactc

SEQ ID NO: 48301 - DNA, 135 bp, synthetic construct
  source 1..135: mol_type = other DNA
gccagcgggctgttcacaagctttaccaagatcgtgaactccagtatcggagctatcgacaacggcgctaacaacctgactatgattatggccgccatccccaaatccacaatcagcaccttctctaattcactg

SEQ ID NO: 48302 - DNA, 60 bp, synthetic construct
  source 1..60: mol_type = other DNA
gccctgcccgagctgcagatcgcttcctatagcgactacatctctttcatatctagcctg

SEQ ID NO: 48303 - DNA, 63 bp, synthetic construct
  source 1..63: mol_type = other DNA
tccaacctgagcatcattagcttcaactctcccctgttcggagactttagagctctcggcatc

SEQ ID NO: 48304 - DNA, 90 bp, synthetic construct
  source 1..90: mol_type = other DNA
gagggagtggctcccctggactctattgccatggtcagcaacgcattcacctccaatggctacgccatcttggggaagtctgggttgggc

SEQ ID NO: 48305 - DNA, 48 bp, synthetic construct
  source 1..48: mol_type = other DNA
atataccacattatcgaccccaacgtcgtgacaaccctgagcatctct

SEQ ID NO: 48306 - DNA, 75 bp, synthetic construct
  source 1..75: mol_type = other DNA
ttacaccaagactttaacctcgtgtccgtcatctctgagattctcctgctgaagcccctgaacatcagccacttc

SEQ ID NO: 48307 - DNA, 33 bp, synthetic construct
  source 1..33: mol_type = other DNA
tacggcatcgacggccttagcgagcagatctcc

SEQ ID NO: 48308 - DNA, 39 bp, synthetic construct
  source 1..39: mol_type = other DNA
ttcaaccacgactatgcctactacttatatgaggaatgg

SEQ ID NO: 48309 - DNA, 54 bp, synthetic construct
  source 1..54: mol_type = other DNA
gacttcctcttcaagaccatcctggggatcagcgaatacggcctgatcaaaaag

SEQ ID NO: 48310 - DNA, 66 bp, synthetic construct
  source 1..66: mol_type = other DNA
aatcccatgcctagcgagtggatctacgacaagattatcttcctgaacggcggtagtggatggatt

SEQ ID NO: 48311 - DNA, 132 bp, synthetic construct
  source 1..132: mol_type = other DNA
agcggcctgttctcttccttcacgcaaatcgtctatggttcaatagacgcaatggctggcggtgctaacaatatgacgatgatcatggccgctatccctaagagcgccctgaatacgttcacaaatgccctg

SEQ ID NO: 48312 - DNA, 132 bp, synthetic construct
  source 1..132: mol_type = other DNA
accggcctgttctctagttttactgagatcgtctacgcctctattaaagcagtgtccaataatgctaccaacttcactatgatcatggcgaaggtcccgccttccgccatgaacacctttaccaatgctctg

SEQ ID NO: 48313 - DNA, 51 bp, synthetic construct
  source 1..51: mol_type = other DNA
agcccggttaaggagccaactgtggaactcctggctcggacctccccctct

SEQ ID NO: 48314 - DNA, 60 bp, synthetic construct
  source 1..60: mol_type = other DNA
ctcaccatcgcttcccctagcttcctgatggcagccggcactggtttcgaggaccctctg

SEQ ID NO: 48315 - DNA, 39 bp, synthetic construct
  source 1..39: mol_type = other DNA
gactacactcctctgctgctcatcctttatgacgatcgc

SEQ ID NO: 48316 - DNA, 60 bp, synthetic construct
  source 1..60: mol_type = other DNA
tacctgtccatcattggcttcaactctcccctgttcggcgattttcggactttgagcctc

SEQ ID NO: 48317 - DNA, 135 bp, synthetic construct
  source 1..135: mol_type = other DNA
gcaagcgggcttttctcaagctttacgcaaatagtctatggctcgatcgacgccatggctgatggagctaacaacctcactatgatcatggccgccatccccaagtccgccctgaacaccttcaccaactcactt

SEQ ID NO: 48318 - DNA, 132 bp, synthetic construct
  source 1..132: mol_type = other DNA
tctgggctgttttcctcatttactgaaatcgtgtataaatgcattgaggctatcgccaacggcgccgagaattataccgcaatcatgggcgctgtaccaacatctacgatgaacaccttcacaaacgctttg

SEQ ID NO: 48319 - DNA, 93 bp, synthetic construct
  source 1..93: mol_type = other DNA
accgagaatgtgaacttgctcgactccctcgtcatggtatctaacgcgttcacgagcaatggatacagcatcctggggcatagcgaacttggc

SEQ ID NO: 48320 - DNA, 87 bp, synthetic construct
  source 1..87: mol_type = other DNA
gagggcgttgaacctctggatgccatcgtgatggtgtccaatgcattcacatctaacggatacgctgtgctgaccgggacaggctcc

SEQ ID NO: 48321 - DNA, 135 bp, synthetic construct
  source 1..135: mol_type = other DNA
gcatctggactctttagtagtctaacaaccatggttaacgcgggcgtcaaggctatggagaagggcgctgagaacgccactgccatcatggccgccattcccaaggacagtatcgcaaccttcaataacgcactg

SEQ ID NO: 48322 - DNA, 96 bp, synthetic construct
  source 1..96: mol_type = other DNA
gtcgaggacgttagtcctctcgacgccctcgtgatggctagtaacgcatttactagcaatggctacgctgtgttgggcaacgtcagttcgagcggg

SEQ ID NO: 48323 - DNA, 102 bp, synthetic construct
  source 1..102: mol_type = other DNA
gttagctctcccatgaacttccccgagttcgacctcgaggaaatgctgctcgacttccctgaaactatccatacacttatttcccacaacccagtcgacgca

SEQ ID NO: 48324 - DNA, 129 bp, synthetic construct
  source 1..129: mol_type = other DNA
accatggggcctgccctgagtcggattttcactcccgcaaatatcagccagatggcaactaactcttcctccacctccgtcatcctcaatagcatcccctcaagtgtttgggcgggactgtttagtggt

SEQ ID NO: 48325 - DNA, 33 bp, synthetic construct
  source 1..33: mol_type = other DNA
cagctgacaaccttcctgactgtgctcgagaac

SEQ ID NO: 48326 - DNA, 39 bp, synthetic construct
  source 1..39: mol_type = other DNA
atgctcttcgagctttatgggcattatatcctggctacc

SEQ ID NO: 48327 - DNA, 135 bp, synthetic construct
  source 1..135: mol_type = other DNA
agcggcctgttcacatctttcactaagatcgtgtacatttccatcgacgccatggccaacaataccagcaacctgaccaccatcatggctgccgtgccacaatccacaatgaacacatttaacaacgctttgact

SEQ ID NO: 48328 - DNA, 84 bp, synthetic construct
  source 1..84: mol_type = other DNA
gagaacgtcagtcccatggattctatgaccatggtgtctaacgcttttactagtaattccttcgacgcttccggcaagaacatc

SEQ ID NO: 48329 - DNA, 90 bp, synthetic construct
  source 1..90: mol_type = other DNA
gaggacgtcagccccctggactctctgaatatggttagcaacgccttcacatccaacggctataccgtgctgggcaagaccggacttggc

SEQ ID NO: 48330 - DNA, 87 bp, synthetic construct
  source 1..87: mol_type = other DNA
gagaacgtctcacctatggattccctgacaatggtctctaatgcttttacaagtaactccttcgacgctagtggcaacaacatcatc

SEQ ID NO: 48331 - DNA, 84 bp, synthetic construct
  source 1..84: mol_type = other DNA
gagagcgtcgaccctctgagttccctcgtgatggtgtcaaatgcctttacatcaaatggctacgctattctgggcaacacagga

SEQ ID NO: 48332 - DNA, 132 bp, synthetic construct
  source 1..132: mol_type = other DNA
atttctctcggtagcgctatctccactcttcccaagtcctcaatcgcggcgatttccaacgcaacaaccaccaatgccgtgcttaacgctatcccgcctcaaacgtggacagccctgggaagcgggttcagt

SEQ ID NO: 48333 - DNA, 87 bp, synthetic construct
  source 1..87: mol_type = other DNA
gtcgagaacgtgtctcccatggattccctgaccatggttagcaatgctttcacaagcaacagctttgacgcctccggcaagaacatc

SEQ ID NO: 48334 - DNA, 87 bp, synthetic construct
  source 1..87: mol_type = other DNA
gagcggacaactccactgaacgccctggtcatggtatcaaatgcgttcacatcaaacggctactccgtgctggggcactctaccttc

SEQ ID NO: 48335 - DNA, 84 bp, synthetic construct
  source 1..84: mol_type = other DNA
gaaggcgtcagccccatggactccatgaccatggtttctaatgcctttacctctaatagtttcgacgctagtggccagaacatc

SEQ ID NO: 48336 - DNA, 69 bp, synthetic construct
  source 1..69: mol_type = other DNA
ccctactatccggagataggcccctttcctctgatgccacctgacccccggatcgaggagttcattcct

SEQ ID NO: 48337 - DNA, 84 bp, synthetic construct
  source 1..84: mol_type = other DNA
gaggacgtcagccccatggactccctgaccatggtgtccaacgcctttacttcgaattcttttgacgctagcggccagaacatc

SEQ ID NO: 48338 - DNA, 84 bp, synthetic construct
  source 1..84: mol_type = other DNA
gagaacgttagcccaatggactccatcaccatggtcagcaacgctttcacatctaattcctttgacgccagcggcaagaacatc

SEQ ID NO: 48339 - DNA, 87 bp, synthetic construct
  source 1..87: mol_type = other DNA
gagaacactatgcccctggactccctggccatggtctctaatgctttcacaagcaatggttactctgtgctcgggaacagcaccttc

SEQ ID NO: 48340 - DNA, 69 bp, synthetic construct
  source 1..69: mol_type = other DNA
atcaatttcgtgtaccccgagaacatgcctatgccggacctactccctgaggtcatggaacctagctct

SEQ ID NO: 48341 - DNA, 30 bp, synthetic construct
  source 1..30: mol_type = other DNA
agcggcctggagcagcacctcttccaattg

SEQ ID NO: 48342 - DNA, 30 bp, synthetic construct
  source 1..30: mol_type = other DNA
atggactgggtttcacttaacatcttcggc

SEQ ID NO: 48343 - DNA, 90 bp, synthetic construct
  source 1..90: mol_type = other DNA
gagggcgtcaatccgctggacagtctcgttatggtatccaacgcgttcacgagcaacggctacgctgtgttgggcacatctatgcctggc

SEQ ID NO: 48344 - DNA, 84 bp, synthetic construct
  source 1..84: mol_type = other DNA
gagaaagtatcaccaatggactctattaccatggttagcaatgcctttacctcgaattctttcgacgcctccggcaagaacatt

SEQ ID NO: 48345 - DNA, 69 bp, synthetic construct
  source 1..69: mol_type = other DNA
atcctatatggctcagtttatcccgacatggagccactgctggacttcacccctaacgcccttgatcct

SEQ ID NO: 48346 - DNA, 36 bp, synthetic construct
  source 1..36: mol_type = other DNA
gtgaacgctgacgccttcctctttcaaatgcctgtg

SEQ ID NO: 48347 - DNA, 60 bp, synthetic construct
  source 1..60: mol_type = other DNA
ctcgtatctcaaagcattgacccggcgaatgtcggcatcgggattctgggaggattgggc

SEQ ID NO: 48348 - DNA, 63 bp, synthetic construct
  source 1..63: mol_type = other DNA
cttggggcccctgctgtcactgttggcggcctgggggcaacagcaccaggccttggagtttcc

SEQ ID NO: 48349 - DNA, 90 bp, synthetic construct
  source 1..90: mol_type = other DNA
gaggacgtgtctcccatggacagtctgaccatggtcagcaatgcttttacttctaattcgtttgatgcctccggcaagatcatgattggc

SEQ ID NO: 48350 - DNA, 87 bp, synthetic construct
  source 1..87: mol_type = other DNA
gaaggcgtcagccccctggagtcaatcaccatggtcagcaacgctttcacatctaactcctacgaggccagtggcaatagcgtagtg

SEQ ID NO: 48351 - DNA, 84 bp, synthetic construct
  source 1..84: mol_type = other DNA
gagaacgtgtctcccatggattccctgaccatggtctccaatgcatttacttcgaatagcttcgacgcctctggcaagaatgta

SEQ ID NO: 48352 - DNA, 90 bp, synthetic construct
  source 1..90: mol_type = other DNA
gagggagtgtcccccatcgactcgctaaatatggtgtccaacgccttcacctctaacggctatgccgtcctcggcacaacaggattgggt

SEQ ID NO: 48353 - DNA, 90 bp, synthetic construct
  source 1..90: mol_type = other DNA
gaggacgtcagccccctggattctctcaatatggtgtccaacgcttttacaagtaatggctacaccgtgctggggactacaggaatcggc

SEQ ID NO: 48354 - DNA, 84 bp, synthetic construct
  source 1..84: mol_type = other DNA
gagaacgtgtctcccatggacagcctgaccatggtctccaacgctttcacaagtaacagcttcgacgcctccggcaagaacatc

SEQ ID NO: 48355 - DNA, 84 bp, synthetic construct
  source 1..84: mol_type = other DNA
gagaacgtcagtcccatggacagcattaccatggtgtctaacgcttttacatcgaactcattcgacgcctccggcaagaacatc

SEQ ID NO: 48356 - DNA, 90 bp, synthetic construct
  source 1..90: mol_type = other DNA
gagaatgttagtccactgaactccctcgtcatggtatcaaatgccttcacctctaacggatactccatcctaggtagttccggatggggc

SEQ ID NO: 48357 - DNA, 63 bp, synthetic construct
  source 1..63: mol_type = other DNA
ttatcatcaagtagccgcgacctgatcttcaattaccggatcattgagttctttctcaacctc

SEQ ID NO: 48358 - DNA, 90 bp, synthetic construct
  source 1..90: mol_type = other DNA
gagcaagtctctccgctgaactccctggtcatggtgtcaaacgcatttactagcaatggctactccatcctcggagcttctggatgggga

SEQ ID NO: 48359 - DNA, 84 bp, synthetic construct
  source 1..84: mol_type = other DNA
gaaggcgtggaaccactgaactccgctgtgatggttagcaacgctttcacaagtaacggctatgcggtgctcggaaattcaggg

SEQ ID NO: 48360 - DNA, 126 bp, synthetic construct
  source 1..126: mol_type = other DNA
agtctatctagcttttttgctgccattggcgagaagggctggaaaaccatctcctccgctacaagtcctgacgtggccatctccgccatccccgcacacgcttggtctagcctggctactggtctg

SEQ ID NO: 48361 - DNA, 48 bp, synthetic construct
  source 1..48: mol_type = other DNA
ggcccggcgagccggaatctgctcaacaacttcaagatcattgagttt

SEQ ID NO: 48362 - DNA, 87 bp, synthetic construct
  source 1..87: mol_type = other DNA
agcgacctcctgaattttccgcaattcgacctgattgccctgatcatgcacttttccgacacactccggatgctgttcacccacaac

SEQ ID NO: 48363 - DNA, 69 bp, synthetic construct
  source 1..69: mol_type = other DNA
atcctgggccacgagaacctcagcctctctgggttctggtactacctgtccctgggcgtgtttgaaggg

SEQ ID NO: 48364 - DNA, 30 bp, synthetic construct
  source 1..30: mol_type = other DNA
cttttcggtcgtggttggtgcggatacgct

SEQ ID NO: 48365 - DNA, 90 bp, synthetic construct
  source 1..90: mol_type = other DNA
gagggagtctctcccatggacagcatgaccatggtgacaaacgcttttacctccaactcctacgaggcctccggcaaaatcatggttggg

SEQ ID NO: 48366 - DNA, 30 bp, synthetic construct
  source 1..30: mol_type = other DNA
gggatgctgaaggctggagctcctatcggc

SEQ ID NO: 48367 - DNA, 81 bp, synthetic construct
  source 1..81: mol_type = other DNA
ggcggcattgtgcctgccgatcccaccaacgcgatcgctgctaaggccatagccgtttctgaggggaaggtcaagcttgat

SEQ ID NO: 48368 - DNA, 36 bp, synthetic construct
  source 1..36: mol_type = other DNA
ctcttcctgggcgctaagggggttacctggtctacc

SEQ ID NO: 48369 - DNA, 87 bp, synthetic construct
  source 1..87: mol_type = other DNA
gagtccgtggctcctctggacgccctcgtcatggtgtcaaatgcattcacaagtaacggctacgctatcctggggtctaccggaatc

SEQ ID NO: 48370 - DNA, 87 bp, synthetic construct
  source 1..87: mol_type = other DNA
aaccccaaggccaagccaaccactacctttacccaattagaagaagagaagaaggcaggcaaggatagcaaggcgcctgaaccagca

SEQ ID NO: 48371 - DNA, 183 bp, synthetic construct
  source 1..183: mol_type = other DNA
gccagcaccgagcgcaggcgatacgatgcatcatctgagtctaaggaggccgctccggcggaggagcctaaggagaaggaggctagctcattctccgagctggccgacgaaaagaaggccaagaagtcctctggcaaagatggcgaaggcaagaagctcaaatatgttagttctagaaggaaa

SEQ ID NO: 48372 - DNA, 45 bp, synthetic construct
  source 1..45: mol_type = other DNA
cctactatccggaatctgatatacaactttcggattatcgagttc

SEQ ID NO: 48373 - DNA, 168 bp, synthetic construct
  source 1..168: mol_type = other DNA
atttttcaaatcgaggacctcatcaagttcaccgacatcggcaagattatggtgcacgacatcaaggccctgtctgtcctatatgcgaacctcatgcggggcgagtatatcattaattcccactacaacgaaggcaatgtttcaaataacctgacaatggttttggat

SEQ ID NO: 48374 - DNA, 30 bp, synthetic construct
  source 1..30: mol_type = other DNA
gggatgcttaaggctggagctccaatgggc

SEQ ID NO: 48375 - DNA, 81 bp, synthetic construct
  source 1..81: mol_type = other DNA
gggggaatcgtccccgctgatccgtccaacgccatcgccgctaaagccatcgcggtatcagaggctaaggtcaagctcagt

SEQ ID NO: 48376 - DNA, 33 bp, synthetic construct
  source 1..33: mol_type = other DNA
ttccttggagccgagggcgtcaactggagcagc

SEQ ID NO: 48377 - DNA, 105 bp, synthetic construct
  source 1..105: mol_type = other DNA
ggactcctgcacactgtccaaagtgacatgcccaatatcgtcacgtcgatgacaaactccggcgccgtgcccgctttcaactacatggtccgtaattctggagct

SEQ ID NO: 48378 - DNA, 117 bp, synthetic construct
  source 1..117: mol_type = other DNA
aatagcgagaacatcctcttctccacccttaaacatatccaaggggatctgatgctgttcttttttttcttcgtgttcttcttcttcttcgactacctgaagcacatccaaggtgac

SEQ ID NO: 48379 - DNA, 51 bp, synthetic construct
  source 1..51: mol_type = other DNA
ttcgggcaaatccccatctttcccttcacctcactcaatctgcctcttaac

SEQ ID NO: 48380 - DNA, 72 bp, synthetic construct
  source 1..72: mol_type = other DNA
ttctacggctccctctatcccgactatgtccctatcatgggcatgactccaaactcatacgatccctacact

SEQ ID NO: 48381 - DNA, 33 bp, synthetic construct
  source 1..33: mol_type = other DNA
agcaacctcgacctgtacttgtttcaaatgcct

SEQ ID NO: 48382 - DNA, 123 bp, synthetic construct
  source 1..123: mol_type = other DNA
gtgctgggtggcatcaccgaggccaacaccgctctgaccaatatggcccacctctatccccctgatgccctggctgagggtggtacaggatggacaagcttccctaagcttgggactcctttt

SEQ ID NO: 48383 - DNA, 105 bp, synthetic construct
  source 1..105: mol_type = other DNA
aatgtgtacttctatcaaaacttcggccaaatagcaatcgactatgttggaggcaacatgaacagcatcatcccaacatttatttccactgagttgccacccgct

SEQ ID NO: 48384 - DNA, 30 bp, synthetic construct
  source 1..30: mol_type = other DNA
ggcatgatcaaggctggagctcccattggg

SEQ ID NO: 48385 - DNA, 81 bp, synthetic construct
  source 1..81: mol_type = other DNA
gggggcatcgtgcctgctgacccaacgaacgcgatcgccgccaaagctatagctgtatccgagggcaaggtcaagcttgat

SEQ ID NO: 48386 - DNA, 33 bp, synthetic construct
  source 1..33: mol_type = other DNA
ttccttggcgctgagggtgtcaattgggctacc

SEQ ID NO: 48387 - DNA, 60 bp, synthetic construct
  source 1..60: mol_type = other DNA
ctgtctagtagctcccgggacctcatcttcaactacaagatcatcgagttcttcctgaac

SEQ ID NO: 48388 - DNA, 87 bp, synthetic construct
  source 1..87: mol_type = other DNA
gagtccgtggctcccctggacgccctggtcatggtgtctaatgcattcacatcaaacggatacgcaatcctcggcaacacaggaatc

SEQ ID NO: 48389 - DNA, 84 bp, synthetic construct
  source 1..84: mol_type = other DNA
gagggagtggaccccctgtccgccctcgttatggtatcaaatgcctttactagcaacggctatgctatcctcgggaagtctggt

SEQ ID NO: 48390 - DNA, 48 bp, synthetic construct
  source 1..48: mol_type = other DNA
atgagctacgtctcccacatagtcgggatcattgagcaccatatcgcc

SEQ ID NO: 48391 - DNA, 33 bp, synthetic construct
  source 1..33: mol_type = other DNA
atgggtggcttcctggccgctagcgctatcggg

SEQ ID NO: 48392 - DNA, 51 bp, synthetic construct
  source 1..51: mol_type = other DNA
gagatcatgggcctcgtgtacttcaccaattctgcttatatgaacggagct

SEQ ID NO: 48393 - DNA, 39 bp, synthetic construct
  source 1..39: mol_type = other DNA
tccagcagctttaacccgagtttttccgtagactgggga

SEQ ID NO: 48394 - DNA, 42 bp, synthetic construct
  source 1..42: mol_type = other DNA
ttcaacctccctgtggtcgagatttacacacctatcgaatct

SEQ ID NO: 48395 - DNA, 57 bp, synthetic construct
  source 1..57: mol_type = other DNA
accagctgtaaccattggtcccactgcattgtgcacatccacgtcctgtgctcttgc

SEQ ID NO: 48396 - DNA, 42 bp, synthetic construct
  source 1..42: mol_type = other DNA
gagatgcaggtttacatgatctcctttgttcaacttcctctg

SEQ ID NO: 48397 - DNA, 87 bp, synthetic construct
  source 1..87: mol_type = other DNA
gagtccgttgaccccctgaatgctctcgtgatggtctctaacgctttcacgtccaacggatacgccatcctggggaagagtggagtg

SEQ ID NO: 48398 - DNA, 102 bp, synthetic construct
  source 1..102: mol_type = other DNA
aataatatgatgaacgtagttggatcttctaacttcgatcttaaagagatggtcatcgagtctcgcggaataatgccgcaaaaccttattcacaatatcggc

SEQ ID NO: 48399 - DNA, 60 bp, synthetic construct
  source 1..60: mol_type = other DNA
atgaacatgctgattgactttatcaaggagaatttcttctacctccatcctggctatacc

SEQ ID NO: 48400 - DNA, 42 bp, synthetic construct
  source 1..42: mol_type = other DNA
gtcgacaaccacgtctacccgcgaatccatctgttggctact

SEQ ID NO: 48401 - DNA, 69 bp, synthetic construct
  source 1..69: mol_type = other DNA
atggacttctttggctactacgagcagcacgtgctgcctaccttcatgatcaacctcaccggtagtgcc

SEQ ID NO: 48402 - DNA, 84 bp, synthetic construct
  source 1..84: mol_type = other DNA
gagaatgtggacccgctgaactccttagttatggtgtccaacgcgttcacaagcaacggttacgcgatactcggcaacacagga

SEQ ID NO: 48403 - DNA, 42 bp, synthetic construct
  source 1..42: mol_type = other DNA
atgctgaacatcattaccatgatcacaaatccgcaaaacgct

SEQ ID NO: 48404 - DNA, 57 bp, synthetic construct
  source 1..57: mol_type = other DNA
ctgagcaactctatcctggacttcgtgccctccgtaaacctctttaactccttcctg

SEQ ID NO: 48405 - DNA, 84 bp, synthetic construct
  source 1..84: mol_type = other DNA
gagtccgtcgaccctctgtctgcattagtgatggtgtccaacgctttcacttccaatggatacgctattcttggtagcacaggg

SEQ ID NO: 48406 - DNA, 42 bp, synthetic construct
  source 1..42: mol_type = other DNA
ggctccctgctctctttgtccataaatgacctcaacaccttc

SEQ ID NO: 48407 - DNA, 90 bp, synthetic construct
  source 1..90: mol_type = other DNA
gaggacgtgtcgccaatggatagcattaccatggtctccaacgctttcacctctaactcttttgaccctgcgggcaagtccatgatcggc

SEQ ID NO: 48408 - DNA, 51 bp, synthetic construct
  source 1..51: mol_type = other DNA
gccccagcgagcgttggccagctccaagatctacaagtacataccttcatc

SEQ ID NO: 48409 - DNA, 54 bp, synthetic construct
  source 1..54: mol_type = other DNA
ctcgggcccatttcacgtgatctgatttacaactttcggatcggcgagttcata

SEQ ID NO: 48410 - DNA, 84 bp, synthetic construct
  source 1..84: mol_type = other DNA
gaaagcgttgaccccctgtccgcccttgtgatggtcagcaacgctttcacctccaatggctacgcaatcctcgggtcaacagga

SEQ ID NO: 48411 - DNA, 54 bp, synthetic construct
  source 1..54: mol_type = other DNA
ggcatgtcctccatcgacatgctgagtgacctgcgggtgctgtctttcgcattg

SEQ ID NO: 48412 - DNA, 87 bp, synthetic construct
  source 1..87: mol_type = other DNA
gagggcgtcgaacccctgaactctgctgttatggtgtcgaacgccttcacctccaatggatacgccgtgctcggcaagagtggtatt

SEQ ID NO: 48413 - DNA, 90 bp, synthetic construct
  source 1..90: mol_type = other DNA
tccctcgacttcaagctgcccgagtttcagctgaagttcgccctgagccatatcatggagaccatgaagctgttctacattcacaacccc

SEQ ID NO: 48414 - DNA, 84 bp, synthetic construct
  source 1..84: mol_type = other DNA
gagaacgtcagcccgatggattccatgaccatggtgtccaacgctttcacatcgaactcttttgacgcctccggcaagaatatg

SEQ ID NO: 48415 - DNA, 72 bp, synthetic construct
  source 1..72: mol_type = other DNA
aaccccaaggccaagccaaccacaacattcactcaactcgaggaagagaagaaggccgggaaagacagcaag

SEQ ID NO: 48416 - DNA, 183 bp, synthetic construct
  source 1..183: mol_type = other DNA
agcagcacagagagaaggcggtacaatgcgagcagcgaaaccgaggaggctgcccctgcggaggaacccaaggagaaggaagcctcatctttctctgaactggccgacgaaaagaaggccaaaaagtcctctgggaaggacggagagggcaagaagctcaaatacgtttcatcaaggagaaag

SEQ ID NO: 48417 - DNA, 123 bp, synthetic construct
  source 1..123: mol_type = other DNA
ggcgtctacaacaacctcggtaacttcctgatcgccctgaataacacaaatatggttaactccactcctgctgaggtccttagtgccgtccctaccgacgtgatgaactccctcgtcggatct

SEQ ID NO: 48418 - DNA, 84 bp, synthetic construct
  source 1..84: mol_type = other DNA
gagagcgtggacccactgtcctctcttgtaatggtatccaacgcgttcacatccaatggctacgccatcctcggtagtacagga

SEQ ID NO: 48419 - DNA, 63 bp, synthetic construct
  source 1..63: mol_type = other DNA
atgcctaccgtggacacttttctgcccgagataatccaatctacatttttttctggctacacc

SEQ ID NO: 48420 - DNA, 45 bp, synthetic construct
  source 1..45: mol_type = other DNA
gtcgacaacggcatttaccccaagaccgtgttcctgatcacacct

SEQ ID NO: 48421 - DNA, 72 bp, synthetic construct
  source 1..72: mol_type = other DNA
gccgtcgacttcttcaattatagcgagcagcacattctgtccaatgcaatttactcccttaccgataccgct

SEQ ID NO: 48422 - DNA, 90 bp, synthetic construct
  source 1..90: mol_type = other DNA
gaggaagtctcgccgatcaactctatggttatggtctccaacgccttcacctccaatgggtacagcattctgggatcttctggatggggt

SEQ ID NO: 48423 - DNA, 177 bp, synthetic construct
  source 1..177: mol_type = other DNA
atgcagtgcatcgagctaacggccattctgaccggcttcgtcggatctaactcttatgccgacatctccactaccgtttcatccctctccgcatacctgccctttaatttcgacgtgaacagcatctctgcttccttaaattcaagcattcaggagatcggaagatacgtattaaat

SEQ ID NO: 48424 - DNA, 48 bp, synthetic construct
  source 1..48: mol_type = other DNA
tcatcgacctcgagagacctgatctataactacaagatcatcgagttc

SEQ ID NO: 48425 - DNA, 30 bp, synthetic construct
  source 1..30: mol_type = other DNA
gggatgctagcggctggggctccagtcggc

SEQ ID NO: 48426 - DNA, 78 bp, synthetic construct
  source 1..78: mol_type = other DNA
ggcggactgtttcctgctgattccgccttcgctaccaaggccaccagcgtcgcttccgccaaagtgaagttggcatgg

SEQ ID NO: 48427 - DNA, 33 bp, synthetic construct
  source 1..33: mol_type = other DNA
ttcctgggcgccaagggcgtcacatggtctacc

SEQ ID NO: 48428 - DNA, 93 bp, synthetic construct
  source 1..93: mol_type = other DNA
agtgaaggcgccaacgcactggactcccttgtgattgtgtctaacgagtttaccggtaacggatacagcgtattcggcgaaacaattcctggc

SEQ ID NO: 48429 - DNA, 60 bp, synthetic construct
  source 1..60: mol_type = other DNA
gggatcaagtctaacaatagcatcagccaaataccattcacccaactgcctgctggagac

SEQ ID NO: 48430 - DNA, 42 bp, synthetic construct
  source 1..42: mol_type = other DNA
atgctgtctatcgacatgattagcaacctccgggtcctgact

SEQ ID NO: 48431 - DNA, 63 bp, synthetic construct
  source 1..63: mol_type = other DNA
atggccaccgtggattcctttctgcccgatataatacaatcaaccttcttctctggctataca

SEQ ID NO: 48432 - DNA, 45 bp, synthetic construct
  source 1..45: mol_type = other DNA
gtcgacaacggcatttaccccaagaccgtgttcctgatcacacca

SEQ ID NO: 48433 - DNA, 69 bp, synthetic construct
  source 1..69: mol_type = other DNA
gtggagtacttcaattattcggagcagcacgtcctggccaacggcctctaccaattgttcgacacttct

SEQ ID NO: 48434 - DNA, 48 bp, synthetic construct
  source 1..48: mol_type = other DNA
ggcgtcagctccattgacctcctgaagaacctgaaagttatcgaattc

SEQ ID NO: 48435 - DNA, 108 bp, synthetic construct
  source 1..108: mol_type = other DNA
tgctggggcggcgcaatctgtgccgatggcgatgtgtacattgacaacagcaccttcgagaataactccgccggagattatggtggcgccatccatgctgctaacgtg

SEQ ID NO: 48436 - DNA, 33 bp, synthetic construct
  source 1..33: mol_type = other DNA
ttcatccccaacttcgagtacaatcttcctcag

SEQ ID NO: 48437 - DNA, 153 bp, synthetic construct
  source 1..153: mol_type = other DNA
tacgccctgattcatcacggatttgacatcaactcgtatttctctctaaaccccagtccaatcgactacctcctcaactgcatggtcttcgatatcctgacacctatcggcaatatcctgaccaccattcaagttaatggatggaacacgtct

SEQ ID NO: 48438 - DNA, 33 bp, synthetic construct
  source 1..33: mol_type = other DNA
atccccagacctgagaatccacctgccaacttc

SEQ ID NO: 48439 - DNA, 63 bp, synthetic construct
  source 1..63: mol_type = other DNA
atcaagtctgtgaaccctatttctcaaattccttttacccaactaccagccggacacatctac

SEQ ID NO: 48440 - DNA, 30 bp, synthetic construct
  source 1..30: mol_type = other DNA
ggcatgctggctgccggagcaccagtcggc

SEQ ID NO: 48441 - DNA, 75 bp, synthetic construct
  source 1..75: mol_type = other DNA
ggcggactgttcccggctaactccgctttcgccaccaaggcgaccgccgttgcggtggccaaggtcaaaatgcct

SEQ ID NO: 48442 - DNA, 33 bp, synthetic construct
  source 1..33: mol_type = other DNA
ttcctcggcgctgagggcgtaacatggagcacc

SEQ ID NO: 48443 - DNA, 87 bp, synthetic construct
  source 1..87: mol_type = other DNA
gaggacgtcagtcccctggatagcattgttatggtgacaaatgcctttacctccaactccttcgaggcttctggcaacagcatcgtg

SEQ ID NO: 48444 - DNA, 63 bp, synthetic construct
  source 1..63: mol_type = other DNA
atgcccactgtggacaccttcctgcctgagattatccaaagtacctttttctccggttacaca

SEQ ID NO: 48445 - DNA, 48 bp, synthetic construct
  source 1..48: mol_type = other DNA
ctggtcgacaacggcatctaccctaagaccgtgttcctgattacacct

SEQ ID NO: 48446 - DNA, 75 bp, synthetic construct
  source 1..75: mol_type = other DNA
gccgtggactttttcaattatagcgagcaacacgtcctctctaacgccatctactctctcaccgatactactgcg

SEQ ID NO: 48447 - DNA, 54 bp, synthetic construct
  source 1..54: mol_type = other DNA
agtatccccgacttcgttagtttttactctaaccacttcatttcttcacctatc

SEQ ID NO: 48448 - DNA, 48 bp, synthetic construct
  source 1..48: mol_type = other DNA
ggcccttcctctctcaaaatgttcgccgagatgaaggtccctagcttt

SEQ ID NO: 48449 - DNA, 48 bp, synthetic construct
  source 1..48: mol_type = other DNA
ggccccacaagcatggacctgctccggaattttcaaatacataccttc

SEQ ID NO: 48450 - DNA, 39 bp, synthetic construct
  source 1..39: mol_type = other DNA
atcttcaacgtctcatatcctgccgacattcccactatc

SEQ ID NO: 48451 - DNA, 42 bp, synthetic construct
  source 1..42: mol_type = other DNA
ggcgccgtcatgtccctgtctgttaatgatcttaatagcttc

SEQ ID NO: 48452 - DNA, 96 bp, synthetic construct
  source 1..96: mol_type = other DNA
agtgagcacgtgaacgcactggatgctctcgttatggtctccaatagcttcacctctaatggatacgcagtgttgggcaatagcatcgcggggtcg

SEQ ID NO: 48453 - DNA, 90 bp, synthetic construct
  source 1..90: mol_type = other DNA
gggacaagctacggactctttgacgacttctacttcgtgatcgtgaccctgacaaccgtcggctatggcgatgtggttccacaaacgtac

SEQ ID NO: 48454 - DNA, 108 bp, synthetic construct
  source 1..108: mol_type = other DNA
gtgttcgctggcgccaagagcctgacccaagcaattaccgtcctgtggactatcaacgtgccttggatgtgggcttaccacggcaacgtgattgctccatgggttagc

SEQ ID NO: 48455 - DNA, 96 bp, synthetic construct
  source 1..96: mol_type = other DNA
gccgagggcgttaatgccttagattctctcgtcatgatctccaaccaattcacgggcaatggcttcgcggtctttggcaatagcagtccagggata

SEQ ID NO: 48456 - DNA, 90 bp, synthetic construct
  source 1..90: mol_type = other DNA
gaggacgtatctcccctggatagcctcaatatggtctctaacgcttttacttccaacggttacaccgtcttagggcagtctggacttggc

SEQ ID NO: 48457 - DNA, 45 bp, synthetic construct
  source 1..45: mol_type = other DNA
atggatttcacatctcaaatcctggatgtgatgtttcacctgttc

SEQ ID NO: 48458 - DNA, 87 bp, synthetic construct
  source 1..87: mol_type = other DNA
tttgacctgcctctgttcgatctccaccacctcctgctgaaccttgacgagaccatcgagatgttcttcgtgaacagcccagagttt

SEQ ID NO: 48459 - DNA, 54 bp, synthetic construct
  source 1..54: mol_type = other DNA
ctgggctccagcgccggggacctgcttttcgattttaagatccccaacttcctg

SEQ ID NO: 48460 - DNA, 93 bp, synthetic construct
  source 1..93: mol_type = other DNA
agccggaggttctttcttcccgagttccatttgaaattcgccctgtcccacatcatgaacacacttaaaatgtactacctttatgaccctgtg

SEQ ID NO: 48461 - DNA, 60 bp, synthetic construct
  source 1..60: mol_type = other DNA
acctatttcgactactccctggcctttgggctgtctgagggccgaaacgctttaaggtct

SEQ ID NO: 48462 - DNA, 42 bp, synthetic construct
  source 1..42: mol_type = other DNA
tacttcatcatgtttttcaatggcgagctctccaccggaaga

SEQ ID NO: 48463 - DNA, 51 bp, synthetic construct
  source 1..51: mol_type = other DNA
tacgggaactttgacggtggtatctctgacttccttactggaagacacgca

SEQ ID NO: 48464 - DNA, 66 bp, synthetic construct
  source 1..66: mol_type = other DNA
ttcatcgtggacgagtccaacctgccctcaagtactgctgagattatgacttttgtatctcaaaac

SEQ ID NO: 48465 - DNA, 51 bp, synthetic construct
  source 1..51: mol_type = other DNA
ttcatcttcgctgggagcggagcacatgtctccacgctgatggcccagctg

SEQ ID NO: 48466 - DNA, 36 bp, synthetic construct
  source 1..36: mol_type = other DNA
gctggcggagtgacctcatcgaactccgctatcttc

SEQ ID NO: 48467 - DNA, 30 bp, synthetic construct
  source 1..30: mol_type = other DNA
atctttgacctgagcccaactttctaccac

SEQ ID NO: 48468 - DNA, 96 bp, synthetic construct
  source 1..96: mol_type = other DNA
atagacccgtcaatgaacaacatcttcgacaatctctggttcgtggtcgtgtccctgaccactgtcggctacggcgacatcacacctaacaccatc

SEQ ID NO: 48469 - DNA, 60 bp, synthetic construct
  source 1..60: mol_type = other DNA
gaggacatcctgacctacatgggcgccacaagctctatggatctgtcgatgcaatatctt

SEQ ID NO: 48470 - DNA, 30 bp, synthetic construct
  source 1..30: mol_type = other DNA
atcgagcagctgggccagattggagttctg

SEQ ID NO: 48471 - DNA, 30 bp, synthetic construct
  source 1..30: mol_type = other DNA
atgaatgtggccgacatcattaaccaaccc

SEQ ID NO: 48472 - DNA, 93 bp, synthetic construct
  source 1..93: mol_type = other DNA
gcggagcacgtgaacgcactggactcacttgtcatggtgtcgaacgccttcactagcaacgggtacaccgtgctcgggaagacaatcccgggg

SEQ ID NO: 48473 - DNA, 57 bp, synthetic construct
  source 1..57: mol_type = other DNA
ctgggcgtctctgggatcgactctttgtcgcatttccaagtatctggacttgcttcc

SEQ ID NO: 48474 - DNA, 57 bp, synthetic construct
  source 1..57: mol_type = other DNA
atgagcctcattgagctgatccgggacaacttcttctacctggaacctggctacaca

SEQ ID NO: 48475 - DNA, 42 bp, synthetic construct
  source 1..42: mol_type = other DNA
gtggacaacaatatctacccccttattcacctccttgtcaca

SEQ ID NO: 48476 - DNA, 69 bp, synthetic construct
  source 1..69: mol_type = other DNA
gtcgactttttcggctactgggagcagcacgtgctgcctagcatcctcaccagcctgacaggaactgcc

SEQ ID NO: 48477 - DNA, 30 bp, synthetic construct
  source 1..30: mol_type = other DNA
gtgaccaacgtgccctatggactgtaccag

SEQ ID NO: 48478 - DNA, 96 bp, synthetic construct
  source 1..96: mol_type = other DNA
gtcgaccccactatgaataacctgtttaacgacctctggttcgtgatcgtttccattaccactgtcggttacggggatgtcattcctaacacactg

SEQ ID NO: 48479 - DNA, 96 bp, synthetic construct
  source 1..96: mol_type = other DNA
agcagtcccctgggctttcctccattcgaccttgaggacatgctgatggacgcccctgagacggtccaacttttaatctcccattctcctgttgat

SEQ ID NO: 48480 - DNA, 48 bp, synthetic construct
  source 1..48: mol_type = other DNA
gacaacgaggtccggcacattgttcgtcaatctacccctgtgcttcag

SEQ ID NO: 48481 - DNA, 33 bp, synthetic construct
  source 1..33: mol_type = other DNA
accatcgccttcaacaacatcggcgttggttac

SEQ ID NO: 48482 - DNA, 60 bp, synthetic construct
  source 1..60: mol_type = other DNA
gctgtccctactgtgtctgagattagctccggcgccgccctgaacgaatacttcatcaat

SEQ ID NO: 48483 - DNA, 93 bp, synthetic construct
  source 1..93: mol_type = other DNA
acctttttccaatttcctgtgtttgatctgcacaagattttcttcgacttctatgacacattccaactcctcatttatagcaacccaaaggac

SEQ ID NO: 48484 - DNA, 87 bp, synthetic construct
  source 1..87: mol_type = other DNA
gagtccgtggaccccctatcaagcttggtcatggtcagcaacgcattcacgtcaaatggatacgccattctggggggtactggttcc

SEQ ID NO: 48485 - DNA, 60 bp, synthetic construct
  source 1..60: mol_type = other DNA
gccgtccccgctgtgacacagatcacttcccacgcaaccctgaactcttacgtgatctcc

SEQ ID NO: 48486 - DNA, 63 bp, synthetic construct
  source 1..63: mol_type = other DNA
gccgtgcccgctgtctctaacatcacctcccacgcggcagttaacagctacatcatgaactat

SEQ ID NO: 48487 - DNA, 90 bp, synthetic construct
  source 1..90: mol_type = other DNA
gacccttccctgaacatggttgactctctctggttcgtgatgagcactctgaccaccgtcggttatggtgacgtgacacccaacacactg

SEQ ID NO: 48488 - DNA, 36 bp, synthetic construct
  source 1..36: mol_type = other DNA
ccccagatcgctcaatactttaacgtggacatcacc

SEQ ID NO: 48489 - DNA, 36 bp, synthetic construct
  source 1..36: mol_type = other DNA
gagttcctgaacaccctgacacacattatcggaacc

SEQ ID NO: 48490 - DNA, 90 bp, synthetic construct
  source 1..90: mol_type = other DNA
gtcgaggataccggccccctgaacgccctggtcatggtatccaacgccttcacaagcaacggatacgcagtcctagggaaaagttctctg

SEQ ID NO: 48491 - DNA, 30 bp, synthetic construct
  source 1..30: mol_type = other DNA
atcttcgatgtcagtaatgagttctaccag

SEQ ID NO: 48492 - DNA, 96 bp, synthetic construct
  source 1..96: mol_type = other DNA
atcgatcctggaatgaataacctgttcgacaacctctggttcgtagttgtatcattaactaccgtcggatacggagacattacaccccattctgtg

SEQ ID NO: 48493 - DNA, 90 bp, synthetic construct
  source 1..90: mol_type = other DNA
gttgagaataccggcccgctgaacgcccttgttatggtgtccaacgctttcacatccaacggttatgctgtactcggcaagtcttctctg

SEQ ID NO: 48494 - DNA, 84 bp, synthetic construct
  source 1..84: mol_type = other DNA
gaaggggtggaccccctgagtgccctcgtgatggtctcgaacgcattcacgtccaacggctatgcgatattaggcaaatccggg

SEQ ID NO: 48495 - DNA, 96 bp, synthetic construct
  source 1..96: mol_type = other DNA
atcgatccatcgatgaacaatctgttcgataacctctggttcgtcgtggtgtccatcaccaccgttggttatggggacatcactcctaacaccatt

SEQ ID NO: 48496 - DNA, 48 bp, synthetic construct
  source 1..48: mol_type = other DNA
ggccccatcaaaattcctctgaccaagggggtcgaggtatctattatg

SEQ ID NO: 48497 - DNA, 30 bp, synthetic construct; identical to SEQ ID NO: 46830
  source 1..30: mol_type = other DNA

SEQ ID NO: 48498 - DNA, 123 bp, synthetic construct
  source 1..123: mol_type = other DNA
tctatcctgccattgcacccatacgcatttgccatggcatccggcgtcggctccgcatcgatgaacgcggctagcctggggcctacattggccgcctttcctggactggagacccagatcgaa

SEQ ID NO: 48499 - DNA, 93 bp, synthetic construct
  source 1..93: mol_type = other DNA
gtggaaggggttaacatgctcgacgcccttgttatgtcaagcaacgcgttcacgagtaatggatacgcagtgctggggaacagtgtaccagga

SEQ ID NO: 48500 - DNA, 114 bp, synthetic construct
  source 1..114: mol_type = other DNA
ttggtttttgcggggaccaagagtctatcccaagctgtaactgttttatggaccttcaacgtcccctggtctctggcttaccacggcaacattatcgcaccttgggtttctcag

SEQ ID NO: 48501 - DNA, 48 bp, synthetic construct
  source 1..48: mol_type = other DNA
ggccccacaagcattgacctgatccggaattttcaaatccataccttt

SEQ ID NO: 48502 - DNA, 105 bp, synthetic construct
  source 1..105: mol_type = other DNA
ggatatatgtcactacaaagcggaacaccagtgtctgagattgtttcgcaaggcaccactctcatcttcgtagtatacccgcaagtatttaacatcttggggacc

SEQ ID NO: 48503 - DNA, 75 bp, synthetic construct
  source 1..75: mol_type = other DNA
gtctcctacttccctcaactgatgttcctcgtcaacttctccctgccaagcatggccattatcgacaccttgccc

SEQ ID NO: 48504 - DNA, 33 bp, synthetic construct
  source 1..33: mol_type = other DNA
ctggtggacgtgcacgaggtcctcttcaacaac

SEQ ID NO: 48505 - DNA, 90 bp, synthetic construct
  source 1..90: mol_type = other DNA
gctgagaacaagtccgcactcgactccctcgtcatggttagcaatgcattcacctctaacggctacgccgtgctggggaactctatcttc

SEQ ID NO: 48506 - DNA, 60 bp, synthetic construct
  source 1..60: mol_type = other DNA
gacatgattcatatatcgagtcccgtcctcgttaatgagtctaccacaaccatcttctca

SEQ ID NO: 48507 - DNA, 30 bp, synthetic construct
  source 1..30: mol_type = other DNA
gagaggagctgggacaacggagtgtctgaa

SEQ ID NO: 48508 - DNA, 33 bp, synthetic construct
  source 1..33: mol_type = other DNA
ctcgtcgtgctgaccaagatagacgcagcgccg

SEQ ID NO: 48509 - DNA, 216 bp, synthetic construct
  source 1..216: mol_type = other DNA
ttcgattcctacaagacagctctcgttcaaaccataatgaaggccgacatgcagagcaggatcatatatatatctgcggattcttggaacgcctctggctatctcgacgatcgcggactctacctggacgacgagatccacctgaacgccaagggctacgaggtgctggactcctgtatcgcgtccgagattctgaaggacatcaagaagaagcag

SEQ ID NO: 48510 - DNA, 96 bp, synthetic construct
  source 1..96: mol_type = other DNA
tccagccccttcggctttcctccattcgatctcgaggacctgctcatggacgcccctgaaaccgtgcacctcctgctgagtcactccttcgtggat

SEQ ID NO: 48511 - DNA, 60 bp, synthetic construct
  source 1..60: mol_type = other DNA
gctgttccgaccgtcgctgagattcagagcggcgccaacctcaccgactacctgatctct

SEQ ID NO: 48512 - DNA, 87 bp, synthetic construct
  source 1..87: mol_type = other DNA
agctttttcggcttccctctctttaacctcgaggaaatgctgctgaagttcgatcaaacgttacacctgttcttcatccacaatcct

SEQ ID NO: 48513 - DNA, 48 bp, synthetic construct
  source 1..48: mol_type = other DNA
tttatgcaatcagtttacgagggcctgttctcctggaccaagggcgga

SEQ ID NO: 48514 - DNA, 30 bp, synthetic construct
  source 1..30: mol_type = other DNA
gagcggaccctggtggccggccacagcctg

SEQ ID NO: 48515 - DNA, 33 bp, synthetic construct
  source 1..33: mol_type = other DNA
aacttcatcaatgacttactgaactcaacatac

SEQ ID NO: 48516 - DNA, 39 bp, synthetic construct
  source 1..39: mol_type = other DNA
ctcaacgggatcgaggaggagttcggagctggaaagctg

SEQ ID NO: 48517 - DNA, 45 bp, synthetic construct
  source 1..45: mol_type = other DNA
gccgatatcgactggaagtctcccttcctcgtatacgccattgga

SEQ ID NO: 48518 - DNA, 93 bp, synthetic construct
  source 1..93: mol_type = other DNA
agcgaaggcgtcaacgcactggactcattggtcatcgtttcgaatcagtttacgggcaacggctactccgccttcggcaacacggtgtcagga

SEQ ID NO: 48519 - DNA, 96 bp, synthetic construct
  source 1..96: mol_type = other DNA
accgagggcaagaacccactggacgcactagtgatggtatcgaacgcattcacgtcaaatggatacgctgtgctgggcaatagcattggcggacct

SEQ ID NO: 48520 - DNA, 48 bp, synthetic construct
  source 1..48: mol_type = other DNA
ggccccacaagcgtggacctgctgcggaactttcaaattcacaccttc

SEQ ID NO: 48521 - DNA, 93 bp, synthetic construct
  source 1..93: mol_type = other DNA
gagaacaagaatcccctggactccctcgtgatggtcagcaacgcgtttacgtctaatggatacgctgtgctgggcagtggtatcagtggcgca

SEQ ID NO: 48522 - DNA, 84 bp, synthetic construct
  source 1..84: mol_type = other DNA
ctcgggctgttctcctcttacatcctgcccggacctatcgacgtgatcaacagcgcctgggtcgtgattcagaacggcaaactg

SEQ ID NO: 48523 - DNA, 60 bp, synthetic construct
  source 1..60: mol_type = other DNA
ggtagtagctcagggctgggatacatgatcctgacggctacaaacctcttcgacactggg

SEQ ID NO: 48524 - DNA, 93 bp, synthetic construct
  source 1..93: mol_type = other DNA
gcagagggcgctaacgctctggactccctcgttattgtttcaaaccaattcactggaaatggatacagctcattcgggaatacgataagtggc

SEQ ID NO: 48525 - DNA, 90 bp, synthetic construct
  source 1..90: mol_type = other DNA
ctggggctcttctctagctacattctgcccggccctatcgacgtcgtgaagtccgccgtcgttgttattcaaaacggaaaactgcttacc

SEQ ID NO: 48526 - DNA, 60 bp, synthetic construct
  source 1..60: mol_type = other DNA
ggatctagctccggcctcggctacatgatcctgaccgccaccaacctgtttgataccggc

SEQ ID NO: 48527 - DNA, 87 bp, synthetic construct
  source 1..87: mol_type = other DNA
gagaacaaggaccccctggattcctttgtcatggtctctaatgcctttacctcgaatggctactctgtgctcggcaacagtacattg

SEQ ID NO: 48528 - DNA, 90 bp, synthetic construct
  source 1..90: mol_type = other DNA
ctgggaattgtcaatccttacatactgcctggtccaatcaccgtttgccaaagcgcctgggagctcatcatgaacggcaaactcttgacc

SEQ ID NO: 48529 - DNA, 60 bp, synthetic construct
  source 1..60: mol_type = other DNA
gggagcagttccggactcggctacatgatccttactgccacgtctctgttcgatcctggc

SEQ ID NO: 48530 - DNA, 30 bp, synthetic construct
  source 1..30: mol_type = other DNA
tccaacgtgaacagctctaatgacatcgcc

SEQ ID NO: 48531 - DNA, 30 bp, synthetic construct
  source 1..30: mol_type = other DNA
ctggttggccacgagatccagcttggaact

SEQ ID NO: 48532 - DNA, 96 bp, synthetic construct
  source 1..96: mol_type = other DNA
gttgagaacaagaatcctctagactctctagtgatggtcagcaacgccttcacgagcaatggatacgcagtgctggggtcaagcggcccctcaata

SEQ ID NO: 48533 - DNA, 48 bp, synthetic construct
  source 1..48: mol_type = other DNA
ggcatgagcgccgtggacatgatccgggatttcaagctcccatctctg

SEQ ID NO: 48534 - DNA, 93 bp, synthetic construct
  source 1..93: mol_type = other DNA
gccgagggcgcaaatgcccttgatagccttgtcatcgtgtccaaccaattcacggggaatggctactcggctttcggcaacacgatttctggt

SEQ ID NO: 48535 - DNA, 48 bp, synthetic construct
  source 1..48: mol_type = other DNA
atgacaaccagcgattggtttgaggctatcctggccaacctgttcgat

SEQ ID NO: 48536 - DNA, 93 bp, synthetic construct
  source 1..93: mol_type = other DNA
agcgagggagttaacgctctggatagcattgttatcgtgtccaatcaatttaccggaaacggctactcggtctttggtaacacaatctctggt

SEQ ID NO: 48537 - DNA, 42 bp, synthetic construct
  source 1..42: mol_type = other DNA
cgctggggcatggacagcatcttcggtttcgattttgatccc

SEQ ID NO: 48538 - DNA, 33 bp, synthetic construct
  source 1..33: mol_type = other DNA
ctgcacgagaccgtggaggccgagttcgacttt

SEQ ID NO: 48539 - DNA, 93 bp, synthetic construct
  source 1..93: mol_type = other DNA
agcgagggcaagaatgctctggatagtctggtcatagtgtctaaccaatttacgggtaacggatacagcgtgttcggaagtaccattagtgga

SEQ ID NO: 48540 - DNA, 93 bp, synthetic construct
  source 1..93: mol_type = other DNA
gctgaaggcgcaaacgcacttgactcactagttatagtgtcaaaccagtttactggcaacggatacagtgccttcggcaacaccatctctggt

SEQ ID NO: 48541 - DNA, 87 bp, synthetic construct
  source 1..87: mol_type = other DNA
gagcgggttaatcccctggacgctctggtcatggtgtccaacgctttcacatccaatggctacgcggtccttggccactctatcctg

SEQ ID NO: 48542 - DNA, 105 bp, synthetic construct
  source 1..105: mol_type = other DNA
accagcggctttgccttcacccggctggctgggctgaacaacgtcgagaacgcgactgccgctgaagcagccagtcagatcttcacacccgactttatcgctgcg

SEQ ID NO: 48543 - DNA, 93 bp, synthetic construct
  source 1..93: mol_type = other DNA
tgcagccccttcaatttccccgccttcgacctggaggagatgcttctcctttggcctgaaacaattcacatgatttacacacataatccagtc

SEQ ID NO: 48544 - DNA, 42 bp, synthetic construct
  source 1..42: mol_type = other DNA
agatggggcatggactccatcttcggcttcgggttcgatcca

SEQ ID NO: 48545 - DNA, 93 bp, synthetic construct
  source 1..93: mol_type = other DNA
tccgaacgagttaacgcgttggactcactcgttattgtatcaaaccaattcaccggcaacggatacagtgtattcggaaactctatatcgggc

SEQ ID NO: 48546 - DNA, 39 bp, synthetic construct
  source 1..39: mol_type = other DNA
atgctggacatcgtgaacattctgaatcagatcgataac

SEQ ID NO: 48547 - DNA, 33 bp, synthetic construct
  source 1..33: mol_type = other DNA
agcaccttcatggactattccttttacaacccc

SEQ ID NO: 48548 - DNA, 84 bp, synthetic construct
  source 1..84: mol_type = other DNA
ctgtgccactctggcttcgactgtgactctggtcaactctgcaagtacagctgcaacgtttgcccttacctgcctggatgcttc

SEQ ID NO: 48549 - DNA, 36 bp, synthetic construct
  source 1..36: mol_type = other DNA
atcctccctgccgtgattcctggcgttggattgctg

SEQ ID NO: 48550 - DNA, 90 bp, synthetic construct
  source 1..90: mol_type = other DNA
gggcccacatatggcctctacgacgatttctacttcgtgatggtgaccctgaccaccgttggttatggggacattatccctgtcactctg

SEQ ID NO: 48551 - DNA, 93 bp, synthetic construct
  source 1..93: mol_type = other DNA
agcgaaggagttaatgccctggattcactcgtcatcgtctcaaacgaatttaccggcaacggttatgctgtattcggggacaccatccctggc

SEQ ID NO: 48552 - DNA, 90 bp, synthetic construct
  source 1..90: mol_type = other DNA
gccgagtctgtcaatgccctcgactcccttgtgatgatcagcaacgagttcactgggaacggctacggcatcttcggagctaccattctg

SEQ ID NO: 48553 - DNA, 93 bp, synthetic construct
  source 1..93: mol_type = other DNA
gctgagggcgagaatgcattggactctttagtcatcgttagcaaccaatttaccggcaacggatattcttccttcgggtcaaccatcagtggc

SEQ ID NO: 48554 - DNA, 54 bp, synthetic construct
  source 1..54: mol_type = other DNA
atcgcggattcaatccatcctggcaacgctgggatcggaattttgggtggactg

SEQ ID NO: 48555 - DNA, 66 bp, synthetic construct
  source 1..66: mol_type = other DNA
ctgggctctggggcagtaaccatcggcgctctgggagctactgcaccggggttgggagttggttac

SEQ ID NO: 48556 - DNA, 90 bp, synthetic construct
  source 1..90: mol_type = other DNA
gagggcaaggatgcactggattcacttgtgatggtcagcaacgctttcacctccaacggatacgccgtgctcggcaatagcatccccggg

SEQ ID NO: 48557 - DNA, 30 bp, synthetic construct
  source 1..30: mol_type = other DNA
ttcagcaacggcatcaacctggactacaat

SEQ ID NO: 48558 - DNA, 30 bp, synthetic construct
  source 1..30: mol_type = other DNA
ggcgagctgttgtattccaatctggaatcc

SEQ ID NO: 48559 - DNA, 96 bp, synthetic construct
  source 1..96: mol_type = other DNA
gcagagggtgcaaacgccctggactccctggtcattgtctcaaatcaattcactggcaatggttatagtgccttcggaaatacgataagtggtatc

SEQ ID NO: 48560 - DNA, 96 bp, synthetic construct
  source 1..96: mol_type = other DNA
gtagagcacaagaatcccctggacgccctggttatggtatctaacgcattcacaagtaacggatacgcagtcttagggaaatctcccggctctata

SEQ ID NO: 48561 - DNA, 93 bp, synthetic construct
  source 1..93: mol_type = other DNA
gctgaaggcgcaaacgccctggactccctcgtcatcgtctcaaatcagtttacgggcaacgggtactccgcgttcggaaataccgttagcggt

SEQ ID NO: 48562 - DNA, 48 bp, synthetic construct
  source 1..48: mol_type = other DNA
agccctgtcaaggagccaaccgtggaactcctggctcggacatcacct

SEQ ID NO: 48563 - DNA, 48 bp, synthetic construct
  source 1..48: mol_type = other DNA
atcgcagccagcttttccaccaagggctttgccggctttgctttctcc

SEQ ID NO: 48564 - DNA, 33 bp, synthetic construct
  source 1..33: mol_type = other DNA
ctgaagctgaatttcctgacgtcgttgagcaat

SEQ ID NO: 48565 - DNA, 102 bp, synthetic construct
  source 1..102: mol_type = other DNA
cattacctgctcatcttcatcaacttcctcaaatattacctcttcatcaagttctacaacttgttcaacaacctgtcttatttcgttaccattcacctgttc

SEQ ID NO: 48566 - DNA, 75 bp, synthetic construct
  source 1..75: mol_type = other DNA
gaccacatccctggcttccggtccctgatcttcgctcccatcttttcaattctggccatcacctctcttgctgga

SEQ ID NO: 48567 - DNA, 33 bp, synthetic construct
  source 1..33: mol_type = other DNA
catattgactcgggaaatctgatcttcaccaac

SEQ ID NO: 48568 - DNA, 39 bp, synthetic construct
  source 1..39: mol_type = other DNA
gtctacctgatgcgggacttcagcgtgtcctctacacag

SEQ ID NO: 48569 - DNA, 75 bp, synthetic construct
  source 1..75: mol_type = other DNA
caggacaatatccccggattgaactccttcctggccatgagcatcctccctctgctgcctatcaattctctgttc

SEQ ID NO: 48570 - DNA, 96 bp, synthetic construct
  source 1..96: mol_type = other DNA
gtcgagaatgcaaacgccgttgatagtttagttatggtttcgaacgcgttcacctcaaatggatacgctattttgggccagggtagtataggcccc

SEQ ID NO: 48571 - DNA, 81 bp, synthetic construct
  source 1..81: mol_type = other DNA
tttaaccccgacaatggagatttatacgaattcatgagcgggttctactggttcattagttacctcggcgtcgatataaac

SEQ ID NO: 48572 - DNA, 48 bp, synthetic construct
  source 1..48: mol_type = other DNA
agcccagtgaaggagcctaccgtcgaactgatcgcaagaacaagtcct

SEQ ID NO: 48573 - DNA, 72 bp, synthetic construct
  source 1..72: mol_type = other DNA
gacaacatccccgccctgaactctttccttgggatgtccattttgccgctgctgccaattaatagtcttctg

SEQ ID NO: 48574 - DNA, 30 bp, synthetic construct
  source 1..30: mol_type = other DNA
atggacagcggcaatctgatcttcaccaac

SEQ ID NO: 48575 - DNA, 66 bp, synthetic construct
  source 1..66: mol_type = other DNA
aatgccatttacggatggaacttcataatgcagatcgccaccggcggctacgaagtgctgaacaca

SEQ ID NO: 48576 - DNA, 30 bp, synthetic construct
  source 1..30: mol_type = other DNA
cgcggaagcatcggcaccaaccacttcaca

SEQ ID NO: 48577 - DNA, 84 bp, synthetic construct
  source 1..84: mol_type = other DNA
tacaacagcctgggcacaaataacctctccatctgcctgtttgtgatgttcgggctgcatagtacctctagcacactggaactc

SEQ ID NO: 48578 - DNA, 45 bp, synthetic construct
  source 1..45: mol_type = other DNA
actattaagatccccatcacccacgacgtggccatcacaatcatg

SEQ ID NO: 48579 - DNA, 30 bp, synthetic construct
  source 1..30: mol_type = other DNA
ggccagagcattaccctgatcttcgagatg

SEQ ID NO: 48580 - DNA, 123 bp, synthetic construct
  source 1..123: mol_type = other DNA
agctttctgccactgcatccatacgcgttcgctatggccagtggtgtcggctcggcatctatgaacgctgccgcaatcgggcctacactggccgcttttccgggaatggagacccagatcgaa

SEQ ID NO: 48581 - DNA, 93 bp, synthetic construct
  source 1..93: mol_type = other DNA
gtggagaaggctaacgccgtcgatagcctggttatggtctcgaacgccttcacgagcaacggctacgtggtcctaggccaatcaatacccgga

SEQ ID NO: 48582 - DNA, 69 bp, synthetic construct
  source 1..69: mol_type = other DNA
gacaacatccccgggttccgggagctggtctacgcccctctgtttagcatcgttggaatgaattacctg

SEQ ID NO: 48583 - DNA, 30 bp, synthetic construct
  source 1..30: mol_type = other DNA
ctggacagcggcaacctgatcttcaccaat

SEQ ID NO: 48584 - DNA, 45 bp, synthetic construct
  source 1..45: mol_type = other DNA
accatcgagattcccctgacaaaggacgtggccatcactatcatg

SEQ ID NO: 48585 - DNA, 30 bp, synthetic construct
  source 1..30: mol_type = other DNA
gggcagagcatcggcctgattttcgacatg

SEQ ID NO: 48586 - DNA, 123 bp, synthetic construct
  source 1..123: mol_type = other DNA
tcattcctgcctctgcacccatacgcattcgccatggctagtggcgttggctccgcatcgatgaacgctgccgcaatcggcccaacactggccgcattccccggaatggagacccagatcgaa

SEQ ID NO: 48587 - DNA, 48 bp, synthetic construct
  source 1..48: mol_type = other DNA
agcccagttaaggaacccactgctgagctgctcgcgcgaacttctccc

SEQ ID NO: 48588 - DNA, 93 bp, synthetic construct
  source 1..93: mol_type = other DNA
ttcggtagcagctactctctgttcgactacttctacttcgtgatcgtcacactcgccaccgttggatacggcgacattgtgcccctgactttc

SEQ ID NO: 48589 - DNA, 57 bp, synthetic construct
  source 1..57: mol_type = other DNA
gccctgcccgagctgcagattgctaactattcggattttatcctcttcatcacaacc

SEQ ID NO: 48590 - DNA, 45 bp, synthetic construct
  source 1..45: mol_type = other DNA
acaattgagatccccatcaccaaggacgtggccattaccatcatg

SEQ ID NO: 48591 - DNA, 33 bp, synthetic construct
  source 1..33: mol_type = other DNA
ggccagagcattgggctgatgtttcaaatgatt

SEQ ID NO: 48592 - DNA, 123 bp, synthetic construct
  source 1..123: mol_type = other DNA
tcctttctccccctgcacccatacgcgtttgcaatggccagcggtgtcggatccgcaagcatgaatgcagccgccattggccctaccctggctgccttcccggggctggaaacacagatcgag

SEQ ID NO: 48593 - DNA, 114 bp, synthetic construct
  source 1..114: mol_type = other DNA
cttgtttttgctggcaccaaggggctgtctcaagccgttactctcctgtggacattcaacgtgccctggaactgggcctaccacggcaatgtgatcgcaccatgggttagccaa

SEQ ID NO: 48594 - DNA, 72 bp, synthetic construct
  source 1..72: mol_type = other DNA
gcatacattccgggcttccgggacctccttttcactcctttgttttccataatggccttcgggtcctttggt

SEQ ID NO: 48595 - DNA, 33 bp, synthetic construct
  source 1..33: mol_type = other DNA
cacatcgacaccggcaacctgatcttcaccaat

SEQ ID NO: 48596 - DNA, 48 bp, synthetic construct
  source 1..48: mol_type = other DNA
agccccgtgaaggagcccacggtcgaacttttggcacgtaccagtcca

SEQ ID NO: 48597 - DNA, 48 bp, synthetic construct
  source 1..48: mol_type = other DNA
agcccagtgaaggaacctaccgtcgagctattggctcgtactagtcct

SEQ ID NO: 48598 - DNA, 48 bp, synthetic construct
  source 1..48: mol_type = other DNA
tcccctgtgaaggaaccaaccgtcgagctgctcgctcggacaagtccc

SEQ ID NO: 48599 - DNA, 60 bp, synthetic construct
  source 1..60: mol_type = other DNA
ctgatatccgattcttttaatcccggcaacgctgccattggattcctcggtggacttggc

SEQ ID NO: 48600 - DNA, 63 bp, synthetic construct
  source 1..63: mol_type = other DNA
atgggggcttcagcggtcacgatcggcggtcttggcgctaccgcccctggagttggggtatct

SEQ ID NO: 48601 - DNA, 48 bp, synthetic construct
  source 1..48: mol_type = other DNA
agcccagtcaaggaacctaccgtggagcttctggcccgaacaagtcca

SEQ ID NO: 48602 - DNA, 42 bp, synthetic construct
  source 1..42: mol_type = other DNA
ctggacatcgtgttcattctcaacgagatcgactccgtaatt

SEQ ID NO: 48603 - DNA, 33 bp, synthetic construct
  source 1..33: mol_type = other DNA
atcgactatcctttctacaacccacataccacc

SEQ ID NO: 48604 - DNA, 63 bp, synthetic construct
  source 1..63: mol_type = other DNA
taccagaacatcccttctatgttcatgcttatctttcaaaacgcatttgacttccaaagtata

SEQ ID NO: 48605 - DNA, 63 bp, synthetic construct
  source 1..63: mol_type = other DNA
gtcacagggaccatgaacatcggagagatcatcacttaccaatcagtacatggacccttgatt

SEQ ID NO: 48606 - DNA, 60 bp, synthetic construct
  source 1..60: mol_type = other DNA
ctgatcagcgagggcgtcactccgggagctgccgggattggactgcttggaggattgggc

SEQ ID NO: 48607 - DNA, 63 bp, synthetic construct
  source 1..63: mol_type = other DNA
ttgggtgcacctgctgtcgccatcggtggtcttggagccacagctccgggcatgggtgtctct

SEQ ID NO: 48608 - DNA, 96 bp, synthetic construct
  source 1..96: mol_type = other DNA
atctcttccctcatgcactttcccgagttcgacctcgaggatatgctcctggaactgcccaagaccattaacacgcttttctcgcacaacccagtg

SEQ ID NO: 48609 - DNA, 57 bp, synthetic construct
  source 1..57: mol_type = other DNA
atcagcaacaccgtgacacctggcgctgctgcaattggacctctgggtggacttggc

SEQ ID NO: 48610 - DNA, 66 bp, synthetic construct
  source 1..66: mol_type = other DNA
ttgggagcccctgccgtcaccatcggtggcctcggcgcaacagcacctggccttggaggctcagtt

SEQ ID NO: 48611 - DNA, 48 bp, synthetic construct
  source 1..48: mol_type = other DNA
agccctgtcaaggagccaaccgtggaactcctggcccgaacaagtccg

SEQ ID NO: 48612 - DNA, 48 bp, synthetic construct
  source 1..48: mol_type = other DNA
atgggccggatcgtcggccagagccagtttgaacaaccgttgttcatg

SEQ ID NO: 48613 - DNA, 39 bp, synthetic construct
  source 1..39: mol_type = other DNA
accatccccattaacggcacaccactgcacgtgttccct

SEQ ID NO: 48614 - DNA, 60 bp, synthetic construct
  source 1..60: mol_type = other DNA
ctgatcagcgagtcaatcacccctggtgccgccgggattggtttgcttggaggattgggc

SEQ ID NO: 48615 - DNA, 66 bp, synthetic construct
  source 1..66: mol_type = other DNA
ctgggagatccggccgtggccgtcggcggtcttggcgctactgctcctggtttgggcgttggttat

SEQ ID NO: 48616 - DNA, 93 bp, synthetic construct
  source 1..93: mol_type = other DNA
acagagcagaagaatcctctcgattccctcgtaatggtgtccaacgcattcacctcgaatggatacgctgtgctgggcaaatcaatccccggg

SEQ ID NO: 48617 - DNA, 57 bp, synthetic construct
  source 1..57: mol_type = other DNA
atcagcgaatccgtgacaccaggactggctggaattgggttgcttggaggactgggc

SEQ ID NO: 48618 - DNA, 63 bp, synthetic construct
  source 1..63: mol_type = other DNA
ctgggtgcccctgctgttgccgtcggaggtcttggagcgacggctcccggtcttggcgtttct

SEQ ID NO: 48619 - DNA, 48 bp, synthetic construct
  source 1..48: mol_type = other DNA
agccctgtgaaggagccaaccgtcgaactcctagcccggacttctccc

SEQ ID NO: 48620 - DNA, 57 bp, synthetic construct
  source 1..57: mol_type = other DNA
ctgatcgacgatggcgttgatcctggggcagctggcattggtcttttgggaggactc

SEQ ID NO: 48621 - DNA, 60 bp, synthetic construct
  source 1..60: mol_type = other DNA
ggcgcccctgctgtgacaataggaggactgggagccacagcacccggtctctctgttggc

SEQ ID NO: 48622 - DNA, 33 bp, synthetic construct
  source 1..33: mol_type = other DNA
gacacactgctcgggggagcaaacctctggggc

SEQ ID NO: 48623 - DNA, 90 bp, synthetic construct
  source 1..90: mol_type = other DNA
atggagctggttcaatttaatagcggcggcgacctcatggtggctcgggccagcgggaaagtagacattggctacgtcgggatctctccc

SEQ ID NO: 48624 - DNA, 138 bp, synthetic construct
  source 1..138: mol_type = other DNA
gttgagaaggaggtccccgtgaagatcatatctgcggcgcagtccgagggcagtggaatcatcctgtctaaggattccaacatcagtaccgtgtctgatctccggggcaagattatcgctacacctggagaggcttct

SEQ ID NO: 48625 - DNA, 60 bp, synthetic construct
  source 1..60: mol_type = other DNA
ctcatctccgatagcgtgacccctggggccgctggaattggtctgctgggtggacttggc

SEQ ID NO: 48626 - DNA, 66 bp, synthetic construct
  source 1..66: mol_type = other DNA
ctcggtagcgctgccgtcacggttggggggctgggtgcaacagcacctggaatgggtgtcggatac

SEQ ID NO: 48627 - DNA, 36 bp, synthetic construct
  source 1..36: mol_type = other DNA
gacatgctgttgggcggacagaacctctggggatgg

SEQ ID NO: 48628 - DNA, 45 bp, synthetic construct
  source 1..45: mol_type = other DNA
atggactacggctatgagatcctgaagatccccttcaaccatctc

SEQ ID NO: 48629 - DNA, 66 bp, synthetic construct
  source 1..66: mol_type = other DNA
gcggtttgccccgagattaacaacctgttcaacttacaaatttttagcggcaatgccaacaacagc

SEQ ID NO: 48630 - DNA, 33 bp, synthetic construct
  source 1..33: mol_type = other DNA
gtcttcatccaaggcgtggcttataactctgcc

SEQ ID NO: 48631 - DNA, 45 bp, synthetic construct
  source 1..45: mol_type = other DNA
gccggaggcaatatcggacacgacctggcaagcgtcgtggctttc

SEQ ID NO: 48632 - DNA, 36 bp, synthetic construct
  source 1..36: mol_type = other DNA
gacaacagccagctgtggaacttcctggagcacaat

SEQ ID NO: 48633 - DNA, 39 bp, synthetic construct
  source 1..39: mol_type = other DNA
gctctgatgtccggattgtccgagctctggaagcgaatc

SEQ ID NO: 48634 - DNA, 93 bp, synthetic construct
  source 1..93: mol_type = other DNA
agcgagaacgtgaacgcactggactccttggtcatgattagtaacgagttcacggggaatggatacgggatatttggcaatacgatacccggc

SEQ ID NO: 48635 - DNA, 60 bp, synthetic construct
  source 1..60: mol_type = other DNA
gccgtgcccacaattaccgacataagttcaggggtcgctctgaatgagtacttcatcaac

SEQ ID NO: 48636 - DNA, 48 bp, synthetic construct
  source 1..48: mol_type = other DNA
agcccagtcaaagaaccaaccgtcgagctgatcgctcggacatctcct

SEQ ID NO: 48637 - DNA, 30 bp, synthetic construct
  source 1..30: mol_type = other DNA
ttcaccccaatcccgtctaatattcagttc

SEQ ID NO: 48638 - DNA, 33 bp, synthetic construct
  source 1..33: mol_type = other DNA
gtcctcctgcccgttattattcccgggatcagg

SEQ ID NO: 48639 - DNA, 90 bp, synthetic construct
  source 1..90: mol_type = other DNA
gggtccagctataacctgttcgattacttctactttgtgatcgtcacactcgccaccgttggatacggcgatgtggtgcctactactgtg

SEQ ID NO: 48640 - DNA, 54 bp, synthetic construct
  source 1..54: mol_type = other DNA
ctgatcgccgatggtgtcggagacgctggaattgggttactaggtggacttggc

SEQ ID NO: 48641 - DNA, 66 bp, synthetic construct
  source 1..66: mol_type = other DNA
ctcggcatgcaggcagtgacagtcggtggactgggagccacagcaccagggctgggagtgtcatac

SEQ ID NO: 48642 - DNA, 60 bp, synthetic construct
  source 1..60: mol_type = other DNA
gctgtgccaacaatctccgacatctctagcggcgtcgccctgaacgagtacttcatcaat

SEQ ID NO: 48643 - DNA, 30 bp, synthetic construct
  source 1..30: mol_type = other DNA
ctcctgcccgtgattatccctggtgtcaac

SEQ ID NO: 48644 - DNA, 93 bp, synthetic construct
  source 1..93: mol_type = other DNA
tttggtagctcgtatactctgttcgactacttttacctcgtggtcgtcaccatcaccactgttggctacggagatattgtgcccctgacattt

SEQ ID NO: 48645 - DNA, 33 bp, synthetic construct
  source 1..33: mol_type = other DNA
ctcctgcctgtgatcattgtgccaaataacggt

SEQ ID NO: 48646 - DNA, 96 bp, synthetic construct
  source 1..96: mol_type = other DNA
ttcggctcctcctataaccttttcgattacttttaccttgttatcgtcaccataaccacggttggatatggggacattgtgccccttaccgttccg

SEQ ID NO: 48647 - DNA, 36 bp, synthetic construct
  source 1..36: mol_type = other DNA
gattatgccaaggacatcctggtgtccagctacttt

SEQ ID NO: 48648 - DNA, 60 bp, synthetic construct
  source 1..60: mol_type = other DNA
gccgtgcctactattagcgacatctcttccggcgtcgctctgaacgagtacttcatcacc

SEQ ID NO: 48649 - DNA, 63 bp, synthetic construct
  source 1..63: mol_type = other DNA
gctgtgcccacaattaccgacatatcgtccggggtcgccctgaacggctacttcatcgactac

SEQ ID NO: 48650 - DNA, 75 bp, synthetic construct
  source 1..75: mol_type = other DNA
gtcgcccacttccctgctctgaacttcctggtcggcttctacgcaccctctatgtccctgatcgggtctttgccc

SEQ ID NO: 48651 - DNA, 60 bp, synthetic construct
  source 1..60: mol_type = other DNA
gctgtgcctaccatagccgatattagctccggcgtcgccctgaacgagtacttcatcaac

SEQ ID NO: 48652 - DNA, 69 bp, synthetic construct
  source 1..69: mol_type = other DNA
atcggcggcgtcgtgaacgctttcgtgatgattttcgaatacgcattcgacttcaagtccttcgttggc

SEQ ID NO: 48653 - DNA, 87 bp, synthetic construct
  source 1..87: mol_type = other DNA
tatggcagctacgccgaaatcacagctatcggggaaaaaggtgcacctttggttcaagccgtagtggcttccaccgcaattggagac

SEQ ID NO: 48654 - DNA, 60 bp, synthetic construct
  source 1..60: mol_type = other DNA
gccgtccccactgtctccgacatcacttcgggtgctactctgaacgagtacttcctcaac

SEQ ID NO: 48655 - DNA, 72 bp, synthetic construct
  source 1..72: mol_type = other DNA
aatcactttcctttccttaacttcctcgtgaacttctccgtcccatctatgagcatcctgtcatccttgccc

SEQ ID NO: 48656 - DNA, 36 bp, synthetic construct
  source 1..36: mol_type = other DNA
ctcgtggatgtgaacgagctgctggacttcgacacc

SEQ ID NO: 48657 - DNA, 63 bp, synthetic construct
  source 1..63: mol_type = other DNA
gccgtgcctacaattgctgacatttcctccggcgtcggcctgtctgattacttagtgaatgtg

SEQ ID NO: 48658 - DNA, 39 bp, synthetic construct
  source 1..39: mol_type = other DNA
tttttcaaatacgcggtaacccacgacgtgttccacatc

SEQ ID NO: 48659 - DNA, 33 bp, synthetic construct
  source 1..33: mol_type = other DNA
aaccagagcaccaattccgccaccttctttatg

SEQ ID NO: 48660 - DNA, 72 bp, synthetic construct
  source 1..72: mol_type = other DNA
tacacaataccagtcaagaactcttttgctaacgtccgcaatctgatcatcctgattggtggattgttcggg

SEQ ID NO: 48661 - DNA, 33 bp, synthetic construct
  source 1..33: mol_type = other DNA
tattacttccaatatgtcaagggctttggacct

SEQ ID NO: 48662 - DNA, 54 bp, synthetic construct
  source 1..54: mol_type = other DNA
attatgggggacttagtattttctctaggctacgcttctcttatcatcgttaga

SEQ ID NO: 48663 - DNA, 63 bp, synthetic construct
  source 1..63: mol_type = other DNA
gctgtccctactatggccgacataagctccggggtggtgctcaaggattacttcatcaacttt

SEQ ID NO: 48664 - DNA, 33 bp, synthetic construct
  source 1..33: mol_type = other DNA
gtgaaggacatcctggtgtcaagctacttcacc

SEQ ID NO: 48665 - DNA, 75 bp, synthetic construct
  source 1..75: mol_type = other DNA
gtcgtgcactttccggccttgaacttcttggtcggcttttacgtgccctctatgagcctgactgggtctttgccc

SEQ ID NO: 48666 - DNA, 33 bp, synthetic construct
  source 1..33: mol_type = other DNA
gttgcgggattgggcgctgatgctctggccgcc

SEQ ID NO: 48667 - DNA, 54 bp, synthetic construct
  source 1..54: mol_type = other DNA
cccatcctgaagttcatgggcgccgggaacacaatacaatacgctatggactac

SEQ ID NO: 48668 - DNA, 48 bp, synthetic construct
  source 1..48: mol_type = other DNA
agccccatcaaggaacctactgtagagttgctggccagaacctctcct

SEQ ID NO: 48669 - DNA, 54 bp, synthetic construct
  source 1..54: mol_type = other DNA
ctgattaccgaagctgctggcgctaccggaattggaccattgggtggtctcggc

SEQ ID NO: 48670 - DNA, 63 bp, synthetic construct
  source 1..63: mol_type = other DNA
ctcggcgcccctgccgtgacaatcggtggtcttggagcaacggcacctgggcttggggtgtca

SEQ ID NO: 48671 - DNA, 90 bp, synthetic construct
  source 1..90: mol_type = other DNA
gagaacgtcaaccccctggactctctcgacatggtttccaacgctttcacctcaaacggatatacggtgctggggaactccatcggcggc

SEQ ID NO: 48672 - DNA, 48 bp, synthetic construct
  source 1..48: mol_type = other DNA
agccccgtgaaggaaccgactgtagagctgctggccagaacaagtcct

SEQ ID NO: 48673 - DNA, 81 bp, synthetic construct
  source 1..81: mol_type = other DNA
aaggcgttcctgggcacctccccgattagctgcatccccgctacactcactgactgttaccccgaatggggtctgacgttg

SEQ ID NO: 48674 - DNA, 36 bp, synthetic construct
  source 1..36: mol_type = other DNA
gactacctcctgtttttcatgaacgccgattcctac

SEQ ID NO: 48675 - DNA, 57 bp, synthetic construct
  source 1..57: mol_type = other DNA
aatccgataccgagcgaactgatttacaacaagatcatctggctgaacggaggaatt

SEQ ID NO: 48676 - DNA, 60 bp, synthetic construct
  source 1..60: mol_type = other DNA
gccgtcccaactgccgcggacatttctagcggcgtggccctgaacgagtacttcatctcc

SEQ ID NO: 48677 - DNA, 42 bp, synthetic construct
  source 1..42: mol_type = other DNA
gagatttcaagcggctttcaattctcgtaccaactatttagt

SEQ ID NO: 48678 - DNA, 51 bp, synthetic construct
  source 1..51: mol_type = other DNA
atgaacatcttcaactttatcaagaatattaaatggaacctcatcgacgac

SEQ ID NO: 48679 - DNA, 48 bp, synthetic construct
  source 1..48: mol_type = other DNA
agccccgttaaggaacctaccgctgagctgttcgcaaggacagcacct

SEQ ID NO: 48680 - DNA, 57 bp, synthetic construct
  source 1..57: mol_type = other DNA
gccctgcccaatttcaacattctcaccgacacggacttaagctacgctatcgaatcc

SEQ ID NO: 48681 - DNA, 57 bp, synthetic construct
  source 1..57: mol_type = other DNA
gccgtccccacaattaccgacatcagctccggcgtggctctgaacgagtacttcctg

SEQ ID NO: 48682 - DNA, 63 bp, synthetic construct
  source 1..63: mol_type = other DNA
tacagcaatatcccatccatgttcgtgctcatatttcaagacgcattcaactttaggcctatt

SEQ ID NO: 48683 - DNA, 75 bp, synthetic construct
  source 1..75: mol_type = other DNA
tccactggcgtggcccgggacgccagcgtcgctggagctccctatgtacaaaatgcgatccagtctgttttcggt

SEQ ID NO: 48684 - DNA, 51 bp, synthetic construct
  source 1..51: mol_type = other DNA
ggcgtatcatcgatgaacctgttggacattaggtccattggctaccttctg

SEQ ID NO: 48685 - DNA, 33 bp, synthetic construct
  source 1..33: mol_type = other DNA
gtggttggactgggcccagaacctcttgtcgca

SEQ ID NO: 48686 - DNA, 48 bp, synthetic construct
  source 1..48: mol_type = other DNA
ctgatcctgcttggagagggcgtggccctcgattacgggattgactat

SEQ ID NO: 48687 - DNA, 93 bp, synthetic construct
  source 1..93: mol_type = other DNA
tgctcccctcttgactttcccgagttcgacctcgaggacatgctgctggacttcccacaaacaatacataatttgtatagtcacaacccaatc

SEQ ID NO: 48688 - DNA, 48 bp, synthetic construct
  source 1..48: mol_type = other DNA
agccccgtgaaggaaccgaccaccgagctaatcgccagaactggaccc

SEQ ID NO: 48689 - DNA, 54 bp, synthetic construct
  source 1..54: mol_type = other DNA
acctacctgttctatggctactgtctctggtgcgccagatacagctccccattt

SEQ ID NO: 48690 - DNA, 54 bp, synthetic construct
  source 1..54: mol_type = other DNA
atttacctcaaggggctgggcggatacgagctggccagcatcgattacttcgat

SEQ ID NO: 48691 - DNA, 39 bp, synthetic construct
  source 1..39: mol_type = other DNA
taccggggcttcctttcttccatcgtgaagaccaacgcc

SEQ ID NO: 48692 - DNA, 96 bp, synthetic construct
  source 1..96: mol_type = other DNA
tgcagcccactgaacttccccgagttcgacctggaggacatgctcgtggattttcccgagaccatccacacactgtactcccacaaccctgttgat

SEQ ID NO: 48693 - DNA, 39 bp, synthetic construct
  source 1..39: mol_type = other DNA
ttcagctccctacaccaaagcttttacaacaacaatcca

SEQ ID NO: 48694 - DNA, 60 bp, synthetic construct
  source 1..60: mol_type = other DNA
tcgtcccaaatctgggccgacaagctgggctggctcaacggactgatgggcatgtccgtc

SEQ ID NO: 48695 - DNA, 69 bp, synthetic construct
  source 1..69: mol_type = other DNA
atggacattattggccccattatcggtggcttcgagatgatcatggagatgctacaatcggggggcggg

SEQ ID NO: 48696 - DNA, 45 bp, synthetic construct
  source 1..45: mol_type = other DNA
aacctgggcattgacatcctgctgccacttcacacctacatcgag

SEQ ID NO: 48697 - DNA, 75 bp, synthetic construct
  source 1..75: mol_type = other DNA
gtcgacaacatccctgggctgagctccctgttcaccctggtcctctttcccaatgttgtcaattccttcgtcggt

SEQ ID NO: 48698 - DNA, 57 bp, synthetic construct
  source 1..57: mol_type = other DNA
gtgctgcctgacaaggagattctgaattacaccgggtttatcaacttcttgggctcc

SEQ ID NO: 48699 - DNA, 96 bp, synthetic construct
  source 1..96: mol_type = other DNA
agcacattccttaacttccccgagttcgagctggaatccctcgtgtttaattattaccaaacgctacacctgatccgggtccacgatcctgttagc

SEQ ID NO: 48700 - DNA, 45 bp, synthetic construct
  source 1..45: mol_type = other DNA
atgctcgattttacttctttaagttatcagggcattgtcgggtac

SEQ ID NO: 48701 - DNA, 54 bp, synthetic construct
  source 1..54: mol_type = other DNA
agcatggccatggagttcgaccccgctaccaacgtgcagtctactatcacatcc

SEQ ID NO: 48702 - DNA, 123 bp, synthetic construct
  source 1..123: mol_type = other DNA
tccgacatgcactactttgtcatcgacgccatatatgacagttacaaactcatccccatcggcggcgccaacctcaagggggatttcctgtctgtgatggctacctacatcaccgactacttc

SEQ ID NO: 48703 - DNA, 69 bp, synthetic construct
  source 1..69: mol_type = other DNA
cccaacatcgtggacttcctgtttgtcgagatgcagaaactgaccaagctcttcatggaacagatgagc

SEQ ID NO: 48704 - DNA, 72 bp, synthetic construct
  source 1..72: mol_type = other DNA
aagattgtgcccggcctggattccttcatcggaatcagctctctttctatgagcatcggtcaaattagtggt

SEQ ID NO: 48705 - DNA, 30 bp, synthetic construct
  source 1..30: mol_type = other DNA
ctcgacagcggcaacctgatcttcaccaat

SEQ ID NO: 48706 - DNA, 60 bp, synthetic construct
  source 1..60: mol_type = other DNA
tacatcctaggtagctccgagctgccctctgacgtgatggccttccaaaccactaatgct

SEQ ID NO: 48707 - DNA, 105 bp, synthetic construct
  source 1..105: mol_type = other DNA
gccaacatccctgatcccaacatctacttcgaggagtatcggcctctcggcctgagcttcgtggacgctatgatcggaggaatgcaccagtactaccacgatatg

SEQ ID NO: 48708 - DNA, 123 bp, synthetic construct
  source 1..123: mol_type = other DNA
tccctcgatatactccacccttacgccttcgcaatggccagcgggattggcagcgcttcaatgaacgccgccgcaatctccccattagtttacatgtttcccgcaatgaagaccgacctgatg

SEQ ID NO: 48709 - DNA, 111 bp, synthetic construct
  source 1..111: mol_type = other DNA
tacaccaaggttccctatccacattacgtcccgaaaggcgactctgtgctggctatgtggtccctcggagaatacgccgctcaaatggagtactaccaaaagatgagttct

SEQ ID NO: 48710 - DNA, 57 bp, synthetic construct
  source 1..57: mol_type = other DNA
tcttcccaaatatgggccgaccagctcggctggctgaactctctgatgggcatcaac

SEQ ID NO: 48711 - DNA, 81 bp, synthetic construct
  source 1..81: mol_type = other DNA
ttccactttcctgaattcgacctggaggaaatgatcataaacttgcacgagacgatttccctcttcttcgagcacgatcca

SEQ ID NO: 48712 - DNA, 60 bp, synthetic construct
  source 1..60: mol_type = other DNA
gccgtacccacggtcgctgtaatttcatccgacgctgccctggatgagtacttcatcaac

SEQ ID NO: 48713 - DNA, 72 bp, synthetic construct
  source 1..72: mol_type = other DNA
accctccctggcgccagcatcggtatcaacacactgattaaccccaactggaacctgcttggggacatcaac

SEQ ID NO: 48714 - DNA, 105 bp, synthetic construct
  source 1..105: mol_type = other DNA
ggctacatgtccgtcacaagcggaacccctatgatccagctggtgtctgagggcactgggctcatcttcgtcgttttcccgaaaatcttttccctaatgggagtt

SEQ ID NO: 48715 - DNA, 81 bp, synthetic construct
  source 1..81: mol_type = other DNA
gcctctcctgccatctatacaaacctgaatccggcgcaatttagttccgacttcacggggtcccttctgttcgcatcactg

SEQ ID NO: 48716 - DNA, 42 bp, synthetic construct
  source 1..42: mol_type = other DNA
atttacgggccggacgctgcaatcgtaaaagccttctctcgg

SEQ ID NO: 48717 - DNA, 66 bp, synthetic construct
  source 1..66: mol_type = other DNA
accacaggcctctctaattggatgggcagctgcctgtccaacatgatcggacctcaccctagtgaa

SEQ ID NO: 48718 - DNA, 33 bp, synthetic construct
  source 1..33: mol_type = other DNA
acaaccgccttgagcatgggcttctctcctatc

SEQ ID NO: 48719 - DNA, 33 bp, synthetic construct
  source 1..33: mol_type = other DNA
atgagcggtttcctgatcgacgcaacacttggc

SEQ ID NO: 48720 - DNA, 30 bp, synthetic construct
  source 1..30: mol_type = other DNA
aactgccccgtgctgttcggatgggagaat

SEQ ID NO: 48721 - DNA, 51 bp, synthetic construct
  source 1..51: mol_type = other DNA
ctcaagggcaacatagacattctcatcggcttcttcatgctgatcctcatt

SEQ ID NO: 48722 - DNA, 30 bp, synthetic construct; identical to SEQ ID NO: 46243
  source 1..30: mol_type = other DNA

SEQ ID NO: 48723 - DNA, 30 bp, synthetic construct
  source 1..30: mol_type = other DNA
ggcaagttattgtattccaatctggaaagt

SEQ ID NO: 48724 - DNA, 36 bp, synthetic construct
  source 1..36: mol_type = other DNA
atggacattatgaatttcataactagaccgcacaat

SEQ ID NO: 48725 - DNA, 63 bp, synthetic construct
  source 1..63: mol_type = other DNA
gcagtgcctacaatggccgagattagctccggggcggccttgtctgaatacttcctgagctac

SEQ ID NO: 48726 - DNA, 60 bp, synthetic construct
  source 1..60: mol_type = other DNA
atctcgagccaggtctgggctgaccagctcggctggctgaactctctgatgggagtcaat

SEQ ID NO: 48727 - DNA, 48 bp, synthetic construct
  source 1..48: mol_type = other DNA
ctggtctctgcggtcggtacaaagggactgagctccttcgctcttggg

SEQ ID NO: 48728 - DNA, 66 bp, synthetic construct
  source 1..66: mol_type = other DNA
cccatggactctcaagtctgggctgacaagctgggcgtcttgattttctcacttaacttctacttc

SEQ ID NO: 48729 - DNA, 54 bp, synthetic construct
  source 1..54: mol_type = other DNA
tacggctggaatattaaggtgacttgctatgagaacaacatatataattctagg

SEQ ID NO: 48730 - DNA, 30 bp, synthetic construct
  source 1..30: mol_type = other DNA
ttcctcgagcttccgccggctgtagaagtg

SEQ ID NO: 48731 - DNA, 90 bp, synthetic construct
  source 1..90: mol_type = other DNA
ggacccacttatgggctcttcgaggacttctactttgtcgtggtgaccctgagcacggttggctacggcgatgtggtccctgaaaccttc

SEQ ID NO: 48732 - DNA, 93 bp, synthetic construct
  source 1..93: mol_type = other DNA
agctctcctttcaattttccccggttcgagctcgaggacatgctgctggatctgccaaacacgatgaatatgcttattagccacaatcacgtg

SEQ ID NO: 48733 - DNA, 63 bp, synthetic construct
  source 1..63: mol_type = other DNA
gcagtgccaactgtggctgagatatcaagcggcgtcgccctgaacgagtacttcatcaactat

SEQ ID NO: 48734 - DNA, 90 bp, synthetic construct
  source 1..90: mol_type = other DNA
aacctgaactttccggatagctttaacatcaaggagttctttctcaattactccaaaaccatgtatctgtttcggcaccatgatccagtg

SEQ ID NO: 48735 - DNA, 33 bp, synthetic construct
  source 1..33: mol_type = other DNA
gtgctgctgcccgtcgtcatccccggggttaat

SEQ ID NO: 48736 - DNA, 96 bp, synthetic construct
  source 1..96: mol_type = other DNA
tttgggactagctatagtcctttcgactacttctatttcgtgattatcaccatcgccactgttggatatggcgacatcgtccccctgaccttcgag

SEQ ID NO: 48737 - DNA, 57 bp, synthetic construct
  source 1..57: mol_type = other DNA
tcgtcacaaatctgggccgaccagctgggctggttaaactctctaatgggagttagc

SEQ ID NO: 48738 - DNA, 96 bp, synthetic construct
  source 1..96: mol_type = other DNA
agcaatccactcaacttccctgagtttgaccttgaggacctgcttctccaattaccggagaccatcaagctgttcttttcgcactcgcccgctgat

SEQ ID NO: 48739 - DNA, 72 bp, synthetic construct
  source 1..72: mol_type = other DNA
accctgcctggcgccatgatctctctcaaggagctgttcgcacctgactggagcctgctcctggatttcgac

SEQ ID NO: 48740 - DNA, 111 bp, synthetic construct
  source 1..111: mol_type = other DNA
ctcggatatatgtccctggagtcaggcacagccgttgcctaccttgtgacccaaggcacagggctcgtcttcattgcgtacccaacggtactaaacgtgctgggccaatat

SEQ ID NO: 48741 - DNA, 60 bp, synthetic construct
  source 1..60: mol_type = other DNA
agctacttccccatcctgaataacctgattctcaccgatgactacacatcctctgtgttc

SEQ ID NO: 48742 - DNA, 30 bp, synthetic construct
  source 1..30: mol_type = other DNA
attcccaacatcgacgctttcttttcgaat

SEQ ID NO: 48743 - DNA, 66 bp, synthetic construct
  source 1..66: mol_type = other DNA
caccctattagcgagggcttcaattttatcaacggcaacccgcaaatgacagagcgcacagctgaa

SEQ ID NO: 48744 - DNA, 39 bp, synthetic construct
  source 1..39: mol_type = other DNA
atgattaataccgacctgatcctgaacgaagccacagaa

SEQ ID NO: 48745 - DNA, 78 bp, synthetic construct
  source 1..78: mol_type = other DNA
ggcggtatcattacttctgaccccgccatacaagccggtgctatcaaggttgcgacgggaaaagtcgggatgtccttt

SEQ ID NO: 48746 - DNA, 33 bp, synthetic construct
  source 1..33: mol_type = other DNA
ttccttggcgccgagggcgttaactggtcaact

SEQ ID NO: 48747 - DNA, 39 bp, synthetic construct
  source 1..39: mol_type = other DNA
atggacttgacccaattttacgagatatattctagctcg

SEQ ID NO: 48748 - DNA, 60 bp, synthetic construct
  source 1..60: mol_type = other DNA
caatgggtcaatgccggggactttcacgtccccttcatgagcctgaatggaggcatcatt

SEQ ID NO: 48749 - DNA, 36 bp, synthetic construct
  source 1..36: mol_type = other DNA
cacctggactgcggcgagatcctgttcaccaactgg

SEQ ID NO: 48750 - DNA, 60 bp, synthetic construct
  source 1..60: mol_type = other DNA
gccgtccctacattttccgaaatcagctctggcgtggctctgaacgagtacttcattagt

SEQ ID NO: 48751 - DNA, 66 bp, synthetic construct
  source 1..66: mol_type = other DNA
ctgcaggtcgtggacagcaactccatattcgggagtttcatgtctctgaatatcgagctctttggc

SEQ ID NO: 48752 - DNA, 33 bp, synthetic construct
  source 1..33: mol_type = other DNA
catttggactcaagtcagatacttttcaacaac

SEQ ID NO: 48753 - DNA, 66 bp, synthetic construct
  source 1..66: mol_type = other DNA
ctgaaccctacatacaccattcccgagttcaccacacaaggtctatacctaaccgacaagagcatt

SEQ ID NO: 48754 - DNA, 36 bp, synthetic construct
  source 1..36: mol_type = other DNA
ttttttcactctcaacctcctacctgctccaacctg

SEQ ID NO: 48755 - DNA, 90 bp, synthetic construct
  source 1..90: mol_type = other DNA
agcagttcttaccctacctttctggatgccctcttcgggctctttacggatcctggcaaactgttcggctccctgttcgctaaaccaagc

SEQ ID NO: 48756 - DNA, 66 bp, synthetic construct
  source 1..66: mol_type = other DNA
ctgcacgtggtggactccaactctatctttgggtccttcatgagcctgaacgtcggactctttggg

SEQ ID NO: 48757 - DNA, 33 bp, synthetic construct
  source 1..33: mol_type = other DNA
cacctggactcttcccaaatattattcaacaac

SEQ ID NO: 48758 - DNA, 42 bp, synthetic construct
  source 1..42: mol_type = other DNA
atcgagctgaacatcagctctggcgtgaccgtgtccatcatg

SEQ ID NO: 48759 - DNA, 30 bp, synthetic construct; identical to SEQ ID NO: 46748
  source 1..30: mol_type = other DNA

SEQ ID NO: 48760 - DNA, 123 bp, synthetic construct
  source 1..123: mol_type = other DNA
gaactgctgccactgcacccatacgcatttgcaatggcatctggtgtcggttctgctagcatgaacgccgctagtctggggcctacactggccgcgtttcctgccctcaagacccagatcgag

SEQ ID NO: 48761 - DNA, 45 bp, synthetic construct
  source 1..45: mol_type = other DNA
cagttcatcgccgacaacaccctgatggagtcctactctgctacc

SEQ ID NO: 48762 - DNA, 90 bp, synthetic construct
  source 1..90: mol_type = other DNA
caccctattccaagcgagctgatctacgacaaaattatcttcctcaacggcggcctgtggtggacctggatgaagaacatctttcctatc

SEQ ID NO: 48763 - DNA, 84 bp, synthetic construct
  source 1..84: mol_type = other DNA
tacactgagacattcttccctagccccattgagaccttcaagggcttcaaggagatcctgctgaacggcaaactcggggaagac

SEQ ID NO: 48764 - DNA, 60 bp, synthetic construct
  source 1..60: mol_type = other DNA
gccgccaatagtggcctgggctacctcatctacacctcccggctgtactataggacagac

SEQ ID NO: 48765 - DNA, 51 bp, synthetic construct
  source 1..51: mol_type = other DNA
ggctccgagagcattaaaatgctgtacaattttcaatttcacggatttatc

SEQ ID NO: 48766 - DNA, 90 bp, synthetic construct
  source 1..90: mol_type = other DNA
ctcacagtgctgccttcttacatgttccccgggccagtggaggtagtaaactctttcatcaagctgtggtccaccggcgagctgttcacc

SEQ ID NO: 48767 - DNA, 60 bp, synthetic construct
  source 1..60: mol_type = other DNA
atcggatctagtagcggcattggttatatgattctgacttccaccaacatcttcgatact

SEQ ID NO: 48768 - DNA, 33 bp, synthetic construct
  source 1..33: mol_type = other DNA
atgctggagagcaatattaacaccctcatcaca

SEQ ID NO: 48769 - DNA, 63 bp, synthetic construct
  source 1..63: mol_type = other DNA
cttaacctggtgcccgctctcaattttctgttcggctccaacactgcaagcaacagcatcatg

SEQ ID NO: 48770 - DNA, 30 bp, synthetic construct
  source 1..30: mol_type = other DNA
gccgacgtgaacagcctcctgttcaccaat

SEQ ID NO: 48771 - DNA, 39 bp, synthetic construct
  source 1..39: mol_type = other DNA
gacctcatcctgcccatggtcttctcctctttgagatac

SEQ ID NO: 48772 - DNA, 93 bp, synthetic construct
  source 1..93: mol_type = other DNA
gaccccaatatggatctctttgagagcctgtggttcgtgattgtcaccctcaccactgttggttatggggacatcaccccacaaacctttaac

SEQ ID NO: 48773 - DNA, 93 bp, synthetic construct
  source 1..93: mol_type = other DNA
gatagcgggatcaacgacatgcagactgccgtttggtacatcatcgtttctatgacctccaccggatacggcgatgtggttcctgctactctg

SEQ ID NO: 48774 - DNA, 87 bp, synthetic construct
  source 1..87: mol_type = other DNA
ttccagctgatcccctctttcatgttccctggcccaaccgacgtggccaacagcttcgtcaagctcgtggtctccggtcaactcttc

SEQ ID NO: 48775 - DNA, 57 bp, synthetic construct
  source 1..57: mol_type = other DNA
ggctcctctagcggcattggctatatgattctaacctctacgaacctgttcgacaca

SEQ ID NO: 48776 - DNA, 57 bp, synthetic construct
  source 1..57: mol_type = other DNA
gctctgcccgaggtcatgctggtgaccgacggccagttcctcgccttcctggaaagc

SEQ ID NO: 48777 - DNA, 84 bp, synthetic construct
  source 1..84: mol_type = other DNA
ctgcacctgatcccaccttacattctgccaagccccctgaacgtcgtgtccgccatctggaagctcattatcgatggcaaactg

SEQ ID NO: 48778 - DNA, 57 bp, synthetic construct
  source 1..57: mol_type = other DNA
gcctctagcaacggcctgggctacatgattctgaccgctagtcagctgtttcaaccc

SEQ ID NO: 48779 - DNA, 84 bp, synthetic construct
  source 1..84: mol_type = other DNA
ttccagctcatccctgtgtacatgttccctgggccaacagacgtggccaccagctttgtgaagctgattgtctccggcaaactg

SEQ ID NO: 48780 - DNA, 57 bp, synthetic construct
  source 1..57: mol_type = other DNA
ggcagcagtagcggcatcggctacatgatcctgacctccactaacctgttcgacacc

SEQ ID NO: 48781 - DNA, 84 bp, synthetic construct
  source 1..84: mol_type = other DNA
ttccacttaataccgagttatatgttccctgggccaaccgacgttgtgaacagctttgtcaagctggtggtctctggcaaactg

SEQ ID NO: 48782 - DNA, 63 bp, synthetic construct
  source 1..63: mol_type = other DNA
gggagctccagcggaatcggctacatgattctcacctccacctctctgttcggatttacggac

SEQ ID NO: 48783 - DNA, 90 bp, synthetic construct
  source 1..90: mol_type = other DNA
ctgaatctcatcccctattacatcctcccaagccctattgacgtgttcaacgccgcctacgctctgattatcaacggcaagctgttggac

SEQ ID NO: 48784 - DNA, 63 bp, synthetic construct
  source 1..63: mol_type = other DNA
attgcctcatccaaggggttgggatacatgattctaaccgcttccaacctcttcgaccctggg

SEQ ID NO: 48785 - DNA, 36 bp, synthetic construct
  source 1..36: mol_type = other DNA
cccactggcacaaccgggccactgcatgtgttccct

SEQ ID NO: 48786 - DNA, 66 bp, synthetic construct
  source 1..66: mol_type = other DNA
agcctcctgggcctggcctccaaggctcccgtggacgcagaggcccagaccacaactatcatctcc

SEQ ID NO: 48787 - DNA, 90 bp, synthetic construct
  source 1..90: mol_type = other DNA
ctgcacctcattccatactacatcctgccttcccctctgaatgtctttactgcggcttggacgcttatctccaatggcaagctgttcatg

SEQ ID NO: 48788 - DNA, 60 bp, synthetic construct
  source 1..60: mol_type = other DNA
attgcctcctctcggggcctgggttatatgatcctgaccgctagccagctcttccaaccc

SEQ ID NO: 48789 - DNA, 120 bp, synthetic construct
  source 1..120: mol_type = other DNA
gtcggcgaggaccagctggccgcccaactaagtaccatcattagcgttacaagacaggcgccagagaccgtcggtactgccttgcgcaccgtatatgctaggatcaccgatatccaagcc

SEQ ID NO: 48790 - DNA, 96 bp, synthetic construct
  source 1..96: mol_type = other DNA
cggaacatgggcgaagttatggaagagatcggtaacaagtggagcacaatgactaaggaacagaaaacctatctagcgcaaacgggcacagcaatg

SEQ ID NO: 48791 - DNA, 153 bp, synthetic construct
  source 1..153: mol_type = other DNA
gaacaacaagacatctacatggaccggctgtcaacccatgttcaacaacttaccactgccaccgaacacatgtggatggggctgaccgataccgatggattcaaggatgtcatcgacggcctgaccacaatcgtggagaaggtggataaattg

SEQ ID NO: 48792 - DNA, 90 bp, synthetic construct
  source 1..90: mol_type = other DNA
ctgcacatgatcccatactacattctgcctagccccgtgaacgtcttcaccgccgcctggacactgctcaccaacggcaagctcgctatg

SEQ ID NO: 48793 - DNA, 60 bp, synthetic construct
  source 1..60: mol_type = other DNA
attgcctcctctcggggcctgggttacatgatactgaccgctagccagctcttccaaccc

SEQ ID NO: 48794 - DNA, 33 bp, synthetic construct
  source 1..33: mol_type = other DNA
gtgagtggattcttgctgggtgtcaatacggca

SEQ ID NO: 48795 - DNA, 78 bp, synthetic construct
  source 1..78: mol_type = other DNA
ggcatcgccaaagtgttctacggcaatctggatctcttctcgaacatggcaccttgggtcgcaaaggacattttcgcc

SEQ ID NO: 48796 - DNA, 42 bp, synthetic construct
  source 1..42: mol_type = other DNA
attgagatcacacccaccaagggggtaacagtatcagttatg

SEQ ID NO: 48797 - DNA, 30 bp, synthetic construct
  source 1..30: mol_type = other DNA
ggccagagcatccacctgctcctggagatg

SEQ ID NO: 48798 - DNA, 123 bp, synthetic construct
  source 1..123: mol_type = other DNA
agcatcctgccactgcacccgttcgcgtttgcaatggccagcggggttggatctgcctcaatgaacgctgcatcactgggccctacactggctgcatttcccggtctggaaacccagatcgaa

SEQ ID NO: 48799 - DNA, 87 bp, synthetic construct
  source 1..87: mol_type = other DNA
ttccagctaataccatctttcatgttcccgggacccaccgacgtggccaactcatttgttcgcttggctgtgtccgggaagctgttc

SEQ ID NO: 48800 - DNA, 57 bp, synthetic construct
  source 1..57: mol_type = other DNA
ggatcttcctccgggatcggctacatgattctgacaagcaccagcctcttcgatacc

SEQ ID NO: 48801 - DNA, 93 bp, synthetic construct
  source 1..93: mol_type = other DNA
gatccgtctatgaacagcctgttcgactccctgtggttcgtagtttctagcctcacaaccgtcggctacggcgacgtgctgcctgattcaatg

SEQ ID NO: 48802 - DNA, 90 bp, synthetic construct
  source 1..90: mol_type = other DNA
ctgggcctgatcccctactacattctgccctcacccgtaaacgtgttcaatgctgcctttcaattgattgccaacgggaagctcatcgag

SEQ ID NO: 48803 - DNA, 57 bp, synthetic construct
  source 1..57: mol_type = other DNA
gccagctctaagggcctcggctacatgatcctgaccgcatcgcaacttttcgacccc

SEQ ID NO: 48804 - DNA, 87 bp, synthetic construct
  source 1..87: mol_type = other DNA
tttcagttggtcccgggctacatgttccctgggccctctgacgtggccacctccttcgtgaagctgattgtatccggaaggctgttt

SEQ ID NO: 48805 - DNA, 57 bp, synthetic construct
  source 1..57: mol_type = other DNA
ggctcctcgagtggcataggctacatgattctcacaagcaccaacctgttcgatacc

SEQ ID NO: 48806 - DNA, 84 bp, synthetic construct
  source 1..84: mol_type = other DNA
ctgattctggtgccaagctacatgttccccggccctgtcgaggtggtcaacgcctttatcaagctcctggtgtccgggaaactg

SEQ ID NO: 48807 - DNA, 57 bp, synthetic construct
  source 1..57: mol_type = other DNA
ggctctagttccgggatcggatacatgattctgactagcaccaacctgttcgacact

SEQ ID NO: 48808 - DNA, 36 bp, synthetic construct
  source 1..36: mol_type = other DNA
gctaccgtggcatccaccgatgccgttgccgtatat

SEQ ID NO: 48809 - DNA, 63 bp, synthetic construct
  source 1..63: mol_type = other DNA
cagatcgccggagtattcacttacgctggaacctccgctagactcactccttcactggtggca

SEQ ID NO: 48810 - DNA, 90 bp, synthetic construct
  source 1..90: mol_type = other DNA
ctgcacctgatcccctactacgtgctcccgagccctgtagatgtcctgtccgccgcttataagatcattatcaacggtagcctcctgaaa

SEQ ID NO: 48811 - DNA, 60 bp, synthetic construct
  source 1..60: mol_type = other DNA
attgcctctacctccggcctcggttatatgattcttacggccagtcagctgttcgacccc

SEQ ID NO: 48812 - DNA, 90 bp, synthetic construct
  source 1..90: mol_type = other DNA
tggggaatcgtgaatccttacattctgcctggaccaatcaccgtctgtcaatcggcctgggagctgattctgaacggcaagcttctcacc

SEQ ID NO: 48813 - DNA, 60 bp, synthetic construct
  source 1..60: mol_type = other DNA
gggagttctagcggcctcggctacatgatacttaccgccacatccctgttcgatcctgga

SEQ ID NO: 48814 - DNA, 48 bp, synthetic construct
  source 1..48: mol_type = other DNA
atcctggacttcgtaccaagtgttaatctctttaactccttcttgacc

SEQ ID NO: 48815 - DNA, 33 bp, synthetic construct
  source 1..33: mol_type = other DNA
atggaccccaataagatcctcttcaccaacact

SEQ ID NO: 48816 - DNA, 30 bp, synthetic construct
  source 1..30: mol_type = other DNA
gacatgtttgtcaaggggagcttcctgaac

SEQ ID NO: 48817 - DNA, 60 bp, synthetic construct
  source 1..60: mol_type = other DNA
gccctgcccggcattgagcttctcaacgagatggactttatcaccttcctccaatctaat

SEQ ID NO: 48818 - DNA, 48 bp, synthetic construct
  source 1..48: mol_type = other DNA
ctagtaatcacgcctgagttcaattttggcttcaacgccatttctacc

SEQ ID NO: 48819 - DNA, 33 bp, synthetic construct
  source 1..33: mol_type = other DNA
ctcgacggcaatcatatatttttcaccaactca

SEQ ID NO: 48820 - DNA, 84 bp, synthetic construct
  source 1..84: mol_type = other DNA
ctcggtcttttctcggcttacattctgcctggacccctggacgtgctcaactccgcctgggtcgtgatcgagaatggcaagctg

SEQ ID NO: 48821 - DNA, 60 bp, synthetic construct
  source 1..60: mol_type = other DNA
ggctcctctagcggcctcggatacatgatcctgaccgccacaaacctgttcgacactggc

SEQ ID NO: 48822 - DNA, 90 bp, synthetic construct
  source 1..90: mol_type = other DNA
ctgggtcttttttctagttacattctgcctggccccctggacgtgcttaattccgcccgggtcgtgatcgagaacggcaagcttttgacc

SEQ ID NO: 48823 - DNA, 60 bp, synthetic construct
  source 1..60: mol_type = other DNA
gggtcaagctcgggactcggctacatgatcctgaccgccaccaacctgtttgacacgggg

SEQ ID NO: 48824 - DNA, 84 bp, synthetic construct
  source 1..84: mol_type = other DNA
ttcggcattgtcaacccctacattcttcccgggcctatcgaagtttgcaaatccgcctgggagctgatcgtgtctgggaaactg

SEQ ID NO: 48825 - DNA, 63 bp, synthetic construct
  source 1..63: mol_type = other DNA
ggcagttcttccggcctcggttatatgatattaaccgctactagcctgccgttccctggcgat

SEQ ID NO: 48826 - DNA, 48 bp, synthetic construct
  source 1..48: mol_type = other DNA
ctgggcattgttccctcgtttaacctctttaattcctttctcacggga

SEQ ID NO: 48827 - DNA, 33 bp, synthetic construct
  source 1..33: mol_type = other DNA
tttgacagcgacaaggtactgttcacggatggc

SEQ ID NO: 48828 - DNA, 63 bp, synthetic construct
  source 1..63: mol_type = other DNA
ttcctgggcattcctatggccaagaactccgccgaggcagctctgcactccatcttcccattt

SEQ ID NO: 48829 - DNA, 90 bp, synthetic construct
  source 1..90: mol_type = other DNA
ctggggctattctcctcgtacattctgcccggacctctggacgtggtcaactctgcctgggtggtcatagaaaacggcaaactcttgaca

SEQ ID NO: 48830 - DNA, 66 bp, synthetic construct
  source 1..66: mol_type = other DNA
atcggtagtagttctgggctgggctacatgatcctgaccgcaacgaaccttggtacaacagacttc

SEQ ID NO: 48831 - DNA, 51 bp, synthetic construct
  source 1..51: mol_type = other DNA
gggatctatattatctcctctgacatgataatgaactacacactcttctct

SEQ ID NO: 48832 - DNA, 69 bp, synthetic construct
  source 1..69: mol_type = other DNA
tacgtggccgtctttgctcccgagatcaacatggccgaggcaggcaccttatttttttcccacatgtgg

SEQ ID NO: 48833 - DNA, 30 bp, synthetic construct
  source 1..30: mol_type = other DNA
atgggcgtgcagaatatcaacatccagtac

SEQ ID NO: 48834 - DNA, 87 bp, synthetic construct
  source 1..87: mol_type = other DNA
ttccacattgtgaacccttacatattgccggggcctatcgaggtctgcaatagcgcctgggacctgatcctttctggcaagcttaaa

SEQ ID NO: 48835 - DNA, 60 bp, synthetic construct
  source 1..60: mol_type = other DNA
attggcagtagctctggactcggatacatgatacttcaagccactagccgttttgacccc

SEQ ID NO: 48836 - DNA, 132 bp, synthetic construct
  source 1..132: mol_type = other DNA
accggcctgtttacgtcttttacaaaaattgtgtacatatccatcgatgccatgagcaagaacgccaataatctgactacgataatggccgctgttcccaagactaccatgaacacatttacaaatgcactg

SEQ ID NO: 48837 - DNA, 90 bp, synthetic construct
  source 1..90: mol_type = other DNA
ctggggattgtggacctgtacaagctccctggccccatcaccgtttgtcaagctgcctggatcctcatcctgaacggaaagctgcttacg

SEQ ID NO: 48838 - DNA, 60 bp, synthetic construct
  source 1..60: mol_type = other DNA
gggtccggttctggcctcggctacatgatcctgaccgccacaagcctgttcgatcctggc

SEQ ID NO: 48839 - DNA, 84 bp, synthetic construct
  source 1..84: mol_type = other DNA
ctcggactggttaatccgtacattctaccgggcccaatcaccgtctgtcaatccgcttggtccctgatcttgtctgggaagctg

SEQ ID NO: 48840 - DNA, 63 bp, synthetic construct
  source 1..63: mol_type = other DNA
ggcagcagttctggactgggctacatgatcctgaccgccacatccctctttgaccccggtcct

SEQ ID NO: 48841 - DNA, 30 bp, synthetic construct
  source 1..30: mol_type = other DNA
aatcacaagcataacgcccacatctgtctg

SEQ ID NO: 48842 - DNA, 84 bp, synthetic construct
  source 1..84: mol_type = other DNA
ctgggaatcatctctgcctacatcctgcctggccccgcggacgtcatttacgctgctagtagcgtaattgtgaacggcaaactg

SEQ ID NO: 48843 - DNA, 60 bp, synthetic construct
  source 1..60: mol_type = other DNA
ggaagctctaccggcctgggctatatgattctgaccgcctccaacctcttcgataccggc

SEQ ID NO: 48844 - DNA, 45 bp, synthetic construct
  source 1..45: mol_type = other DNA
agcgccaatttcaacctgaactctattctgccattctccatcacc

SEQ ID NO: 48845 - DNA, 36 bp, synthetic construct
  source 1..36: mol_type = other DNA
tttatcgacaagcaggagatcatcttcaacaacgtg

SEQ ID NO: 48846 - DNA, 84 bp, synthetic construct
  source 1..84: mol_type = other DNA
ctcggactcgtgaacccctacatcctgcctgggcccattaccgtctgccaatctgcctgggagctgatcctcaacggcaaactg

SEQ ID NO: 48847 - DNA, 63 bp, synthetic construct
  source 1..63: mol_type = other DNA
ggctctagctccggcctgggatacatgatactgaccgccacaagtctcttcgggccacccgac

SEQ ID NO: 48848 - DNA, 45 bp, synthetic construct
  source 1..45: mol_type = other DNA
atcctgaagggagttaatagcttcaacgcctttaacaccttcctg

SEQ ID NO: 48849 - DNA, 33 bp, synthetic construct
  source 1..33: mol_type = other DNA
ctggacagcggcgagatcctcttcaccaataac

SEQ ID NO: 48850 - DNA, 90 bp, synthetic construct
  source 1..90: mol_type = other DNA
ctcgggctcgtcaacccttacattctgcccggaccgataacagtcgtcgaatctgcctggaccctgatcctgaacggcaaactcctgacc

SEQ ID NO: 48851 - DNA, 60 bp, synthetic construct
  source 1..60: mol_type = other DNA
ggctcgagtagcgggctgggttacatgatactcactgctacatctctcttcgatcctggc

SEQ ID NO: 48852 - DNA, 87 bp, synthetic construct
  source 1..87: mol_type = other DNA
ctgggcctctttagctcttacatcctgcctggacccctggacgtgatcaactccgcctgggtcgtgattcagaaaggaaaattgaat

SEQ ID NO: 48853 - DNA, 66 bp, synthetic construct
  source 1..66: mol_type = other DNA
atcgggtcctcatctgggctgggatatatgattttgaccgcgactaacctcttcactacgggcgat

SEQ ID NO: 48854 - DNA, 39 bp, synthetic construct
  source 1..39: mol_type = other DNA
ggcagcatcaccaccctcctgaagtcccagacactgctg

SEQ ID NO: 48855 - DNA, 33 bp, synthetic construct
  source 1..33: mol_type = other DNA
accacagtcctgggcaatgccggggttaattat

SEQ ID NO: 48856 - DNA, 30 bp, synthetic construct
  source 1..30: mol_type = other DNA
ggcctgctgcctatcccccttttcctcctg

SEQ ID NO: 48857 - DNA, 60 bp, synthetic construct
  source 1..60: mol_type = other DNA
ctgggcatccacatggccacgaacacagctgacgctgcactgcatagcttctttccattt

SEQ ID NO: 48858 - DNA, 45 bp, synthetic construct
  source 1..45: mol_type = other DNA
ctggacatagttccatccttcaatctgttcaactccttcctcacg

SEQ ID NO: 48859 - DNA, 33 bp, synthetic construct
  source 1..33: mol_type = other DNA
atggaccccaataagatcctgttcaccaactcc

SEQ ID NO: 48860 - DNA, 81 bp, synthetic construct
  source 1..81: mol_type = other DNA
aaggcattcctcggtacctcaccaatatcctgtatccctgccacactcactgactgctttcccgaatggggcctgacactg

SEQ ID NO: 48861 - DNA, 57 bp, synthetic construct
  source 1..57: mol_type = other DNA
aattctattctcgacatcgtgccgtcggggaacgcctttaactccttcctgactggg

SEQ ID NO: 48862 - DNA, 33 bp, synthetic construct
  source 1..33: mol_type = other DNA
ctggaccccaacaagatcctcttcaccaacaat

SEQ ID NO: 48863 - DNA, 33 bp, synthetic construct
  source 1..33: mol_type = other DNA
accagccagtacattaggagtggtggcacaatc

SEQ ID NO: 48864 - DNA, 45 bp, synthetic construct
  source 1..45: mol_type = other DNA
atccgttttgcctctgcggagtttctgattaccggtaccgggatg

SEQ ID NO: 48865 - DNA, 72 bp, synthetic construct
  source 1..72: mol_type = other DNA
atcagcccggccatcaattggatttcccaacaactgttcaacctgatctccctgattgcaattggacacatc

SEQ ID NO: 48866 - DNA, 57 bp, synthetic construct
  source 1..57: mol_type = other DNA
ttcgccgaaaaccacgtccataacgtgattccctttatcaatcaggaggtgacaccc

SEQ ID NO: 48867 - DNA, 204 bp, synthetic construct
  source 1..204: mol_type = other DNA
atgagccctatagatccagtgaaagcatacttggggcagcgaatcgtttcacaagaacaactggccatcatgggggagtattggggaacaaatctgagtctcggagagcgggtcatgggatggctccaaacgctcgctagcgggagcatggggttcagtcttatataccgggtcccagtcactgaagtcattatccaaaagatc

SEQ ID NO: 48868 - DNA, 87 bp, synthetic construct
  source 1..87: mol_type = other DNA
gtgtacctgggctggttccccatcgggctgagcgtccctattggacagctctccgacaccgtgacattctggcaatggctataccgc

SEQ ID NO: 48869 - DNA, 42 bp, synthetic construct
  source 1..42: mol_type = other DNA
ctgcttaccatcgttggcttaaatcccattcaaaataacctg

SEQ ID NO: 48870 - DNA, 57 bp, synthetic construct
  source 1..57: mol_type = other DNA
aatcccatccctagcgagctgatctacgacaagattaacttcctgaacggaggtctg

SEQ ID NO: 48871 - DNA, 48 bp, synthetic construct
  source 1..48: mol_type = other DNA
aatttcatcctcaagacaaccgctctgaacttcgcgtctaattcactg

SEQ ID NO: 48872 - DNA, 30 bp, synthetic construct
  source 1..30: mol_type = other DNA
gacagcaacaatatcctgttcaccaacgat

SEQ ID NO: 48873 - DNA, 51 bp, synthetic construct
  source 1..51: mol_type = other DNA
gaccatgtcctgaacttcatcccctcctttggactgagccatagtattacc

SEQ ID NO: 48874 - DNA, 33 bp, synthetic construct
  source 1..33: mol_type = other DNA
atcgacagcggcaaggtgctgttcactaacggc

SEQ ID NO: 48875 - DNA, 108 bp, synthetic construct
  source 1..108: mol_type = other DNA
atcaccgcctgtgtttatcgcccatgggtcctcgactcccgggtgcagcctctgaaggacgctttccacggagcctctgggtacagtttcccaagcggacacacaact

SEQ ID NO: 48876 - DNA, 63 bp, synthetic construct
  source 1..63: mol_type = other DNA
accaagagctatcctatggactacgatgctgccggcaaactcctggttgaccctgccaagttg

SEQ ID NO: 48877 - DNA, 51 bp, synthetic construct
  source 1..51: mol_type = other DNA
ctggatgatgtcatcaaggtctccgacaatgtaatgtacgcggaacatgag

SEQ ID NO: 48878 - DNA, 45 bp, synthetic construct
  source 1..45: mol_type = other DNA
gggctcacccattccatacatcaagcaacgggcattaacgtgtcc

SEQ ID NO: 48879 - DNA, 114 bp, synthetic construct
  source 1..114: mol_type = other DNA
atgaagatcatcgcttgcatttatcggccctggatcctggaccctcgggtccatcctgtgaaagaggcaattccaaccgccactggctactcttttccaagcggacatactacc

SEQ ID NO: 48880 - DNA, 66 bp, synthetic construct
  source 1..66: mol_type = other DNA
accaagtcctatcccctggactataactcagccggcaaactcatcgtcgatcctgctatcatgacc

SEQ ID NO: 48881 - DNA, 30 bp, synthetic construct; identical to SEQ ID NO: 42490
  source 1..30: mol_type = other DNA

SEQ ID NO: 48882 - DNA, 39 bp, synthetic construct
  source 1..39: mol_type = other DNA
ctgacatacatgggcgccacctcctcatttgactcgaac

SEQ ID NO: 48883 - DNA, 42 bp, synthetic construct
  source 1..42: mol_type = other DNA
tacttccattttagattcaggctcggatcccaacgttgccgg

SEQ ID NO: 48884 - DNA, 255 bp, synthetic construct
  source 1..255: mol_type = other DNA
atggccatctgtaacaattgcacattcaccaacaattatgccaagaacggcggcgctatcttttcgcaaggggagctctacctgaacaattgtatctttaacgagaacaccggctacggcaccggaaacgacatcctgaacgtcgacaacggaaaggtcttcatgaatggcgaacaagttaatggcacacagggaactgtgaaatatgtgaaatctatttccgatttatcatcgagcctgattacaaccgttgcc

SEQ ID NO: 48885 - DNA, 96 bp, synthetic construct
  source 1..96: mol_type = other DNA
tacgccgcttatgccatcacttcggaccagtataacctcgccttcaaccggctgaataccgcaatcagcattatctccggaacggtcgcatttggg

SEQ ID NO: 48886 - DNA, 129 bp, synthetic construct
  source 1..129: mol_type = other DNA
acaaacattaagaatatcgtgaaccagggcacctacaatggcgtcatcgaatttgagggcggcactatcattgaattcgactctaaagactacaagttctccgggaagtggaagttcaccactaaccag

SEQ ID NO: 48887 - DNA, 87 bp, synthetic construct
  source 1..87: mol_type = other DNA
ctgaacctcgtgccatactatatcctgcctagccccctggatgtctgtaatgctgcccttaagctcgtcgccaatggcaagctgctg

SEQ ID NO: 48888 - DNA, 57 bp, synthetic construct
  source 1..57: mol_type = other DNA
gcctcctctaagggcctgggatacatgatactgaccgctagccagctcttcgacccc

SEQ ID NO: 48889 - DNA, 48 bp, synthetic construct
  source 1..48: mol_type = other DNA
ggactcatcgagaccgggttcggcctttattcgtttaactgctacctg

SEQ ID NO: 48890 - DNA, 57 bp, synthetic construct
  source 1..57: mol_type = other DNA
atcgtcgacaaatacgtgctcgccaaaaagtttgctttcctggccaacatggatccc

SEQ ID NO: 48891 - DNA, 45 bp, synthetic construct
  source 1..45: mol_type = other DNA
atcactcaagctcctgccaccgacaacccagccgcgaagttcggc

SEQ ID NO: 48892 - DNA, 84 bp, synthetic construct
  source 1..84: mol_type = other DNA
aacgatctgaacattgtttcgtccgctgtgaacgccttcctggcaatcggcaacgaggtcatctcctgcatggcagatccttgg

SEQ ID NO: 48893 - DNA, 93 bp, synthetic construct
  source 1..93: mol_type = other DNA
gctagcggattcaagtccattggcatggatgtgtctggcttcgggatctttctccaaacgatggccaacgagaagtccaggaccaggggaacc

SEQ ID NO: 48894 - DNA, 114 bp, synthetic construct
  source 1..114: mol_type = other DNA
gcagacgaggccgcgtttcaaggcagtaataacggcctctttgccttcttctccaacacaaacggcaccggttttccaattctggatagcagcctgaccgccatcactcaagcc

SEQ ID NO: 48895 - DNA, 51 bp, synthetic construct
  source 1..51: mol_type = other DNA
cccggactcgctgctctgggtaccggcgacgtaactaccctcgcatccgct

SEQ ID NO: 48896 - DNA, 48 bp, synthetic construct
  source 1..48: mol_type = other DNA
aacttcatcctcaagaccaccgccctgaacctcgctagcaatagtctg

SEQ ID NO: 48897 - DNA, 30 bp, synthetic construct
  source 1..30: mol_type = other DNA
gatagcaacaatgtgctgttcaccaacgac

SEQ ID NO: 48898 - DNA, 30 bp, synthetic construct
  source 1..30: mol_type = other DNA
aacccttccctgaccggacccagctctatg

SEQ ID NO: 48899 - DNA, 114 bp, synthetic construct
  source 1..114: mol_type = other DNA
atgaaagtttttgcctgcgtctaccggccctggatattagactcccgggttcaccccgttaaagaggccataactacggcgacgggctacagcttcccttccggacataccact

SEQ ID NO: 48900 - DNA, 66 bp, synthetic construct
  source 1..66: mol_type = other DNA
accaagagctaccctctggattatgacgcagctggcaaactcatcgtggaccctgctattctgaca

SEQ ID NO: 48901 - DNA, 33 bp, synthetic construct
  source 1..33: mol_type = other DNA
gggttcgtgaccggctcaatcaactttggagcc

SEQ ID NO: 48902 - DNA, 33 bp, synthetic construct
  source 1..33: mol_type = other DNA
aactgccccctggacttcgagccataccctagc

SEQ ID NO: 48903 - DNA, 54 bp, synthetic construct
  source 1..54: mol_type = other DNA
aacctctacgccacaagcgacgctcgggcgatggcctacatcggcaatctggca

SEQ ID NO: 48904 - DNA, 39 bp, synthetic construct
  source 1..39: mol_type = other DNA
gtgggcatttcatctctcggtaacgctgctcttggagcc

SEQ ID NO: 48905 - DNA, 96 bp, synthetic construct
  source 1..96: mol_type = other DNA
ctgcacctcgtgaagccttacgtgcttccctcgccggttgatgtgctgtactccgccatcgatatcctacaatctgggaagttacaaaataacgtt

SEQ ID NO: 48906 - DNA, 66 bp, synthetic construct
  source 1..66: mol_type = other DNA
attggatcttcctccggactcggttacatgattctcaccgccacgaacctgggggatgacactttc

SEQ ID NO: 48907 - DNA, 60 bp, synthetic construct
  source 1..60: mol_type = other DNA
gccctgcccggcgtggagcttctcactgagaccgacttcatcacattccttcaagccaat

SEQ ID NO: 48908 - DNA, 36 bp, synthetic construct
  source 1..36: mol_type = other DNA
aagctgcctagcgtgaccggctcttgctcccatccc

SEQ ID NO: 48909 - DNA, 30 bp, synthetic construct
  source 1..30: mol_type = other DNA
gccttccctacgcctagctttggaagtgcg

SEQ ID NO: 48910 - DNA, 45 bp, synthetic construct
  source 1..45: mol_type = other DNA
gcctttagcatcttctccattaccggcatggagaacgagatcttc

SEQ ID NO: 48911 - DNA, 45 bp, synthetic construct
  source 1..45: mol_type = other DNA
tacaataagaagaacacctacgttcgcatatatgagagccagaag

SEQ ID NO: 48912 - DNA, 51 bp, synthetic construct
  source 1..51: mol_type = other DNA
ttttttgttcaaagggacactgtccgctactataccgagaacaatgacacg

SEQ ID NO: 48913 - DNA, 117 bp, synthetic construct
  source 1..117: mol_type = other DNA
tatactcaaaataacgatacagtgaatctgaacatcgacgtcaaggccaaagagctggaatgggttaatgctgactttaagctccacgaccagttcatgattatcaatcgggaaaag

SEQ ID NO: 48914 - DNA, 90 bp, synthetic construct
  source 1..90: mol_type = other DNA
ctccacctcgtgaaacccttcatcctgcctagtcccgttggcgtgctgaacagcgccattaatatattgcaaagtggaaagctgttcaag

SEQ ID NO: 48915 - DNA, 60 bp, synthetic construct
  source 1..60: mol_type = other DNA
attgggtctagtagcggcctcggatacatgatcctgaccgcctccaacctgttcgacacc

SEQ ID NO: 48916 - DNA, 30 bp, synthetic construct
  source 1..30: mol_type = other DNA
gtgaaggagcctgtcaaggagcccgttaag

SEQ ID NO: 48917 - DNA, 30 bp, synthetic construct
  source 1..30: mol_type = other DNA
atgattatcgagaacatcgacatcccccca

SEQ ID NO: 48918 - DNA, 30 bp, synthetic construct
  source 1..30: mol_type = other DNA
ccactggacttcgagcccttccctaacttc

SEQ ID NO: 48919 - DNA, 48 bp, synthetic construct
  source 1..48: mol_type = other DNA
cacctgttcgctaccgatgaggcccgagaactcgcttattcgggagac

SEQ ID NO: 48920 - DNA, 57 bp, synthetic construct
  source 1..57: mol_type = other DNA
gcccttcccggcgtgcagctcctgaccgagggcgattttatcgctttcctgcaatcc

SEQ ID NO: 48921 - DNA, 90 bp, synthetic construct
  source 1..90: mol_type = other DNA
atcagcctcgtgaagccatacgtgctgccttctcccgtcgctgtgctgtactccgcgatcagtattatccaatccggaaaactcttgcag

SEQ ID NO: 48922 - DNA, 60 bp, synthetic construct
  source 1..60: mol_type = other DNA
attggcagctcttccggcctgggatacatgatcctcaccgccacaaacctgttcgaccca

SEQ ID NO: 48923 - DNA, 87 bp, synthetic construct
  source 1..87: mol_type = other DNA
gagcggctgaattttcccgagttcaacatggaggagggcctagttgggttcgagaagatcctcatgctgcttttcaaccacgacatc

SEQ ID NO: 48924 - DNA, 36 bp, synthetic construct
  source 1..36: mol_type = other DNA
agcaccgccatggtgtccagcgccaatggtggaatt

SEQ ID NO: 48925 - DNA, 39 bp, synthetic construct
  source 1..39: mol_type = other DNA
aacactgccgtgaatgagagcacattcgtcaccgatcct

SEQ ID NO: 48926 - DNA, 36 bp, synthetic construct
  source 1..36: mol_type = other DNA
aattacaaccctgtcgccgtgaactggatcggaacc

SEQ ID NO: 48927 - DNA, 93 bp, synthetic construct
  source 1..93: mol_type = other DNA
tcttccttcaatttcgcctggggtaacgacgctggtagctttttcaccaatgttgtcggcgggagccacaacttaaactcgatgaccactttt

SEQ ID NO: 48928 - DNA, 129 bp, synthetic construct
  source 1..129: mol_type = other DNA
accctgcccggcgccgggatcggcatcaacacacttctcacccctgattggagcaaactgctcgacgtgaacatttggctggctaaatacggttcaggcaactgcgactacttgtgcaagttgtttgcc

SEQ ID NO: 48929 - DNA, 81 bp, synthetic construct
  source 1..81: mol_type = other DNA
atgtgtctgcttgaggagttgatcaaaaacatctcaaaggactggagtaccctggataaaaacgaactgaagagctatatg

SEQ ID NO: 48930 - DNA, 33 bp, synthetic construct
  source 1..33: mol_type = other DNA
atgggagccttcttaaccgccgccgcggttggg

SEQ ID NO: 48931 - DNA, 69 bp, synthetic construct
  source 1..69: mol_type = other DNA
caccctatccctagtgaacagatctacgacaagatcatgttcctgaacggcggtgcatggaatggcggc

SEQ ID NO: 48932 - DNA, 33 bp, synthetic construct
  source 1..33: mol_type = other DNA
agtggctttttgttttccgctgaggcagctgga

SEQ ID NO: 48933 - DNA, 60 bp, synthetic construct
  source 1..60: mol_type = other DNA
tttagtggcacacctactgcgagtaacgctgcactggagtcttccatggacatcatcttc

SEQ ID NO: 48934 - DNA, 45 bp, synthetic construct
  source 1..45: mol_type = other DNA
ggcatcttcaccgggacactgggatttgacatggcagcagctggc

SEQ ID NO: 48935 - DNA, 33 bp, synthetic construct
  source 1..33: mol_type = other DNA
gccaacgctgtcgggggctctggttatggcgag

SEQ ID NO: 48936 - DNA, 30 bp, synthetic construct
  source 1..30: mol_type = other DNA
accggcatcctgggcttcaacatggccgcc

SEQ ID NO: 48937 - DNA, 39 bp, synthetic construct
  source 1..39: mol_type = other DNA
cggagcggcggtatccatcatcaacataaccatgttcgg

SEQ ID NO: 48938 - DNA, 39 bp, synthetic construct
  source 1..39: mol_type = other DNA
atcagcggcgccctgctcggagctgatgttatgggaggt

SEQ ID NO: 48939 - DNA, 36 bp, synthetic construct
  source 1..36: mol_type = other DNA
agcggattagtgtttggatcatcaatggtcggtgtc

SEQ ID NO: 48940 - DNA, 30 bp, synthetic construct
  source 1..30: mol_type = other DNA
agcgccatcggaggctacggggaatcagtg

SEQ ID NO: 48941 - DNA, 42 bp, synthetic construct
  source 1..42: mol_type = other DNA
gggatatttacgggtagtctgggatttgacatggccgctggc

SEQ ID NO: 48942 - DNA, 30 bp, synthetic construct
  source 1..30: mol_type = other DNA
tccagcatcggcggatacggcgaatccgct

SEQ ID NO: 48943 - DNA, 36 bp, synthetic construct
  source 1..36: mol_type = other DNA
atctttaccggcactctgggcttcgctatggccgcc

SEQ ID NO: 48944 - DNA, 39 bp, synthetic construct
  source 1..39: mol_type = other DNA
atcagcgggttcgcattgggcgcggacgcggctagcggg

SEQ ID NO: 48945 - DNA, 36 bp, synthetic construct
  source 1..36: mol_type = other DNA
ctgtccgggttcgtgtttggaagcaacgtagcaggg

SEQ ID NO: 48946 - DNA, 57 bp, synthetic construct
  source 1..57: mol_type = other DNA
ttcatcaataacgggcagacctttccctctatatacaacatcggcatcacaatgcca

SEQ ID NO: 48947 - DNA, 63 bp, synthetic construct
  source 1..63: mol_type = other DNA
agtgggacaccagcgtcctcgattggagccctgggcggggtcggaccctttggggatattggc

SEQ ID NO: 48948 - DNA, 30 bp, synthetic construct
  source 1..30: mol_type = other DNA
aactactttgtgaccggcgccaatgctttc

SEQ ID NO: 48949 - DNA, 39 bp, synthetic construct
  source 1..39: mol_type = other DNA
atcagcggattcgcccttggagccgatgccgcctcgggc

SEQ ID NO: 48950 - DNA, 30 bp, synthetic construct
  source 1..30: mol_type = other DNA
gactccagcttatatgctcaagattccgac

SEQ ID NO: 48951 - DNA, 66 bp, synthetic construct
  source 1..66: mol_type = other DNA
aaccccatgcctagcgagtggatctacgacaagatcatcttcctgaatggcggctctggttggatt

SEQ ID NO: 48952 - DNA, 30 bp, synthetic construct
  source 1..30: mol_type = other DNA
ttcaacaccgaaccgatcagcgtccctgac

SEQ ID NO: 48953 - DNA, 75 bp, synthetic construct
  source 1..75: mol_type = other DNA
ttcccaacacctcctgagtttatctcgtcccaattgatcaacatcgacgagctcattaacaatttcctgagcatg

SEQ ID NO: 48954 - DNA, 96 bp, synthetic construct
  source 1..96: mol_type = other DNA
tttgaccccacaatcaacagcctctacgagtccctgtggttcgtctttcaaacaataaccactgtcggttacggcgacattataccgcaatcccaa

SEQ ID NO: 48955 - DNA, 42 bp, synthetic construct
  source 1..42: mol_type = other DNA
atcgtcacgtccctcgccgaatatgctcactacgcacttccc

SEQ ID NO: 48956 - DNA, 48 bp, synthetic construct
  source 1..48: mol_type = other DNA
tttggccacatgctcttcacatatcaacctgtactgaactacattatc

SEQ ID NO: 48957 - DNA, 39 bp, synthetic construct
  source 1..39: mol_type = other DNA
tttagcggcctgctgttctccgccgaagctgcatctgga

SEQ ID NO: 48958 - DNA, 111 bp, synthetic construct
  source 1..111: mol_type = other DNA
gccgacgaggcagcattccaaagttccaacggcttgcttaacatgttttctactacaaacggaactggcctccctattctggactccagcctcactgcaataacccaggca

SEQ ID NO: 48959 - DNA, 51 bp, synthetic construct
  source 1..51: mol_type = other DNA
ccaggccttgccgcactgggaaccggcgacgtgacgacactcgcaagcgcc

SEQ ID NO: 48960 - DNA, 39 bp, synthetic construct
  source 1..39: mol_type = other DNA
ctctccaccgccatcctgggcattaacccttctagcatc

SEQ ID NO: 48961 - DNA, 81 bp, synthetic construct
  source 1..81: mol_type = other DNA
tttaactttcctacttttgactttgaggagttctttctcaagcttcccgagactatccatctgatctacacacacaaccct

SEQ ID NO: 48962 - DNA, 36 bp, synthetic construct
  source 1..36: mol_type = other DNA
agctacgagtccatcctgaacttggcatccacgtct

SEQ ID NO: 48963 - DNA, 51 bp, synthetic construct
  source 1..51: mol_type = other DNA
gccccagttatttcactgcctatagctggcaaacctatgaacttctccatg

SEQ ID NO: 48964 - DNA, 57 bp, synthetic construct
  source 1..57: mol_type = other DNA
cccacactcgctaccactctgaacgcccctgtgtccgagcttgagctcatcataagc

SEQ ID NO: 48965 - DNA, 30 bp, synthetic construct
  source 1..30: mol_type = other DNA
cagatcgcctctgcatccccgttgaactct

SEQ ID NO: 48966 - DNA, 51 bp, synthetic construct
  source 1..51: mol_type = other DNA
gccatgggaggctataacctgatgcccgtcgcgaatagcgagaccctcaca

SEQ ID NO: 48967 - DNA, 45 bp, synthetic construct
  source 1..45: mol_type = other DNA
tggcgggccggcagccaccattctggacctctgcactcccataat

SEQ ID NO: 48968 - DNA, 36 bp, synthetic construct
  source 1..36: mol_type = other DNA
atcaggtccctgtctggagcgggtaacagcggatta

SEQ ID NO: 48969 - DNA, 36 bp, synthetic construct
  source 1..36: mol_type = other DNA
gtgaacggcgccaagggcactttccaacaatcttac

SEQ ID NO: 48970 - DNA, 30 bp, synthetic construct
  source 1..30: mol_type = other DNA
ggcctggtgaccagcacatcctctcctcag

SEQ ID NO: 48971 - DNA, 87 bp, synthetic construct
  source 1..87: mol_type = other DNA
ctgttcgacttcccaagcttcgaaatggaggagctcgtgctgaagctgcccgagacaattcaccaaatttacacccacaaccctgtg

SEQ ID NO: 48972 - DNA, 39 bp, synthetic construct
  source 1..39: mol_type = other DNA
ttcagcgggtttatcctgggcgtagacgcctctggaata

SEQ ID NO: 48973 - DNA, 36 bp, synthetic construct
  source 1..36: mol_type = other DNA
ggtttttctgggttcatgctcggtgctgatgctggc

SEQ ID NO: 48974 - DNA, 36 bp, synthetic construct
  source 1..36: mol_type = other DNA
atcagcggctccattctcggcgtggacgccggaggt

SEQ ID NO: 48975 - DNA, 39 bp, synthetic construct
  source 1..39: mol_type = other DNA
gggatcagtggagctctgctcggcgccaacactggcggg

SEQ ID NO: 48976 - DNA, 33 bp, synthetic construct
  source 1..33: mol_type = other DNA
gagtccatcctgagttcttcattcactagcttc

SEQ ID NO: 48977 - DNA, 51 bp, synthetic construct
  source 1..51: mol_type = other DNA
ccttccttcctctttagcgcacaaaatttttccttcaatctgacaatgatt

SEQ ID NO: 48978 - DNA, 51 bp, synthetic construct
  source 1..51: mol_type = other DNA
aacatggccccggtttttgcgaacccgtcaactgagctcagcctgatgcca

SEQ ID NO: 48979 - DNA, 48 bp, synthetic construct
  source 1..48: mol_type = other DNA
atcgcctccgcaaccgactctctgggcgatagcgtggatgttgctggg

SEQ ID NO: 48980 - DNA, 42 bp, synthetic construct
  source 1..42: mol_type = other DNA
gggttcagcggggcaatgctgggcattgatcctaccgggata

SEQ ID NO: 48981 - DNA, 66 bp, synthetic construct
  source 1..66: mol_type = other DNA
aacccagtatcatctcaagccatatacgaccggatcattttcctgaatggcggatctcactggatg

SEQ ID NO: 48982 - DNA, 90 bp, synthetic construct
  source 1..90: mol_type = other DNA
gtgttcgatttcccgagtttcgaagttgaggagtttatcctgaagttccctgagacaattcacctcatctacacccatagccctgtagat

SEQ ID NO: 48983 - DNA, 39 bp, synthetic construct
  source 1..39: mol_type = other DNA
ttcagcggggctatcctgggcgcaaaccctggtggaata

SEQ ID NO: 48984 - DNA, 30 bp, synthetic construct
  source 1..30: mol_type = other DNA
tacgagtctctcatcggattgacggttaac

SEQ ID NO: 48985 - DNA, 45 bp, synthetic construct
  source 1..45: mol_type = other DNA
cccagcttcgtgtttgacaccgccaacttctctatgacaatctcc

SEQ ID NO: 48986 - DNA, 54 bp, synthetic construct
  source 1..54: mol_type = other DNA
gtgcctacaatcagccaggtcctggagtacccctctacacaacttacactgatg

SEQ ID NO: 48987 - DNA, 33 bp, synthetic construct
  source 1..33: mol_type = other DNA
tacgagttcatcctcaacctcgctagtacctcc

SEQ ID NO: 48988 - DNA, 33 bp, synthetic construct
  source 1..33: mol_type = other DNA
ctgcccgtggctggcaagcctatgaacttcacc

SEQ ID NO: 48989 - DNA, 51 bp, synthetic construct
  source 1..51: mol_type = other DNA
accctcgccactactctgaacgctcccgtatcggaactcgagctgatctcc

SEQ ID NO: 48990 - DNA, 105 bp, synthetic construct
  source 1..105: mol_type = other DNA
gccaacgaggccatgtaccagagcggcggaggtctgagcgtctcctctggcatgaactggacgtcccaatttttggacacatccatgtctgctatcacccaaggg

SEQ ID NO: 48991 - DNA, 51 bp, synthetic construct
  source 1..51: mol_type = other DNA
ccgggactcgccgcgctcgggaccggcgacgtaacggccctggcttccgct

SEQ ID NO: 48992 - DNA, 30 bp, synthetic construct
  source 1..30: mol_type = other DNA
tacgagacagtcatcagcctgaccgtgaac

SEQ ID NO: 48993 - DNA, 45 bp, synthetic construct
  source 1..45: mol_type = other DNA
cccagcttcgtgtttaactctgccaatgtctccctgaccatcacc

SEQ ID NO: 48994 - DNA, 36 bp, synthetic construct
  source 1..36: mol_type = other DNA
ggcaaggtgctcgagaaccccagtacccagttaacc

SEQ ID NO: 48995 - DNA, 57 bp, synthetic construct
  source 1..57: mol_type = other DNA
aacccaattagttcccaattgatctacgacaagattatcttcctgaatggaggaatg

SEQ ID NO: 48996 - DNA, 39 bp, synthetic construct
  source 1..39: mol_type = other DNA
atcagcggggctgtgctgggagctgacccaagtggtgtg

SEQ ID NO: 48997 - DNA, 42 bp, synthetic construct
  source 1..42: mol_type = other DNA
acggccttcgacgaggggcacagctttgaagcacttttcacc

SEQ ID NO: 48998 - DNA, 39 bp, synthetic construct
  source 1..39: mol_type = other DNA
gccggcctcgagggtctgacactgaagctgatcatcacc

SEQ ID NO: 48999 - DNA, 78 bp, synthetic construct
  source 1..78: mol_type = other DNA
ggccagaactgggcacctttcgtcccatgggtctgcccttatctgatcgccagcggagagattgctaaatacggcgca

SEQ ID NO: 49000 - DNA, 96 bp, synthetic construct
  source 1..96: mol_type = other DNA
ccagaacaagtggccgaatacgtcaagcccatcgctgacgccttcgaggagaacgtggcaaacggcaccgtggagctcacaacgcagagtcttttc

SEQ ID NO: 49001 - DNA, 48 bp, synthetic construct
  source 1..48: mol_type = other DNA
gggtacaccggcgccaatttcaacctgctcgcctatgctgcacttgtg

SEQ ID NO: 49002 - DNA, 39 bp, synthetic construct
  source 1..39: mol_type = other DNA
gccaaagtgtttcttagcttctttgggatcggcattgcc

SEQ ID NO: 49003 - DNA, 30 bp, synthetic construct
  source 1..30: mol_type = other DNA
tacgagagcctgatcggactcaccgtgaac

SEQ ID NO: 49004 - DNA, 45 bp, synthetic construct
  source 1..45: mol_type = other DNA
cccagctttgtgttcgacaccgccaacttctccatgacaatcagc

SEQ ID NO: 49005 - DNA, 51 bp, synthetic construct
  source 1..51: mol_type = other DNA
gtgccgacgatcagccaggttctggaatacccatcaactcaactaacactc

SEQ ID NO: 49006 - DNA, 126 bp, synthetic construct
  source 1..126: mol_type = other DNA
acctgtccctattgtggctcagaatctgtttatgaaacaggcggctactaccgctgtgccgaatgcggaaatagtatctactctcccgacgagctcgagctgggctattgggatggatacatggag

SEQ ID NO: 49007 - DNA, 99 bp, synthetic construct
  source 1..99: mol_type = other DNA
gccgattctatctccgagtacatacaacccatggtggacaacttccaaaaacaggtggacgagggcgtcatcaccctgaccacacattccatcttcacc

SEQ ID NO: 49008 - DNA, 33 bp, synthetic construct
  source 1..33: mol_type = other DNA
tactttggcgccgacttcaacatctacgcttac

SEQ ID NO: 49009 - DNA, 111 bp, synthetic construct
  source 1..111: mol_type = other DNA
aaacacggacttatctctttctattttttcaattcctttttcacactgctgttctttctgtttctgctgctcttttccttcttcctgatctttctcattttcctggacttc

SEQ ID NO: 49010 - DNA, 30 bp, synthetic construct
  source 1..30: mol_type = other DNA
ggcaacctgagcggggccgcatcatctgcc

SEQ ID NO: 49011 - DNA, 42 bp, synthetic construct
  source 1..42: mol_type = other DNA
ggcattagcggtgccgtgttgggagccgatccaagcggaata

SEQ ID NO: 49012 - DNA, 36 bp, synthetic construct
  source 1..36: mol_type = other DNA
ttcagcggactgatgctgggcatcaacaccagtggc

SEQ ID NO: 49013 - DNA, 42 bp, synthetic construct
  source 1..42: mol_type = other DNA
ggattcagcaccgctgtgctggggatcgacccaactggcgat

SEQ ID NO: 49014 - DNA, 57 bp, synthetic construct
  source 1..57: mol_type = other DNA
aaccctattccatcggagatcatctacgagaagctgatgttcgtgtccggaggaatg

SEQ ID NO: 49015 - DNA, 36 bp, synthetic construct
  source 1..36: mol_type = other DNA
gtgacctccgccttcctcggggccggaaatggggcc

SEQ ID NO: 49016 - DNA, 51 bp, synthetic construct
  source 1..51: mol_type = other DNA
gaggaattcggggaattttccgaaacaatcaccttccaaacattcctcact

SEQ ID NO: 49017 - DNA, 45 bp, synthetic construct
  source 1..45: mol_type = other DNA
gccactggggcaacaggcctcaccgctaacatcgtgctggattcc

SEQ ID NO: 49018 - DNA, 84 bp, synthetic construct
  source 1..84: mol_type = other DNA
agccacaaatacgggatttacttcccctggtcttccccttacctgatcgctagtggcgagatcgcccaatacaccaacaactac

SEQ ID NO: 49019 - DNA, 33 bp, synthetic construct
  source 1..33: mol_type = other DNA
atttcgaccgcggtacttggcatcaacccaagc

SEQ ID NO: 49020 - DNA, 81 bp, synthetic construct
  source 1..81: mol_type = other DNA
ttcgactttccaagattcgaaattgaagagtttgtctttaatttccaagagactttccatcttatttacaaccacaatccc

SEQ ID NO: 49021 - DNA, 30 bp, synthetic construct
  source 1..30: mol_type = other DNA
atgttcgttccacaagcttttatctcaatg

SEQ ID NO: 49022 - DNA, 51 bp, synthetic construct
  source 1..51: mol_type = other DNA
accatgaatgtgaacggcataccagcaaacagcaggggcctgatcgtcatg

SEQ ID NO: 49023 - DNA, 33 bp, synthetic construct
  source 1..33: mol_type = other DNA
acccctcggcccgagggcgtaatcattgctaac

SEQ ID NO: 49024 - DNA, 159 bp, synthetic construct
  source 1..159: mol_type = other DNA
atcaccaaggctacacccgctaatattaacgacggcgacgccatcctggggaatttcaacggggtcagcgatgagatcactattcggatctacgactccaccgactcgcaagttgatagtatcgagaagaactacgacgtcgtgaacattcgcaacttc

SEQ ID NO: 49025 - DNA, 45 bp, synthetic construct
  source 1..45: mol_type = other DNA
atgagcgctggtggctctggagcgcctgctgagggagctgtagat

SEQ ID NO: 49026 - DNA, 42 bp, synthetic construct
  source 1..42: mol_type = other DNA
tcagtcgccgctgcattcaagttgacagggctggagattgct

SEQ ID NO: 49027 - DNA, 30 bp, synthetic construct
  source 1..30: mol_type = other DNA
tacgagaccgtgatctcacttaccgtgaat

SEQ ID NO: 49028 - DNA, 45 bp, synthetic construct
  source 1..45: mol_type = other DNA
tctcccagcttcgtgtttaacaccgccaatatctccctgaacgtg

SEQ ID NO: 49029 - DNA, 51 bp, synthetic construct
  source 1..51: mol_type = other DNA
cccactatagggaaggtgctcgagaacccgagtacagaactcacactgatg

SEQ ID NO: 49030 - DNA, 33 bp, synthetic construct
  source 1..33: mol_type = other DNA
accagccagatcacctatttcatcaactcctac

SEQ ID NO: 49031 - DNA, 30 bp, synthetic construct
  source 1..30: mol_type = other DNA
atggccgctccaacggttggtttaggtgca

SEQ ID NO: 49032 - DNA, 60 bp, synthetic construct
  source 1..60: mol_type = other DNA
cccaacattatacaagtgttcaataagtccatgaagtacatgaccattcctagcctgaac

SEQ ID NO: 49033 - DNA, 120 bp, synthetic construct
  source 1..120: mol_type = other DNA
atgagtggaatcctgctgaccaagaccagcaccttcatcattggccccgtggcctctcttctggggtacctcatgtccggcatcttcactatcctcgagaagatcggtatccctaacatc

SEQ ID NO: 49034 - DNA, 33 bp, synthetic construct
  source 1..33: mol_type = other DNA
tttaccaacatcttcaagatcccccaaacgagt

SEQ ID NO: 49035 - DNA, 36 bp, synthetic construct
  source 1..36: mol_type = other DNA
atcactttgattcaaagcaccatctccacattggac

SEQ ID NO: 49036 - DNA, 42 bp, synthetic construct
  source 1..42: mol_type = other DNA
gtgggcagcatctctggcatcttcgcctccattgacaccgtc

SEQ ID NO: 49037 - DNA, 33 bp, synthetic construct
  source 1..33: mol_type = other DNA
taccggagcgccttcacgagtcagactgctgtg

SEQ ID NO: 49038 - DNA, 45 bp, synthetic construct
  source 1..45: mol_type = other DNA
accatcggcttcgagaacattgttagaatgataatgggaatcgcc

SEQ ID NO: 49039 - DNA, 60 bp, synthetic construct
  source 1..60: mol_type = other DNA
ggcgccattgggatcatcccctacgacatcttctatagccttgagaccattacaaactgg

SEQ ID NO: 49040 - DNA, 48 bp, synthetic construct
  source 1..48: mol_type = other DNA
gccgacattaaccacggcgctatgatgctatttagcatcatctctgcc

SEQ ID NO: 49041 - DNA, 39 bp, synthetic construct
  source 1..39: mol_type = other DNA
gccttcgacgaaggccacacctttgagctcctgttctct

SEQ ID NO: 49042 - DNA, 42 bp, synthetic construct
  source 1..42: mol_type = other DNA
gccggcctggacgggttcagcctcaagctgttcatcgattcc

SEQ ID NO: 49043 - DNA, 81 bp, synthetic construct
  source 1..81: mol_type = other DNA
ggccagacttgggcaccatatgttccatgggtttgcccttacttgatcgctagtggcgagatcgccgaatactcctcatct

SEQ ID NO: 49044 - DNA, 42 bp, synthetic construct
  source 1..42: mol_type = other DNA
actagcttcggcgagggccagacgttcgaagccctgtttaca

SEQ ID NO: 49045 - DNA, 42 bp, synthetic construct
  source 1..42: mol_type = other DNA
gccgggctggacggtttctccctctccctcttcgccgagtgc

SEQ ID NO: 49046 - DNA, 84 bp, synthetic construct
  source 1..84: mol_type = other DNA
gggcaaaattgggcccctttcgtcccctgggtttgcccgtacctcatcgctagcggcgagatcgcccaatatggggtctcagtc

SEQ ID NO: 49047 - DNA, 63 bp, synthetic construct
  source 1..63: mol_type = other DNA
atgcactacccactggccggcaatggcatcctgcccattgctgagcagctcagccctaccttt

SEQ ID NO: 49048 - DNA, 42 bp, synthetic construct
  source 1..42: mol_type = other DNA
acagccttcgacgagggcggtgcttttgaagcactcttcacc

SEQ ID NO: 49049 - DNA, 42 bp, synthetic construct
  source 1..42: mol_type = other DNA
gccggccttgatgggttcagcctgaaactcttcgttgactcc

SEQ ID NO: 49050 - DNA, 81 bp, synthetic construct
  source 1..81: mol_type = other DNA
ggccagaactgggccccgttcgtgccatgggttagcccctacctcatcgcatctggcgagattgccgaatacggcgcatcc

SEQ ID NO: 49051 - DNA, 36 bp, synthetic construct
  source 1..36: mol_type = other DNA
accgatcagatcacagacctgatttacacctacaac

SEQ ID NO: 49052 - DNA, 30 bp, synthetic construct
  source 1..30: mol_type = other DNA
ctggtggcccccaccgtgggcctgggcctg

SEQ ID NO: 49053 - DNA, 57 bp, synthetic construct
  source 1..57: mol_type = other DNA
cccaacattaccgccatgatccagaacccaatggaggctatctccatctcttcaccc

SEQ ID NO: 49054 - DNA, 42 bp, synthetic construct
  source 1..42: mol_type = other DNA
accagcttcgacgaaggacagactttcgaggccctctttaca

SEQ ID NO: 49055 - DNA, 42 bp, synthetic construct
  source 1..42: mol_type = other DNA
gccggccttgagggtttctccgtgaacctttttcttgattcg

SEQ ID NO: 49056 - DNA, 84 bp, synthetic construct
  source 1..84: mol_type = other DNA
ggccagaaatgggctcccttcgtgccttggacctgcccctacctgattgctagcggcgaaatcacagaatatgctacctccatc

SEQ ID NO: 49057 - DNA, 39 bp, synthetic construct
  source 1..39: mol_type = other DNA
gccttcgacgaaggtcacagctttgaggctctgttcacc

SEQ ID NO: 49058 - DNA, 39 bp, synthetic construct
  source 1..39: mol_type = other DNA
gccgggctcgagggcctgacccttaagctgatcatcacc

SEQ ID NO: 49059 - DNA, 81 bp, synthetic construct
  source 1..81: mol_type = other DNA
ggtcagaattgggccccattcgtgccttgggtctgcccatatcttatagcaagcggcgagatagtgaaatatggcgcaaac

SEQ ID NO: 49060 - DNA, 39 bp, synthetic construct
  source 1..39: mol_type = other DNA
gtgttcggcgaggaaggcacctttgaggccttcttcaca

SEQ ID NO: 49061 - DNA, 39 bp, synthetic construct
  source 1..39: mol_type = other DNA
gccgggctggacggctttaccctgaagctcttcatcacc

SEQ ID NO: 49062 - DNA, 84 bp, synthetic construct
  source 1..84: mol_type = other DNA
ggccaaaactgggcccctttcattccctgggtgtctccttatctgatcgcctccggagaaattgtcgagtactcggttagctcc

SEQ ID NO: 49063 - DNA, 39 bp, synthetic construct
  source 1..39: mol_type = other DNA
gccttcggcgaagggaatacatttgaactgctcttcacc

SEQ ID NO: 49064 - DNA, 45 bp, synthetic construct
  source 1..45: mol_type = other DNA
gctgggctcgaggggttctccctgatgctgtctttcattagcgat

SEQ ID NO: 49065 - DNA, 81 bp, synthetic construct
  source 1..81: mol_type = other DNA
gggcagaactgggcccccttcgtaccttgggtctgcccatacctgatcgcatccggcgagatcgccaagtacagtaccagt

SEQ ID NO: 49066 - DNA, 48 bp, synthetic construct
  source 1..48: mol_type = other DNA
atggacctcagttcttacttcaacctgtccgccattacgagtattccc

SEQ ID NO: 49067 - DNA, 30 bp, synthetic construct
  source 1..30: mol_type = other DNA
ttcctgcccatcctgcggattaacgtgcac

SEQ ID NO: 49068 - DNA, 33 bp, synthetic construct
  source 1..33: mol_type = other DNA
tacaacaagctgatcttctacttcggactcttt

SEQ ID NO: 49069 - DNA, 33 bp, synthetic construct
  source 1..33: mol_type = other DNA
ctcttctctgcatcatcgaagaacgtgcttgcc

SEQ ID NO: 49070 - DNA, 54 bp, synthetic construct
  source 1..54: mol_type = other DNA
cccatgcctagcgagtggatttacgacaagatcatcttcctgaacggaggaatg

SEQ ID NO: 49071 - DNA, 39 bp, synthetic construct
  source 1..39: mol_type = other DNA
gcctttgatgagggccacaccttcgacctcctgttcaag

SEQ ID NO: 49072 - DNA, 39 bp, synthetic construct
  source 1..39: mol_type = other DNA
gccgggttggacggctttagcctgcggctcttcatcgag

SEQ ID NO: 49073 - DNA, 81 bp, synthetic construct
  source 1..81: mol_type = other DNA
ggccaaacttgggcaccctacgtgccttgggtctgcccttacctgattgcaagcggggaaatagctcaatatagcacatct

SEQ ID NO: 49074 - DNA, 93 bp, synthetic construct
  source 1..93: mol_type = other DNA
gatacccaaattaatgacttcgcaaccgctctgtggtacgtcgtggtgtccatcaccgccaccggctatggggacgttgtacccactacactg

SEQ ID NO: 49075 - DNA, 57 bp, synthetic construct
  source 1..57: mol_type = other DNA
gtgttctttaacctgttcgagcaatacgtctcaaactctatctccatcatcggtatt

SEQ ID NO: 49076 - DNA, 123 bp, synthetic construct
  source 1..123: mol_type = other DNA
tccgtgctgcccctgcacccattcgcctttgcaatggctagtggagtcggatctgctagcatgaacgccgcatccctgggacctaccctggccgcattccctggcctggaaacacaaatcgag

SEQ ID NO: 49077 - DNA, 42 bp, synthetic construct
  source 1..42: mol_type = other DNA
accgccttcgacgaagggcgcactttcgaggctctgttcacg

SEQ ID NO: 49078 - DNA, 42 bp, synthetic construct
  source 1..42: mol_type = other DNA
gcgggacttgaaggcttctccatcaacctgtacctgaatagc

SEQ ID NO: 49079 - DNA, 81 bp, synthetic construct
  source 1..81: mol_type = other DNA
ggtcaaaattgggcaccgttcgtgccttggatttgcccatacctgctggctagtggcaaaatcgccgaatataccagctcc

SEQ ID NO: 49080 - DNA, 42 bp, synthetic construct
  source 1..42: mol_type = other DNA
gcctttgacgagacccagagcttcgatgcactgtttagctcg

SEQ ID NO: 49081 - DNA, 42 bp, synthetic construct
  source 1..42: mol_type = other DNA
gctgggctgagcggcttttcattgcaactgtttatcaactcc

SEQ ID NO: 49082 - DNA, 81 bp, synthetic construct
  source 1..81: mol_type = other DNA
ggacagtcatgggccccctacgtgccatgggcctgcccttacctgatttcatccggcgagattgccgactactcggtatcc

SEQ ID NO: 49083 - DNA, 60 bp, synthetic construct
  source 1..60: mol_type = other DNA
gctctgcctggcgccgagctgctgaccgaaaccgacctcatgacattcttacaagcaaac

SEQ ID NO: 49084 - DNA, 39 bp, synthetic construct
  source 1..39: mol_type = other DNA
gcctttgacgagggcagcaccttcgatatgctgttcacg

SEQ ID NO: 49085 - DNA, 39 bp, synthetic construct
  source 1..39: mol_type = other DNA
gccggcctcgagggcttcaccctgaagctgttcatggac

SEQ ID NO: 49086 - DNA, 84 bp, synthetic construct
  source 1..84: mol_type = other DNA
gggcagacctgggccccatacgtcccctgggtttgcccttatctgattgccagcggcgagatcgctgaatatgcgacctctccc

SEQ ID NO: 49087 - DNA, 84 bp, synthetic construct
  source 1..84: mol_type = other DNA
atgcacgtagtgaatggacagtacctgctgatcgccagcttcgctgaaatgggcgtcgacgccatgtttggtggcattcctctg

SEQ ID NO: 49088 - DNA, 30 bp, synthetic construct
  source 1..30: mol_type = other DNA
cggatgaacaccgacctgttcacaactccc

SEQ ID NO: 49089 - DNA, 57 bp, synthetic construct
  source 1..57: mol_type = other DNA
aacccgattccgtccgagatgatctacgacaagatcattttcctgaatggaggaatg

SEQ ID NO: 49090 - DNA, 42 bp, synthetic construct
  source 1..42: mol_type = other DNA
gcctttgatgagacccagagcttcgactctctctttagcgcc

SEQ ID NO: 49091 - DNA, 39 bp, synthetic construct
  source 1..39: mol_type = other DNA
gccggactgagcggctttaccctcgggctgttcatcaac

SEQ ID NO: 49092 - DNA, 84 bp, synthetic construct
  source 1..84: mol_type = other DNA
gggcagtcctgggctccctacgtcccatgggcctgcccttatctgattagcagtggcgaaatcgccgactacggagtgtctctg

SEQ ID NO: 49093 - DNA, 102 bp, synthetic construct
  source 1..102: mol_type = other DNA
ggactgctccacaccgtgcaatctgacttgccaaacatcgtggccagcatgacaaattccggggccgttcccgccttcaattacatgatacgcaattctggc

SEQ ID NO: 49094 - DNA, 36 bp, synthetic construct
  source 1..36: mol_type = other DNA
cacatgtgttcatcataccccatcgagcagtctgtg

SEQ ID NO: 49095 - DNA, 39 bp, synthetic construct
  source 1..39: mol_type = other DNA
gcctttgacgagggcaacaccttcgaactgctgttcaat

SEQ ID NO: 49096 - DNA, 39 bp, synthetic construct
  source 1..39: mol_type = other DNA
gccggcctcgagggctttagcctgaagctgttcatcgac

SEQ ID NO: 49097 - DNA, 81 bp, synthetic construct
  source 1..81: mol_type = other DNA
ggccagacatgggccccatacgtgccttgggtctgcccatatctgattgcaagcggagaaattgctgagtattcagctagc

SEQ ID NO: 49098 - DNA, 60 bp, synthetic construct
  source 1..60: mol_type = other DNA
cagttcagcggctaccccgtggctaataacgccaacatcgccctgaatctgaacctcatg

SEQ ID NO: 49099 - DNA, 57 bp, synthetic construct
  source 1..57: mol_type = other DNA
aaccccatccctagcgagatgatttacgacaagatcatcttcctgaacggaggtatg

SEQ ID NO: 49100 - DNA, 42 bp, synthetic construct
  source 1..42: mol_type = other DNA
tcagcttttggggaaggcaacaccttcaaagtgctgttcacc

SEQ ID NO: 49101 - DNA, 39 bp, synthetic construct
  source 1..39: mol_type = other DNA
gccggcctggacgggtttagcctgaaagttttcatatac

SEQ ID NO: 49102 - DNA, 84 bp, synthetic construct
  source 1..84: mol_type = other DNA
ggacagagctgggccccatatgtgccctgggtctgcccttacctgatcgcctccggcgagatcgctggctatggtacatctatt

SEQ ID NO: 49103 - DNA, 42 bp, synthetic construct
  source 1..42: mol_type = other DNA
acctcttttgacgaaggccagacattcgaggcgctgttcacg

SEQ ID NO: 49104 - DNA, 42 bp, synthetic construct
  source 1..42: mol_type = other DNA
gccggcctggatgggttttcactgaagatcttcgcggacggg

SEQ ID NO: 49105 - DNA, 81 bp, synthetic construct
  source 1..81: mol_type = other DNA
ggccagaactgggccccattcgtgccttgggtttgcccgtacctgatcgcttccggcgagattgctgaatatagtacttca

SEQ ID NO: 49106 - DNA, 42 bp, synthetic construct
  source 1..42: mol_type = other DNA
acctccttcgacgaagggcactccttcgagatgctgtttgcc

SEQ ID NO: 49107 - DNA, 39 bp, synthetic construct
  source 1..39: mol_type = other DNA
gccgggctggagggctttagcatcggaatgttcatggac

SEQ ID NO: 49108 - DNA, 81 bp, synthetic construct
  source 1..81: mol_type = other DNA
ggccagaactgggcgcctttcgttccctgggtttgcccatacctcattgcttccggcgagatagcagaatactctacgtct

SEQ ID NO: 49109 - DNA, 39 bp, synthetic construct
  source 1..39: mol_type = other DNA
gccttcggcgagggccacacctttgaactgctgttcgac

SEQ ID NO: 49110 - DNA, 39 bp, synthetic construct
  source 1..39: mol_type = other DNA
gccggcctggatgggtttagcctcaagctgttcatcgac

SEQ ID NO: 49111 - DNA, 81 bp, synthetic construct
  source 1..81: mol_type = other DNA
ggtcaggcttgggcaccatacgtgccatgggtttgcccttatttaatctcaagcggcgagattgctaaatacggtacagga

SEQ ID NO: 49112 - DNA, 39 bp, synthetic construct
  source 1..39: mol_type = other DNA
agctttgacgaggcccagtccttcgacaagctgttcgct

SEQ ID NO: 49113 - DNA, 42 bp, synthetic construct
  source 1..42: mol_type = other DNA
gctgggctggacggattttccattaacttgtttatctcacga

SEQ ID NO: 49114 - DNA, 84 bp, synthetic construct
  source 1..84: mol_type = other DNA
ggccagaactgggccagcttcgtgccttggatctccccatatctgatcgctagtggcgaaatcgccaagtacagcaccagtccc

SEQ ID NO: 49115 - DNA, 54 bp, synthetic construct
  source 1..54: mol_type = other DNA
ccaattccctctgagtggatctacgacaagatcatcttcctcaacggaggactg

SEQ ID NO: 49116 - DNA, 42 bp, synthetic construct
  source 1..42: mol_type = other DNA
accgccttcgacgagggcggaacattcgaagctctgttcact

SEQ ID NO: 49117 - DNA, 42 bp, synthetic construct
  source 1..42: mol_type = other DNA
gccaacctcgacggattttcccttaaactgttcatggatagc

SEQ ID NO: 49118 - DNA, 81 bp, synthetic construct
  source 1..81: mol_type = other DNA
ggccagaactgggccccgttcgttccctggatcagcccttatctgattgcctccggaaaaatcgctgaatacggcgcctcc

SEQ ID NO: 49119 - DNA, 33 bp, synthetic construct
  source 1..33: mol_type = other DNA
atgtccttcaatccgcaaagtaacatcaatatc

SEQ ID NO: 49120 - DNA, 66 bp, synthetic construct
  source 1..66: mol_type = other DNA
ccccagtccgtgaacatattcacaagccagatcgagtttatcaatcagatcttcaccttgggagtc

SEQ ID NO: 49121 - DNA, 57 bp, synthetic construct
  source 1..57: mol_type = other DNA
cacccgatcccctctggcctcatctacgacaagattatcttcctgaacggaggaatt

SEQ ID NO: 49122 - DNA, 57 bp, synthetic construct
  source 1..57: mol_type = other DNA
caccctattccatccgagctcatctacgacaagatcatcttcctgaacggaggaatt

SEQ ID NO: 49123 - DNA, 57 bp, synthetic construct
  source 1..57: mol_type = other DNA
aacccgataccctccgagctgatctacgacaagattatcttcctcaacggtggactg

SEQ ID NO: 49124 - DNA, 57 bp, synthetic construct
  source 1..57: mol_type = other DNA
aatccgatttcgagtcaaatcatttacgacaagattatcttcctgaatggaggaatt

SEQ ID NO: 49125 - DNA, 45 bp, synthetic construct
  source 1..45: mol_type = other DNA
aactctggatactccatcggcttcgagacagactcagtagttgac

SEQ ID NO: 49126 - DNA, 54 bp, synthetic construct
  source 1..54: mol_type = other DNA
accgtggacctcctgatctctaatctggatagcagtaatgatatcgccatctat

SEQ ID NO: 49127 - DNA, 54 bp, synthetic construct
  source 1..54: mol_type = other DNA
cccatccctagcgagattatctacgacaagatcaatttcctgaacggaggaatg

SEQ ID NO: 49128 - DNA, 78 bp, synthetic construct
  source 1..78: mol_type = other DNA
gcagtgaacagccccgctctgccgacccctgacgccgctgtggccgtcctgcttgcaaatgtagatcagctggttcct

SEQ ID NO: 49129 - DNA, 63 bp, synthetic construct
  source 1..63: mol_type = other DNA
gctgggagcaccggcctggggtacttcattatgcaatcctggtcaatggtcaattacccacgg

SEQ ID NO: 49130 - DNA, 60 bp, synthetic construct
  source 1..60: mol_type = other DNA
aatgccgtggagaccagctccctcatcgctaactttttccccaagaacctggtcgatcct

SEQ ID NO: 49131 - DNA, 54 bp, synthetic construct
  source 1..54: mol_type = other DNA
cccatccctagcgagattatctacgacaagatcaacttcctgaatggaggaatg

SEQ ID NO: 49132 - DNA, 57 bp, synthetic construct
  source 1..57: mol_type = other DNA
aaccccatttcaagccaagtaatttacgacaagattatcttcctgaatggaggaatc

SEQ ID NO: 49133 - DNA, 57 bp, synthetic construct
  source 1..57: mol_type = other DNA
aatcccatttcatcacaagtaatctacgacaagatcatcttcctgaacggaggaatg

SEQ ID NO: 49134 - DNA, 30 bp, synthetic construct
  source 1..30: mol_type = other DNA
ttctacccaacaagtttacaattctcccgc

SEQ ID NO: 49135 - DNA, 99 bp, synthetic construct
  source 1..99: mol_type = other DNA
gtggacagtaacatcaacaatattcacaccgccgtctggtacatcatcgtctctatgacaagcacaggctacggcgacattgtgcctgctactacttct

SEQ ID NO: 49136 - DNA, 57 bp, synthetic construct
  source 1..57: mol_type = other DNA
aatcccatccctagcgagctgatttacgaccacatcatcttcctgaacggaggactg

SEQ ID NO: 49137 - DNA, 78 bp, synthetic construct
  source 1..78: mol_type = other DNA
ctcgagaacaattacgacgacactgccattgaggtcctgcccctttgcgacctagtcataacggatactagcgacata

SEQ ID NO: 49138 - DNA, 186 bp, synthetic construct
  source 1..186: mol_type = other DNA
actattatcaactggaccatcaccgtgacaaacaatgggcccgacgacgccctggatgtggtcatgcacaatatcctccctgaagagctggaatttatttcgtatctcgcatcgcaaggcattctgcggaacggcctgaacgagagcgttgagaacatcagcaacgactctaacgaatccggagaa

SEQ ID NO: 49139 - DNA, 57 bp, synthetic construct
  source 1..57: mol_type = other DNA
aaccccatgtcctcccaatttatatacgacaatatcattattctgaatggcggaatc

SEQ ID NO: 49140 - DNA, 51 bp, synthetic construct
  source 1..51: mol_type = other DNA
acggtcagcatgtcttatctgaagcacaaactcgtgtactaccaatacgag

SEQ ID NO: 49141 - DNA, 42 bp, synthetic construct
  source 1..42: mol_type = other DNA
tggttctccaagcactacatcccaatattttctcgcaatccc

SEQ ID NO: 49142 - DNA, 69 bp, synthetic construct
  source 1..69: mol_type = other DNA
tctacactcggcaccacacctatatcgtccataagttacagcctgaccctgatcaccaacatcaatatc

SEQ ID NO: 49143 - DNA, 96 bp, synthetic construct
  source 1..96: mol_type = other DNA
cctttctttaagtctagcgtggagcccgtcatttccactatgcggaagcagatcaccagcggccagatcacactcacctacctgtccatcttctcc

SEQ ID NO: 49144 - DNA, 30 bp, synthetic construct
  source 1..30: mol_type = other DNA
tactttctgacccgaggctccttcatgcag

SEQ ID NO: 49145 - DNA, 42 bp, synthetic construct
  source 1..42: mol_type = other DNA
aaggacctggcaaactatctgatccaaacatatcacatcaag

SEQ ID NO: 49146 - DNA, 57 bp, synthetic construct
  source 1..57: mol_type = other DNA
aatccgatacctagtgaactcatctacgacaagatcatcttcctgaacggaggactg

SEQ ID NO: 49147 - DNA, 51 bp, synthetic construct
  source 1..51: mol_type = other DNA
ctgctcttcaacatgtttgagcaatatgtctacatcctgatcgcaagtatt

SEQ ID NO: 49148 - DNA, 99 bp, synthetic construct
  source 1..99: mol_type = other DNA
tttgataccaacatcacggattttgccaccgctttctggtacattattgtttcaatgaccggcactggatacggcgatgtcgtgcctggaaccttgacg

SEQ ID NO: 49149 - DNA, 42 bp, synthetic construct
  source 1..42: mol_type = other DNA
ctcgcaagccagggcctgttcgctgggcgcacagtggatatc

SEQ ID NO: 49150 - DNA, 60 bp, synthetic construct
  source 1..60: mol_type = other DNA
gacatgatccatataagctccccggtgctggtcaacgagagcacaaccactatcttctct

SEQ ID NO: 49151 - DNA, 39 bp, synthetic construct
  source 1..39: mol_type = other DNA
gtggccggccagcaggctaataacctgttttcgtctggg

SEQ ID NO: 49152 - DNA, 30 bp, synthetic construct
  source 1..30: mol_type = other DNA
cccttcctgagctccacactctatacctac

SEQ ID NO: 49153 - DNA, 96 bp, synthetic construct
  source 1..96: mol_type = other DNA
gaccctagcatcgtttccctgttcgatgcggtctggtttatcttccaaaccatttcaaccgttggctacggcgacgtgattccaacctctccaatc

SEQ ID NO: 49154 - DNA, 30 bp, synthetic construct
  source 1..30: mol_type = other DNA
atgaacttcagcatcgctcccgagaatccc

SEQ ID NO: 49155 - DNA, 51 bp, synthetic construct
  source 1..51: mol_type = other DNA
cttctctttaatctgttcgagcaatatgtctatattctgatctcctctatc

SEQ ID NO: 49156 - DNA, 57 bp, synthetic construct
  source 1..57: mol_type = other DNA
aatcctatcccctctgagctcatctacgacaagatcatcttcctgaacggaggaatg

SEQ ID NO: 49157 - DNA, 48 bp, synthetic construct
  source 1..48: mol_type = other DNA
ctggctgccacctatacaagcaagggtctgggcggatacgcattcggc

SEQ ID NO: 49158 - DNA, 33 bp, synthetic construct
  source 1..33: mol_type = other DNA
tccgtggactttttcaacttatcacacacacag

SEQ ID NO: 49159 - DNA, 78 bp, synthetic construct
  source 1..78: mol_type = other DNA
accaacatcgtggacggctacgtcaactgggtggagctgttcgggattgatgacctcgaagtcatagcccaaatcaaa

SEQ ID NO: 49160 - DNA, 60 bp, synthetic construct
  source 1..60: mol_type = other DNA
ctgagcaatggcgtgtcccatacacaaaaccccgtgatgtataacgttacctacgtgacc

SEQ ID NO: 49161 - DNA, 42 bp, synthetic construct
  source 1..42: mol_type = other DNA
ttgcaggaactgaacatccccatttccctcctgttcttgctg

SEQ ID NO: 49162 - DNA, 57 bp, synthetic construct
  source 1..57: mol_type = other DNA
aatcccatccctagcgagatcatctacgaaaagattattttcctcaacggaggtctg

SEQ ID NO: 49163 - DNA, 60 bp, synthetic construct
  source 1..60: mol_type = other DNA
gtgttacaagtcccgattagcgccaacgtcatcctggagaccttcaagaatcctacactg

SEQ ID NO: 49164 - DNA, 63 bp, synthetic construct
  source 1..63: mol_type = other DNA
gagagcatcctgggcataaatatcgtgtctaccatttctaacaccgctgggaatttggatctg

SEQ ID NO: 49165 - DNA, 60 bp, synthetic construct
  source 1..60: mol_type = other DNA
ctgaccgccatgggcgtgccagtgcccatcaaccgtagccaatcgtccgacaatcctgtg

SEQ ID NO: 49166 - DNA, 84 bp, synthetic construct
  source 1..84: mol_type = other DNA
atccccttatacgggctcagtgccgccgccgtcgaccagttcgctgctctccgggccgtgatggctggaaactttgggagtatc

SEQ ID NO: 49167 - DNA, 33 bp, synthetic construct
  source 1..33: mol_type = other DNA
accggcaatctggtgcccatcgacaacagctac

SEQ ID NO: 49168 - DNA, 48 bp, synthetic construct
  source 1..48: mol_type = other DNA
atccccagcgagatcatctacgagaagattattctgctcaacggcggc

SEQ ID NO: 49169 - DNA, 54 bp, synthetic construct
  source 1..54: mol_type = other DNA
gattcttttgcctctgcatcgacggtactctccggagtggacgctactgccgca

SEQ ID NO: 49170 - DNA, 48 bp, synthetic construct
  source 1..48: mol_type = other DNA
tttcttaccgctgccggtactactggcgcaagctcctttgctcttgac

SEQ ID NO: 49171 - DNA, 54 bp, synthetic construct
  source 1..54: mol_type = other DNA
attagcatcctgggcgccctcgggactaccggatggacagagtttgcgttttcc

SEQ ID NO: 49172 - DNA, 60 bp, synthetic construct
  source 1..60: mol_type = other DNA
ttactcagctctgctgcgagcttttcaagtcaaggctttgccggcttcgccttttctgga

SEQ ID NO: 49173 - DNA, 51 bp, synthetic construct
  source 1..51: mol_type = other DNA
ttcgctacctcaatggccactaagggtttctcatcctttgcccttggcgga

SEQ ID NO: 49174 - DNA, 36 bp, synthetic construct
  source 1..36: mol_type = other DNA
tacgagctggtgctgggcttcaccatcctcgacaac

SEQ ID NO: 49175 - DNA, 42 bp, synthetic construct
  source 1..42: mol_type = other DNA
cccattctcttcaagctgtttgaacaatacataagcatgttt

SEQ ID NO: 49176 - DNA, 39 bp, synthetic construct
  source 1..39: mol_type = other DNA
gcagttggggcaagcttcgattccgtggctactgttgga

SEQ ID NO: 49177 - DNA, 75 bp, synthetic construct
  source 1..75: mol_type = other DNA
cgatacggtggagaaattttctctgagcatttcgcccaagatataatatcctacctggagtcgcatcgctccgag

SEQ ID NO: 49178 - DNA, 63 bp, synthetic construct
  source 1..63: mol_type = other DNA
gcaggcgcaagcatcggctccgtgatcggaccccagttcaccacacggtactctgccgaccag

SEQ ID NO: 49179 - DNA, 39 bp, synthetic construct
  source 1..39: mol_type = other DNA
ctggcaatgtttagtaaaggcgccctctcctttaccttc

SEQ ID NO: 49180 - DNA, 60 bp, synthetic construct
  source 1..60: mol_type = other DNA
ctgttcacaagcgccgctagtttctccacacaaggcttcgctggtttcgccttgtctgga

SEQ ID NO: 49181 - DNA, 60 bp, synthetic construct
  source 1..60: mol_type = other DNA
attacaatcgccacgtctttttctacggtcgggtttagtagcttcgctttgggaggagtt

SEQ ID NO: 49182 - DNA, 33 bp, synthetic construct
  source 1..33: mol_type = other DNA
gccatcggcgccggactgaaccaactggtggca

SEQ ID NO: 49183 - DNA, 54 bp, synthetic construct
  source 1..54: mol_type = other DNA
ttcgccgtggcttttaccaccaagggggtcggtggagctgcattggctggactg

SEQ ID NO: 49184 - DNA, 39 bp, synthetic construct
  source 1..39: mol_type = other DNA
gtgatcggggcctctatggattctgccgctgctgttggt

SEQ ID NO: 49185 - DNA, 93 bp, synthetic construct
  source 1..93: mol_type = other DNA
gatacccaaattaacgactttgccactgcattctggtacgtcatagtttctatcaccgccactggctatggtgacgttgtgccaactaccctg

SEQ ID NO: 49186 - DNA, 48 bp, synthetic construct
  source 1..48: mol_type = other DNA
gccggcgcatacaccagcaagggcatcgctggctttgcctttggaggc

SEQ ID NO: 49187 - DNA, 57 bp, synthetic construct
  source 1..57: mol_type = other DNA
atctccaccgccgcaagtttcagtagcaaaggcctggccggattcgctttttcggga

SEQ ID NO: 49188 - DNA, 51 bp, synthetic construct
  source 1..51: mol_type = other DNA
ttcgtaactgctgcgtctacgaagggactgtcttcctacgccctgggcggt

SEQ ID NO: 49189 - DNA, 93 bp, synthetic construct
  source 1..93: mol_type = other DNA
ggccgggtcgcagttggctccgacaacctgtgcccctattgtctcgaggaaggccttgacgcccggaccctgaaggggagcacagagtacatc

SEQ ID NO: 49190 - DNA, 51 bp, synthetic construct
  source 1..51: mol_type = other DNA
atcgtggccgctttttcttctaggggtctggcgggttacgctttctctggc

SEQ ID NO: 49191 - DNA, 54 bp, synthetic construct
  source 1..54: mol_type = other DNA
atagccaccgcaatgacctccacgggcgcggctgggttcgctttttctggcggt

SEQ ID NO: 49192 - DNA, 51 bp, synthetic construct
  source 1..51: mol_type = other DNA
ttcgccactgctatcaccacaaagggtgctagtagcttcgcccttggggga

SEQ ID NO: 49193 - DNA, 60 bp, synthetic construct
  source 1..60: mol_type = other DNA
ttaatatcgtccgctgcatccttttcatcaaagggaatggccggctttgccttctctggc

SEQ ID NO: 49194 - DNA, 39 bp, synthetic construct
  source 1..39: mol_type = other DNA
gctgtcggtgcatccttcgatagcgcggcaaccgtcggt

SEQ ID NO: 49195 - DNA, 45 bp, synthetic construct
  source 1..45: mol_type = other DNA
atcggagctggcgaggcaaccggactgctgtctggaggtcttggg

SEQ ID NO: 49196 - DNA, 51 bp, synthetic construct
  source 1..51: mol_type = other DNA
gtcgggatgctagccgccgtaactggacagaacgcggttgccgctggtgga

SEQ ID NO: 49197 - DNA, 42 bp, synthetic construct
  source 1..42: mol_type = other DNA
atgattccgcaagcgtctaacaaccatatcattgccgctgga

SEQ ID NO: 49198 - DNA, 42 bp, synthetic construct
  source 1..42: mol_type = other DNA
aaccataacacattcaagggcacttacatcaataacaccgtc

SEQ ID NO: 49199 - DNA, 51 bp, synthetic construct
  source 1..51: mol_type = other DNA
gttgcggcggcagtctccactaagggactgggtggcttcgcattcttctca

SEQ ID NO: 49200 - DNA, 33 bp, synthetic construct
  source 1..33: mol_type = other DNA
ctctactcctacaatctggacttcaacaacagc

SEQ ID NO: 49201 - DNA, 30 bp, synthetic construct
  source 1..30: mol_type = other DNA
ggcctgattcctcctctcaagatcaacctg

SEQ ID NO: 49202 - DNA, 36 bp, synthetic construct
  source 1..36: mol_type = other DNA
aataagctgctgttttacctgaactttctttccctg

SEQ ID NO: 49203 - DNA, 48 bp, synthetic construct
  source 1..48: mol_type = other DNA
gggctggtggccggacaggagaccaaccagctcggttttgctgggtcc

SEQ ID NO: 49204 - DNA, 30 bp, synthetic construct
  source 1..30: mol_type = other DNA
ttttaccccgtggacctgttcttcaagaac

SEQ ID NO: 49205 - DNA, 99 bp, synthetic construct
  source 1..99: mol_type = other DNA
gagaatgatattaacgacatctctaccgccctgtggttcaccttcgtgtcaatgacttccaccggttatggcgacatcgtcccctccacgtttagcact

SEQ ID NO: 49206 - DNA, 39 bp, synthetic construct
  source 1..39: mol_type = other DNA
accagcgcgtcgaacttaggctcaagtcttgagatcatt

SEQ ID NO: 49207 - DNA, 45 bp, synthetic construct
  source 1..45: mol_type = other DNA
gccgccagcttctcatccaagggctgggcaggtttcgccttctcc

SEQ ID NO: 49208 - DNA, 48 bp, synthetic construct
  source 1..48: mol_type = other DNA
accgccagcatcacttcccaaggctgggcaggctttgcctttagcggc

SEQ ID NO: 49209 - DNA, 135 bp, synthetic construct
  source 1..135: mol_type = other DNA
atgaacacaatcattcacgcttctgacactatgttcaattcgtcatccaacgggctgctgtccttcttctccggcaacgccacccaaggcgctaatgatgccctcaattccgcccttaccattgtttcgcaaagc

SEQ ID NO: 49210 - DNA, 51 bp, synthetic construct
  source 1..51: mol_type = other DNA
ccaggactggctgctctggggcaaggcgacgtcaccgcactcgccactgcc

SEQ ID NO: 49211 - DNA, 60 bp, synthetic construct
  source 1..60: mol_type = other DNA
ctgctgggcatgctcggggcagtcggtagtaccggatggtccagcttcgcttttagtggg

SEQ ID NO: 49212 - DNA, 57 bp, synthetic construct
  source 1..57: mol_type = other DNA
aatcccttccctagcgagctcatctacgagaagattctgtttctgaacggtggaatg

SEQ ID NO: 49213 - DNA, 39 bp, synthetic construct
  source 1..39: mol_type = other DNA
gggaccatcggagccggcctgaataacctcttcgctggg

SEQ ID NO: 49214 - DNA, 48 bp, synthetic construct
  source 1..48: mol_type = other DNA
tttatcggagccgctagcaccaagggcctctcctctttcgctttgggc

SEQ ID NO: 49215 - DNA, 57 bp, synthetic construct
  source 1..57: mol_type = other DNA
actggcggaaccaactccccaaccgacaattctgtgaatgggtctgcgtcatctgtt

SEQ ID NO: 49216 - DNA, 48 bp, synthetic construct
  source 1..48: mol_type = other DNA
gctgcctcctttagcaccaagggactggccgggttcgcattctctggc

SEQ ID NO: 49217 - DNA, 54 bp, synthetic construct
  source 1..54: mol_type = other DNA
actttcctgacggccgcgggtaccaccggaatcagcacgtttgctttggatgga

SEQ ID NO: 49218 - DNA, 63 bp, synthetic construct
  source 1..63: mol_type = other DNA
atcgggaacccccggagcggcattgccgtgtacatgtcctatctgatctctgagatgacactg

SEQ ID NO: 49219 - DNA, 45 bp, synthetic construct
  source 1..45: mol_type = other DNA
gccgcaagcttctccaccaaggggttcgccggcttcgcttttagt

SEQ ID NO: 49220 - DNA, 54 bp, synthetic construct
  source 1..54: mol_type = other DNA
gtgaccacgattgctgccttccgcacaaagggactcgcatccatcactcttagc

SEQ ID NO: 49221 - DNA, 39 bp, synthetic construct
  source 1..39: mol_type = other DNA
gcagtcggggccagcttcgattccgtggctaccgttggc

SEQ ID NO: 49222 - DNA, 45 bp, synthetic construct
  source 1..45: mol_type = other DNA
ttcggcgctatcggagccggcctggacaaaatggcaggtagtctt

SEQ ID NO: 49223 - DNA, 51 bp, synthetic construct
  source 1..51: mol_type = other DNA
tccgacgtggccaagcagagcttcaaaactatagttgcaaacccatcaccc

SEQ ID NO: 49224 - DNA, 39 bp, synthetic construct
  source 1..39: mol_type = other DNA
gacatcggaatgagcttcctgaacccttacgttgggggc

SEQ ID NO: 49225 - DNA, 57 bp, synthetic construct
  source 1..57: mol_type = other DNA
accggcggcatcgggaacacagcgacagatgcggcaatgaagggcagcccaactgtc

SEQ ID NO: 49226 - DNA, 42 bp, synthetic construct
  source 1..42: mol_type = other DNA
gggctgatcggaacgggctttaggcaagtactgggctctctc

SEQ ID NO: 49227 - DNA, 36 bp, synthetic construct
  source 1..36: mol_type = other DNA
atgaaaatcaccaaggcagcgcaactcgtcaagctg

SEQ ID NO: 49228 - DNA, 30 bp, synthetic construct
  source 1..30: mol_type = other DNA
gacaaggtgcccaaggaccagttctacgat

SEQ ID NO: 49229 - DNA, 42 bp, synthetic construct
  source 1..42: mol_type = other DNA
tcggtcggcactgggatcggcatcaactctagtagtcttggt

SEQ ID NO: 49230 - DNA, 42 bp, synthetic construct
  source 1..42: mol_type = other DNA
gccaactcggcggaccgcctggggggagccctgggtgctgga

SEQ ID NO: 49231 - DNA, 60 bp, synthetic construct
  source 1..60: mol_type = other DNA
ggcctgcccgagttcctgatcaccgattatagcgacttcatttcctacatcttctctctc

SEQ ID NO: 49232 - DNA, 33 bp, synthetic construct
  source 1..33: mol_type = other DNA
gcaatggttggcgggtaccagtctgttggagtc

SEQ ID NO: 49233 - DNA, 60 bp, synthetic construct
  source 1..60: mol_type = other DNA
atcgctcctctgttcgcctccggcgaagtctcgtcgacactcattccccaactcgctacc

SEQ ID NO: 49234 - DNA, 30 bp, synthetic construct
  source 1..30: mol_type = other DNA
atctttggcgacattttcgggactgaaagc

SEQ ID NO: 49235 - DNA, 45 bp, synthetic construct
  source 1..45: mol_type = other DNA
ttcggagcgatcggatcaggcattaaccaggtggctggatcactt

SEQ ID NO: 49236 - DNA, 99 bp, synthetic construct
  source 1..99: mol_type = other DNA
ctggaccccaacattaacgacatcccaactgccatctggttcattgtggtctccatgaccagcaccggctacggcgacatcgtgcctgtgacacattct

SEQ ID NO: 49237 - DNA, 33 bp, synthetic construct
  source 1..33: mol_type = other DNA
cagctgatcaccgccgtgacaatcatcactaac

SEQ ID NO: 49238 - DNA, 45 bp, synthetic construct
  source 1..45: mol_type = other DNA
atcctgttcgagatcttcggacactacatcctgagcaacggcgga

SEQ ID NO: 49239 - DNA, 45 bp, synthetic construct
  source 1..45: mol_type = other DNA
atggcaagccaagtgtcaggaaataactacgtggctgttggggcg

SEQ ID NO: 49240 - DNA, 42 bp, synthetic construct
  source 1..42: mol_type = other DNA
atggcaacacaggtttccggcaataacgtagtggccgcgggc

SEQ ID NO: 49241 - DNA, 60 bp, synthetic construct
  source 1..60: mol_type = other DNA
acctacttcgactactccctcgcctttggactgagcgagggccgcaatgctcttaggtct

SEQ ID NO: 49242 - DNA, 36 bp, synthetic construct
  source 1..36: mol_type = other DNA
atcatgtttttcaacggcgagttgagtactggtaga

SEQ ID NO: 49243 - DNA, 141 bp, synthetic construct
  source 1..141: mol_type = other DNA
atcgagtacctgccttctcgttccgttgttacaccggtaccagtccccctgacgattacggctgcacccggagctggttctcccgatgccttttccaagaccgtgccattgcgcgtcaaattgccttgtgcctgtgctggt

SEQ ID NO: 49244 - DNA, 33 bp, synthetic construct
  source 1..33: mol_type = other DNA
cagctgatcaacgccgtgaccatcatcgacaat

SEQ ID NO: 49245 - DNA, 48 bp, synthetic construct
  source 1..48: mol_type = other DNA
cccgtgctgtttgagatcttcggctattacgtacttctcggaagagtc

SEQ ID NO: 49246 - DNA, 39 bp, synthetic construct
  source 1..39: mol_type = other DNA
ctcctgagcggcaaggccatcaccaacgtgttcgctagc

SEQ ID NO: 49247 - DNA, 57 bp, synthetic construct
  source 1..57: mol_type = other DNA
atcaacatcattggagctctgagcacaaccggctggtcgtctgtagcattttctggc

SEQ ID NO: 49248 - DNA, 51 bp, synthetic construct
  source 1..51: mol_type = other DNA
atgccagggatgctcgagaaccagacccttgccaacttcctgcacgtgaag

SEQ ID NO: 49249 - DNA, 36 bp, synthetic construct
  source 1..36: mol_type = other DNA
ctgctggccgcccaaggaaataatgtgctcatggcc

SEQ ID NO: 49250 - DNA, 33 bp, synthetic construct
  source 1..33: mol_type = other DNA
cagctggtgacaagcgtcaccatcctcgacaac

SEQ ID NO: 49251 - DNA, 48 bp, synthetic construct
  source 1..48: mol_type = other DNA
ccctttctgttcaacatcttcgagaaatatgtccttcacgtgcattcc

SEQ ID NO: 49252 - DNA, 39 bp, synthetic construct
  source 1..39: mol_type = other DNA
tatatatctagtatacagggcttctttacctatactcag

SEQ ID NO: 49253 - DNA, 36 bp, synthetic construct
  source 1..36: mol_type = other DNA
acagtatcccccattatcggactgagtgcttctacc

SEQ ID NO: 49254 - DNA, 57 bp, synthetic construct
  source 1..57: mol_type = other DNA
cctaatatttcttctgtgttgcaaaaccaactggccccaatgtctgctccaagtctg

SEQ ID NO: 49255 - DNA, 39 bp, synthetic construct
  source 1..39: mol_type = other DNA
ctcgtgaacggcggcctgagcattgccgctatcaccatg

SEQ ID NO: 49256 - DNA, 66 bp, synthetic construct
  source 1..66: mol_type = other DNA
gccggagttgatatcgcctccacaaccggcgcactgggtagcgtcggagatgtggctggaattggg

SEQ ID NO: 49257 - DNA, 30 bp, synthetic construct
  source 1..30: mol_type = other DNA
aacaccgtagttggcaacgcagctccttgg

SEQ ID NO: 49258 - DNA, 33 bp, synthetic construct
  source 1..33: mol_type = other DNA
gcgaccatcacactgatggagacccttggaggc

SEQ ID NO: 49259 - DNA, 57 bp, synthetic construct
  source 1..57: mol_type = other DNA
gagacactcaagatctctgccgagtcccctattgagcccatctcgacgactctcctg

SEQ ID NO: 49260 - DNA, 78 bp, synthetic construct
  source 1..78: mol_type = other DNA
atgaactttatccccattgagctgacaaagaatttcgccgtgactcggaccgacgtatttacatcctatgtcgatgtc

SEQ ID NO: 49261 - DNA, 36 bp, synthetic construct
  source 1..36: mol_type = other DNA
ttctacgtgaaacctctgacactgaccggaaagcag

SEQ ID NO: 49262 - DNA, 33 bp, synthetic construct
  source 1..33: mol_type = other DNA
atcctgggcggactctatgggtcaggttcctct

SEQ ID NO: 49263 - DNA, 48 bp, synthetic construct
  source 1..48: mol_type = other DNA
atgttcggcgctatcggagcaggcctggacaagatggctggatctctg

SEQ ID NO: 49264 - DNA, 33 bp, synthetic construct
  source 1..33: mol_type = other DNA
agcgagcagctcgtgcaagctatctactcctat

SEQ ID NO: 49265 - DNA, 36 bp, synthetic construct
  source 1..36: mol_type = other DNA
atcgtcgcaccgaccattggcgtgacatctctggac

SEQ ID NO: 49266 - DNA, 57 bp, synthetic construct
  source 1..57: mol_type = other DNA
cccaacattgccggcgtgctctccaagacccagtctcctatcacactgggaagtcca

SEQ ID NO: 49267 - DNA, 36 bp, synthetic construct
  source 1..36: mol_type = other DNA
atggctagcgccatggccaacaatgtgttcgccgca

SEQ ID NO: 49268 - DNA, 156 bp, synthetic construct
  source 1..156: mol_type = other DNA
acacacaccatcctgcacatcgacgagtattggacttactccttggttaacctcaccttcatgcaagggatgacagtggccgtccacgatgtccatcccatcctctactacctgattctttacctgttcaagcctgtggctggcagcgacaacttc

SEQ ID NO: 49269 - DNA, 48 bp, synthetic construct
  source 1..48: mol_type = other DNA
tgctggttcacaaggtttcggggcaaagttatgtcatttacacgtcaa

SEQ ID NO: 49270 - DNA, 33 bp, synthetic construct
  source 1..33: mol_type = other DNA
gctgaccagttaattcaagcaatttacggctat

SEQ ID NO: 49271 - DNA, 36 bp, synthetic construct
  source 1..36: mol_type = other DNA
atcgtggcacctactattggtgtctcaagcttaaac

SEQ ID NO: 49272 - DNA, 57 bp, synthetic construct
  source 1..57: mol_type = other DNA
ccaaacattgccggcgctctgacaaagacggtttcgccgatatctatctcctctccc

SEQ ID NO: 49273 - DNA, 69 bp, synthetic construct
  source 1..69: mol_type = other DNA
ggcacaaccaccattgacttcatcctcgacttcctggggattaataacatcatcgccaacgagtcagga

SEQ ID NO: 49274 - DNA, 36 bp, synthetic construct
  source 1..36: mol_type = other DNA
gagctgaaccccgtctccttaacattccggaatgaa

SEQ ID NO: 49275 - DNA, 99 bp, synthetic construct
  source 1..99: mol_type = other DNA
atcgaccctaacgtcaatgatatccacaccgccctgtggtacattatcgtgacaattacgagcacaggttatggggacatcgtgccctctactcttagc

SEQ ID NO: 49276 - DNA, 33 bp, synthetic construct
  source 1..33: mol_type = other DNA
gccgaccagctagtccaagcaatatacagctat

SEQ ID NO: 49277 - DNA, 36 bp, synthetic construct
  source 1..36: mol_type = other DNA
attgtggctccaactatcggcgtctctagcctgaac

SEQ ID NO: 49278 - DNA, 57 bp, synthetic construct
  source 1..57: mol_type = other DNA
cccaacatcgctggcgccctgagcaagacaacctccccaattaccctcggatctcct

SEQ ID NO: 49279 - DNA, 54 bp, synthetic construct
  source 1..54: mol_type = other DNA
cggctgaccggcagcattgccgggcactccgagatgaacacaatcccttctctt

SEQ ID NO: 49280 - DNA, 33 bp, synthetic construct
  source 1..33: mol_type = other DNA
gcctttcggcccgtttcgcccacctttcgaaat

SEQ ID NO: 49281 - DNA, 99 bp, synthetic construct
  source 1..99: mol_type = other DNA
attgatcctaatatcaacgacatcaacacctctctgtggtacaccattgtaaccgtgacaagcaccggctacggggatgtggtccctagctccgtgtac

SEQ ID NO: 49282 - DNA, 48 bp, synthetic construct
  source 1..48: mol_type = other DNA
ggcgccgccgctgcttcggccgcggcaagcaacctggccgcggcaatg

SEQ ID NO: 49283 - DNA, 30 bp, synthetic construct
  source 1..30: mol_type = other DNA
cagctcgtgaccaacttaacggatctgcag

SEQ ID NO: 49284 - DNA, 42 bp, synthetic construct
  source 1..42: mol_type = other DNA
gtgctgtataacttgttcgaacaatatttgttcctgaagctg

SEQ ID NO: 49285 - DNA, 33 bp, synthetic construct
  source 1..33: mol_type = other DNA
gctgagcagttgatacaagcgatatacgggtat

SEQ ID NO: 49286 - DNA, 36 bp, synthetic construct
  source 1..36: mol_type = other DNA
atcgtggctccaaccattggcgtttcctcactgaac

SEQ ID NO: 49287 - DNA, 57 bp, synthetic construct
  source 1..57: mol_type = other DNA
cccaacattgccggcgctctgagcaagacaaccactccaatcaccatcggttctccc

SEQ ID NO: 49288 - DNA, 33 bp, synthetic construct
  source 1..33: mol_type = other DNA
gccgagcagttgacacaagcgatctactcgtat

SEQ ID NO: 49289 - DNA, 30 bp, synthetic construct
  source 1..30: mol_type = other DNA
atcgtggctccaactattggagtcggcgcg

SEQ ID NO: 49290 - DNA, 57 bp, synthetic construct
  source 1..57: mol_type = other DNA
cccaacattgctgggtccctcacaaaggacttcaaggatctcaccatgaacagtcca

SEQ ID NO: 49291 - DNA, 33 bp, synthetic construct
  source 1..33: mol_type = other DNA
gccgagcagctgacccaagcaatatatagctac

SEQ ID NO: 49292 - DNA, 30 bp, synthetic construct
  source 1..30: mol_type = other DNA
attgtggctcctaccataggtgtcggagca

SEQ ID NO: 49293 - DNA, 57 bp, synthetic construct
  source 1..57: mol_type = other DNA
cccaacatagctggttctctatccaaggacttcggcgacctcgctatgacctctccc

SEQ ID NO: 49294 - DNA, 45 bp, synthetic construct
  source 1..45: mol_type = other DNA
ccctttttgttttcgatctttgagaacttcctgcggttctacatg

SEQ ID NO: 49295 - DNA, 39 bp, synthetic construct
  source 1..39: mol_type = other DNA
atggttgtttccataaacggcggaaaggtggtcgaaact

SEQ ID NO: 49296 - DNA, 33 bp, synthetic construct
  source 1..33: mol_type = other DNA
gcatcaggcgtggccgtgaataacctttgggct

SEQ ID NO: 49297 - DNA, 42 bp, synthetic construct
  source 1..42: mol_type = other DNA
ttcggcgcgatcggaagcggtctaaatcaggttgtcgggagc

SEQ ID NO: 49298 - DNA, 99 bp, synthetic construct
  source 1..99: mol_type = other DNA
ctggaccccggcatcaacgacattcctactgccatctggttcattgtggtctccatgacctcgaccggatatggggatgtagtgccagtaactcactcc

SEQ ID NO: 49299 - DNA, 33 bp, synthetic construct
  source 1..33: mol_type = other DNA
gccgaccagctgatacaagcaatttacggttat

SEQ ID NO: 49300 - DNA, 36 bp, synthetic construct
  source 1..36: mol_type = other DNA
atcgtggctccaaccattggagtttcctcacttaac

SEQ ID NO: 49301 - DNA, 57 bp, synthetic construct
  source 1..57: mol_type = other DNA
cctaacattgccggcgctatgtccaagaccatgtctcctatatctataggatctccc

SEQ ID NO: 49302 - DNA, 33 bp, synthetic construct
  source 1..33: mol_type = other DNA
accgggttccagtttagctacgaaatatttagc

SEQ ID NO: 49303 - DNA, 51 bp, synthetic construct
  source 1..51: mol_type = other DNA
tctaccgacttcgtgaccgcttattttaaattctacctcggcgatctgtgg

SEQ ID NO: 49304 - DNA, 36 bp, synthetic construct
  source 1..36: mol_type = other DNA
ttcgggctcctgcccacattccaatatacccttggc

SEQ ID NO: 49305 - DNA, 96 bp, synthetic construct
  source 1..96: mol_type = other DNA
gacgccggcatcactgactttggaaccgctatttggtacaccttcgcctccatgacctctactggctatggggatgtggtccctactaccgttagt

SEQ ID NO: 49306 - DNA, 33 bp, synthetic construct
  source 1..33: mol_type = other DNA
gctgaccagttaatacaagccatatactcatat

SEQ ID NO: 49307 - DNA, 36 bp, synthetic construct
  source 1..36: mol_type = other DNA
attgtggctccgactattggagtttcgagcctgaac

SEQ ID NO: 49308 - DNA, 57 bp, synthetic construct
  source 1..57: mol_type = other DNA
cccaacatcgccggggctctgagcaagactaccacacctgtgaccttgggaagtcca

SEQ ID NO: 49309 - DNA, 33 bp, synthetic construct
  source 1..33: mol_type = other DNA
atggccggcgctctggctaacaatgccctcgca

SEQ ID NO: 49310 - DNA, 33 bp, synthetic construct
  source 1..33: mol_type = other DNA
gccctgcacccggttagcagcactttccgcttt

SEQ ID NO: 49311 - DNA, 99 bp, synthetic construct
  source 1..99: mol_type = other DNA
ctggagcctaacatcaccgacatcaacactgccttctggtacataattgtgtctatcacaaacacgggatatggggacattgtaccgtcaagcctttct

SEQ ID NO: 49312 - DNA, 33 bp, synthetic construct
  source 1..33: mol_type = other DNA
gccgaccagctggttcaagctatttactcctat

SEQ ID NO: 49313 - DNA, 36 bp, synthetic construct
  source 1..36: mol_type = other DNA
attgtcgcacctactatcggcgtgtcctcacttgac

SEQ ID NO: 49314 - DNA, 57 bp, synthetic construct
  source 1..57: mol_type = other DNA
cccaacattgctggcgccctgaccaagacaactagcccaatcaccatcggttctcct

SEQ ID NO: 49315 - DNA, 30 bp, synthetic construct
  source 1..30: mol_type = other DNA
ctgcggcccgtgagcagcaccttccgggac

SEQ ID NO: 49316 - DNA, 99 bp, synthetic construct
  source 1..99: mol_type = other DNA
gtcgaccctagtattcacgacatccacaccgccctgtggtacgtgatcgtcagcatcacatccaccggctatggggatgtggtgccctctactctttcc

SEQ ID NO: 49317 - DNA, 36 bp, synthetic construct
  source 1..36: mol_type = other DNA
gcttccggggtggccgtcaataacctatgggcatgg

SEQ ID NO: 49318 - DNA, 33 bp, synthetic construct
  source 1..33: mol_type = other DNA
tctgaacaactaatccaagccatatactcctac

SEQ ID NO: 49319 - DNA, 36 bp, synthetic construct
  source 1..36: mol_type = other DNA
attgtcgccccaacaatcggagtgacctctctggac

SEQ ID NO: 49320 - DNA, 60 bp, synthetic construct
  source 1..60: mol_type = other DNA
cccaacatcgccggcgtgctgagcaagacacagtccccaattaccatgggatctcctcag

SEQ ID NO: 49321 - DNA, 30 bp, synthetic construct
  source 1..30: mol_type = other DNA
gctgctggcgctgcggccaataatctgttc

SEQ ID NO: 49322 - DNA, 33 bp, synthetic construct
  source 1..33: mol_type = other DNA
gctgagcagttgacgcaagctatatatagctat

SEQ ID NO: 49323 - DNA, 30 bp, synthetic construct
  source 1..30: mol_type = other DNA
attgtggctcctaccatcggagtcggcgca

SEQ ID NO: 49324 - DNA, 57 bp, synthetic construct
  source 1..57: mol_type = other DNA
cccaacatagcgggtagtctctccaaggacttcagcgatctcaccatgagttctcca

SEQ ID NO: 49325 - DNA, 33 bp, synthetic construct
  source 1..33: mol_type = other DNA
agcgagcagttggtacaagcaatctattcctac

SEQ ID NO: 49326 - DNA, 36 bp, synthetic construct
  source 1..36: mol_type = other DNA
atcgttgcccctaccattggagtctcttctcttgac

SEQ ID NO: 49327 - DNA, 57 bp, synthetic construct
  source 1..57: mol_type = other DNA
cctaacattgccggcgttctggctaagactaccagccccatcacaatgggatctccc

SEQ ID NO: 49328 - DNA, 33 bp, synthetic construct
  source 1..33: mol_type = other DNA
gccgaggaactcacgcaagttatttacacctat

SEQ ID NO: 49329 - DNA, 33 bp, synthetic construct
  source 1..33: mol_type = other DNA
atcgtggctcctacaattggcatcaccgctttc

SEQ ID NO: 49330 - DNA, 57 bp, synthetic construct
  source 1..57: mol_type = other DNA
cccaacatcgccggcgctctgagcaagcagttcggaaccgtggacatgggttccagc

SEQ ID NO: 49331 - DNA, 39 bp, synthetic construct
  source 1..39: mol_type = other DNA
gtggagtttcaccccgtgtcgctgaccttccggcaagac

SEQ ID NO: 49332 - DNA, 99 bp, synthetic construct
  source 1..99: mol_type = other DNA
gtcgatcctgggatcaacgacattaatacggctttttggtacatcatagtctccataacctctaccggatacggcgatgtggtgccgagcagtatcagt

SEQ ID NO: 49333 - DNA, 33 bp, synthetic construct
  source 1..33: mol_type = other DNA
gctgaccagcttatccaagcaatatacagctac

SEQ ID NO: 49334 - DNA, 36 bp, synthetic construct
  source 1..36: mol_type = other DNA
atcgtggctccaaccattggcgtcacaagcttggac

SEQ ID NO: 49335 - DNA, 57 bp, synthetic construct
  source 1..57: mol_type = other DNA
cccaacatcgccggcgtgctctctaagaccctgagcccaatctctattagtagtcct

SEQ ID NO: 49336 - DNA, 33 bp, synthetic construct
  source 1..33: mol_type = other DNA
atggttggggccgcagcccgaaatgctttcgcg

SEQ ID NO: 49337 - DNA, 33 bp, synthetic construct
  source 1..33: mol_type = other DNA
agcgagcagcttgtacaagcgatatactcctat

SEQ ID NO: 49338 - DNA, 36 bp, synthetic construct
  source 1..36: mol_type = other DNA
atcgtggcaccaacaattggcgtctcttccttaaac

SEQ ID NO: 49339 - DNA, 60 bp, synthetic construct
  source 1..60: mol_type = other DNA
ccaaacatcgctggcgccctgagcaagaccacatctcccatcaccattggtagtcctcag

SEQ ID NO: 49340 - DNA, 30 bp, synthetic construct
  source 1..30: mol_type = other DNA
ttctacccggtgtcgcaaacctttaggttc

SEQ ID NO: 49341 - DNA, 99 bp, synthetic construct
  source 1..99: mol_type = other DNA
gtcgatacaaacattcctgacatccacaccgccatctggtacatcgtggttagcatgaccgggacaggctatggcgacattgtgcctgctactactact

SEQ ID NO: 49342 - DNA, 39 bp, synthetic construct
  source 1..39: mol_type = other DNA
gtggctgcctctgccgctatagacaacgtcttggccgct

SEQ ID NO: 49343 - DNA, 63 bp, synthetic construct
  source 1..63: mol_type = other DNA
ctcgacggtactggcactgggggatctggcctcgccaactccttcacaatccatctggagagc

SEQ ID NO: 49344 - DNA, 33 bp, synthetic construct
  source 1..33: mol_type = other DNA
gctgagcagataacacaggcaatatactcatac

SEQ ID NO: 49345 - DNA, 30 bp, synthetic construct
  source 1..30: mol_type = other DNA
atcgtggctccaacgattggtgtcggtgcc

SEQ ID NO: 49346 - DNA, 57 bp, synthetic construct
  source 1..57: mol_type = other DNA
cctaacatcgcgggatccctatcgaaggatttcagcacaatttccatgacctctccc

SEQ ID NO: 49347 - DNA, 36 bp, synthetic construct
  source 1..36: mol_type = other DNA
gtgctgggcatgaacagcaataacgtgttcactgtc

SEQ ID NO: 49348 - DNA, 60 bp, synthetic construct
  source 1..60: mol_type = other DNA
gaatatgcgggcatgacctctagtagtccagctagtaccgaaactgcctctacgacactg

SEQ ID NO: 49349 - DNA, 48 bp, synthetic construct
  source 1..48: mol_type = other DNA
accggggtatccgcctctttctccattgggtccgtcgagtctatgggg

SEQ ID NO: 49350 - DNA, 33 bp, synthetic construct
  source 1..33: mol_type = other DNA
gctgagcagctcactcaagccatctactcatat

SEQ ID NO: 49351 - DNA, 57 bp, synthetic construct
  source 1..57: mol_type = other DNA
cctaacattgccgggagtttatccaaggacttttcctctcccacaatcaccagcttc

SEQ ID NO: 49352 - DNA, 45 bp, synthetic construct
  source 1..45: mol_type = other DNA
ctgatacaaatgggagccggcgaagtgattgaggacgctctgaac

SEQ ID NO: 49353 - DNA, 33 bp, synthetic construct
  source 1..33: mol_type = other DNA
accttcttgagcgggactatcgccgtagcatcc

SEQ ID NO: 49354 - DNA, 33 bp, synthetic construct
  source 1..33: mol_type = other DNA
gctgaccagctaattcaagcaatctacggttat

SEQ ID NO: 49355 - DNA, 36 bp, synthetic construct
  source 1..36: mol_type = other DNA
gtggtggcacctactatcggagtctcatcgttaaac

SEQ ID NO: 49356 - DNA, 57 bp, synthetic construct
  source 1..57: mol_type = other DNA
cccaacatcgccggcgctatgaccaagacactgtcccctattactatcggatcaccc

SEQ ID NO: 49357 - DNA, 33 bp, synthetic construct
  source 1..33: mol_type = other DNA
ttttaccccacaagcctcaccttcaagaaccag

SEQ ID NO: 49358 - DNA, 99 bp, synthetic construct
  source 1..99: mol_type = other DNA
gccgatcctaacctgagcaatccccggactgctttctggtacattatcgtgaccatcacaagtaccggttatggggacatcgtcccaagtacattgtcc

SEQ ID NO: 49359 - DNA, 36 bp, synthetic construct
  source 1..36: mol_type = other DNA
ttcgccggcattagcgacgggaacgtgatcgaagtg

SEQ ID NO: 49360 - DNA, 36 bp, synthetic construct
  source 1..36: mol_type = other DNA
acgcaacaaatcactgacctgatctacacatacaac

SEQ ID NO: 49361 - DNA, 30 bp, synthetic construct; identical to SEQ ID NO: 49052
  source 1..30: mol_type = other DNA

SEQ ID NO: 49362 - DNA, 57 bp, synthetic construct
  source 1..57: mol_type = other DNA
ccaaatatcaccgctatgatccagaaccccatggaggccattagcatcgcttctcct

SEQ ID NO: 49363 - DNA, 36 bp, synthetic construct
  source 1..36: mol_type = other DNA
accgagcagatcacagacctgatttacacctacaac

SEQ ID NO: 49364 - DNA, 30 bp, synthetic construct; identical to SEQ ID NO: 49052
  source 1..30: mol_type = other DNA

SEQ ID NO: 49365 - DNA, 57 bp, synthetic construct
  source 1..57: mol_type = other DNA
cccaatattaccgccatgatcgccaacccaatggacgctatctcgatctcctctcct

SEQ ID NO: 49366 - DNA, 36 bp, synthetic construct
  source 1..36: mol_type = other DNA
acgacacagataacggacctgatctacacatacaac

SEQ ID NO: 49367 - DNA, 30 bp, synthetic construct; identical to SEQ ID NO: 49052
  source 1..30: mol_type = other DNA

SEQ ID NO: 49368 - DNA, 60 bp, synthetic construct
  source 1..60: mol_type = other DNA
ctcccaaacatcaccgccctgctggctgatcccatggacgctattagtattcagagtcca

SEQ ID NO: 49369 - DNA, 30 bp, synthetic construct
  source 1..30: mol_type = other DNA
cagctgatcgtgaacgtcaccacacttagc

SEQ ID NO: 49370 - DNA, 39 bp, synthetic construct
  source 1..39: mol_type = other DNA
cccttcctcttctcattgttcgagattgtgatcaactac

SEQ ID NO: 49371 - DNA, 39 bp, synthetic construct
  source 1..39: mol_type = other DNA
tacaccaagcagattacagacctgatctacacctacaac

SEQ ID NO: 49372 - DNA, 30 bp, synthetic construct; identical to SEQ ID NO: 49052
  source 1..30: mol_type = other DNA

SEQ ID NO: 49373 - DNA, 60 bp, synthetic construct
  source 1..60: mol_type = other DNA
ctccctaacatcaccgccttacttcaaagccctatggacgctattagcatccagtctccc

SEQ ID NO: 49374 - DNA, 93 bp, synthetic construct
  source 1..93: mol_type = other DNA
gccgaccaaatctcctcttatatacaaccggttgtcgaaaatttcgagaaacaagtggagaacggcaccgtcacactgaccactcactcactg

SEQ ID NO: 49375 - DNA, 48 bp, synthetic construct
  source 1..48: mol_type = other DNA
gggttctacggcaatggctacgacctcctgacctacatcattctcacc

SEQ ID NO: 49376 - DNA, 45 bp, synthetic construct
  source 1..45: mol_type = other DNA
gcctactggatttcatcaatttttggcaacgccatggctttcatc

SEQ ID NO: 49377 - DNA, 42 bp, synthetic construct
  source 1..42: mol_type = other DNA
atgactttcgagggcaacgaagtgctggctgtctacccctat

SEQ ID NO: 49378 - DNA, 201 bp, synthetic construct
  source 1..201: mol_type = other DNA
ctgtctcccatcaatcccgtctccgtttacctgaagggcgcagcagtgtccgaaagtcaacgagccattctcaacgagtacttcggtgtcggcgttcctcttcaaacaaaaatctaccactggttgctcaacctcatacaaggaaacctgggcacaagcctcatttaccgggccccggtgctcgacgtcatcatagataaa

SEQ ID NO: 49379 - DNA, 90 bp, synthetic construct
  source 1..90: mol_type = other DNA
gctgtctacctcaagctgttccctatcgggttcggagtgcccatcggtgtccggtctaccgacgccagcttcatcgattgggcatctcgc

SEQ ID NO: 49380 - DNA, 87 bp, synthetic construct
  source 1..87: mol_type = other DNA
atgggcgctttcgacctcacctgggacgccgctacggcgtctgacgtgcccggggctaactccctgaacggagtcaacgatacaatc

SEQ ID NO: 49381 - DNA, 30 bp, synthetic construct
  source 1..30: mol_type = other DNA
ttccagacacctatatcatcggggattacc

SEQ ID NO: 49382 - DNA, 36 bp, synthetic construct
  source 1..36: mol_type = other DNA
agccagctagttaacgccgtcaccattatcgacaac

SEQ ID NO: 49383 - DNA, 39 bp, synthetic construct
  source 1..39: mol_type = other DNA
gtgctgttcaatctctttggcaactacatcctgtctggg

SEQ ID NO: 49384 - DNA, 39 bp, synthetic construct
  source 1..39: mol_type = other DNA
tacacggcccaaatcacggacctgatctacacctacaac

SEQ ID NO: 49385 - DNA, 30 bp, synthetic construct; identical to SEQ ID NO: 49052
  source 1..30: mol_type = other DNA

SEQ ID NO: 49386 - DNA, 60 bp, synthetic construct
  source 1..60: mol_type = other DNA
ctgcccaatattacggcactcctcatggacccaatggacgctattacgatacaaagtcca

SEQ ID NO: 49387 - DNA, 33 bp, synthetic construct
  source 1..33: mol_type = other DNA
atgggcatcatggtcgaggccgtgatgatcaac

SEQ ID NO: 49388 - DNA, 36 bp, synthetic construct
  source 1..36: mol_type = other DNA
tacgccaacgagatcaccgacctgatttacacctac

SEQ ID NO: 49389 - DNA, 36 bp, synthetic construct
  source 1..36: mol_type = other DNA
ctggtggcccccaccgtgggcctgggcgccgtggac

SEQ ID NO: 49390 - DNA, 60 bp, synthetic construct
  source 1..60: mol_type = other DNA
cccaatatcgccgctattatgaacaagtctatgggcagcatcagtatcgtgtccatggac

SEQ ID NO: 49391 - DNA, 36 bp, synthetic construct
  source 1..36: mol_type = other DNA
accgaggaaatcactaacctgatctacacatacaat

SEQ ID NO: 49392 - DNA, 30 bp, synthetic construct; identical to SEQ ID NO: 49052
  source 1..30: mol_type = other DNA

SEQ ID NO: 49393 - DNA, 60 bp, synthetic construct
  source 1..60: mol_type = other DNA
cctaacattacggctatgatccagaaccccatggatgccattaccatcgctagcatggac

SEQ ID NO: 49394 - DNA, 42 bp, synthetic construct
  source 1..42: mol_type = other DNA
ccctttctcttcaatctgtttgagaactacgtcaaggcttac

SEQ ID NO: 49395 - DNA, 39 bp, synthetic construct
  source 1..39: mol_type = other DNA
ttcacgcaacagattacagacctgatctacacctacaac

SEQ ID NO: 49396 - DNA, 30 bp, synthetic construct; identical to SEQ ID NO: 49052
  source 1..30: mol_type = other DNA

SEQ ID NO: 49397 - DNA, 57 bp, synthetic construct
  source 1..57: mol_type = other DNA
cctaacatcaccgctatgattcagaatcccatggatgctatttcgatctcctctcct

SEQ ID NO: 49398 - DNA, 39 bp, synthetic construct
  source 1..39: mol_type = other DNA
gtggccaccctgagcttcagcacccaaggcgtcggaggg

SEQ ID NO: 49399 - DNA, 36 bp, synthetic construct
  source 1..36: mol_type = other DNA
acaaagcagatcaccgacctgatttacacctacaac

SEQ ID NO: 49400 - DNA, 30 bp, synthetic construct; identical to SEQ ID NO: 49052
  source 1..30: mol_type = other DNA

SEQ ID NO: 49401 - DNA, 57 bp, synthetic construct
  source 1..57: mol_type = other DNA
cccaacatcaccgccatgattcagaacccaatggaggctatcagcatcgctagtccg

SEQ ID NO: 49402 - DNA, 39 bp, synthetic construct
  source 1..39: mol_type = other DNA
tacacgacacaaataacagacctaatatatagctacaac

SEQ ID NO: 49403 - DNA, 30 bp, synthetic construct; identical to SEQ ID NO: 49052
  source 1..30: mol_type = other DNA

SEQ ID NO: 49404 - DNA, 57 bp, synthetic construct
  source 1..57: mol_type = other DNA
cccaatatcaccgctatgattcagaaccctatggacgccatcacaatcagctctcca

SEQ ID NO: 49405 - DNA, 39 bp, synthetic construct
  source 1..39: mol_type = other DNA
tacaccacccaaattactgacctgatttacacctacaac

SEQ ID NO: 49406 - DNA, 30 bp, synthetic construct; identical to SEQ ID NO: 49052
  source 1..30: mol_type = other DNA

SEQ ID NO: 49407 - DNA, 60 bp, synthetic construct
  source 1..60: mol_type = other DNA
cccaacataacagcaatgatccagaaccctatggatgctatcaccattgcctctgttgac

SEQ ID NO: 49408 - DNA, 60 bp, synthetic construct
  source 1..60: mol_type = other DNA
ggctggctggtgtcgcaaggcatgatcccggtttctagagtgccttacgtgacagcgact

SEQ ID NO: 49409 - DNA, 36 bp, synthetic construct
  source 1..36: mol_type = other DNA
acacagcagatcaccgacctgatctatacctacaac

SEQ ID NO: 49410 - DNA, 30 bp, synthetic construct
  source 1..30: mol_type = other DNA
ctggtggcccccagcgtgggcctgggcctg

SEQ ID NO: 49411 - DNA, 57 bp, synthetic construct
  source 1..57: mol_type = other DNA
cctaacatcaccgctatgatcgccaaccccatggatgctatttctatctcctctcct

SEQ ID NO: 49412 - DNA, 36 bp, synthetic construct
  source 1..36: mol_type = other DNA
agccagctggtggatgccgtcaccatcattgacaac

SEQ ID NO: 49413 - DNA, 42 bp, synthetic construct
  source 1..42: mol_type = other DNA
attctttttcaaatatttggcaactacatactgtcatctctt

SEQ ID NO: 49414 - DNA, 33 bp, synthetic construct
  source 1..33: mol_type = other DNA
gccgaccagttggtccaagccatttattcgtat

SEQ ID NO: 49415 - DNA, 36 bp, synthetic construct
  source 1..36: mol_type = other DNA
attgtggctccaaccatcggagtaacatctctggac

SEQ ID NO: 49416 - DNA, 57 bp, synthetic construct
  source 1..57: mol_type = other DNA
cctaacatcgccggcgtgttaagtaaaacatcaagccccatcaccattggatctcct

SEQ ID NO: 49417 - DNA, 36 bp, synthetic construct
  source 1..36: mol_type = other DNA
acaaagcagatcaccgacctgatctacacttacaac

SEQ ID NO: 49418 - DNA, 30 bp, synthetic construct; identical to SEQ ID NO: 49052
  source 1..30: mol_type = other DNA

SEQ ID NO: 49419 - DNA, 57 bp, synthetic construct
  source 1..57: mol_type = other DNA
cccaatatcactgctatgatccagaaccctatggacggcattacgatttcatcacca

SEQ ID NO: 49420 - DNA, 48 bp, synthetic construct
  source 1..48: mol_type = other DNA
gacgaggccatcagcacctcgatcaagttccccaacctgtctcctgag

SEQ ID NO: 49421 - DNA, 63 bp, synthetic construct
  source 1..63: mol_type = other DNA
ggctggctagttagtcaaggcatgatccctgtttcccgggtgccttacgtagtcgccgtcacc

SEQ ID NO: 49422 - DNA, 30 bp, synthetic construct
  source 1..30: mol_type = other DNA
agcatcggcggatacggcgaatcagcactc

SEQ ID NO: 49423 - DNA, 39 bp, synthetic construct
  source 1..39: mol_type = other DNA
atcttcaccggcacactggggtttgcaatggcagcgggt

SEQ ID NO: 49424 - DNA, 54 bp, synthetic construct
  source 1..54: mol_type = other DNA
cacgccctcgggctgcacatgttctccgacaaggcagttagtggagatcgaatc

SEQ ID NO: 49425 - DNA, 120 bp, synthetic construct
  source 1..120: mol_type = other DNA
atgcacatccctgacggcctgattggagagaaccccttcaccgaggctgtggagcacgggcacgagcacgcccacgagctgctcgaaaacgggccactcggacatgccctgatcaatcca

SEQ ID NO: 49426 - DNA, 33 bp, synthetic construct
  source 1..33: mol_type = other DNA
gagatccccttgccggtcgccgcttgtgcccac

SEQ ID NO: 49427 - DNA, 63 bp, synthetic construct
  source 1..63: mol_type = other DNA
atggaaatcattgacttattttcgattgccctcaccggagttaaagaacagaagatcggtctg

SEQ ID NO: 49428 - DNA, 96 bp, synthetic construct
  source 1..96: mol_type = other DNA
accgagcacaagaacgccttggatagcctcgttatggtttcaaacgcttttacatccaatggatacgcagtactggggcaatcaatccccggatcc

SEQ ID NO: 49429 - DNA, 99 bp, synthetic construct
  source 1..99: mol_type = other DNA
gactccaacattactgactttcggaccgctatctggtacacctttgcatcgatgacctccactggctacggagatgtcgtgcccacttcttcacctggc

SEQ ID NO: 49430 - DNA, 30 bp, synthetic construct
  source 1..30: mol_type = other DNA
acattctactccactagccggaccttcaag

SEQ ID NO: 49431 - DNA, 99 bp, synthetic construct
  source 1..99: mol_type = other DNA
gtggactccaatatcaacaacctgcaaaccgccttctggtacattgttgtcactatcacaagcaccggctacggagatgtggtgccagctactgcaagc

SEQ ID NO: 49432 - DNA, 66 bp, synthetic construct
  source 1..66: mol_type = other DNA
atggcaattgaggagatggtgactaacatgagcatcaccgaatccggcgccgctacatctagtcca

SEQ ID NO: 49433 - DNA, 39 bp, synthetic construct
  source 1..39: mol_type = other DNA
tacagcggcaccgcgttgcaaattacccccattatcgcc

SEQ ID NO: 49434 - DNA, 51 bp, synthetic construct
  source 1..51: mol_type = other DNA
gacggaaccgctagaggcttgagcatcggggacgatccccaccctccggaa

SEQ ID NO: 49435 - DNA, 48 bp, synthetic construct
  source 1..48: mol_type = other DNA
gacatggtgaccgggacaaactatatgacctacggcgtcttcgatacc

SEQ ID NO: 49436 - DNA, 66 bp, synthetic construct
  source 1..66: mol_type = other DNA
atgagcgctatggaccagatgctgaccaacatgacaacttccggcaacgccgtggtcaactctcag

SEQ ID NO: 49437 - DNA, 39 bp, synthetic construct
  source 1..39: mol_type = other DNA
tacagcggcaccgccctggagatcacacccattatcgct

SEQ ID NO: 49438 - DNA, 36 bp, synthetic construct
  source 1..36: mol_type = other DNA
caggtctacctcattagccagatcaagctcccaatc

SEQ ID NO: 49439 - DNA, 72 bp, synthetic construct
  source 1..72: mol_type = other DNA
atgtccgggcttgatcaaatgctcaccaatatgaccgtcagtagcaatggcgtggtggattcacccatcttc

SEQ ID NO: 49440 - DNA, 39 bp, synthetic construct
  source 1..39: mol_type = other DNA
tacagccggaccgccctggagattacacccatcatcgcc

SEQ ID NO: 49441 - DNA, 72 bp, synthetic construct
  source 1..72: mol_type = other DNA
atgagtgctatggatcagatgctctctaacatgaccgctagcggcaatggcatcgtcaattcgcaactgttt

SEQ ID NO: 49442 - DNA, 39 bp, synthetic construct
  source 1..39: mol_type = other DNA
tacagcggcaccgccctggagattacacccatcatcgcc

SEQ ID NO: 49443 - DNA, 69 bp, synthetic construct
  source 1..69: mol_type = other DNA
aacatcttcgtggaccccctgctgttcttgcaattcctgcgggagctctgcaacggcgtcttcaacaat

SEQ ID NO: 49444 - DNA, 90 bp, synthetic construct
  source 1..90: mol_type = other DNA
gtgtgcatgtatcgtccatggattctggatagcagaatccactccgtcgaagcagcattaccggcggcgggtggctattctttcccaagt

SEQ ID NO: 49445 - DNA, 186 bp, synthetic construct
  source 1..186: mol_type = other DNA
aataagattaagacgcagaccaaggctgagattaccgattccgacacccacatgttcacggtacatgtgacagtcaccgagcagggcacagggaagcccgtgactaagggccgggtcaccatcaagagcaagaagggcaaaatcatcggaactggcaagatcaaggagggtactgccgacatcacc

SEQ ID NO: 49446 - DNA, 111 bp, synthetic construct
  source 1..111: mol_type = other DNA
ctcatcacggcttacccacaaagccagctcgcccacacactctcctctatcatcccctacgtggctgtcagcaacacgaccatgcaacacttctacctggctaacttgcat

SEQ ID NO: 49447 - DNA, 30 bp, synthetic construct
  source 1..30: mol_type = other DNA
atgatcaacatggtcgagaccgtgatgatc

SEQ ID NO: 49448 - DNA, 99 bp, synthetic construct
  source 1..99: mol_type = other DNA
gtggacagcaacatcgttgacttccggaccgccatttggtacacatttgtttcaatgaccagcaccggctatggggatgtggtccccacttccacatct

SEQ ID NO: 49449 - DNA, 75 bp, synthetic construct
  source 1..75: mol_type = other DNA
tctgactttggctccgtgcctctgaacattctgtttggatacttcatcggcacctcctatgagttcacggcattt

SEQ ID NO: 49450 - DNA, 48 bp, synthetic construct
  source 1..48: mol_type = other DNA
tacgacagctatgggacctttcccgagggctactacttctacatgtcc

SEQ ID NO: 49451 - DNA, 33 bp, synthetic construct
  source 1..33: mol_type = other DNA
aaatacgcgaacaagagcgttgtgtttaacgac

SEQ ID NO: 49452 - DNA, 30 bp, synthetic construct
  source 1..30: mol_type = other DNA
ttttaccccgtggacaccagcttcaagttc

SEQ ID NO: 49453 - DNA, 96 bp, synthetic construct
  source 1..96: mol_type = other DNA
gatagcaacatcgccgacttcaagacagccatttggtacaccttcgctagcatgacctctactggatatggagacgtggttcccacttccacatct

SEQ ID NO: 49454 - DNA, 66 bp, synthetic construct
  source 1..66: mol_type = other DNA
atgtccgccatggacgagatgctgagcaacatgaccgtgtcgagctccgggacagttaacactcca

SEQ ID NO: 49455 - DNA, 39 bp, synthetic construct
  source 1..39: mol_type = other DNA
tacagcggcaccgccctggagatcacacccattatcgcc

SEQ ID NO: 49456 - DNA, 39 bp, synthetic construct
  source 1..39: mol_type = other DNA
caggcggtgcaggatagtacattcgtgaccgatcctgcc

SEQ ID NO: 49457 - DNA, 36 bp, synthetic construct
  source 1..36: mol_type = other DNA
caggcagtgcaggattcgacattcgtcaccgatccc

SEQ ID NO: 49458 - DNA, 42 bp, synthetic construct
  source 1..42: mol_type = other DNA
caggagatggccaagaattctacgctctttgccggaaatatg

SEQ ID NO: 49459 - DNA, 57 bp, synthetic construct
  source 1..57: mol_type = other DNA
agctacctggggctggttggagccgacaattcctggctcaactataccatctgggat

SEQ ID NO: 49460 - DNA, 36 bp, synthetic construct
  source 1..36: mol_type = other DNA
agccagctgatcgacgccgtgaccgtcattggaaac

SEQ ID NO: 49461 - DNA, 36 bp, synthetic construct
  source 1..36: mol_type = other DNA
cccatcctgttcaagctctttgtgaactacgtccac

SEQ ID NO: 49462 - DNA, 66 bp, synthetic construct
  source 1..66: mol_type = other DNA
gacatggttggccttggcggcgttgaagcctctagcgctgaggaggtcggagtgaccatccaaagt

SEQ ID NO: 49463 - DNA, 39 bp, synthetic construct
  source 1..39: mol_type = other DNA
aacaccgccgtgaaggagtccacttttgtgtctgacccc

SEQ ID NO: 49464 - DNA, 45 bp, synthetic construct
  source 1..45: mol_type = other DNA
aacagcggctacaccatcgggtttgagacagactgcgtgttcgac

SEQ ID NO: 49465 - DNA, 57 bp, synthetic construct
  source 1..57: mol_type = other DNA
gccgacctgctgctgagtaattcgaataccttcaatgatcccaccgtttacactaac

SEQ ID NO: 49466 - DNA, 42 bp, synthetic construct
  source 1..42: mol_type = other DNA
aacgaatttgccaccgctaacatgaccggattcgacgcaaca

SEQ ID NO: 49467 - DNA, 96 bp, synthetic construct
  source 1..96: mol_type = other DNA
gctgaccaggtggccgagtacatcaagcccatggtggactctttcgagcaaaatgttgaaagtggcactgtcactctgactacccattctcttttc

SEQ ID NO: 49468 - DNA, 36 bp, synthetic construct
  source 1..36: mol_type = other DNA
ttctacggcaccaagctgaacatcattgtacaatat

SEQ ID NO: 49469 - DNA, 48 bp, synthetic construct
  source 1..48: mol_type = other DNA
atccccatcgcctacaagatcctgcctttctttggcattggaatccgc

SEQ ID NO: 49470 - DNA, 36 bp, synthetic construct
  source 1..36: mol_type = other DNA
agccagctggccgatgccgtcaccgtgatcgacaac

SEQ ID NO: 49471 - DNA, 33 bp, synthetic construct
  source 1..33: mol_type = other DNA
atgctcttcaagctgtttgagcgatacgtaatt

SEQ ID NO: 49472 - DNA, 39 bp, synthetic construct
  source 1..39: mol_type = other DNA
aacaccgccgtgaatcagagctccttcgtaactgaccct

SEQ ID NO: 49473 - DNA, 39 bp, synthetic construct
  source 1..39: mol_type = other DNA
ccctacaccaaggagctgtacaatttcgtgtacaactat

SEQ ID NO: 49474 - DNA, 30 bp, synthetic construct
  source 1..30: mol_type = other DNA
ctggtgtctcccatggccggagtttcctcg

SEQ ID NO: 49475 - DNA, 54 bp, synthetic construct
  source 1..54: mol_type = other DNA
cccaacatttcctcactgacatctgggtcggccgttcaaatccagagccttact

SEQ ID NO: 49476 - DNA, 96 bp, synthetic construct
  source 1..96: mol_type = other DNA
gactcgcaaatcaatgacatgcagaccgcagtctggtacatcattgtttctatgacgtctaccggctatggcgatgtggtccctatcattatcccc

SEQ ID NO: 49477 - DNA, 42 bp, synthetic construct
  source 1..42: mol_type = other DNA
aacaccgctgtgaacgacagtaccttcatcgtcgatcctaca

SEQ ID NO: 49478 - DNA, 33 bp, synthetic construct
  source 1..33: mol_type = other DNA
cagctgatcgacgccgtgaccctcatcgataac

SEQ ID NO: 49479 - DNA, 30 bp, synthetic construct
  source 1..30: mol_type = other DNA
ctgttcaagctgttcgaacaatatcttctt

SEQ ID NO: 49480 - DNA, 105 bp, synthetic construct
  source 1..105: mol_type = other DNA
atcgacctgggccacatcggctacaaggagctgctccacattatctttaataagaatgacccctcaaatgacctgattaacggtatcctgatctgggatcttggg

SEQ ID NO: 49481 - DNA, 57 bp, synthetic construct
  source 1..57: mol_type = other DNA
ctgggcggcggaatgatttcgggccagtctcatgccaccatctctatcgacaacccc

SEQ ID NO: 49482 - DNA, 72 bp, synthetic construct
  source 1..72: mol_type = other DNA
tacatgttcaacgaatatgctttgagcactatcgtgttctggcaatttgggtcgatgggaaaagcaggatgg

SEQ ID NO: 49483 - DNA, 39 bp, synthetic construct
  source 1..39: mol_type = other DNA
cccctgctcttcaagctgttcgagaacttcatcaactac

SEQ ID NO: 49484 - DNA, 36 bp, synthetic construct
  source 1..36: mol_type = other DNA
attgccacctccttcatttcgttaaacggagttggc

SEQ ID NO: 49485 - DNA, 36 bp, synthetic construct
  source 1..36: mol_type = other DNA
aacgggtttaccctgttcggcctgtacacaatcctg

SEQ ID NO: 49486 - DNA, 39 bp, synthetic construct
  source 1..39: mol_type = other DNA
cccttcactcaacaagtttacgacatcgtatacggttat

SEQ ID NO: 49487 - DNA, 30 bp, synthetic construct
  source 1..30: mol_type = other DNA
ctggtggcccccatcgccggcgtgagcagc

SEQ ID NO: 49488 - DNA, 51 bp, synthetic construct
  source 1..51: mol_type = other DNA
cccaacatcagtcttcttgtcgaaggcaccacactggaattgcagagcctc

SEQ ID NO: 49489 - DNA, 45 bp, synthetic construct
  source 1..45: mol_type = other DNA
ttcacagccgttacggactctatcctgattgtggaccctgatgta

SEQ ID NO: 49490 - DNA, 36 bp, synthetic construct
  source 1..36: mol_type = other DNA
tgcagcttcggcaacgtggactacgggaagacaacc

SEQ ID NO: 49491 - DNA, 57 bp, synthetic construct
  source 1..57: mol_type = other DNA
aactacggggccggcgtgccccttgagtattccctgctgagcttcctcgctaacgac

SEQ ID NO: 49492 - DNA, 84 bp, synthetic construct
  source 1..84: mol_type = other DNA
gactttaccttctcgaacatgtacctgaaccagctgctcggcaatctgattgagacccacggccagaacatcgtgtcctgcttc

SEQ ID NO: 49493 - DNA, 30 bp, synthetic construct
  source 1..30: mol_type = other DNA
agcatcggctgcaccatgcccgagttcaac

SEQ ID NO: 49494 - DNA, 33 bp, synthetic construct
  source 1..33: mol_type = other DNA
acaagcatcggctgcaccatgcccgagttcaac

SEQ ID NO: 49495 - DNA, 63 bp, synthetic construct
  source 1..63: mol_type = other DNA
gagatctttcaaatggtgccagccggcggcgaaagcgcattccaagacatcgacatcatctcc

SEQ ID NO: 49496 - DNA, 33 bp, synthetic construct
  source 1..33: mol_type = other DNA
accagcatcggctgcgctatgcccgagttcaac

SEQ ID NO: 49497 - DNA, 30 bp, synthetic construct
  source 1..30: mol_type = other DNA
tacattttcgtgaccctggccatcatggtg

SEQ ID NO: 49498 - DNA, 30 bp, synthetic construct; identical to SEQ ID NO: 49493
  source 1..30: mol_type = other DNA

SEQ ID NO: 49499 - DNA, 30 bp, synthetic construct; identical to SEQ ID NO: 49493
  source 1..30: mol_type = other DNA

SEQ ID NO: 49500 - DNA, 96 bp, synthetic construct
  source 1..96: mol_type = other DNA
gccgattctatttccgactacatccaaccaatggtggacaattttcaaaaacaagtcgaggaaggcgctatcacactgacaacctatagtattttt

SEQ ID NO: 49501 - DNA, 33 bp, synthetic construct
  source 1..33: mol_type = other DNA
tatttcggatctgactttaacatctacgcttac

SEQ ID NO: 49502 - DNA, 39 bp, synthetic construct
  source 1..39: mol_type = other DNA
gccggcaagctcctgccctttttcggactgagcatgggc

SEQ ID NO: 49503 - DNA, 81 bp, synthetic construct
  source 1..81: mol_type = other DNA
ttcgacttccccttcatttccatcaaggaaggcgagattctgctgctcaacgtcgggtctctctttacggcgcatggctct

SEQ ID NO: 49504 - DNA, 30 bp, synthetic construct; identical to SEQ ID NO: 45216
  source 1..30: mol_type = other DNA

SEQ ID NO: 49505 - DNA, 123 bp, synthetic construct
  source 1..123: mol_type = other DNA
tccgtgctgcccctgcacccatttgcatttgccatggccagcggcgtcgggtctgctagcatgaacgcagctagtctggccccaacactcgccgcattcccggcactggagacacagatcgaa

SEQ ID NO: 49506 - DNA, 33 bp, synthetic construct
  source 1..33: mol_type = other DNA
accagcatcggctgcacaatgcccgagttcaac

SEQ ID NO: 49507 - DNA, 30 bp, synthetic construct; identical to SEQ ID NO: 49493
  source 1..30: mol_type = other DNA

SEQ ID NO: 49508 - DNA, 36 bp, synthetic construct
  source 1..36: mol_type = other DNA
gtgtaccagtccgccttcacctctagcgatgctctg

SEQ ID NO: 49509 - DNA, 42 bp, synthetic construct
  source 1..42: mol_type = other DNA
acgatcggcgttgagaatatcgttcgtttaattctcggaatg

SEQ ID NO: 49510 - DNA, 39 bp, synthetic construct
  source 1..39: mol_type = other DNA
ggagccacactggctgaagcaggaggtgcaagcatcggc

SEQ ID NO: 49511 - DNA, 93 bp, synthetic construct
  source 1..93: mol_type = other DNA
gccgactccatctctgactatatacaacctatggtggacaatttccaaaaacaggtggacgaaggcgtcattactctgacaactcaaagtatc

SEQ ID NO: 49512 - DNA, 36 bp, synthetic construct
  source 1..36: mol_type = other DNA
gggtactttggcgccgacttcaacatctacgcttac

SEQ ID NO: 49513 - DNA, 48 bp, synthetic construct
  source 1..48: mol_type = other DNA
gtgcctctggccggcaagctgctgccttttttcggacttagcatgggg

SEQ ID NO: 49514 - DNA, 30 bp, synthetic construct
  source 1..30: mol_type = other DNA
atccggttcttagcatcggaccaacaaccc

SEQ ID NO: 49515 - DNA, 63 bp, synthetic construct
  source 1..63: mol_type = other DNA
gattatttttcgttaaccgggacaagtacccttgagggcgtgtctatcacatgggcctcaatc

SEQ ID NO: 49516 - DNA, 30 bp, synthetic construct; identical to SEQ ID NO: 49493
  source 1..30: mol_type = other DNA

SEQ ID NO: 49517 - DNA, 60 bp, synthetic construct
  source 1..60: mol_type = other DNA
ctggggcacgagaacctcagcctctccggcttctggtactacctgtctctgggagtgttc

SEQ ID NO: 49518 - DNA, 30 bp, synthetic construct
  source 1..30: mol_type = other DNA
aagagcgacctgggcaccacaccaatctcc

SEQ ID NO: 49519 - DNA, 48 bp, synthetic construct
  source 1..48: mol_type = other DNA
tacaacgagctgaatctcaagcaagtatattctaccatggcttgtggc

SEQ ID NO: 49520 - DNA, 33 bp, synthetic construct
  source 1..33: mol_type = other DNA
cggctctccctgtacctgggttatagcatccct

SEQ ID NO: 49521 - DNA, 30 bp, synthetic construct
  source 1..30: mol_type = other DNA
ttccccgtggactacagcctgatccaatgg

SEQ ID NO: 49522 - DNA, 36 bp, synthetic construct
  source 1..36: mol_type = other DNA
ccccttctgtttagcctcttcgagacctacgttctg

SEQ ID NO: 49523 - DNA, 96 bp, synthetic construct
  source 1..96: mol_type = other DNA
gccgactccatctctgagtatatccaacctatggtggataactttcaaaaacaagtggacgagggcgtcatcacactgaccacgcattcgatcttt

SEQ ID NO: 49524 - DNA, 33 bp, synthetic construct
  source 1..33: mol_type = other DNA
tacttcggcgccgacttcaacatctatgcttac

SEQ ID NO: 49525 - DNA, 48 bp, synthetic construct
  source 1..48: mol_type = other DNA
gtgcctctcgccggcaagctgctgcccttcttcgggcttagcatgggc

SEQ ID NO: 49526 - DNA, 81 bp, synthetic construct
  source 1..81: mol_type = other DNA
atggggatgactgatttctccttcgagacagtccggaacatggaccttggtgccaatttcgtccacggtaccggaaaggcc

SEQ ID NO: 49527 - DNA, 63 bp, synthetic construct
  source 1..63: mol_type = other DNA
cgggtccagatcggcgaggccctgaactacgtgtttaaatatatcgacttcggcggaaagtat

SEQ ID NO: 49528 - DNA, 87 bp, synthetic construct
  source 1..87: mol_type = other DNA
accttcacaatgcacggagacaccacccctctcattatcgctatgccctggggcacagccaacctgatggacaacgtgatgggtttt

SEQ ID NO: 49529 - DNA, 33 bp, synthetic construct; identical to SEQ ID NO: 49506
  source 1..33: mol_type = other DNA

SEQ ID NO: 49530 - DNA, 30 bp, synthetic construct; identical to SEQ ID NO: 49493
  source 1..30: mol_type = other DNA

SEQ ID NO: 49531 - DNA, 60 bp, synthetic construct
  source 1..60: mol_type = other DNA
gactactatggctggtccgccacacctactattgccgtgaacagcctgaatatcgcttcc

SEQ ID NO: 49532 - DNA, 96 bp, synthetic construct
  source 1..96: mol_type = other DNA
tccagcccactgggcttccccacatttgatctcgaggaccttctgatggatgctcccgagaccgcccatctcctcttctctcatgatcctgtggac

SEQ ID NO: 49533 - DNA, 81 bp, synthetic construct
  source 1..81: mol_type = other DNA
atgggcttcgccgacatcagctttgaggctgtcagaaacatgaacctcggtgctaatttcgtgcacggggccggcaaggcg

SEQ ID NO: 49534 - DNA, 33 bp, synthetic construct
  source 1..33: mol_type = other DNA
aaggacaaaatcctggaactggcccatggagag

SEQ ID NO: 49535 - DNA, 42 bp, synthetic construct
  source 1..42: mol_type = other DNA
caggaccaacaggacgcactgattgcttacgccgttctcatt

SEQ ID NO: 49536 - DNA, 33 bp, synthetic construct
  source 1..33: mol_type = other DNA
accagcatcggctgcgccatgcctgagttcaac

SEQ ID NO: 49537 - DNA, 30 bp, synthetic construct; identical to SEQ ID NO: 49493
  source 1..30: mol_type = other DNA

SEQ ID NO: 49538 - DNA, 48 bp, synthetic construct
  source 1..48: mol_type = other DNA
atggtcatgattccaccttacgtccccgaggccttcctgaccatgtac

SEQ ID NO: 49539 - DNA, 99 bp, synthetic construct
  source 1..99: mol_type = other DNA
tatcccgattcatttgcctctgtactgcaacccatgatacagcagtttgaacaaaatattgccgatggcacagtgaccctggctaccgactccctcttc

SEQ ID NO: 49540 - DNA, 30 bp, synthetic construct
  source 1..30: mol_type = other DNA
ttcgctgcccaaatggatctaacatcctac

SEQ ID NO: 49541 - DNA, 36 bp, synthetic construct
  source 1..36: mol_type = other DNA
gcccggtttttcctgagctttttcggcattcagatc

SEQ ID NO: 49542 - DNA, 81 bp, synthetic construct
  source 1..81: mol_type = other DNA
cactcctatctgaatggatggagcgctgagaagtctgaatggacaattacccgagctatcgggggatacaatggacaagcc

SEQ ID NO: 49543 - DNA, 48 bp, synthetic construct
  source 1..48: mol_type = other DNA
atggtcctgattcctccatacgtgcccgacgttttcatttccatgtac

SEQ ID NO: 49544 - DNA, 57 bp, synthetic construct
  source 1..57: mol_type = other DNA
tacttcacgataagtagcactcctaccgtggacgagaacacaattagcgttatgtcc

SEQ ID NO: 49545 - DNA, 48 bp, synthetic construct
  source 1..48: mol_type = other DNA
atgatgtttatcccacctcacgtccctgccgagtttgtatccatgtac

SEQ ID NO: 49546 - DNA, 51 bp, synthetic construct
  source 1..51: mol_type = other DNA
atggtttttataccgttttatgtccctgccgagttcctgtccatgtacctg

SEQ ID NO: 49547 - DNA, 63 bp, synthetic construct
  source 1..63: mol_type = other DNA
gatatgttccacctggccggcaccgatatagcgtcatcgcgagcagtcaacctcgagatgact

SEQ ID NO: 49548 - DNA, 48 bp, synthetic construct
  source 1..48: mol_type = other DNA
atggtggtgctgcctgtcgtggtccccgacgctttcatatctatgtac

SEQ ID NO: 49549 - DNA, 51 bp, synthetic construct
  source 1..51: mol_type = other DNA
atggtctttatcccaccttacgtgcccgatgctttcctgagcatgtatctc

SEQ ID NO: 49550 - DNA, 36 bp, synthetic construct
  source 1..36: mol_type = other DNA
acatacctgtgcaccgtgactctgatgaaccctgag

SEQ ID NO: 49551 - DNA, 57 bp, synthetic construct
  source 1..57: mol_type = other DNA
atgatcgggcagggctccacctcaactgtggaaagcatgggcgtcgacatctacatg

SEQ ID NO: 49552 - DNA, 48 bp, synthetic construct
  source 1..48: mol_type = other DNA
atggtttttatcccacctcatgtgcccgctgagttcattagcatgtac

SEQ ID NO: 49553 - DNA, 33 bp, synthetic construct
  source 1..33: mol_type = other DNA
gtgagcggcctgggcagcgaccccctggccgcc

SEQ ID NO: 49554 - DNA, 54 bp, synthetic construct
  source 1..54: mol_type = other DNA
cccatgctggtggccatgggcgctagctccgtaatgcaatacgctaagccttac

SEQ ID NO: 49555 - DNA, 48 bp, synthetic construct
  source 1..48: mol_type = other DNA
atgctgttcctgcccaactttgtgcctgacgtctttgtgtctatgtac

SEQ ID NO: 49556 - DNA, 48 bp, synthetic construct
  source 1..48: mol_type = other DNA
atgtgggagtccagcggcgacagcttctacatactaccgagtatttct

SEQ ID NO: 49557 - DNA, 48 bp, synthetic construct
  source 1..48: mol_type = other DNA
atggtcttcataccgcaatatgttccgcaagcattcattagcatgtac

SEQ ID NO: 49558 - DNA, 63 bp, synthetic construct
  source 1..63: mol_type = other DNA
gcaaatattggcctgatgggcaacgaggccgctgacaacggctttatctcctggttctccacc

SEQ ID NO: 49559 - DNA, 48 bp, synthetic construct
  source 1..48: mol_type = other DNA
atgatctttacccctccatatgtcccgagcgagttcatcttcatgtat

SEQ ID NO: 49560 - DNA, 69 bp, synthetic construct
  source 1..69: mol_type = other DNA
agcgggctcggctctgccccggtatcttcaatcccctacgctatcaacctgatctggatggtcgagatc

SEQ ID NO: 49561 - DNA, 39 bp, synthetic construct
  source 1..39: mol_type = other DNA
ggcatcgccaccctgtccatctcaacggctggattcggc

SEQ ID NO: 49562 - DNA, 54 bp, synthetic construct
  source 1..54: mol_type = other DNA
gggctgggcctcaaggcgattggggtagaggaaatgtttattggattcctgatg

SEQ ID NO: 49563 - DNA, 42 bp, synthetic construct
  source 1..42: mol_type = other DNA
ctcggctattctcatatcgtgatcggagactacatgattagc

SEQ ID NO: 49564 - DNA, 72 bp, synthetic construct
  source 1..72: mol_type = other DNA
aaggccgggctgggcaccgctccgatttcttgcatcccggcaactctgacggattgcgttggaatgacatct

SEQ ID NO: 49565 - DNA, 33 bp, synthetic construct
  source 1..33: mol_type = other DNA
ctggatgcactgggcatgagcccagacggttac

SEQ ID NO: 49566 - DNA, 42 bp, synthetic construct
  source 1..42: mol_type = other DNA
ttcggaattgctgcaagtggtgtctcgactgccggatttggc

SEQ ID NO: 49567 - DNA, 63 bp, synthetic construct
  source 1..63: mol_type = other DNA
gacatgttccatctcgccgggaccggcgttgctagctccctcgaggtgaccctggaatctacc

SEQ ID NO: 49568 - DNA, 60 bp, synthetic construct
  source 1..60: mol_type = other DNA
gtggcctttattttttcctatagcgaagccagttctcacctggagcctctgattgctagt

SEQ ID NO: 49569 - DNA, 60 bp, synthetic construct
  source 1..60: mol_type = other DNA
gccgtgccaaccgtggctgttataagctccgacgctgccctggatgagtacttcatcaac

SEQ ID NO: 49570 - DNA, 135 bp, synthetic construct
  source 1..135: mol_type = other DNA
aacatcggcaacgcactgattttcgccgatgaggcagccttccaagggagcaacggactcctgtctatgttctctaacaccaatgggactggcctgccaatcttagactcttcacttacggcaattactcaagca

SEQ ID NO: 49571 - DNA, 51 bp, synthetic construct
  source 1..51: mol_type = other DNA
cccggactcgccgccttgggtactggcgacgtgaccacactggctagcgcc

SEQ ID NO: 49572 - DNA, 75 bp, synthetic construct
  source 1..75: mol_type = other DNA
gccatgggcatgaacgattgcgccctggacgacctggctaacgtcgggagcaatcacctcgttcaagatgatgtg

SEQ ID NO: 49573 - DNA, 42 bp, synthetic construct
  source 1..42: mol_type = other DNA
gctattgtggatgccatcgccgacgtcgggaatgctggagac

SEQ ID NO: 49574 - DNA, 63 bp, synthetic construct
  source 1..63: mol_type = other DNA
gaaattctgatctactaccttcccgattcctatatgttcgccgatggctacgtggagtcaatg

SEQ ID NO: 49575 - DNA, 57 bp, synthetic construct
  source 1..57: mol_type = other DNA
gaccagttcgggattgtttcatcgggcaccgtgaaccccgagtcctttaacgtcatg

SEQ ID NO: 49576 - DNA, 39 bp, synthetic construct
  source 1..39: mol_type = other DNA
tccgagatcatcagtagcgtgattcagggctctaacaca

SEQ ID NO: 49577 - DNA, 57 bp, synthetic construct
  source 1..57: mol_type = other DNA
cccaacatctccattatccggtctggcgacctggccgctattaagatcggaagcatc

SEQ ID NO: 49578 - DNA, 30 bp, synthetic construct
  source 1..30: mol_type = other DNA
tacgacaaggtgcaggccagcttcgaaccc

SEQ ID NO: 49579 - DNA, 33 bp, synthetic construct
  source 1..33: mol_type = other DNA
ggctattcttccgacgtccttggggttggctcg

SEQ ID NO: 49580 - DNA, 54 bp, synthetic construct
  source 1..54: mol_type = other DNA
atcttcggcctcaacggggccaatctgattcccgacaacatcaccatcatgact

SEQ ID NO: 49581 - DNA, 33 bp, synthetic construct
  source 1..33: mol_type = other DNA
agctcggttggctatcacctgccaaccctcaac

SEQ ID NO: 49582 - DNA, 33 bp, synthetic construct
  source 1..33: mol_type = other DNA
acagccatgggctacaccctgcctgagctcaac

SEQ ID NO: 49583 - DNA, 60 bp, synthetic construct
  source 1..60: mol_type = other DNA
gagcacttcggaatcgtcagctcgggcctggtggacggcgaatctgtgaccatcatggtg

SEQ ID NO: 49584 - DNA, 33 bp, synthetic construct
  source 1..33: mol_type = other DNA
accgccatgggctacacactgcctgagctgaac

SEQ ID NO: 49585 - DNA, 33 bp, synthetic construct
  source 1..33: mol_type = other DNA
agcgccatgggctacacgctaccggagctcaac

SEQ ID NO: 49586 - DNA, 39 bp, synthetic construct
  source 1..39: mol_type = other DNA
atcctgagctttggacaacacgagtttacccatcctttc

SEQ ID NO: 49587 - DNA, 117 bp, synthetic construct
  source 1..117: mol_type = other DNA
cggaccatgccgtgcctgtggcatagcccaatccaagtcctaaagtatagcatgcacttggaatacttcccttttgtcgttttcccacaagtgttcaaccaaatgggagatgatgcc

SEQ ID NO: 49588 - DNA, 60 bp, synthetic construct
  source 1..60: mol_type = other DNA
gagaacttcgggatcgtgtctgagggcattatcgactctactactgtttctgtcatgagc

SEQ ID NO: 49589 - DNA, 33 bp, synthetic construct
  source 1..33: mol_type = other DNA
aaggtctgctcatggggttttttctcaatcgag

SEQ ID NO: 49590 - DNA, 63 bp, synthetic construct
  source 1..63: mol_type = other DNA
gccatgcccttcgatcctgctacgttcactgcccaaccgcacctggcctacgtgttcggattc

SEQ ID NO: 49591 - DNA, 63 bp, synthetic construct
  source 1..63: mol_type = other DNA
gagaacgtcggcatcatgggggccgatctggtcgggcagagcacacttagtctgttcgaagtg

SEQ ID NO: 49592 - DNA, 60 bp, synthetic construct
  source 1..60: mol_type = other DNA
tacctctacaataccgccatcgacgtattcaactccactaacgacttctactatactctg

SEQ ID NO: 49593 - DNA, 60 bp, synthetic construct
  source 1..60: mol_type = other DNA
atctgcggcgagaatattatggtccagctgctgcacggtggctacgaggtcatgaactcc

SEQ ID NO: 49594 - DNA, 30 bp, synthetic construct
  source 1..30: mol_type = other DNA
ctggggaatggcggaaactaccacttcacc

SEQ ID NO: 49595 - DNA, 48 bp, synthetic construct
  source 1..48: mol_type = other DNA
aacaacttccggttttccaatggaatcttctctatggagtctcagtgg

SEQ ID NO: 49596 - DNA, 51 bp, synthetic construct
  source 1..51: mol_type = other DNA
cagttcccctttaaggttatcgccatgaacagtcactatgctaataacttc

SEQ ID NO: 49597 - DNA, 33 bp, synthetic construct
  source 1..33: mol_type = other DNA
aactacaagatgctgcacatcaatgacggtaag

SEQ ID NO: 49598 - DNA, 60 bp, synthetic construct
  source 1..60: mol_type = other DNA
gggcacttcggcatagtcggagggaacctgatgggcgaccagcctacttggatggatgta

SEQ ID NO: 49599 - DNA, 54 bp, synthetic construct
  source 1..54: mol_type = other DNA
gagaacatagggctcaatggcgccaccctgacacccgaaactgtgaccgtgatg

SEQ ID NO: 49600 - DNA, 33 bp, synthetic construct
  source 1..33: mol_type = other DNA
gagctggacttcaagttcattatcgagaactac

SEQ ID NO: 49601 - DNA, 36 bp, synthetic construct
  source 1..36: mol_type = other DNA
aagctgcctagcgtgaccggctcctctgctcatcca

SEQ ID NO: 49602 - DNA, 45 bp, synthetic construct
  source 1..45: mol_type = other DNA
gtgttcacaaccaacaatgccaactttgtggatgctttcgtggac

SEQ ID NO: 49603 - DNA, 63 bp, synthetic construct
  source 1..63: mol_type = other DNA
gagcacttcggcattacaagccctggcaccgtcgaacagagctctgtgaacatcttttccatc

SEQ ID NO: 49604 - DNA, 54 bp, synthetic construct
  source 1..54: mol_type = other DNA
gagatgttcaacctcctgcccgtggacgagacccctctcaacctgaacattatc

SEQ ID NO: 49605 - DNA, 291 bp, synthetic construct
  source 1..291: mol_type = other DNA
gtgagcggcatgacgattttctcccctttgctgcgaattgggcgcatcgagcaatattccctttcttccattaaaacggtcctttccaatattcaactcattggacacaatgccaacgccagctactggggcgctgagggcaccgcctttgccgaaggatacatcactcttccaatgcaactggtactgtttttcgggctgccctttcctatgtttttcggcatccttgtgaaccagaaggacacgatcgattacatgctgcccgggatcttcggctgggggttcgatttc

SEQ ID NO: 49606 - DNA, 285 bp, synthetic construct
  source 1..285: mol_type = other DNA
gatactgcgtttccacaagtagttaagaacaagacagtcgatagcaacatcacctactctactacaaagacgaactactcatcggctgagatcgactcaagtgacagtgatgattcctctagctcttcctcttcttctattgatactggagatagttcaggcggcggttcctcctatgatggcggaagttctggtggaggatccagctccggcggcggtagctcaggcggcggctcatctagcggtggcggctcttctggcggtggttcttctagtggaggtggc

SEQ ID NO: 49607 - DNA, 87 bp, synthetic construct
  source 1..87: mol_type = other DNA
attaatagcgcgccctctctgggcggatacatgacaaccggactgggggctaacggctacggcgctgcctcttcggtcggaataaac

SEQ ID NO: 49608 - DNA, 36 bp, synthetic construct
  source 1..36: mol_type = other DNA
aagctgccttctgtgaccggaagctccgcacatccc

SEQ ID NO: 49609 - DNA, 48 bp, synthetic construct
  source 1..48: mol_type = other DNA
aatgtggtgaccgctaacaacgccagcttcgtcgatgcctttgtggat

SEQ ID NO: 49610 - DNA, 294 bp, synthetic construct
  source 1..294: mol_type = other DNA
gtgttcaacttcgacttcgataaggtgtctcctaccgagtccgtcgccactatacaagatacggcctttcccgagttcaaggaggttaagacttctaacacaacatcaacctcgcacaacaacagttggtccacgtcgagttcgaatacaatcgagaccactactgacacatcctccacaccatcttcggattccagcgggagcggcggtggccagcagagcgatcctggctctgatggcggcggaagcgacagtggaggaggcacaactcccaataatggaggaaacgctaac

SEQ ID NO: 49611 - DNA, 39 bp, synthetic construct
  source 1..39: mol_type = other DNA
cggcccttccacctgatctttatcaacaacttcttcgag

SEQ ID NO: 49612 - DNA, 228 bp, synthetic construct
  source 1..228: mol_type = other DNA
gtcgccacccctgagatctccatgggcagccccgtgaatttttacaacctctccaacaactccaatatcccactgaacaactctaacattacatacgacgacgagaacgtgcaccttaacatcaacgtggatatcgacgatgaggaagagaagaatattaccatcaaccgatacgataataggactacattcctgattagcaactatgactcgagccagtccaatgtt

SEQ ID NO: 49613 - DNA, 60 bp, synthetic construct
  source 1..60: mol_type = other DNA
ggaaacttcggtatcgtcggcggcgacttagttgggagtcatcctacctggatggatatc

SEQ ID NO: 49614 - DNA, 60 bp, synthetic construct
  source 1..60: mol_type = other DNA
ggcaacttcggcattgtcggcggcgatctgatcggacccaatcctacctggatggatgtg

SEQ ID NO: 49615 - DNA, 57 bp, synthetic construct
  source 1..57: mol_type = other DNA
gtgcgggagctggactacagcattttcaagtcctttctgatcctcacaccaacatat

SEQ ID NO: 49616 - DNA, 54 bp, synthetic construct
  source 1..54: mol_type = other DNA
ctcgacgccagcggcctggcctccatcgcttctggcgaggagaacatcatctca

SEQ ID NO: 49617 - DNA, 87 bp, synthetic construct
  source 1..87: mol_type = other DNA
atcaattctgctcctatgctgggcggatacgccgccaccggtctgggacagaacggatttgggagcgcaagcagtgtcggtctagac

SEQ ID NO: 49618 - DNA, 87 bp, synthetic construct
  source 1..87: mol_type = other DNA
atcaacagctctgcctacctgggcggctacgctacaaccgggctgggacagaatggcttcgggatggccagtagcgttggcctcaat

SEQ ID NO: 49619 - DNA, 51 bp, synthetic construct
  source 1..51: mol_type = other DNA
ggaacctggggcatacccgacgtcggcaacagcaacgccaacattgtgact

SEQ ID NO: 49620 - DNA, 90 bp, synthetic construct
  source 1..90: mol_type = other DNA
atcaactcggcaccgtctctgggcggctacgctgtgaccggactggggcagaatggattcgggtccgcttctctcgttggactcaacgtt

SEQ ID NO: 49621 - DNA, 87 bp, synthetic construct
  source 1..87: mol_type = other DNA
atcaacagtgctccgtcgctgggaggatatgcagccactggcttgggccagaatggatttggttcggcgagttctgtcggcatcgac

SEQ ID NO: 49622 - DNA, 87 bp, synthetic construct
  source 1..87: mol_type = other DNA
atcaactccgctcccgaccttggcggatacatgacaaccgggctagggcagaatggtttcgggtccgctagtagcgttgggttgaac

SEQ ID NO: 49623 - DNA, 60 bp, synthetic construct
  source 1..60: mol_type = other DNA
cagtttatgggcctcgatgggttcagcgagtcctaccctacaatcaacctgttcaacgac

SEQ ID NO: 49624 - DNA, 87 bp, synthetic construct
  source 1..87: mol_type = other DNA
ataaattctagcgctcacctgggcggctacgctctgaccggacttgggcaaaacggcttcggacccgcatcttctgtcggcctaaac

SEQ ID NO: 49625 - DNA, 69 bp, synthetic construct
  source 1..69: mol_type = other DNA
ttcggggtccgcggacccattggcaagttctttctggagtttttcgccgtgaaaatagcttttagcgcc

SEQ ID NO: 49626 - DNA, 81 bp, synthetic construct
  source 1..81: mol_type = other DNA
ctggccggcaacatcgcacggcagacgcgtaccctgccaatggcagtatatagcgaagtagcagccgggaacatgggagaa

SEQ ID NO: 49627 - DNA, 51 bp, synthetic construct
  source 1..51: mol_type = other DNA
gacgcctccggactcgcctctaccgggtccggcgacgcagacatcgtcccc

SEQ ID NO: 49628 - DNA, 51 bp, synthetic construct
  source 1..51: mol_type = other DNA
agtgcatacggcatccctgacgtcgggaacagtgatgccaacgtgatcaca

SEQ ID NO: 49629 - DNA, 87 bp, synthetic construct
  source 1..87: mol_type = other DNA
atcaactcttccgcccatctcggcggctacatgacaaccgggctgggccagaacggattcggcactgcatccgctgtcggactcaac

SEQ ID NO: 49630 - DNA, 36 bp, synthetic construct
  source 1..36: mol_type = other DNA
aagaatcagctgtatagcgccatcggcgtgtacaac

SEQ ID NO: 49631 - DNA, 54 bp, synthetic construct
  source 1..54: mol_type = other DNA
aatattatctcccttgacatgaacggcatgaagcccatcaacatagtgtccgcc

SEQ ID NO: 49632 - DNA, 39 bp, synthetic construct
  source 1..39: mol_type = other DNA
gccgccttcggtttttccggttttatgttgggagctgac

SEQ ID NO: 49633 - DNA, 84 bp, synthetic construct
  source 1..84: mol_type = other DNA
aactctgcccctagcctcggcggttatatggctaccggactggggcaaaatgggttcggatcagcctcttcggttggtcttggc

SEQ ID NO: 49634 - DNA, 33 bp, synthetic construct
  source 1..33: mol_type = other DNA
aagacccagctgaacagcgtgatgggagcttac

SEQ ID NO: 49635 - DNA, 30 bp, synthetic construct
  source 1..30: mol_type = other DNA
ggcagcaaggagtccctgttcggactggac

SEQ ID NO: 49636 - DNA, 57 bp, synthetic construct
  source 1..57: mol_type = other DNA
cctaacatcattggcctgaacatgaatgacatgaagcccatcaatgtagtgtccgtg

SEQ ID NO: 49637 - DNA, 57 bp, synthetic construct
  source 1..57: mol_type = other DNA
cagtgcattggtatcacgtctacggcaccatactctacaactgttacggtggaatcc

SEQ ID NO: 49638 - DNA, 87 bp, synthetic construct
  source 1..87: mol_type = other DNA
atcaactctgctccgtcactaggaggctacgctgcaacgggccttgggcaaaacggtttcggctccgctagctctgttggcttatct

SEQ ID NO: 49639 - DNA, 87 bp, synthetic construct
  source 1..87: mol_type = other DNA
atcaacagtgcaccaattctgggcggatatgctgcaaccggcctggggcagaatggattcggatctgcaagctcggtcgggctagac

SEQ ID NO: 49640 - DNA, 57 bp, synthetic construct
  source 1..57: mol_type = other DNA
gtgcgggagctggactacagcatcttcaagtccttcctcattctgacacccacttat

SEQ ID NO: 49641 - DNA, 87 bp, synthetic construct
  source 1..87: mol_type = other DNA
atcaacagcgctccatcactcggtggctacgccgctactggactgggccagaatgggttcggctctgcatcctcggtcggtcttgat

SEQ ID NO: 49642 - DNA, 72 bp, synthetic construct
  source 1..72: mol_type = other DNA
cccctgactggcgcctccgtgaatccagctcgatccctggctcctgccttgttcctcggtggtcaggctctc

SEQ ID NO: 49643 - DNA, 69 bp, synthetic construct
  source 1..69: mol_type = other DNA
gaacaggaatgggcaaaggccctggggaccagcaaagattccggcacatccccacaacaactcatcgac

SEQ ID NO: 49644 - DNA, 30 bp, synthetic construct
  source 1..30: mol_type = other DNA
gtgaaaaagtacctgaagaagggattcccc

SEQ ID NO: 49645 - DNA, 87 bp, synthetic construct
  source 1..87: mol_type = other DNA
accagcgctccaagccttggtggatacgctgccacgggcctagggcagaacggcttcgggtcagccagcagtgtcattgtcggaggt

SEQ ID NO: 49646 - DNA, 36 bp, synthetic construct
  source 1..36: mol_type = other DNA
atgctgagcgtgcccatccaatttatcaacatgtac

SEQ ID NO: 49647 - DNA, 36 bp, synthetic construct
  source 1..36: mol_type = other DNA
atgatctacgtaccccaagagtttattagcatgtac

SEQ ID NO: 49648 - DNA, 87 bp, synthetic construct
  source 1..87: mol_type = other DNA
atcaacagcgctccgagtctgggtggctacaccgctacgggcctggggcagaatggattcggctccgcttcaagtgttggacttgat

SEQ ID NO: 49649 - DNA, 90 bp, synthetic construct
  source 1..90: mol_type = other DNA
gagaatcagaatcctattaactcgttgtccatggtatccaatgcctttacttcaaatggctacgctgtgctgggatcttccgtagtcggg

SEQ ID NO: 49650 - DNA, 30 bp, synthetic construct
  source 1..30: mol_type = other DNA
cccagcctcaatctacaaacggagatcatt

SEQ ID NO: 49651 - DNA, 57 bp, synthetic construct
  source 1..57: mol_type = other DNA
aacgttcgaagtcttgattattctatgtttggctctttcctgatcctgacaccaacc

SEQ ID NO: 49652 - DNA, 30 bp, synthetic construct
  source 1..30: mol_type = other DNA
atcagcgacctgggcaccacacccatttcc

SEQ ID NO: 49653 - DNA, 51 bp, synthetic construct
  source 1..51: mol_type = other DNA
gatgcatctggcctggcctccatcggatctggcgacgccgacatagtgccc

SEQ ID NO: 49654 - DNA, 33 bp, synthetic construct
  source 1..33: mol_type = other DNA
aaggaccagctctattccgccattggcatctac

SEQ ID NO: 49655 - DNA, 54 bp, synthetic construct
  source 1..54: mol_type = other DNA
aacataatctcacttaatatggaggacatgaaacccattaacatagtctcggtc

SEQ ID NO: 49656 - DNA, 51 bp, synthetic construct
  source 1..51: mol_type = other DNA
aacgccaacggcatccccgatgtaactaaagccgacgcgaatgtggtcgct

SEQ ID NO: 49657 - DNA, 60 bp, synthetic construct
  source 1..60: mol_type = other DNA
tcagttagggagctcgactactctatcttcaagtcctttctgattctgactccaacatat

SEQ ID NO: 49658 - DNA, 90 bp, synthetic construct
  source 1..90: mol_type = other DNA
ttctttcattctcaaccccaactagcagccatctactctgcctccccttccgtcgccgtgaacgagatggctagcgtgctggttggaccc

SEQ ID NO: 49659 - DNA, 30 bp, synthetic construct
  source 1..30: mol_type = other DNA
atgtacgttccgcaagcgttcatttcaatg

SEQ ID NO: 49660 - DNA, 48 bp, synthetic construct
  source 1..48: mol_type = other DNA
atggtgcctgtgccgccttacgtgccactcgagatcgtcaagatgtat

SEQ ID NO: 49661 - DNA, 54 bp, synthetic construct
  source 1..54: mol_type = other DNA
ctgttcactagcgggctgccagatgtcggaacctccgacgccaacatcgttacc

SEQ ID NO: 49662 - DNA, 87 bp, synthetic construct
  source 1..87: mol_type = other DNA
ataaacactgctccatctctcggcggatacatggccaccggcctgggtcagaacggatttggagcggcaagtagcgttggtatcaac

SEQ ID NO: 49663 - DNA, 87 bp, synthetic construct
  source 1..87: mol_type = other DNA
atcaattctgcgccgtcattgggcggttacatggccaccgggctgggacagaacggcttcggcgctgcatcaactgttggcattaac

SEQ ID NO: 49664 - DNA, 33 bp, synthetic construct
  source 1..33: mol_type = other DNA
cggacccagctgaacagcatcattggagtctac

SEQ ID NO: 49665 - DNA, 30 bp, synthetic construct
  source 1..30: mol_type = other DNA
tccaaggacgccatcttcggactgaacagc

SEQ ID NO: 49666 - DNA, 57 bp, synthetic construct
  source 1..57: mol_type = other DNA
cctaatatcatttcgctagacttcaacgagatgaagcccatcaatatcggctctatc

SEQ ID NO: 49667 - DNA, 45 bp, synthetic construct
  source 1..45: mol_type = other DNA
ctgagtcagcctgctagccccacttggtctggcgttttgggactg

SEQ ID NO: 49668 - DNA, 36 bp, synthetic construct
  source 1..36: mol_type = other DNA
atccccatggtctccgggggatcttgggaggctttc

SEQ ID NO: 49669 - DNA, 45 bp, synthetic construct
  source 1..45: mol_type = other DNA
gctgtctgggaagacacctttgatgtcttcggccatgctatgagc

SEQ ID NO: 49670 - DNA, 90 bp, synthetic construct
  source 1..90: mol_type = other DNA
cttttcatttcccccgaggccctgagctctctctacgcctggtcggttgggtctattgacatcgctggctccggagtcaacggctggagc

SEQ ID NO: 49671 - DNA, 33 bp, synthetic construct
  source 1..33: mol_type = other DNA
atgtttgtgcctcctgagttcgtttccatgtac

SEQ ID NO: 49672 - DNA, 45 bp, synthetic construct
  source 1..45: mol_type = other DNA
tacgccaacaagatccccgacgtttctaacatcaatcccaacatc

SEQ ID NO: 49673 - DNA, 69 bp, synthetic construct
  source 1..69: mol_type = other DNA
ttcggggttcgtggtccgataggcagctttttcatcgagttctttgcctacaagattgctttttcatgg

SEQ ID NO: 49674 - DNA, 81 bp, synthetic construct
  source 1..81: mol_type = other DNA
ctcgcaggcaatatcgccggtcaaactcgaaccctgccgatggcagtttattccgaagtggcagccggaaacatgggtgag

SEQ ID NO: 49675 - DNA, 30 bp, synthetic construct
  source 1..30: mol_type = other DNA
gctgggcttggcactgaggctcttgccgcc

SEQ ID NO: 49676 - DNA, 51 bp, synthetic construct
  source 1..51: mol_type = other DNA
atcctggaagccattggggcgcgcgatacgatgcagtactcactggactac

SEQ ID NO: 49677 - DNA, 33 bp, synthetic construct
  source 1..33: mol_type = other DNA
atgtacgtgcctcaagcatttatcggcatgtat

SEQ ID NO: 49678 - DNA, 30 bp, synthetic construct
  source 1..30: mol_type = other DNA
gcaggactgggcgctgaacctttggccgca

SEQ ID NO: 49679 - DNA, 45 bp, synthetic construct
  source 1..45: mol_type = other DNA
ctggagctgatgggcgccagctccgtgatcaactacgctatggac

SEQ ID NO: 49680 - DNA, 69 bp, synthetic construct
  source 1..69: mol_type = other DNA
ttcggagttcgaggtcccattgggagctttttcatcgacttctttgcctacaagatcgctttctcttgg

SEQ ID NO: 49681 - DNA, 81 bp, synthetic construct
  source 1..81: mol_type = other DNA
ctcgccggcaacattgctggacagacccgaaccctgccaatggctgtgtattccgaagtggctgccgggaacatgggagaa

SEQ ID NO: 49682 - DNA, 165 bp, synthetic construct
  source 1..165: mol_type = other DNA
aacaaccccctggtcatggattatcaggactcaagcgtgacctgcggcccaacctccctgagcatggcagctcagatgctctacggaaatacatccgagagcgctttcaagaaggcctgtaacaccgactctaacgggacatctcctgatgagttggtagctggg

SEQ ID NO: 49683 - DNA, 48 bp, synthetic construct
  source 1..48: mol_type = other DNA
cgcaattctagcgccgtcaagaactccctcaagctgggcaaaccagtg

SEQ ID NO: 49684 - DNA, 33 bp, synthetic construct
  source 1..33: mol_type = other DNA
accaagggcatcaaaaaatgtgctttctctcag

SEQ ID NO: 49685 - DNA, 42 bp, synthetic construct
  source 1..42: mol_type = other DNA
ctcgtgctaagttcctcgcaagccgagtttacccaccctttc

SEQ ID NO: 49686 - DNA, 171 bp, synthetic construct
  source 1..171: mol_type = other DNA
gcctcagtgacagggatgactgtttttagtcccatgctccggctgggtagaatagaacagtacagtctatcttctatcaaaactgtgctcactaacgtccagctcataggccataatgcaaacgcctcctattggggtgcagaggggactgctttcgccgagggatacatc

SEQ ID NO: 49687 - DNA, 87 bp, synthetic construct
  source 1..87: mol_type = other DNA
attaacagcgctccctctctcggcggctacatggcgacaggtttaggacagaatggctttggagcggctagcagcgttggaataaac

SEQ ID NO: 49688 - DNA, 72 bp, synthetic construct
  source 1..72: mol_type = other DNA
atggacttcgtgaccctcggcggaaacctccttgggacaattcaactcggcgatatcgtcctctaccttacc

SEQ ID NO: 49689 - DNA, 54 bp, synthetic construct
  source 1..54: mol_type = other DNA
gccgcaaccggcacactctctctggctgtgcttagccaaatgcccgcatctccc

SEQ ID NO: 49690 - DNA, 69 bp, synthetic construct
  source 1..69: mol_type = other DNA
ttcggagtcagggggcccatcggggctttcttcatcgacttcttcgccgtcaagatcgcatttagttgg

SEQ ID NO: 49691 - DNA, 81 bp, synthetic construct
  source 1..81: mol_type = other DNA
ctcgccggtaacatcgccggccaaactaggaccctgcctatggctgtgtattctgaggtagcggccgggaatatgggagat

SEQ ID NO: 49692 - DNA, 90 bp, synthetic construct
  source 1..90: mol_type = other DNA
atcaacagtgctcctagcctgggaggatacgccgtgaccggccttggccaaaacggattcggcgctgagtcttctgtcggactgaacctg

SEQ ID NO: 49693 - DNA, 30 bp, synthetic construct
  source 1..30: mol_type = other DNA
gggcagaacatcggcatcattttcaacgcc

SEQ ID NO: 49694 - DNA, 123 bp, synthetic construct
  source 1..123: mol_type = other DNA
tacaccatcccactgcacccttatgcctacgggatggcctgcggcattggctcggcctcaatgaacgccgccgctgtggcctctctctccacaattttccctcaatatgcagtcgagatggag

SEQ ID NO: 49695 - DNA, 60 bp, synthetic construct
  source 1..60: mol_type = other DNA
atggtggtggacatcgttcctcaattcgtccctgccttctttcaaagtgtcatggtttat

SEQ ID NO: 49696 - DNA, 78 bp, synthetic construct
  source 1..78: mol_type = other DNA
atggtcatggatctcggaacactcggcggcaatctgctgggcaccattccccttggcgatatcgtgctatatgtcaca

SEQ ID NO: 49697 - DNA, 54 bp, synthetic construct
  source 1..54: mol_type = other DNA
gcttctaccggcacactgtccctggccgtgctgagtcaaatgcccgcaaacccc

SEQ ID NO: 49698 - DNA, 66 bp, synthetic construct
  source 1..66: mol_type = other DNA
tttggggtccggggccccatcggcaagttcttcatcgagttcttcgccgtgaaaatcgctttctcc

SEQ ID NO: 49699 - DNA, 87 bp, synthetic construct
  source 1..87: mol_type = other DNA
ctggccggaaacatcgccggccagacccggacactgccaatggcagtttatagtgaagtggctgctggcaatatggcgggagccgaa

SEQ ID NO: 49700 - DNA, 57 bp, synthetic construct
  source 1..57: mol_type = other DNA
cttggaggcgatctcttcggcaccatccccctgggcgacattgtgctgtacctgaac

SEQ ID NO: 49701 - DNA, 54 bp, synthetic construct
  source 1..54: mol_type = other DNA
gctgcaactggcacactgagcctgttcgagctccagaccctgccccttaacgcc

SEQ ID NO: 49702 - DNA, 69 bp, synthetic construct
  source 1..69: mol_type = other DNA
tttggagttcggggccccatcggaagcttcttcatcgagttctttgccgtcaagattgctttctcttgg

SEQ ID NO: 49703 - DNA, 81 bp, synthetic construct
  source 1..81: mol_type = other DNA
ctcgctggcaacatcgcgggactgacccgaaccctgccgatggcagtatactccgaagttgcggccggcaacatgggcgaa

SEQ ID NO: 49704 - DNA, 69 bp, synthetic construct
  source 1..69: mol_type = other DNA
tttggcgtccgcggtcccattggcaaatttttcatcgacttcttcaccgtcaagatcgccttttcttgg

SEQ ID NO: 49705 - DNA, 81 bp, synthetic construct
  source 1..81: mol_type = other DNA
ctggctggcaatatcgcgggcgagactcgcacgctgcccatggccgtttattcggaagttgcagccggcaatatgggagaa

SEQ ID NO: 49706 - DNA, 60 bp, synthetic construct
  source 1..60: mol_type = other DNA
atggtcgcctctattatcccacaatttgtacctgctttctactctagcatgtattccacg

SEQ ID NO: 49707 - DNA, 69 bp, synthetic construct
  source 1..69: mol_type = other DNA
ttcggagtccgcgggcccattggccggtttttcctggacttctttaccgtgaagtccgcttttgcgata

SEQ ID NO: 49708 - DNA, 81 bp, synthetic construct
  source 1..81: mol_type = other DNA
ctggctgggaatatcgctggccagacccgcacactgccgatggccgtgtatagcgaagtcgccgccgggaatatgggggag

SEQ ID NO: 49709 - DNA, 57 bp, synthetic construct
  source 1..57: mol_type = other DNA
atggtcgcctctgtgatcccgcaatttgtgcccgcattttactcctctatgtacacc

SEQ ID NO: 49710 - DNA, 69 bp, synthetic construct
  source 1..69: mol_type = other DNA
cagttccggtccgctatcggcgaggccctggacgtggtctttagcgtgattgacttcgatggcaagtac

SEQ ID NO: 49711 - DNA, 81 bp, synthetic construct
  source 1..81: mol_type = other DNA
gtcaacaatactgtccccgacgatctgattgacatcgtgatgccctggggcaccgcaaatttgctcgattacatctggttt

SEQ ID NO: 49712 - DNA, 57 bp, synthetic construct
  source 1..57: mol_type = other DNA
atggtcgcctctgtgattcctcaatttgtacctgctttttactcctccatgtatagc

SEQ ID NO: 49713 - DNA, 36 bp, synthetic construct
  source 1..36: mol_type = other DNA
ggcctgagctcctacgatctggacttcaacaatcct

SEQ ID NO: 49714 - DNA, 45 bp, synthetic construct
  source 1..45: mol_type = other DNA
cctaacaagctgctgttctacttctacttcctcgccaatttgctt

SEQ ID NO: 49715 - DNA, 78 bp, synthetic construct
  source 1..78: mol_type = other DNA
atgggcatggacttcgtgacactcggcggtaacctgctcgggaccatccctctgggcgacattgtcctgtacctcacc

SEQ ID NO: 49716 - DNA, 54 bp, synthetic construct
  source 1..54: mol_type = other DNA
gcatctaccgggaccttgtccctggccgtgctgagtcagatgcctgcttctccc

SEQ ID NO: 49717 - DNA, 33 bp, synthetic construct
  source 1..33: mol_type = other DNA
ggcctcagctcctacgatctggacttcaccaac

SEQ ID NO: 49718 - DNA, 42 bp, synthetic construct
  source 1..42: mol_type = other DNA
aacaagatcattttcttcatcgactttctcactagcttccac

SEQ ID NO: 49719 - DNA, 69 bp, synthetic construct
  source 1..69: mol_type = other DNA
ggcctgacttccttcgacgggaccgagaccggcctggacgggatgttgcggccaagccacggaatgcgc

SEQ ID NO: 49720 - DNA, 48 bp, synthetic construct
  source 1..48: mol_type = other DNA
ccccatcatcgcatcccttgccatgatggcaagctcaggctgcaccac

SEQ ID NO: 49721 - DNA, 36 bp, synthetic construct
  source 1..36: mol_type = other DNA
aacatgcccatccctttcggaaccagtggacacatg

SEQ ID NO: 49722 - DNA, 33 bp, synthetic construct
  source 1..33: mol_type = other DNA
gggagcactgtgatgggggacgtgatctctgga

SEQ ID NO: 49723 - DNA, 69 bp, synthetic construct
  source 1..69: mol_type = other DNA
ttcggcgtccggggccccattgggtcctttttcatcgactttttcgccttcaagatagcattcagctgg

SEQ ID NO: 49724 - DNA, 81 bp, synthetic construct
  source 1..81: mol_type = other DNA
ctcgccgggaacatagcagaccagacccggaccttgccgatggcagtctactccgaggtggccgctggcaacatgggagat

SEQ ID NO: 49725 - DNA, 69 bp, synthetic construct
  source 1..69: mol_type = other DNA
ttcggcgtccgaggtcccatcggccggttctttatcgacttcttcgctgtcaagattgcctttagttgg

SEQ ID NO: 49726 - DNA, 81 bp, synthetic construct
  source 1..81: mol_type = other DNA
ctcgcaggcaacatcgccggccagacccgcacgctgcccatggcggtctactccgatgtcgctgcgggcaatatgggaagc

SEQ ID NO: 49727 - DNA, 33 bp, synthetic construct
  source 1..33: mol_type = other DNA
gagcttgtcatgggggtgaccatcctgaacgac

SEQ ID NO: 49728 - DNA, 57 bp, synthetic construct
  source 1..57: mol_type = other DNA
cccatcctgtacaacctctttgagcaatacgtttatattatcgctgctagcgtgttt

SEQ ID NO: 49729 - DNA, 66 bp, synthetic construct
  source 1..66: mol_type = other DNA
tttggagtccgaggacccatcggcaaattctttatcgacttcttcgccgtgaagattgctttctct

SEQ ID NO: 49730 - DNA, 81 bp, synthetic construct
  source 1..81: mol_type = other DNA
ctggctgggaacattgccggacagaccagaaccctgccaatggccgtatatagcgaggttgccgctggcaatatggggtct

SEQ ID NO: 49731 - DNA, 72 bp, synthetic construct
  source 1..72: mol_type = other DNA
atggacatcgtgacccttggagggaatctcctggggaccattcctctcggcgatattgtcctctaccttact

SEQ ID NO: 49732 - DNA, 54 bp, synthetic construct
  source 1..54: mol_type = other DNA
gcggccactgggacactctcactatctgtgctctcccaaatgagcgcaagtcca

SEQ ID NO: 49733 - DNA, 75 bp, synthetic construct
  source 1..75: mol_type = other DNA
atgatggatttcgtcactctcggcggcgacctgctcgggacaatcccactgggcgacattgtgctgtaccttacc

SEQ ID NO: 49734 - DNA, 54 bp, synthetic construct
  source 1..54: mol_type = other DNA
gccagtaccggcacactgtcacttgccgtgctctcgcaaatgcccgcttctccc

SEQ ID NO: 49735 - DNA, 30 bp, synthetic construct
  source 1..30: mol_type = other DNA
accatcggctaccccatgcctaacttcaac

SEQ ID NO: 49736 - DNA, 36 bp, synthetic construct; identical to SEQ ID NO: 48908
  source 1..36: mol_type = other DNA

SEQ ID NO: 49737 - DNA, 39 bp, synthetic construct
  source 1..39: mol_type = other DNA
gccttccctgagcccaacaccatggccgctatcaccaag

SEQ ID NO: 49738 - DNA, 48 bp, synthetic construct
  source 1..48: mol_type = other DNA
gacctgatcttcgacaagaacgtgatgtcttactcgatatatgactcc

SEQ ID NO: 49739 - DNA, 69 bp, synthetic construct
  source 1..69: mol_type = other DNA
ttcggagttagagggcccatcgggaagttcttcatcgactttttcgccgtcaagattgcttttagttgg

SEQ ID NO: 49740 - DNA, 81 bp, synthetic construct
  source 1..81: mol_type = other DNA
attgccgggaatattgccaaccaaaccaggacacttccaatggctgtatactccgaggtcgcggccggcaatatgggggac

SEQ ID NO: 49741 - DNA, 69 bp, synthetic construct
  source 1..69: mol_type = other DNA
gggctgggattccacatcgattactcatcgtttctgatggctgcgggcccagggctgggcgatcctatt

SEQ ID NO: 49742 - DNA, 69 bp, synthetic construct
  source 1..69: mol_type = other DNA
tttggcgtccggggacccataggcagcttcttcatcgactttttcgccatcaagattgctttctcatgg

SEQ ID NO: 49743 - DNA, 81 bp, synthetic construct
  source 1..81: mol_type = other DNA
ttggccgggaatatcgctggacagacaaggacgctccctatggccgtgtattctgaggtggccgccggaaacatgggtgaa

SEQ ID NO: 49744 - DNA, 66 bp, synthetic construct
  source 1..66: mol_type = other DNA
ttcggggttcgtggtgtcatcggcaagtttttcatcgagtttttcgcctacaaaatcgctttctcc

SEQ ID NO: 49745 - DNA, 81 bp, synthetic construct
  source 1..81: mol_type = other DNA
ttggccggcaatatcgcggggcagaccaggaccttgcctctggctgtgtattctgaggtcgctgcgggtaacatggtcgaa

SEQ ID NO: 49746 - DNA, 69 bp, synthetic construct
  source 1..69: mol_type = other DNA
tttggtgtcagagggccaattggttctttcttcgtcgagttcttcgcctacaagatcgcttttagttgg

SEQ ID NO: 49747 - DNA, 81 bp, synthetic construct
  source 1..81: mol_type = other DNA
ctcgccggtaacatcgccggtcagacacggaccctgcctatggctgtgtactccgaggtcgccgctggaaatatgggagac

SEQ ID NO: 49748 - DNA, 30 bp, synthetic construct
  source 1..30: mol_type = other DNA
accatcggctaccccatgccgcaatttaat

SEQ ID NO: 49749 - DNA, 69 bp, synthetic construct
  source 1..69: mol_type = other DNA
ttcggtgtccgggggcccattggcaaattcttcatcgacttcttcgcttttaagatcgcctttagttgg

SEQ ID NO: 49750 - DNA, 81 bp, synthetic construct
  source 1..81: mol_type = other DNA
ctggctggaaacattgctgggcaaactcgcacccttcctatggccgtttatagcgaagtggcggctggtaacatgggaaca

SEQ ID NO: 49751 - DNA, 105 bp, synthetic construct
  source 1..105: mol_type = other DNA
gaaattatcgtgttcaaggagaacaataacatcagctccctgaacgccacaatcaatggatctgagattgtgcccggaatcaacggcctcaccgtcgatgttgag

SEQ ID NO: 49752 - DNA, 117 bp, synthetic construct
  source 1..117: mol_type = other DNA
gtttatgaggaagttaagccttccatctccctcgccgactaccccgagaagacaatcgtcagcggcaacagccagaagaaggctgtgaccattctgatctctaacaagaacatcaac

SEQ ID NO: 49753 - DNA, 231 bp, synthetic construct
  source 1..231: mol_type = other DNA
atcgtccttgatgaagatttttgttacttctcaaaacagaaagttaaaccaactatcattctgaataacagtaatttcataaagtatataaatgacgtgaaaagcggctcaattatttacattgacgacgacttggataaaatctatattgatgtgctgatcaaacacattaaattctacaatcttaacatccttaaactggacacccacctctccgagagcaaccatatc

SEQ ID NO: 49754 - DNA, 66 bp, synthetic construct
  source 1..66: mol_type = other DNA
ttcggtgtcaggggtcccatcggcaaattcttcattgactttttcaccgtcaagattgctttctca

SEQ ID NO: 49755 - DNA, 81 bp, synthetic construct
  source 1..81: mol_type = other DNA
ctggcaggcaacatcgcgggacagacccggacacttcctatggccgtttactctgaagtagccgcgggaaacatgggggaa

SEQ ID NO: 49756 - DNA, 63 bp, synthetic construct
  source 1..63: mol_type = other DNA
atgcactacccactggccggcaacggcattctgccaatcgctgagcagctgagccctaccttc

SEQ ID NO: 49757 - DNA, 57 bp, synthetic construct
  source 1..57: mol_type = other DNA
tacaccctgaacttagactactcgatgttcacccctttcctgatcctgacacctact

SEQ ID NO: 49758 - DNA, 66 bp, synthetic construct
  source 1..66: mol_type = other DNA
tttggcgtccgaggtcccatcgggaaatttttcatcgacttcttcaccgtcaagattgcattctca

SEQ ID NO: 49759 - DNA, 81 bp, synthetic construct
  source 1..81: mol_type = other DNA
attgctggcaatatcgctgggcagaccaggactctgcccatggctgtgtactccgaagtggccgcgggaaatatgggggac

SEQ ID NO: 49760 - DNA, 72 bp, synthetic construct
  source 1..72: mol_type = other DNA
atggactttattacacttggaggcgatctgctcggcgtgatccctctcggggacatcgtactgtaccttacc

SEQ ID NO: 49761 - DNA, 54 bp, synthetic construct
  source 1..54: mol_type = other DNA
gcagccaccggcacactgtccctcgagatcctgagctctatgcctgctaaccct

SEQ ID NO: 49762 - DNA, 69 bp, synthetic construct
  source 1..69: mol_type = other DNA
ttcggcgtcagggggcccattgggcacttcctgatcgaatacttctctgtaaagatcgcattttcgtgg

SEQ ID NO: 49763 - DNA, 84 bp, synthetic construct
  source 1..84: mol_type = other DNA
ctggccggaaatatcgccggcgaaacccggacactgcccatggccgtatactctgaggtcgctgccggtaacatgctcgatgcc

SEQ ID NO: 49764 - DNA, 69 bp, synthetic construct
  source 1..69: mol_type = other DNA
atattcggggtccggggacccatcggcaaattcttcatcgactttttcaccgtgaagatcgcctttagc

SEQ ID NO: 49765 - DNA, 81 bp, synthetic construct
  source 1..81: mol_type = other DNA
ctggcaggcaacatcgctggccagacacgcacactgccgatggccgtgtactccgaggtagccgctggaaatatgggagat

SEQ ID NO: 49766 - DNA, 72 bp, synthetic construct
  source 1..72: mol_type = other DNA
atggacttcgtgactctcggtggtaacctcctgggcacaattcctcttggcgacatcgtcttgtacctgaac

SEQ ID NO: 49767 - DNA, 54 bp, synthetic construct
  source 1..54: mol_type = other DNA
gcctctaccggcacactgtctttacaagtcctgagccagatgcctgctaacccc

SEQ ID NO: 49768 - DNA, 69 bp, synthetic construct
  source 1..69: mol_type = other DNA
ttcggggtccggggcccggttggacagtttttcctggacttctttgccgtcaaaatcgctttctcatgg

SEQ ID NO: 49769 - DNA, 81 bp, synthetic construct
  source 1..81: mol_type = other DNA
ctcgccgggaacatcgccggccaaactcggaccctgcccatggccgtctattctgaggttgccgctggaaacatgggagac

SEQ ID NO: 49770 - DNA, 69 bp, synthetic construct
  source 1..69: mol_type = other DNA
ttcggggtccggggtcccattggcaaattctttctggacttctttaccgtgaagttttctgctagcatt

SEQ ID NO: 49771 - DNA, 81 bp, synthetic construct
  source 1..81: mol_type = other DNA
atcgccgggaatattgccggtcagacaagaacactgcctatggccgtgtatagtgaagtcgcagctggaaatatgggagag

SEQ ID NO: 49772 - DNA, 72 bp, synthetic construct
  source 1..72: mol_type = other DNA
atggatatagctgccctatcgggggaaatattcggattcatcccactcggggacatcatgctgtacatcaca

SEQ ID NO: 49773 - DNA, 54 bp, synthetic construct
  source 1..54: mol_type = other DNA
ggcgctaccggcacactgagcatcctgaacttggcacaaatacagcccaatccc

SEQ ID NO: 49774 - DNA, 36 bp, synthetic construct
  source 1..36: mol_type = other DNA
aagatgccttccgtttccgggtcgtgttcccatccc

SEQ ID NO: 49775 - DNA, 30 bp, synthetic construct
  source 1..30: mol_type = other DNA
gcattcccgggtgctgatatcggagcaacc

SEQ ID NO: 49776 - DNA, 39 bp, synthetic construct
  source 1..39: mol_type = other DNA
gctgccctgccatacccctatagcctccctaccttcaac

SEQ ID NO: 49777 - DNA, 69 bp, synthetic construct
  source 1..69: mol_type = other DNA
ttcggagttcggggtcccatcgggaaatttttcatcgacttctttaccgtcaagattgcctttagttgg

SEQ ID NO: 49778 - DNA, 81 bp, synthetic construct
  source 1..81: mol_type = other DNA
attgcggggaacatcgccggccagaccaggactctccccatggccgtgtactccgaggtggcagctggcaatatgggcgac

SEQ ID NO: 49779 - DNA, 54 bp, synthetic construct
  source 1..54: mol_type = other DNA
ggcggaaatctccttgggatcgtgcccctgggcgacattgtcttctacctgaac

SEQ ID NO: 49780 - DNA, 54 bp, synthetic construct
  source 1..54: mol_type = other DNA
gcatgcggtacagtttccctccttgccatacaaagcatgccgacaacagcaaag

SEQ ID NO: 49781 - DNA, 36 bp, synthetic construct
  source 1..36: mol_type = other DNA
gacgccgtgtacctcgatgagtcagacggactgatc

SEQ ID NO: 49782 - DNA, 72 bp, synthetic construct
  source 1..72: mol_type = other DNA
atgaatatcggtagtcttggcggcgacctgctggggctgattcctctgggcgacatagtgctctacatcaat

SEQ ID NO: 49783 - DNA, 51 bp, synthetic construct
  source 1..51: mol_type = other DNA
gcctgcggaaccgtgtctctcctggccatccaaagcattaagcccaccgct

SEQ ID NO: 49784 - DNA, 42 bp, synthetic construct
  source 1..42: mol_type = other DNA
tggatgtctcattttagttttatagagctgttgactgagggg

SEQ ID NO: 49785 - DNA, 51 bp, synthetic construct
  source 1..51: mol_type = other DNA
aaggttgtggatggcccataccccttcctgaaagtaaacagccagccaatc

SEQ ID NO: 49786 - DNA, 72 bp, synthetic construct
  source 1..72: mol_type = other DNA
atggactttgcaactctcggtggaaacatcttcggcacaataccactgggggacattgtgctttacatcacc

SEQ ID NO: 49787 - DNA, 54 bp, synthetic construct
  source 1..54: mol_type = other DNA
gcctctactggtacacttagcctggaggtgctttcccaaatccaagctacacca

SEQ ID NO: 49788 - DNA, 72 bp, synthetic construct
  source 1..72: mol_type = other DNA
atggatttcgtcacactcgggggcaacctcctcggcactattcctcttggtgacatcgttctctacatcacc

SEQ ID NO: 49789 - DNA, 54 bp, synthetic construct
  source 1..54: mol_type = other DNA
gcctccaccggcactctgagcctcgctgtgctgagtcaaatgcccgctacaccc

SEQ ID NO: 49790 - DNA, 30 bp, synthetic construct
  source 1..30: mol_type = other DNA
gtgagccagatcccctttgacggtagtgtg

SEQ ID NO: 49791 - DNA, 42 bp, synthetic construct
  source 1..42: mol_type = other DNA
agcgcttacaacgcctccctctctcccaactacaatttcgcc

SEQ ID NO: 49792 - DNA, 69 bp, synthetic construct
  source 1..69: mol_type = other DNA
gcaacctccctgggcctggacgccagcgctttcccacttgattctggctggctgctcatttgtgtcgat

SEQ ID NO: 49793 - DNA, 78 bp, synthetic construct
  source 1..78: mol_type = other DNA
gggaccgactttggcattcaggccttaaactccatattcggccatctgtttgggacggttcatggtcacactgctttt

SEQ ID NO: 49794 - DNA, 168 bp, synthetic construct
  source 1..168: mol_type = other DNA
gaaacatgcccatattgcgggtccgaggctgtctatagctcaggaaacgggtatcgctgtgctgaatgcggcaattacatttccaaccctgacgacctgaacctgaactacgaggagggctactacgagctcacgttgccttcatttatcaatagcatcaacaaggtc

SEQ ID NO: 49795 - DNA, 165 bp, synthetic construct
  source 1..165: mol_type = other DNA
acctgcccctattgtggatcggaggccatctacccatccggaaacggctatcggtgccaggaatgcgggaattacatctccaaccccgacgacctgaacctcaactacgaggaaggatactatgagctctacctggctcctatgctatactctattaacggttct

SEQ ID NO: 49796 - DNA, 33 bp, synthetic construct
  source 1..33: mol_type = other DNA
acacagtacactaccaacatgggagcttcagcc

SEQ ID NO: 49797 - DNA, 36 bp, synthetic construct
  source 1..36: mol_type = other DNA
aacatgcccatccctttcggaacctctggacacatg

SEQ ID NO: 49798 - DNA, 72 bp, synthetic construct
  source 1..72: mol_type = other DNA
atggacttcattaccctgggcggaaacttgttagggacagtgccacttggcgatattgtgctttacgttact

SEQ ID NO: 49799 - DNA, 54 bp, synthetic construct
  source 1..54: mol_type = other DNA
gcctccactggcaccctgtctctggccgtgttgagccagatgtccgctacacct

SEQ ID NO: 49800 - DNA, 72 bp, synthetic construct
  source 1..72: mol_type = other DNA
atggatttcgtcactttggggggcaacttgctgggtacaatcagcctcggcgacatcgttctatacgtcact

SEQ ID NO: 49801 - DNA, 54 bp, synthetic construct
  source 1..54: mol_type = other DNA
gccagcaccggcacactgtgcctggccatcttaagccaaatgcatgctaacccc

SEQ ID NO: 49802 - DNA, 36 bp, synthetic construct
  source 1..36: mol_type = other DNA
ggcctgagctcttacgatctggacctcaacaactcc

SEQ ID NO: 49803 - DNA, 39 bp, synthetic construct
  source 1..39: mol_type = other DNA
cccaacaagctgctcttctacctgaattttctgagtctg

SEQ ID NO: 49804 - DNA, 30 bp, synthetic construct
  source 1..30: mol_type = other DNA
agcatcggctaccctatgcccgagttcaac

SEQ ID NO: 49805 - DNA, 69 bp, synthetic construct
  source 1..69: mol_type = other DNA
ttcggcgtcagagggcccattgggtccttctttatcgactttttcgcctacaagatcgcattttcgtgg

SEQ ID NO: 49806 - DNA, 81 bp, synthetic construct
  source 1..81: mol_type = other DNA
ctggcaggcaatatcgccggacagacccgcacactgcctctggctgtgtactcggaggtagcggcggggaacatgggcgaa

SEQ ID NO: 49807 - DNA, 30 bp, synthetic construct
  source 1..30: mol_type = other DNA
accagcatcggctaccccatgcctaagttc

SEQ ID NO: 49808 - DNA, 72 bp, synthetic construct
  source 1..72: mol_type = other DNA
atggacttcgtcactctcggtggcaacctcttcgggaccattcctcttggcgacatagtcctctacgtgact

SEQ ID NO: 49809 - DNA, 54 bp, synthetic construct
  source 1..54: mol_type = other DNA
gcgagcacggggacactgtccctgttcgagctgtctcaactgccacctaaccca

SEQ ID NO: 49810 - DNA, 294 bp, synthetic construct
  source 1..294: mol_type = other DNA
ggaatattcagcctggactccgactctttgtcgaatacaaacgtgtccgcaaccgtgatcgacactgcgttccccgacgtggctgatgtttcgtcaattattaacgagaccgccggcgagaatttcaccaatgtgacaggctacgactcaacttatagtgaaatagagaccgttgaggaggcctactccgtgccgacaagttatgagacaccccaaagctccgacaccggaggagaagctcccgaagctcagcctcaacaaggaggtggtggcgaagcggcgcccgcggaaggg

SEQ ID NO: 49811 - DNA, 33 bp, synthetic construct
  source 1..33: mol_type = other DNA
tataccaaagtctcattaatccgctatgagaac

SEQ ID NO: 49812 - DNA, 36 bp, synthetic construct
  source 1..36: mol_type = other DNA
aacatgcccatccctttcggaaccagcggacacatg

SEQ ID NO: 49813 - DNA, 69 bp, synthetic construct
  source 1..69: mol_type = other DNA
tctgggctgggcagtgcccctgtttcgtccatcccctacgctatgaacctcatcggaaatatcgagatc

SEQ ID NO: 49814 - DNA, 30 bp, synthetic construct
  source 1..30: mol_type = other DNA
atgtatttcattccgcctgcgtacaacctg

SEQ ID NO: 49815 - DNA, 69 bp, synthetic construct
  source 1..69: mol_type = other DNA
tccgggctgggcagtgccccggtttcaagcattccctacgccatggacctcgtctgggctatcgagatc

SEQ ID NO: 49816 - DNA, 30 bp, synthetic construct
  source 1..30: mol_type = other DNA
atgggctttatccctcctgccgacaacttc

SEQ ID NO: 49817 - DNA, 69 bp, synthetic construct
  source 1..69: mol_type = other DNA
tccggcctcggctctgctccggtatctagtatcccctacgccattgacctgatttggctgatcaacatc

SEQ ID NO: 49818 - DNA, 57 bp, synthetic construct
  source 1..57: mol_type = other DNA
cttggaggcgatgtcatgggcaccatccccctgggcgacattgtgctctacctgaat

SEQ ID NO: 49819 - DNA, 54 bp, synthetic construct
  source 1..54: mol_type = other DNA
gccgctaccggcacactgagcctcttcgagctggcggcaattcctgcttctccc

SEQ ID NO: 49820 - DNA, 69 bp, synthetic construct
  source 1..69: mol_type = other DNA
agtgggctgggctccgcccctgtgtctagcataccctattcgatgaacctcatctgggctatcgagatc

SEQ ID NO: 49821 - DNA, 30 bp, synthetic construct
  source 1..30: mol_type = other DNA
atgtacttcatccccaatagcgacaacctg

SEQ ID NO: 49822 - DNA, 72 bp, synthetic construct
  source 1..72: mol_type = other DNA
atgctgatcgaggacctcggcggcaacatcttgggcaccattcccctgggcgacattgtcctgtacctgaat

SEQ ID NO: 49823 - DNA, 54 bp, synthetic construct
  source 1..54: mol_type = other DNA
gcagctacgggaaccctgagcctgttcgagctcgcaagcatccctgccaacccc

SEQ ID NO: 49824 - DNA, 60 bp, synthetic construct
  source 1..60: mol_type = other DNA
cccatgagcgacgccgccgctgctgtaatagttgatgctaggctggacggcgatatcgac

SEQ ID NO: 49825 - DNA, 33 bp, synthetic construct
  source 1..33: mol_type = other DNA
aagacatttagcctttacgacattatccttccc

SEQ ID NO: 49826 - DNA, 54 bp, synthetic construct
  source 1..54: mol_type = other DNA
ctgcccgggacagacctcgctacctctaacgccttctccattatcttgggaagc

SEQ ID NO: 49827 - DNA, 69 bp, synthetic construct
  source 1..69: mol_type = other DNA
agcgggctgggctccgctccggtctcaagcatcccctacgccatggacctcatctggatggtcgagatc

SEQ ID NO: 49828 - DNA, 159 bp, synthetic construct
  source 1..159: mol_type = other DNA
cccaattgcgggtcagaagctatttatagttctggaaatgggtaccgttgcgcggaatgcggatattcaatcaacaaccctgatgacctgaatcttaactacgaggagggctactatgagctcaccctgccatccttcatctactctatgaacaacgtg

SEQ ID NO: 49829 - DNA, 30 bp, synthetic construct
  source 1..30: mol_type = other DNA
accattggctatagcatgcccgagttcaac

SEQ ID NO: 49830 - DNA, 69 bp, synthetic construct
  source 1..69: mol_type = other DNA
agttgcttgggctctgcacccgtgtcttccatcccttacgccatcaacctcatctggctggtcgagatc

SEQ ID NO: 49831 - DNA, 30 bp, synthetic construct
  source 1..30: mol_type = other DNA
ctgggcttcatccccatggctgacagtgtg

SEQ ID NO: 49832 - DNA, 51 bp, synthetic construct
  source 1..51: mol_type = other DNA
aggaacgctagcttcaccgcctattttgaggaacacctgggcgacctgtgg

SEQ ID NO: 49833 - DNA, 30 bp, synthetic construct
  source 1..30: mol_type = other DNA
accgggatgctgcccgacttctattacggc

SEQ ID NO: 49834 - DNA, 69 bp, synthetic construct
  source 1..69: mol_type = other DNA
tctggattgggctctgctcccgtctcttctatcccctacgccatgaacctgatctgggctgtcgagatt

SEQ ID NO: 49835 - DNA, 30 bp, synthetic construct
  source 1..30: mol_type = other DNA
atgtacttcatcccacctgcggacaacctg

SEQ ID NO: 49836 - DNA, 51 bp, synthetic construct
  source 1..51: mol_type = other DNA
aggaacgcctcgtttacggcgtatttcgaagagcacttgggcgacttgtgg

SEQ ID NO: 49837 - DNA, 30 bp, synthetic construct
  source 1..30: mol_type = other DNA
accggcatgctgcccgacttctattacggc

SEQ ID NO: 49838 - DNA, 69 bp, synthetic construct
  source 1..69: mol_type = other DNA
tctgatttaggttccgcccctgtctcgagcatcccctacgctatgaacctcatttgggccatcgagatc

SEQ ID NO: 49839 - DNA, 30 bp, synthetic construct
  source 1..30: mol_type = other DNA
atgtacttcatcccgagcgcagattcgttg

SEQ ID NO: 49840 - DNA, 48 bp, synthetic construct
  source 1..48: mol_type = other DNA
atgatcgctgctacgtttgtgcccgagtacacagccagcattttcttg

SEQ ID NO: 49841 - DNA, 36 bp, synthetic construct
  source 1..36: mol_type = other DNA
aagctgccttccgtgaccgggagctgttctcatccc

SEQ ID NO: 49842 - DNA, 36 bp, synthetic construct
  source 1..36: mol_type = other DNA
gccttccctgagcccacaatcatggctgcaatcaca

SEQ ID NO: 49843 - DNA, 30 bp, synthetic construct
  source 1..30: mol_type = other DNA
agcaacctgggctcgactcccgtggcttcc

SEQ ID NO: 49844 - DNA, 30 bp, synthetic construct
  source 1..30: mol_type = other DNA
gtgagctttatacctcccgcccctaacttc

SEQ ID NO: 49845 - DNA, 36 bp, synthetic construct
  source 1..36: mol_type = other DNA
aagctgccttctgtgaccggaagctgctcccatccc

SEQ ID NO: 49846 - DNA, 30 bp, synthetic construct
  source 1..30: mol_type = other DNA
gccttccccgctccttcctttggatcagca

SEQ ID NO: 49847 - DNA, 36 bp, synthetic construct; identical to SEQ ID NO: 48908
  source 1..36: mol_type = other DNA

SEQ ID NO: 49848 - DNA, 30 bp, synthetic construct
  source 1..30: mol_type = other DNA
gcttttcccgctcctaacttcggagccgct

SEQ ID NO: 49849 - DNA, 36 bp, synthetic construct
  source 1..36: mol_type = other DNA
aagctgccttccgtgaccggcagctgctctcatccc

SEQ ID NO: 49850 - DNA, 30 bp, synthetic construct
  source 1..30: mol_type = other DNA
gcatttcctgctcccacattcggaggtgcc

SEQ ID NO: 49851 - DNA, 36 bp, synthetic construct
  source 1..36: mol_type = other DNA
aagctgccttctgtaaccggaagctgctcccatccc

SEQ ID NO: 49852 - DNA, 33 bp, synthetic construct
  source 1..33: mol_type = other DNA
gcattcccggcgcccagcttcggatcggccttg

SEQ ID NO: 49853 - DNA, 36 bp, synthetic construct
  source 1..36: mol_type = other DNA
aagttaccttcggtaacagggtcctgctctcatccc

SEQ ID NO: 49854 - DNA, 39 bp, synthetic construct
  source 1..39: mol_type = other DNA
gccttccccgagcctaacaccatggccgctatcaccaag

SEQ ID NO: 49855 - DNA, 69 bp, synthetic construct
  source 1..69: mol_type = other DNA
ctggctgggctgggcacaacccctatctcttgtatacccgcaacactgagctacagtacccctcttagc

SEQ ID NO: 49856 - DNA, 30 bp, synthetic construct
  source 1..30: mol_type = other DNA
gtgtttagcttcatagaccccggtagctat

SEQ ID NO: 49857 - DNA, 180 bp, synthetic construct
  source 1..180: mol_type = other DNA
aacaagatcaacctcaattccctcctgattaaggacaactctgccaagttcgattacattagcgctaaccctgtgatcgacgccattcggatcatgaacgtcaacggcggcctgctgatttctgagtttgccgctatcttcaatggaaccatcaagacacctactaacttcgtgttcaag

SEQ ID NO: 49858 - DNA, 36 bp, synthetic construct
  source 1..36: mol_type = other DNA
aagctgccctctgtgaccggaagctgctcccatcct

SEQ ID NO: 49859 - DNA, 30 bp, synthetic construct
  source 1..30: mol_type = other DNA
gccttccccgctcctacctttggagctgcc

SEQ ID NO: 49860 - DNA, 60 bp, synthetic construct
  source 1..60: mol_type = other DNA
ctccatatcaccggcttcgagcacacaattgggctgatcgaagctgcaatgtcctcaagc

SEQ ID NO: 49861 - DNA, 54 bp, synthetic construct
  source 1..54: mol_type = other DNA
gccattgtcgtggacaaggagaccggccgggaaagcatcgtgatcgacaaggat

SEQ ID NO: 49862 - DNA, 57 bp, synthetic construct
  source 1..57: mol_type = other DNA
atcaaggctatttgccgggcctgtaactatggcgaatatgatctggacccagctaag

SEQ ID NO: 49863 - DNA, 48 bp, synthetic construct
  source 1..48: mol_type = other DNA
ggctgcaacgccctggctttccccgtgtcaagcggacctggatctcga

SEQ ID NO: 49864 - DNA, 87 bp, synthetic construct
  source 1..87: mol_type = other DNA
agcaccttccttaatttccccgagtttgagctggaatccctcgtcttcaactattaccacacactgcacctaattcgcgtccatgac

SEQ ID NO: 49865 - DNA, 66 bp, synthetic construct
  source 1..66: mol_type = other DNA
atggtgaccgtgatccccggttccgacctgctgacatccgcccttaacgtcattgcacaatccctc

SEQ ID NO: 49866 - DNA, 51 bp, synthetic construct
  source 1..51: mol_type = other DNA
cccgggctcgccgcactcggctctggagacgtgaacacacttgcaagcgct

SEQ ID NO: 49867 - DNA, 36 bp, synthetic construct
  source 1..36: mol_type = other DNA
aagctgcctagcgtgaccggctcttgctcccatcct

SEQ ID NO: 49868 - DNA, 30 bp, synthetic construct
  source 1..30: mol_type = other DNA
gcctttcccgcacctacattctctgccgca

SEQ ID NO: 49869 - DNA, 36 bp, synthetic construct
  source 1..36: mol_type = other DNA
aagctgccttccgtgaccggaagctgctctcatcca

SEQ ID NO: 49870 - DNA, 30 bp, synthetic construct
  source 1..30: mol_type = other DNA
gccttccccgctcctaccttcgagacagca

SEQ ID NO: 49871 - DNA, 36 bp, synthetic construct
  source 1..36: mol_type = other DNA
aagctgcctagcgtgaccggctcctgctctcatccc

SEQ ID NO: 49872 - DNA, 30 bp, synthetic construct
  source 1..30: mol_type = other DNA
gccttccctgcaccaacttttggagcttcc

SEQ ID NO: 49873 - DNA, 36 bp, synthetic construct
  source 1..36: mol_type = other DNA
aagctgccttccgtgaccggaagctgttcccacccc

SEQ ID NO: 49874 - DNA, 30 bp, synthetic construct
  source 1..30: mol_type = other DNA
gccttccccgctcctacctttggagaagcc

SEQ ID NO: 49875 - DNA, 90 bp, synthetic construct
  source 1..90: mol_type = other DNA
ggcctgcccgctctcacacatcagcctgcaagctttaacgggttcctgaactacctgatctgcttcaagggttccgactaccctcacatg

SEQ ID NO: 49876 - DNA, 36 bp, synthetic construct
  source 1..36: mol_type = other DNA
ctgaccatcgacgccgagtttacggttaaggatttc

SEQ ID NO: 49877 - DNA, 36 bp, synthetic construct; identical to SEQ ID NO: 48908
  source 1..36: mol_type = other DNA

SEQ ID NO: 49878 - DNA, 30 bp, synthetic construct
  source 1..30: mol_type = other DNA
gccttcccatcgccgaactttggaactgca

SEQ ID NO: 49879 - DNA, 36 bp, synthetic construct
  source 1..36: mol_type = other DNA
aagctgccttccgtgaccggaagctgctctcatccc

SEQ ID NO: 49880 - DNA, 30 bp, synthetic construct
  source 1..30: mol_type = other DNA
gcgttcccgtcacctagtttcggatctgcc

SEQ ID NO: 49881 - DNA, 69 bp, synthetic construct
  source 1..69: mol_type = other DNA
atggccacaaccatccccggcggcgagatcctttctggcaccctcaacgtctctcaacaacaggcgatt

SEQ ID NO: 49882 - DNA, 51 bp, synthetic construct
  source 1..51: mol_type = other DNA
cccggactggccgctctcggagctggcgatatgatcactctcacctcaaac

SEQ ID NO: 49883 - DNA, 36 bp, synthetic construct
  source 1..36: mol_type = other DNA
aagctgcctagcgtgaccggctcttgttcccatccc

SEQ ID NO: 49884 - DNA, 30 bp, synthetic construct
  source 1..30: mol_type = other DNA
gctttccctgcacccgacatgagcacagct

SEQ ID NO: 49885 - DNA, 57 bp, synthetic construct
  source 1..57: mol_type = other DNA
gctctgcccgagctccagatcgcaaactattctgattttatcgtgttcattagcact

SEQ ID NO: 49886 - DNA, 36 bp, synthetic construct
  source 1..36: mol_type = other DNA
aacatgcctatccccttcgggacaagcggacacatg

SEQ ID NO: 49887 - DNA, 90 bp, synthetic construct
  source 1..90: mol_type = other DNA
ttcggggacggagaagagtctgtaaacgacttcatcatgatctttgccgaggccgcgggcatggacggggacattacctggaatggtgtg

SEQ ID NO: 49888 - DNA, 48 bp, synthetic construct
  source 1..48: mol_type = other DNA
ggatggaccctgaggcacactgctgcaagcgcttctgggttcagcacg

SEQ ID NO: 49889 - DNA, 36 bp, synthetic construct
  source 1..36: mol_type = other DNA
gttagtggactgggcgccgatgcattggcggccgga

SEQ ID NO: 49890 - DNA, 48 bp, synthetic construct
  source 1..48: mol_type = other DNA
ctgaacgtgatgggggccggaaagaccatcggctacgccacggactac

SEQ ID NO: 49891 - DNA, 42 bp, synthetic construct
  source 1..42: mol_type = other DNA
aatcttaactttggggtcaagggcgtttgccatttcaatttc

SEQ ID NO: 49892 - DNA, 33 bp, synthetic construct
  source 1..33: mol_type = other DNA
cagctcgtgatgggcatcaccatcctgaataac

SEQ ID NO: 49893 - DNA, 45 bp, synthetic construct
  source 1..45: mol_type = other DNA
ccctttctgttctcgctctttgagaagtacctgggcatcaagtcc

SEQ ID NO: 49894 - DNA, 60 bp, synthetic construct
  source 1..60: mol_type = other DNA
atcgccattcccggtggcgcattcctgaccgctgccctcaacctgattagtcaaagtcta

SEQ ID NO: 49895 - DNA, 45 bp, synthetic construct
  source 1..45: mol_type = other DNA
gggctggctgccctgggaagcggcgacatcaatacactctctacc

SEQ ID NO: 49896 - DNA, 63 bp, synthetic construct
  source 1..63: mol_type = other DNA
ttcctcggcatccctatggccaccaacaccgcggatgcagcgctccattcgatcttccctttc

SEQ ID NO: 49897 - DNA, 81 bp, synthetic construct
  source 1..81: mol_type = other DNA
atgtatgttgtgatctacgttgtgtctattcccgggtccgagttcctgaccgccgcactcaatgtggttagccagtcgctc

SEQ ID NO: 49898 - DNA, 51 bp, synthetic construct
  source 1..51: mol_type = other DNA
cctggtctcgccgctctcggctctggagacgtctcgactctggcaagcgcc

SEQ ID NO: 49899 - DNA, 66 bp, synthetic construct
  source 1..66: mol_type = other DNA
ttccgggagccgatcggttctgctctgaacgtggtcttttgcgttgtggacttcggaggcgattac

SEQ ID NO: 49900 - DNA, 90 bp, synthetic construct
  source 1..90: mol_type = other DNA
gtcagtaacactgtgccgaccgagctgctcgatatcagcatgccatggggcacaactaacctgaacgacaccctgctcaatttcatgcct

SEQ ID NO: 49901 - DNA, 81 bp, synthetic construct
  source 1..81: mol_type = other DNA
cctgtgacttttaaaatcaacggggctacctatacccgcattagcgacgagaagggcatagccagcatcgcaattaacctg

SEQ ID NO: 49902 - DNA, 285 bp, synthetic construct
  source 1..285: mol_type = other DNA
ggagtcttcaactttgatttcgagtccctgtctgacgccaacgctgtggctattgtcaccgacaccgctttccccgacgtggccgacatccaagtgaataacaccgtgacaaacactagcaccaccgacgtcgccggcggatacgtggaaacagttcaggacacctccgggagttctagccaaggctcctcctcttacacaccttctgagccaacccctgccccttccactggtggcggaggcgagtcgcctgaatctgggagcagtagcgaacaacctgctggg

SEQ ID NO: 49903 - DNA, 57 bp, synthetic construct
  source 1..57: mol_type = other DNA
ttcatgagcatcatcaagaacgccgtcaacgacattttggtctacatagtgaacttt

SEQ ID NO: 49904 - DNA, 99 bp, synthetic construct
  source 1..99: mol_type = other DNA
gctggccccatcggggccactctaagtgaattccagaacatgtctagtagcacacctgctgcaatgcagaacgcctccgccgtggacctgttcatcaac

SEQ ID NO: 49905 - DNA, 51 bp, synthetic construct
  source 1..51: mol_type = other DNA
ctcatcgggcaactcttttcccaagtgctgcccaacggcggcatgaagttc

SEQ ID NO: 49906 - DNA, 33 bp, synthetic construct
  source 1..33: mol_type = other DNA
gtgcccttctctgagctgatcctgggaacatgg

SEQ ID NO: 49907 - DNA, 36 bp, synthetic construct
  source 1..36: mol_type = other DNA
aagatgcctagcgtgaccggctcctgctctcatccc

SEQ ID NO: 49908 - DNA, 36 bp, synthetic construct
  source 1..36: mol_type = other DNA
gccttccccctgccttcgttcgccgccgctttgcca

SEQ ID NO: 49909 - DNA, 33 bp, synthetic construct
  source 1..33: mol_type = other DNA
aagaccatcaattatagttttattatcttgccc

SEQ ID NO: 49910 - DNA, 51 bp, synthetic construct
  source 1..51: mol_type = other DNA
ctcccgtccaattcgccaaacagcgacgcctttgccgctatcctggggaca

SEQ ID NO: 49911 - DNA, 30 bp, synthetic construct
  source 1..30: mol_type = other DNA
ttcgtggatgacgacatgaacgacgaagtg

SEQ ID NO: 49912 - DNA, 57 bp, synthetic construct
  source 1..57: mol_type = other DNA
gctaacattgtgaatatcggcgtggcgaattctgatatgaattacgtctatgataca

SEQ ID NO: 49913 - DNA, 36 bp, synthetic construct
  source 1..36: mol_type = other DNA
atcggcgccgagaacatggtcatgatgttcgttggc

SEQ ID NO: 49914 - DNA, 81 bp, synthetic construct
  source 1..81: mol_type = other DNA
atggatggcgatatctttatggtctcctttcccggtagtgaccttgtcgcgagcgcgatgaacattatatcacaatctctg

SEQ ID NO: 49915 - DNA, 54 bp, synthetic construct
  source 1..54: mol_type = other DNA
cctggactggccgccttgggcgcaggggatatcaacaccttagcttcggcttcg

SEQ ID NO: 49916 - DNA, 60 bp, synthetic construct
  source 1..60: mol_type = other DNA
atgattattcaaggaacagagaccctgacatccctgattcatattatatcggagtctctc

SEQ ID NO: 49917 - DNA, 51 bp, synthetic construct
  source 1..51: mol_type = other DNA
cccgggttggcagctctggggagcggagacattacgaccctggccgagagc

SEQ ID NO: 49918 - DNA, 33 bp, synthetic construct
  source 1..33: mol_type = other DNA
aaaacgtttagcgtttacgacatcattcttccc

SEQ ID NO: 49919 - DNA, 57 bp, synthetic construct
  source 1..57: mol_type = other DNA
atgctgccgggtactgatttaaccatcagcaacgccttctccattatcctcggtaat

SEQ ID NO: 49920 - DNA, 60 bp, synthetic construct
  source 1..60: mol_type = other DNA
aataccgagaaagacaaggagtttgcgcgagaaattcgcaaccagcggatcgtgctgttc

SEQ ID NO: 49921 - DNA, 33 bp, synthetic construct
  source 1..33: mol_type = other DNA
aagacctttagcttctacgacttcatccttccc

SEQ ID NO: 49922 - DNA, 57 bp, synthetic construct
  source 1..57: mol_type = other DNA
gcactgcccgggactgatgccgccaccgctaacgcgttcaatatcatcttgggttcc

SEQ ID NO: 49923 - DNA, 39 bp, synthetic construct
  source 1..39: mol_type = other DNA
gccgaggtctatgacgtttactcaagtcaaggctttttc

SEQ ID NO: 49924 - DNA, 30 bp, synthetic construct
  source 1..30: mol_type = other DNA
agcaccggcaacatcgacttatgggttccg

SEQ ID NO: 49925 - DNA, 267 bp, synthetic construct
  source 1..267: mol_type = other DNA
gtggcactgaacactgtgcccgctaacaacaccacaaacgtcacaattaccgatagcgctttcactaccaaccagtccgtcgtgaacgccagcaacatgagcgccaatacaacaaataataccaccactgtgaaggccaccacaaagaagtattcttcatcgagttactcctctgggagttccagcaaaagctcatcttcgagacagtccaactccaagagttcttctaagggcagcaccagggacatctattcctctaactctacc

SEQ ID NO: 49926 - DNA, 42 bp, synthetic construct
  source 1..42: mol_type = other DNA
caaatcaccggaacgggaatgcagtactcccctttcgatacc

SEQ ID NO: 49927 - DNA, 45 bp, synthetic construct
  source 1..45: mol_type = other DNA
tgtggctacggcttctttgacatctctgggtactccttaagctcg

SEQ ID NO: 49928 - DNA, 66 bp, synthetic construct
  source 1..66: mol_type = other DNA
ctgaagaaccccacactcggctttaacatcattactatcgcttccatattcgtgatcctgcaagcc

SEQ ID NO: 49929 - DNA, 42 bp, synthetic construct
  source 1..42: mol_type = other DNA
cagatcaccggcactgggatgcagtacagccccttcgatacc

SEQ ID NO: 49930 - DNA, 66 bp, synthetic construct
  source 1..66: mol_type = other DNA
atggtctctacaatccccggctccgagattctcactagcaccctgaacatgatcagtcagtctctg

SEQ ID NO: 49931 - DNA, 51 bp, synthetic construct
  source 1..51: mol_type = other DNA
cccgggttggctgccctgggcgcaggggacgtgaataccctcgccaacgca

SEQ ID NO: 49932 - DNA, 54 bp, synthetic construct
  source 1..54: mol_type = other DNA
accttcaacctggactacagcatgttctcttcctttctgatcctcactcctacc

SEQ ID NO: 49933 - DNA, 33 bp, synthetic construct
  source 1..33: mol_type = other DNA
aagacctttgatttcttttcgtttgtgcttccc

SEQ ID NO: 49934 - DNA, 57 bp, synthetic construct
  source 1..57: mol_type = other DNA
ctgcctgcacccgctttctttgagaactccgacgccttcaatgtagtgctcggatct

SEQ ID NO: 49935 - DNA, 36 bp, synthetic construct; identical to SEQ ID NO: 49812
  source 1..36: mol_type = other DNA

SEQ ID NO: 49936 - DNA, 75 bp, synthetic construct
  source 1..75: mol_type = other DNA
atggttatttacgtggtcagcatacccggctccgagcttctgaccgccgctctgaacgttgttagtcaatcatta

SEQ ID NO: 49937 - DNA, 51 bp, synthetic construct
  source 1..51: mol_type = other DNA
cctggactcgctgcgctgggaagtggagacgtcaccacactggccaacgcc

SEQ ID NO: 49938 - DNA, 30 bp, synthetic construct
  source 1..30: mol_type = other DNA
ccctacgtactctactccaatggaggcggc

SEQ ID NO: 49939 - DNA, 93 bp, synthetic construct
  source 1..93: mol_type = other DNA
tctttcaccaagggttggggagctgaccccaacaccttcttcaccacaactctgctgcaaagcagcggcaattacctgcaccttgcccatttc

SEQ ID NO: 49940 - DNA, 69 bp, synthetic construct
  source 1..69: mol_type = other DNA
ctgaccctgcccggggccagcatcggactggcatatggctggcttctcctggctaagctctgcttcccc

SEQ ID NO: 49941 - DNA, 54 bp, synthetic construct
  source 1..54: mol_type = other DNA
acctttaacctggactactccatgttctctagcttcctgatcctcacacctacc

SEQ ID NO: 49942 - DNA, 48 bp, synthetic construct
  source 1..48: mol_type = other DNA
ggcgacatgcaagtttacctgatttcacatattaagctgcctcttaca

SEQ ID NO: 49943 - DNA, 63 bp, synthetic construct
  source 1..63: mol_type = other DNA
ggcctggagcttgccaacactgtgctcaaccactacaacataaccatcctgaacaacatcatt

SEQ ID NO: 49944 - DNA, 39 bp, synthetic construct
  source 1..39: mol_type = other DNA
aaagtgttcaacctgggcttctggggcttgacaactgac

SEQ ID NO: 49945 - DNA, 60 bp, synthetic construct
  source 1..60: mol_type = other DNA
tacatgccatatccttcgtactggaccggccaggaggcttatgcctacatgtttggattc

SEQ ID NO: 49946 - DNA, 36 bp, synthetic construct
  source 1..36: mol_type = other DNA
aattacaaccctgtggccgtcaactggatcggaacc

SEQ ID NO: 49947 - DNA, 39 bp, synthetic construct
  source 1..39: mol_type = other DNA
gccgtcggcgcatctttcgactccgccactgttgtggtt

SEQ ID NO: 49948 - DNA, 33 bp, synthetic construct
  source 1..33: mol_type = other DNA
aagaccttcatcatcaataacattgtgttgccc

SEQ ID NO: 49949 - DNA, 57 bp, synthetic construct
  source 1..57: mol_type = other DNA
ctgctgcctggcaccgaccccatcgtgtccaatgccttcaacattgtccttggtagc

SEQ ID NO: 49950 - DNA, 30 bp, synthetic construct
  source 1..30: mol_type = other DNA
aagagcgacctgggcacaacctctatctcc

SEQ ID NO: 49951 - DNA, 39 bp, synthetic construct
  source 1..39: mol_type = other DNA
ggctacctgaacgcccagctcgctttcctgctggacaac

SEQ ID NO: 49952 - DNA, 63 bp, synthetic construct
  source 1..63: mol_type = other DNA
aactctaccctcaacctggactacactatgttttcatcctttctgatcctgacacctacctac

SEQ ID NO: 49953 - DNA, 39 bp, synthetic construct
  source 1..39: mol_type = other DNA
aagattatcgatgttgggttccttggaatgcaagtgccc

SEQ ID NO: 49954 - DNA, 57 bp, synthetic construct
  source 1..57: mol_type = other DNA
cttccgagcccatcctactacaccggcggccctgctctccaattcgtattcacacag

SEQ ID NO: 49955 - DNA, 36 bp, synthetic construct
  source 1..36: mol_type = other DNA
ggccacctcaacgcccagctggctttcctgcttgac

SEQ ID NO: 49956 - DNA, 63 bp, synthetic construct
  source 1..63: mol_type = other DNA
aacagcaccatcaatctcgactacactatgttctcctccttcctgattctgacacctacttac

SEQ ID NO: 49957 - DNA, 57 bp, synthetic construct
  source 1..57: mol_type = other DNA
agcacactgaaccttaattaccggatgttttccgccttcctgatcctcactcctacc

SEQ ID NO: 49958 - DNA, 69 bp, synthetic construct
  source 1..69: mol_type = other DNA
atgcccgagagctgcttcgccgaagctgccgtttatggggttgctgacgccaagctggtagatcctgac

SEQ ID NO: 49959 - DNA, 36 bp, synthetic construct
  source 1..36: mol_type = other DNA
gagtttattcaagacactggcgttgaaggaggagca

SEQ ID NO: 49960 - DNA, 105 bp, synthetic construct
  source 1..105: mol_type = other DNA
acacacctgatcgacgggttcgactcatccatatataacatgattgctccctatatcaacgataacctgacctccatctttaagagtctcactttcttcggcgga

SEQ ID NO: 49961 - DNA, 69 bp, synthetic construct
  source 1..69: mol_type = other DNA
gtgcagcggccaaggcccgagatcctccggctggtccatgagacaagttactcttttccttccggacac

SEQ ID NO: 49962 - DNA, 66 bp, synthetic construct
  source 1..66: mol_type = other DNA
atggccatggccatccctggaggcgacttcctaacaacgggattgaacctgatcgcccaatcgcta

SEQ ID NO: 49963 - DNA, 48 bp, synthetic construct
  source 1..48: mol_type = other DNA
ggactggccgctctcgggagcggcgacgtgaataccctgtctgaaagc

SEQ ID NO: 49964 - DNA, 33 bp, synthetic construct
  source 1..33: mol_type = other DNA
gtgcccgtgttcgccctgtttctgcggttcgag

SEQ ID NO: 49965 - DNA, 90 bp, synthetic construct
  source 1..90: mol_type = other DNA
ctgtttaagggctggggctctaacccttccgtgttcttcacccggaccctgctgcattctacaagtaacccctacggactgacttacctg

SEQ ID NO: 49966 - DNA, 72 bp, synthetic construct
  source 1..72: mol_type = other DNA
atctgctgtttccctgcccgcattccataccggaataacggcctaatccaaccaaagctcgggcttagcatc

SEQ ID NO: 49967 - DNA, 96 bp, synthetic construct
  source 1..96: mol_type = other DNA
agcggcaatacaggagagattatgcaaaacattcagaacgcccagacaacaacccctaccacaactgacactctgggcaccaacccactggatctg

SEQ ID NO: 49968 - DNA, 51 bp, synthetic construct
  source 1..51: mol_type = other DNA
ctgggtccagtgctggggacttacctcgctcacggaggcctcggataccaa

SEQ ID NO: 49969 - DNA, 30 bp, synthetic construct
  source 1..30: mol_type = other DNA
ctgccattctcggagtggatccttggagcc

SEQ ID NO: 49970 - DNA, 63 bp, synthetic construct
  source 1..63: mol_type = other DNA
atggctatggccatacctggcggcgacttcctgaccaccggacttaacctcatcgcacaatcc

SEQ ID NO: 49971 - DNA, 48 bp, synthetic construct
  source 1..48: mol_type = other DNA
ggcttggccgctctgggaagcggggacgtgaacaccctctctcaaagc

SEQ ID NO: 49972 - DNA, 54 bp, synthetic construct
  source 1..54: mol_type = other DNA
aggagcgggtccgtggccgactactttgagcggcacttcggaggctctgaatac

SEQ ID NO: 49973 - DNA, 39 bp, synthetic construct
  source 1..39: mol_type = other DNA
aagatcattgacctgcacttcctcggcttggaggttccc

SEQ ID NO: 49974 - DNA, 60 bp, synthetic construct
  source 1..60: mol_type = other DNA
gtcctaccttctccggccttttatactggagactcttcacttcaatttgtgttcactcag

SEQ ID NO: 49975 - DNA, 42 bp, synthetic construct
  source 1..42: mol_type = other DNA
ttggactactctaaattcaccccttttctcatcctgacacca

SEQ ID NO: 49976 - DNA, 87 bp, synthetic construct
  source 1..87: mol_type = other DNA
ataaatagctctgcctatttgggcggctacctgacaaccggactcggccaaaatgggttcggagctgcctctactgtcggcattaac

SEQ ID NO: 49977 - DNA, 33 bp, synthetic construct
  source 1..33: mol_type = other DNA
tacctgaacacccagctggccttcctccttgac

SEQ ID NO: 49978 - DNA, 63 bp, synthetic construct
  source 1..63: mol_type = other DNA
aacagcaccctgaacctggactacaccatgttctcctctttcctcatcctgacacccacttac

SEQ ID NO: 49979 - DNA, 75 bp, synthetic construct
  source 1..75: mol_type = other DNA
caggcagacagctcctggacatggggatacaattctctgagcgatttcggcatctcttatggaacacctgccgcc

SEQ ID NO: 49980 - DNA, 36 bp, synthetic construct
  source 1..36: mol_type = other DNA
tacctgaacacccagtttgccttcctcctggacaac

SEQ ID NO: 49981 - DNA, 60 bp, synthetic construct
  source 1..60: mol_type = other DNA
aattcgactgtaaacctggactacaccatgttctcctcattcctgatcctcactcctaca

SEQ ID NO: 49982 - DNA, 39 bp, synthetic construct
  source 1..39: mol_type = other DNA
tacaccggcatcagactggagctcgggcccattcttgcc

SEQ ID NO: 49983 - DNA, 30 bp, synthetic construct
  source 1..30: mol_type = other DNA
accagccagatcccattcgacggaagtgta

SEQ ID NO: 49984 - DNA, 66 bp, synthetic construct
  source 1..66: mol_type = other DNA
atggtgctgaacattcccggtggcgagttccttaccggaagcctggacgtcattagtcaaagcctc

SEQ ID NO: 49985 - DNA, 51 bp, synthetic construct
  source 1..51: mol_type = other DNA
cccggtctggccgccctgggggcaggcgacattaacactctggcaagcagc

SEQ ID NO: 49986 - DNA, 36 bp, synthetic construct; identical to SEQ ID NO: 49812
  source 1..36: mol_type = other DNA

SEQ ID NO: 49987 - DNA, 231 bp, synthetic construct
  source 1..231: mol_type = other DNA
atattcgtggtcgagaattatacaccttctaactctaatacacactactacgatgtcggttccggttcctcccgcggaagctacagccatagtagccattctagccactacggcggggttgatacctccccgaacaccatcgccaaaaatgaccccgattggtactatgaccactacgaatacggcgacaacccggacatcgatgactacctcgaatcacagggttatgac

SEQ ID NO: 49988 - DNA, 63 bp, synthetic construct
  source 1..63: mol_type = other DNA
atgagcgtgtcaatccccggcggcgagttcctgaccgggtccctggacgtcattagtcagtct

SEQ ID NO: 49989 - DNA, 51 bp, synthetic construct
  source 1..51: mol_type = other DNA
ccgggactggccgccttgggagcaggcgacgtgaacactctggctgagtcc

SEQ ID NO: 49990 - DNA, 60 bp, synthetic construct
  source 1..60: mol_type = other DNA
atgatcatccaaggtaccgaggccctgacaagcctgattcacatcatttccgaatctctg

SEQ ID NO: 49991 - DNA, 51 bp, synthetic construct
  source 1..51: mol_type = other DNA
cccggcctggccgctctcggatcaggagacatcaccacacttgctgagagc

SEQ ID NO: 49992 - DNA, 66 bp, synthetic construct
  source 1..66: mol_type = other DNA
atgtcaatctccgtgcccggaggggaatatctgaccgggtctcttgacgttatctcgcaatctata

SEQ ID NO: 49993 - DNA, 51 bp, synthetic construct
  source 1..51: mol_type = other DNA
ccaggactggccgctttgggcgccggggacgtcaacaccctcgcggagagt

SEQ ID NO: 49994 - DNA, 30 bp, synthetic construct
  source 1..30: mol_type = other DNA
taccccctgcggtcctatagcatcgtgttc

SEQ ID NO: 49995 - DNA, 45 bp, synthetic construct
  source 1..45: mol_type = other DNA
atcggcgccgagaagatggtcatgacgttgattcaaatgcagatt

SEQ ID NO: 49996 - DNA, 33 bp, synthetic construct
  source 1..33: mol_type = other DNA
tctactcttggcaccacaccaatctctatttca

SEQ ID NO: 49997 - DNA, 66 bp, synthetic construct
  source 1..66: mol_type = other DNA
atggccctcaacatccccggcggagagttcctcaccggctccctggatgtcatctcaatttcccaa

SEQ ID NO: 49998 - DNA, 51 bp, synthetic construct
  source 1..51: mol_type = other DNA
cccggtttagctgccttaggagctggcgacataaacacgttggccagcagt

SEQ ID NO: 49999 - DNA, 33 bp, synthetic construct
  source 1..33: mol_type = other DNA
taccccctgcggagctattccaatgtcttcaac

SEQ ID NO: 50000 - DNA, 42 bp, synthetic construct
  source 1..42: mol_type = other DNA
ggcgccgagaagatggtcatgatgctgattcaaatgcaaatc

SEQ ID NO: 50001 - DNA, 30 bp, synthetic construct
  source 1..30: mol_type = other DNA
ccctatgttctatattccaacgggggaggc

SEQ ID NO: 50002 - DNA, 87 bp, synthetic construct
  source 1..87: mol_type = other DNA
ttcttcaagggatggggcgctgaccccaacacctacctcaatgtcaatgtactgcaagctactgattccctgagcggcgtgttcaac

SEQ ID NO: 50003 - DNA, 60 bp, synthetic construct
  source 1..60: mol_type = other DNA
accctgcctggggcctccatcggcctcgctgagctgttcaaccctgactggtctctcctc

SEQ ID NO: 50004 - DNA, 69 bp, synthetic construct
  source 1..69: mol_type = other DNA
atggtcggcaccactattcccgggtccgagatcctgacaagcggcctgaacatgattgcacaatccctg

SEQ ID NO: 50005 - DNA, 51 bp, synthetic construct
  source 1..51: mol_type = other DNA
ccagggctggcagcactcggcgccggagacgtgaatactcttgctaacgcc

SEQ ID NO: 50006 - DNA, 231 bp, synthetic construct
  source 1..231: mol_type = other DNA
tcttccctcactctgaatagttattctagttccgactccaagtcccattattattcttcggggagcggcagctctagcggctcgagccattcaacgcacagcagccactatagcggggtagacgattccccccacactatcgcccgcaatgacccggactggtactatgaccattatgaatacggcgacaaccccgacattgacgattacctggaatcccagggttatgac

SEQ ID NO: 50007 - DNA, 30 bp, synthetic construct
  source 1..30: mol_type = other DNA
accagccagatcccattcgacggttctgtg

SEQ ID NO: 50008 - DNA, 33 bp, synthetic construct
  source 1..33: mol_type = other DNA
gtcgctggacttggagcaggtccactggccgca

SEQ ID NO: 50009 - DNA, 54 bp, synthetic construct
  source 1..54: mol_type = other DNA
gacatgctcctgctgttcggcgccgagagcgtgatcgattacgctatggactac

SEQ ID NO: 50010 - DNA, 234 bp, synthetic construct
  source 1..234: mol_type = other DNA
tccctgctgaccatggacacttatagccccatccactctaacacccactactacgatgtcggttcgggttccagtagcggcagccatagccactcaagccatagttcgcactacggcggcgtcgacacatcccctaataagatcgccaagaatgaccccgactggtactacgaccactacgaatacggcgacaacccaaacattgatgactacctcgaatcccagggatatgac

SEQ ID NO: 50011 - DNA, 63 bp, synthetic construct
  source 1..63: mol_type = other DNA
atggcgatggccatccccggtggtgacttcctcactactggattgaatctgattagccagagc

SEQ ID NO: 50012 - DNA, 48 bp, synthetic construct
  source 1..48: mol_type = other DNA
ggactggctgctctcggatcgggggacgtgaacacactctctcaatcc

SEQ ID NO: 50013 - DNA, 30 bp, synthetic construct
  source 1..30: mol_type = other DNA
tacttcgacggaggcagcacagtgttcagc

SEQ ID NO: 50014 - DNA, 48 bp, synthetic construct
  source 1..48: mol_type = other DNA
gccgactggggcatcttcgctgagtacctgacaaccaattcatctttt

SEQ ID NO: 50015 - DNA, 63 bp, synthetic construct
  source 1..63: mol_type = other DNA
atgtccgtgtctatccccggaggcgagttcctgaccggcagcctcgatgtcatctcccaatct

SEQ ID NO: 50016 - DNA, 57 bp, synthetic construct
  source 1..57: mol_type = other DNA
cctggcctcgccgcactcggggcgggcgacgtgaacacatcgttgcaacaagcacaa

SEQ ID NO: 50017 - DNA, 66 bp, synthetic construct
  source 1..66: mol_type = other DNA
agcaccctcggcaccacgccaatttcctctatttcgtattctcttacactaataactgatattaac

SEQ ID NO: 50018 - DNA, 51 bp, synthetic construct
  source 1..51: mol_type = other DNA
gagatcatgggcctcgtgtacttcaccaattctgcctatatgaatggtgct

SEQ ID NO: 50019 - DNA, 51 bp, synthetic construct
  source 1..51: mol_type = other DNA
acactgcctgagatggagctactgactgccggggactttctggccttcatc

SEQ ID NO: 50020 - DNA, 96 bp, synthetic construct
  source 1..96: mol_type = other DNA
gtgtcggattcggcctctagcacattccaaaacattcagaatatgagtgctgccacaccaagccccgtagtgtcggatctgtccccactggatctg

SEQ ID NO: 50021 - DNA, 69 bp, synthetic construct
  source 1..69: mol_type = other DNA
ctgggtgccgtcggtcccgtcctcgaagccgtgcatgcgggaggtggtctacaatatataatctacctg

SEQ ID NO: 50022 - DNA, 30 bp, synthetic construct
  source 1..30: mol_type = other DNA
gtgccctttagcgactggatcttcggtctg

SEQ ID NO: 50023 - DNA, 66 bp, synthetic construct
  source 1..66: mol_type = other DNA
atgtctgtgtccatccctggcggagagttcctgaccggctcacttgacgtgattagccagtcccaa

SEQ ID NO: 50024 - DNA, 51 bp, synthetic construct
  source 1..51: mol_type = other DNA
cccggcctggccgcgctgggcgctggcgatgtgaataccctcgctgagagt

SEQ ID NO: 50025 - DNA, 33 bp, synthetic construct
  source 1..33: mol_type = other DNA
aacatgcctatccccttcggaacatctggacac

SEQ ID NO: 50026 - DNA, 69 bp, synthetic construct
  source 1..69: mol_type = other DNA
tccaccctcggcaccaccccgataagttccatttcgtattctcttacactgatcaccaacatcaacatt

SEQ ID NO: 50027 - DNA, 63 bp, synthetic construct
  source 1..63: mol_type = other DNA
atggtgaccgtgattcctggctccgacctcctgacaagtgccctgaacgtcgttagccagtct

SEQ ID NO: 50028 - DNA, 51 bp, synthetic construct
  source 1..51: mol_type = other DNA
cctggtctggctgcgctgggctcaggagacgttacaaccctctcaaacgcc

SEQ ID NO: 50029 - DNA, 66 bp, synthetic construct
  source 1..66: mol_type = other DNA
atggtgtcaactatacccggctccgaagtcctgacatccaccctgaacatgatcagtcagtctctg

SEQ ID NO: 50030 - DNA, 51 bp, synthetic construct
  source 1..51: mol_type = other DNA
cctggcctcgccgccctgggagctggggatgtgaacacgctggccaatgcc

SEQ ID NO: 50031 - DNA, 66 bp, synthetic construct
  source 1..66: mol_type = other DNA
atggtgactacaatcccggggtcggagatcctgacctctaccctgaacatgatatcgcaatccctc

SEQ ID NO: 50032 - DNA, 51 bp, synthetic construct
  source 1..51: mol_type = other DNA
cccgggctggctgccctcggggccggcgacgttaacacattggcaaatgcg

SEQ ID NO: 50033 - DNA, 63 bp, synthetic construct
  source 1..63: mol_type = other DNA
atggccctgaacatccccggtggcgagttcctcaccgggtctttggacgtcatttcccaaagc

SEQ ID NO: 50034 - DNA, 51 bp, synthetic construct
  source 1..51: mol_type = other DNA
cctggactcgctgctctgggggccggcgatatcaacactctcgcatcaagc

SEQ ID NO: 50035 - DNA, 33 bp, synthetic construct
  source 1..33: mol_type = other DNA
aagaccctggaatttgagttcatcgctttgccc

SEQ ID NO: 50036 - DNA, 51 bp, synthetic construct
  source 1..51: mol_type = other DNA
tttacctcctcttcccaaaatgcctcatcctttgtgactatccttagtaca

SEQ ID NO: 50037 - DNA, 60 bp, synthetic construct
  source 1..60: mol_type = other DNA
aactccaccctgaacctggactacagcatgttctctcctttcctgatcctcacacctacc

SEQ ID NO: 50038 - DNA, 66 bp, synthetic construct
  source 1..66: mol_type = other DNA
atggtcctcaacatccccggcggagagttccttaccggctccctggacgtgattagccagtctctg

SEQ ID NO: 50039 - DNA, 51 bp, synthetic construct
  source 1..51: mol_type = other DNA
cccggactggccgccctcggcgctggcgacataaacaccctcgcgagctct

SEQ ID NO: 50040 - DNA, 66 bp, synthetic construct
  source 1..66: mol_type = other DNA
gccaacctgggcacctcccctatcatctgcgtcccctacgtgtctagcctgattctcaagctgagc

SEQ ID NO: 50041 - DNA, 33 bp, synthetic construct
  source 1..33: mol_type = other DNA
aagaccctgagcatctccttcattgtgttgccc

SEQ ID NO: 50042 - DNA, 51 bp, synthetic construct
  source 1..51: mol_type = other DNA
cttccttccacgtcgccaaactctgatgctttcactacaatcctgagtact

SEQ ID NO: 50043 - DNA, 33 bp, synthetic construct
  source 1..33: mol_type = other DNA
cggacactggagttcgaatttatcgctttgccc

SEQ ID NO: 50044 - DNA, 54 bp, synthetic construct
  source 1..54: mol_type = other DNA
gcatttcctacttctagccctaacgcccacgccttcactgctctcttgtcaact

SEQ ID NO: 50045 - DNA, 66 bp, synthetic construct
  source 1..66: mol_type = other DNA
atggtgacaactgtgcccgggtccgagatcctgacatcgggactgaacatgatagcccaatcttta

SEQ ID NO: 50046 - DNA, 51 bp, synthetic construct
  source 1..51: mol_type = other DNA
ccaggactggccgctctgggagccggcgacgtgaatacattggcaaacgca

SEQ ID NO: 50047 - DNA, 33 bp, synthetic construct
  source 1..33: mol_type = other DNA
aacatgcccatccctttcggcacttctggtcac

SEQ ID NO: 50048 - DNA, 78 bp, synthetic construct
  source 1..78: mol_type = other DNA
gactttatctatacacccgctgagctgtctaactacgcgtatttgagccaagagaccttcttctccttccacgacatg

SEQ ID NO: 50049 - DNA, 69 bp, synthetic construct
  source 1..69: mol_type = other DNA
atgtccggcatcgtatcccgcgctaccgagcttgcctgcggcgatccctttctcttcctgaagctgacc

SEQ ID NO: 50050 - DNA, 33 bp, synthetic construct
  source 1..33: mol_type = other DNA
aagaccctgaaattcgagtggatcatgcttccc

SEQ ID NO: 50051 - DNA, 51 bp, synthetic construct
  source 1..51: mol_type = other DNA
atgcccagcaacagtcccaatgctgacgccttttccaccatcctctcaacc

SEQ ID NO: 50052 - DNA, 36 bp, synthetic construct
  source 1..36: mol_type = other DNA
aacattcccatccctttcggcacaagcggtcacatg

SEQ ID NO: 50053 - DNA, 36 bp, synthetic construct
  source 1..36: mol_type = other DNA
atctacggccctgcgcactacaattctactatgcag

SEQ ID NO: 50054 - DNA, 42 bp, synthetic construct
  source 1..42: mol_type = other DNA
accattggtgccgagaacattatccgaatgatcctgggtctg

SEQ ID NO: 50055 - DNA, 78 bp, synthetic construct
  source 1..78: mol_type = other DNA
gattacatcttcacaccctatgagctggctgacctggcctaccttagtcaagagactcagtttagcttcatggacatg

SEQ ID NO: 50056 - DNA, 69 bp, synthetic construct
  source 1..69: mol_type = other DNA
atgtccggaatcgtttcccgcgctaccgagatggcctgcggcgacccctttctgttcctcaagttgact

SEQ ID NO: 50057 - DNA, 33 bp, synthetic construct
  source 1..33: mol_type = other DNA
cggaccctggagattagcttcatcgctcttcca

SEQ ID NO: 50058 - DNA, 54 bp, synthetic construct
  source 1..54: mol_type = other DNA
atatttccctcgtcgagcccaaacgcacctgcctttgctgccctgctttctacc

SEQ ID NO: 50059 - DNA, 66 bp, synthetic construct
  source 1..66: mol_type = other DNA
atggtgaccactatacccggttcggaggtcctgacatccgggctgaacatgatcgcccaaagcctc

SEQ ID NO: 50060 - DNA, 51 bp, synthetic construct
  source 1..51: mol_type = other DNA
cctggactcgccgccctgggggctggagacgtcaatacactggccaacgcc

SEQ ID NO: 50061 - DNA, 33 bp, synthetic construct
  source 1..33: mol_type = other DNA
aagaccctggagttcgagtttatcgctttgcca

SEQ ID NO: 50062 - DNA, 54 bp, synthetic construct
  source 1..54: mol_type = other DNA
gcatttccctctagttcccctaatgcgccggcgtttgcaatgctgctctctaca

SEQ ID NO: 50063 - DNA, 33 bp, synthetic construct
  source 1..33: mol_type = other DNA
cgcaccctggagattggcttcatcgcacttccc

SEQ ID NO: 50064 - DNA, 54 bp, synthetic construct
  source 1..54: mol_type = other DNA
ttattcccctcatcctcccctaatgcccccgcatttgctgctctgctgtctact

SEQ ID NO: 50065 - DNA, 33 bp, synthetic construct
  source 1..33: mol_type = other DNA
cgcaccctcgaaatcgagttcattgtgcttccc

SEQ ID NO: 50066 - DNA, 51 bp, synthetic construct
  source 1..51: mol_type = other DNA
ttcccttccaatagccctaacgccgacgcgttcgcaatgctgctgtctaca

SEQ ID NO: 50067 - DNA, 36 bp, synthetic construct
  source 1..36: mol_type = other DNA
aacatgcccatccctttcggtaccagcggacacatg

SEQ ID NO: 50068 - DNA, 69 bp, synthetic construct
  source 1..69: mol_type = other DNA
aaggccaacctgggcaccagccccattatctgcctgccttacgtgtctagtctcatcctgaagatgtct

SEQ ID NO: 50069 - DNA, 180 bp, synthetic construct
  source 1..180: mol_type = other DNA
gaaaacatcatacatcaaagaggtatcggcacccactacaaggacgtctactgctatctcatcgagtctctgaggctggccggcatccagattggcggctacaagttcgtgaactactttccgccattcattcctttcctcacatccctgctgttccggattgggttcgtttccgaatac

SEQ ID NO: 50070 - DNA, 33 bp, synthetic construct
  source 1..33: mol_type = other DNA
aagacactacaaatagaattcattgtgttgccc

SEQ ID NO: 50071 - DNA, 54 bp, synthetic construct
  source 1..54: mol_type = other DNA
gccctgcctagcaacagccctaatgccgacgctttcgcaaccatccttggaacc

SEQ ID NO: 50072 - DNA, 111 bp, synthetic construct
  source 1..111: mol_type = other DNA
acataccaaaacatgggatctaattatgggatgatctcgcaaaacttgtatcatctttcgcaaacaggtcatccgtctcccatacaaggcgtcgacggagttgagattttc

SEQ ID NO: 50073 - DNA, 48 bp, synthetic construct
  source 1..48: mol_type = other DNA
atcggggctccattcggcaccgacgtcttatttgcgtccgtgtcaata

SEQ ID NO: 50074 - DNA, 30 bp, synthetic construct
  source 1..30: mol_type = other DNA
gtgcccatcgtgaactgggtctacggattc

SEQ ID NO: 50075 - DNA, 69 bp, synthetic construct
  source 1..69: mol_type = other DNA
aaggccaacctcggcaccagtcctatcatttgcctgccctacgtctcgagcctaatcctgaagatgtct

SEQ ID NO: 50076 - DNA, 66 bp, synthetic construct
  source 1..66: mol_type = other DNA
atggtcactacggttcccgggtccgacattctaacctctggcctgaacatgatatcgcaaagccta

SEQ ID NO: 50077 - DNA, 51 bp, synthetic construct
  source 1..51: mol_type = other DNA
cccggcctggccgctctcggagcgggtgacgtcaacacattggcgtctgcg

SEQ ID NO: 50078 - DNA, 66 bp, synthetic construct
  source 1..66: mol_type = other DNA
atggtcctgaacatccccggtggagagttcctcaccggctcccttgacgtgattagccagtctctt

SEQ ID NO: 50079 - DNA, 51 bp, synthetic construct
  source 1..51: mol_type = other DNA
cccgggctggccgcacttggagccggcgacataaacacactggctagcagc

SEQ ID NO: 50080 - DNA, 78 bp, synthetic construct
  source 1..78: mol_type = other DNA
gcaagcaaggtgcagatggccttcgccaacatccccttcggcaacgggaccgacatctccatttctgctctggaattg

SEQ ID NO: 50081 - DNA, 60 bp, synthetic construct
  source 1..60: mol_type = other DNA
gtcattggccagctgataagtactgtcacccacaacgacgggatgttctactttgtgtac

SEQ ID NO: 50082 - DNA, 30 bp, synthetic construct
  source 1..30: mol_type = other DNA
gtgcctgttgctgaattcctgactggtgtc

SEQ ID NO: 50083 - DNA, 63 bp, synthetic construct
  source 1..63: mol_type = other DNA
atggccctcaacatccccggcggcgagttcctgaccgggtctcttgacgtaatttctcaaagc

SEQ ID NO: 50084 - DNA, 51 bp, synthetic construct
  source 1..51: mol_type = other DNA
cccgggctggccgctctgggtgctggcgacatcaacaccctcgcaagcagt

SEQ ID NO: 50085 - DNA, 66 bp, synthetic construct
  source 1..66: mol_type = other DNA
atggtggccacaatcccgggaagcgagatcctgactagtaccctgaacatgataagtcaaagttta

SEQ ID NO: 50086 - DNA, 51 bp, synthetic construct
  source 1..51: mol_type = other DNA
cctgggttggccgccttgggagcaggcgacgttaacaccctggctaatgcg

SEQ ID NO: 50087 - DNA, 33 bp, synthetic construct
  source 1..33: mol_type = other DNA
taccccttctccctgcatagccagaccatccac

SEQ ID NO: 50088 - DNA, 45 bp, synthetic construct
  source 1..45: mol_type = other DNA
accattggcgccgagaacatggtgctgatgatcatgggacttact

SEQ ID NO: 50089 - DNA, 36 bp, synthetic construct
  source 1..36: mol_type = other DNA
atctacattcccgctcacaacaatgccacaatgctg

SEQ ID NO: 50090 - DNA, 45 bp, synthetic construct
  source 1..45: mol_type = other DNA
atgaccatgggcgcccagaacattatccggatgatccttggactg

SEQ ID NO: 50091 - DNA, 63 bp, synthetic construct
  source 1..63: mol_type = other DNA
cacaagtctataatgaacctcgactacgggatgttctcatccttcctgatcctgacacctacc

SEQ ID NO: 50092 - DNA, 75 bp, synthetic construct
  source 1..75: mol_type = other DNA
ctgatcttcactcctcaagagttgactgattacgagtacctcgcgcaagagactttttttagtttcgaagacatg

SEQ ID NO: 50093 - DNA, 66 bp, synthetic construct
  source 1..66: mol_type = other DNA
tccggcatcactagccgggccaccgagctggcttgcggcgatccctttctgttcctcaagctcaca

SEQ ID NO: 50094 - DNA, 33 bp, synthetic construct
  source 1..33: mol_type = other DNA
cggaccatggagattagcttcatcgctcttccc

SEQ ID NO: 50095 - DNA, 54 bp, synthetic construct
  source 1..54: mol_type = other DNA
atcttcccctctagcggctcaaacgcccctgcttttgctgcactgctctctacc

SEQ ID NO: 50096 - DNA, 63 bp, synthetic construct
  source 1..63: mol_type = other DNA
atggccagcacaatccccggtggcgacattcttaccggcatcctgaacgtggtggctcaaagc

SEQ ID NO: 50097 - DNA, 51 bp, synthetic construct
  source 1..51: mol_type = other DNA
cccggactggccgccctcggtgctggcgacatgatgactctcacaaccaac

SEQ ID NO: 50098 - DNA, 60 bp, synthetic construct
  source 1..60: mol_type = other DNA
atgtccgccattcccggcggagagttcctcaccgggtctctggacgtgatcagtcaatca

SEQ ID NO: 50099 - DNA, 51 bp, synthetic construct
  source 1..51: mol_type = other DNA
cccgggcttgccgccctgggggccggcgacattaacaccctggctagtagc

SEQ ID NO: 50100 - DNA, 63 bp, synthetic construct
  source 1..63: mol_type = other DNA
atggtgaccacaatccctggatcggaagtcttaacttctgcactgaacatgatttcgcaatca

SEQ ID NO: 50101 - DNA, 51 bp, synthetic construct
  source 1..51: mol_type = other DNA
ccagggctggcggccctgggcgccggtgacgtgaacaccctcgcaaatgcc

SEQ ID NO: 50102 - DNA, 66 bp, synthetic construct
  source 1..66: mol_type = other DNA
atggccctcaacatccccggcggcgagttcctgaccgggtccctggacgtgatttcacaatctctg

SEQ ID NO: 50103 - DNA, 51 bp, synthetic construct
  source 1..51: mol_type = other DNA
cccggactggctgccttgggcgctggggacatcaatacactcgcaagctcc

SEQ ID NO: 50104 - DNA, 60 bp, synthetic construct
  source 1..60: mol_type = other DNA
atgatctttcaaggaaccgagtccctgaccacactgatccacattatctctgaaagcctc

SEQ ID NO: 50105 - DNA, 54 bp, synthetic construct
  source 1..54: mol_type = other DNA
cctgggctatcggcgctcggaaccggggatatttcaacgttagctcaagccgct

SEQ ID NO: 50106 - DNA, 66 bp, synthetic construct
  source 1..66: mol_type = other DNA
atggtgctgaacatccccggtggcgagttcctgaccgggtccctggacgtcatctcccaatcccta

SEQ ID NO: 50107 - DNA, 51 bp, synthetic construct
  source 1..51: mol_type = other DNA
ccaggactcgctgccctgggcgctggggacatcaataccctagcgacaagc

SEQ ID NO: 50108 - DNA, 30 bp, synthetic construct
  source 1..30: mol_type = other DNA
tttcccctgaagacgtatagtgacgtgttc

SEQ ID NO: 50109 - DNA, 42 bp, synthetic construct
  source 1..42: mol_type = other DNA
atcggggccgagaagatggtccagctgatcataaccggaatt

SEQ ID NO: 50110 - DNA, 69 bp, synthetic construct
  source 1..69: mol_type = other DNA
atgcctgccgacgccttcgcaaataacgtggtccccaacctggtggacccaaagctcgctatgactgac

SEQ ID NO: 50111 - DNA, 33 bp, synthetic construct
  source 1..33: mol_type = other DNA
gtgttcagcgacatgtattacgctaacgtaccc

SEQ ID NO: 50112 - DNA, 93 bp, synthetic construct
  source 1..93: mol_type = other DNA
ttcgacctgtggtacacagggcagccattctttaaccaatacactggcgaatatgtcgagcacttgcctcctgagatcgtgttgagcaacaga

SEQ ID NO: 50113 - DNA, 66 bp, synthetic construct
  source 1..66: mol_type = other DNA
atggtgaccaccattcccgggtcggaagtcctgacttccacactgaacatgattagccaaagttta

SEQ ID NO: 50114 - DNA, 51 bp, synthetic construct
  source 1..51: mol_type = other DNA
cccgggcttgccgccctcggcgctggcgacgtgaacaccctggctaatgcg

SEQ ID NO: 50115 - DNA, 66 bp, synthetic construct
  source 1..66: mol_type = other DNA
atggccctgtccatccccggcggcgagttcctgaccgggtctcttgacgtgattagccagagtctg

SEQ ID NO: 50116 - DNA, 51 bp, synthetic construct
  source 1..51: mol_type = other DNA
cccggcctcgccgccctcggggctggagacattaacactctggcgagcagc

SEQ ID NO: 50117 - DNA, 33 bp, synthetic construct
  source 1..33: mol_type = other DNA
atgttcagcgacatgtattacgccaacgttcca

SEQ ID NO: 50118 - DNA, 90 bp, synthetic construct
  source 1..90: mol_type = other DNA
tttgacctctggtacaccggccagcccttcttcaatcaatatactggcgaatacgtggagcacctgcctcctgagatcgtcctgagcaac

SEQ ID NO: 50119 - DNA, 39 bp, synthetic construct
  source 1..39: mol_type = other DNA
gtttatccatcggcgctgacatccaattctacgtctctg

SEQ ID NO: 50120 - DNA, 42 bp, synthetic construct
  source 1..42: mol_type = other DNA
accatgggcgtcgagaacattgtccgttctattatcggtctc

SEQ ID NO: 50121 - DNA, 66 bp, synthetic construct
  source 1..66: mol_type = other DNA
atggtgtccacaattcctggaagtgaaatccttacgtcaacgctgaacatgataagtcagagctta

SEQ ID NO: 50122 - DNA, 51 bp, synthetic construct
  source 1..51: mol_type = other DNA
cctggattggctgccctcggcgccggggacgttaataccctcgcaaacgct

SEQ ID NO: 50123 - DNA, 33 bp, synthetic construct
  source 1..33: mol_type = other DNA
tacggccccgctcactataacgccactatgcag

SEQ ID NO: 50124 - DNA, 45 bp, synthetic construct
  source 1..45: mol_type = other DNA
atgaccatgggcgccgagaacatcatccggatgattttgggactg

SEQ ID NO: 50125 - DNA, 87 bp, synthetic construct
  source 1..87: mol_type = other DNA
gactggatctacacaccagctgagctggtggactacgaatacttgtctcaagaaaccttttactccttcgaggacatgatgtacatt

SEQ ID NO: 50126 - DNA, 72 bp, synthetic construct
  source 1..72: mol_type = other DNA
atgagcgggattacatctagggctacagaacttgcttgtggcgaccccttcctgtttctcaagctgacctgc

SEQ ID NO: 50127 - DNA, 81 bp, synthetic construct
  source 1..81: mol_type = other DNA
tcaactgggctgccacttttcgaagtctatacccaaaatacaatttccgccctgggagtgcctggttatataagcccaatc

SEQ ID NO: 50128 - DNA, 60 bp, synthetic construct
  source 1..60: mol_type = other DNA
atgtccaccttccccggatctgaaatcctgactggcatcctccacattgtgtctgaatcc

SEQ ID NO: 50129 - DNA, 51 bp, synthetic construct
  source 1..51: mol_type = other DNA
ccgggcttggccgccctgggctccggcgacattacctctctcgcaagcgca

SEQ ID NO: 50130 - DNA, 36 bp, synthetic construct
  source 1..36: mol_type = other DNA
aacatgcctatcccctttggcacgtcagggcatatg

SEQ ID NO: 50131 - DNA, 66 bp, synthetic construct
  source 1..66: mol_type = other DNA
atgtccgtggccattcccggaggcgagtacctcaccggcgctctggatgtcataagtcagtctctc

SEQ ID NO: 50132 - DNA, 51 bp, synthetic construct
  source 1..51: mol_type = other DNA
ccaggcctggctgccctgggaaccggggacgtaactactctggccgaaagc

SEQ ID NO: 50133 - DNA, 33 bp, synthetic construct
  source 1..33: mol_type = other DNA
aagaccctcaaaatcggcctgattatgttgcct

SEQ ID NO: 50134 - DNA, 54 bp, synthetic construct
  source 1..54: mol_type = other DNA
atgctgccatcaaactcgccctctgctgacgccttcgcaaccatcctcggaaca

SEQ ID NO: 50135 - DNA, 36 bp, synthetic construct
  source 1..36: mol_type = other DNA
aacatgcctatccccttcggaaccagcggacacatg

SEQ ID NO: 50136 - DNA, 63 bp, synthetic construct
  source 1..63: mol_type = other DNA
atggtgtccaacattcctggcggcgagttcttaactggttcgttagacgtcatctctcaaagt

SEQ ID NO: 50137 - DNA, 51 bp, synthetic construct
  source 1..51: mol_type = other DNA
cctggtctcgctgcacttggggccggcgacattaatacgctggctagctcc

SEQ ID NO: 50138 - DNA, 36 bp, synthetic construct
  source 1..36: mol_type = other DNA
aacattcccatccctttcggaaccagtggacacatg

SEQ ID NO: 50139 - DNA, 57 bp, synthetic construct
  source 1..57: mol_type = other DNA
atgatcttgcaaggtaccgggattttgacttccttcattcacatcatctccgaaagc

SEQ ID NO: 50140 - DNA, 51 bp, synthetic construct
  source 1..51: mol_type = other DNA
cccggcctttctgccttggggacaggagacatcactactctcgcgcaatcc

SEQ ID NO: 50141 - DNA, 60 bp, synthetic construct
  source 1..60: mol_type = other DNA
atgattcttcaaggaaccgaaaccctcacgagtctgattcacatcatctccgagtctctg

SEQ ID NO: 50142 - DNA, 54 bp, synthetic construct
  source 1..54: mol_type = other DNA
cctggactcgccgcccttggcactggagacatcgcaaccctggcacaaagcctc

SEQ ID NO: 50143 - DNA, 33 bp, synthetic construct
  source 1..33: mol_type = other DNA
taccggagcgctttcacctctcaaacttctctt

SEQ ID NO: 50144 - DNA, 45 bp, synthetic construct
  source 1..45: mol_type = other DNA
atgaccatgggcttcgagatcatggtccgcaccgtcctcggattc

SEQ ID NO: 50145 - DNA, 33 bp, synthetic construct
  source 1..33: mol_type = other DNA
taccccctgaagatccatagcaacattttccac

SEQ ID NO: 50146 - DNA, 39 bp, synthetic construct
  source 1..39: mol_type = other DNA
atcggcgccgagaacgcagtccagcttataatgggtgtg

SEQ ID NO: 50147 - DNA, 33 bp, synthetic construct
  source 1..33: mol_type = other DNA
taccggtctgccttcacttcccaaacgagtttg

SEQ ID NO: 50148 - DNA, 42 bp, synthetic construct
  source 1..42: mol_type = other DNA
accatgggcgtggagaacatggtccggatcatcattggtttt

SEQ ID NO: 50149 - DNA, 60 bp, synthetic construct
  source 1..60: mol_type = other DNA
atgattattcaaggtactgagactcttacaagcctcattcacatcctgtccgagtctctg

SEQ ID NO: 50150 - DNA, 51 bp, synthetic construct
  source 1..51: mol_type = other DNA
cctggcctggctgcactgggctcaggagacatcgctaccctggctgagagc

SEQ ID NO: 50151 - DNA, 42 bp, synthetic construct
  source 1..42: mol_type = other DNA
gttaagattatcaacatcggcttcctcggaatggaaactcca

SEQ ID NO: 50152 - DNA, 57 bp, synthetic construct
  source 1..57: mol_type = other DNA
ctgcccagtccatctttctttaccggagactcatccttggccttcgtgtttacgcaa

SEQ ID NO: 50153 - DNA, 33 bp, synthetic construct
  source 1..33: mol_type = other DNA
taccggagcgctttcaactcccaaacctctctg

SEQ ID NO: 50154 - DNA, 45 bp, synthetic construct
  source 1..45: mol_type = other DNA
atgaccatgggcttcgagacaatcgttcggacgattctgggtttc

SEQ ID NO: 50155 - DNA, 60 bp, synthetic construct
  source 1..60: mol_type = other DNA
atgataatccaaggcactgaggccctgacctccttcatccacatcctctctgaaagcctg

SEQ ID NO: 50156 - DNA, 51 bp, synthetic construct
  source 1..51: mol_type = other DNA
ccgggtctggccgccctcggcaccggggacatcgctaccctcgcggagtca

SEQ ID NO: 50157 - DNA, 33 bp, synthetic construct
  source 1..33: mol_type = other DNA
agccagatcggactcgacctgaaggtggtgcct

SEQ ID NO: 50158 - DNA, 87 bp, synthetic construct
  source 1..87: mol_type = other DNA
ggcctggtcgacttctcaagtgtcctggctgccgacgccgtggagattcccaagttctacctgcctttcatcaactacgatctcaac

SEQ ID NO: 50159 - DNA, 36 bp, synthetic construct
  source 1..36: mol_type = other DNA
gtgtacccctctgctttccactccgccaactctgtg

SEQ ID NO: 50160 - DNA, 45 bp, synthetic construct
  source 1..45: mol_type = other DNA
atgaccatgggcgtcgagaacctagttcgactgattatcggattc

SEQ ID NO: 50161 - DNA, 63 bp, synthetic construct
  source 1..63: mol_type = other DNA
atggccctcaacatccctggcggcgagttccttaccgggtctctggacgttatttcccaatca

SEQ ID NO: 50162 - DNA, 51 bp, synthetic construct
  source 1..51: mol_type = other DNA
cccggcctggccgccctcggggctggcgacatcaacactcttgctagctct

SEQ ID NO: 50163 - DNA, 33 bp, synthetic construct
  source 1..33: mol_type = other DNA
tacccctctgccttttctagtcaaacctcactg

SEQ ID NO: 50164 - DNA, 42 bp, synthetic construct
  source 1..42: mol_type = other DNA
accattggcgtcgagaacatcatccggctgatcatagggatc

SEQ ID NO: 50165 - DNA, 60 bp, synthetic construct
  source 1..60: mol_type = other DNA
atgatattacaaggcactgagaccctgacatccttcatccacattctgtctgaatcactg

SEQ ID NO: 50166 - DNA, 51 bp, synthetic construct
  source 1..51: mol_type = other DNA
cccggtcttgccgcgttggggaccggcgatattgctacgctagccgagagt

SEQ ID NO: 50167 - DNA, 60 bp, synthetic construct
  source 1..60: mol_type = other DNA
atgacaatccccggcggcgacttcctgaccaccggactcaacctgattagtcagtcccag

SEQ ID NO: 50168 - DNA, 48 bp, synthetic construct
  source 1..48: mol_type = other DNA
ggactggctgctctggggtccggcgacgtgaacaccctctctgaaagc

SEQ ID NO: 50169 - DNA, 60 bp, synthetic construct
  source 1..60: mol_type = other DNA
atgataattcagggtacagagaccctcacaagcctgattcacatcctgtccgagtctctg

SEQ ID NO: 50170 - DNA, 51 bp, synthetic construct
  source 1..51: mol_type = other DNA
cccggactcgcggccttgggaagcggcgacatcgcaactctggcggaaagt

SEQ ID NO: 50171 - DNA, 60 bp, synthetic construct
  source 1..60: mol_type = other DNA
aacagcaccctgaatctcgactactctatgttctcccctttcctcatcctgactcctacc

SEQ ID NO: 50172 - DNA, 69 bp, synthetic construct
  source 1..69: mol_type = other DNA
gccaacctgggcaccagccccctgatttgcctcccttatgtgtcgtccctgatcgtgaatctctctgtc

SEQ ID NO: 50173 - DNA, 36 bp, synthetic construct
  source 1..36: mol_type = other DNA
gtgtacccatctgccttcacctccgagacatctgtg

SEQ ID NO: 50174 - DNA, 42 bp, synthetic construct
  source 1..42: mol_type = other DNA
accatcgggttcggcaccatcgttcggatgatcctcggaatc

SEQ ID NO: 50175 - DNA, 60 bp, synthetic construct
  source 1..60: mol_type = other DNA
atgataatacagggcacagagaccctgacatccctgatccacatccttagcgagtctctg

SEQ ID NO: 50176 - DNA, 54 bp, synthetic construct
  source 1..54: mol_type = other DNA
cctggcctggccgctctcgggaccggggacatcgcgactgcggctcagcaacta

SEQ ID NO: 50177 - DNA, 66 bp, synthetic construct
  source 1..66: mol_type = other DNA
atggccctcaacattcccgggggcgagttcttgaccggaagcctggacgtgatttcacaatccttg

SEQ ID NO: 50178 - DNA, 51 bp, synthetic construct
  source 1..51: mol_type = other DNA
cccggcctggctgccctgggtgccggggacatcaatactctcgctagctct

SEQ ID NO: 50179 - DNA, 30 bp, synthetic construct
  source 1..30: mol_type = other DNA
taccccctgaacgggcacagtagttttttc

SEQ ID NO: 50180 - DNA, 39 bp, synthetic construct
  source 1..39: mol_type = other DNA
atcggcgccgagaacatggttaagcttttcctggttctc

SEQ ID NO: 50181 - DNA, 33 bp, synthetic construct
  source 1..33: mol_type = other DNA
tacccttctgccttccatagtcagacatctgtt

SEQ ID NO: 50182 - DNA, 45 bp, synthetic construct
  source 1..45: mol_type = other DNA
atgaccatcggcgtcgagaacatcattcggctgattatcggattc

SEQ ID NO: 50183 - DNA, 39 bp, synthetic construct
  source 1..39: mol_type = other DNA
aagattatcaacatcaatttcctgggcatggagacacca

SEQ ID NO: 50184 - DNA, 57 bp, synthetic construct
  source 1..57: mol_type = other DNA
ctgcctagccccgatttcttcaccggcgacgctgccctgtccttcgtgttcacacag

SEQ ID NO: 50185 - DNA, 270 bp, synthetic construct
  source 1..270: mol_type = other DNA
aactggacactcgtgaagcaccagatcattgattgggataccaaggaggccgagctggactccggggccatcgactgcatttggagcggcttcaccatcaacggccgcgaggacgactacgcttggactgacccctacttcaacaactctcaagtattcgtggttaaagctgactccaatatcagctctgtggaggacctcaaggggaaggatattgacgtcgaaatgggctccagcgccatcgccgctctcgagaacaacaaggatttg

SEQ ID NO: 50186 - DNA, 174 bp, synthetic construct
  source 1..174: mol_type = other DNA
aacacgaagtataacgaggaggactaccgcatcctcgaaactccccttagcctggagcaatatggcgttggcttcgctaaggataatacagagctgcgggaccaggtccaggaaaccctgaacgagatgtacgaggatgggaccattgacaagatagctcagaaatataaagat

SEQ ID NO: 50187 - DNA, 87 bp, synthetic construct
  source 1..87: mol_type = other DNA
ggaggccacatggagaacgtcattgacgacatccccgatagcgctggaggctccaaggacggcaatgtgacggctaccgagttattc

SEQ ID NO: 50188 - DNA, 48 bp, synthetic construct
  source 1..48: mol_type = other DNA
accggggccctgctgagccacttcatgcccaagggctggatccagtac

SEQ ID NO: 50189 - DNA, 30 bp, synthetic construct
  source 1..30: mol_type = other DNA
atccccctgagcaacttcattcttggagtg

SEQ ID NO: 50190 - DNA, 33 bp, synthetic construct
  source 1..33: mol_type = other DNA
aaggccaccctcggcaccagcccaatctcttgt

SEQ ID NO: 50191 - DNA, 36 bp, synthetic construct
  source 1..36: mol_type = other DNA
gtctacccatccgccctgtattctgagggaactgcc

SEQ ID NO: 50192 - DNA, 42 bp, synthetic construct
  source 1..42: mol_type = other DNA
accatcggcgtgcagaacatagttcgccttatcctgggtttt

SEQ ID NO: 50193 - DNA, 54 bp, synthetic construct
  source 1..54: mol_type = other DNA
aatagcaccatgaacctggactacactatgttcaagtcctttctgatccttacc

SEQ ID NO: 50194 - DNA, 60 bp, synthetic construct
  source 1..60: mol_type = other DNA
atgataatacagggcacggagactctcacatccctgatccacatcatttctgagtctctg

SEQ ID NO: 50195 - DNA, 54 bp, synthetic construct
  source 1..54: mol_type = other DNA
cccggcttggccgccctggggagtggcgacatcatgactctccaatcgttagct

SEQ ID NO: 50196 - DNA, 54 bp, synthetic construct
  source 1..54: mol_type = other DNA
atgatgaattacaactatgcatttagcccgatctatgagtttaccaccggtgtt

SEQ ID NO: 50197 - DNA, 78 bp, synthetic construct
  source 1..78: mol_type = other DNA
aacatcgtatcgggaatcctcctggggaattgggacgccttccccatctccggtggactgctgctcttctgcgttgac

SEQ ID NO: 50198 - DNA, 78 bp, synthetic construct
  source 1..78: mol_type = other DNA
ggcacagacttcggcatcccactgatgaacctgtttttcgccgacttcattgggagcgctggcggatttaccgctttt

SEQ ID NO: 50199 - DNA, 33 bp, synthetic construct
  source 1..33: mol_type = other DNA
tacccctttaagatttactcaaacatcttcaat

SEQ ID NO: 50200 - DNA, 39 bp, synthetic construct
  source 1..39: mol_type = other DNA
attggcgccgagaacatggtttcgctactcatcggagca

SEQ ID NO: 50201 - DNA, 63 bp, synthetic construct
  source 1..63: mol_type = other DNA
atggtggctatccccggctctgagtttctcaccgccgcactgaacgtcgtctctcaaagctta

SEQ ID NO: 50202 - DNA, 51 bp, synthetic construct
  source 1..51: mol_type = other DNA
cctggactcgccgcactcggtagcggcgacgtaaccactctggctaacgca

SEQ ID NO: 50203 - DNA, 33 bp, synthetic construct
  source 1..33: mol_type = other DNA
tatccaagcgccttccactcccaaacctctgtg

SEQ ID NO: 50204 - DNA, 45 bp, synthetic construct
  source 1..45: mol_type = other DNA
atgaccattggcgttgagaacataattcggctgatcatcggtatc

SEQ ID NO: 50205 - DNA, 33 bp, synthetic construct
  source 1..33: mol_type = other DNA
tatcccctgcggttctattcgaatatcatcaat

SEQ ID NO: 50206 - DNA, 36 bp, synthetic construct
  source 1..36: mol_type = other DNA
ggggccgagcacatgatccagattctgatgggactg

SEQ ID NO: 50207 - DNA, 36 bp, synthetic construct
  source 1..36: mol_type = other DNA
atctacccctatgccctgagtagcgagaccaacgtg

SEQ ID NO: 50208 - DNA, 42 bp, synthetic construct
  source 1..42: mol_type = other DNA
accgttggaatcgagagtatcattcgccttttcctgggaatg

SEQ ID NO: 50209 - DNA, 42 bp, synthetic construct
  source 1..42: mol_type = other DNA
gtcaaaatcattaacatcgggttcctcggcatggagacaccc

SEQ ID NO: 50210 - DNA, 57 bp, synthetic construct
  source 1..57: mol_type = other DNA
ctgcccagccctgccttctacaccggcgactcttccctggcttttgtgttcacacaa

SEQ ID NO: 50211 - DNA, 60 bp, synthetic construct
  source 1..60: mol_type = other DNA
atgataatacagggaacggaaactctgacaagcctgatccacatcatttctgagtctctg

SEQ ID NO: 50212 - DNA, 51 bp, synthetic construct
  source 1..51: mol_type = other DNA
ccaggattggccgcacttgggaccggagatatcgctaccctcgctcaatca

SEQ ID NO: 50213 - DNA, 60 bp, synthetic construct
  source 1..60: mol_type = other DNA
atgatactacaaggcaccggcatcctgacaagcttcatccacatcatttccgagtctctg

SEQ ID NO: 50214 - DNA, 54 bp, synthetic construct
  source 1..54: mol_type = other DNA
ccgggactcagcgcactcggaactggtgacatcaccacactgtcacaaagcgcg

SEQ ID NO: 50215 - DNA, 33 bp, synthetic construct
  source 1..33: mol_type = other DNA
aagagcaccctgggaacaccacctccgatatcg

SEQ ID NO: 50216 - DNA, 87 bp, synthetic construct
  source 1..87: mol_type = other DNA
ggcggccacatggagaacgtcatcgacgacactcccgattccgccggaggcagcaaggacggcaatgtgacagctaccgaactgttc

SEQ ID NO: 50217 - DNA, 48 bp, synthetic construct
  source 1..48: mol_type = other DNA
accggcgctctgctttcacacttcatgcccaagggctggatccagtac

SEQ ID NO: 50218 - DNA, 30 bp, synthetic construct
  source 1..30: mol_type = other DNA
atccctctgagcaacttcattttgggagtg

SEQ ID NO: 50219 - DNA, 39 bp, synthetic construct
  source 1..39: mol_type = other DNA
atttaccccactgcgctagcatcggagaccaacatcaca

SEQ ID NO: 50220 - DNA, 45 bp, synthetic construct
  source 1..45: mol_type = other DNA
atgaccgtcggcgtcgagaacatcatccggctgattctgggaatg

SEQ ID NO: 50221 - DNA, 33 bp, synthetic construct
  source 1..33: mol_type = other DNA
atctatagacagtcctttttcaacgctggactg

SEQ ID NO: 50222 - DNA, 42 bp, synthetic construct
  source 1..42: mol_type = other DNA
acagtcggggtcgagaacatcatccgcatgattatcggtttt

SEQ ID NO: 50223 - DNA, 60 bp, synthetic construct
  source 1..60: mol_type = other DNA
atgattctcggcggaaccgagacactgacttccctgatccatattctatccgagtgtctg

SEQ ID NO: 50224 - DNA, 51 bp, synthetic construct
  source 1..51: mol_type = other DNA
cccgggctcgctgctctcggaaccggcgacatcgccacactcgccgagtct

SEQ ID NO: 50225 - DNA, 39 bp, synthetic construct
  source 1..39: mol_type = other DNA
aagatcattaacatcgagttcctgggcatggaaactccc

SEQ ID NO: 50226 - DNA, 57 bp, synthetic construct
  source 1..57: mol_type = other DNA
ctgccttctccttccttttacaccggcgacagcagtctggccttcgtgttcacacag

SEQ ID NO: 50227 - DNA, 33 bp, synthetic construct
  source 1..33: mol_type = other DNA
tacaccagtgcctttagttctgagacgctgcgg

SEQ ID NO: 50228 - DNA, 42 bp, synthetic construct
  source 1..42: mol_type = other DNA
actatcggagtggagaacatggttcgtatcatcgttggggtg

SEQ ID NO: 50229 - DNA, 63 bp, synthetic construct
  source 1..63: mol_type = other DNA
atgaccgccgtgcccggctccgaaattatcacgagcggcctgaacatgatcagccagagcctg

SEQ ID NO: 50230 - DNA, 51 bp, synthetic construct
  source 1..51: mol_type = other DNA
cccggactggccgccttgggggcaggcgacgtcaatacactcgctaacgca

SEQ ID NO: 50231 - DNA, 36 bp, synthetic construct
  source 1..36: mol_type = other DNA
gtgtatccttccgcgctttattccgaaacctacgcc

SEQ ID NO: 50232 - DNA, 42 bp, synthetic construct
  source 1..42: mol_type = other DNA
acgatgggcgtgcagaacattgtccgattaatcatcgggatg

SEQ ID NO: 50233 - DNA, 60 bp, synthetic construct
  source 1..60: mol_type = other DNA
atgataatccagggcaccgagaccctgacctccctcattcacattatctctgagtcactg

SEQ ID NO: 50234 - DNA, 54 bp, synthetic construct
  source 1..54: mol_type = other DNA
cccggcctggccgctctcgggaccggcgacattgcaactgcggcccagtcattg

SEQ ID NO: 50235 - DNA, 42 bp, synthetic construct
  source 1..42: mol_type = other DNA
gttaagattatcaacatcggcttcctgggcatggaaactcct

SEQ ID NO: 50236 - DNA, 57 bp, synthetic construct
  source 1..57: mol_type = other DNA
ctgccctctcctgctacattcaccggcgacagctccctggccttcgtgttcactcag

SEQ ID NO: 50237 - DNA, 60 bp, synthetic construct
  source 1..60: mol_type = other DNA
gacatcttcaatcaaatcatccggcccataacctacctgttcctgatgggctccagtaag

SEQ ID NO: 50238 - DNA, 183 bp, synthetic construct
  source 1..183: mol_type = other DNA
ctccagcttggaatcggcctgaacaccgtattttgttcgatgggcaagagcatgacatccacctctattctccacacccatctgctcaaatctatcttcggcggcgtgcttgtaaatttgctgggccccgttattggcaatgggatcaacactggtgtcggcctgtatcattacgtacctaca

SEQ ID NO: 50239 - DNA, 36 bp, synthetic construct
  source 1..36: mol_type = other DNA
ggcatgttcgccgagctgtggaagatccaagcttcc

SEQ ID NO: 50240 - DNA, 66 bp, synthetic construct
  source 1..66: mol_type = other DNA
atggccctgaacatccccggcggcgagttcctgaccggctcccttgacgtgattagccagtctctc

SEQ ID NO: 50241 - DNA, 51 bp, synthetic construct
  source 1..51: mol_type = other DNA
ccaggactggccgccctcggcgccggtgacataaatactctggcatcttcc

SEQ ID NO: 50242 - DNA, 57 bp, synthetic construct
  source 1..57: mol_type = other DNA
atgtttaagttcaatgacattatcttctccggcaccggcaacgtgaacagcctgaac

SEQ ID NO: 50243 - DNA, 48 bp, synthetic construct
  source 1..48: mol_type = other DNA
atccccatcaaggacccaacaagcgagctgattgctagaacctctccc

SEQ ID NO: 50244 - DNA, 60 bp, synthetic construct
  source 1..60: mol_type = other DNA
atgatcctgcaagggacttctatcctgacatccttcatccacattgtgtccgttgaatcg

SEQ ID NO: 50245 - DNA, 51 bp, synthetic construct
  source 1..51: mol_type = other DNA
cccggcctgtccgctcttggaagcggtgacatcaccacccttgctgagtcc

SEQ ID NO: 50246 - DNA, 33 bp, synthetic construct
  source 1..33: mol_type = other DNA
tacccctttaacgtccatagcgacatcttccac

SEQ ID NO: 50247 - DNA, 42 bp, synthetic construct
  source 1..42: mol_type = other DNA
acaatcggccccgaaaagatggtgctgctgttcatgggcggg

SEQ ID NO: 50248 - DNA, 33 bp, synthetic construct
  source 1..33: mol_type = other DNA
taccggagcgccttcatttcccaaacgtcagcc

SEQ ID NO: 50249 - DNA, 42 bp, synthetic construct
  source 1..42: mol_type = other DNA
accatcggcttcgagagcatagttcgcatgattatcggtatc

SEQ ID NO: 50250 - DNA, 33 bp, synthetic construct
  source 1..33: mol_type = other DNA
taccccaacgcgttgtatagccaaacctccatc

SEQ ID NO: 50251 - DNA, 45 bp, synthetic construct
  source 1..45: mol_type = other DNA
atgaccatcggcgtcgagaacattattcggctgatcatcggatac

SEQ ID NO: 50252 - DNA, 60 bp, synthetic construct
  source 1..60: mol_type = other DNA
atgataatacagggcactggcactctcacatctttcattcacatcctgtccgagagtctg

SEQ ID NO: 50253 - DNA, 51 bp, synthetic construct
  source 1..51: mol_type = other DNA
cccggcctggccgcactgggaactggagatatcgctaccctcgcggagtcc

SEQ ID NO: 50254 - DNA, 33 bp, synthetic construct
  source 1..33: mol_type = other DNA
aagacctttgatttcttctctttcacacttccc

SEQ ID NO: 50255 - DNA, 57 bp, synthetic construct
  source 1..57: mol_type = other DNA
ctgcccgcacctgcatttttcgaaaacagcgaggccttctccatcgtgttgggctcc

SEQ ID NO: 50256 - DNA, 69 bp, synthetic construct
  source 1..69: mol_type = other DNA
aaggccaacctgggcaccagtcccctgatttgcctgccctacgtttcgagcgagatcgtgaagctcagt

SEQ ID NO: 50257 - DNA, 33 bp, synthetic construct
  source 1..33: mol_type = other DNA
aagaccttcgacttctttagctttacacttcct

SEQ ID NO: 50258 - DNA, 57 bp, synthetic construct
  source 1..57: mol_type = other DNA
ctgcccgctcctgtcttctttgaaaacagcgaggccttctccatcgtgcttggttca

SEQ ID NO: 50259 - DNA, 33 bp, synthetic construct
  source 1..33: mol_type = other DNA
cggaccctcgagatcagcttcattgcacttccc

SEQ ID NO: 50260 - DNA, 54 bp, synthetic construct
  source 1..54: mol_type = other DNA
attttcccatcaacgtcccctaatgcaccagccttcgctgctctgctgtctact

SEQ ID NO: 50261 - DNA, 54 bp, synthetic construct
  source 1..54: mol_type = other DNA
accaccgagatgcaccacaacactctgctcaagttctacgtgatgacagtcaag

SEQ ID NO: 50262 - DNA, 33 bp, synthetic construct
  source 1..33: mol_type = other DNA
agaaccttggagattagcttcatcgcattgccc

SEQ ID NO: 50263 - DNA, 54 bp, synthetic construct
  source 1..54: mol_type = other DNA
atgttcccctcatcttcaccgaacgcaccagctttcgccgctcttctgtcaacc

SEQ ID NO: 50264 - DNA, 33 bp, synthetic construct
  source 1..33: mol_type = other DNA
aagacatttgacttctttagcttcacccttccc

SEQ ID NO: 50265 - DNA, 60 bp, synthetic construct
  source 1..60: mol_type = other DNA
atgctgcctgctcccgtctttttcgagaactccgacgcctactctatcgtgcttggtagc

SEQ ID NO: 50266 - DNA, 63 bp, synthetic construct
  source 1..63: mol_type = other DNA
cggctgttctttattcaatttaatagtcctctgtttggtgacttttcctctttgagcatcgag

SEQ ID NO: 50267 - DNA, 33 bp, synthetic construct
  source 1..33: mol_type = other DNA
aagacctttgtactctttagcttcacacttcct

SEQ ID NO: 50268 - DNA, 60 bp, synthetic construct
  source 1..60: mol_type = other DNA
tggctgcccgctccttccttcttcgagaacgcggccgcgtttgagatcgtgttgggttca

SEQ ID NO: 50269 - DNA, 60 bp, synthetic construct
  source 1..60: mol_type = other DNA
aatagcaccctgaacctgaactacgctatgttttcatcgttcctcatccttacacctacc

SEQ ID NO: 50270 - DNA, 96 bp, synthetic construct
  source 1..96: mol_type = other DNA
atctcttctcctttcaacttccctagttttgaactcgaggagatgctgctggacctgccaaacaccctcaacatgctgattagccacaaccatgtg

SEQ ID NO: 50271 - DNA, 33 bp, synthetic construct
  source 1..33: mol_type = other DNA
cggaccatggagatcagcttcattgctcttcct

SEQ ID NO: 50272 - DNA, 54 bp, synthetic construct
  source 1..54: mol_type = other DNA
atcttcccctcgtctagcccaaacgcacctgccttcgctgccctgctttctacc

SEQ ID NO: 50273 - DNA, 39 bp, synthetic construct
  source 1..39: mol_type = other DNA
aaggtggtcaatctgaacttctacggaatggaggttacc

SEQ ID NO: 50274 - DNA, 57 bp, synthetic construct
  source 1..57: mol_type = other DNA
ctgccctctcctgtctggtacaccggagactcgagtctggcctttgtcttcacacag

SEQ ID NO: 50275 - DNA, 57 bp, synthetic construct
  source 1..57: mol_type = other DNA
cagctgatcggcgtagtttcggcggactcccaacctatgcaagttacggtggaatct

SEQ ID NO: 50276 - DNA, 36 bp, synthetic construct; identical to SEQ ID NO: 49871
  source 1..36: mol_type = other DNA

SEQ ID NO: 50277 - DNA, 30 bp, synthetic construct
  source 1..30: mol_type = other DNA
gccttccccgctcctagctttggatcagct

SEQ ID NO: 50278 - DNA, 90 bp, synthetic construct
  source 1..90: mol_type = other DNA
gtgggccctgtcggggctaagctctccgccgcgcaaaatatgtctagctcgactccggcggcgatgcaggatgcaagccctgtggatctg

SEQ ID NO: 50279 - DNA, 48 bp, synthetic construct
  source 1..48: mol_type = other DNA
atcgggcagctattctcacaagtgctgcccaacggcggaatgaggttc

SEQ ID NO: 50280 - DNA, 33 bp, synthetic construct
  source 1..33: mol_type = other DNA
gtgcccttctccgagctgatcctcggtacatgg

SEQ ID NO: 50281 - DNA, 36 bp, synthetic construct
  source 1..36: mol_type = other DNA
aacatgcctatccctttcggcactagcggacacatg

SEQ ID NO: 50282 - DNA, 45 bp, synthetic construct
  source 1..45: mol_type = other DNA
atggacctcctgaccttttactacaatttccccaacatcagcttc

SEQ ID NO: 50283 - DNA, 48 bp, synthetic construct
  source 1..48: mol_type = other DNA
ggtgtcgagatcatcttcatgaccctgcggtacatcggcattccaatc

SEQ ID NO: 50284 - DNA, 33 bp, synthetic construct
  source 1..33: mol_type = other DNA
aacctgcctgtcccattcggctcttctggtcac

SEQ ID NO: 50285 - DNA, 36 bp, synthetic construct
  source 1..36: mol_type = other DNA
atgattgaccctagcaccaaggtgctgatcaacccc

SEQ ID NO: 50286 - DNA, 33 bp, synthetic construct
  source 1..33: mol_type = other DNA
gagagagtggacctcggataccagttcatccga

SEQ ID NO: 50287 - DNA, 33 bp, synthetic construct
  source 1..33: mol_type = other DNA
agaaccctggagattagcttcatcgcacttcct

SEQ ID NO: 50288 - DNA, 51 bp, synthetic construct
  source 1..51: mol_type = other DNA
ttcccttcctcctctccaaacgccccggcattcgccgctctgctgagcacc

SEQ ID NO: 50289 - DNA, 129 bp, synthetic construct
  source 1..129: mol_type = other DNA
aacatctacggcaactttatgattattgccaacgaggtcatgagccaggctcagaacgtgtacatggggaactccaccttcattctctccgaggctgccagccaggcaatcgccaatctgatgatctcc

SEQ ID NO: 50290 - DNA, 96 bp, synthetic construct
  source 1..96: mol_type = other DNA
tctgctgacgcaatttccgcctctctctccggcattcagaacgcctcttcttctacaccaactctggacaatacaatcagtgccatggacatcctg

SEQ ID NO: 50291 - DNA, 54 bp, synthetic construct
  source 1..54: mol_type = other DNA
ggcatgtttggccaattgttctgtcaatacgtccccaacggcggtctgaagtat

SEQ ID NO: 50292 - DNA, 30 bp, synthetic construct
  source 1..30: mol_type = other DNA
gtcccatttagtgaatttatcgttggtgcc

SEQ ID NO: 50293 - DNA, 30 bp, synthetic construct
  source 1..30: mol_type = other DNA
agcgtcatggctaatgtcgggctcgtagcc

SEQ ID NO: 50294 - DNA, 36 bp, synthetic construct
  source 1..36: mol_type = other DNA
aacatgcccatccctttcggcacaagcggacacatg

SEQ ID NO: 50295 - DNA, 75 bp, synthetic construct
  source 1..75: mol_type = other DNA
gccatggggatgaacgactgcgctctcgacgacctgacctcggtcggcagcaatcacctggtgcacgatgatgtt

SEQ ID NO: 50296 - DNA, 63 bp, synthetic construct
  source 1..63: mol_type = other DNA
tataacagcaccatcaccctggattacactgccttcgacccttttctcattctgactccaacc

SEQ ID NO: 50297 - DNA, 153 bp, synthetic construct
  source 1..153: mol_type = other DNA
gccgactgggcttctgagaccgttacggtatccagctccctgctgggcagcaccgccaagaccggatcaggcacaggcctcgacgtggcaggcaaggattttttcactgaaatcgattctggcggcaatatcgtcgccgttgacaactggcat

SEQ ID NO: 50298 - DNA, 72 bp, synthetic construct
  source 1..72: mol_type = other DNA
tgggaccgcttcggcacctccgagtatagcatcctgggcgttaagaccgcctacgacgtgtctcctgagttt

SEQ ID NO: 50299 - DNA, 30 bp, synthetic construct
  source 1..30: mol_type = other DNA
aaccccttcgggacacaggctttggctggc

SEQ ID NO: 50300 - DNA, 66 bp, synthetic construct
  source 1..66: mol_type = other DNA
acacagatcagctccctcttcctgggcaaggatggaaccgctctggcgtaccaagtctctggagat

SEQ ID NO: 50301 - DNA, 87 bp, synthetic construct
  source 1..87: mol_type = other DNA
ctgctggactcctacatgaatatcatctacaaggagctctctgagaacattagcaacggcaacatcgaactcacaaccctgagtatt

SEQ ID NO: 50302 - DNA, 42 bp, synthetic construct
  source 1..42: mol_type = other DNA
tattttgcggcgcagagcgcaagctcaggcaaactgctggac

SEQ ID NO: 50303 - DNA, 36 bp, synthetic construct
  source 1..36: mol_type = other DNA
agcgtgtacatggacatgatggtcaaccctttcctg

SEQ ID NO: 50304 - DNA, 36 bp, synthetic construct
  source 1..36: mol_type = other DNA
atgaccatgggcttcgagaacatagtattgagacta

SEQ ID NO: 50305 - DNA, 30 bp, synthetic construct
  source 1..30: mol_type = other DNA
acccggcccatgggctggagcctggacagc

SEQ ID NO: 50306 - DNA, 36 bp, synthetic construct
  source 1..36: mol_type = other DNA
cggcccttcatcacctttgacaacggctggtacatg

SEQ ID NO: 50307 - DNA, 54 bp, synthetic construct
  source 1..54: mol_type = other DNA
atggttggctcaaacatcctgacctctacactcgacctggtgtcgcaatcgtta

SEQ ID NO: 50308 - DNA, 51 bp, synthetic construct
  source 1..51: mol_type = other DNA
cccggcctggccgccctgggtaccggagacatcgtaacacttagtaacgct

SEQ ID NO: 50309 - DNA, 33 bp, synthetic construct
  source 1..33: mol_type = other DNA
aagatgttctccttctttagctttgtgcttccc

SEQ ID NO: 50310 - DNA, 57 bp, synthetic construct
  source 1..57: mol_type = other DNA
ctgcctgctcctgagtttttcacaaacagcgaagcctacgcaatcgtgcttggtagt

SEQ ID NO: 50311 - DNA, 90 bp, synthetic construct
  source 1..90: mol_type = other DNA
ccctatttgtatagctacctgaaccctgtcgtggaggacgtgaccaacaagatccagaccggcgtgattcagctccaattcttcactgac

SEQ ID NO: 50312 - DNA, 33 bp, synthetic construct
  source 1..33: mol_type = other DNA
tactacgctgctacgtctcaatctctgcttcac

SEQ ID NO: 50313 - DNA, 33 bp, synthetic construct
  source 1..33: mol_type = other DNA
aagaccttcgtgttctttcaagtggttcttccc

SEQ ID NO: 50314 - DNA, 57 bp, synthetic construct
  source 1..57: mol_type = other DNA
ctgccagctcctgcattctttgagaacagccaggccttcaatatcgtgcttggttcc

SEQ ID NO: 50315 - DNA, 33 bp, synthetic construct
  source 1..33: mol_type = other DNA
aaaacctttaagatcagcatcttcattcttccc

SEQ ID NO: 50316 - DNA, 60 bp, synthetic construct
  source 1..60: mol_type = other DNA
ctcatgcccacaccacctttctttatcaacgctgaggcttatagcaccgttttgggttcc

SEQ ID NO: 50317 - DNA, 90 bp, synthetic construct
  source 1..90: mol_type = other DNA
tccgctgacgtcgtgaactccgccctgaatagcacagtgcccagcaacggcacccagctgaactctgagatcaacgccttggacctcttc

SEQ ID NO: 50318 - DNA, 63 bp, synthetic construct
  source 1..63: mol_type = other DNA
ggagcagccggggctttgtttaatagtctaatgcctcacggcggcctgagatacgttatttac

SEQ ID NO: 50319 - DNA, 33 bp, synthetic construct
  source 1..33: mol_type = other DNA
gtgcccttctccgactttatcatgaacctgctg

SEQ ID NO: 50320 - DNA, 33 bp, synthetic construct
  source 1..33: mol_type = other DNA
aagacctttgatttttttagcctgacattgccc

SEQ ID NO: 50321 - DNA, 60 bp, synthetic construct
  source 1..60: mol_type = other DNA
atgctgcccgcacctgtgtttttcgagaacagcgaagccttcaacgctgtcttgggaaac

SEQ ID NO: 50322 - DNA, 39 bp, synthetic construct
  source 1..39: mol_type = other DNA
cgattcatctccatcatgggcacactgaccgacaacgag

SEQ ID NO: 50323 - DNA, 90 bp, synthetic construct
  source 1..90: mol_type = other DNA
gacgacatcgcttcctacctgatgcccattctgaagcaggccatgggcgtggaaggcggtgcctctagcatcaacgcatgggatatcatg

SEQ ID NO: 50324 - DNA, 36 bp, synthetic construct
  source 1..36: mol_type = other DNA
ggctacaccgtgaagtccattccaagccttgctatc

SEQ ID NO: 50325 - DNA, 42 bp, synthetic construct
  source 1..42: mol_type = other DNA
ggcaatatcgtctcgcaacaaatcagcggcaccaagctgttc

SEQ ID NO: 50326 - DNA, 33 bp, synthetic construct
  source 1..33: mol_type = other DNA
aagacctttgcttttttctcatttagtcttccg

SEQ ID NO: 50327 - DNA, 57 bp, synthetic construct
  source 1..57: mol_type = other DNA
ctgccatcccctgctttctttaagaacagtgaagctttctccatagtgcttggaagc

SEQ ID NO: 50328 - DNA, 54 bp, synthetic construct
  source 1..54: mol_type = other DNA
atggtcggcaccaacatcctcacatccactctggacttggtctcacaatctctg

SEQ ID NO: 50329 - DNA, 51 bp, synthetic construct
  source 1..51: mol_type = other DNA
ccaggactagcagctttaggaagcggcgacatagtgacgctcagcaacgca

SEQ ID NO: 50330 - DNA, 96 bp, synthetic construct
  source 1..96: mol_type = other DNA
gggagctctaactccctgtttgagagtttctacttcgtcattgtgaccctcactacggttggatatggagacatcgtgcccaagacattcaacgaa

SEQ ID NO: 50331 - DNA, 54 bp, synthetic construct
  source 1..54: mol_type = other DNA
atggccggcagcaatatcctggcttccacccttaacctggtatcacaaagtctg

SEQ ID NO: 50332 - DNA, 51 bp, synthetic construct
  source 1..51: mol_type = other DNA
cctggactggcagagttgggtaccggcgacatcgttaccctctcaaaggcc

SEQ ID NO: 50333 - DNA, 54 bp, synthetic construct
  source 1..54: mol_type = other DNA
atggtcggaacgaacatcctcacctccacactggaccttgtttcacaatctctg

SEQ ID NO: 50334 - DNA, 51 bp, synthetic construct
  source 1..51: mol_type = other DNA
cccggactggctgccttgggaagcggtgacatcgttacactgtctaacgca

SEQ ID NO: 50335 - DNA, 69 bp, synthetic construct
  source 1..69: mol_type = other DNA
aaggccaacctcggcacctcccctctgatttgcatcccctatgtctctagtatcatcaccaatctgtct

SEQ ID NO: 50336 - DNA, 36 bp, synthetic construct; identical to SEQ ID NO: 49812
  source 1..36: mol_type = other DNA

SEQ ID NO: 50337 - DNA, 48 bp, synthetic construct
  source 1..48: mol_type = other DNA
gcgacctactctacgcccgattctatctacaagctggacaggtactcc

SEQ ID NO: 50338 - DNA, 30 bp, synthetic construct
  source 1..30: mol_type = other DNA
accatgctgggcatcagcacaaagtcctac

SEQ ID NO: 50339 - DNA, 36 bp, synthetic construct
  source 1..36: mol_type = other DNA
catccttggctgaccagcgccaacatggacattatc

SEQ ID NO: 50340 - DNA, 36 bp, synthetic construct
  source 1..36: mol_type = other DNA
aacatgcccatccctttcggcacctctggacacatg

SEQ ID NO: 50341 - DNA, 33 bp, synthetic construct
  source 1..33: mol_type = other DNA
aagacattcgacttctttagctttaccttgcct

SEQ ID NO: 50342 - DNA, 60 bp, synthetic construct
  source 1..60: mol_type = other DNA
attatgcccgctcctgcctttttcaccaactctgaggcattcagcatcgtgttgggtagc

SEQ ID NO: 50343 - DNA, 87 bp, synthetic construct
  source 1..87: mol_type = other DNA
gcagacgagatcgccagcgtgctgatgcccatgctcaaggacgcccttctgaagggcaacgtgacctccgtcgatgctttcaacatc

SEQ ID NO: 50344 - DNA, 39 bp, synthetic construct
  source 1..39: mol_type = other DNA
ggctacaccattcactcaacctatgaccttgtaatgtat

SEQ ID NO: 50345 - DNA, 45 bp, synthetic construct
  source 1..45: mol_type = other DNA
ggcaacataatcagccaacagatgggcggagccaatctgctcaaa

SEQ ID NO: 50346 - DNA, 33 bp, synthetic construct
  source 1..33: mol_type = other DNA
aagaccttttccttctttagcttcgttcttccg

SEQ ID NO: 50347 - DNA, 57 bp, synthetic construct
  source 1..57: mol_type = other DNA
ctccctgctcccgagttcttcaagaactctgaggccttttccaccgtgttggggtcc

SEQ ID NO: 50348 - DNA, 39 bp, synthetic construct
  source 1..39: mol_type = other DNA
atggtgaccctccacctgcccgacggcatcagtagcata

SEQ ID NO: 50349 - DNA, 33 bp, synthetic construct
  source 1..33: mol_type = other DNA
agcgtaccctctcctcttggagtccctatccac

SEQ ID NO: 50350 - DNA, 42 bp, synthetic construct
  source 1..42: mol_type = other DNA
gccggggctattttcggcccttatactgttgggacaagcatc

SEQ ID NO: 50351 - DNA, 30 bp, synthetic construct
  source 1..30: mol_type = other DNA
tacaacggcggactccttaatctgctgatg

SEQ ID NO: 50352 - DNA, 36 bp, synthetic construct
  source 1..36: mol_type = other DNA
aacatgcccatccctttcgggaccagtggacacatg

SEQ ID NO: 50353 - DNA, 87 bp, synthetic construct
  source 1..87: mol_type = other DNA
ccttccctgcattcctacctgaatcccgtggtcgacgatcttaccaacaaggtggagactggcgtggtccagctgacattcaaggac

SEQ ID NO: 50354 - DNA, 36 bp, synthetic construct
  source 1..36: mol_type = other DNA
tattacaccgccataagtccgaacgtgctgcaatct

SEQ ID NO: 50355 - DNA, 81 bp, synthetic construct
  source 1..81: mol_type = other DNA
ccctacctgtatagctatctgaacccagttgtggaggacctcaccaataaggtgcagactggagtcattcaactaacattt

SEQ ID NO: 50356 - DNA, 33 bp, synthetic construct
  source 1..33: mol_type = other DNA
tactacgccgctactagtcctagccttctgcac

SEQ ID NO: 50357 - DNA, 57 bp, synthetic construct
  source 1..57: mol_type = other DNA
gagatgtttcaactaatgcctacctctccacccgtttcgagcgacatcacattcgtg

SEQ ID NO: 50358 - DNA, 258 bp, synthetic construct
  source 1..258: mol_type = other DNA
ggagtctttaacttcgacttcggggccttcaccaacacaaatgccagcgctatagttacggataccgccttccccaatgtggctgacgtgcacgtcaacacaacaacctctaatgtgtcgagccacacaaccaactatactagcaacgtccagcaaactcaatcttcctacaactacgtgaccccgacctcatccgactctgagaacacacccgttactcctgaaggtggaggaggtggctcaggcaataacactgga

SEQ ID NO: 50359 - DNA, 33 bp, synthetic construct
  source 1..33: mol_type = other DNA
aagacatttgagtttttctacttcacccttcct

SEQ ID NO: 50360 - DNA, 57 bp, synthetic construct
  source 1..57: mol_type = other DNA
ctgcctgccccttcattcttcgagtctagtgacgccttcggtatcgtgttgggttcc

SEQ ID NO: 50361 - DNA, 87 bp, synthetic construct
  source 1..87: mol_type = other DNA
gacgatatcgctcctgtgctgatgcccgcactcaaggagctggtcaaggacgccaatattagctctatcaacgccttctccatcatg

SEQ ID NO: 50362 - DNA, 36 bp, synthetic construct
  source 1..36: mol_type = other DNA
gggtacaccatcaagtcagcctatggcctgataatt

SEQ ID NO: 50363 - DNA, 42 bp, synthetic construct
  source 1..42: mol_type = other DNA
ggcaacattatcaatcagcagatcaacggtactaggctcttt

SEQ ID NO: 50364 - DNA, 33 bp, synthetic construct
  source 1..33: mol_type = other DNA
aagacctttgagttctttagcttcacattgcct

SEQ ID NO: 50365 - DNA, 60 bp, synthetic construct
  source 1..60: mol_type = other DNA
ctgcccgctcctagctttttcgaaggttctgaagcgttttcgattctattgtcggttggc

SEQ ID NO: 50366 - DNA, 30 bp, synthetic construct
  source 1..30: mol_type = other DNA
atgcacctgcctgacggaatccttcctctg

SEQ ID NO: 50367 - DNA, 33 bp, synthetic construct
  source 1..33: mol_type = other DNA
agcgtcccatcccctctgggagtgccaatccac

SEQ ID NO: 50368 - DNA, 108 bp, synthetic construct
  source 1..108: mol_type = other DNA
ggcatctttgggatgttatcttctatatttccgggaagcggctctacacctacctacaccgggacaagccagagcactgcctccaactacgtgccatctttcgatctc

SEQ ID NO: 50369 - DNA, 105 bp, synthetic construct
  source 1..105: mol_type = other DNA
gccaagtgcatcgggtgcaacacatgcgtcgaagcatgccctggcgacttcatcgccgccaactctgctagcctgaccgtggctattccatccgtctgtgccgca

SEQ ID NO: 50370 - DNA, 84 bp, synthetic construct
  source 1..84: mol_type = other DNA
gttaaggtctgccctgtggatgccctggacatcgatgtcgaatggggcgagggagcccccgttgatgccgaggggatcggtaga

SEQ ID NO: 50371 - DNA, 102 bp, synthetic construct
  source 1..102: mol_type = other DNA
aacaagtgtccaacgcaagcaatacgagtggtcactaagactggcatgtcctgccctgctctggtcgagaccgacgccgaaccatctttcacatcctgcatt

SEQ ID NO: 50372 - DNA, 87 bp, synthetic construct
  source 1..87: mol_type = other DNA
agtatgtgtagcaatgatgccctgaaggtggaccaatacgaggtaaccatcgacggcgagcccgtgctccgcgataggattctgttc

SEQ ID NO: 50373 - DNA, 69 bp, synthetic construct
  source 1..69: mol_type = other DNA
gaccaatgtggcgattgtatcgaggcctgcccctacgatatgattcacaagaccgatgaccctaagctg

SEQ ID NO: 50374 - DNA, 33 bp, synthetic construct
  source 1..33: mol_type = other DNA
aagacctttgatttttttagtcttacattgcct

SEQ ID NO: 50375 - DNA, 60 bp, synthetic construct
  source 1..60: mol_type = other DNA
atgctgcccgctcctgtcttctttgagaacagccaagcgttcagcacggtcctcggtagc

SEQ ID NO: 50376 - DNA, 93 bp, synthetic construct
  source 1..93: mol_type = other DNA
gccgacgatatctcttcaatactgatgcctgtgctcaaggaggccatgttggagggcaatgtaacctccatcgacgctgttaatattatggtg

SEQ ID NO: 50377 - DNA, 42 bp, synthetic construct
  source 1..42: mol_type = other DNA
gccggccacaccattaagtccacttatgacctaatcatgtat

SEQ ID NO: 50378 - DNA, 45 bp, synthetic construct
  source 1..45: mol_type = other DNA
ctgggcaacatagttagtcagcagatgggtggacctgcactcttt

SEQ ID NO: 50379 - DNA, 147 bp, synthetic construct
  source 1..147: mol_type = other DNA
aatctcaagaccgacaacaacggcaggatcattatcaataacaccctgaagcccgggacatacaaagtcaccatcaagaatcctgtgaccctggaagagaagaaccagacaatcaaggtgctgaagcggatcactgagaataagaac

SEQ ID NO: 50380 - DNA, 90 bp, synthetic construct
  source 1..90: mol_type = other DNA
ccttatctgtaccactacttcaaccccgtcgtcgaggatctcaccaacaaggtgcagactggcgtcgtcaaattaaccttcgaagatgtc

SEQ ID NO: 50381 - DNA, 33 bp, synthetic construct
  source 1..33: mol_type = other DNA
tattacgtggcgtcggcggacaacctgcttgta

SEQ ID NO: 50382 - DNA, 87 bp, synthetic construct
  source 1..87: mol_type = other DNA
atcatggatggcaccctctcctactgcttcacatttctgactgctcgggccggtggcgatggcagtcaatgggatgcgattgctggt

SEQ ID NO: 50383 - DNA, 75 bp, synthetic construct
  source 1..75: mol_type = other DNA
ctgctgaccctcgcttgcgactccaacctgatcgctgttgcgactgtcgttagctggtcggacgcggtcgcgccc

SEQ ID NO: 50384 - DNA, 63 bp, synthetic construct
  source 1..63: mol_type = other DNA
atcgaaagcgggcagattgccgacttcaacgagatcgctaagaatatcggcacctggttgaaa

SEQ ID NO: 50385 - DNA, 90 bp, synthetic construct
  source 1..90: mol_type = other DNA
tccaacagcctgaacctgctggagaccatgggcgaggtgtcggtcggatcaggggtctccatcgagggtcttcacgttggactcgatggt

SEQ ID NO: 50386 - DNA, 111 bp, synthetic construct
  source 1..111: mol_type = other DNA
gccgccaaggccgccgagcccagggcagccccatccaaaaccgagaagaaaaaatatgggggaagcgaagaggactctggaaagattaagtacacgagcagtagaaggaaa

SEQ ID NO: 50387 - DNA, 90 bp, synthetic construct
  source 1..90: mol_type = other DNA
cctgcactgtactcctatttcaaccctctcgtcgaggaccttagcgacaaggtccggagtggcgtgatcaagctgactttcgacgatcag

SEQ ID NO: 50388 - DNA, 48 bp, synthetic construct
  source 1..48: mol_type = other DNA
tactttatatcttctgctcccaacctgacctacgccttggtgctcatt

SEQ ID NO: 50389 - DNA, 51 bp, synthetic construct
  source 1..51: mol_type = other DNA
atgctggaaagcatttaccaaagtattacaatcttcttcctcaactacggt

SEQ ID NO: 50390 - DNA, 33 bp, synthetic construct
  source 1..33: mol_type = other DNA
ctgctctacggccagaagatcaccatcatctcc

SEQ ID NO: 50391 - DNA, 36 bp, synthetic construct
  source 1..36: mol_type = other DNA
ggcatcatttacaacgagctgaatgagaagatctcc

SEQ ID NO: 50392 - DNA, 108 bp, synthetic construct
  source 1..108: mol_type = other DNA
atggggattctggccaacatctcctctgcattctcatcactgggcggaagcagtagctactcctcctcgcaccaaccaacagcttctaattttgctccaagtgttgac

SEQ ID NO: 50393 - DNA, 90 bp, synthetic construct
  source 1..90: mol_type = other DNA
agctatctgcacccttacatgaaccccatcgtggaggccctgaccaagcggatcgaggacggcaccattcaattaacattccaatcgatt

SEQ ID NO: 50394 - DNA, 36 bp, synthetic construct
  source 1..36: mol_type = other DNA
gtggttgccaccaagggaaacctagtacaaaccacc

SEQ ID NO: 50395 - DNA, 42 bp, synthetic construct
  source 1..42: mol_type = other DNA
aatttcggcatctttgcctctctgaaccaggtgactcttgtg

SEQ ID NO: 50396 - DNA, 108 bp, synthetic construct
  source 1..108: mol_type = other DNA
atgggcattctcgccaacatcagctccgcgttctcctctctgggcggcagtagcagctattctagtagccaccagccgtcagctagcaacttctccccttctgtggat

SEQ ID NO: 50397 - DNA, 36 bp, synthetic construct; identical to SEQ ID NO: 50294
  source 1..36: mol_type = other DNA

SEQ ID NO: 50398 - DNA, 78 bp, synthetic construct
  source 1..78: mol_type = other DNA
tacggcgcagacagcagctgggaatggggcacaaacgcactgagtgacttcggagtgtcagatacagacgcggctacc

SEQ ID NO: 50399 - DNA, 42 bp, synthetic construct
  source 1..42: mol_type = other DNA
ggaggcatccttgccgctgccgtcccttttagcattcagtac

SEQ ID NO: 50400 - DNA, 81 bp, synthetic construct
  source 1..81: mol_type = other DNA
tttcctgccgactttggtctcgagagcatctggaagaacttgattcccaccttctatacacaagggcaattctcccggtac

SEQ ID NO: 50401 - DNA, 36 bp, synthetic construct
  source 1..36: mol_type = other DNA
aaccaggacatggccttcaacctgaatgagggatac

SEQ ID NO: 50402 - DNA, 36 bp, synthetic construct
  source 1..36: mol_type = other DNA
aacatgcccatccctttcgggactagcggccacatg

SEQ ID NO: 50403 - DNA, 276 bp, synthetic construct
  source 1..276: mol_type = other DNA
cagaacattggttcgtcttacctcgataccatcacctccatttacaacatgctgtacacactcaaggctgccgggtacaaagtggaggacctcccaaacaacgtttcggaactcgaggatatgattctgaaatgcggtatcaatgtggccaactgggctcctggcgagctggagaaactcgccaaccagtctggagtgacactgttaccggtatctgagtataccaagtggttcaattctctggacgacatcatcaagctgcaggtccgagaaggc

SEQ ID NO: 50404 - DNA, 192 bp, synthetic construct
  source 1..192: mol_type = other DNA
gaactggcccgccgggcagtcgagctgaactatacggtcactatcggcgataccatcgatgattggcgcaatcaggtggtgtctctgctgcccgatgatcagatggcagatgccacaactgttcttaacaaaattgttggcgctctcaagaactataccaacacacacgatgcaaaatacttcgaactgttc

SEQ ID NO: 50405 - DNA, 93 bp, synthetic construct
  source 1..93: mol_type = other DNA
gagcccaaccttcacgcctacctgaaccctgtggtcgagcaggtggaaaaccaggttcggagcggcgagatcaccattacatttcaatcaata

SEQ ID NO: 50406 - DNA, 36 bp, synthetic construct
  source 1..36: mol_type = other DNA
tacttcaccgctgtgcaagatgatctgtttctgacc

SEQ ID NO: 50407 - DNA, 69 bp, synthetic construct
  source 1..69: mol_type = other DNA
gccaacctgggcacaagccctctgatctgcctgccctatgtgtcctcgctcattaccaagttcagtgtg

SEQ ID NO: 50408 - DNA, 66 bp, synthetic construct
  source 1..66: mol_type = other DNA
ttcggagtccggggccccatcgggaaatttttcatcgagttctttgccgtgaagattgctttctcc

SEQ ID NO: 50409 - DNA, 60 bp, synthetic construct
  source 1..60: mol_type = other DNA
acccggacactgcccatggctgtttattctgaagttgcggctggcaacatgggagaagcc

SEQ ID NO: 50410 - DNA, 78 bp, synthetic construct
  source 1..78: mol_type = other DNA
ctcagggactacttcatggaggccatgcgagtctcaatgggcaacgattatgtcaacgtgatcgctccctttctgaac

SEQ ID NO: 50411 - DNA, 63 bp, synthetic construct
  source 1..63: mol_type = other DNA
atcgaaagcgggaccattgccgactttaacgagatcggcaagaatatgggcatctggctgaaa

SEQ ID NO: 50412 - DNA, 93 bp, synthetic construct
  source 1..93: mol_type = other DNA
gcgtccaatagtttaaacctcatggacaccgtcggcgaaatcagcgctggcgagacagtgaccatcgagggcctgaatgttgggttggaagga

SEQ ID NO: 50413 - DNA, 108 bp, synthetic construct
  source 1..108: mol_type = other DNA
gccgctaagaccgcagaaccccaggctgcccctgccaagacagagaagaaaaaatatggggggtccgaggagaccggaaagatcaaatacacatcttctagaaggaag

SEQ ID NO: 50414 - DNA, 87 bp, synthetic construct
  source 1..87: mol_type = other DNA
cccctgctgtttgacttcctgaaccctgccgtcgacgagttgactcaaaaagttgataacggcatcatacaattgactttccatgac

SEQ ID NO: 50415 - DNA, 36 bp, synthetic construct
  source 1..36: mol_type = other DNA
tactatgtggccatcagccaggacttctttagaaca

SEQ ID NO: 50416 - DNA, 39 bp, synthetic construct
  source 1..39: mol_type = other DNA
aacttcatcctctgctggaacttcctgattgtgttccag

SEQ ID NO: 50417 - DNA, 84 bp, synthetic construct
  source 1..84: mol_type = other DNA
gctgatgacatcgccggctttctgatgcccatcctgaaggaggcactcggcggtgacgacattagcatcaacgccttcgacatc

SEQ ID NO: 50418 - DNA, 36 bp, synthetic construct
  source 1..36: mol_type = other DNA
ggctacacaatcaagtccactagcacactcctgctg

SEQ ID NO: 50419 - DNA, 42 bp, synthetic construct
  source 1..42: mol_type = other DNA
gggaacatagtcggacagcagctcgggatacagcacctggtg

SEQ ID NO: 50420 - DNA, 84 bp, synthetic construct
  source 1..84: mol_type = other DNA
ccctatttatatagttatttcaaccctgtggtggaggacctgaccgaaaaagtccagaccggcgtgatccagctcaccttccaa

SEQ ID NO: 50421 - DNA, 36 bp, synthetic construct
  source 1..36: mol_type = other DNA
tactatacggcaactagccccaacctgttgcaagtc

SEQ ID NO: 50422 - DNA, 108 bp, synthetic construct
  source 1..108: mol_type = other DNA
ggcatcctgacaagtataagttccgcgttctcttccctggccaacccaagcccatacgccagtagctatcagcccaagacttctagcttcacccctaacttcgatctg

SEQ ID NO: 50423 - DNA, 72 bp, synthetic construct
  source 1..72: mol_type = other DNA
atgaacatcttcgtcgaccccctgttgtttctgcaattcctgcgcgagctctgcaacggagtgtttaataac

SEQ ID NO: 50424 - DNA, 96 bp, synthetic construct
  source 1..96: mol_type = other DNA
gtgtgcatgtaccggccctggattcttgatagcaggattcactccgtcgaggccgcactccctgccgctggcggatactctttcccaagtggacat

SEQ ID NO: 50425 - DNA, 30 bp, synthetic construct
  source 1..30: mol_type = other DNA
atgcacatccccgacggcctgattcctttc

SEQ ID NO: 50426 - DNA, 33 bp, synthetic construct
  source 1..33: mol_type = other DNA
accattcctagccccatgggggtacagatccac

SEQ ID NO: 50427 - DNA, 30 bp, synthetic construct
  source 1..30: mol_type = other DNA
atgcacctggctgacggccttatccctttc

SEQ ID NO: 50428 - DNA, 33 bp, synthetic construct
  source 1..33: mol_type = other DNA
accgttcctacacccttcggcattagcatccac

SEQ ID NO: 50429 - DNA, 33 bp, synthetic construct
  source 1..33: mol_type = other DNA
accgtccctagccccatcggcattccaatgcac

SEQ ID NO: 50430 - DNA, 33 bp, synthetic construct
  source 1..33: mol_type = other DNA
agcattccatcacctctgggcgttcctatccac

SEQ ID NO: 50431 - DNA, 45 bp, synthetic construct
  source 1..45: mol_type = other DNA
ggggacgctctcaccggggtcaaaagccagaacgctgatctgctt

SEQ ID NO: 50432 - DNA, 30 bp, synthetic construct
  source 1..30: mol_type = other DNA
atgcacatccccgacggcctgattcctatg

SEQ ID NO: 50433 - DNA, 33 bp, synthetic construct
  source 1..33: mol_type = other DNA
tccattcctagccccttcggcatcccaatgcac

SEQ ID NO: 50434 - DNA, 33 bp, synthetic construct
  source 1..33: mol_type = other DNA
tccgtccctagccccctgggcgttccaatccac

SEQ ID NO: 50435 - DNA, 33 bp, synthetic construct
  source 1..33: mol_type = other DNA
tccatcccaagccctctgggagtccccattcac

SEQ ID NO: 50436 - DNA, 30 bp, synthetic construct
  source 1..30: mol_type = other DNA
ctctacgccgttgaagttaatttaactgca

SEQ ID NO: 50437 - DNA, 117 bp, synthetic construct
  source 1..117: mol_type = other DNA
ttctccatggggattatcgcaacaatatcctcggccttctcctccctgtctaacaatagcccctatggcgcagcgtatcagccgaccgtcccttcctatacacctaacgtggtatcc

SEQ ID NO: 50438 - DNA, 102 bp, synthetic construct
  source 1..102: mol_type = other DNA
tccttcgcctttggagacacgtccctccacggtctgatcgctgctcctgctaacttcctcatgatgggcatcggaattgacgacgtcactggcacaattccc

SEQ ID NO: 50439 - DNA, 45 bp, synthetic construct
  source 1..45: mol_type = other DNA
gtctggggaggaggatggttaatgcaaatgggggcactggacttc

SEQ ID NO: 50440 - DNA, 33 bp, synthetic construct
  source 1..33: mol_type = other DNA
tccatccctagcccactgggcgttcccattcac

SEQ ID NO: 50441 - DNA, 33 bp, synthetic construct
  source 1..33: mol_type = other DNA
tccatacctagtcctttgggagtaccaatccac

SEQ ID NO: 50442 - DNA, 96 bp, synthetic construct
  source 1..96: mol_type = other DNA
tattcctcctacaccgaaatcgccacatcgatgatgggagaagtggcttctgtggccagcagcgattacaccgtcaccgacaacatgatggttctg

SEQ ID NO: 50443 - DNA, 36 bp, synthetic construct
  source 1..36: mol_type = other DNA
tacgttttctcgacacgggacttctttaggaccttt

SEQ ID NO: 50444 - DNA, 42 bp, synthetic construct
  source 1..42: mol_type = other DNA
atgctctgggtctcccaaatcggaattgaggccttctacgct

SEQ ID NO: 50445 - DNA, 45 bp, synthetic construct
  source 1..45: mol_type = other DNA
ctctacaacctgaagcaggccgacagctatatcctgacctttgag

SEQ ID NO: 50446 - DNA, 93 bp, synthetic construct
  source 1..93: mol_type = other DNA
gagcccaacctgtattcctactttaaccctgtggtcgaggacctgacacaaaaggtgcagagcggcacagttaagctgactttcgccgatatt

SEQ ID NO: 50447 - DNA, 36 bp, synthetic construct
  source 1..36: mol_type = other DNA
tattacgtggccatcagcggcaacctgttctacacc

SEQ ID NO: 50448 - DNA, 93 bp, synthetic construct
  source 1..93: mol_type = other DNA
ccttacttacattcctatttcaaccccgtggtcgacgaccttactcaaaaagtacagcagggcaccatcactctcacattctcacaattccag

SEQ ID NO: 50449 - DNA, 36 bp, synthetic construct
  source 1..36: mol_type = other DNA
tattacgtggcaacggctgacaacctgttcaccacc

SEQ ID NO: 50450 - DNA, 30 bp, synthetic construct
  source 1..30: mol_type = other DNA
atgaacttcgtgcccaacgccgacaatctg

SEQ ID NO: 50451 - DNA, 87 bp, synthetic construct
  source 1..87: mol_type = other DNA
ttcacctttggatggggcagcgacccaagctccttcttcgccaccaacgttggaggtacaagcgacttcgggtccattggctcaatc

SEQ ID NO: 50452 - DNA, 39 bp, synthetic construct
  source 1..39: mol_type = other DNA
ttcaccctgcccggctttgaggtcggcctgaagacatgc

SEQ ID NO: 50453 - DNA, 30 bp, synthetic construct
  source 1..30: mol_type = other DNA
ctgctggtgaccagcaacgacgctgcttac

SEQ ID NO: 50454 - DNA, 96 bp, synthetic construct
  source 1..96: mol_type = other DNA
atgctcgagacaccacacgtcaacgacattaaatacgaaaccctggggaacacaagcatcggcactgtggaagttggaatctccggcaacgagaac

SEQ ID NO: 50455 - DNA, 108 bp, synthetic construct
  source 1..108: mol_type = other DNA
atgggcattttgtcggccatgagctccgccttctctagcatcaacggtggctctagctacggctccgccgttcaacctacgacccctaattacctgtccaacatcgac

SEQ ID NO: 50456 - DNA, 33 bp, synthetic construct
  source 1..33: mol_type = other DNA
gagctgccattgcctgtcgctgcttgcgtgcac

SEQ ID NO: 50457 - DNA, 87 bp, synthetic construct
  source 1..87: mol_type = other DNA
ccttacctgtatagcttcttcaaccccgttgtggaggacctgacacacaaggtgcagaccggcgtcatcaccatcactttccaaagc

SEQ ID NO: 50458 - DNA, 39 bp, synthetic construct
  source 1..39: mol_type = other DNA
tattacctggctgccaacgatgacttcctgaagaccttc

SEQ ID NO: 50459 - DNA, 210 bp, synthetic construct
  source 1..210: mol_type = other DNA
ggaaaaactaagaaggtccagaacgccctgttcgccaagaccgtggttaagaatgacgctaagatctatcggggcgactcttccgtggtgaccgtctacgcttacatcgacgaggatggcgacgagtccacaactggggatcagaccagcatcgggaccaccagcgtggaggtgcacgtcgacaagggaatttgggacaaggctacatcc

SEQ ID NO: 50460 - DNA, 192 bp, synthetic construct
  source 1..192: mol_type = other DNA
gaccacactgaatacaatactattaacctgatagagaacggcaccacaatcgagattcctaacgacatgaagatgaaatccaataacaatggcatttccgtgctggaaaacgacaacaccattatcatctctttcaattccgcaaataagggggtcggggagatcacagccttcgccgatattaagataccg

SEQ ID NO: 50461 - DNA, 231 bp, synthetic construct
  source 1..231: mol_type = other DNA
ggtgccagttattcgggaaacgtgacaatcaaagaccctaccgtcgctggctgttctctgtcgggcgaatgtaacgcagttttggtgtccaacaacgagactcacgataacattatcgtcatctccaaaaacaagaatattgtgaatcacatcatcaattctatccaatggcatgcagttagttctaacgatgattcatctaccgccactacatccatacaacagccttcc

SEQ ID NO: 50462 - DNA, 96 bp, synthetic construct
  source 1..96: mol_type = other DNA
ggaactccaatgtacagccaggccgaggtggaccggtacatgctgaacaaatatggcatggtcgactaccacgttggagataatggctacatcgac

SEQ ID NO: 50463 - DNA, 102 bp, synthetic construct
  source 1..102: mol_type = other DNA
aatattttcgctggcgagaaatatggcatgatttccaagatgatgtcggagaccaataaaagcatttcttactccgacatagcgggagacgcagtcggtttg

SEQ ID NO: 50464 - DNA, 36 bp, synthetic construct
  source 1..36: mol_type = other DNA
ggggcacctttcgggtctgatctgtacttttccatg

SEQ ID NO: 50465 - DNA, 90 bp, synthetic construct
  source 1..90: mol_type = other DNA
cctcatctatatggttacttcaaccccgtggtggaggacctgacccacaaggtacagcaaggtaccatcaaactcactttcacatctcag

SEQ ID NO: 50466 - DNA, 36 bp, synthetic construct
  source 1..36: mol_type = other DNA
tattacgtggcaaccactgacgatatgcttgtcacc

SEQ ID NO: 50467 - DNA, 39 bp, synthetic construct
  source 1..39: mol_type = other DNA
gtgagcatcgccgtgccctggagtcctgtcctgatcacc

SEQ ID NO: 50468 - DNA, 51 bp, synthetic construct
  source 1..51: mol_type = other DNA
atgccctggtttacaaacatgaatcacggcctcgcattcctgttcgctgca

SEQ ID NO: 50469 - DNA, 45 bp, synthetic construct
  source 1..45: mol_type = other DNA
gccatgctgacaaagaccggcaccgcactggaaatcccgattagt

SEQ ID NO: 50470 - DNA, 87 bp, synthetic construct
  source 1..87: mol_type = other DNA
ccttacttatattcttacttcaaccccgtggtggacgacctaacacaaaaagttcagcaagggacaatcaagctgacattccaatct

SEQ ID NO: 50471 - DNA, 36 bp, synthetic construct
  source 1..36: mol_type = other DNA
tattacgtggccacaactgatgacctgctcgttaca

SEQ ID NO: 50472 - DNA, 63 bp, synthetic construct
  source 1..63: mol_type = other DNA
cctagcatcctgtccgccatcggcccctacatcattaccccaattatcaccgacgtgcattct

SEQ ID NO: 50473 - DNA, 93 bp, synthetic construct
  source 1..93: mol_type = other DNA
gagcccaatttatacggatacttcaaccctgtggttgaagagctgacgcaaaaagttcagagcggcgtggtcaaactgactttcacggacacg

SEQ ID NO: 50474 - DNA, 36 bp, synthetic construct
  source 1..36: mol_type = other DNA
tactatttagcctcgactgacaacctgctctacaca

SEQ ID NO: 50475 - DNA, 99 bp, synthetic construct
  source 1..99: mol_type = other DNA
ttcatagccatcggctcccactacggggaattgtcagctggcctgcggaacatgagcgggatcgccgtgtctgacttcggcatggatggactcgaactg

SEQ ID NO: 50476 - DNA, 48 bp, synthetic construct
  source 1..48: mol_type = other DNA
atcgctacacccttcggctccgacttcacctttgccggttttggagtg

SEQ ID NO: 50477 - DNA, 39 bp, synthetic construct
  source 1..39: mol_type = other DNA
gtgacaattgccaccccttggagccccgtgctgatcagt

SEQ ID NO: 50478 - DNA, 51 bp, synthetic construct
  source 1..51: mol_type = other DNA
atgccctggttcaccggcatggagcacggactggcatggatcctgtccgct

SEQ ID NO: 50479 - DNA, 45 bp, synthetic construct
  source 1..45: mol_type = other DNA
ttcatgctcgggaccggctctgccctgagcatttcccaattgatc

SEQ ID NO: 50480 - DNA, 75 bp, synthetic construct
  source 1..75: mol_type = other DNA
ttcaatgcctccatccctgacacatacatcttccatacaatctctgaactgggcataacaggatccaattctcct

SEQ ID NO: 50481 - DNA, 36 bp, synthetic construct
  source 1..36: mol_type = other DNA
tgttgccggtgcttcgatcgatattcttggatcttc

SEQ ID NO: 50482 - DNA, 30 bp, synthetic construct
  source 1..30: mol_type = other DNA
tccttcatgaagaacggcagcatcggattc

SEQ ID NO: 50483 - DNA, 102 bp, synthetic construct
  source 1..102: mol_type = other DNA
ctgatgggattcatgagcgtactttcaagcatatctcccctggggtcaggctcctcttccaccggcgtttcttccgcctctaacattgcaagcagcatggac

SEQ ID NO: 50484 - DNA, 87 bp, synthetic construct
  source 1..87: mol_type = other DNA
ccctacctgtactcctacttcaaccctgtggtcgaggacctcacacatcaggtacaacagggcacaatcaagctgacgttccaatcg

SEQ ID NO: 50485 - DNA, 36 bp, synthetic construct
  source 1..36: mol_type = other DNA
tactatgtggctacgactgacgatctgttccaaact

SEQ ID NO: 50486 - DNA, 30 bp, synthetic construct
  source 1..30: mol_type = other DNA
ctgagcttcatcccgtcgtcctcaaatatc

SEQ ID NO: 50487 - DNA, 48 bp, synthetic construct
  source 1..48: mol_type = other DNA
ttccgggagacaatggtcttcacgaccggcgaaggattcttcaacggc

SEQ ID NO: 50488 - DNA, 33 bp, synthetic construct
  source 1..33: mol_type = other DNA
gtgtcccggggtggcagctggtactggaacatc

SEQ ID NO: 50489 - DNA, 90 bp, synthetic construct
  source 1..90: mol_type = other DNA
cccttcctccactcctttctgaaccctgtggtggaggacctgacccaaaaggtccagagcggcgtcattacactgacgttccaagacatt

SEQ ID NO: 50490 - DNA, 45 bp, synthetic construct
  source 1..45: mol_type = other DNA
tattacgtggccacctccgctgacctcgtcaagacatcactcctg

SEQ ID NO: 50491 - DNA, 87 bp, synthetic construct
  source 1..87: mol_type = other DNA
ccttacctgtatagctacttcaaccccgtggtggacgacctgacgcaaaaagttcagtccggcgtgatcaccctgactttcgctgac

SEQ ID NO: 50492 - DNA, 36 bp, synthetic construct
  source 1..36: mol_type = other DNA
tactatgtcggcaccgccgagaacatcgtctctgtg

SEQ ID NO: 50493 - DNA, 81 bp, synthetic construct
  source 1..81: mol_type = other DNA
tcctttaatgacaccctgatcaacacatatctcttctatactatatctgagctcgggattcccaatgctaattccccattg

SEQ ID NO: 50494 - DNA, 36 bp, synthetic construct
  source 1..36: mol_type = other DNA
ttcatcggcccctacacccctagcgagattggagac

SEQ ID NO: 50495 - DNA, 60 bp, synthetic construct
  source 1..60: mol_type = other DNA
gacggcctgctgatgtttttcaagctgcaccaaatgcctaacgatgggatggtggagaac

SEQ ID NO: 50496 - DNA, 93 bp, synthetic construct
  source 1..93: mol_type = other DNA
atgtgcaccaagtggcggaagctcgagataagcaccaaaaccgacacgcccatcttcgtggcctttcctaagattttttccctgatgggggtc

SEQ ID NO: 50497 - DNA, 36 bp, synthetic construct
  source 1..36: mol_type = other DNA
gccatccctctgacatggaccccagtgcccattaca

SEQ ID NO: 50498 - DNA, 48 bp, synthetic construct
  source 1..48: mol_type = other DNA
ccatggtactcagggatgacaggtggcatcgccactctcttgggaacc

SEQ ID NO: 50499 - DNA, 39 bp, synthetic construct
  source 1..39: mol_type = other DNA
ttctacttagcacaaggcacggctctgacactcactcag

SEQ ID NO: 50500 - DNA, 54 bp, synthetic construct
  source 1..54: mol_type = other DNA
gtgcggggcgagttcgattttagtttaatcttctttaagactgacttcgctctg

SEQ ID NO: 50501 - DNA, 42 bp, synthetic construct
  source 1..42: mol_type = other DNA
ttcccgcaaccagagaacaccagcttcgaggccatctggaac

SEQ ID NO: 50502 - DNA, 93 bp, synthetic construct
  source 1..93: mol_type = other DNA
gatctgattcgcgagttcatgatcgaaatcttcaatcaattaataggcaacctcccaccgaactcctccgtcgccgacgaggccatcttcctc

SEQ ID NO: 50503 - DNA, 36 bp, synthetic construct
  source 1..36: mol_type = other DNA
gtcattcctctgccttggacacccgtgccaatcacc

SEQ ID NO: 50504 - DNA, 51 bp, synthetic construct
  source 1..51: mol_type = other DNA
attccatggttcggcggcatgacagggggactgaacgtcgtgctgggttca

SEQ ID NO: 50505 - DNA, 39 bp, synthetic construct
  source 1..39: mol_type = other DNA
gcctaccttactcaaggtaccgttttgggagtcgtcgac

SEQ ID NO: 50506 - DNA, 36 bp, synthetic construct
  source 1..36: mol_type = other DNA
atcattcccctgccatggacacccgttcctatcacc

SEQ ID NO: 50507 - DNA, 54 bp, synthetic construct
  source 1..54: mol_type = other DNA
gtgccatggttcggcggaatgactggcggcctggacgtcgttggggtgtcccta

SEQ ID NO: 50508 - DNA, 39 bp, synthetic construct
  source 1..39: mol_type = other DNA
agctacctaactcaaggtactgtgcttgggatcgctgac

SEQ ID NO: 50509 - DNA, 36 bp, synthetic construct
  source 1..36: mol_type = other DNA
atcattcctctgccgtggacaccagtgccaatcacc

SEQ ID NO: 50510 - DNA, 51 bp, synthetic construct
  source 1..51: mol_type = other DNA
atcccttggttcggaggcatgaccggaggcctcgacgtcctgcttggttcc

SEQ ID NO: 50511 - DNA, 36 bp, synthetic construct
  source 1..36: mol_type = other DNA
tacctaactcaaggtacagctttaggggtagttgat

SEQ ID NO: 50512 - DNA, 51 bp, synthetic construct
  source 1..51: mol_type = other DNA
atgaatattgggcagtccatctacgatcttttcggcggtaacggggagata

SEQ ID NO: 50513 - DNA, 78 bp, synthetic construct
  source 1..78: mol_type = other DNA
ttcttcaacgcccctctgatcgacacctacctgtttcacacaatcagcgagctcggcattcccaatggcaattctccc

SEQ ID NO: 50514 - DNA, 36 bp, synthetic construct
  source 1..36: mol_type = other DNA
atttgcagaatccacaaccggttcttattgataagt

SEQ ID NO: 50515 - DNA, 60 bp, synthetic construct
  source 1..60: mol_type = other DNA
gagatgttcggcattgtatcaccggggaccgtcgacactgaagccatgacatctttgacc

SEQ ID NO: 50516 - DNA, 36 bp, synthetic construct
  source 1..36: mol_type = other DNA
atcatcccactgccttggactcccgtacccattacc

SEQ ID NO: 50517 - DNA, 51 bp, synthetic construct
  source 1..51: mol_type = other DNA
atcccgtggtttggcgggatgacgggaggcctggatgtattcctggggtca

SEQ ID NO: 50518 - DNA, 42 bp, synthetic construct
  source 1..42: mol_type = other DNA
tactctctgacgcaaggagccgctatcggcgttgtggatctt

SEQ ID NO: 50519 - DNA, 87 bp, synthetic construct
  source 1..87: mol_type = other DNA
agcttcctgcacgcctacctgaaccccgtggtcgatgacttatcacaaaaagtgcacaccggcgtgatccggattacattccaaagt

SEQ ID NO: 50520 - DNA, 36 bp, synthetic construct
  source 1..36: mol_type = other DNA
tactatctggccatcagcgatgacctgttcaagtct

SEQ ID NO: 50521 - DNA, 36 bp, synthetic construct
  source 1..36: mol_type = other DNA
attatcccactgccctggactcctgtgcctatcacc

SEQ ID NO: 50522 - DNA, 51 bp, synthetic construct
  source 1..51: mol_type = other DNA
gtgccctggttcggaggcatgactggggggctcgacgtgcttttgggctca

SEQ ID NO: 50523 - DNA, 36 bp, synthetic construct
  source 1..36: mol_type = other DNA
taccttacccaaggtgcagtcctgggagttgtagac

SEQ ID NO: 50524 - DNA, 33 bp, synthetic construct
  source 1..33: mol_type = other DNA
tttaggggcagcaagggcaccaaccacttcaca

SEQ ID NO: 50525 - DNA, 33 bp, synthetic construct
  source 1..33: mol_type = other DNA
ggcctgcactccacctcatctactgtcgaactt

SEQ ID NO: 50526 - DNA, 87 bp, synthetic construct
  source 1..87: mol_type = other DNA
cctttcctccacgcctacctgaaccccgtcgtggacgatctgagccagaaggttcacaccggcgtgattcggatcacattccaatcc

SEQ ID NO: 50527 - DNA, 36 bp, synthetic construct
  source 1..36: mol_type = other DNA
tattacatcgccattagcgacgatctgttcaagagc

SEQ ID NO: 50528 - DNA, 48 bp, synthetic construct
  source 1..48: mol_type = other DNA
aagataccccaacctgaaaccctgtctctgtccggcctcatggaatcc

SEQ ID NO: 50529 - DNA, 36 bp, synthetic construct
  source 1..36: mol_type = other DNA
atcatcccattgccctggacacccgtgcctattacc

SEQ ID NO: 50530 - DNA, 51 bp, synthetic construct
  source 1..51: mol_type = other DNA
gtcccttggttcggtggaatgactgggggcatcgacattgtgctgggcagt

SEQ ID NO: 50531 - DNA, 39 bp, synthetic construct
  source 1..39: mol_type = other DNA
ttctacttaactcaagggtccgtcctgggaatcgtagac

SEQ ID NO: 50532 - DNA, 36 bp, synthetic construct
  source 1..36: mol_type = other DNA
ctcattcccctgccgtggacacctgtgccaattacc

SEQ ID NO: 50533 - DNA, 51 bp, synthetic construct
  source 1..51: mol_type = other DNA
atcccctggtttggtggcatgactgggggactggaggccctcctcggctct

SEQ ID NO: 50534 - DNA, 36 bp, synthetic construct
  source 1..36: mol_type = other DNA
aacataacccagggcgccagcattgggatcatcaat

SEQ ID NO: 50535 - DNA, 48 bp, synthetic construct
  source 1..48: mol_type = other DNA
atgaacatcggccagagcatttacgacctgttcggcggaaatggagaa

SEQ ID NO: 50536 - DNA, 33 bp, synthetic construct
  source 1..33: mol_type = other DNA
aagaccctcaaagtggagttcatcatgttgcca

SEQ ID NO: 50537 - DNA, 54 bp, synthetic construct
  source 1..54: mol_type = other DNA
atgctgcctagcgactctcccaacgctgaggcctttagctcgatactgtcaaca

SEQ ID NO: 50538 - DNA, 36 bp, synthetic construct
  source 1..36: mol_type = other DNA
attatccccctgccatggacacccgttcctatcacc

SEQ ID NO: 50539 - DNA, 51 bp, synthetic construct
  source 1..51: mol_type = other DNA
atcccctggtttggaggcatgacaggagggattgagaccttccttggctct

SEQ ID NO: 50540 - DNA, 39 bp, synthetic construct
  source 1..39: mol_type = other DNA
tacagcttaacacaaggtgccaccattggcatcgtagac

SEQ ID NO: 50541 - DNA, 36 bp, synthetic construct
  source 1..36: mol_type = other DNA
atcatccctctgccatggacccctgtgcccattacc

SEQ ID NO: 50542 - DNA, 51 bp, synthetic construct
  source 1..51: mol_type = other DNA
gtgccttggttcggcggcatgaccggtggactggacgtgttgcttggtagc

SEQ ID NO: 50543 - DNA, 39 bp, synthetic construct
  source 1..39: mol_type = other DNA
atgtacttcgcccaagggactgttgtcggcatcgctaac

SEQ ID NO: 50544 - DNA, 54 bp, synthetic construct
  source 1..54: mol_type = other DNA
ggcagccaggtcgagaccctcactggctaccccgagacaatcaccgacaagagt

SEQ ID NO: 50545 - DNA, 36 bp, synthetic construct
  source 1..36: mol_type = other DNA
gtgattcccctgccttggacacccgtcccaatcacc

SEQ ID NO: 50546 - DNA, 51 bp, synthetic construct
  source 1..51: mol_type = other DNA
atcccatggttcggaggcatgactggtggccttgaggtcctgctcggctcc

SEQ ID NO: 50547 - DNA, 36 bp, synthetic construct
  source 1..36: mol_type = other DNA
tacgtggtccagggtagcgtgctgtcgatcaccgac

SEQ ID NO: 50548 - DNA, 255 bp, synthetic construct
  source 1..255: mol_type = other DNA
tggggcgccgctattcaaaacgcgggatactgcatctgcaacaattgcacatttacaaacaactactgttcgcgagggggcgccatcttcaacaccggccggctggaactgaacaactgcaccttcattggaaacacaggctataccgagggcaacgacgtgctgaacgtcggcgatggcatcgtgattctcaatggcaagaagatcaccgaggacgaaggtcccgtgacatgtaccgattctgtaacatctacc

SEQ ID NO: 50549 - DNA, 111 bp, synthetic construct
  source 1..111: mol_type = other DNA
atggcatatcagggctccttcctccttggaatcagttggatgcagcccgtcttcgatgctatgaacgccctgttcaatcctctgatggcgctggaccccactccaaacaat

SEQ ID NO: 50550 - DNA, 120 bp, synthetic construct
  source 1..120: mol_type = other DNA
atcaaggacatgatcattgtgctgccacctgctgtctattactgcaccttcacccctctctttcacgcctttggccaatggatttacggcggaaacatcactacaatcccatacggaatc

SEQ ID NO: 50551 - DNA, 36 bp, synthetic construct
  source 1..36: mol_type = other DNA
atcattcctctgccctggacacctgtgccaatcacc

SEQ ID NO: 50552 - DNA, 51 bp, synthetic construct
  source 1..51: mol_type = other DNA
atcccttggttcggcggcatgaccggcgggctggacgtgctccttggttcc

SEQ ID NO: 50553 - DNA, 36 bp, synthetic construct
  source 1..36: mol_type = other DNA
ctgagcatgcagggcacacccgttggaattgttgac

SEQ ID NO: 50554 - DNA, 36 bp, synthetic construct
  source 1..36: mol_type = other DNA
attatccccctgccgtggaccccagttcctatcact

SEQ ID NO: 50555 - DNA, 51 bp, synthetic construct
  source 1..51: mol_type = other DNA
attccctggttcgggggcatgaccggcggcatcgaggtcttgctgggctct

SEQ ID NO: 50556 - DNA, 36 bp, synthetic construct
  source 1..36: mol_type = other DNA
agctcctacgctggcgcccctcttggcatcattgac

SEQ ID NO: 50557 - DNA, 48 bp, synthetic construct
  source 1..48: mol_type = other DNA
aagatcccccaacctgaaacactgagcctgtccggcatcatggatctc

SEQ ID NO: 50558 - DNA, 36 bp, synthetic construct
  source 1..36: mol_type = other DNA
attatccctctgccctggacaccagtgcctatcaca

SEQ ID NO: 50559 - DNA, 51 bp, synthetic construct
  source 1..51: mol_type = other DNA
atcccttggttcggcgggatgactggtggcattgaagtgctgcttggatca

SEQ ID NO: 50560 - DNA, 39 bp, synthetic construct
  source 1..39: mol_type = other DNA
ctgaacgctaccggcacacctgtctcaatcgccaatgtg

SEQ ID NO: 50561 - DNA, 36 bp, synthetic construct
  source 1..36: mol_type = other DNA
gtgatccctctgagctggacacccgtcccaatcacc

SEQ ID NO: 50562 - DNA, 48 bp, synthetic construct
  source 1..48: mol_type = other DNA
ccctggtactccgggatgaccggcggactgtctgtgctcatcggaagc

SEQ ID NO: 50563 - DNA, 30 bp, synthetic construct
  source 1..30: mol_type = other DNA
atgtacacacaagggatcagcctttctctg

SEQ ID NO: 50564 - DNA, 33 bp, synthetic construct
  source 1..33: mol_type = other DNA
ctggaggttggcgggcacaccgcggtagcagcc

SEQ ID NO: 50565 - DNA, 63 bp, synthetic construct
  source 1..63: mol_type = other DNA
atcgcctacatatttagttataactcgcaaaatatggctctgaagccctactcgtccatctca

SEQ ID NO: 50566 - DNA, 36 bp, synthetic construct
  source 1..36: mol_type = other DNA
atcattccactgccctggacccctgttccaatcact

SEQ ID NO: 50567 - DNA, 51 bp, synthetic construct
  source 1..51: mol_type = other DNA
attccctggtttggcggcatgacagggggtatcgacgtcttcctcggaagc

SEQ ID NO: 50568 - DNA, 36 bp, synthetic construct
  source 1..36: mol_type = other DNA
atgtcaagtcaagggatggcctttaccttcatcgac

SEQ ID NO: 50569 - DNA, 42 bp, synthetic construct
  source 1..42: mol_type = other DNA
taccccttgagcaacttcgatttccaatttatgttcctgagt

SEQ ID NO: 50570 - DNA, 51 bp, synthetic construct
  source 1..51: mol_type = other DNA
aagattgttgtcgggccatatcccttccttaaagtttacgagcagagcgtc

SEQ ID NO: 50571 - DNA, 90 bp, synthetic construct
  source 1..90: mol_type = other DNA
ccttacctgtattcttacttccacccggtcgtctctgacctctcccacaaggtggagaccggcgtaattcagctgaccactgccgacttc

SEQ ID NO: 50572 - DNA, 36 bp, synthetic construct
  source 1..36: mol_type = other DNA
tattacatcgctatacaaaataacctgttccgggtc

SEQ ID NO: 50573 - DNA, 36 bp, synthetic construct
  source 1..36: mol_type = other DNA
attatccccctgccatggacacctgtgcccatcacc

SEQ ID NO: 50574 - DNA, 51 bp, synthetic construct
  source 1..51: mol_type = other DNA
attccctggtttggcggcatgactggtggtctcgacattttcctcggatct

SEQ ID NO: 50575 - DNA, 39 bp, synthetic construct
  source 1..39: mol_type = other DNA
atgagcatgcagggcacccctgtcggaatcgtggaactc

SEQ ID NO: 50576 - DNA, 36 bp, synthetic construct
  source 1..36: mol_type = other DNA
atcattcccttgccttggaccagcgtgccaatcacc

SEQ ID NO: 50577 - DNA, 51 bp, synthetic construct
  source 1..51: mol_type = other DNA
attccctggttcggcggcatgactgggggcttggagatcctcctgggaagc

SEQ ID NO: 50578 - DNA, 36 bp, synthetic construct
  source 1..36: mol_type = other DNA
atgagtctacaaggtgcaacattcaccgtggtagac

SEQ ID NO: 50579 - DNA, 33 bp, synthetic construct
  source 1..33: mol_type = other DNA
ctgggcgatttcgtttataccgacactggagca

SEQ ID NO: 50580 - DNA, 111 bp, synthetic construct
  source 1..111: mol_type = other DNA
atggcctaccaaggcagcttcctcctcggcatctcttggctccaacccgtgttcgacgccatgaacgcagttctgaatccactcgtccatatggatccaactcctaataac

SEQ ID NO: 50581 - DNA, 132 bp, synthetic construct
  source 1..132: mol_type = other DNA
tccaccattaaggacattatcgtggtcttccctccggccgtgtactactgcaccctgacacctttgtttcattcgttgggacagatgctttatggcggcaacatcacaaccatcccttacggtgtcgggggg

SEQ ID NO: 50582 - DNA, 36 bp, synthetic construct
  source 1..36: mol_type = other DNA
atcatcccactgccatggacaccggtgcctattacc

SEQ ID NO: 50583 - DNA, 51 bp, synthetic construct
  source 1..51: mol_type = other DNA
atcccttggttcgggggaatgacaggtggtctggacatcttcctaggtagc

SEQ ID NO: 50584 - DNA, 39 bp, synthetic construct
  source 1..39: mol_type = other DNA
ctgagcatccagtgcacacctgtcggcattgcttctctg

SEQ ID NO: 50585 - DNA, 36 bp, synthetic construct
  source 1..36: mol_type = other DNA
atcatcccactgccttggacaccagtgcccattacc

SEQ ID NO: 50586 - DNA, 51 bp, synthetic construct
  source 1..51: mol_type = other DNA
attccctggttcgggggcatgaccggcggcctggagatcctccttggctcc

SEQ ID NO: 50587 - DNA, 39 bp, synthetic construct
  source 1..39: mol_type = other DNA
ctgactagtcaggggacaagcttcggcgtgatggatctt

SEQ ID NO: 50588 - DNA, 81 bp, synthetic construct
  source 1..81: mol_type = other DNA
tctaccgggctgcctctcttcgaggtctacacacaaaacacaataagcgccctgggcgtgcccggatacatttccccaatt

SEQ ID NO: 50589 - DNA, 36 bp, synthetic construct
  source 1..36: mol_type = other DNA
atcattcctctgccctggacacccgtgccaatcacc

SEQ ID NO: 50590 - DNA, 51 bp, synthetic construct
  source 1..51: mol_type = other DNA
atcccctggttcggaggcatgacgggcggcctggaagtattcctgggatct

SEQ ID NO: 50591 - DNA, 36 bp, synthetic construct
  source 1..36: mol_type = other DNA
ctgggattccagggcacgccggttgggatcattgac

SEQ ID NO: 50592 - DNA, 36 bp, synthetic construct
  source 1..36: mol_type = other DNA
atcattccattgccctggactcctgtacctatcacc

SEQ ID NO: 50593 - DNA, 51 bp, synthetic construct
  source 1..51: mol_type = other DNA
atcccctggttcggcggaatgaccggcggccttgaggtgctgctgggtagt

SEQ ID NO: 50594 - DNA, 39 bp, synthetic construct
  source 1..39: mol_type = other DNA
ctgtccagtcaagggatggcattcggcgtagtggatctc

SEQ ID NO: 50595 - DNA, 75 bp, synthetic construct
  source 1..75: mol_type = other DNA
tgggtggaccccgacaaactcgaggagatttaccgctggtccgtcggcaccatcgatggagccgactgggataag

SEQ ID NO: 50596 - DNA, 42 bp, synthetic construct
  source 1..42: mol_type = other DNA
cccatgtacaactttaatttccaatttttgttcttggacggc

SEQ ID NO: 50597 - DNA, 51 bp, synthetic construct
  source 1..51: mol_type = other DNA
aatgtcgtttctgggccctacccctttcttaaagtaaaccaacaggctccc

SEQ ID NO: 50598 - DNA, 42 bp, synthetic construct
  source 1..42: mol_type = other DNA
atggccctgaacatccccggaggcgagttgctttttacgggt

SEQ ID NO: 50599 - DNA, 51 bp, synthetic construct
  source 1..51: mol_type = other DNA
cctggcctggccgccctgggagctggggacatcaatacactcgcttcatca

SEQ ID NO: 50600 - DNA, 36 bp, synthetic construct
  source 1..36: mol_type = other DNA
atcattccactgccttggaccccagttcccatcacc

SEQ ID NO: 50601 - DNA, 51 bp, synthetic construct
  source 1..51: mol_type = other DNA
gttccctggtttggtggaatgacgggcggcctggaaacattcctgggaagc

SEQ ID NO: 50602 - DNA, 39 bp, synthetic construct
  source 1..39: mol_type = other DNA
tccagcttcgccggcaccccactgggtatctacgatctg

SEQ ID NO: 50603 - DNA, 45 bp, synthetic construct
  source 1..45: mol_type = other DNA
taccccatgcacaacttcgacttccaatttctcttcctcgatgga

SEQ ID NO: 50604 - DNA, 51 bp, synthetic construct
  source 1..51: mol_type = other DNA
aaggtggtcaacggaccataccctttcctccgtgtctacgagcagtctatc

SEQ ID NO: 50605 - DNA, 33 bp, synthetic construct
  source 1..33: mol_type = other DNA
ctcggctcatacgcttatactggaactggttcc

SEQ ID NO: 50606 - DNA, 63 bp, synthetic construct
  source 1..63: mol_type = other DNA
agcttcggcgatttgagccagctaacctatggagttattgggattcacgcctacggatctgtg

SEQ ID NO: 50607 - DNA, 51 bp, synthetic construct
  source 1..51: mol_type = other DNA
agtagccagtacaccctgactttcatgaatctgggcaacatgagcaccatc

SEQ ID NO: 50608 - DNA, 60 bp, synthetic construct
  source 1..60: mol_type = other DNA
gtggacttcctgaatcacctcctgggcaacagcggctttgggttggcaacagggaacctg

SEQ ID NO: 50609 - DNA, 102 bp, synthetic construct
  source 1..102: mol_type = other DNA
aatatacaggctggcgataactacggtctgattacgaaagaaatgtcaaagtccaatgtagcgatccccttctccgaagtcagtggcggagccattggactg

SEQ ID NO: 50610 - DNA, 30 bp, synthetic construct
  source 1..30: mol_type = other DNA
atccccttcggaggcgacttttacttcgcc

SEQ ID NO: 50611 - DNA, 30 bp, synthetic construct
  source 1..30: mol_type = other DNA
cccggcattgtgatcgcggttttctctaaa

SEQ ID NO: 50612 - DNA, 30 bp, synthetic construct
  source 1..30: mol_type = other DNA
ctgggccccatcaccgacaacacaggttac

SEQ ID NO: 50613 - DNA, 36 bp, synthetic construct
  source 1..36: mol_type = other DNA
ctgggcgacttcgcctataccgagacaggttacctg

SEQ ID NO: 50614 - DNA, 276 bp, synthetic construct
  source 1..276: mol_type = other DNA
gtgggcctggatacagaccagatctacactaggcccgctccgcaaagtcaaatggatgccgggctcgccatcgccccatacgaccgggggggcgaaatactggaatctcctggagtgaccgaggcccagtaccccgacaacagccagaacctgggatggattaattcctatatgactcccatcgctgagatgctgaaggggattagtccttatttcgggacaagcatctgcgcttcccctggcggcgtcatcgatgagattctgtactacacacgg

SEQ ID NO: 50615 - DNA, 30 bp, synthetic construct
  source 1..30: mol_type = other DNA
ctcctgggaccggttcaactttcggtcgtg

SEQ ID NO: 50616 - DNA, 60 bp, synthetic construct
  source 1..60: mol_type = other DNA
gacaacatcctgatgttctttaacacaccacaacaaatctttaatatcagcaaggagtac

SEQ ID NO: 50617 - DNA, 219 bp, synthetic construct
  source 1..219: mol_type = other DNA
atgggcaacccctttgtggacagcggcgtgttcgtccctttggactcactgcaagatattactggcaaggaaggcgtctctcgggtgctcgttaagactggcgaggatgtgaatgacacagccatcagtgacaagatcgaggaggactacgaggatttctctacactgaccagcgaggaaatttcctccatcgccgatgacgtcctcggcatccttgac

SEQ ID NO: 50618 - DNA, 42 bp, synthetic construct
  source 1..42: mol_type = other DNA
ctgagactctttgaggttaccgatttcgccctcggctatagc

SEQ ID NO: 50619 - DNA, 33 bp, synthetic construct
  source 1..33: mol_type = other DNA
accagcatcggctgcgtaatgcctccccaattc

SEQ ID NO: 50620 - DNA, 33 bp, synthetic construct
  source 1..33: mol_type = other DNA
ctggggaactatgtttacaccgagacaggagcc

SEQ ID NO: 50621 - DNA, 90 bp, synthetic construct
  source 1..90: mol_type = other DNA
ccttatttatatagttacttcaaccccgtcgtggacgatttatcgcaaaaggttgagaccggcgtcgtgaagctgacattccaaaccgac

SEQ ID NO: 50622 - DNA, 36 bp, synthetic construct
  source 1..36: mol_type = other DNA
tattacgtcgctattcaaaataacctttttagggtg

SEQ ID NO: 50623 - DNA, 78 bp, synthetic construct
  source 1..78: mol_type = other DNA
ggcgccgacttcggaactcccgtgctgaacatcctcatcgggtacttcattggcacaaataccagctataccgctttt

SEQ ID NO: 50624 - DNA, 54 bp, synthetic construct
  source 1..54: mol_type = other DNA
ttatggggaaaaggcttgtttagcggccgcggcatcctgtactactatatgact

SEQ ID NO: 50625 - DNA, 132 bp, synthetic construct
  source 1..132: mol_type = other DNA
aatactgccgactggtctattgcatcggtcaatgaatacgccatggacatctacctcaacaaagtcagctactcctggactctggacgagaagggcaatatccaggtcaacaagcagaaggacgtgtacaaa

SEQ ID NO: 50626 - DNA, 72 bp, synthetic construct
  source 1..72: mol_type = other DNA
gagaaaagcggcaaggacaaaccggatactgctttcttcgacatacggaacaagaataaatacgtgtcacgt

SEQ ID NO: 50627 - DNA, 189 bp, synthetic construct
  source 1..189: mol_type = other DNA
ctcaacccgcaatattatgacccccttgttaagacaccagccggcatgaacgcctacgcctcccgctttcaaaacttttacgccaccactgtgctgggtggcgagaaactgaacaaggagctcggcaaccagctggccgatactgtcctgaagatcaacagcggagtcaactctaatacattggccgca

SEQ ID NO: 50628 - DNA, 114 bp, synthetic construct
  source 1..114: mol_type = other DNA
atgggcagctacaagatcagcttcgctagggtctacgaggtcattctcattcacctgaccaacctgggagacgggctcacatccctcgacatgaaggtggtttggaacgaaagg

SEQ ID NO: 50629 - DNA, 99 bp, synthetic construct
  source 1..99: mol_type = other DNA
taccccgactccttcgcatccgtcctccaacctatgatccagcaatttgaacaaaacatagccgacggcaccgtcacactcgctaccgattctctgttc

SEQ ID NO: 50630 - DNA, 30 bp, synthetic construct
  source 1..30: mol_type = other DNA
ttcgcggcacagatggacctaacgagctac

SEQ ID NO: 50631 - DNA, 36 bp, synthetic construct
  source 1..36: mol_type = other DNA
gccagctggttcctggggttgctcggcatccaactg

SEQ ID NO: 50632 - DNA, 102 bp, synthetic construct
  source 1..102: mol_type = other DNA
ggctacagctccgttggtggaaacacgggccagatttcccaaaacgcatatagcattgggaatatttctctgtcaaccggcggtttgactagttgggatctt

SEQ ID NO: 50633 - DNA, 51 bp, synthetic construct
  source 1..51: mol_type = other DNA
atcggggccccttttggcgtggacttcacttttgcaagtgtcacaattata

SEQ ID NO: 50634 - DNA, 30 bp, synthetic construct
  source 1..30: mol_type = other DNA
gctcctttcgccatgtggttctacaacgcc

SEQ ID NO: 50635 - DNA, 207 bp, synthetic construct
  source 1..207: mol_type = other DNA
ttcaatgggatggagattgtgaatcacatctccgagagcaacgactacaactcttatttcaataactacgagagccggtacaacaacacacccggcgctgtccaatacatcaacattaaccctgcttgttgcgtcaacaagaacatcaccactatcaactctgagaataccacaaccacactgatcaccgagattgagaagtccaat

SEQ ID NO: 50636 - DNA, 45 bp, synthetic construct
  source 1..45: mol_type = other DNA
agctggacaaccgacctgggcctttaccacctgctgctccatgag

SEQ ID NO: 50637 - DNA, 51 bp, synthetic construct
  source 1..51: mol_type = other DNA
aaaatcgtggaaggaccttaccctttcctcttggtgcacaaccagcctatt

SEQ ID NO: 50638 - DNA, 45 bp, synthetic construct
  source 1..45: mol_type = other DNA
agctggaccacagagcttggcctgtaccacctcctgttccacgaa

SEQ ID NO: 50639 - DNA, 51 bp, synthetic construct
  source 1..51: mol_type = other DNA
aaaattgtgaagggaccctacccattcctgttggtgcacaaccaacctatc

SEQ ID NO: 50640 - DNA, 108 bp, synthetic construct
  source 1..108: mol_type = other DNA
tacgccagcaactccctgccaagcaacattataagcgattccgttggctccgtgatcaacacaacaaccctgtcctctaatagcaccgctaacaacactatcgattct

SEQ ID NO: 50641 - DNA, 42 bp, synthetic construct
  source 1..42: mol_type = other DNA
ggcacaaccgatttcgggctgtattacctcttgtttcacgag

SEQ ID NO: 50642 - DNA, 51 bp, synthetic construct
  source 1..51: mol_type = other DNA
aagattgtggaagggccatacccattcctgcttgtgcacaaccaacccatc

SEQ ID NO: 50643 - DNA, 54 bp, synthetic construct
  source 1..54: mol_type = other DNA
agcagccaatacacgctgactttcatgaacattggcaacctcaccaccatctac

SEQ ID NO: 50644 - DNA, 60 bp, synthetic construct
  source 1..60: mol_type = other DNA
aaggtcgacttcctcaaccacctgctgggcaactccgggtttagccttgtgaccggaaac

SEQ ID NO: 50645 - DNA, 78 bp, synthetic construct
  source 1..78: mol_type = other DNA
tttttcaacgacagcctgattaacacatacctcttccacaccatctccgagctgggcatccccaatgtgaacagtccc

SEQ ID NO: 50646 - DNA, 36 bp, synthetic construct
  source 1..36: mol_type = other DNA
gagatgaccggagaccttgagggccttagccacggc

SEQ ID NO: 50647 - DNA, 108 bp, synthetic construct
  source 1..108: mol_type = other DNA
atgtccggaagcggcaccatcgtggacctgtatcacaagtactacgggtccgcctctggcgacctggctagcctggaggccctcaaatccagcgtggtctctttcaaa

SEQ ID NO: 50648 - DNA, 39 bp, synthetic construct
  source 1..39: mol_type = other DNA
ctggagggcgacatggatgaccgcgtctatgcccacatg

SEQ ID NO: 50649 - DNA, 42 bp, synthetic construct
  source 1..42: mol_type = other DNA
tttaacaagaacgacctggacgagaacttcttcttcgtggat

SEQ ID NO: 50650 - DNA, 36 bp, synthetic construct
  source 1..36: mol_type = other DNA
agctggaactacaatatccctatcatatccattgtc

SEQ ID NO: 50651 - DNA, 39 bp, synthetic construct
  source 1..39: mol_type = other DNA
tttctgcaagagattaactttaatgccattatcggagtg

SEQ ID NO: 50652 - DNA, 42 bp, synthetic construct
  source 1..42: mol_type = other DNA
acgattggcgccgagaacatggtcggactgatcatcgggatg

SEQ ID NO: 50653 - DNA, 93 bp, synthetic construct
  source 1..93: mol_type = other DNA
gaggactacctgtactcctacttcaaccccgtggtcaacaacctcaaccacaaagtgtctagcggcgtcatcaagctgacctacatgaccatc

SEQ ID NO: 50654 - DNA, 36 bp, synthetic construct
  source 1..36: mol_type = other DNA
tactatgtggcgttgcaaaataacttcttcaagacc

SEQ ID NO: 50655 - DNA, 129 bp, synthetic construct
  source 1..129: mol_type = other DNA
ggatggctcggccccacatccggatctggcaccacctacaccggctgggatatctggaacaacgtggacagcatcttcaagcctcacactgaggattatggcggcctgggttacatcaagtacagtggt

SEQ ID NO: 50656 - DNA, 99 bp, synthetic construct
  source 1..99: mol_type = other DNA
atgtacactgggactgtgaccgttgaaacttacactgccggaggcgagctgatctccaaggtgaccagcaaagtggcctctgatggcgtcggattcaag

SEQ ID NO: 50657 - DNA, 135 bp, synthetic construct
  source 1..135: mol_type = other DNA
agcctgaacaacaatcagaacctggagatctttgggcaaaaatattacattatctctaccaattccatgttccctgctatcaacaaatacgacgttgttgtttgcaaaaatgtgaagcagaacgaattgagagtg

SEQ ID NO: 50658 - DNA, 204 bp, synthetic construct
  source 1..204: mol_type = other DNA
gacgtgattacgtaccaaataaatgacgaagtgataacacataggatctctcggatagaagagcaggatcagatttactactataccaaaggggacaataacgcggacgaggataagaggaaaatcacattcaacaacattaaaggcaaggagatctatattattcccaagatcggaaagctcattaaaatcctgtcctcctca

SEQ ID NO: 50659 - DNA, 39 bp, synthetic construct
  source 1..39: mol_type = other DNA
ggcgagatgaccggtgacctcgaaggcttgagccatggg

SEQ ID NO: 50660 - DNA, 108 bp, synthetic construct
  source 1..108: mol_type = other DNA
atgtccgggtctggcaccatcgtggacctctacaacaagtattacggatcagggtccgataacctggcttccctggccgcccttaagtctgtcgtagtctcatttaaa

SEQ ID NO: 50661 - DNA, 78 bp, synthetic construct
  source 1..78: mol_type = other DNA
agcttcaacgacaccctggtgtctacctacctcttccacacaatatcagagctagggatccccaacattaactctccc

SEQ ID NO: 50662 - DNA, 66 bp, synthetic construct
  source 1..66: mol_type = other DNA
ctcgagtacttccacctggtgccgacggatgcagccccaccttttgacgtcaacatcggaatgact

SEQ ID NO: 50663 - DNA, 117 bp, synthetic construct
  source 1..117: mol_type = other DNA
gcctacatgaaagctgacggaaattacaacatcatttccaaggagctgagcagccaggagatcaagaacacccagccctctaacgatacggataccggcatgagcgctatcggatac

SEQ ID NO: 50664 - DNA, 45 bp, synthetic construct
  source 1..45: mol_type = other DNA
ggaggcctgttcgggatggacctgccctacgccatgaccagcatc

SEQ ID NO: 50665 - DNA, 30 bp, synthetic construct
  source 1..30: mol_type = other DNA
cccatggtcgtgaagggctacttcggtatc

SEQ ID NO: 50666 - DNA, 78 bp, synthetic construct
  source 1..78: mol_type = other DNA
tttttcaatagctctctgattgacgcctacctctttcacaccatctctgagctgggcatccccaacgccaattctccg

SEQ ID NO: 50667 - DNA, 30 bp, synthetic construct
  source 1..30: mol_type = other DNA
ttcaccgagattgtctatggatacatcgtg

SEQ ID NO: 50668 - DNA, 102 bp, synthetic construct
  source 1..102: mol_type = other DNA
aatattggggctggcgacaactatgggagtatcacgaaggcattctcacaaagcaacaaaagcatctctttttccgacgtgaagggcgacgcaataggactg

SEQ ID NO: 50669 - DNA, 33 bp, synthetic construct
  source 1..33: mol_type = other DNA
ggcgttcccttcggagcagacatgtactttgcc

SEQ ID NO: 50670 - DNA, 42 bp, synthetic construct
  source 1..42: mol_type = other DNA
cccatgagcaactttgacttcgagttcctcttcctgaaggac

SEQ ID NO: 50671 - DNA, 51 bp, synthetic construct
  source 1..51: mol_type = other DNA
aaggtggtgtccggaccgtaccccttcctgaaagtttacgagcagcccgtt

SEQ ID NO: 50672 - DNA, 30 bp, synthetic construct
  source 1..30: mol_type = other DNA
ttcaccgagattctgtacaagtacatcgtg

SEQ ID NO: 50673 - DNA, 63 bp, synthetic construct
  source 1..63: mol_type = other DNA
gctatttacggatggaatttcatcatgcaaatcgcgaccggcggatacgaggtgctcaacaca

SEQ ID NO: 50674 - DNA, 30 bp, synthetic construct
  source 1..30: mol_type = other DNA
cggggcagcaacgggacaaatcacttcacc

SEQ ID NO: 50675 - DNA, 162 bp, synthetic construct
  source 1..162: mol_type = other DNA
gactcttcctgtatcattaattggactatcacggccgtcaataacggacctgacaaggccagcgacgtctgcgttgacctaaccgatttcaaaacctttgggctggtcgtcctgaactcctctgacaacgtagccatctacctccccgtgaaacgctggaac

SEQ ID NO: 50676 - DNA, 42 bp, synthetic construct
  source 1..42: mol_type = other DNA
gctcccatctttactgacttcttcgggaagcctgaagccctc

SEQ ID NO: 50677 - DNA, 45 bp, synthetic construct
  source 1..45: mol_type = other DNA
aaaattcacgagcagatctaccggtccaaggaatctcagcttagg

SEQ ID NO: 50678 - DNA, 30 bp, synthetic construct
  source 1..30: mol_type = other DNA
ctcctgagcaagaagggctgcaaattgctg

SEQ ID NO: 50679 - DNA, 201 bp, synthetic construct
  source 1..201: mol_type = other DNA
atgtatggcacagtgatcttgaataccataaatgagaacgatctgagcacatatctggacgtggacgaaaacaccagcggctcagggggatatgtccaatatgtgaacatcaaccctgccgaatgtctgaacaagaacatcacaacgaccaggacaggaaacacgaccacaaccataattactgagtacaattccacgaaa

SEQ ID NO: 50680 - DNA, 42 bp, synthetic construct
  source 1..42: mol_type = other DNA
cctaactctcccctgatcgaaggctatttctttgagcctctg

SEQ ID NO: 50681 - DNA, 48 bp, synthetic construct
  source 1..48: mol_type = other DNA
agctatgagttcgccggcctctactttgaccggatctacaacctgttc

SEQ ID NO: 50682 - DNA, 81 bp, synthetic construct
  source 1..81: mol_type = other DNA
tttttcaacgcctccctgtttaatacttacgtgttccataccatttccgaactgggcatccctaatgggaacagccctctc

SEQ ID NO: 50683 - DNA, 78 bp, synthetic construct
  source 1..78: mol_type = other DNA
caggccgactctagttggacatggggctataattcgattagcgacttcggcatctcctactccaccgctgctgcaaac

SEQ ID NO: 50684 - DNA, 30 bp, synthetic construct
  source 1..30: mol_type = other DNA
ttcgacaccgagcccattagcatccctgac

SEQ ID NO: 50685 - DNA, 78 bp, synthetic construct
  source 1..78: mol_type = other DNA
ttcttcaactcttcactaatggacgcttacatcttccacaccatctctgagctgggcattcccaacgccaattctccc

SEQ ID NO: 50686 - DNA, 111 bp, synthetic construct
  source 1..111: mol_type = other DNA
gtcttcgccggagccacttctctgaagcaggtggtgacccttctgtggactttcaatgttccgtggaattgggcatatcatggcgatctcttcgctccctgggtgactcag

SEQ ID NO: 50687 - DNA, 30 bp, synthetic construct
  source 1..30: mol_type = other DNA
atgaaccagtacaacctgatcaacatgacc

SEQ ID NO: 50688 - DNA, 30 bp, synthetic construct
  source 1..30: mol_type = other DNA
tttttcctgaataacctgggaatcccttac

SEQ ID NO: 50689 - DNA, 270 bp, synthetic construct
  source 1..270: mol_type = other DNA
ctgaaccccgatcaattgtacccacggcctacgccccaaacgcaaatggacgctggattatcaattgctccctacgaccggggcggcgaaatcctttctgcacctgggataacaaaggcccagtaccccgagaacagcccttctctgggctggatcaacagctacatgtcccctatcgctgacgcaatccagggaatcagtccctacttcgggacctccatctattctagtccgggcggactgattgacgagattctctactacacaaga

SEQ ID NO: 50690 - DNA, 57 bp, synthetic construct
  source 1..57: mol_type = other DNA
gctctgccgcaagcacatttaattactgagggacagtttatcaccttcctgaactcc

SEQ ID NO: 50691 - DNA, 42 bp, synthetic construct
  source 1..42: mol_type = other DNA
atgtatgggcttatatcctattctccttcctttcaagttaca

SEQ ID NO: 50692 - DNA, 36 bp, synthetic construct
  source 1..36: mol_type = other DNA
atgagccctattaacgtttcacttaccttcgagatc

SEQ ID NO: 50693 - DNA, 45 bp, synthetic construct
  source 1..45: mol_type = other DNA
tggatgactgactggggtctcttcaacctgggcttttttcaactc

SEQ ID NO: 50694 - DNA, 51 bp, synthetic construct
  source 1..51: mol_type = other DNA
gagaaggttataggcccctatcctttcctgatggttaatacgcagcccgtc

SEQ ID NO: 50695 - DNA, 87 bp, synthetic construct
  source 1..87: mol_type = other DNA
ttcgatctccctattttcgacctgcaccacctgctgctcaactttaacgagaccatcgacatgttcttcgccaatagccccgaatat

SEQ ID NO: 50696 - DNA, 42 bp, synthetic construct
  source 1..42: mol_type = other DNA
agctggacaaccgacctgggcctttaccacctcctgttcaac

SEQ ID NO: 50697 - DNA, 51 bp, synthetic construct
  source 1..51: mol_type = other DNA
aaaattgtggaaggaccatacccctttctcctcgtgaacaagcagcccatc

SEQ ID NO: 50698 - DNA, 273 bp, synthetic construct
  source 1..273: mol_type = other DNA
ggcctgaataccgaccaaatctacattcgccccgcaccgcaaagtcagatggacgccggtctcgccattgctccctatgaccgcggcggcgaagtcctggtgtccccgggggtcaccgaagcacagtaccccgagaactccaagaatctcggctggattaactcctacatgacaccaatcgctgagttgctgaaggcactgtctccgtacttcggcaccagtatatgcgcctcgcccggcggattgatcgatgaaatactgtactacacaaga

SEQ ID NO: 50699 - DNA, 48 bp, synthetic construct
  source 1..48: mol_type = other DNA
ctgatcctgaacgaggataatacattcattgaccacaccgatgagaat

SEQ ID NO: 50700 - DNA, 33 bp, synthetic construct
  source 1..33: mol_type = other DNA
gaggacaacaccttcatcgacgaccatacggat

SEQ ID NO: 50701 - DNA, 42 bp, synthetic construct
  source 1..42: mol_type = other DNA
tggacaaccgactggggcctgcactatttgcttttcgagggt

SEQ ID NO: 50702 - DNA, 51 bp, synthetic construct
  source 1..51: mol_type = other DNA
aagattgtggaaggcccctaccccttcctgctcgtgtataaccagccagtt

SEQ ID NO: 50703 - DNA, 57 bp, synthetic construct
  source 1..57: mol_type = other DNA
gccctgcccgagataaagatcctgacctacggggactttatcggcttcatccattcc

SEQ ID NO: 50704 - DNA, 117 bp, synthetic construct
  source 1..117: mol_type = other DNA
ctgtacctccatacattttctatactcttcctgagtttcagcaccgagttccccaagacatctgccgaatacatcgccccacctgctcctgctccttctttgactaaccctttcaaa

SEQ ID NO: 50705 - DNA, 42 bp, synthetic construct
  source 1..42: mol_type = other DNA
attgacataaagtcatacctggagaatacgggcaacttgtgg

SEQ ID NO: 50706 - DNA, 36 bp, synthetic construct
  source 1..36: mol_type = other DNA
atgaacaattccaacgacctgagcatcacctccttc

SEQ ID NO: 50707 - DNA, 54 bp, synthetic construct
  source 1..54: mol_type = other DNA
cactactgcctgtttggcttcaactatttcgagagccccttcaaggcccattac

SEQ ID NO: 50708 - DNA, 36 bp, synthetic construct
  source 1..36: mol_type = other DNA
attaacaacagcaatgacctgtcgattactagtttt

SEQ ID NO: 50709 - DNA, 267 bp, synthetic construct
  source 1..267: mol_type = other DNA
ctgaaccctgatcaattatacgttaggcctgccccacaagagcaggtggacgaagggctcgctatcgccccatatgacagaggtggcgtgccccttaaggaaccaggaaatatcgacccccaatacccagagaacgctgaatccctgggcatgatcaccggctacatgagccctctggccgagttcgtttcctcgatctctccatacttcggcacatcgatctattcgagtccaggcggtctcattgacgagattctgtactacacc

SEQ ID NO: 50710 - DNA, 270 bp, synthetic construct
  source 1..270: mol_type = other DNA
cttaatcctgatcaactatatgttagacctgctccccaagtacaagtggacgaaggactcgctatcgccccttacgaccgcggcggcgaagtgctgaagtctcctggcaacatcaacccacaatacccagagaatgccgccgagctggggatgatcaccgcctatatgagccctctagcccaatggatatcctctatttctccatacttcggcacctctatatattcctcgcctggcggactgattgatgaggtcctctactacacaaga

SEQ ID NO: 50711 - DNA, 273 bp, synthetic construct
  source 1..273: mol_type = other DNA
ggtctgaacgtggatcagatttaccctaggcccgaaccccaggtgcaggtggaccaaggcatggctatggctccatatgcacgcggtggcgagccactgaaggagagaggcatcaccatatcgcaatatccacaatatgagcccaatctgggctggataaacagctacgtgtcaccgctaagtcaattcgtgatgagtatcagtccctacttcgggacttcaatctatagtagtccaggcggactcattgatgagatcctctactatacaaga

SEQ ID NO: 50712 - DNA, 270 bp, synthetic construct
  source 1..270: mol_type = other DNA
ctgaatccggatcagctatatcctaggccggctccccaagtacaagtggacgagggcctcgccattgccccttacgaccgaggcggcgaagtgctgagtcagccagggatcatcaagccccagtatccagacaacgccgaagctcttggcatgattactggctacatgagtccacccgctcaatggatctctagcatctctccctacttcgggacatccatttattctagccccggcggactcatcgacgagatcctgtactacacaaga

SEQ ID NO: 50713 - DNA, 267 bp, synthetic construct
  source 1..267: mol_type = other DNA
ttgaatcctgaccaaatttatgtccgcccggccccgcaagagcaggtggacgagggcctggctctggccccttacgatcggggtggcgagccgctcaaggaagccggagtcattgaccctcaatatcctgagaatgcagcctctcttggcatgattaccggatacatgagccctatagcccaatggataagtagcatcagcccctacttcggaacttccatctattcatcgcccggaggtctgatcgatgagatcctctactacacc

SEQ ID NO: 50714 - DNA, 270 bp, synthetic construct
  source 1..270: mol_type = other DNA
ctgaacccggaccaaatctatccacgggtggagcctcaggtgcaggtcgagaataacctgtccatggccccatatgataggggaggcgaggtgctcaagagtcccggcatcaccgatagccagtacccccaatatgaaccagagctgggctggatcaacagttatgtttcaccgcttgctcaatttataaagtccattagtccatacttcggaacttctatctattcctccccgggcggcctcatcgacgaaatcctctactatactcgc

SEQ ID NO: 50715 - DNA, 81 bp, synthetic construct
  source 1..81: mol_type = other DNA
acgttcaaggacactctcatcaatacctatctcattcacactatctccgagctgggcatcccaaattccaactcaccttac

SEQ ID NO: 50716 - DNA, 267 bp, synthetic construct
  source 1..267: mol_type = other DNA
ctgaacccagatcagctctacgtccgcccggcaccacaagaacaaattgacgaaggccttgcaatcgctccttacgaccggggcggcgaggtcctgactcaaccgggggagatcaatccccaataccctgataatgctgcatctctcggcatgattaccggctatatgtctccactagcccaattcatatcctccatatcaccttacttcggaacttccatctactctagccccggcggactgatcgacgagatcctgtactatacg

SEQ ID NO: 50717 - DNA, 267 bp, synthetic construct
  source 1..267: mol_type = other DNA
cttaaccccgaccaactctacgtccgaccggctcctcaagagcagatcgatgacggcctggcaatcgccccatacgataggggcggagaggtgctaacccaaccgggatccatccatccgcaataccccgagaatgccgcttctctgggcatgatcactggatacatgagcccactagcacaatttgtctcctctattagcccctacttcgggacatccatttatagtagccccggcggcctgatcgacgagattctgtactacacc

SEQ ID NO: 50718 - DNA, 57 bp, synthetic construct
  source 1..57: mol_type = other DNA
attttcgagatcaatggccgcaactacacccgcgtgtcagatgaaaacggtacagca

SEQ ID NO: 50719 - DNA, 276 bp, synthetic construct
  source 1..276: mol_type = other DNA
aactacacaattaagacactcttcaacggaacaacagtggagaataccatcaccgtgctgcctaccctgatcgccgacaatctcgtgaagtactacaagaacgcgagccagttctttattagtcttatcgacggagaaagcaatcccatctccggggtcaatattactatgaatatcaacggcgtcttttacaaccggaccaccaacgagaagggaaccgcaaagctgaacatcaacctgccacctggcgagtatatcctgactgccattgatcca

SEQ ID NO: 50720 - DNA, 87 bp, synthetic construct
  source 1..87: mol_type = other DNA
ctggatgggcagggcaatccactggccaacgccgctgtgaagttcaacatcaacggagtcttttacactaagcacacagactctaag

SEQ ID NO: 50721 - DNA, 60 bp, synthetic construct
  source 1..60: mol_type = other DNA
tacatcattacatccgaatacgatgggctgaagatcagcaataccatcaccatcaacgat

SEQ ID NO: 50722 - DNA, 120 bp, synthetic construct
  source 1..120: mol_type = other DNA
gggtacttcgaggctggtgactcttacggcgaaatgagcgagatgattgccttcggccacgagcacaacatcaagaccaacatgtccgtgacccaggacggcacaagtgctctggagtac

SEQ ID NO: 50723 - DNA, 54 bp, synthetic construct
  source 1..54: mol_type = other DNA
ttcattgccggccactacatcggacaggacttcgtctttgggctggtttctacc

SEQ ID NO: 50724 - DNA, 30 bp, synthetic construct
  source 1..30: mol_type = other DNA
cagggcatcgtttcgtctgtgttcggaatt

SEQ ID NO: 50725 - DNA, 270 bp, synthetic construct
  source 1..270: mol_type = other DNA
ctcaatccggagcaactttacgtccggcccgcgccacaagtccaggtggacgaaggagtggctatcgcaccttacgcccggggtggcgtccctcttgaggaggccggcaacatctcacctcaatatcccgagaatgccgaatccctgggcatgatcacgggctatatgtccccacttgctgagtggatctctagcattagcccctacttcggaaccactatctactcgtcccccggtggactgatcgacgagatcctgtactacacaaga

SEQ ID NO: 50726 - DNA, 267 bp, synthetic construct
  source 1..267: mol_type = other DNA
cttaaccccgatcaactatacgtcagacctgcaccgcaagaacaagtggatgaaggactggccatcgctccatatgaccggggcggagaagtgctcacgcaacctggcattatcaacccacaataccctgacaacgccgcaagcctgggcatgatcactggctacatgagccctatcgctgagtggatctccgcaatctctccgtacttcgggacctccatttactcctctcccggcggactgattgacgagatcctctactacact

SEQ ID NO: 50727 - DNA, 81 bp, synthetic construct
  source 1..81: mol_type = other DNA
tctttcaacgacactctggctaatacgtaccttattcacactatctctgaactcggtatccccaacctcaatagcccttac

SEQ ID NO: 50728 - DNA, 267 bp, synthetic construct
  source 1..267: mol_type = other DNA
cttaaccccgaccaactatatgtcaggcccgcccctcaagagcagatcgatgaaggcctggccatcgctccttacgaccgcggcggcgaggtgctgactgagccaggcaatatcaatccccaataccctgagaacgcggcccagctggggatgatcaccggctacatgtctcctattagccaatgggtgtcctccatctctccctacttcggaacctccatttattcatccccgggcggtctgatcgacgagattctctactacacg

SEQ ID NO: 50729 - DNA, 267 bp, synthetic construct
  source 1..267: mol_type = other DNA
ctgaaccccgatcaattatatgttagacccgatccccaacaacagattgacgagggctctagcctcgcaccatacgaccggggaggcgagccactcaaggaggctggggatatcaacccccaatatttagagaacgctgccgtgctgggcatgatcaccggctatatgtcccctctcgccgaatgggtctcctctatatctccgtacttcggcaccagtatatatagttctcccggcggcctgatcgacgagatcctgtactacacg

SEQ ID NO: 50730 - DNA, 78 bp, synthetic construct
  source 1..78: mol_type = other DNA
tccgtgaatgacaccctgtttaacatgtacgtcttccacacaattagcgatctgggcatccctaatgggaactgtccc

SEQ ID NO: 50731 - DNA, 99 bp, synthetic construct
  source 1..99: mol_type = other DNA
ggagtggaggacatcgtctcttattactatcgggagtaccagtattactacgctagcgcctacatggactacaagggcctgtactactccattatgggc

SEQ ID NO: 50732 - DNA, 267 bp, synthetic construct
  source 1..267: mol_type = other DNA
ctgaacagcgaccagttatatgtcagacccgcaccccaagaccagatcgatgccggcctcgctctggcaccatacgacagaggcggcgaagtcctcaaagaccccgggttcatcaagcctcagtttcctgagaacgctgagcagctgggaatgatcaccggctatatgtcgcctctcgcgcaatggattagctccatctctccatatttcggcacaagcatctactcctctcccggcggactgattgacgaaatcctgtactacaca

SEQ ID NO: 50733 - DNA, 66 bp, synthetic construct
  source 1..66: mol_type = other DNA
ggccctgatctgatgttcgtgtttggggactacatcaagactccaatcgccattggagtcgctaac

SEQ ID NO: 50734 - DNA, 267 bp, synthetic construct
  source 1..267: mol_type = other DNA
ctcaaccctgaccaactatatgtgaaaccattttcgcaagttcaggtggacaagggactgcctctggctccttacgatcgggacggcgaccccctagtacaaccagggaacattctgccccaatttccggacaacgtaaagtctctcggcatggtgaccggctacatgtctccattggcccaattcgtctctagtgtctctccttacttcgggacatccatttatagctctccgggcggactgatcgatgagatcctgtactacacc

SEQ ID NO: 50735 - DNA, 267 bp, synthetic construct
  source 1..267: mol_type = other DNA
ctcaaccctgatcaattataccctaggcccgctccgcaagaacaagtggacgcaggcctggctatcgcaccttatgaccggggcggcgaagtcctggtggaacctggcgagattaaccctcaatatccagacaatgccgcctctcttggaatgatcactgcctatatgagcccactagcccaatggatcagctcgatctctccctacttcgggacctctatttatagtagtcccggtggcctgatcgatgagatcctgtactacaca

SEQ ID NO: 50736 - DNA, 51 bp, synthetic construct
  source 1..51: mol_type = other DNA
atgaacttggggcaggccatctatgaccttttcggagccaatggggagtgg

SEQ ID NO: 50737 - DNA, 267 bp, synthetic construct
  source 1..267: mol_type = other DNA
ctgaacccggatcaattatacgttcggccggcaccacaagagcagatcgacgaaggcctcgctatcgctccatatgacaggggtggccagcctttgacacaacctggcgaaatcgacccacaatatccggagaacgccgagtccctgggcatgattactggctatatgtccccattggcacaatggataagcagcattagcccttacttcggaacttctatctactcttcccctggtggcctgatcgatgagattctgtactacaca

SEQ ID NO: 50738 - DNA, 267 bp, synthetic construct
  source 1..267: mol_type = other DNA
cttaaccccgatcaactttacgtccgacctgccccgcaagagcaaatcgacgagggtctcgcaattgccccttatgatcggggcggaatcgtgctgaaggagcccggagaaatccacccacaatatccagacaacgccgcctccctggggatgatcaccgcttatatgagcccacttgcgcaatggatttcctctatttccccatacttcggcacatctatttattcgtccccgggcggcctgattgacgagatcctctactacact

SEQ ID NO: 50739 - DNA, 36 bp, synthetic construct
  source 1..36: mol_type = other DNA
aacctgttcaccgagcctaatcccctgatcaagtat

SEQ ID NO: 50740 - DNA, 78 bp, synthetic construct
  source 1..78: mol_type = other DNA
aataactcgtcaaattcagactacggcatcttcatcgtgacctatctggtccccttcattttcgtgaacttctcttgg

SEQ ID NO: 50741 - DNA, 69 bp, synthetic construct
  source 1..69: mol_type = other DNA
atgactaccatcaacacaaatctgttcaacttcatcaaccacggccttgagaacccgctgctgaatacc

SEQ ID NO: 50742 - DNA, 87 bp, synthetic construct
  source 1..87: mol_type = other DNA
gtcaatgagccccggcccgaggccaccctgagcaacgtgcacctcctgatcgtggaaaacgacccaaggtctttccctagtggacac

SEQ ID NO: 50743 - DNA, 120 bp, synthetic construct
  source 1..120: mol_type = other DNA
ggctacttcgaggctggcgacagctacggcgagatgtccgagatgattgcatttagccacgaacacaatatcaagaccaacattacatctaacgacaacggaacttccgccctggaatat

SEQ ID NO: 50744 - DNA, 51 bp, synthetic construct
  source 1..51: mol_type = other DNA
atcgccggtcattacattgggcaggactttctctttggcatggtgtctacg

SEQ ID NO: 50745 - DNA, 30 bp, synthetic construct
  source 1..30: mol_type = other DNA
cccggcattatatcttccgttttcggaatc

SEQ ID NO: 50746 - DNA, 270 bp, synthetic construct
  source 1..270: mol_type = other DNA
ctgaaccctgaccaactttacacacggccagcgcctcaagagcaagtcgatgacggactctctatagccccatacgaccgaggcggcgaagtgatgaagacccctgggactatcaatccccaataccccgagaacgctgctgagctcggcatgatcaccggttacatgtccccactggcccaatggatttctagcattagcccctacttcggaacatccatttatagttcccctggcggcctgattgacgagatcctgtactacactaga

SEQ ID NO: 50747 - DNA, 78 bp, synthetic construct
  source 1..78: mol_type = other DNA
ttctttaatgcctctttctccaacgcttacgtgttccacgccattagcgagctgggcatccctaacttaaatagccct

SEQ ID NO: 50748 - DNA, 111 bp, synthetic construct
  source 1..111: mol_type = other DNA
attaatatcggcgatcactatgggcaaattaccaaggggtttttgcaagcaaaagcaaacggaacattgtctgtcaatgaaagcatgcccaagctcaacaccttcgacctg

SEQ ID NO: 50749 - DNA, 42 bp, synthetic construct
  source 1..42: mol_type = other DNA
gggatgccctttggcaccgaccttacctttttctccgtaact

SEQ ID NO: 50750 - DNA, 30 bp, synthetic construct
  source 1..30: mol_type = other DNA
cacctgcaatacgtctttggctttgactcc

SEQ ID NO: 50751 - DNA, 51 bp, synthetic construct
  source 1..51: mol_type = other DNA
attggcaaccaggccattggatctgataccgtaccgggcctcatctcctcc

SEQ ID NO: 50752 - DNA, 111 bp, synthetic construct
  source 1..111: mol_type = other DNA
gcttactcctccgtcggagagaattatggcgctatctctaacgccctgtggcacaagaacgtcaccgggaaccaaacttctaacatgtctttcaagctgaatacaatcgat

SEQ ID NO: 50753 - DNA, 33 bp, synthetic construct
  source 1..33: mol_type = other DNA
atccccttcggaaccgatacgtattcgagccta

SEQ ID NO: 50754 - DNA, 33 bp, synthetic construct
  source 1..33: mol_type = other DNA
gacccgataagcacttggtactatggactgaac

SEQ ID NO: 50755 - DNA, 45 bp, synthetic construct
  source 1..45: mol_type = other DNA
atccctcaaccgagtacactcaaccttgagggcctgtggaatctg

SEQ ID NO: 50756 - DNA, 33 bp, synthetic construct
  source 1..33: mol_type = other DNA
atacaacagctggggcaggttatagtactcgga

SEQ ID NO: 50757 - DNA, 45 bp, synthetic construct
  source 1..45: mol_type = other DNA
gcttttgcctttttctccgtgaccggagtccctgagagcgtgttc

SEQ ID NO: 50758 - DNA, 99 bp, synthetic construct
  source 1..99: mol_type = other DNA
atggctgacatcttctctatgttctccggtggaatcctgaatgtgctcaacaccctgttcaaccctcttctggccatggacccaaataaccagaatcct

SEQ ID NO: 50759 - DNA, 120 bp, synthetic construct
  source 1..120: mol_type = other DNA
attatcagcaacctggtgctcatcctccctgcgcccgcctactggctgaccctgactccattttggcacttcatcggccagttcctctacggcgggaaagctacaatcccctatggaata

SEQ ID NO: 50760 - DNA, 261 bp, synthetic construct
  source 1..261: mol_type = other DNA
aggtcactcggagagatgacgattaccagctcaacaagccctatttactcgcttcaaagcagggccgactttacactccacgtgcttaatctcttggactttctcggcggcaacttcgggctgactcatggtcacatgctcgcgtcctcaatccctggaagcgacctcgggccacggatgatggtcggccggctgatcgcatggagaagcgaggttaccgtgactccgacattgattggacagatggtggtcgactttggc

SEQ ID NO: 50761 - DNA, 42 bp, synthetic construct
  source 1..42: mol_type = other DNA
tacgagttcgtgctggttatgcaaacgctaccatacaacgaa

SEQ ID NO: 50762 - DNA, 99 bp, synthetic construct
  source 1..99: mol_type = other DNA
atggccgacatcttcggaatgctgagcggcggagtgctcaacgctctgaatgcactgttcaaccctctcctggccatggacccccaaaaccagcccaac

SEQ ID NO: 50763 - DNA, 123 bp, synthetic construct
  source 1..123: mol_type = other DNA
agcgtcatctcacaactcgttctgattttgccggcccccgcttactggctgactctgacacccttctggcacttcattggccagtttctctacggaggcaaagccaccattccctacggcatc

SEQ ID NO: 50764 - DNA, 42 bp, synthetic construct
  source 1..42: mol_type = other DNA
tatgagttcgtcttggttatgcaaaccctgccgtacaacgaa

SEQ ID NO: 50765 - DNA, 96 bp, synthetic construct
  source 1..96: mol_type = other DNA
atggtggacgtgattggcatgctgatgggtggcgtcaacaacgtgctcaatagcatcttcaaccctatcctggccatggacccaaacccccataac

SEQ ID NO: 50766 - DNA, 126 bp, synthetic construct
  source 1..126: mol_type = other DNA
acaagcgccattcacgacctggtgctgattcttccgcaacctgtatattgggtgacccttactccaatctggcacgctatcggcggattcatctacggcggaaaggccaccatcccctacggtatt

SEQ ID NO: 50767 - DNA, 78 bp, synthetic construct
  source 1..78: mol_type = other DNA
tacttcaatgccagcttcctggacacctatattttccacacaatcagcgagctgggcatacctaattcaaattctcct

SEQ ID NO: 50768 - DNA, 96 bp, synthetic construct
  source 1..96: mol_type = other DNA
atcagcgacccactgaatctgcccgacttcgaccttaaggatatgctcctgaacctgcccaagaccattcacgtcctgtactccaacaacccagtg

SEQ ID NO: 50769 - DNA, 51 bp, synthetic construct
  source 1..51: mol_type = other DNA
gccggctacatcggttccgttgagggcctgatgggcctcgggaagattgcg

SEQ ID NO: 50770 - DNA, 81 bp, synthetic construct
  source 1..81: mol_type = other DNA
tttttcaatgactcactcatcaatacctatatgttccacaccatctctgaactgggcattcccaatgtaaactcccctttg

SEQ ID NO: 50771 - DNA, 42 bp, synthetic construct
  source 1..42: mol_type = other DNA
atcaaggtcgtcaacctcaatttctacggcatggaggtgact

SEQ ID NO: 50772 - DNA, 57 bp, synthetic construct
  source 1..57: mol_type = other DNA
ctgccatctcctgtttggtacacaggcgacagctccctggccttcgtctttacccag

SEQ ID NO: 50773 - DNA, 78 bp, synthetic construct
  source 1..78: mol_type = other DNA
ttcttcaacgattcttttagtagcacctacctgttccacacaatttccgagctgggcatccctaacctcaattcgcca

SEQ ID NO: 50774 - DNA, 108 bp, synthetic construct
  source 1..108: mol_type = other DNA
atcagcgccggcgagcactacgggatgatttccaaagccctctttcaagcaaaggctaacggcacactggtgtccaatgacgatgtccccaagtcaaccagtcttggc

SEQ ID NO: 50775 - DNA, 30 bp, synthetic construct
  source 1..30: mol_type = other DNA
atcccctttggcaacgactttgtatactct

SEQ ID NO: 50776 - DNA, 30 bp, synthetic construct
  source 1..30: mol_type = other DNA
gagcccatcatgctgtggtactatgggatt

SEQ ID NO: 50777 - DNA, 54 bp, synthetic construct
  source 1..54: mol_type = other DNA
atgggcggatacgtcgagaccctgaacggaatcctcggccttgggaaagtggtg

SEQ ID NO: 50778 - DNA, 96 bp, synthetic construct
  source 1..96: mol_type = other DNA
atggccaacttcttcgggatgatctccggcgagattttcaacgccctgaacgctatctttaacccaatcctctccatggacccaaatccccataac

SEQ ID NO: 50779 - DNA, 123 bp, synthetic construct
  source 1..123: mol_type = other DNA
agcgctatccacaacctggtgctgatcctgcccgagcccgtctactggattactctcaccccattctggcatttcatcggcggcttcatgtacgggggcaaagcaacaattccttttggtatt

SEQ ID NO: 50780 - DNA, 48 bp, synthetic construct
  source 1..48: mol_type = other DNA
aagatcccgcaacccgaaacactttcgctctcgggactttggggactg

SEQ ID NO: 50781 - DNA, 111 bp, synthetic construct
  source 1..111: mol_type = other DNA
atcaatattggggatcactatggacagatcacaaagggcttctttcaagcaaaagcaaatgggaccctgaatgtgaatgagtccatgccgaaactgaatacattcgacctg

SEQ ID NO: 50782 - DNA, 45 bp, synthetic construct
  source 1..45: mol_type = other DNA
ggcatgcccttcggttatgacttcacatttcacgcccttaccatc

SEQ ID NO: 50783 - DNA, 78 bp, synthetic construct
  source 1..78: mol_type = other DNA
ttcttcaacgcttcctttttcaacacctacgtgttccacgcaatatctgaactgggcattcccaatctcaactctccc

SEQ ID NO: 50784 - DNA, 78 bp, synthetic construct
  source 1..78: mol_type = other DNA
ttctttaatagttctctgatggacgcttacatcttccacacgatatccgaactgggcattcctaacgccaattctcct

SEQ ID NO: 50785 - DNA, 78 bp, synthetic construct
  source 1..78: mol_type = other DNA
ttcttcaattcctcaatattcaacacctacgtgttccacacaatctccgagttagggatccccaatgccaactctccc

SEQ ID NO: 50786 - DNA, 81 bp, synthetic construct
  source 1..81: mol_type = other DNA
actttcaacgacactctggtcaatacttacctggaatacactattagcaccttgggcattcccaactccgattcaccttac

SEQ ID NO: 50787 - DNA, 30 bp, synthetic construct
  source 1..30: mol_type = other DNA
gtccagaacgtggcctactatagcccaacc

SEQ ID NO: 50788 - DNA, 48 bp, synthetic construct
  source 1..48: mol_type = other DNA
ctcgccaatggcaagatcacccacaaccagctgagcgtgacatccttc

SEQ ID NO: 50789 - DNA, 81 bp, synthetic construct
  source 1..81: mol_type = other DNA
acctttaacgacaccttagtaaatacataccttgagtatactatctcaacactgggcattccaaatagtgattcaccctac

SEQ ID NO: 50790 - DNA, 90 bp, synthetic construct
  source 1..90: mol_type = other DNA
ttctttcattcacaaccccaactagctgcgacatacgccgccaccccgcctgtcgctgccaacgagatggctaccacactgcttggaccc

SEQ ID NO: 50791 - DNA, 78 bp, synthetic construct
  source 1..78: mol_type = other DNA
ttcttcaatgcctctttcttcaacacatacttcttccacaccattagccagctgggcatccctaacgggaatagtccc

SEQ ID NO: 50792 - DNA, 96 bp, synthetic construct
  source 1..96: mol_type = other DNA
atctacaatggcgacaagctgaacttcatttccaatgcaatttcgtcaaaccccgtgaacaacaatgtctctaccgcctcaagctcgattagtctg

SEQ ID NO: 50793 - DNA, 39 bp, synthetic construct
  source 1..39: mol_type = other DNA
tacgtgttcggcttcgacctgaagtttgcttgctcaaca

SEQ ID NO: 50794 - DNA, 60 bp, synthetic construct
  source 1..60: mol_type = other DNA
ggcagcggggcttattacgactccgtgcacaccatcttcggagtcggagcagaacctgcc

SEQ ID NO: 50795 - DNA, 81 bp, synthetic construct
  source 1..81: mol_type = other DNA
ttcttcaacgcctccttgtttgacgcctacgtctttcacgccatttctgaattaggaattcccgacgcgaattctccactc

SEQ ID NO: 50796 - DNA, 78 bp, synthetic construct
  source 1..78: mol_type = other DNA
tttttcaacgactccatcttcaatacctacgtgttccacacaattagcgagctgggaatccccaacggcaactctccc

SEQ ID NO: 50797 - DNA, 78 bp, synthetic construct
  source 1..78: mol_type = other DNA
ttctttaatgcctctctggccaacacctacatcttccacacaatttccgagctcggcatccccaacgctaactctccc

SEQ ID NO: 50798 - DNA, 78 bp, synthetic construct
  source 1..78: mol_type = other DNA
ttcttcaacgccagcttctttaacacctacatcttccacacaatctccgagctgggcattcccaacggcaatagtcca

SEQ ID NO: 50799 - DNA, 78 bp, synthetic construct
  source 1..78: mol_type = other DNA
tttttcaacgacttcatcggcaacacatacatcctgcacaccattagcgagctcggcatcccccatcctaactctcct

SEQ ID NO: 50800 - DNA, 84 bp, synthetic construct
  source 1..84: mol_type = other DNA
acccacttcaacgctagcctgtacaatacatatgccattcatactatctccgagctgggcatccctaacgtgaactctcctctg

SEQ ID NO: 50801 - DNA, 78 bp, synthetic construct
  source 1..78: mol_type = other DNA
ttcttcaatgccagcttcgctgacacctacatcttcaacacaatctccgccctgggcatccccaactctgatagtccc

SEQ ID NO: 50802 - DNA, 51 bp, synthetic construct
  source 1..51: mol_type = other DNA
acaaagatcatttattacatacaaatcccatacctggggctcactatccct

SEQ ID NO: 50803 - DNA, 78 bp, synthetic construct
  source 1..78: mol_type = other DNA
ttcttcaatgatttcatcggggacacctacgtgctccatgccatctctgagctgggcataccacactcgaattctccc

SEQ ID NO: 50804 - DNA, 78 bp, synthetic construct
  source 1..78: mol_type = other DNA
ctcttcaacgccagcttcgtgaacacctacctgttccacacaatcagcgagctgggcattcctaactccaactctccg

SEQ ID NO: 50805 - DNA, 78 bp, synthetic construct
  source 1..78: mol_type = other DNA
ttcttcaactcgtctatattcgacacctacgtgttccacacaatcagcgagctgggcatccctaacgccaactctcct

SEQ ID NO: 50806 - DNA, 39 bp, synthetic construct
  source 1..39: mol_type = other DNA
atcgtcatccctctgcactggaccccagtgcccatcacc

SEQ ID NO: 50807 - DNA, 51 bp, synthetic construct
  source 1..51: mol_type = other DNA
attccctggttcgccgggatgacgggaggcatcgagatagtacttgaatcc

SEQ ID NO: 50808 - DNA, 36 bp, synthetic construct
  source 1..36: mol_type = other DNA
ctaagtcagactacgggcatccaggtcagcttggtg

SEQ ID NO: 50809 - DNA, 36 bp, synthetic construct
  source 1..36: mol_type = other DNA
ggaatcagcaccggcggcaatgtgaacccatggacc

SEQ ID NO: 50810 - DNA, 33 bp, synthetic construct
  source 1..33: mol_type = other DNA
atggtctttgtaccccctacttggtacatgggg

SEQ ID NO: 50811 - DNA, 78 bp, synthetic construct
  source 1..78: mol_type = other DNA
ttcttcaacgcctccctcttcaatacatacgtgtttcacaccattagcgagctgggcatccccaacgggaactctcct

SEQ ID NO: 50812 - DNA, 66 bp, synthetic construct
  source 1..66: mol_type = other DNA
atggagtacctcttctatctgttcttcgccaacttcatcggaaccgctggcggatttggagcattc

SEQ ID NO: 50813 - DNA, 48 bp, synthetic construct
  source 1..48: mol_type = other DNA
ggcaccggggtgctcagcaataatgtgcacctgtactacttcatgacc

SEQ ID NO: 50814 - DNA, 48 bp, synthetic construct
  source 1..48: mol_type = other DNA
agccagaagatcctgaccttcctgaacattggctcactgaccgccgtt

SEQ ID NO: 50815 - DNA, 60 bp, synthetic construct
  source 1..60: mol_type = other DNA
gacgtcgatttttacaaccacctcatcggcaactacggtttttcacttgttcggggtaat

SEQ ID NO: 50816 - DNA, 45 bp, synthetic construct
  source 1..45: mol_type = other DNA
ctcccgcaaccagcaacggcgtcgttcgctagtatttgggcactg

SEQ ID NO: 50817 - DNA, 51 bp, synthetic construct
  source 1..51: mol_type = other DNA
atctatgccatgctcgagtctgaaatggaccaaaccctgaccaacaatatg

SEQ ID NO: 50818 - DNA, 33 bp, synthetic construct
  source 1..33: mol_type = other DNA
tactacctcggcaacagcctgctggaggaaatc

SEQ ID NO: 50819 - DNA, 60 bp, synthetic construct
  source 1..60: mol_type = other DNA
cccatctcccacgctttcaactttatttcgggaaatcctgccatgatcaccagaacagca

SEQ ID NO: 50820 - DNA, 39 bp, synthetic construct
  source 1..39: mol_type = other DNA
ggcttcattatgatcatgcaaacgcttagctacaacgag

SEQ ID NO: 50821 - DNA, 45 bp, synthetic construct
  source 1..45: mol_type = other DNA
ttccggagctacgccgactttgagatcgacggaggcctggatttc

SEQ ID NO: 50822 - DNA, 96 bp, synthetic construct
  source 1..96: mol_type = other DNA
gctcccgagttcctggtggaccaccctgaggtcgtcaaggacattctcctgctgaaatacgacggttctatcgcctttgatggattgggagcaacg

SEQ ID NO: 50823 - DNA, 42 bp, synthetic construct
  source 1..42: mol_type = other DNA
gcccgggtggacaccctgcggctgaacggcatccaccccgcc

SEQ ID NO: 50824 - DNA, 45 bp, synthetic construct
  source 1..45: mol_type = other DNA
ctttacggagtgatttcctatagccccgacttccaaattactggc

SEQ ID NO: 50825 - DNA, 45 bp, synthetic construct
  source 1..45: mol_type = other DNA
tccttcaaccccatgggcagcgagtctaccttctattctttttat

SEQ ID NO: 50826 - DNA, 123 bp, synthetic construct
  source 1..123: mol_type = other DNA
ggcctgggattcgccacccctgccgggcagggcttcgtgcaaggcggcagtccgtcttctttcgtcgtttgggtgactgacggcatctttgagggccactacactgctattgctgggaatctg

SEQ ID NO: 50827 - DNA, 33 bp, synthetic construct
  source 1..33: mol_type = other DNA
tcttccaccgtgatgggcgacatcattagcacc

SEQ ID NO: 50828 - DNA, 87 bp, synthetic construct
  source 1..87: mol_type = other DNA
atgaccgactttttcggcatggtgcttgacgtcctgaacgccatcttcaaccccatcctggctctcgaccctaacccccaaaataac

SEQ ID NO: 50829 - DNA, 132 bp, synthetic construct
  source 1..132: mol_type = other DNA
gcctccagcatctctcacctggtgctcatcctgccggcccccgcgtattggctgactcttactccattctggcatttcatcgggcccatgctctatggcggcaaggctaccattccttacggcattggtatc

SEQ ID NO: 50830 - DNA, 75 bp, synthetic construct
  source 1..75: mol_type = other DNA
atggccgatatcatcataagcttccttaattacatctttaaccccctgctctccctggacccaacccctaataac

SEQ ID NO: 50831 - DNA, 132 bp, synthetic construct
  source 1..132: mol_type = other DNA
accatcaagaataccgtggtcatcctgcctcctctggtctactattgctcgcttacgcccatttggcacacgatcggtcctctcattcccggttatggcgcagccaatcctcatgctcttccatggagcata

SEQ ID NO: 50832 - DNA, 60 bp, synthetic construct
  source 1..60: mol_type = other DNA
gccctgcccgagctgcagattgccaagtacagcgacttcatcggctttatctctgctctg

SEQ ID NO: 50833 - DNA, 270 bp, synthetic construct
  source 1..270: mol_type = other DNA
ctcaacccggatcagatatacactcgtcccgcccctcaagagcaggtggatgagggcctggctatcgctccatacgaccgaggcggcgaggtgctcaagagtcccgggattatcaacccccaatatcctgagaacgcccgcgagctgggaatgataaccggatatatgagtcccctggcccaatgggtttctagcattagcccctacttcggaacctctatctattcctctcctggcggcctgatcgacgaagtcctttactacactaga

SEQ ID NO: 50834 - DNA, 270 bp, synthetic construct
  source 1..270: mol_type = other DNA
ctgaatccagaccaactgtataccaggccagcgccacaagttcagattgacgacggactgcctatcgccccatacgaccggggaggcgtggtgctcaaagagcccgggattattaaggctcagtttcctgagaactctaaggagctcgggatgatcaccggctacatgagccctctagccgaatgggtcagcagcatctccccatacttcgggacatccatctactcttctcccggcggcctgatcgatgaggtgctgtactatactagg

SEQ ID NO: 50835 - DNA, 84 bp, synthetic construct
  source 1..84: mol_type = other DNA
ctcagagacgcctacatgtccgctatgcgcgccagcatgggaaacgactatgtcaatgtgatcgctcccaccttacaaacctat

SEQ ID NO: 50836 - DNA, 51 bp, synthetic construct
  source 1..51: mol_type = other DNA
tccattttcgacgacagcggcgactactgggggttcggcgacttttggggt

SEQ ID NO: 50837 - DNA, 39 bp, synthetic construct
  source 1..39: mol_type = other DNA
cccggctgggtttacgatacctacatcgaaggatggcac

SEQ ID NO: 50838 - DNA, 69 bp, synthetic construct
  source 1..69: mol_type = other DNA
caatacggtacactggacaacttcttcgacgagatccagcacatgggcgattggttccaacctggggga

SEQ ID NO: 50839 - DNA, 72 bp, synthetic construct
  source 1..72: mol_type = other DNA
gcctccacctctctgagcctgcctgaaattttcgagggaatgggcctcgaggagcttaagatcggaatggac

SEQ ID NO: 50840 - DNA, 84 bp, synthetic construct
  source 1..84: mol_type = other DNA
ctccgggacgtcttcatgagcgcaatgagaacctccatgggaaatgactacgttaatgtcatcgcccctcaactcttaacatac

SEQ ID NO: 50841 - DNA, 45 bp, synthetic construct
  source 1..45: mol_type = other DNA
ctgccgcaacctgctgctcctacccttgctagtctttgggctctg

SEQ ID NO: 50842 - DNA, 30 bp, synthetic construct
  source 1..30: mol_type = other DNA
ctgttccctgccgtcatacccggtgctaat

SEQ ID NO: 50843 - DNA, 93 bp, synthetic construct
  source 1..93: mol_type = other DNA
ggatctagtaactccctcttcgagagcttctacttcgtgatcgtgacactgactaccgtcggctacggagacatcgtccccaagaccttcaac

SEQ ID NO: 50844 - DNA, 45 bp, synthetic construct
  source 1..45: mol_type = other DNA
ctaccacaaaccgcaacggcaagcctggcctcaatctgggctctc

SEQ ID NO: 50845 - DNA, 90 bp, synthetic construct
  source 1..90: mol_type = other DNA
cctaacctgcacgcctaccttaatcccgtggtggagaacctcagcaaacaggtcgaaaccggcaacatcaagctgacattccactccatc

SEQ ID NO: 50846 - DNA, 39 bp, synthetic construct
  source 1..39: mol_type = other DNA
tactttgtcgccgtgaacagcaatgacatgttcaagaca

SEQ ID NO: 50847 - DNA, 84 bp, synthetic construct
  source 1..84: mol_type = other DNA
ttgcgcgatgcctatatggctgccatgcaatcgtctatgggcaatgactacgtgaatgtgatcgctcctcaaactcagttcctc

SEQ ID NO: 50848 - DNA, 270 bp, synthetic construct
  source 1..270: mol_type = other DNA
ctgaatccagaccagctctatacacgccctgcgccccaagttcaagtggatgaagggctcgccatcgctccttatgaccgcggtggcgaagtgctgagcgagcccggcaacatcaagccccagtaccccgacaacagcaaggagctgggcatgatcaccggatacatgagcccccttgccgagtggattagttccatttctccttacttcggcacctccatctactcttcccctggcggactgatcgacgaggtgctgtactacactcgg

SEQ ID NO: 50849 - DNA, 84 bp, synthetic construct
  source 1..84: mol_type = other DNA
ctcagggactactacatttccgccatgaatgcatccatgggggtggaatacgtcaatttcatcacgccgcaattccaatacctg

SEQ ID NO: 50850 - DNA, 75 bp, synthetic construct
  source 1..75: mol_type = other DNA
tttcacgacgtgctcatgaacacatacactgtccacaccatctctgaactgggattcccgggagtgtctcctctg

SEQ ID NO: 50851 - DNA, 270 bp, synthetic construct
  source 1..270: mol_type = other DNA
ctcaaccccgatcaactctacgttcgcccctcgccccaactgcaagctgaggatggagtcaatctggccccatatgacaggggcggcgaggtgctcaaggagcctgtgatcgttaaagctcagtaccctgagaacagcgaggagctcgggatgatcagcgcctacatgtctccattggctcaatggatttcctccatttcaccgtacttcggcacaagtatctattcaagtcccgggggcctgattgacgaagtcctgtactacactcgg

SEQ ID NO: 50852 - DNA, 30 bp, synthetic construct
  source 1..30: mol_type = other DNA
ttcctgcccgtgatcaagaggagctctagg

SEQ ID NO: 50853 - DNA, 33 bp, synthetic construct
  source 1..33: mol_type = other DNA
aagaccctcgaaatcgagttcattgctttgccc

SEQ ID NO: 50854 - DNA, 51 bp, synthetic construct
  source 1..51: mol_type = other DNA
ttcccctcatcctcccctaacgcatctgccttcgcttcgttattgtcgaca

SEQ ID NO: 50855 - DNA, 267 bp, synthetic construct
  source 1..267: mol_type = other DNA
ctgaacagtgatcagctgtacacccggcctgctcctcaagaacagattgacgagggccttgccattgctccctacgaccgcggcggcgtcattctcaaggagcctggcatcatccatgcacaatacccagagaactctaaggagctgggcatgatcaccgcttatatgtctccactggcccaatgggtgtcgagcatcagcccctacttcggaacttccatctactcctctcctggcggcctcatcgacgaggtgctctactatacc

SEQ ID NO: 50856 - DNA, 45 bp, synthetic construct
  source 1..45: mol_type = other DNA
ctgcctcaacccgctaccgcctcccttgctagtctttgggcacta

SEQ ID NO: 50857 - DNA, 84 bp, synthetic construct
  source 1..84: mol_type = other DNA
atgcccgatccctggggcatcatcctgggcgccctgaacaccgtgttcaatcctattctcgccatggacccgaacccagcaaat

SEQ ID NO: 50858 - DNA, 126 bp, synthetic construct
  source 1..126: mol_type = other DNA
agcagcgccatctccgggctcgtcatccacctgccaccttctgtgtattgggtgacacttacccctctgtggcacttcattgggtctatcatctacggcggccaggctactatcccctacggaatt

SEQ ID NO: 50859 - DNA, 84 bp, synthetic construct
  source 1..84: mol_type = other DNA
atggtcgatatttggggcatgatctacgaggcgctaaatagtgtattcaacccaatcctcgccatggaccctaaccctgctaat

SEQ ID NO: 50860 - DNA, 126 bp, synthetic construct
  source 1..126: mol_type = other DNA
acaagcgccatccacgacttagtcattatactgcctaagacagtgtattgggtcaccttaacaccggtctggcacttcattggacagttcctctacggcggcaaggctaccattccctatggtatc

SEQ ID NO: 50861 - DNA, 102 bp, synthetic construct
  source 1..102: mol_type = other DNA
atggaagacaagaaaattggcgatatacagctggacttgcttttcttcatcaacaaccaactacaaaatccgttcctggacatggctgtgccaatcatctac

SEQ ID NO: 50862 - DNA, 90 bp, synthetic construct
  source 1..90: mol_type = other DNA
ttctatccttccacccggccattcatcgcttacgaggccattaggctggtggtccacgacaacgggttctatagcttcccatctggacac

SEQ ID NO: 50863 - DNA, 84 bp, synthetic construct
  source 1..84: mol_type = other DNA
atggtggatatcatgggccctatctacggggtcctgaatgccatcttcaaccccatcctcgccattgacccgaatccggctaac

SEQ ID NO: 50864 - DNA, 123 bp, synthetic construct
  source 1..123: mol_type = other DNA
tccgccatccacaacctggtcatcattctgcccaagacagtgtactgggtcaccctgacccctctctggcacgtgatcgggagcttcgtttatgggggaaaggcgactattccttacgggatt

SEQ ID NO: 50865 - DNA, 30 bp, synthetic construct
  source 1..30: mol_type = other DNA
ctgttccctgccgtgatccctggagctaat

SEQ ID NO: 50866 - DNA, 93 bp, synthetic construct
  source 1..93: mol_type = other DNA
ggaagtagcaactccctcttcgagagcttctacttcgtcatcgtgaccctgactacggttggctacggagatatcgtgcccaagaccttcaat

SEQ ID NO: 50867 - DNA, 36 bp, synthetic construct
  source 1..36: mol_type = other DNA
gggacactgaccggcgattgggaggttctcgctgat

SEQ ID NO: 50868 - DNA, 72 bp, synthetic construct
  source 1..72: mol_type = other DNA
aacggaacctcccttttcgactatattgaggaataccgggcaggagaggctctgatcgccgcattcaaatgt

SEQ ID NO: 50869 - DNA, 84 bp, synthetic construct
  source 1..84: mol_type = other DNA
atggtggatatcatgggcatgctgaacggggctctgaatgccatcttcaatcccatcctcgccatggacccgaatcccgccaat

SEQ ID NO: 50870 - DNA, 126 bp, synthetic construct
  source 1..126: mol_type = other DNA
tcttccgctattcacgacctcgtcattatcctgcctaccaccgtctattgggtgaccctgacacctttgtggcacgccatcggaagcgtgatctacggtggcaaggccacaatcccatacggaatc

SEQ ID NO: 50871 - DNA, 84 bp, synthetic construct
  source 1..84: mol_type = other DNA
atggtcgacttcatggggcctatctacggcgctctgaacgccgtgttcaatcccatcctcgccatggacccaaatcctgcaaac

SEQ ID NO: 50872 - DNA, 126 bp, synthetic construct
  source 1..126: mol_type = other DNA
gcctctgctgtatccaatctagtgataataatgcctccctctgtttattgggtcaccctggtccccatctggcacatgatcgggtccttcctctacggcggacaggctacaattccctatggtatt

SEQ ID NO: 50873 - DNA, 84 bp, synthetic construct
  source 1..84: mol_type = other DNA
atggcagaccccatgggcatggtttatggtgcactgaatagcattttcaacccaatcctcgccatggatcccaaccctgctaac

SEQ ID NO: 50874 - DNA, 126 bp, synthetic construct
  source 1..126: mol_type = other DNA
tctagtgctatctcctctttggtggtgaccctgcctaccactgtctattggattaccctgacaccattctggcacgctctgggtggtatcatctacggtggcaaggccaccatccctttcggaatc

SEQ ID NO: 50875 - DNA, 72 bp, synthetic construct
  source 1..72: mol_type = other DNA
atctttggcgtccgtggtcccattgggaaattcttcatcgactttttcaccgtcaagatttccatcttcgcg

SEQ ID NO: 50876 - DNA, 81 bp, synthetic construct
  source 1..81: mol_type = other DNA
cttcaagacaaacagggcctgagtctatggcaattcatacaaaaatggctacaagaaatttgggggacactcctgattatg

SEQ ID NO: 50877 - DNA, 84 bp, synthetic construct
  source 1..84: mol_type = other DNA
atggtggatatcatgggaatggtctacggcgccctcaacaccgtgttcaaccctatcctggccatggacccaaaccctgctaac

SEQ ID NO: 50878 - DNA, 126 bp, synthetic construct
  source 1..126: mol_type = other DNA
accagcgccatctctggcctggtggtccacctgccggtaactgtatactggatcacccttacacctgtctggcacttcattggctccatcttttacggcggcaaggctactatcccttacggaatt

SEQ ID NO: 50879 - DNA, 84 bp, synthetic construct
  source 1..84: mol_type = other DNA
atggcagatttcatggagatgatatttcaagcactgaatgccgtgttcaaccctatcctcgctatcgaccccaacccaaccaac

SEQ ID NO: 50880 - DNA, 126 bp, synthetic construct
  source 1..126: mol_type = other DNA
cactcctccatatcgtccctggtggtcattcttcctccgtccgtctactgggccaccctgacgccactctggcacgccattggcggagtgatctacggcggcaaggctacaatcccatatggtatc

SEQ ID NO: 50881 - DNA, 51 bp, synthetic construct
  source 1..51: mol_type = other DNA
tattctaactttatgcaatcttatgggatggattctcaaatcatcatcacc

SEQ ID NO: 50882 - DNA, 42 bp, synthetic construct
  source 1..42: mol_type = other DNA
ttcggcagcccagactattggggctatgggggtttttggggc

SEQ ID NO: 50883 - DNA, 39 bp, synthetic construct
  source 1..39: mol_type = other DNA
cccggctgggtctacgccacctatatcgaaggatggcac

SEQ ID NO: 50884 - DNA, 84 bp, synthetic construct
  source 1..84: mol_type = other DNA
atggccgatcccatggggatggtttatggcgcactgaacgctattttcaacccaatcctatcaattgaccccaacccaaccaac

SEQ ID NO: 50885 - DNA, 123 bp, synthetic construct
  source 1..123: mol_type = other DNA
tccgtcatctctggccttgtggtcatcctgcctcctagcgtgtactgggtgaccctgacacccttctggcacttcatcggccactttctctacggtggaaacgccactattccctacgggatt

SEQ ID NO: 50886 - DNA, 84 bp, synthetic construct
  source 1..84: mol_type = other DNA
atgcctgacccttggggcatcattctgggcgctctaaactccgtgttcaatcccatcctggccctcgatcccaacccaaccaac

SEQ ID NO: 50887 - DNA, 126 bp, synthetic construct
  source 1..126: mol_type = other DNA
tctagtgtcatttccgggctggtcatccacctgcctccaagcgtgtattgggtgacactcactccgttttggcacttcatcggcggcttcctatatggaggcaaggccaccattccttacgggatt

SEQ ID NO: 50888 - DNA, 42 bp, synthetic construct
  source 1..42: mol_type = other DNA
ggtatcgcctccgcttctggctctgaattgtccaactacgcc

SEQ ID NO: 50889 - DNA, 72 bp, synthetic construct
  source 1..72: mol_type = other DNA
atgattaatgttgatctcttctacttcatcaaccacaccctgcaaaaccccctgttcgatgtgatcatgcct

SEQ ID NO: 50890 - DNA, 93 bp, synthetic construct
  source 1..93: mol_type = other DNA
acatttactcaaccccggccttacctgctcgtggacggggtccgggtgctggttatggagggcgacccaaacgcttttcctagcggacatact

SEQ ID NO: 50891 - DNA, 36 bp, synthetic construct
  source 1..36: mol_type = other DNA
atgaacctcctgacacttctgaccctgatcgacgac

SEQ ID NO: 50892 - DNA, 30 bp, synthetic construct
  source 1..30: mol_type = other DNA
attggctaccccttctacaaccctagcatc

SEQ ID NO: 50893 - DNA, 39 bp, synthetic construct
  source 1..39: mol_type = other DNA
cacttcattacaatcatgggcaccctgactgacgatgag

SEQ ID NO: 50894 - DNA, 99 bp, synthetic construct
  source 1..99: mol_type = other DNA
aatgtctacggcaatgcaatgattgtggcccaggagatctacttgcaagctacctatagctacatgggctcctctagtgccatcgccttcgatgctcag

SEQ ID NO: 50895 - DNA, 123 bp, synthetic construct
  source 1..123: mol_type = other DNA
aatatttacggcaatgttatggtggtggcccaagctatcgtgctgcaagccacgcaagtttacatgggaacatccactgccttcatgagcgacgctatcgcacaagcactcgccaatcttgcc

SEQ ID NO: 50896 - DNA, 45 bp, synthetic construct
  source 1..45: mol_type = other DNA
ctgcaccaaccagccaccgcctctattcaaagtatactgacactg

SEQ ID NO: 50897 - DNA, 81 bp, synthetic construct
  source 1..81: mol_type = other DNA
atggcctttactgaccctatcttccaagcattaaacgttgttttcgacccaatcctctccatggatcccaatccggctaac

SEQ ID NO: 50898 - DNA, 126 bp, synthetic construct
  source 1..126: mol_type = other DNA
tctagcgccatccacaacctggtggtcatcctgccaaccaccgtgtactgggtgaccctgacaccactgtggcacgccatcggctccgtcatttacggggggaaggctaccatcccttatggaatt

SEQ ID NO: 50899 - DNA, 57 bp, synthetic construct
  source 1..57: mol_type = other DNA
tacggtgacttaagtgccctgaccggcggtatcattgatctgcacgtttacggttca

SEQ ID NO: 50900 - DNA, 45 bp, synthetic construct
  source 1..45: mol_type = other DNA
ctgccgcaaccagcaaccgccagcatccagtccattcttgcactg

SEQ ID NO: 50901 - DNA, 36 bp, synthetic construct
  source 1..36: mol_type = other DNA
atgaagaataacgtgatcctgatgagcttcaacctg

SEQ ID NO: 50902 - DNA, 63 bp, synthetic construct
  source 1..63: mol_type = other DNA
ttctacggcgacctgagcgtgctcaccgggggaatcatcgacttgcccgtctatgggtctatt

SEQ ID NO: 50903 - DNA, 63 bp, synthetic construct
  source 1..63: mol_type = other DNA
tactacggtgacctgtccgtcctgactggcggcgttattgacctccctgtatatgggagcatc

SEQ ID NO: 50904 - DNA, 45 bp, synthetic construct
  source 1..45: mol_type = other DNA
atcccactggccagctctggctcctgggaggctctctacgaactg

SEQ ID NO: 50905 - DNA, 45 bp, synthetic construct
  source 1..45: mol_type = other DNA
ctgccgcaacccgctgcggcctctatcccaagcattctcgctctc

SEQ ID NO: 50906 - DNA, 45 bp, synthetic construct
  source 1..45: mol_type = other DNA
ttgcctcaacctgcgaccgcctccatcccaagcattcttgctctg

SEQ ID NO: 50907 - DNA, 42 bp, synthetic construct
  source 1..42: mol_type = other DNA
atggtgactcccattgacatcatgagtctgccactcaacatc

SEQ ID NO: 50908 - DNA, 57 bp, synthetic construct
  source 1..57: mol_type = other DNA
ttcggcgacctgagcgccctgaccggtggagtgatcgatctccacgtctacggaagc

SEQ ID NO: 50909 - DNA, 78 bp, synthetic construct
  source 1..78: mol_type = other DNA
atgtcggtgtcagaactcgacattctgatctggatccgggataacatgagctctgctgcaatggacgctgcatccgag

SEQ ID NO: 50910 - DNA, 87 bp, synthetic construct
  source 1..87: mol_type = other DNA
gtcaccgcaagagatcgcccgtttgaggactactccgtggatctgatcattagccgcccgagcgattttagttttccttctggtcac

SEQ ID NO: 50911 - DNA, 42 bp, synthetic construct
  source 1..42: mol_type = other DNA
gaggatcacatcttcgttaaccgcgggtttctttacggcccc

SEQ ID NO: 50912 - DNA, 75 bp, synthetic construct
  source 1..75: mol_type = other DNA
gacctgacaaaatgtgactggaagaccctctggtactatggcgacgagttcatgaacttccaaggtcgaattgcc

SEQ ID NO: 50913 - DNA, 87 bp, synthetic construct
  source 1..87: mol_type = other DNA
atcaacagtgctccctctctgggcggatacatggctaccgggctgggacagaacggatttggggctgccagttctgttggcctcaac

SEQ ID NO: 50914 - DNA, 45 bp, synthetic construct
  source 1..45: mol_type = other DNA
ctgaagatccccaaaatcattacactagatagtctgcttagtcag

SEQ ID NO: 50915 - DNA, 45 bp, synthetic construct
  source 1..45: mol_type = other DNA
atcagccagcctgccgagcccactctgtccgctatttgggatctc

SEQ ID NO: 50916 - DNA, 45 bp, synthetic construct
  source 1..45: mol_type = other DNA
atcgctcaacctgtaaaccctaccctgagcgctatttgggatctc

SEQ ID NO: 50917 - DNA, 114 bp, synthetic construct
  source 1..114: mol_type = other DNA
atgagtaacatctttaactctatgttcgaaacagttttctatttcccctgggaggtctccctgatcatatttctccaatctactctgcctagctttgtgctgggcttttttgag

SEQ ID NO: 50918 - DNA, 123 bp, synthetic construct
  source 1..123: mol_type = other DNA
gttactgtggcccgtttacggccatacgcggccgtagatacaattaaatgcatccgcgctgatgtggccgaccagaaccccctggactttaagatccagggctatagcttcccttctggtcac

SEQ ID NO: 50919 - DNA, 45 bp, synthetic construct
  source 1..45: mol_type = other DNA
atccctctgcccgcaagcggtagttgggacgctttatatgctctg

SEQ ID NO: 50920 - DNA, 75 bp, synthetic construct
  source 1..75: mol_type = other DNA
tacttcgagagcgggaccatcgacaacgccttctccctgtctgggggaatgaaagatatgctctctcctggcgga

SEQ ID NO: 50921 - DNA, 66 bp, synthetic construct
  source 1..66: mol_type = other DNA
gcggcggacagtctgaccatcccttctgtggctgagggtacaggcctggagtctattgaagttggg

SEQ ID NO: 50922 - DNA, 42 bp, synthetic construct
  source 1..42: mol_type = other DNA
ttcggcagcgatgactactggggatttggaggcttctatggg

SEQ ID NO: 50923 - DNA, 39 bp, synthetic construct
  source 1..39: mol_type = other DNA
ccaggctgggtctacgccaacttcgtggaaggatggcac

SEQ ID NO: 50924 - DNA, 45 bp, synthetic construct
  source 1..45: mol_type = other DNA
atcccactgcctgcaagcggcggatgggaggctctctacgaactg

SEQ ID NO: 50925 - DNA, 66 bp, synthetic construct
  source 1..66: mol_type = other DNA
ttcggagttagaggacccatcgggtcctttttcatcgacttctttgcctacaagattgctttctcc

SEQ ID NO: 50926 - DNA, 81 bp, synthetic construct
  source 1..81: mol_type = other DNA
ctcgccggtaacattgcggggcagacaagaacactgcctatggccgtttattccgaggttgctgctggcaatatgggtgat

SEQ ID NO: 50927 - DNA, 39 bp, synthetic construct
  source 1..39: mol_type = other DNA
atctatgtgtacctcatcgagaacgtcatctacctgatc

SEQ ID NO: 50928 - DNA, 45 bp, synthetic construct
  source 1..45: mol_type = other DNA
atccctctggctagcaacggttcctgggaggccctcttcgaattg

SEQ ID NO: 50929 - DNA, 123 bp, synthetic construct
  source 1..123: mol_type = other DNA
gcagggtccttcaccgacatgatggtcgaggccctacaacaaacagacatgggcggtggcaagaccggctgggatgtgttcgtcgaaaacggcctgagcgctgccgatctccaagccagtttc

SEQ ID NO: 50930 - DNA, 45 bp, synthetic construct
  source 1..45: mol_type = other DNA
atcagccagcccgtggagcctaccctggctgccatttggaacctg

SEQ ID NO: 50931 - DNA, 45 bp, synthetic construct
  source 1..45: mol_type = other DNA
atagcacaacctgctgaacctaccctgagcgccattctggatctc

SEQ ID NO: 50932 - DNA, 42 bp, synthetic construct
  source 1..42: mol_type = other DNA
atccccatcccggcacaccctgacttcgcaagtctatgggag

SEQ ID NO: 50933 - DNA, 78 bp, synthetic construct
  source 1..78: mol_type = other DNA
ttctttcgggactctctggccaacacatacatcttccacaccattagcgagctgggcatccctaacatgaattctccc

SEQ ID NO: 50934 - DNA, 45 bp, synthetic construct
  source 1..45: mol_type = other DNA
atccccctggcctcattaggatcatgggagtccttatacgaactg

SEQ ID NO: 50935 - DNA, 45 bp, synthetic construct
  source 1..45: mol_type = other DNA
atccctctggctagctccggctcttgggaggcactcttcgccctg

SEQ ID NO: 50936 - DNA, 75 bp, synthetic construct
  source 1..75: mol_type = other DNA
tactttgagagcggcaccttcgacgatgccttctccctgtccggcgatatgaaggacatgctgagtccaggagga

SEQ ID NO: 50937 - DNA, 66 bp, synthetic construct
  source 1..66: mol_type = other DNA
gccgcagactccctgacaattcctagcgtcgctgagggcaccgggctggaatctatcgaagttggg

SEQ ID NO: 50938 - DNA, 93 bp, synthetic construct
  source 1..93: mol_type = other DNA
agctccatcacattctcctggggtaccgacgccgccctgtactttgtgaacaacgttggcggatcaagcaacctgagtaatgcatcattcctg

SEQ ID NO: 50939 - DNA, 69 bp, synthetic construct
  source 1..69: mol_type = other DNA
acactgcccggcgccgacattgggatcaacaccctgctgaaccctacctggagcaagctctacgatgtc

SEQ ID NO: 50940 - DNA, 45 bp, synthetic construct
  source 1..45: mol_type = other DNA
atctgggacagcggccatattcaacctgaactgcagtggtgcaac

SEQ ID NO: 50941 - DNA, 42 bp, synthetic construct
  source 1..42: mol_type = other DNA
atcccactcgcctcaaacggcagctgggaggccctgttcgag

SEQ ID NO: 50942 - DNA, 54 bp, synthetic construct
  source 1..54: mol_type = other DNA
gtctatagcgggttcatgcaaggttatggaatggagtccgaaatcgtgatcacc

SEQ ID NO: 50943 - DNA, 48 bp, synthetic construct
  source 1..48: mol_type = other DNA
atccccatggccagcaacggcacctggactgcgcaatggataattttg

SEQ ID NO: 50944 - DNA, 147 bp, synthetic construct
  source 1..147: mol_type = other DNA
ctgggcagaaccggtaaccaggagctgcacatttctctcgtgcccttctggagctactgggtcatgctccgcggcgtgttccacgctctgcgccaatgtgactggcaaggcgtgatcagagaggtgtctgggatcggataccctgct

SEQ ID NO: 50945 - DNA, 60 bp, synthetic construct
  source 1..60: mol_type = other DNA
acacccactttaatacaactaagttatggcatcatccctctcattacctacaacggtctg

SEQ ID NO: 50946 - DNA, 66 bp, synthetic construct
  source 1..66: mol_type = other DNA
gccccaggcatcattagcgagatcggaccctacatcattacccctatagttactggcgtcaacaat

SEQ ID NO: 50947 - DNA, 90 bp, synthetic construct
  source 1..90: mol_type = other DNA
atgagctccaacatcaatgtcgatctgttctacttctttaaccacaacttccaaaacccgatcttcgacgccgtgatgcctattgttacc

SEQ ID NO: 50948 - DNA, 87 bp, synthetic construct
  source 1..87: mol_type = other DNA
gtccaggagccccggcctttcgtgaccctggacaatgtccgattacttatcaccgaaggcgacccactgtcctttccatctggtcac

SEQ ID NO: 50949 - DNA, 48 bp, synthetic construct
  source 1..48: mol_type = other DNA
gtgggctatttcggcggctcactgccactgatcgactacggaggtgca

SEQ ID NO: 50950 - DNA, 45 bp, synthetic construct
  source 1..45: mol_type = other DNA
atccccatggcctccaacggcagctgggaggctctgttcgaagtg

SEQ ID NO: 50951 - DNA, 63 bp, synthetic construct
  source 1..63: mol_type = other DNA
cccctgattctcgccgagataggccagtacatcataacacctatcatcaccgacgtaaactcc

SEQ ID NO: 50952 - DNA, 69 bp, synthetic construct
  source 1..69: mol_type = other DNA
atgatcaatatcgacctgttctacttcattaacgataccctcaagaaccccctgttcgacttcctgatg

SEQ ID NO: 50953 - DNA, 90 bp, synthetic construct
  source 1..90: mol_type = other DNA
atccttgagccacggccttttgtgaccctgtccaacgtccacctcctgattagcgagaacgaccccgcctcctttccctctggtcatact

SEQ ID NO: 50954 - DNA, 63 bp, synthetic construct
  source 1..63: mol_type = other DNA
gggcccgacctgctggccgcttacggcgagttcataaccacacctatcgctgtcggcgtactg

SEQ ID NO: 50955 - DNA, 63 bp, synthetic construct
  source 1..63: mol_type = other DNA
cctaccctgctggccatgtttggaaatctcatcatcacacccatccctgttggagttccaaat

SEQ ID NO: 50956 - DNA, 63 bp, synthetic construct
  source 1..63: mol_type = other DNA
agcattatgcggctcaaccacgagatgttttcatctttccttatcctcacaccaacctaccag

SEQ ID NO: 50957 - DNA, 54 bp, synthetic construct
  source 1..54: mol_type = other DNA
ctgtccgtagttgggagttacctgatcacacccatgattaccgacatccatagc

SEQ ID NO: 50958 - DNA, 57 bp, synthetic construct
  source 1..57: mol_type = other DNA
gaccctctgatggggatcgtgcatagcattaatcactctaccggcctgaacatctca

SEQ ID NO: 50959 - DNA, 30 bp, synthetic construct
  source 1..30: mol_type = other DNA
acaggagccgtggctggtggagttcctatc

SEQ ID NO: 50960 - DNA, 117 bp, synthetic construct
  source 1..117: mol_type = other DNA
tccaccgggattatggtgcccgaggccttcgccaagggcgctatcactgtcgccaacaccaaggctctgggcggagctacatttatggctgccgggaagagcacagcatctcttact

SEQ ID NO: 50961 - DNA, 42 bp, synthetic construct
  source 1..42: mol_type = other DNA
atggacctggccaccacaatcatgtctctgcccactaatatt

SEQ ID NO: 50962 - DNA, 60 bp, synthetic construct
  source 1..60: mol_type = other DNA
cccagcattatcaacgagttcggtcaattcatcaccactccaatcatcacaaatatccca

SEQ ID NO: 50963 - DNA, 63 bp, synthetic construct
  source 1..63: mol_type = other DNA
cccatgatcctgcctgagatcggccagtacctgatcaccccaattgtgactgacgtaaacaac

SEQ ID NO: 50964 - DNA, 90 bp, synthetic construct
  source 1..90: mol_type = other DNA
atgagcgacatcaacctggacctcttctacttctttaacacctccattaagaatcccatcttcgatttcatcatgcctcggatcacagac

SEQ ID NO: 50965 - DNA, 87 bp, synthetic construct
  source 1..87: mol_type = other DNA
atcaacgagccccggcctttcatcaccctggacaacgtgaatctgctcatcgacattgaaggcagctactctttcccatctggacac

SEQ ID NO: 50966 - DNA, 144 bp, synthetic construct
  source 1..144: mol_type = other DNA
gtcctgagcgacctgccttccgtgacccctaccgcttctaacctcaacaagctctacgtactaaataagagtagcaccgattccgacttctggtaccaaagctgggtggccgtgaacgacggtggctataaatgggtcagagat

SEQ ID NO: 50967 - DNA, 63 bp, synthetic construct
  source 1..63: mol_type = other DNA
gcccctgacatactgagcgaggtcggccaatacattatcactcccatgatcaccaacgtgaca

SEQ ID NO: 50968 - DNA, 63 bp, synthetic construct
  source 1..63: mol_type = other DNA
ccctggattctgcccgaggtcaacccattcctcatcacacctatcataaccgacgtgaacagc

SEQ ID NO: 50969 - DNA, 84 bp, synthetic construct
  source 1..84: mol_type = other DNA
atgaatattaacgaggccctcttcatctacatcaaccagtttatgcaaaaccaaaccctggacgtgatcatgcccacggttacc

SEQ ID NO: 50970 - DNA, 93 bp, synthetic construct
  source 1..93: mol_type = other DNA
ttggtacacgaacctcgcccttttatggcacttgagaatgtccggttgctggtgccggaggatgaccctaactcatttccatctggacatgcc

SEQ ID NO: 50971 - DNA, 66 bp, synthetic construct
  source 1..66: mol_type = other DNA
gggcctgagttgatgcaaacgttcggccaatatataatcacacccattgccactgacctgcattcc

SEQ ID NO: 50972 - DNA, 45 bp, synthetic construct
  source 1..45: mol_type = other DNA
atccccatggccgctgacggctcttggcaagcgctcttcgagatc

SEQ ID NO: 50973 - DNA, 45 bp, synthetic construct
  source 1..45: mol_type = other DNA
atttcgcaaccggcagagccaacgctgtctgcgatatgggctctg

SEQ ID NO: 50974 - DNA, 60 bp, synthetic construct
  source 1..60: mol_type = other DNA
ctggatatcataagcgctttcggcccttacatcgtgaccccaatccccatgggagtcatt

SEQ ID NO: 50975 - DNA, 63 bp, synthetic construct
  source 1..63: mol_type = other DNA
cctatgatcctgccctacatcggcaacagcatcatcgtgccaaccgtcacatccgtgactaac

SEQ ID NO: 50976 - DNA, 66 bp, synthetic construct
  source 1..66: mol_type = other DNA
gggcctgaaattatggcccagttcggagagtacatcaccactcccatcgctgtcggcgtgacaaac

SEQ ID NO: 50977 - DNA, 63 bp, synthetic construct
  source 1..63: mol_type = other DNA
cctatgatactgccctacatcggcaatagcctcatcgtcccaaccgtgacatccatccctaac

SEQ ID NO: 50978 - DNA, 66 bp, synthetic construct
  source 1..66: mol_type = other DNA
gggcccgatctacttagtctgttcggcgagtacatcctgaccccaatccccgttggggtcatcaac

SEQ ID NO: 50979 - DNA, 39 bp, synthetic construct
  source 1..39: mol_type = other DNA
ctgaacggcatcgaggaagagttcggagcagggaagctg

SEQ ID NO: 50980 - DNA, 42 bp, synthetic construct
  source 1..42: mol_type = other DNA
atcccgctggcctccaacgggacttggcaagccttgcttgac

SEQ ID NO: 50981 - DNA, 51 bp, synthetic construct
  source 1..51: mol_type = other DNA
cttccctatatcggctctacattggcccctgttgtgactagcacctacaac

SEQ ID NO: 50982 - DNA, 39 bp, synthetic construct
  source 1..39: mol_type = other DNA
atttgccgcatccacaaccggttcttgctcttatctatc

SEQ ID NO: 50983 - DNA, 60 bp, synthetic construct
  source 1..60: mol_type = other DNA
gagatgttcggcatcgtatcgcccgggactgtcgacaccgaggccatgacatccatgacc

SEQ ID NO: 50984 - DNA, 96 bp, synthetic construct
  source 1..96: mol_type = other DNA
tacggacccagttacaacgggttcgacgacttctacttcgtgatcgttaccttgacaacggtcggctacggagatgtgacccctatcacctataac

SEQ ID NO: 50985 - DNA, 45 bp, synthetic construct
  source 1..45: mol_type = other DNA
attccactcgctgcctccggtagctgggaggccctgttcgaaatc

SEQ ID NO: 50986 - DNA, 42 bp, synthetic construct
  source 1..42: mol_type = other DNA
atccccatggccagcaacggctcctgggaggcactgtttgaa

SEQ ID NO: 50987 - DNA, 30 bp, synthetic construct
  source 1..30: mol_type = other DNA
gccggcatggtagccgccggcctacctatc

SEQ ID NO: 50988 - DNA, 78 bp, synthetic construct
  source 1..78: mol_type = other DNA
ggaggaatcatcacatccgaccccgcaattcaggctggcgccatcaaggtcgccactggcaaggttggaatgagcttt

SEQ ID NO: 50989 - DNA, 72 bp, synthetic construct
  source 1..72: mol_type = other DNA
atgatcaacgtcgatctgttctactttatcaaccacaacctccaaaatcctgtgtttgacgttattatgccc

SEQ ID NO: 50990 - DNA, 93 bp, synthetic construct
  source 1..93: mol_type = other DNA
acatttacacaaccccggccctatctgcttgtggacggcgttagggtcctcgtggccgaggctgatcctaacgcattcccttctggacatacc

SEQ ID NO: 50991 - DNA, 36 bp, synthetic construct
  source 1..36: mol_type = other DNA
atgaccttcgtgcctccaagctggtggatgttgggc

SEQ ID NO: 50992 - DNA, 96 bp, synthetic construct
  source 1..96: mol_type = other DNA
ggaaccagctactctctgttcgatgacttctacttcgtcatcgtgacactgaccactgtcggatacgggcagagtcagctgccattccatcactct

SEQ ID NO: 50993 - DNA, 84 bp, synthetic construct
  source 1..84: mol_type = other DNA
accgatgtagtccgcataccccaagacgctctgcggaccatggagatgactgctaacgacacaatgatcattgggggcgaagaa

SEQ ID NO: 50994 - DNA, 111 bp, synthetic construct
  source 1..111: mol_type = other DNA
ttcatgcgcgatattcctacaagctttatctctgctaaccagatgcccagccttgaacatattttcggcacggactggatgggccgcgacatgttccaacgaaccatcgct

SEQ ID NO: 50995 - DNA, 129 bp, synthetic construct
  source 1..129: mol_type = other DNA
atggacatctacaatcacaacgctagcgtgtcaatcatctccattggcgatagccccaacgtcatcgaccacttccccatggctgcatggaagcagaaggccatcaccgccgccattttaacgggtata

SEQ ID NO: 50996 - DNA, 72 bp, synthetic construct
  source 1..72: mol_type = other DNA
gacgccatcatctactccacggacaatcaggattacagccagtttatgaaccgagttcgggatggagttgtg

SEQ ID NO: 50997 - DNA, 99 bp, synthetic construct
  source 1..99: mol_type = other DNA
cacaacgtgattaactacaaaccctctgagttcaaatccaacgaatttgaccctaccaacatcaagcccggcgagtacaacccatccgacttcctgaat

SEQ ID NO: 50998 - DNA, 45 bp, synthetic construct
  source 1..45: mol_type = other DNA
attcctctcgctagcaccggctcgtggcaagcgctccttgacatc

SEQ ID NO: 50999 - DNA, 87 bp, synthetic construct
  source 1..87: mol_type = other DNA
atggacatcaacgaggccctgttcatttacatcaatcagcatctccaaaatcctacactggatatgatcatgagcggcattaccgat

SEQ ID NO: 51000 - DNA, 96 bp, synthetic construct
  source 1..96: mol_type = other DNA
aactacgtccacgagccccggccattcatggccctcaagaacgtgcacctgattatcgccgagaacgaccccaattcctttcctagcggacatgcg

SEQ ID NO: 51001 - DNA, 60 bp, synthetic construct
  source 1..60: mol_type = other DNA
gccaaccccggcttctacgaagcactggccgctatcgccgctgtgaaattcgagaagacc

SEQ ID NO: 51002 - DNA, 72 bp, synthetic construct
  source 1..72: mol_type = other DNA
atgattaacgaagacctgttctacttcatcaaccacaatctccaaaattctgtgttcgatgtgatcatgccc

SEQ ID NO: 51003 - DNA, 90 bp, synthetic construct
  source 1..90: mol_type = other DNA
tttactcaaccgcgaccatttatcctgctgaataatgttcgtgttcttgtcactgagctcgaccccaattccttcccttccggacacaca

SEQ ID NO: 51004 - DNA, 30 bp, synthetic construct
  source 1..30: mol_type = other DNA
aagctgtacaaccagaccggcatcacactg

SEQ ID NO: 51005 - DNA, 72 bp, synthetic construct
  source 1..72: mol_type = other DNA
atgtccattaacgagatttttttctactatattaacaataacctgcaaaacccaatattcgacgccatcctc

SEQ ID NO: 51006 - DNA, 90 bp, synthetic construct
  source 1..90: mol_type = other DNA
gtgcaggagccaaggccctacatggtgctggataacgtccggctgctcatcttcgaggacgacgttttcgcctttcctagcggacatgcc

SEQ ID NO: 51007 - DNA, 42 bp, synthetic construct
  source 1..42: mol_type = other DNA
atccctctggctagcaacggcagctggcaagcgttgctcgac

SEQ ID NO: 51008 - DNA, 45 bp, synthetic construct
  source 1..45: mol_type = other DNA
atcccgttagcttcgacgggctcttggcaagcactccttgacatt

SEQ ID NO: 51009 - DNA, 69 bp, synthetic construct
  source 1..69: mol_type = other DNA
tacggactgggggactatttcttcaacattagcgcgatacaaataacgatggtgtccggctacatccct

SEQ ID NO: 51010 - DNA, 42 bp, synthetic construct
  source 1..42: mol_type = other DNA
atccccctggctagcaacggcagctggcaggcattactcgac

SEQ ID NO: 51011 - DNA, 30 bp, synthetic construct
  source 1..30: mol_type = other DNA
cagtcgtttcattcgctaatctctgactac

SEQ ID NO: 51012 - DNA, 60 bp, synthetic construct
  source 1..60: mol_type = other DNA
attgctacatactacttcaatctaagcgctagtcagatcaccctgatctccggcaacatc

SEQ ID NO: 51013 - DNA, 63 bp, synthetic construct
  source 1..63: mol_type = other DNA
ccatccatcctgtctgccattggtccttacataattacgcccatcatcaccgacgtgcattct

SEQ ID NO: 51014 - DNA, 57 bp, synthetic construct
  source 1..57: mol_type = other DNA
atcctgcccgagattggccagtacattatcacccctattgtaactgacattccaaac

SEQ ID NO: 51015 - DNA, 51 bp, synthetic construct
  source 1..51: mol_type = other DNA
gtgaagggattcaactactccttgaaccccgtctatgatttcgtctttggc

SEQ ID NO: 51016 - DNA, 69 bp, synthetic construct
  source 1..69: mol_type = other DNA
ctcggaaccctgctgggccgatgggatgtgttccccattagcggtggccttttcctgttttgcgttgat

SEQ ID NO: 51017 - DNA, 63 bp, synthetic construct
  source 1..63: mol_type = other DNA
cctagcattctctccgccatcggcccctacattataacaccaatcatcaccgacgtgaacagc

SEQ ID NO: 51018 - DNA, 45 bp, synthetic construct
  source 1..45: mol_type = other DNA
atccctttggcttctacgggctcctgggaggctctgttcgaactc

SEQ ID NO: 51019 - DNA, 126 bp, synthetic construct
  source 1..126: mol_type = other DNA
ctcgaggccgggtccctcctggacatggtcaaggaggaactgatgaaccaggaatacgaaggccagacaatgtgggagtacatcctgagccagggagtcaccgagcaggacctgaaggatagcttc

SEQ ID NO: 51020 - DNA, 63 bp, synthetic construct
  source 1..63: mol_type = other DNA
ccatacatcattagcaatttcggcgaatttattaccacacccattatcactaatgtgcctgag

SEQ ID NO: 51021 - DNA, 87 bp, synthetic construct
  source 1..87: mol_type = other DNA
atgagcaacatccagattgacctgctgtacttcatcaacaacggtttgcaaaatcccatcctcgacaagatcgtgcccatcatctat

SEQ ID NO: 51022 - DNA, 90 bp, synthetic construct
  source 1..90: mol_type = other DNA
ttctatccctctccacggccctttatcgccctggagggcattcggctcaccgtgcatgacaacgggttctactccttcccttctggacac

SEQ ID NO: 51023 - DNA, 126 bp, synthetic construct
  source 1..126: mol_type = other DNA
ggcaccggaggcatctaccctatccaactgatggggccacttcttcaagcgattagcccctacatgcctatgacacacgggattaccctccttcgcgagtctgctctcggcctgatctggtccaac

SEQ ID NO: 51024 - DNA, 225 bp, synthetic construct
  source 1..225: mol_type = other DNA
gtaggctttggcgaatccgacctgcccaatgacggcgaggtccagtacatgaatgtgactaacaatattaccgcttacgagaacagctcctacgacctacaagacgaaaacggaacccaaatctcctactatgatttcgacgaaaacgtgacagaaggccagaacatcaccgccttcaacgtttcctcgagtgccaacatttactggttcctgcggatcagtctg

SEQ ID NO: 51025 - DNA, 66 bp, synthetic construct
  source 1..66: mol_type = other DNA
gggcctgccatcatggctgagattggccagtacatcatgacacccataatcaccgacatccatagt

SEQ ID NO: 51026 - DNA, 90 bp, synthetic construct
  source 1..90: mol_type = other DNA
attgggaacgacgatgaggactccaaggacagcaccgatttcgccggcaaggagctcgaggtggctgacaatctggacaacggaatcgtc

SEQ ID NO: 51027 - DNA, 60 bp, synthetic construct
  source 1..60: mol_type = other DNA
gccggccggatcgtgctggatggagctccagcggcagtaacagatgctgaccttgctcga

SEQ ID NO: 51028 - DNA, 30 bp, synthetic construct
  source 1..30: mol_type = other DNA
tacggcggtgctgaatcaggagctgcacct

SEQ ID NO: 51029 - DNA, 48 bp, synthetic construct
  source 1..48: mol_type = other DNA
aatgccgggacagaccgtttagtcgatcacgtagtgtctggggaaaac

SEQ ID NO: 51030 - DNA, 63 bp, synthetic construct
  source 1..63: mol_type = other DNA
cccttcatcctgcctgagatcggtagctacctcatcaccccaatagtaacggatgtttccaac

SEQ ID NO: 51031 - DNA, 87 bp, synthetic construct
  source 1..87: mol_type = other DNA
ctggagtgttggcaaaaactgctcgacttcgaatattgttcctttctgtactgcttctaccacttcctcctgaacttcgtccaagtg

SEQ ID NO: 51032 - DNA, 48 bp, synthetic construct
  source 1..48: mol_type = other DNA
agtagccggtccgacaagatcgtcgataacgtgatttctggagaaagc

SEQ ID NO: 51033 - DNA, 39 bp, synthetic construct
  source 1..39: mol_type = other DNA
gggaccctcactggcgactttgctgtgctggctgaaaca

SEQ ID NO: 51034 - DNA, 60 bp, synthetic construct
  source 1..60: mol_type = other DNA
ggaggcaagaccgtatatgattatatccaagagtacaccaaggtcatcgccatgctgatc

SEQ ID NO: 51035 - DNA, 42 bp, synthetic construct
  source 1..42: mol_type = other DNA
gtggatctgggccacaccgtttctgttgtggctactcttgac

SEQ ID NO: 51036 - DNA, 54 bp, synthetic construct
  source 1..54: mol_type = other DNA
tactatagcaacacccggaacctgaccatgaattactgcctgaagacaactccc

SEQ ID NO: 51037 - DNA, 39 bp, synthetic construct
  source 1..39: mol_type = other DNA
actctcaccggggacttggctgtgctgctcgagggcacg

SEQ ID NO: 51038 - DNA, 60 bp, synthetic construct
  source 1..60: mol_type = other DNA
ggcggaaagaccgtctacgactatatacaagagtataccaaagtgatcgccatgctgatc

SEQ ID NO: 51039 - DNA, 75 bp, synthetic construct
  source 1..75: mol_type = other DNA
atgatgaactccatttacggcatcctcgatatgattttcgccccgttcatttcattagaccccaaccctaataat

SEQ ID NO: 51040 - DNA, 120 bp, synthetic construct
  source 1..120: mol_type = other DNA
caggagcctcatatcgctcaaaccgtcgtgatgcttcctaagatcgcctattactgcctcctggtccccctgtggcacatgttgtaccaacccttaccaagcacccccaccggtgctatt

SEQ ID NO: 51041 - DNA, 60 bp, synthetic construct
  source 1..60: mol_type = other DNA
cctttcatcctgccgagcataggcccctacctcatcaccccaattgtgaccgacgttagt

SEQ ID NO: 51042 - DNA, 90 bp, synthetic construct
  source 1..90: mol_type = other DNA
atgttcggcaacgtcaatgtggacctgttctactttttcaaccacaatttccaaaaccctattttcgacgccgtgatgcctatcgttacc

SEQ ID NO: 51043 - DNA, 87 bp, synthetic construct
  source 1..87: mol_type = other DNA
attatggagcccaggccttttgtcacactggataacgtcagactgcttatcgtggagaccgacccactatcatttccgtcgggccac

SEQ ID NO: 51044 - DNA, 39 bp, synthetic construct
  source 1..39: mol_type = other DNA
tatggcattatttcatactccccagacttccagatcacc

SEQ ID NO: 51045 - DNA, 42 bp, synthetic construct
  source 1..42: mol_type = other DNA
tcattcaatcccctcggggagcaatcaaccttcaactttagc

SEQ ID NO: 51046 - DNA, 66 bp, synthetic construct
  source 1..66: mol_type = other DNA
aacgccatctacggttggaatttcataatgcagatcgctaccggcggatacgaggtgctgaacacc

SEQ ID NO: 51047 - DNA, 36 bp, synthetic construct
  source 1..36: mol_type = other DNA
ttccggggcagcaaggggacaaaccactttaccatc

SEQ ID NO: 51048 - DNA, 33 bp, synthetic construct
  source 1..33: mol_type = other DNA
atgaccgcatttgtgccacctacatggttcgag

SEQ ID NO: 51049 - DNA, 36 bp, synthetic construct
  source 1..36: mol_type = other DNA
ctgtccggcatcgaggacggactcgctggatctgcc

SEQ ID NO: 51050 - DNA, 45 bp, synthetic construct
  source 1..45: mol_type = other DNA
ctcccgcaactagagcaaccgagccttgctgccatctggaagctg

SEQ ID NO: 51051 - DNA, 81 bp, synthetic construct
  source 1..81: mol_type = other DNA
atgttctccgaaataaatgtggatctcttttattttttcaaccacaatttccaaaacccgatctttgacgcgattatgcct

SEQ ID NO: 51052 - DNA, 87 bp, synthetic construct
  source 1..87: mol_type = other DNA
atctgcgaaccccggccatttgtgacccttgataacgtccggctcctgattactgagacagaccccctgagcttcccttctggtcac

SEQ ID NO: 51053 - DNA, 90 bp, synthetic construct
  source 1..90: mol_type = other DNA
atgttcgctaacgtcaacgtggatctgttctacttcttcaaccacaattttcaaaatccaatctttgacgccattatgcctgtggttact

SEQ ID NO: 51054 - DNA, 87 bp, synthetic construct
  source 1..87: mol_type = other DNA
attcgcgaacctcggcccttcttgaccctcgataatgtgcacctgctgatcaccgagaacgacccactgagcttcccaagtggacat

SEQ ID NO: 51055 - DNA, 42 bp, synthetic construct
  source 1..42: mol_type = other DNA
atcccaatggccgcaactggtagctgggagtccctgttccag

SEQ ID NO: 51056 - DNA, 33 bp, synthetic construct
  source 1..33: mol_type = other DNA
gtgagtactattagcgatcagttttcgagtatt

SEQ ID NO: 51057 - DNA, 45 bp, synthetic construct
  source 1..45: mol_type = other DNA
ctgccccaacccgagaccgccagcatcgctgcactctggacaatc

SEQ ID NO: 51058 - DNA, 42 bp, synthetic construct
  source 1..42: mol_type = other DNA
ttcgggatcatcggatacagcgcgtccttccaaataacaggc

SEQ ID NO: 51059 - DNA, 39 bp, synthetic construct
  source 1..39: mol_type = other DNA
ctcgccccactgaactccgtctacgcaagctgggttggg

SEQ ID NO: 51060 - DNA, 30 bp, synthetic construct
  source 1..30: mol_type = other DNA
agctttctgctgacctttctgagcccggag

SEQ ID NO: 51061 - DNA, 33 bp, synthetic construct
  source 1..33: mol_type = other DNA
ttccagacaccaacggacctgcaccgcgaaccc

SEQ ID NO: 51062 - DNA, 45 bp, synthetic construct
  source 1..45: mol_type = other DNA
ggggcagctctgaccggcgtcaaggagcagaacgccgatcttctg

SEQ ID NO: 51063 - DNA, 72 bp, synthetic construct
  source 1..72: mol_type = other DNA
atggaggaaatcgatatcctctacgaccttcacgatgccctcggcgggggaatgatggactcctttagcctg

SEQ ID NO: 51064 - DNA, 87 bp, synthetic construct
  source 1..87: mol_type = other DNA
ggcgttggccgtgtccgaccggttactgaatacgatatcgacgccctgattgtttcatacaacacatcctccttcccttctggacac

SEQ ID NO: 51065 - DNA, 75 bp, synthetic construct
  source 1..75: mol_type = other DNA
atgagcgtcaacgtggatatgttctacttcttcaatcacaatttccaaaatccgatcttcgacgctgtgatgccc

SEQ ID NO: 51066 - DNA, 87 bp, synthetic construct
  source 1..87: mol_type = other DNA
atctgcgagccacggccctttgtcaccctcgataacgtgcacctgctgattgccgaggacgaccccctttctttccctagtggacat

SEQ ID NO: 51067 - DNA, 66 bp, synthetic construct
  source 1..66: mol_type = other DNA
agctacaactacatccccggcgacctgtataccggagtcgctggtggatatgccgcaatggaaagc

SEQ ID NO: 51068 - DNA, 60 bp, synthetic construct
  source 1..60: mol_type = other DNA
cccaacgtgctcggcggcggatacagcatgatgcacctgatcgagttcacccttcctccc

SEQ ID NO: 51069 - DNA, 30 bp, synthetic construct
  source 1..30: mol_type = other DNA
atctccaccatttctgacatcatcactagc

SEQ ID NO: 51070 - DNA, 84 bp, synthetic construct
  source 1..84: mol_type = other DNA
atgaacatcaacattgacctgttctacatcttcaaccacaatcttcaaaaccctctgtttgatagcgtcatgcctgttgttacc

SEQ ID NO: 51071 - DNA, 87 bp, synthetic construct
  source 1..87: mol_type = other DNA
gtcaacgagccccggccctttgtatccctaggcaatgtccggctactgatcgaggaagccgacccactgtcctttccttctggtcat

SEQ ID NO: 51072 - DNA, 30 bp, synthetic construct
  source 1..30: mol_type = other DNA
gatgctttctctggtgctatcgaggattac

SEQ ID NO: 51073 - DNA, 84 bp, synthetic construct
  source 1..84: mol_type = other DNA
atgaacattaacgtgtacctgttctatatctttaaccacaacctgcaaaacccgctgtttgatagcgtcatgcctgtcgttacc

SEQ ID NO: 51074 - DNA, 87 bp, synthetic construct
  source 1..87: mol_type = other DNA
gtcaacgaaccccggccattcgtctccttggacaatcttcggctcctgatcgaggaggccgatcccctgtccttcccttctggacat

SEQ ID NO: 51075 - DNA, 114 bp, synthetic construct
  source 1..114: mol_type = other DNA
gtggagagccgctttgggaattttgagaactatattcatatcatcgacacaactctgaccgtcgagtcccggttcggcaacttcgagaactacatacacattatcgataccacc

SEQ ID NO: 51076 - DNA, 294 bp, synthetic construct
  source 1..294: mol_type = other DNA
atgttcaacacttcccacgccaagcaggggacagagatcaagatcaccagcgacaaggagcaggtggagggcgaggaactctctttcaagctgagcgagcaaaatggtaccagcgtttccaaagaaatcgtcaatgtgacaattaaagataagaagggaaaggtcgtggtggacgaggtggtcaagactaacagcaaaggaaaagccaaactggacctgaacctcaagaagggcaagtataaagtcaacgtggcctatggaggcaacgagaattacaccggcaccaatgctacg

SEQ ID NO: 51077 - DNA, 42 bp, synthetic construct
  source 1..42: mol_type = other DNA
agctctgccctgtccggcgtcaaaaaccagaatgttaacctc

SEQ ID NO: 51078 - DNA, 30 bp, synthetic construct
  source 1..30: mol_type = other DNA
tttttcggacccctgaccactcctacacag

SEQ ID NO: 51079 - DNA, 60 bp, synthetic construct
  source 1..60: mol_type = other DNA
ctgcacgggtactaccccaagtttatctggaacgtgttcattggcgagccttctatcacc

SEQ ID NO: 51080 - DNA, 57 bp, synthetic construct
  source 1..57: mol_type = other DNA
agctatcccctgtggcactactttaatctcgacatccggaactccgccttccaagat

SEQ ID NO: 51081 - DNA, 63 bp, synthetic construct
  source 1..63: mol_type = other DNA
ttccggtgctatagctactttagcctgttgaacgtctatggccgcaccatcctttttctcaag

SEQ ID NO: 51082 - DNA, 69 bp, synthetic construct
  source 1..69: mol_type = other DNA
acagggcagctggacaccaccatgctgacaaactatacccaactgtttaacggcaatttcacaagactg

SEQ ID NO: 51083 - DNA, 156 bp, synthetic construct
  source 1..156: mol_type = other DNA
atgttcatgactggccagatcgacattaatctcctgctcaacccctttaacatgacccagatgaacaacatgtcacaaatgaataacatgagccagatctacaacacacaaatgaatatgaccggcagtaataacctgtcctccctgttcggattt

SEQ ID NO: 51084 - DNA, 99 bp, synthetic construct
  source 1..99: mol_type = other DNA
ggcatgcccgtgttcgactccgtttgtaatacgtttagcatcatttccaccggaggcatgagtgtcaagaacgccaacatggggttctacaacgacgac

SEQ ID NO: 51085 - DNA, 168 bp, synthetic construct
  source 1..168: mol_type = other DNA
gtgtactgttcggatggctactccgtttgttgttgcttcgggaactaccacaaccgctgtaaacatcccaagctgaactcctacggccggatggcagccgtgcacaatatctactacaacggggcctacgcttaccggggattctatagagtctactgccgctgtaac

SEQ ID NO: 51086 - DNA, 45 bp, synthetic construct
  source 1..45: mol_type = other DNA
acggccacgggcaggtctccatggcggtcctgctgtagcatccgg

SEQ ID NO: 51087 - DNA, 42 bp, synthetic construct
  source 1..42: mol_type = other DNA
agcgagaccttcgcggaccgatacggggtatccccttctgcc

SEQ ID NO: 51088 - DNA, 42 bp, synthetic construct
  source 1..42: mol_type = other DNA
tacgagagacgcggatctccacctgccgcacttagcccgcct

SEQ ID NO: 51089 - DNA, 69 bp, synthetic construct
  source 1..69: mol_type = other DNA
gccgctcggagcatcttcctacaagacattgtggcataccagcaagccaatggcccctttctcttcacc

SEQ ID NO: 51090 - DNA, 51 bp, synthetic construct
  source 1..51: mol_type = other DNA
ggagtccctcccactattatgagtctcggcttcctgagcaacaatcacgtg

SEQ ID NO: 51091 - DNA, 63 bp, synthetic construct
  source 1..63: mol_type = other DNA
ggctctattgacatccgaatccacgatggcaatttcctgagcatctgctcctgtatctacaag

SEQ ID NO: 51092 - DNA, 39 bp, synthetic construct
  source 1..39: mol_type = other DNA
ctggtttcccaattcctgatcaaggagggcgttcctgtc

SEQ ID NO: 51093 - DNA, 165 bp, synthetic construct
  source 1..165: mol_type = other DNA
aacacaaccggcaagcccatttgcgacctgggcatcgtcaagatcgtgaacagcactaactgtaacattggcgacctcgttgagtggaatattaccatcatgaatcacggcccttccgccgcttctaatgtcatcgttaaggacgtgctgcggaggcatttccat

SEQ ID NO: 51094 - DNA, 45 bp, synthetic construct
  source 1..45: mol_type = other DNA
gcctttagcatcttctccatcaccggcatggagaacgagattttc

SEQ ID NO: 51095 - DNA, 30 bp, synthetic construct
  source 1..30: mol_type = other DNA
gccggcctgatcgagtacacacctaacacc

SEQ ID NO: 51096 - DNA, 36 bp, synthetic construct
  source 1..36: mol_type = other DNA
tacctgcctgcctatatccccaacttcaattggcag

SEQ ID NO: 51097 - DNA, 36 bp, synthetic construct
  source 1..36: mol_type = other DNA
aagctgccttccgtgaccggatcatgttctcatcca

SEQ ID NO: 51098 - DNA, 63 bp, synthetic construct
  source 1..63: mol_type = other DNA
ctggccttccccgctccggactttgtcgggcaaattaagtcgctacaaacgaaaatcatccga

SEQ ID NO: 51099 - DNA, 138 bp, synthetic construct
  source 1..138: mol_type = other DNA
agtgggaacttcatccccatctacctagtgaagggatccgtggtgcctaccacaaccatcattccctacggaccaattagcatcacatatcctctgttcctcaactttatcaattctaccctggtcgtctgcgagaac

SEQ ID NO: 51100 - DNA, 72 bp, synthetic construct
  source 1..72: mol_type = other DNA
cacgtcagccctgacaaccccttcattttctcatggagtattgagttcatgcctgtccgtattggctacttt

SEQ ID NO: 51101 - DNA, 180 bp, synthetic construct
  source 1..180: mol_type = other DNA
tggacaattgtggtcgtgaatcacgggcccagcgctgccaaagacgtcaaggtctacgacatactccccgatggccttaagctcgtaaaagtgaacccaagcgttggtacctacaccgacggcatctggaccatcggcgatctgtctgtgaacaacaccgtttccctcatcctgctcaag

SEQ ID NO: 51102 - DNA, 63 bp, synthetic construct
  source 1..63: mol_type = other DNA
ccctacatcctgagcaacttcgggcaatttattacaacccctatcattactaacgtgtcagag

SEQ ID NO: 51103 - DNA, 105 bp, synthetic construct
  source 1..105: mol_type = other DNA
ctgagcgactccaatgctgacaccgtgatggacgccctcgatgacgccggatacctggataacggcgagtacatgggattcgggagagacgactttcggaacatc

SEQ ID NO: 51104 - DNA, 219 bp, synthetic construct
  source 1..219: mol_type = other DNA
ttcaccgacatctccgactcccggttcattaagaacaagagcgaatccggcggcagtattgacaactacctcggctggatcaacgtgaaggctacacgcttcaagaggaaccacgtcaaaaaatacggaggggcaatctttaacggcggaatgctcaattctctggacgattgcatcttcgagaagaacctcgctcctctgaagggcggagctatctac

SEQ ID NO: 51105 - DNA, 54 bp, synthetic construct
  source 1..54: mol_type = other DNA
ggagccgagaacgacgaatatggaagtgatctgtcccaatgctcttgtttcgtc

SEQ ID NO: 51106 - DNA, 60 bp, synthetic construct
  source 1..60: mol_type = other DNA
accgaggacggggctgccatcttcaacaacggcaagctgatcctgaatgaatgcgagttc

SEQ ID NO: 51107 - DNA, 51 bp, synthetic construct
  source 1..51: mol_type = other DNA
ctcagcaacttcgggcaattcatcaccacacctattattactaatgtatca

SEQ ID NO: 51108 - DNA, 33 bp, synthetic construct
  source 1..33: mol_type = other DNA
accgaatatgcgactgcaatgggtagcaccgct

SEQ ID NO: 51109 - DNA, 84 bp, synthetic construct
  source 1..84: mol_type = other DNA
tctgaggacttctacatgatccatctggatttgcaagatgttctgcaacaacaacagtcttttcaacactggcacttgtactcg

SEQ ID NO: 51110 - DNA, 105 bp, synthetic construct
  source 1..105: mol_type = other DNA
ctgtccgaatctagcgctgataccatgatcgacgcacttgaggacgccgggctatgggagaacggcgaatacatgggcctcgatcggaacgacttcgtgaacatc

SEQ ID NO: 51111 - DNA, 201 bp, synthetic construct
  source 1..201: mol_type = other DNA
ctgtctcccatcgaccccgtgaaagcctacttaggccaacgtattgttagccaagaacagctggctattatgggggagtactgggggaccaacctcaccctaggggaacgcgtactcggctggctacaaacactagcttcggggtcgatgggtttcagtttgatttaccgggcccccgtaactgaagttatcgctcaaaag

SEQ ID NO: 51112 - DNA, 54 bp, synthetic construct
  source 1..54: mol_type = other DNA
tgcaacaacatcaagtattgtagaaaccggtttagctataatgtctatgcacgc

SEQ ID NO: 51113 - DNA, 171 bp, synthetic construct
  source 1..171: mol_type = other DNA
gctaccgccggaattgcagatgctgttgacatctacgtgcccgacgccaatcagacacagttcgaagtcggtactggcaattaccttgagaagctcggcaacctgaacgaatccagcatcttgtcacaagatgtcaaggctaagatcaccaacattatactgactgacact

SEQ ID NO: 51114 - DNA, 81 bp, synthetic construct
  source 1..81: mol_type = other DNA
ctgctcactgattatatgcctaccacgaacattactgtggaaacatctgccggctccatgatgtttaatttagtgatgggc

SEQ ID NO: 51115 - DNA, 63 bp, synthetic construct
  source 1..63: mol_type = other DNA
atggacttgctgaccttcatcaataacggcatgcagaaccccattctcgacctggtcgtgccg

SEQ ID NO: 51116 - DNA, 93 bp, synthetic construct
  source 1..93: mol_type = other DNA
tatcatgtctccccccgcccgtattctgtcctgtccaacattagactggtggtgccagacaatggcctcaactccttcccttctgggcatatg

SEQ ID NO: 51117 - DNA, 30 bp, synthetic construct
  source 1..30: mol_type = other DNA
atggcattcggactcgagggcatctcactg

SEQ ID NO: 51118 - DNA, 66 bp, synthetic construct
  source 1..66: mol_type = other DNA
atggtcagcaccatccccggctccgaggtgctcacatccactctgaacatgattagccagtctctg

SEQ ID NO: 51119 - DNA, 51 bp, synthetic construct
  source 1..51: mol_type = other DNA
cccggtttagcggccctgggggctggcgacgtaaacaccttggccaatgct

SEQ ID NO: 51120 - DNA, 87 bp, synthetic construct
  source 1..87: mol_type = other DNA
atgaccgatttctttggcatggtgctggacgtcctcaacgctatcttcaacccaatcctggccctggaccctaacccacaaaataat

SEQ ID NO: 51121 - DNA, 93 bp, synthetic construct
  source 1..93: mol_type = other DNA
gcctcgtctatttcccatctggtgctcattctccccgcacctgcttactggctgaccctcacacctttctggcactttatcggcccttctatc

SEQ ID NO: 51122 - DNA, 147 bp, synthetic construct
  source 1..147: mol_type = other DNA
gtggacacctacttctcccttccggagcagcctggcgtcaagggcgccgagatcatcggctattctattaaggaccggggcggcgatctgagcggcggcttcttccaagggaacatattgtgtagtccggatgcgagtgcaggaacc

SEQ ID NO: 51123 - DNA, 81 bp, synthetic construct
  source 1..81: mol_type = other DNA
gcaaacggcacaattaatatggataccattacccacattgggcagatggaatacaataacttaacgagcttattccggcga

SEQ ID NO: 51124 - DNA, 60 bp, synthetic construct
  source 1..60: mol_type = other DNA
gccctgcccggcacccagctcctgagcgagggagagtttatcacattccttcattctcta

SEQ ID NO: 51125 - DNA, 75 bp, synthetic construct
  source 1..75: mol_type = other DNA
atggacattctgacattcgtgaacaacgagatgcagcagccctttttcgacgccatcgtccctatcatctacacc

SEQ ID NO: 51126 - DNA, 90 bp, synthetic construct
  source 1..90: mol_type = other DNA
tcctacatctctccccggccatacctcactctttctaacattaggctggtggtccgcgacaacgggctcaattccttccctagtggtcac

SEQ ID NO: 51127 - DNA, 81 bp, synthetic construct
  source 1..81: mol_type = other DNA
tctgctgcggtttgggatggcggcaaggacatcctgagtgatattctcgagttcgacacggactcagcgtccagcgtcaga

SEQ ID NO: 51128 - DNA, 297 bp, synthetic construct
  source 1..297: mol_type = other DNA
ctgaccgggtctaataccaagggaaccacaaacaacctggttgagtttaacgacaatggactcagcttcaagcatccaaagaactgggaagtcataaatggctccgacgctgaacacattgacgccaagttctttcgaggaggaaataacactaccatcgagatctataacgtgacagccggcagcacatccctgaaggatataacgcaacaacggatcacttatgcccaaggcaacggcgcctacgtgaccgtcgtggagcctattacaatcgatggccggaacagctctaatgtc

SEQ ID NO: 51129 - DNA, 69 bp, synthetic construct
  source 1..69: mol_type = other DNA
accagctcccacaagcccgactctctccaagcaataagtcacgggctgggcctcaaccctttcgagaac

SEQ ID NO: 51130 - DNA, 63 bp, synthetic construct
  source 1..63: mol_type = other DNA
ctccgggctgacgccctgatcaagactttcgtgaacggatattcgtttaccaacaactttaca

SEQ ID NO: 51131 - DNA, 39 bp, synthetic construct
  source 1..39: mol_type = other DNA
actgggttcacaaccggcagctttctgcccaactccaat

SEQ ID NO: 51132 - DNA, 63 bp, synthetic construct
  source 1..63: mol_type = other DNA
atgagctacctggactttctgcttgacccactgatctccctcgatcccactccctctaaccct

SEQ ID NO: 51133 - DNA, 111 bp, synthetic construct
  source 1..111: mol_type = other DNA
ggaaaccacgctattagtcacgtaatcataaatatcgcctcatcccaatattatctcctcttcatccccatttggaacatcttttggacacaaagcaaccctctgaccatc

SEQ ID NO: 51134 - DNA, 30 bp, synthetic construct
  source 1..30: mol_type = other DNA
tccgactacctgagcggcaacgaatggcca

SEQ ID NO: 51135 - DNA, 69 bp, synthetic construct
  source 1..69: mol_type = other DNA
atgactagcctgaacgaccccacatggatcagtaccggcgtggacaccgtggacattgattcctctgtg

SEQ ID NO: 51136 - DNA, 30 bp, synthetic construct
  source 1..30: mol_type = other DNA
agcggcctggacgtgctgatgacccagatg

SEQ ID NO: 51137 - DNA, 267 bp, synthetic construct
  source 1..267: mol_type = other DNA
atgaagggctccaacatctgggcattctatgtgacagggagcggcgtgacctttaagaacctgaccattaagaacgccaattcgaactcgaacggcggagccatttatttctcctcctcgggcacagtggaaaattgcaacttcatcggcaataacgctacttacttcggcggcgccatttacttttcaagctctgggaccacacacgaggtccggaattgtaactttactggcaacaacgccactggatacggcgatgctgtctac

SEQ ID NO: 51138 - DNA, 30 bp, synthetic construct
  source 1..30: mol_type = other DNA
accgccacacggaatggaggcgctgtatac

SEQ ID NO: 51139 - DNA, 60 bp, synthetic construct
  source 1..60: mol_type = other DNA
aaccagggcaacgtgacaaactgcaacttcatcggaaataatgccacctactatgctggc

SEQ ID NO: 51140 - DNA, 39 bp, synthetic construct
  source 1..39: mol_type = other DNA
gtgacagacctgagcgccactatctcctctaccatcaag

SEQ ID NO: 51141 - DNA, 57 bp, synthetic construct
  source 1..57: mol_type = other DNA
gccattcccgagctgcagatcaccaactactccgacttcattacctttatatccaca

SEQ ID NO: 51142 - DNA, 156 bp, synthetic construct
  source 1..156: mol_type = other DNA
gcagactgggcctccgagacagtgaccgtgtcctcttctctgctgggaaatgctacatcggccgacagcggcactgggctcgacgtcgccggcaagaagttcttcaccgagatcgacagcaacggcaacacagtggctgtcgacgattggcatgtc

SEQ ID NO: 51143 - DNA, 72 bp, synthetic construct
  source 1..72: mol_type = other DNA
tgggatcgcttcgggacgactgagtactccatcctcggcgtcaagaccgcttatgatgtgtctcctgaactg

SEQ ID NO: 51144 - DNA, 168 bp, synthetic construct
  source 1..168: mol_type = other DNA
ctgaatcactacatcatgcacatggacgagtacttcaccatgagcatcaccactctcccactgggcgatattgtgaacgtggcctcctggtacgtccatcctcctctgtattacatcctgggcaaggtcgctgtgacaatcggagccgcaattgggatggactctctc

SEQ ID NO: 51145 - DNA, 39 bp, synthetic construct
  source 1..39: mol_type = other DNA
accgacctggccgcttctatagcatcgtctattaagaac

SEQ ID NO: 51146 - DNA, 60 bp, synthetic construct
  source 1..60: mol_type = other DNA
atgcaggagatcgacatcctggactggatccacgggaccttcggctgcattccaatggat

SEQ ID NO: 51147 - DNA, 87 bp, synthetic construct
  source 1..87: mol_type = other DNA
ggcttcatgcggaacaggcccctgcaagattatgctgtggacgccttaatcacatcttttcaaactagctcctttccttctggtcac

SEQ ID NO: 51148 - DNA, 156 bp, synthetic construct
  source 1..156: mol_type = other DNA
accgactgggcttccgaaactgtaactgtttcgagctccctgctggggtctgccacttcaacggattcagggacaggcctcgaggtggccggaaaggagttcttcaccgagatcgactctgacggcaacacagttgccgtcgacgattggcatgtt

SEQ ID NO: 51149 - DNA, 72 bp, synthetic construct
  source 1..72: mol_type = other DNA
tgggacggttttggtactgccgaatattcaatcctgggcgtcaagacagcctacgatgtatcgcccgagctc

SEQ ID NO: 51150 - DNA, 60 bp, synthetic construct
  source 1..60: mol_type = other DNA
atgcaggagatcgacattctgaactggatctacgacacattccggtgcaccttcctggat

SEQ ID NO: 51151 - DNA, 87 bp, synthetic construct
  source 1..87: mol_type = other DNA
ggcttcatgaggcaccggccctttgaggactacgccgtgcatgctctggtcaacagcttccacacctcttccttccctagtggtcac

SEQ ID NO: 51152 - DNA, 102 bp, synthetic construct
  source 1..102: mol_type = other DNA
acatggatcaatgggcttgacgccactggctggaagctgttttcggatagccccgacctttacgtgctgtccggcggcactatggccaaggcaggttcattt

SEQ ID NO: 51153 - DNA, 75 bp, synthetic construct
  source 1..75: mol_type = other DNA
tgggacgtgctgggcggaactgtctatatgctggatggttccatgttctacgggacaagcggatgtaccgctggt

SEQ ID NO: 51154 - DNA, 60 bp, synthetic construct
  source 1..60: mol_type = other DNA
gacaagcacgatgagaaagtggacaagctgaacaagaagcccaaaaccaagaagcaacct

SEQ ID NO: 51155 - DNA, 36 bp, synthetic construct
  source 1..36: mol_type = other DNA
gacaaggacccctacaacctgaaagagcggtactat

SEQ ID NO: 51156 - DNA, 36 bp, synthetic construct
  source 1..36: mol_type = other DNA
gccattaccaatcccacaatggctggcaacatcaac

SEQ ID NO: 51157 - DNA, 69 bp, synthetic construct
  source 1..69: mol_type = other DNA
aatctcctgtctggcgcgatacaaaatgatatctccaacccggtccaaaatcttatatactctaccgac

SEQ ID NO: 51158 - DNA, 33 bp, synthetic construct
  source 1..33: mol_type = other DNA
gacctggcacccctggcctttctcaccgcttac

SEQ ID NO: 51159 - DNA, 189 bp, synthetic construct
  source 1..189: mol_type = other DNA
atgcagatcaccgtggatcacggcttcgtcggagacgagattattaacgggtctgaatgggatatgcaccgctatgcacctgacggcaaccagatcaactacgaactcggaatcgtgtacctgacaaattggctgcatgacgtggccaactccttctttggtggaaactacagcatcaaggagatcgcc

SEQ ID NO: 51160 - DNA, 39 bp, synthetic construct
  source 1..39: mol_type = other DNA
ttccactgtatctcaaactgcatgctgtgtcttcggaga

SEQ ID NO: 51161 - DNA, 30 bp, synthetic construct
  source 1..30: mol_type = other DNA
gccggacttggagctgacgcattggctggc

SEQ ID NO: 51162 - DNA, 48 bp, synthetic construct
  source 1..48: mol_type = other DNA
atcctgattgccatgggagtcggaggtaccatcggatatgctttggag

SEQ ID NO: 51163 - DNA, 60 bp, synthetic construct
  source 1..60: mol_type = other DNA
atgagctacctggacttcctgctcgaccccctgatctccatggatccaaccccttctaac

SEQ ID NO: 51164 - DNA, 111 bp, synthetic construct
  source 1..111: mol_type = other DNA
ggtaatcacgccatttcccatgtcattataaacataaccagcagtcaatatttccttcttctcatccccatttggaacatcttttggacccagtctaatccactgacaatc

SEQ ID NO: 51165 - DNA, 36 bp, synthetic construct
  source 1..36: mol_type = other DNA
agcccctacatctccctcgagcctaacctgaccatc

SEQ ID NO: 51166 - DNA, 99 bp, synthetic construct
  source 1..99: mol_type = other DNA
atcactggcattggcatcgaggacagtctgttcgaatccatgagcgccctgaccggatctgggattacaatttaccaagacgtcgagatccttcctcag

SEQ ID NO: 51167 - DNA, 123 bp, synthetic construct
  source 1..123: mol_type = other DNA
ggaatgcccatcttcgactcggtctgcaacacctttacaatcattagcaccggcggcatgtctatcaagaacgccaatatcgggttctaccaaactaaaactatcagtttcaccctcctgcaa

SEQ ID NO: 51168 - DNA, 36 bp, synthetic construct
  source 1..36: mol_type = other DNA
ggctacatggtctccgttaacaagatcaaccctagc

SEQ ID NO: 51169 - DNA, 30 bp, synthetic construct
  source 1..30: mol_type = other DNA
gtgatgggcttcctgcccattcaagaggat

SEQ ID NO: 51170 - DNA, 36 bp, synthetic construct
  source 1..36: mol_type = other DNA
ttcaacgtcggctacggaccagatcgacttgtggac

SEQ ID NO: 51171 - DNA, 39 bp, synthetic construct
  source 1..39: mol_type = other DNA
tacctgatgagcggcgctgagatcgatgtggctgggcta

SEQ ID NO: 51172 - DNA, 87 bp, synthetic construct
  source 1..87: mol_type = other DNA
ccctacttatattcctacttccaccctgtggtggacgagttaagtcaaaaagtgcaaaccggtacaatcaagctcaccttcgctgat

SEQ ID NO: 51173 - DNA, 36 bp, synthetic construct
  source 1..36: mol_type = other DNA
tactatgtggcgatacaggacgacctgattagagtg

SEQ ID NO: 51174 - DNA, 39 bp, synthetic construct
  source 1..39: mol_type = other DNA
ggaggcatgatcggcaactacgtgcctagcgagacaggg

SEQ ID NO: 51175 - DNA, 36 bp, synthetic construct
  source 1..36: mol_type = other DNA
ctcgagcgcaccctggacgctggacatagtttgcac

SEQ ID NO: 51176 - DNA, 36 bp, synthetic construct
  source 1..36: mol_type = other DNA
agcgtgaccaatcccgagtacctgcacgacatcaac

SEQ ID NO: 51177 - DNA, 63 bp, synthetic construct
  source 1..63: mol_type = other DNA
ctcagcggcgcgattcaaaatgacatcgctaaccccgtccaagagttaatcaactccgcaaac

SEQ ID NO: 51178 - DNA, 30 bp, synthetic construct
  source 1..30: mol_type = other DNA
ctgatcattgccgctaagcctggttcaact

SEQ ID NO: 51179 - DNA, 72 bp, synthetic construct
  source 1..72: mol_type = other DNA
accaagaacatcgtgatcgatggcaagggccacacaatctaccccggatataatcccgtgttcgacttcaag

SEQ ID NO: 51180 - DNA, 51 bp, synthetic construct
  source 1..51: mol_type = other DNA
atcgagatcaagaacatcattttcgtccgcggaatggggagtgctattcac

SEQ ID NO: 51181 - DNA, 42 bp, synthetic construct
  source 1..42: mol_type = other DNA
atcagcaactgccggttcatcaactgtatatcacaaatctca

SEQ ID NO: 51182 - DNA, 36 bp, synthetic construct
  source 1..36: mol_type = other DNA
ggctacctgggggcctataaggctaccgagacatcc

SEQ ID NO: 51183 - DNA, 39 bp, synthetic construct
  source 1..39: mol_type = other DNA
gtgcccgctatcgcgcaagattttgccatgaacaacgtg

SEQ ID NO: 51184 - DNA, 33 bp, synthetic construct
  source 1..33: mol_type = other DNA
ttcttaggtgcctatactcctactgagatgggc

SEQ ID NO: 51185 - DNA, 51 bp, synthetic construct
  source 1..51: mol_type = other DNA
tgcattccatttttcaatatcttctttaagtcacacatcatcgggaacgaa

SEQ ID NO: 51186 - DNA, 39 bp, synthetic construct
  source 1..39: mol_type = other DNA
tttaactccatgttcgacggcatcagccacgtgaagatc

SEQ ID NO: 51187 - DNA, 42 bp, synthetic construct
  source 1..42: mol_type = other DNA
tccagcctggacatacaacaggtatctaccttcgtgatgaac

SEQ ID NO: 51188 - DNA, 60 bp, synthetic construct
  source 1..60: mol_type = other DNA
gagatgttcgggatcgtcagcccgggcactgtggataccgaagccatgacctccatgacc

SEQ ID NO: 51189 - DNA, 129 bp, synthetic construct
  source 1..129: mol_type = other DNA
gccttcacaacttacaacgaccaggatatgaacgagcttggtaccaatctcttccactggaatggcctcaagaacttcatggctgtcttcaccggcgagggcagcctgggcgtcgagatcaagaacagg

SEQ ID NO: 51190 - DNA, 30 bp, synthetic construct
  source 1..30: mol_type = other DNA
tactccgtggacgccctgagcttcatcgtg

SEQ ID NO: 51191 - DNA, 36 bp, synthetic construct
  source 1..36: mol_type = other DNA
ggctacctgggtccctatggggctggagaaactgcc

SEQ ID NO: 51192 - DNA, 102 bp, synthetic construct
  source 1..102: mol_type = other DNA
accgggtccttcctctataatattggcggcaacctctatggcgtggttcctcaagcaatagccacgattttctcgtatcctgacgtcactcatgctggaatt

SEQ ID NO: 51193 - DNA, 54 bp, synthetic construct
  source 1..54: mol_type = other DNA
aaggccgaggtgcaggagttcgaggagaaaatcaggcgcgatggaggaatggtg

SEQ ID NO: 51194 - DNA, 54 bp, synthetic construct
  source 1..54: mol_type = other DNA
cagaacctcaccgatatcatggcatatgcatccgcaattgacacactgttccga

SEQ ID NO: 51195 - DNA, 69 bp, synthetic construct
  source 1..69: mol_type = other DNA
gccgaccccgaggataagctgcctgagatcgtgtactggctcatgggctccctggctagcgtcacaatg

SEQ ID NO: 51196 - DNA, 33 bp, synthetic construct
  source 1..33: mol_type = other DNA
gactacctcgtggatatgggcgagtccatggct

SEQ ID NO: 51197 - DNA, 228 bp, synthetic construct
  source 1..228: mol_type = other DNA
attatgggcagtgataaatgggtcaatacaactatcgacaagatccacgccgatcctattagtcagggtttcattatgtctgccgacaagctggaggatatcgacctcaactacacccctacctccattgtcacggaaaaacacgtgaacgagagctacgacggagttaaagcagctaattctatgtccggcatgacaggcagttgggacgaactgaccgagtccatg

SEQ ID NO: 51198 - DNA, 51 bp, synthetic construct
  source 1..51: mol_type = other DNA
atgtgggagagcagcggcgactccttctacattctgtcgagcccaagcatc

SEQ ID NO: 51199 - DNA, 45 bp, synthetic construct
  source 1..45: mol_type = other DNA
ggcttcgcccttttttccgtgactggagctcccgaatccgtgttt

SEQ ID NO: 51200 - DNA, 60 bp, synthetic construct
  source 1..60: mol_type = other DNA
attttcggccaaaacatgatcagctcaattgtctttggcggctacgaagttatgaatacc

SEQ ID NO: 51201 - DNA, 36 bp, synthetic construct
  source 1..36: mol_type = other DNA
actgttggcattaagggcaccaacttctcaagccat

SEQ ID NO: 51202 - DNA, 63 bp, synthetic construct
  source 1..63: mol_type = other DNA
ccaaccctgctcgccatgttcggcaatctgatcatcacacccatccctgttggggttcctaac

SEQ ID NO: 51203 - DNA, 36 bp, synthetic construct
  source 1..36: mol_type = other DNA
tacgagatcctaaactccgggtggtcactgagcagc

SEQ ID NO: 51204 - DNA, 78 bp, synthetic construct
  source 1..78: mol_type = other DNA
tgcgtcgactttgggacacccgtgctgaacatcttcatcggctacttcattggaaccaccacggagtacacagctttc

SEQ ID NO: 51205 - DNA, 33 bp, synthetic construct
  source 1..33: mol_type = other DNA
accctctgggggaaagagcttttctccggtcgg

SEQ ID NO: 51206 - DNA, 81 bp, synthetic construct
  source 1..81: mol_type = other DNA
agccagccacaattggctgctatctattctgcctctccctctgtggcggtcaacgacatggccagcgttcttgttggtcct

SEQ ID NO: 51207 - DNA, 81 bp, synthetic construct
  source 1..81: mol_type = other DNA
gcgcctgaggggcttcgcctgccctctatgattgccaatattctgaactactgcaatagtaactacaacgacaacatcctg

SEQ ID NO: 51208 - DNA, 75 bp, synthetic construct
  source 1..75: mol_type = other DNA
accgggaacatcccaacggaggcaatcgtcaactatcgccaaatactaatgggcaattttagttcaatccacggg

SEQ ID NO: 51209 - DNA, 30 bp, synthetic construct
  source 1..30: mol_type = other DNA
tccttcaatccacaatccaacatcaatatc

SEQ ID NO: 51210 - DNA, 75 bp, synthetic construct
  source 1..75: mol_type = other DNA
ctcctgattatcgtgatcgacatcaagaattacaacgtcttcaagaactttagcttccccttttttcaaaaaatt

SEQ ID NO: 51211 - DNA, 72 bp, synthetic construct
  source 1..72: mol_type = other DNA
ttcctgattaactacatgcctagcatcgagattcccatctctgtctcacaaacaaccgttgcaaccgacctt

SEQ ID NO: 51212 - DNA, 75 bp, synthetic construct
  source 1..75: mol_type = other DNA
accggcaatattcccgctgacgccttaacccaatatagacagctcctgagcgggaacctgacatccatcaaccgc

SEQ ID NO: 51213 - DNA, 33 bp, synthetic construct
  source 1..33: mol_type = other DNA
tacggtcccgctcaccatgacgctaccatgcag

SEQ ID NO: 51214 - DNA, 48 bp, synthetic construct
  source 1..48: mol_type = other DNA
atgaccatgggcgccgagaacatcatccggatgattatcgggatcaag

SEQ ID NO: 51215 - DNA, 75 bp, synthetic construct
  source 1..75: mol_type = other DNA
accggaacaatttccacggacaacttgatgcaatatagccagatgaacctgacaaacctgactaataggacactt

SEQ ID NO: 51216 - DNA, 75 bp, synthetic construct
  source 1..75: mol_type = other DNA
acagggaacatccccggagacattatcgctcaataccgacaaatcctctccggcaatattacaagcctgagactg

SEQ ID NO: 51217 - DNA, 78 bp, synthetic construct
  source 1..78: mol_type = other DNA
actgggaacatccccgcggacgccctaacgcaatacaggcagatgatgtccggcaatctgacaagcttacaaaggtcc

SEQ ID NO: 51218 - DNA, 45 bp, synthetic construct
  source 1..45: mol_type = other DNA
tccgtcaacattgacggctgccgaagccaatttatagtggctagt

SEQ ID NO: 51219 - DNA, 30 bp, synthetic construct
  source 1..30: mol_type = other DNA
gacatggctggcgttctccaagatttgaac

SEQ ID NO: 51220 - DNA, 72 bp, synthetic construct
  source 1..72: mol_type = other DNA
ggcaatttccctaaggacattctgaccaactaccgacaactgtttgctgggaactttacccaatttcaacgc

SEQ ID NO: 51221 - DNA, 141 bp, synthetic construct
  source 1..141: mol_type = other DNA
gatacctactttggcctcccggagcagccgggtgtccgcggcgccagcattgttgggaaagacattgaaaaaagaggtggagacatagccggagggttcttccaaggcaatgtgctgtgttcacctgacgcgagcgccggc

SEQ ID NO: 51222 - DNA, 81 bp, synthetic construct
  source 1..81: mol_type = other DNA
accttcaatgatacacttgtgaatacatacctcgagtataccatctctaccctgggcatccccaactccgattccccatac

SEQ ID NO: 51223 - DNA, 75 bp, synthetic construct
  source 1..75: mol_type = other DNA
accggcgtgatcaacaccgacacactgatgaactacagccagatgaacttcgccaacctgacaaatgtcactctg

SEQ ID NO: 51224 - DNA, 30 bp, synthetic construct
  source 1..30: mol_type = other DNA
tttgaccccgctttcgtttcggcgatcatt

SEQ ID NO: 51225 - DNA, 69 bp, synthetic construct
  source 1..69: mol_type = other DNA
accgggaatatccccgctgacgccattagccagtacaagcagatcctgtccggcaacttcacaagaata

SEQ ID NO: 51226 - DNA, 75 bp, synthetic construct
  source 1..75: mol_type = other DNA
gacggcattctgaactctatctccaaactctacgatgtggtcttccggggaagcaaggggacaaaccacttcacc

SEQ ID NO: 51227 - DNA, 30 bp, synthetic construct
  source 1..30: mol_type = other DNA
ggcctgcattctacgagctctacattggag

SEQ ID NO: 51228 - DNA, 45 bp, synthetic construct
  source 1..45: mol_type = other DNA
atgaacatctactcattcatctggaacaacatcaacgacatcaat

SEQ ID NO: 51229 - DNA, 78 bp, synthetic construct
  source 1..78: mol_type = other DNA
gacattctgaatcagtttaatagcttctccgtgctgaatgatttcgctttcaactgccaggccctgatctaccctaag

SEQ ID NO: 51230 - DNA, 81 bp, synthetic construct
  source 1..81: mol_type = other DNA
tcactgttctccgagtctactagagaatttctgggcgggttcatcggctccgactttaccgacggcaccgacactgaggcg

SEQ ID NO: 51231 - DNA, 75 bp, synthetic construct
  source 1..75: mol_type = other DNA
acaggcagcatcccacccgaggtactgaccgactacaagtccctcctgatcggcaacttcactcccttccataga

SEQ ID NO: 51232 - DNA, 69 bp, synthetic construct
  source 1..69: mol_type = other DNA
accgggaacatcccacctgaggctatagcgcagtacaaacaggtgctcgccggcaatttctctgctctg

SEQ ID NO: 51233 - DNA, 72 bp, synthetic construct
  source 1..72: mol_type = other DNA
accggaaacatccccccggacgcgatcgcccaatataagcagctgattgctggcaatggaactctgagattg

SEQ ID NO: 51234 - DNA, 42 bp, synthetic construct
  source 1..42: mol_type = other DNA
atcgagatccccctgacgaaggacgtggcgataaccattatg

SEQ ID NO: 51235 - DNA, 30 bp, synthetic construct; identical to SEQ ID NO: 46595
  source 1..30: mol_type = other DNA

SEQ ID NO: 51236 - DNA, 69 bp, synthetic construct
  source 1..69: mol_type = other DNA
accgggcacatgcccgctgacgccattagccagtaccagcaaatgctcggcggaaacttcacatccatc

SEQ ID NO: 51237 - DNA, 156 bp, synthetic construct
  source 1..156: mol_type = other DNA
gctgactgggcttctgaaactgtgactgtatcctcgagcctgctggggagtgccacttcatcggactcaggtactggactggacattgccggcaaggagttcttcaccgagatcgattctgacgggaacacagtggccgtggatgactggcatgtg

SEQ ID NO: 51238 - DNA, 72 bp, synthetic construct
  source 1..72: mol_type = other DNA
tgggaccggttcggaacagcggattatacgatactcggcgtcaagacgagttacgatgtatctcctgaactg

SEQ ID NO: 51239 - DNA, 60 bp, synthetic construct
  source 1..60: mol_type = other DNA
gccgtgcccacaatcaccgagatcagctccggcgctgcactgaacgactacttcatttca

SEQ ID NO: 51240 - DNA, 69 bp, synthetic construct
  source 1..69: mol_type = other DNA
accgggaacatccccgctgacgccctcacgcaatacaggcagatgctgagcggcaacattacatctccc

SEQ ID NO: 51241 - DNA, 81 bp, synthetic construct
  source 1..81: mol_type = other DNA
agcctcttctccgatgggatgagggagtttctcggcggcttcatcggctctgactttaccgatggcacagatgccgaggca

SEQ ID NO: 51242 - DNA, 66 bp, synthetic construct
  source 1..66: mol_type = other DNA
ctcggacacgagaacctgagcctgtccggcttctggtactacctcggcctcggcgtgtttgaaggt

SEQ ID NO: 51243 - DNA, 33 bp, synthetic construct
  source 1..33: mol_type = other DNA
ctgttcggaagaggttggtgtggctacgcttgc

SEQ ID NO: 51244 - DNA, 42 bp, synthetic construct
  source 1..42: mol_type = other DNA
tacgtgcactattcattcctgaagtttctcattctcattcag

SEQ ID NO: 51245 - DNA, 69 bp, synthetic construct
  source 1..69: mol_type = other DNA
acagggaacatccccgctgacgcaatcgctcaatataagcagattctgagcggcaatttcacaaggatc

SEQ ID NO: 51246 - DNA, 69 bp, synthetic construct
  source 1..69: mol_type = other DNA
acagggaacatccctgctgacgccatcgcgcaataccgtcaaatgctaagcggcaatttcaccggaatc

SEQ ID NO: 51247 - DNA, 111 bp, synthetic construct
  source 1..111: mol_type = other DNA
gtgctcaccggacagatggacctgaatgttctgcttaacccaatgaacacaactcaattggaaaatctcacccaaaacgcctccgttaattccaccaatcttttcggcctg

SEQ ID NO: 51248 - DNA, 75 bp, synthetic construct
  source 1..75: mol_type = other DNA
acaggcgccattcctcctgaagtcattaccgactacaagaccctcctgatgggcaacttcactccactgaacagg

SEQ ID NO: 51249 - DNA, 72 bp, synthetic construct
  source 1..72: mol_type = other DNA
ggcgtgattaaccaggaaacactaatccaatattcaaagatgaatttcgccaacttgactaacccgaatgtg

SEQ ID NO: 51250 - DNA, 69 bp, synthetic construct
  source 1..69: mol_type = other DNA
accggcaacatccctcctgaagtttttgctcaatataaacagctgctggccgggaatctcacaagcatc

SEQ ID NO: 51251 - DNA, 42 bp, synthetic construct
  source 1..42: mol_type = other DNA
ctcgtcaacccacacgtgccaacgatccagggactgatacag

SEQ ID NO: 51252 - DNA, 39 bp, synthetic construct
  source 1..39: mol_type = other DNA
gacggcgtgttccgggaaatcccacctaccgagcaaggt

SEQ ID NO: 51253 - DNA, 69 bp, synthetic construct
  source 1..69: mol_type = other DNA
accgggaatatccccatcgacatcatgacacagtacaagcagattctgagcggcaacttctcttccatc

SEQ ID NO: 51254 - DNA, 33 bp, synthetic construct; identical to SEQ ID NO: 49494
  source 1..33: mol_type = other DNA

SEQ ID NO: 51255 - DNA, 42 bp, synthetic construct
  source 1..42: mol_type = other DNA
aaggtgctgaaacggatcaccgagaacaagaatctcgtgatg

SEQ ID NO: 51256 - DNA, 111 bp, synthetic construct
  source 1..111: mol_type = other DNA
gttctcactggccagatggatcttaatgtcctcctcaatcccatgaataccacacaactggagaacttaacccaaaatgcaagtgtcaatagtaccaacctgttcggcctg

SEQ ID NO: 51257 - DNA, 69 bp, synthetic construct
  source 1..69: mol_type = other DNA
acagggaacataccgacggacataatggcccagtacaagcagatcctggctggcaattttagttctatc

SEQ ID NO: 51258 - DNA, 39 bp, synthetic construct
  source 1..39: mol_type = other DNA
ctgctgaatctgcccgtctacaacctcgtgcctcttggg

SEQ ID NO: 51259 - DNA, 33 bp, synthetic construct
  source 1..33: mol_type = other DNA
ggcgagaacttcagctggtttagggctatccag

SEQ ID NO: 51260 - DNA, 36 bp, synthetic construct
  source 1..36: mol_type = other DNA
agcatggttaggggggctctggaccaatatgaggcc

SEQ ID NO: 51261 - DNA, 75 bp, synthetic construct
  source 1..75: mol_type = other DNA
actggcaaaatcccccctgaaattatcacaaactacaagaccctgttgctggggaatttcacccctatccaaagg

SEQ ID NO: 51262 - DNA, 33 bp, synthetic construct
  source 1..33: mol_type = other DNA
taccattttcaatatgttcgaggatggaacgcc

SEQ ID NO: 51263 - DNA, 54 bp, synthetic construct
  source 1..54: mol_type = other DNA
agctccatctgccggcacgactgcaccggcatctctaacaacatgtgcaatatg

SEQ ID NO: 51264 - DNA, 42 bp, synthetic construct
  source 1..42: mol_type = other DNA
ggcatccgcgggattcccttcatcactaccaaccctaatacg

SEQ ID NO: 51265 - DNA, 69 bp, synthetic construct
  source 1..69: mol_type = other DNA
ctgcggccatccaacatctctcctgccctgattggccagagcctgctgcctcttagtcacaatggatac

SEQ ID NO: 51266 - DNA, 36 bp, synthetic construct
  source 1..36: mol_type = other DNA
attgagttcaacggcttcatccggagcgacgaaatg

SEQ ID NO: 51267 - DNA, 102 bp, synthetic construct
  source 1..102: mol_type = other DNA
acaggctcatacctgtacaacgtcggcgggaatttatatggtcaggtaccccaagcaattgctaccctgttctcctaccccgatctcactcatgccgggata

SEQ ID NO: 51268 - DNA, 57 bp, synthetic construct
  source 1..57: mol_type = other DNA
gcctctgtgttcggactggacgccatccggagtctctctggcgctgggctcaactct

SEQ ID NO: 51269 - DNA, 33 bp, synthetic construct
  source 1..33: mol_type = other DNA
gtgaacggggccaagggcacataccagttttcc

SEQ ID NO: 51270 - DNA, 204 bp, synthetic construct
  source 1..204: mol_type = other DNA
atgattatgggcatcggatctgaacctgaccccggggaagtacaatacatgaacgtcaccgacaacatcactgtatatgagaacagctcctacgatctgcacgacgagaatggcacccagatttcctactatgagttcgacgagaacgtaactgaagggcagaacgtgaccgccttcaacgcttccactgcaaccgggatctac

SEQ ID NO: 51271 - DNA, 57 bp, synthetic construct
  source 1..57: mol_type = other DNA
ttctacaagaaccccagccccttttggccactgaatgctggaatcgcatcacctggc

SEQ ID NO: 51272 - DNA, 93 bp, synthetic construct
  source 1..93: mol_type = other DNA
ttctttgacatccctaccttcggacggcccctgcatacggatttcgtgtccggcttcatcgccatgtgcattggggtcttcaaggatcatctg

SEQ ID NO: 51273 - DNA, 72 bp, synthetic construct
  source 1..72: mol_type = other DNA
agcatgggtgccattccgcctgagattatcactcaataccgtcaactcttagccggcaacttcacttccctt

SEQ ID NO: 51274 - DNA, 105 bp, synthetic construct
  source 1..105: mol_type = other DNA
gccggcagcttcctgtacaacgtcggggctgacttttacaacattgtgcccgcttatgtgaccgccatcttccactaccctgacgtgacaaatgcaggaatcgtt

SEQ ID NO: 51275 - DNA, 39 bp, synthetic construct
  source 1..39: mol_type = other DNA
gggctcctgggccccatggtcaatccgatcttctcacca

SEQ ID NO: 51276 - DNA, 138 bp, synthetic construct
  source 1..138: mol_type = other DNA
ctcacaaacactaagaacaagaaggccgtatacggcgctaagatgaacatcaaggtcttcatttctaaaaataagtactataactacaccggaaccaccgacgctaatggcctggtcaagttcaagatttcctacaag

SEQ ID NO: 51277 - DNA, 255 bp, synthetic construct
  source 1..255: mol_type = other DNA
aaggggtactctgcaagcgccatcactcggaccattaaagtgtccaagtcccctattaaaatggctcccacaagcctgaaagtcaagaaggggacctacttcaaagtgaaggtgacttccactaagaccaagaaggtgctgagctctgtcaaggttaaggttaaggtctatacgggaaagaagtataagacctacaccatcaagacaaattcaaagggcatagcctctctcaagatcagtcagagtgtcggcaag

SEQ ID NO: 51278 - DNA, 30 bp, synthetic construct
  source 1..30: mol_type = other DNA
gccctgacaaagaccctcaccgtgactaaa

SEQ ID NO: 51279 - DNA, 72 bp, synthetic construct
  source 1..72: mol_type = other DNA
gctacaggcaacctgcccgccgacgctctcaccaattaccaacaactgattttggggaacaccacacttcct

SEQ ID NO: 51280 - DNA, 105 bp, synthetic construct
  source 1..105: mol_type = other DNA
ctcactggatcctttctgtacaatgtcggtggcaacctttacggtctcgtaccccccgcaatggctgccatcttctcctatcccgacgtgacgcacgcggggata

SEQ ID NO: 51281 - DNA, 87 bp, synthetic construct
  source 1..87: mol_type = other DNA
ctcaacagcactgcccacctgtactggtcccttcccatgaccaatatcctggacaacacactgtacatgtccttcttctacgagaac

SEQ ID NO: 51282 - DNA, 63 bp, synthetic construct
  source 1..63: mol_type = other DNA
cccgtggtcggcggcttcacctggccacctttcaatttctcgagtttctaccactctccttac

SEQ ID NO: 51283 - DNA, 78 bp, synthetic construct
  source 1..78: mol_type = other DNA
ctgagcggcactattccacaagacgtgctcacgcaatatcagcaactgaccgacgtgaatctcacatccctgaacctc

SEQ ID NO: 51284 - DNA, 204 bp, synthetic construct
  source 1..204: mol_type = other DNA
atgatcatgggcgtcggctctgagcctgaccccggcgaggtgcagtacatgaacgtcaccgacaacatcaccgtatacgaaaattctagctatgacctgcacgatgagaacggaacacagatcagctactacgagttcgacgaaaatgtgacatcaggacagaatgtgactgcctttaatgcttccaccgccactggcatctac

SEQ ID NO: 51285 - DNA, 30 bp, synthetic construct
  source 1..30: mol_type = other DNA
ccctacgtgctgtattcctctggaggaggc

SEQ ID NO: 51286 - DNA, 69 bp, synthetic construct
  source 1..69: mol_type = other DNA
ttcttcaagtcctggggcgccaaccccgggttttacttcgagcacaccctcatgcaatcatctgattct

SEQ ID NO: 51287 - DNA, 105 bp, synthetic construct
  source 1..105: mol_type = other DNA
ctgaccgggtccttcctgtacaacattggtggcaacctctatggcgccgtaccacaagccatagccgcaatttttagctatcctgacgtcacacacgctggaatc

SEQ ID NO: 51288 - DNA, 39 bp, synthetic construct
  source 1..39: mol_type = other DNA
aagatcattaacatcaatttcctgggcatggagacaccc

SEQ ID NO: 51289 - DNA, 57 bp, synthetic construct
  source 1..57: mol_type = other DNA
ctgcctagccctgccaactacaccggcgacagcgcattacaattcgtattcacacag

SEQ ID NO: 51290 - DNA, 39 bp, synthetic construct
  source 1..39: mol_type = other DNA
ctcgatggcctgcccttcgtggccgacaacctgaatacc

SEQ ID NO: 51291 - DNA, 69 bp, synthetic construct
  source 1..69: mol_type = other DNA
ctgacacctggcactctgaagatcccaaccatcggggccagcctgcttcccatttcccacgacctctac

SEQ ID NO: 51292 - DNA, 72 bp, synthetic construct
  source 1..72: mol_type = other DNA
ggaatcattaccatggacactattaagcaatactccgatctgaaactgaataactttacaaacctgactttg

SEQ ID NO: 51293 - DNA, 30 bp, synthetic construct
  source 1..30: mol_type = other DNA
aatattttcaacaaggctcccatcaccaac

SEQ ID NO: 51294 - DNA, 87 bp, synthetic construct
  source 1..87: mol_type = other DNA
atgaccgacttctttggcatggtgctcgatgtcctgaatgccatcttcaaccctatccttgctctggaccccaacaataatccccag

SEQ ID NO: 51295 - DNA, 45 bp, synthetic construct
  source 1..45: mol_type = other DNA
tcttccattagccacctggtgctcatcttgccggcccccgcttac

SEQ ID NO: 51296 - DNA, 138 bp, synthetic construct
  source 1..138: mol_type = other DNA
attctgagcgggcagatggaccctaacatcatcctgaaccccttcaatactaccaatatgaccaacatgagtcaaatatataacagtagcgccatgaacatgacaggctccagcaatttgagtagtctcttcggattc

SEQ ID NO: 51297 - DNA, 30 bp, synthetic construct
  source 1..30: mol_type = other DNA
ttcaacgacccctacctggtgaccagcttt

SEQ ID NO: 51298 - DNA, 39 bp, synthetic construct
  source 1..39: mol_type = other DNA
gtgcccgcaatcgcgcaagacttcgccatgaacaacgtg

SEQ ID NO: 51299 - DNA, 45 bp, synthetic construct
  source 1..45: mol_type = other DNA
gatttttggtgcataacatcagacggcggacagtgcttcatcctg

SEQ ID NO: 51300 - DNA, 33 bp, synthetic construct
  source 1..33: mol_type = other DNA
gagtataacgacccctacctggtgaccagcttc

SEQ ID NO: 51301 - DNA, 33 bp, synthetic construct
  source 1..33: mol_type = other DNA
aatctgttcaaccccatcgacaagtactttagt

SEQ ID NO: 51302 - DNA, 39 bp, synthetic construct
  source 1..39: mol_type = other DNA
atcagccagctgattctcgacctgaacacctctctgtcc

SEQ ID NO: 51303 - DNA, 30 bp, synthetic construct
  source 1..30: mol_type = other DNA
tgcagcaaccaccaccatatccggttcttc

SEQ ID NO: 51304 - DNA, 30 bp, synthetic construct
  source 1..30: mol_type = other DNA
aacaccttcaacaagacacccatcactaac

SEQ ID NO: 51305 - DNA, 30 bp, synthetic construct
  source 1..30: mol_type = other DNA
gacgagattatcagcctgtccaactacaac

SEQ ID NO: 51306 - DNA, 138 bp, synthetic construct
  source 1..138: mol_type = other DNA
gtcgacacctacctgggccttcccgagtcccctggcgtcaagggcgctgagaacgtcggctatagcatcaaaaagcgcggtggcgatctgagcggcggcttcttccaaggtaacattctctgttcccccgacgcctcc

SEQ ID NO: 51307 - DNA, 51 bp, synthetic construct
  source 1..51: mol_type = other DNA
ggcatgcccactagcgagttcattgtttattacgttagtcaaattgacctg

SEQ ID NO: 51308 - DNA, 57 bp, synthetic construct
  source 1..57: mol_type = other DNA
gctttgcctcaagcccacctgattaccgagggccagtttatcacattcctcaactct

SEQ ID NO: 51309 - DNA, 33 bp, synthetic construct
  source 1..33: mol_type = other DNA
tgcaatatcttcaacttcgtcaagatcattctc

SEQ ID NO: 51310 - DNA, 57 bp, synthetic construct
  source 1..57: mol_type = other DNA
ataatcacaagcgaatacgacggtctgaaggtgtccaacaccattatcatcaaggac

SEQ ID NO: 51311 - DNA, 51 bp, synthetic construct
  source 1..51: mol_type = other DNA
aacaaaattaagcccctcctcaagtcatacatgatttataaactgctcttg

SEQ ID NO: 51312 - DNA, 138 bp, synthetic construct
  source 1..138: mol_type = other DNA
gccgtggacaccttcctggggctgcctgaagcccctggcgtcaagggagctgagaacgtcggatacagcattaagaaccgcaagggggatcttgccggcggatttttccaaggaaacatcctgtgttcaccggacgcg

SEQ ID NO: 51313 - DNA, 51 bp, synthetic construct
  source 1..51: mol_type = other DNA
cccggcatgcccacgtccaacttcgttctctattacgtttcgaaaatcgag

SEQ ID NO: 51314 - DNA, 66 bp, synthetic construct
  source 1..66: mol_type = other DNA
atcggcaatccccggagcgggattgccgtgtatatgtcctacctgatcttcgagatgggactgaac

SEQ ID NO: 51315 - DNA, 135 bp, synthetic construct
  source 1..135: mol_type = other DNA
gtcgacacattcctgggcctgcctgaggctcccggggtcaagggtgccgagacagtcggctattctattaagaaccggaaaggcgatctcgccggaggatttttccaaggaaacatcctgtgtagcccagatgcc

SEQ ID NO: 51316 - DNA, 36 bp, synthetic construct
  source 1..36: mol_type = other DNA
agcgaagttcgtgatatccagaactacggctataca

SEQ ID NO: 51317 - DNA, 54 bp, synthetic construct
  source 1..54: mol_type = other DNA
aagaagtattattccgagcggtactttcaaaccgaggcacacgtgaccgatggt

SEQ ID NO: 51318 - DNA, 33 bp, synthetic construct
  source 1..33: mol_type = other DNA
aacctgatccccgtgtacaagttcgactctctg

SEQ ID NO: 51319 - DNA, 231 bp, synthetic construct
  source 1..231: mol_type = other DNA
atatacgccccttcccaagaggagttaagtcaagctaagacaacgaagctcaatgagctgcaagacctctatagtggagcactcactacatctccgtccgcatttcaaatcgaggatcaaatcgagaatgcaaaaaatgccggggaagtggaaagcatcaatatcgtgacgccagcaaccaaagactggaggtcattccatcaaaaatctattaataccaatcacgacaaa

SEQ ID NO: 51320 - DNA, 69 bp, synthetic construct
  source 1..69: mol_type = other DNA
ggcctaacgagtggactgagcgactcttccgtcaacctagcccaatacggtttggttatggatgcattc

SEQ ID NO: 51321 - DNA, 99 bp, synthetic construct
  source 1..99: mol_type = other DNA
tcctcttgggagaacctcggcatcatcgggcaggctgtgatgttcatcattcctttttcgcatcctatgatggccatggacaacctgattttcggaaac

SEQ ID NO: 51322 - DNA, 243 bp, synthetic construct
  source 1..243: mol_type = other DNA
gctgtcatcgagtctatggccaacagtgtcactatcgaagacctcaacatcacccggtacaatcattcgtcacaatatgattcgaaggtttatactgatataggctacgaggtgacctacaaccagaagtcatatggcgaccatgtcaccaacctgatcttctactctaagaaaggaaaagtccttcacaacgactccgagtacatatataccgtcaaggaaagcatgctcaccatcaagatt

SEQ ID NO: 51323 - DNA, 51 bp, synthetic construct
  source 1..51: mol_type = other DNA
cctggcatgcccacctccaagttcgttctccactatgtttcccaagtggaa

SEQ ID NO: 51324 - DNA, 231 bp, synthetic construct
  source 1..231: mol_type = other DNA
aaaggacacaaccttgtcgttcatgagaagaccatagagctggccaacctggagcgagacatcagcattgcccacctatcggatatacatttcggttccctgagacacagaaagataatccgcgacattgccgaccggttgaacggactggactgcgatcttgcaattatctccggcgatttggcggacggaacctccatagtggaactcgacgatttcatggcactcagc

SEQ ID NO: 51325 - DNA, 30 bp, synthetic construct
  source 1..30: mol_type = other DNA
gagattgacgccctgagcttcatcatcggc

SEQ ID NO: 51326 - DNA, 42 bp, synthetic construct
  source 1..42: mol_type = other DNA
aaactcaaagactaccagttccacatcctgtctcgcaatccc

SEQ ID NO: 51327 - DNA, 135 bp, synthetic construct
  source 1..135: mol_type = other DNA
gacacctacttcgggctgccagaacagcccggggtcaaaggcgcccggattatcggcgaatccgtgaaggagcgcaagggggatatcgctggcggcttctttcaagggaatatcctttgttcgcctgatgcaagc

SEQ ID NO: 51328 - DNA, 30 bp, synthetic construct
  source 1..30: mol_type = other DNA
cacatcgacgccctgagcttcattgttggc

SEQ ID NO: 51329 - DNA, 30 bp, synthetic construct
  source 1..30: mol_type = other DNA
aactgggagaatgccatcgttccgaattcc

SEQ ID NO: 51330 - DNA, 69 bp, synthetic construct
  source 1..69: mol_type = other DNA
ctccggcccaatgtgcttgacggcaacgtcctgagcttcattatcaacggctacctgtccgatagatgg

SEQ ID NO: 51331 - DNA, 30 bp, synthetic construct
  source 1..30: mol_type = other DNA
aagatcgacgccctgtctttcctggttgca

SEQ ID NO: 51332 - DNA, 126 bp, synthetic construct
  source 1..126: mol_type = other DNA
ttcaccggccagatggaccccaacattatcctcaaccctttcaacacaactaatatgacccagatgtacaatagctctgccatgaacatgagcggctcctcaaacctgagctccctgttcggtttt

SEQ ID NO: 51333 - DNA, 30 bp, synthetic construct
  source 1..30: mol_type = other DNA
ctggacatgatgacctccctgtctggaagt

SEQ ID NO: 51334 - DNA, 129 bp, synthetic construct
  source 1..129: mol_type = other DNA
atcttcaccggacagatggaccccaatattatcctgaaccctttcaatacaaccaacatgactcagatgtataatagttctgctatgaacatgtctggctcccggaatcttttttcgttgttcggattc

SEQ ID NO: 51335 - DNA, 33 bp, synthetic construct
  source 1..33: mol_type = other DNA
gtcaacgccctgagcatcaatcccaaccctttc

SEQ ID NO: 51336 - DNA, 36 bp, synthetic construct
  source 1..36: mol_type = other DNA
ttcaccatgatcaactggtccatttgcatagtttgc

SEQ ID NO: 51337 - DNA, 63 bp, synthetic construct
  source 1..63: mol_type = other DNA
acctactttggccttccggagcagcctggcgtccgaggagctaggatcattggccaggatgtg

SEQ ID NO: 51338 - DNA, 135 bp, synthetic construct
  source 1..135: mol_type = other DNA
gacacctacttcggcctcccggaacaaccgggggttaggggtgccaggatcatcggaaaggacgtggagaagcgcggcggcgatattgctggaggctttttccaaggtaacattctgtgctcccctgatgcatcc

SEQ ID NO: 51339 - DNA, 216 bp, synthetic construct
  source 1..216: mol_type = other DNA
atgtatgatggcatgaacgaccttaaggaatgggagtacaaccagattaatcactacgattctaaattagtaatcgaagagaacgcgacagactcgcaaatcgacgacgtggctgacgaagtgaacggggacaagctgatggagtctgccatcgagatcgagtctgatagcgccaagaagtccggttccctgctgaggttcgcttcccggattgag

SEQ ID NO: 51340 - DNA, 33 bp, synthetic construct
  source 1..33: mol_type = other DNA
aagatcgacgccctgagcttcctcgtggcttac

SEQ ID NO: 51341 - DNA, 33 bp, synthetic construct
  source 1..33: mol_type = other DNA
aacatgattcccgtgtacaagatcgacagtatg

SEQ ID NO: 51342 - DNA, 30 bp, synthetic construct
  source 1..30: mol_type = other DNA
aacatcgacgccctgagcttcctggtttct

SEQ ID NO: 51343 - DNA, 51 bp, synthetic construct
  source 1..51: mol_type = other DNA
gatatcgccggagggtttttccaagggaacgttttgtgctctcctgacgct

SEQ ID NO: 51344 - DNA, 114 bp, synthetic construct
  source 1..114: mol_type = other DNA
atggacattggcgaatccatcacccgggttggctgcgagtacttcaccggagtcgaaacaatgctgatcctgggccagactgacaggatcgccgccgtcgattttgctccttgg

SEQ ID NO: 51345 - DNA, 111 bp, synthetic construct
  source 1..111: mol_type = other DNA
ttggacttctacttctccgatgaggaaaagaaaaatatatcaaacctgggcaacatgaatgcccccgactatgatgcagtgaacaagctgaatcttgacgtcctgctcatc

SEQ ID NO: 51346 - DNA, 93 bp, synthetic construct
  source 1..93: mol_type = other DNA
atcctcaaggccggctacattttcggggctgtggagaaagccgaggcctacactgagtggatcctgaactaccgggacaaaatgctggaaata

SEQ ID NO: 51347 - DNA, 51 bp, synthetic construct
  source 1..51: mol_type = other DNA
ccgggcatgcctacaagcgacttcgtgctgtattacgtgtccaagatcgag

SEQ ID NO: 51348 - DNA, 45 bp, synthetic construct
  source 1..45: mol_type = other DNA
ggcggaatccccttcattcctaacgggatcttcaatatgaccagc

SEQ ID NO: 51349 - DNA, 102 bp, synthetic construct
  source 1..102: mol_type = other DNA
gccgcttgcgtataccgaccgtggatcctggactcccgggtgcaccctgtcaaggaggccctcgccggagctacaggctatagcttcccgtctggacacatg

SEQ ID NO: 51350 - DNA, 90 bp, synthetic construct
  source 1..90: mol_type = other DNA
catccagacatcaccttacaaaacatgtacctgaaccagctcttgggcaatttcattgagacagttggtcagaacatcgtatcgtgtttc

SEQ ID NO: 51351 - DNA, 60 bp, synthetic construct
  source 1..60: mol_type = other DNA
atgttcgccatcaccggcggcacagtgcccgagaagctgagctacctccacctgtccatg

SEQ ID NO: 51352 - DNA, 42 bp, synthetic construct
  source 1..42: mol_type = other DNA
gtgaacaaccacttcataaaggacgtgattctgatggataat

SEQ ID NO: 51353 - DNA, 132 bp, synthetic construct
  source 1..132: mol_type = other DNA
ttcaagcccagcgcgggcatcaacctgacaacgatcagccagacctccaacgggacattgaatcagacgatgaccgacctggtgctgaatatcatccccgagaatccgctgaacgcattggctaattccgag

SEQ ID NO: 51354 - DNA, 30 bp, synthetic construct
  source 1..30: mol_type = other DNA
aacattatccccaagtacagcatctctggc

SEQ ID NO: 51355 - DNA, 33 bp, synthetic construct
  source 1..33: mol_type = other DNA
aaaggcctgattccattcgtgatcgagaacaag

SEQ ID NO: 51356 - DNA, 51 bp, synthetic construct
  source 1..51: mol_type = other DNA
gccagtcccgctatcaacgaggccgctggccttgtgttcggcaatccttct

SEQ ID NO: 51357 - DNA, 30 bp, synthetic construct
  source 1..30: mol_type = other DNA
agtggactgggccctcatcctcttgccgca

SEQ ID NO: 51358 - DNA, 48 bp, synthetic construct
  source 1..48: mol_type = other DNA
ctgctgatcatgggggccggcgaagtgattagtgaaacaatgacctac

SEQ ID NO: 51359 - DNA, 48 bp, synthetic construct
  source 1..48: mol_type = other DNA
gccctgattgatccctctttcgctctcgagaacctcagccgagaggag

SEQ ID NO: 51360 - DNA, 33 bp, synthetic construct
  source 1..33: mol_type = other DNA
gtggctggactgggtgcagatgctcttgccggg

SEQ ID NO: 51361 - DNA, 51 bp, synthetic construct
  source 1..51: mol_type = other DNA
cccgtcctgaccatcatgggggccgcacatacactcccttacgcccacgag

SEQ ID NO: 51362 - DNA, 123 bp, synthetic construct
  source 1..123: mol_type = other DNA
ctcaccggccagattgaccccaacatcctgttgaacccctttaacacaactcagatggccaacatgaccaacatgagccaaaacatgagcgggtccaataacctatcaagtttattcggattt

SEQ ID NO: 51363 - DNA, 45 bp, synthetic construct
  source 1..45: mol_type = other DNA
gtgagctgccggctcaacatcaatgacttcttccccctgttttcc

SEQ ID NO: 51364 - DNA, 204 bp, synthetic construct
  source 1..204: mol_type = other DNA
ggctctagcatcaatgagctcaacctgttcgggatcaagcacaacctgattgccggcatctctcggagcatgaggtccgacgagtatttggtcaatacgatgttcgcattttcgcaataccacaacggattcggctacttctccgacattgtccgcgctacacccggagtctgttctccatccctcaacgtggtgtccaagaag

SEQ ID NO: 51365 - DNA, 51 bp, synthetic construct
  source 1..51: mol_type = other DNA
ccgggaatgccgactagtgaattcgtgttgcactacgtttcgcaaatagaa

SEQ ID NO: 51366 - DNA, 42 bp, synthetic construct
  source 1..42: mol_type = other DNA
cactttattcaaataatgaacactctaactgatgacgaatgg

SEQ ID NO: 51367 - DNA, 51 bp, synthetic construct
  source 1..51: mol_type = other DNA
ccgggcatgccgacaagcgagttcgtgttgtattacgtatctaaggtcgag

SEQ ID NO: 51368 - DNA, 51 bp, synthetic construct
  source 1..51: mol_type = other DNA
cccggaatgcctactagcgactttgtgctgtactatgttagcaaaatcgag

SEQ ID NO: 51369 - DNA, 108 bp, synthetic construct
  source 1..108: mol_type = other DNA
tacggcggctcctttctgtacaacgtcggaacagatttctatagcatcattcccaagttcatcgtgaatatcttccactaccctgacgttaccaacgctggagcagtg

SEQ ID NO: 51370 - DNA, 51 bp, synthetic construct
  source 1..51: mol_type = other DNA
cccgttatgcctacgtccgaatttgtgctgtattacgtctccaaggtggag

SEQ ID NO: 51371 - DNA, 51 bp, synthetic construct
  source 1..51: mol_type = other DNA
cctggcatgccaacttccaaattcgtcttgtattacgtttcgaagatcgag

SEQ ID NO: 51372 - DNA, 51 bp, synthetic construct
  source 1..51: mol_type = other DNA
ccgggcatgcctacaagcgacttcgtcctgtattacgtctctaaagttgaa

SEQ ID NO: 51373 - DNA, 51 bp, synthetic construct
  source 1..51: mol_type = other DNA
cccggcatgccaaccagcgagacactgctttactatgtgtcacatgtggag

SEQ ID NO: 51374 - DNA, 51 bp, synthetic construct
  source 1..51: mol_type = other DNA
cctggcatgcccactagcgaagtagttctgtactatgtgtcaaaggtcgag

SEQ ID NO: 51375 - DNA, 120 bp, synthetic construct
  source 1..120: mol_type = other DNA
ggactcgggtacaagaccccttccggggccggcatgatcgacggcacaagcccttcaagcttcgtcgattacgtgtctggcggcattttcggcgatctgtttaatgacatcggaggaaac

SEQ ID NO: 51376 - DNA, 51 bp, synthetic construct
  source 1..51: mol_type = other DNA
ccaggcatgcctacctccaaattcgtgctgcattatgttagtcaggtggag

SEQ ID NO: 51377 - DNA, 48 bp, synthetic construct
  source 1..48: mol_type = other DNA
cccctgattgtgctgttcatcaaaaagggcatctttaacatccctagt

SEQ ID NO: 51378 - DNA, 51 bp, synthetic construct
  source 1..51: mol_type = other DNA
ccaggcatgcccacctccgagttcgtgctctatcacgtctctcaagtggaa

SEQ ID NO: 51379 - DNA, 51 bp, synthetic construct
  source 1..51: mol_type = other DNA
ccgggcatgccaacaagcgcgacacttatccactatgtatcacaagtggag

SEQ ID NO: 51380 - DNA, 39 bp, synthetic construct
  source 1..39: mol_type = other DNA
ttccagctgagcaccttcctgaccgtactggagaaccac

SEQ ID NO: 51381 - DNA, 36 bp, synthetic construct
  source 1..36: mol_type = other DNA
ctgttcgagctctacggccactatatcctgtcaact

SEQ ID NO: 51382 - DNA, 51 bp, synthetic construct
  source 1..51: mol_type = other DNA
ccaggcatgccaacaagcgagttcgttctctattatgtttcccatgtggaa

SEQ ID NO: 51383 - DNA, 30 bp, synthetic construct
  source 1..30: mol_type = other DNA
acctacttcgggttgcctgagcaacctggc

SEQ ID NO: 51384 - DNA, 51 bp, synthetic construct
  source 1..51: mol_type = other DNA
cccggcatgccgacgtccaagttcgtgctccactatgtctcccaaatcgag

SEQ ID NO: 51385 - DNA, 51 bp, synthetic construct
  source 1..51: mol_type = other DNA
cccggaatgcccacgtcggaattcgtgctgaaatacgttagtcaggtcgag

SEQ ID NO: 51386 - DNA, 51 bp, synthetic construct
  source 1..51: mol_type = other DNA
ccaggaatgcctacatcaaagttcgtgttgcactacgtgtctcaaatcgag

SEQ ID NO: 51387 - DNA, 36 bp, synthetic construct
  source 1..36: mol_type = other DNA
aacctgacccacatcatgtttttcttcgcctaccag

SEQ ID NO: 51388 - DNA, 48 bp, synthetic construct
  source 1..48: mol_type = other DNA
ggcatgcctacaagcgacttcgtgctgtattacgtctccaagatcgag

SEQ ID NO: 51389 - DNA, 51 bp, synthetic construct
  source 1..51: mol_type = other DNA
cctgggatgccaacaagcaagttcgtgctgcattacgtctctcaaatcgag

SEQ ID NO: 51390 - DNA, 51 bp, synthetic construct
  source 1..51: mol_type = other DNA
cctggaatgcctacttctaagttcgtcctgcactatgtgtctaaagtcgag

SEQ ID NO: 51391 - DNA, 51 bp, synthetic construct
  source 1..51: mol_type = other DNA
cccgggatgcctacgtccaaaatcgtactctactacgttagcaagatagaa

SEQ ID NO: 51392 - DNA, 51 bp, synthetic construct
  source 1..51: mol_type = other DNA
cctaccatgcccacgagcgagtttgtctcctattacgtatccaaagtggaa

SEQ ID NO: 51393 - DNA, 51 bp, synthetic construct
  source 1..51: mol_type = other DNA
cctggggtgcctacctccgaggccgttctctactacgtgtcaaaggttgag

SEQ ID NO: 51394 - DNA, 51 bp, synthetic construct
  source 1..51: mol_type = other DNA
cccggggtgccaacaagcgaaacagtcttgtattatgtatccaaagtggaa

SEQ ID NO: 51395 - DNA, 51 bp, synthetic construct
  source 1..51: mol_type = other DNA
cccgggatgcctacgtccgaggtcgtgtcctactatgtttcgcaagttgaa

SEQ ID NO: 51396 - DNA, 51 bp, synthetic construct
  source 1..51: mol_type = other DNA
ccgggagtgccgacaagcgagaccgtgcttcactacgttagcaaggtcgag

SEQ ID NO: 51397 - DNA, 30 bp, synthetic construct
  source 1..30: mol_type = other DNA
atcaacgccctgagcttcctcgtcggcttt

SEQ ID NO: 51398 - DNA, 51 bp, synthetic construct
  source 1..51: mol_type = other DNA
ccttccatgccaacgagtggagtgctcctgcattacgttagtcaagtcgaa

SEQ ID NO: 51399 - DNA, 93 bp, synthetic construct
  source 1..93: mol_type = other DNA
aactggatcgccgtggacgatgcctatttgggctattctggactgcagatcggggatctggtcgacggcggcgattacgacgactggcagcaa

SEQ ID NO: 51400 - DNA, 69 bp, synthetic construct
  source 1..69: mol_type = other DNA
gcctgttgggacctcttcgacgagcacactgtgctgctggtcacaaccgacccttgcgatgctggagct

SEQ ID NO: 51401 - DNA, 171 bp, synthetic construct
  source 1..171: mol_type = other DNA
gtcatcggaggaatcgtggacgccatcgacatctacgcaccgcaatactccgaaaatgatcacatccatcaagatatctataactatttccaaaaaatgggcaacctttatgagcttaagtctcaggaatctatcgtgatcgctgccgctgacatccaagtcaacaacatt

SEQ ID NO: 51402 - DNA, 297 bp, synthetic construct
  source 1..297: mol_type = other DNA
gcctacgtgcacgagcctgacaacgagaccattaccttttcctccgatcctagtgacgacgccgtgaccagcagcgccaagacatattttttccaatacactggcgaggacgctgactctgtgcactgggactttggcgatggcaccggcgctgacgcctttgaggtctataagacctacgccgacgctgggacttacaatgtgctgtgcaccgcaactaacttcggcggaacacgggtctctggaatgccactcaccatcgaggaaaaggatttcggattcttcactggatacagc

SEQ ID NO: 51403 - DNA, 45 bp, synthetic construct
  source 1..45: mol_type = other DNA
ggccctgcaagccggaatctgatcaacaacttcaagatcatcgag

SEQ ID NO: 51404 - DNA, 54 bp, synthetic construct
  source 1..54: mol_type = other DNA
gcacttcccgaattacagatcgcgaactactctgatttctacaacaccaatccc

SEQ ID NO: 51405 - DNA, 141 bp, synthetic construct
  source 1..141: mol_type = other DNA
ctgatctactccggtcaaatggatatcaatatgatcctcgatccatttaatagtacccagctctacaacatgactaatatgtataatagtagccagaacataactgcaagcaataatttttcatctctcttcgggcttagg

SEQ ID NO: 51406 - DNA, 51 bp, synthetic construct
  source 1..51: mol_type = other DNA
cccggcatgcctacaagcgacatcctgctgtattacgtgtccaaggtggaa

SEQ ID NO: 51407 - DNA, 39 bp, synthetic construct
  source 1..39: mol_type = other DNA
ggcatcgacaaaattatcattaccctgaagaatgctaac

SEQ ID NO: 51408 - DNA, 30 bp, synthetic construct
  source 1..30: mol_type = other DNA
tccggcagccctaaccttgccgaaattggt

SEQ ID NO: 51409 - DNA, 48 bp, synthetic construct
  source 1..48: mol_type = other DNA
gggcccatcgagattacccctactaagggcgtgactgtgtctgtgatg

SEQ ID NO: 51410 - DNA, 30 bp, synthetic construct
  source 1..30: mol_type = other DNA
ggccagagcatccacctgctgctcgagatg

SEQ ID NO: 51411 - DNA, 51 bp, synthetic construct
  source 1..51: mol_type = other DNA
cccggcatgcctacctccgaatttgtgtcttactacgtttccaagatcgag

SEQ ID NO: 51412 - DNA, 51 bp, synthetic construct
  source 1..51: mol_type = other DNA
cccggcatgccaacaagcgagtttgtctcttactatgtgtcgaaagtagaa

SEQ ID NO: 51413 - DNA, 39 bp, synthetic construct
  source 1..39: mol_type = other DNA
gagaagattttcttcggtggcgctatcacaactcctacc

SEQ ID NO: 51414 - DNA, 72 bp, synthetic construct
  source 1..72: mol_type = other DNA
ggctaccctaagctgaaactccaacgcatcatctggaccatttcctgggagcggttcctgctgaagtctttg

SEQ ID NO: 51415 - DNA, 51 bp, synthetic construct
  source 1..51: mol_type = other DNA
cctgggatgcctaccgccgaattagtctcttattatgtttcaaagatcgag

SEQ ID NO: 51416 - DNA, 165 bp, synthetic construct
  source 1..165: mol_type = other DNA
ctcaaccctgaccaactctacgttcgacctgcaccacaagtacaagtcgacgagggtctggccatcgctccctacgactggatatcatcaattagcccctacttcggaacctctatctattcgagccccggaggcctgatcgacgaggtgctctactacacaagg

SEQ ID NO: 51417 - DNA, 111 bp, synthetic construct
  source 1..111: mol_type = other DNA
tcctgggtggccttcgattctggagccgggttttcctctaacggcacacagcttagtaaactcgccgaccagttttccctcgttggtgactatgatgattggcacactaac

SEQ ID NO: 51418 - DNA, 57 bp, synthetic construct
  source 1..57: mol_type = other DNA
tgcggctgggacttcatcgacgacatgtccgatagcctgaagactcaggttggagcg

SEQ ID NO: 51419 - DNA, 51 bp, synthetic construct
  source 1..51: mol_type = other DNA
ccaaccatgccgacgagcgagtttgtctcttattacgtgtccaaggtggaa

SEQ ID NO: 51420 - DNA, 30 bp, synthetic construct
  source 1..30: mol_type = other DNA
attgccctgtccaatgcatattcgattttc

SEQ ID NO: 51421 - DNA, 51 bp, synthetic construct
  source 1..51: mol_type = other DNA
ccaaccatgccgaccagcgaatttgtgtcgtactacgtgtctaaggtggaa

SEQ ID NO: 51422 - DNA, 51 bp, synthetic construct
  source 1..51: mol_type = other DNA
cccggcgtcccaacatctgaaaccgtactgtattatgtgtccaagatcgag

SEQ ID NO: 51423 - DNA, 30 bp, synthetic construct
  source 1..30: mol_type = other DNA
taccccctgcggtcctatagcaacgtgttc

SEQ ID NO: 51424 - DNA, 60 bp, synthetic construct
  source 1..60: mol_type = other DNA
ggcgccgagaagatggttatgacacttattcaatgtcggttcgactattctttacattgg

SEQ ID NO: 51425 - DNA, 30 bp, synthetic construct
  source 1..30: mol_type = other DNA
aatcccaatctgatttcttcattcaacggc

SEQ ID NO: 51426 - DNA, 36 bp, synthetic construct
  source 1..36: mol_type = other DNA
tttaaccaaaatattatgggcagcttgactggactg

SEQ ID NO: 51427 - DNA, 57 bp, synthetic construct
  source 1..57: mol_type = other DNA
aagatgtccaacgccctgagttggctttatgggtcattcgctagcatgacttgggag

SEQ ID NO: 51428 - DNA, 39 bp, synthetic construct
  source 1..39: mol_type = other DNA
aagattatcaatatcaacttcctgggcatggagacaccc

SEQ ID NO: 51429 - DNA, 57 bp, synthetic construct
  source 1..57: mol_type = other DNA
ctgcctagccccgctaactacaccggcgactccgctctccaatttgtattcacacag

SEQ ID NO: 51430 - DNA, 30 bp, synthetic construct
  source 1..30: mol_type = other DNA
gtgagctgggctgagaagggtgcaccagcc

SEQ ID NO: 51431 - DNA, 60 bp, synthetic construct
  source 1..60: mol_type = other DNA
ttcctgcctagccccgctaactacaccggcgactccgcgctccaatttgtgttcacacag

SEQ ID NO: 51432 - DNA, 105 bp, synthetic construct
  source 1..105: mol_type = other DNA
tccggctcattcctctacaacctggggaccaacatctacgatcttgtgcctgcgagtacagctaacatcttcaacttccccgatgcactgcacgccggaatcatc

SEQ ID NO: 51433 - DNA, 129 bp, synthetic construct
  source 1..129: mol_type = other DNA
gtctctacctatgacggactcagcctgggcgaagtgtactcccttatctggaaccacctcacgggaaataacgcttacgaacccagatccaggctgtggtgggccgatcgcttcgtctggaacacaacc

SEQ ID NO: 51434 - DNA, 30 bp, synthetic construct
  source 1..30: mol_type = other DNA
tccgccagcctgaacgctctctctggtaca

SEQ ID NO: 51435 - DNA, 48 bp, synthetic construct
  source 1..48: mol_type = other DNA
atgagctacgagaaccagattctgaagatcatcctcaacttcttcgac

SEQ ID NO: 51436 - DNA, 48 bp, synthetic construct
  source 1..48: mol_type = other DNA
ctgtattccgtggaccaggccgacagctacatcctgatttgggattac

SEQ ID NO: 51437 - DNA, 165 bp, synthetic construct
  source 1..165: mol_type = other DNA
tttaacgaccaccttggaatttactgctccgacgtatacgtttatctccttaacgccctctactacgctggaactaatatctactctaccaagtccatctatctgagccccgtcgtctgcttcctgacaagcctgatcttcgacctgggctacgtggataagacc

SEQ ID NO: 51438 - DNA, 84 bp, synthetic construct
  source 1..84: mol_type = other DNA
atgaccgactttttcggcatggtgctggatgtcctgaacgctatcttcaatcctatcctggccctcgacccaaacccacaaaat

SEQ ID NO: 51439 - DNA, 69 bp, synthetic construct
  source 1..69: mol_type = other DNA
gcctccagcatctctcacctggtcctgattctgcctgctcctgcctactggctcaccgtgctagttgga

SEQ ID NO: 51440 - DNA, 225 bp, synthetic construct
  source 1..225: mol_type = other DNA
atcttcatgagcttcgaggccgagaacaacgctactaacatcaccaacaatactacggatgctcctcacgtcgagaacgttactgtcgagatgacctccaatctgaacaagtccaaggatgtgacattcgacgagagcgacgccgtggactttaacgagaacaagtctgccgagattctgggcgtggaggacaatccctattacaacaaggtcgagcacctctac

SEQ ID NO: 51441 - DNA, 84 bp, synthetic construct
  source 1..84: mol_type = other DNA
tctagctacctggatgacgattccctggtcgtggactataacaacgctctcaacgccgtggacagcgtggtcgactccgataac

SEQ ID NO: 51442 - DNA, 33 bp, synthetic construct
  source 1..33: mol_type = other DNA
tacatcgacgccctgagcttcctggtcctgggg

SEQ ID NO: 51443 - DNA, 108 bp, synthetic construct
  source 1..108: mol_type = other DNA
atgggcttccggagctacaccaccggaacacctatggtgcagctcatcaccgaaggcaccgggctgatcttcatcgtcttccccatgatcttcaacattatgggtacc

SEQ ID NO: 51444 - DNA, 99 bp, synthetic construct
  source 1..99: mol_type = other DNA
tccctggatatccacttcgtggacgccctgtttgagaacatgtctgcttggaccggcagcgggatgacattcttcgtcaacgtggagattcttccacgg

SEQ ID NO: 51445 - DNA, 33 bp, synthetic construct
  source 1..33: mol_type = other DNA
gctatcaacgccgtgtccttcctggttgcactg

SEQ ID NO: 51446 - DNA, 33 bp, synthetic construct
  source 1..33: mol_type = other DNA
aaccagatcaagctgatcccgcaaataaacaac

SEQ ID NO: 51447 - DNA, 30 bp, synthetic construct
  source 1..30: mol_type = other DNA
gctggcctcggacctgatgcattggccgcc

SEQ ID NO: 51448 - DNA, 63 bp, synthetic construct
  source 1..63: mol_type = other DNA
ctccagttcatgggcgccggtaacatgcagtggatcaccgtgattagctactccgactcttgc

SEQ ID NO: 51449 - DNA, 66 bp, synthetic construct
  source 1..66: mol_type = other DNA
gccaagaccgccaagggcctcgggatctgcatggctctgttcggagtcgagaccattttgcctgtc

SEQ ID NO: 51450 - DNA, 36 bp, synthetic construct
  source 1..36: mol_type = other DNA
cacattatcaccgtgtacaagatcaacgagctgaac

SEQ ID NO: 51451 - DNA, 30 bp, synthetic construct
  source 1..30: mol_type = other DNA
aacatcattcccaagtactctgttcctggc

SEQ ID NO: 51452 - DNA, 105 bp, synthetic construct
  source 1..105: mol_type = other DNA
ggaggcttctacctgtacaacgtcggaaccgacatcctcaatgtcgtcccacaaacgatacaaagtgtcctgcactatcccgacgtgacaaacgccggtatcatc

SEQ ID NO: 51453 - DNA, 279 bp, synthetic construct
  source 1..279: mol_type = other DNA
cccatgaatctgaacgacaaccagttatacgttcgccccgaaatccaggagcagatcaacgagaacaacagcctggccccatacgatcgcggaggaatccctcttatcgaggacgcctacgtgaaggcccagtacccaaacaattcgcaaaaccttgggaaaattacctcttacctcacccctctggctctcctagtaaaagacaacacaatctatttcggaacatccatttgcgctagccccggcggcatcctggacgagattctctactatacaagg

SEQ ID NO: 51454 - DNA, 102 bp, synthetic construct
  source 1..102: mol_type = other DNA
tcttacatggcctatacctcatcgatgaaccggtacaataactactataccgggtactccaactacggctataatgactattataactcctactacgattac

SEQ ID NO: 51455 - DNA, 36 bp, synthetic construct
  source 1..36: mol_type = other DNA
taccacctcatccccatctataagatcaacgagctg

SEQ ID NO: 51456 - DNA, 36 bp, synthetic construct
  source 1..36: mol_type = other DNA
ggccccaagtccagggccctgctcttcaaccttcgc

SEQ ID NO: 51457 - DNA, 30 bp, synthetic construct
  source 1..30: mol_type = other DNA
aacattatccccaagtacagtgttcctggc

SEQ ID NO: 51458 - DNA, 105 bp, synthetic construct
  source 1..105: mol_type = other DNA
ggaggcttctatctgtacaacgtcgggacagacgtgctcaacatcgtgcctgctgctattcaaaatgtgtttcactaccccgatgtcaccaacgctggcatcatt

SEQ ID NO: 51459 - DNA, 36 bp, synthetic construct
  source 1..36: mol_type = other DNA
aatcagaccagcctgtttcccaagttcaactacttc

SEQ ID NO: 51460 - DNA, 36 bp, synthetic construct
  source 1..36: mol_type = other DNA
accagcatcaacctgatttccaagttcaactgttgc

SEQ ID NO: 51461 - DNA, 102 bp, synthetic construct
  source 1..102: mol_type = other DNA
ggcggcttctttctgtacaacatgggcactgacctgctcaatgtcgtgcctgccacgatccagaacgtgttccactatccggatatcactaacgccggcatt

SEQ ID NO: 51462 - DNA, 54 bp, synthetic construct
  source 1..54: mol_type = other DNA
cggttcaagaccacaatctttggacctctcggtggctctctgcccttctcctcc

SEQ ID NO: 51463 - DNA, 36 bp, synthetic construct
  source 1..36: mol_type = other DNA
tactttttgcaagccgtctcacaaatctatacctac

SEQ ID NO: 51464 - DNA, 93 bp, synthetic construct
  source 1..93: mol_type = other DNA
gcctggctcgatcccaatatcccggttgatgactttagcggctgggacgtgttcaacaacaaggaccacgagttcgacgaagtggactacact

SEQ ID NO: 51465 - DNA, 57 bp, synthetic construct
  source 1..57: mol_type = other DNA
tggagtcagaatctaccctacggcacacatttttccgacgtggccgatatgggaatc

SEQ ID NO: 51466 - DNA, 105 bp, synthetic construct
  source 1..105: mol_type = other DNA
ggcggcttcttcctgtacaatgtcggcaccgacctgtttaacgtggtccctgccgcgattcagaacgtgctccactaccccgatgttacaaacgctggaatcatc

SEQ ID NO: 51467 - DNA, 39 bp, synthetic construct
  source 1..39: mol_type = other DNA
ttcaacctgttcaatcccatcgactcgtttaagagctat

SEQ ID NO: 51468 - DNA, 102 bp, synthetic construct
  source 1..102: mol_type = other DNA
ggcggattctacctctataactttggcaccgacctgctgaatgtggtgcctgctgctatacaatcggtcttccactaccccgatgtgacaaatgccggtatt

SEQ ID NO: 51469 - DNA, 39 bp, synthetic construct
  source 1..39: mol_type = other DNA
tacagcgtgcccacaaagttttacacgtttgaccgctat

SEQ ID NO: 51470 - DNA, 30 bp, synthetic construct
  source 1..30: mol_type = other DNA
cagttccacgtttacgccatgatgcctatc

SEQ ID NO: 51471 - DNA, 105 bp, synthetic construct
  source 1..105: mol_type = other DNA
ggcggcttcttcctgtacaacgccggaacagacctcctgaatgtggtgcctagcgcgattcaaaatgttctgcactaccccgacgtcacaaacgcagggattatc

SEQ ID NO: 51472 - DNA, 36 bp, synthetic construct
  source 1..36: mol_type = other DNA
cactacaaccccgtcgccgtgaattggatcggaacc

SEQ ID NO: 51473 - DNA, 75 bp, synthetic construct
  source 1..75: mol_type = other DNA
cggaactgcggaagtcgaaataaccggtactgttccatccctgcttggaatcacattagaagcagtcgcattaca

SEQ ID NO: 51474 - DNA, 105 bp, synthetic construct
  source 1..105: mol_type = other DNA
ggcggcttctacctgtacaacttcggaaccgacctcctgaatgtggtgccacaagcgatccaaaccgcgtttcactatcccgacgtcaccaacgccggaataatc

SEQ ID NO: 51475 - DNA, 102 bp, synthetic construct
  source 1..102: mol_type = other DNA
ggcggctttttcctgtacaatgtcggcaccgacatcctgggcatcgtgccgcaaacaattcagacgatcctccactatcccgatgtgaccaacgctggaatt

SEQ ID NO: 51476 - DNA, 39 bp, synthetic construct
  source 1..39: mol_type = other DNA
gtcgtgctggaggtgctgaccaagatccccgacgacgcg

SEQ ID NO: 51477 - DNA, 108 bp, synthetic construct
  source 1..108: mol_type = other DNA
ctgggcggcttctttctctacaatttcggaacagacctgctgaacgtggttccgcaaaacattcagaccattttccactaccctgacgtcaccaacgctggcataatc

SEQ ID NO: 51478 - DNA, 105 bp, synthetic construct
  source 1..105: mol_type = other DNA
ggcggcttcttcctgtacaacgttggaactgacctctttaatatagtaccaagtagtatccagaccattctgcactaccctgacgtgaccaacgccggtatcatt

SEQ ID NO: 51479 - DNA, 105 bp, synthetic construct
  source 1..105: mol_type = other DNA
ggcggtttctacctctacaatgtcgggacagacctgctcaatgtcgtgcctgccgcactccaaaatgttctgcactatcccgacgtcacaaacgccggaatcata

SEQ ID NO: 51480 - DNA, 93 bp, synthetic construct
  source 1..93: mol_type = other DNA
acctggttgagtgtagataccggcttcggaaccgagacagcctctggctggaaagtgtacaccgacgctaaggactccgacatgaagtataca

SEQ ID NO: 51481 - DNA, 66 bp, synthetic construct
  source 1..66: mol_type = other DNA
ttttatacacaatcctggaccgtgttcggcacaactgtcaagctgaccgacatctacaagattggc

SEQ ID NO: 51482 - DNA, 108 bp, synthetic construct
  source 1..108: mol_type = other DNA
gccggaggctttttcctgtacaacgtcggcaccgacctgctcaacgtgatccccgctagcatccagaccattttccactaccctgacgtgacaaatgctgggataatc

SEQ ID NO: 51483 - DNA, 108 bp, synthetic construct
  source 1..108: mol_type = other DNA
gccggaggcttcttcctgtacaacgtcggagcagacatctttaacattatccccgctagcatccagaccgtgttccactaccctgacaccacaaatgctggcatcata

SEQ ID NO: 51484 - DNA, 30 bp, synthetic construct
  source 1..30: mol_type = other DNA
cccgtgctgctgaagaccatcgacttcgga

SEQ ID NO: 51485 - DNA, 114 bp, synthetic construct
  source 1..114: mol_type = other DNA
gagagcgattcagtttctgacgaaaccctgagcgtggagaacgaggagatcggcaacagcctcgagtccaacgacgtgtctgacgaaacatcctctgtcgagaatgaggaaaat

SEQ ID NO: 51486 - DNA, 270 bp, synthetic construct
  source 1..270: mol_type = other DNA
tttatcgggaacagcaacagcaacggatcgcaaaacattacactcattaaggagaacgcctacgggttcaccttcgtcaacgatggcgtgccctactacaactactatctggacggcgtgtttaccaatctcgagggagactttcaaggctacgacatgaaagctaggttcatcgacgagaacgggtccctggttaaggaataccgggacgactacatgaaatacgcattctctgactcgaagaagtcacagacatctactttggctagc

SEQ ID NO: 51487 - DNA, 30 bp, synthetic construct
  source 1..30: mol_type = other DNA
gcaggtctcggcgctgatccacttgccgcc

SEQ ID NO: 51488 - DNA, 54 bp, synthetic construct
  source 1..54: mol_type = other DNA
gacatgctcctgctgttcggggctggcagcgtgcttgattacgccatggactac

SEQ ID NO: 51489 - DNA, 297 bp, synthetic construct
  source 1..297: mol_type = other DNA
tacgccatcaccacacactacaaccccttcgcttctcatgacaactatcaggaagacgtgaagagtgattcaaactcagtagactccagcgatgactccaatgctcagaccagcgagtccaaagcacaggccaccgagtctaagtcttgggagtctatcgggcattactccgggtcaggcagcgggtccaagtccattaaggtgcctgctggcaagattaaagtcaagctgagcgcctacccaatcaagaactacgccacaaaccacctctatgtatcaggcagcaatggacagtcc

SEQ ID NO: 51490 - DNA, 33 bp, synthetic construct
  source 1..33: mol_type = other DNA
tacaatatgatccctgccttcaaaagcaacggg

SEQ ID NO: 51491 - DNA, 222 bp, synthetic construct
  source 1..222: mol_type = other DNA
caaactgatgccaataataacttccctgccaacgacgccttcgaggacggtgtcaacttagagaatgccaaatcccaatttttcaaaggaatcaacgacgtgcccaaggagggtttcgaaaatgcaactcaagtgaacgtcaagacagataaatttaaatctctcaatagcatcgtggatatgaccagggagaacattatccttgatggcctgcttaactct

SEQ ID NO: 51492 - DNA, 51 bp, synthetic construct
  source 1..51: mol_type = other DNA
cccggactggcagccctcgggagcggcgacgtgaccaccctgtcaaacgcc

SEQ ID NO: 51493 - DNA, 99 bp, synthetic construct
  source 1..99: mol_type = other DNA
atcaccggaatcaacatcgaggacagcctgttcgagtctatgtctgccctgaccgggtccggcatcacaatataccaggacgttgaaattcttccacag

SEQ ID NO: 51494 - DNA, 33 bp, synthetic construct
  source 1..33: mol_type = other DNA
ttcatgcgggacggcgacttttatagtcagctg

SEQ ID NO: 51495 - DNA, 33 bp, synthetic construct
  source 1..33: mol_type = other DNA
gcgaagggaccgctcaacgtctcattcaatggc

SEQ ID NO: 51496 - DNA, 30 bp, synthetic construct
  source 1..30: mol_type = other DNA
cagtggatgcccatcaacctgggcattggg

SEQ ID NO: 51497 - DNA, 36 bp, synthetic construct
  source 1..36: mol_type = other DNA
agcctgttcatgtcctctttcaatcaaaattttcac

SEQ ID NO: 51498 - DNA, 36 bp, synthetic construct
  source 1..36: mol_type = other DNA
gccggggcacttctcggcaaagctgacctgttccct

SEQ ID NO: 51499 - DNA, 99 bp, synthetic construct
  source 1..99: mol_type = other DNA
gtggacagcaacattaacaatattcacaccgccgtttggttcatcatcgtctccatgacatctaccggatatggagatatcattcctgctaccacttct

SEQ ID NO: 51500 - DNA, 102 bp, synthetic construct
  source 1..102: mol_type = other DNA
ggcaaattctcgcggcgttacgcctttcaatctaagacctcctctactgcccggatggccacatccatcatggaatctagtggctctgctgtcgtatcattc

SEQ ID NO: 51501 - DNA, 75 bp, synthetic construct
  source 1..75: mol_type = other DNA
tgggatgtgctgggcggcaccgtgtatatgctggacggctccatgttctacggtactagcggctgcacggcaggt

SEQ ID NO: 51502 - DNA, 108 bp, synthetic construct
  source 1..108: mol_type = other DNA
gcaggcggattctttctgtacaacgtcgggaccgacatcctcaatgtggtgcctgctagcattcaggctatcttccactaccctgacgtcacaaacgccggaatcatc

SEQ ID NO: 51503 - DNA, 69 bp, synthetic construct
  source 1..69: mol_type = other DNA
tggcactaccaacctacgattacatacttcatcgataccgcctttggcgtgcaggactacagtcgaccg

SEQ ID NO: 51504 - DNA, 108 bp, synthetic construct
  source 1..108: mol_type = other DNA
gccggtggatttttcctgtacaatgtcggaacggatctcaacaatgttgtccctgcttttattcaaacgatcttccactaccccgacgttagcaacgccggaattatc

SEQ ID NO: 51505 - DNA, 33 bp, synthetic construct
  source 1..33: mol_type = other DNA
gtgagcggactgggcgctgacgcgcttgcggga

SEQ ID NO: 51506 - DNA, 51 bp, synthetic construct
  source 1..51: mol_type = other DNA
atactgaactctatgggcgccggtagcaccattggatatgctgctgactac

SEQ ID NO: 51507 - DNA, 33 bp, synthetic construct
  source 1..33: mol_type = other DNA
atgaacaactcctacgagaacaagagcaccaat

SEQ ID NO: 51508 - DNA, 33 bp, synthetic construct
  source 1..33: mol_type = other DNA
aaagtcaattacatcctgaataacatggacaac

SEQ ID NO: 51509 - DNA, 81 bp, synthetic construct
  source 1..81: mol_type = other DNA
acctggctgagtattggggacgcgaccgctagcggctggaaagtctatacggacgcgaaggactctgatatgaagtatacc

SEQ ID NO: 51510 - DNA, 66 bp, synthetic construct
  source 1..66: mol_type = other DNA
ttctatacgcaaagttggacagcctacggcgtgactatcaaactgaccgacatctacaagattggc

SEQ ID NO: 51511 - DNA, 105 bp, synthetic construct
  source 1..105: mol_type = other DNA
gccgggtccttcctgtacaacattggcgttgatctttcaaatatcgtgcctgctaacatccagtgcatcttcaactaccccgacattacctatgccggaattatc

SEQ ID NO: 51512 - DNA, 51 bp, synthetic construct
  source 1..51: mol_type = other DNA
ccttggtgcccccttgctgagccaattatctattacacctctaaggtggat

SEQ ID NO: 51513 - DNA, 90 bp, synthetic construct
  source 1..90: mol_type = other DNA
tatatcgcatatcaatcctcatatcaatattacaacaattactacgatagctactcttcctacaacgactacaacaactactacgattac

SEQ ID NO: 51514 - DNA, 48 bp, synthetic construct
  source 1..48: mol_type = other DNA
gaggtctacgcctcctttagcgtgattgacctggaaacaccgatcttc

SEQ ID NO: 51515 - DNA, 45 bp, synthetic construct
  source 1..45: mol_type = other DNA
ggatactttggccaaccgaccggcttcttcgtctctgagactggc

SEQ ID NO: 51516 - DNA, 33 bp, synthetic construct; identical to SEQ ID NO: 47930
  source 1..33: mol_type = other DNA

SEQ ID NO: 51517 - DNA, 93 bp, synthetic construct
  source 1..93: mol_type = other DNA
aacgtctttggcaacgccatcgccactgtgcaagaaatcagactgcagatcttcaatgtcttcttccacgggaagttcagaaggtaccgatcc

SEQ ID NO: 51518 - DNA, 30 bp, synthetic construct
  source 1..30: mol_type = other DNA
gcagggctgggtgctgaacctttggccgct

SEQ ID NO: 51519 - DNA, 45 bp, synthetic construct
  source 1..45: mol_type = other DNA
ctgaacatcatgggtgccagctccgtcctcaactacgctatgcag

SEQ ID NO: 51520 - DNA, 45 bp, synthetic construct
  source 1..45: mol_type = other DNA
gggtactttgggcaaccgacgggcttcttcgtgtctgagaacggc

SEQ ID NO: 51521 - DNA, 72 bp, synthetic construct
  source 1..72: mol_type = other DNA
accctgcccggggctagcattggcctcgccgagctctttcaccctgacctgacactgcttctgcactatgat

SEQ ID NO: 51522 - DNA, 87 bp, synthetic construct
  source 1..87: mol_type = other DNA
ggctacatgagcctgtctctcgagttccctttccccattctctacctgcggcacaacctggacttctgctgcatctcctcatctgtg

SEQ ID NO: 51523 - DNA, 66 bp, synthetic construct
  source 1..66: mol_type = other DNA
tctggcctggggtccacccctgtggccagcatcccctacgctctgaacctcatctggaagatcgac

SEQ ID NO: 51524 - DNA, 30 bp, synthetic construct
  source 1..30: mol_type = other DNA
atcgccttcattcccatggctgacaacctg

SEQ ID NO: 51525 - DNA, 66 bp, synthetic construct
  source 1..66: mol_type = other DNA
cccggcatgctcgagaaccagaccctggccaattttctgcacatcaaggagatgttctaccatatc

SEQ ID NO: 51526 - DNA, 54 bp, synthetic construct
  source 1..54: mol_type = other DNA
ccttggtgcccaatctccggccccatcatttattatacttcaaaagtggatctg

SEQ ID NO: 51527 - DNA, 60 bp, synthetic construct
  source 1..60: mol_type = other DNA
gccttccctgagaccatcaacgaacagacaatgctgctgaatttcatccccatcaacggg

SEQ ID NO: 51528 - DNA, 138 bp, synthetic construct
  source 1..138: mol_type = other DNA
gaggtcatcgctctggggcgcctcgatgtggaacctggcgaagaagttcgcgtcgccactcccaaagccaaggctgaggtcgacgacctgctcaaggaggtcaggtcctactggtactccaacaacttccggtggttc

SEQ ID NO: 51529 - DNA, 84 bp, synthetic construct
  source 1..84: mol_type = other DNA
atggctgaccccatgggcgtgatatatcaaggtttaaatgccattttcaaccccatcctcgccctggacccaaaccctaccaac

SEQ ID NO: 51530 - DNA, 72 bp, synthetic construct
  source 1..72: mol_type = other DNA
tccgccatctcctctttggtcatcattctgcctccatctgtgtactggctgaccctgacacctctctggcac

SEQ ID NO: 51531 - DNA, 36 bp, synthetic construct
  source 1..36: mol_type = other DNA
gccctgggccagatcgtggacattaatctgaaccct

SEQ ID NO: 51532 - DNA, 90 bp, synthetic construct
  source 1..90: mol_type = other DNA
ttctcctacatggcctaccgctctaggatgagctattacaacaactactataggtcacctagctacggtcggagctcctactacggttat

SEQ ID NO: 51533 - DNA, 33 bp, synthetic construct
  source 1..33: mol_type = other DNA
ctggccccatacgacgatgcatggagtggagag

SEQ ID NO: 51534 - DNA, 111 bp, synthetic construct
  source 1..111: mol_type = other DNA
tcctgggtggccttcgatagtggagccggcttttcctctaacggaacacaactgtcaaaactcgctgaccaattctcattggttggtgactacgacgactggcatacaaac

SEQ ID NO: 51535 - DNA, 57 bp, synthetic construct
  source 1..57: mol_type = other DNA
tgcggctgggacttcatcgatgatatgtcagactcactgaagactcaggttggagcc

SEQ ID NO: 51536 - DNA, 108 bp, synthetic construct
  source 1..108: mol_type = other DNA
gttggcggatatcacatcgagttcgttgagacctaccgcatcctggccgaccacattcggggcgacgtcagcgatcccactaaggacctcattgtttgggacacaagg

SEQ ID NO: 51537 - DNA, 87 bp, synthetic construct
  source 1..87: mol_type = other DNA
tcctacatggcttacacctcgaggatgagctactactcttcttaccctagttacggtagatcatcctactacaaccgctatggctat

SEQ ID NO: 51538 - DNA, 45 bp, synthetic construct
  source 1..45: mol_type = other DNA
cctctgatggccaacgtgttcctcaaaaagcccgaaacattggtg

SEQ ID NO: 51539 - DNA, 39 bp, synthetic construct
  source 1..39: mol_type = other DNA
aacttcggacgctttaagcggtgcataccaggttgcatc

SEQ ID NO: 51540 - DNA, 39 bp, synthetic construct
  source 1..39: mol_type = other DNA
tactttggcatcaattactacaatatgtttagtatttat

SEQ ID NO: 51541 - DNA, 36 bp, synthetic construct
  source 1..36: mol_type = other DNA
atgctcgagattatcaacccaagcatggtcagcagc

SEQ ID NO: 51542 - DNA, 297 bp, synthetic construct
  source 1..297: mol_type = other DNA
agcagcttcggggccaccagcgtggatgatgctaccgattccggcggcacaggcaagcccaatatgaccgatagctctggcgaccaggagtactacctgatccccgtggccggactccagaaggtgactgtcaacggagtggacatgagcagcgagatttccggcaacgccatcggtgtccactccaaggtcatggaccagggggacatccagattaagacccagtctcacgagatcatcattaaaacccctcctggaatgagcccacaagaagccgtccggtctcctgaaaaccaa

SEQ ID NO: 51543 - DNA, 39 bp, synthetic construct
  source 1..39: mol_type = other DNA
gctatcggggccggcctggataacgttgtcgctgccgtt

SEQ ID NO: 51544 - DNA, 42 bp, synthetic construct
  source 1..42: mol_type = other DNA
atcctggagggtaacgtgttcaatatctcccccattgagttt

SEQ ID NO: 51545 - DNA, 87 bp, synthetic construct
  source 1..87: mol_type = other DNA
acttggctcgacgtgaacaccaatcccgatatttccgcaactgggatagatctgttctccaacgatgacctggacgattggcagagc

SEQ ID NO: 51546 - DNA, 39 bp, synthetic construct
  source 1..39: mol_type = other DNA
acctgggacgagatcgacgatccagtgcaagttggtggg

SEQ ID NO: 51547 - DNA, 30 bp, synthetic construct
  source 1..30: mol_type = other DNA
gctaggaacagcgcaggtggtactttggcc

SEQ ID NO: 51548 - DNA, 30 bp, synthetic construct
  source 1..30: mol_type = other DNA
gccgggcccgagaatgtgtcgttttccgga

SEQ ID NO: 51549 - DNA, 30 bp, synthetic construct
  source 1..30: mol_type = other DNA
cagtggatgccaatcagtcttggcattggc

SEQ ID NO: 51550 - DNA, 36 bp, synthetic construct
  source 1..36: mol_type = other DNA
atgctcgagatcattaacccttccgtcgttagcatg

SEQ ID NO: 51551 - DNA, 288 bp, synthetic construct
  source 1..288: mol_type = other DNA
gtgctgaacacatctcccaagactgccacatccctgaccatgctgtcttcctccaatttaaattcattcggcgaatacgccgtccaacttaaggatgtcaacggcaaccctatgtctggccaatttataaaaatcgaggtcaagaacaatacctacaccctcaagaccgacagtaatggcaccgctcggatgaacctgactctcggagacgggagctacgaaattaagtcctatttcaagggcgacaacaaatatggggagtcgcactcgagtgacatcgtgatcaag

SEQ ID NO: 51552 - DNA, 99 bp, synthetic construct
  source 1..99: mol_type = other DNA
gctgaccggattgtggccgggatcatgagcctgaactcggacatcggcaatatcaacatcctgtccacctctaagggcacatggaacgacctgattgga

SEQ ID NO: 51553 - DNA, 39 bp, synthetic construct
  source 1..39: mol_type = other DNA
gatatggggctggacctggagctcttcggcgttaacggg

SEQ ID NO: 51554 - DNA, 288 bp, synthetic construct
  source 1..288: mol_type = other DNA
ttcattaaccatagttcaaaaactgacaccaccctctctatgatctccaactctaatctggacgcttccaacgagtatacggtacagttgaaggatgtcaacaaccgggtgctagccgataaattcatcaccgtgaagttcaacaacgaatcctacacactggtgacagacaagaatgggacagcctctatcaacctgaccgtgattaagggaagtttcgaggttaaatcttacttcaagggcgacagcaagtacaatgatgcccatagtagcgatatcgtcatcaaa

SEQ ID NO: 51555 - DNA, 60 bp, synthetic construct
  source 1..60: mol_type = other DNA
atcaccgtgccacataacctctacggcgacggactgaatcctcacatgggcctgatcttc

SEQ ID NO: 51556 - DNA, 45 bp, synthetic construct
  source 1..45: mol_type = other DNA
tactacctaatacaatttcaagagcatatcctgatcacaaacacc

SEQ ID NO: 51557 - DNA, 33 bp, synthetic construct
  source 1..33: mol_type = other DNA
cttatcgagtctggcggcgcccaaggaaacagc

SEQ ID NO: 51558 - DNA, 30 bp, synthetic construct
  source 1..30: mol_type = other DNA
atgggcctgagcggactggaacctgatctc

SEQ ID NO: 51559 - DNA, 33 bp, synthetic construct
  source 1..33: mol_type = other DNA
gtgatgggattacaaggattagaacctgatctc

SEQ ID NO: 51560 - DNA, 48 bp, synthetic construct
  source 1..48: mol_type = other DNA
accgccatcttcgatgggattaacagcggcaatatggacctgaaccac

SEQ ID NO: 51561 - DNA, 39 bp, synthetic construct
  source 1..39: mol_type = other DNA
gacatgggactggatctggagctcttcggagtggatggc

SEQ ID NO: 51562 - DNA, 288 bp, synthetic construct
  source 1..288: mol_type = other DNA
ttctttgagcatacctctaagacagatacctctctgacactgatgtctaatagcaagctggatagctcaaacgagtacagcgtgcagctcagggacagcagcaagaatccccttgctttcaagttcatttccgtgaagttcggcaacgacacttacatgcttcaaacggatcggaacggaatcgcctccatcaacctgactgtcaaggacggcagccacgaagtaaaatcttactacaagggcgactccaaatataacgaagcccactcctccgacatcctggttaaa

SEQ ID NO: 51563 - DNA, 237 bp, synthetic construct
  source 1..237: mol_type = other DNA
cgcgtcgtgtaccagcgggacaccacctacatcaacaaggtgcaggtggactccgtctacaagcgggattccgtgctggttcgagagaagggcgacactgtgtacatttataaggaaaggattcgcgagaaatacaagctgatccgggatacggttcgactggttaaagtcgactctgtggccgtggagcgcatcaaggaggtcaaggtcgagaaacccctgagtgcttggaagagt

SEQ ID NO: 51564 - DNA, 66 bp, synthetic construct
  source 1..66: mol_type = other DNA
gagagcggcctgttccccacaaccttcctcaacgtgtacctgagcttgcaatctatcgccaacaat

SEQ ID NO: 51565 - DNA, 72 bp, synthetic construct
  source 1..72: mol_type = other DNA
tggtactatccgggcttctgccgctttggcgtgtttggcaagcgcttttgccggttcggaaaatgttgtgac

SEQ ID NO: 51566 - DNA, 33 bp, synthetic construct
  source 1..33: mol_type = other DNA
gacggcaagctgggatacataccggatgaatcc

SEQ ID NO: 51567 - DNA, 30 bp, synthetic construct
  source 1..30: mol_type = other DNA
atgggactgcagggcctggaatgggatctc

SEQ ID NO: 51568 - DNA, 144 bp, synthetic construct
  source 1..144: mol_type = other DNA
atggggttcaacggagacgacatcaaatatgccaaggtgctgtcgaaccagactcttgtcgactatctccactaccggtactacaattggtctagccgcctgatcattgatggcatccttgtgattctggctaggctcgatatg

SEQ ID NO: 51569 - DNA, 93 bp, synthetic construct
  source 1..93: mol_type = other DNA
tttggctttagtgtttcgggcacgcctaccccaagtctgctcaagttcagccaagccggtcagaacatgattgaaggcggcatcttcggaccc

SEQ ID NO: 51570 - DNA, 33 bp, synthetic construct
  source 1..33: mol_type = other DNA
taccccctgaaaattcactcaaatgtgttcatc

SEQ ID NO: 51571 - DNA, 33 bp, synthetic construct
  source 1..33: mol_type = other DNA
atgaacagctgcctggagcggtttctcttctac

SEQ ID NO: 51572 - DNA, 42 bp, synthetic construct
  source 1..42: mol_type = other DNA
gtgggaccttctaacgttggagtagagattagcaagatcaat

SEQ ID NO: 51573 - DNA, 33 bp, synthetic construct
  source 1..33: mol_type = other DNA
ctctggtttgatgactacaccctgttccctaac

SEQ ID NO: 51574 - DNA, 30 bp, synthetic construct
  source 1..30: mol_type = other DNA
aacatcgatgccttatcattcctgttgggc

SEQ ID NO: 51575 - DNA, 33 bp, synthetic construct
  source 1..33: mol_type = other DNA
gcaggaccaggcaacgtgtttttctcctccgga

SEQ ID NO: 51576 - DNA, 30 bp, synthetic construct
  source 1..30: mol_type = other DNA
cagtggatgcccatcaacctgggcattggc

SEQ ID NO: 51577 - DNA, 39 bp, synthetic construct
  source 1..39: mol_type = other DNA
gacatggggctggatctcgagctgctcggggttgatggg

SEQ ID NO: 51578 - DNA, 48 bp, synthetic construct
  source 1..48: mol_type = other DNA
attggcagcaaccagatcctgcccaataagtaccctgctctcatcacc

SEQ ID NO: 51579 - DNA, 39 bp, synthetic construct
  source 1..39: mol_type = other DNA
gtgttcatcacaataatgcactccctaaccatcagggag

SEQ ID NO: 51580 - DNA, 285 bp, synthetic construct
  source 1..285: mol_type = other DNA
ttcactgggagctccaaggtcgaaacaagtctgtccatggtgtctcaatcgaacttcgatagctcaaccgaatacgtggtactgctctccgacgctgataacaagcccctggccgacaagttcgtcaacgtcgaatttaacaacgacacctatacactgcggacagatagcgagggcctcgccaagatcaatctgaccctttctgagggcaatcacgaggttaactcatacttcgaaggagacgagcagtacaaagagtctcacactagcaacatcattgtcatc

SEQ ID NO: 51581 - DNA, 36 bp, synthetic construct
  source 1..36: mol_type = other DNA
tacaacattttccgcggaatcccccttactgaaacc

SEQ ID NO: 51582 - DNA, 30 bp, synthetic construct
  source 1..30: mol_type = other DNA
aacatcactgctttgtctgtgctgttcgcc

SEQ ID NO: 51583 - DNA, 30 bp, synthetic construct
  source 1..30: mol_type = other DNA
tacatcaacgccctgagcttcattactggc

SEQ ID NO: 51584 - DNA, 30 bp, synthetic construct
  source 1..30: mol_type = other DNA
aacttcagcgccgtgtcctttctgttgggt

SEQ ID NO: 51585 - DNA, 36 bp, synthetic construct
  source 1..36: mol_type = other DNA
ggcggaatcaccaatgggctgacaaacagcttccct

SEQ ID NO: 51586 - DNA, 30 bp, synthetic construct
  source 1..30: mol_type = other DNA
aacatcgcggcgctcagctttgtgttcgcc

SEQ ID NO: 51587 - DNA, 45 bp, synthetic construct
  source 1..45: mol_type = other DNA
gggacagccctcaccggcgtcaaggaacagaagatcgacctgctg

SEQ ID NO: 51588 - DNA, 93 bp, synthetic construct
  source 1..93: mol_type = other DNA
gtccacgagccaaggcccttcattagcctcgataatgtcaggctcctgatcaccgaggacgaccttaattcctttccttctggacatactacc

SEQ ID NO: 51589 - DNA, 30 bp, synthetic construct
  source 1..30: mol_type = other DNA
ggcttgaatcaaaagctcttcggagttgac

SEQ ID NO: 51590 - DNA, 30 bp, synthetic construct
  source 1..30: mol_type = other DNA
ggcctgaaccaacacctcctgggagttgac

SEQ ID NO: 51591 - DNA, 42 bp, synthetic construct
  source 1..42: mol_type = other DNA
gttggcccctctaacatgagcgcgggcctgtccaagatcaat

SEQ ID NO: 51592 - DNA, 297 bp, synthetic construct
  source 1..297: mol_type = other DNA
gtcggcggcgtgtttaataatggcgagaacaccaatacggctgatcatagcgctagccaggtgtcgacgccggttaacaactccaccaatagcattaacaactcaagccaatcctcttccgacaacaacggctctagcgccaccgagacagttttctgggccagtagccagtccgacatcttccacaagccctcatgcgaatgggcgcagaagatttctgataatcataagatcgtatatcattcgcgggaggaggctatctctgacggcaagcggccttgcaatgtctgcaacccc

SEQ ID NO: 51593 - DNA, 105 bp, synthetic construct
  source 1..105: mol_type = other DNA
aacaagtgcccgacggaagccatccgagttattaccaagaccggcatgtcttgccctgccctggtcgagactgacgacgaaccaagcttcgtgtcctgcattagg

SEQ ID NO: 51594 - DNA, 90 bp, synthetic construct
  source 1..90: mol_type = other DNA
agcatgtgcgccaacgacgctctgaaggtggagaaatacgtcgtgaccattgacggcgaggaggtggagagggatcggatcgccttcaat

SEQ ID NO: 51595 - DNA, 69 bp, synthetic construct
  source 1..69: mol_type = other DNA
gaccaatgtggagactgcatcgaggcctgtccctacgatatgattcacaagaccgacaaccctaagctg

SEQ ID NO: 51596 - DNA, 36 bp, synthetic construct
  source 1..36: mol_type = other DNA
ttcttcatcaactacttcaacattttcttccaaatg

SEQ ID NO: 51597 - DNA, 192 bp, synthetic construct
  source 1..192: mol_type = other DNA
gccgtaatcgaaagcatggctaactccgtgaccattgaggacctgaacatcactcggtacaaccactcatcgcaatacgactcgaaagtttacaccgacattggttatgaagtcacttacaaccagaagtcttacggcgaccacgtcaccaacctgatattctatagcaaaaagggcaaagtcctccacaac

SEQ ID NO: 51598 - DNA, 57 bp, synthetic construct
  source 1..57: mol_type = other DNA
ccagacattttatcacttttcggcgagtacattctgacccctatccctgttggagtg

SEQ ID NO: 51599 - DNA, 72 bp, synthetic construct
  source 1..72: mol_type = other DNA
agctacatggcctatagatctaggatgcgcttttacaactccttctacaactggcccaactcctactactac

SEQ ID NO: 51600 - DNA, 54 bp, synthetic construct
  source 1..54: mol_type = other DNA
aagcccgtggtggtcgatctcatcggtgacaccgccattgctagcctgtcttca

SEQ ID NO: 51601 - DNA, 36 bp, synthetic construct
  source 1..36: mol_type = other DNA
gccctgaccctggagacactcgaaatcgctccatcc

SEQ ID NO: 51602 - DNA, 75 bp, synthetic construct
  source 1..75: mol_type = other DNA
ggccctgctagccggaacctgctgaacaatttcaagattatcgagttcctcgactctttgcaaaaacaggattgg

SEQ ID NO: 51603 - DNA, 300 bp, synthetic construct
  source 1..300: mol_type = other DNA
aagatttcttccgagaccgtgtccgtcgagcacacagatagcccctggaaggtgctgatcaaagtaaaaattaacgcccagaaggacaacattaaatattccaacattatcgagaagaacgtcagcatcgagggactgcgggacccactgcctctcgcaaagcttacaatcgctagtggcatcctgacctacgatgaccagatccattacaagaatgccattgccggctatatggttatacatgacttcaagagccctgaatcttacatcgaggccactgctcctctgtacatcaagaag

SEQ ID NO: 51604 - DNA, 69 bp, synthetic construct
  source 1..69: mol_type = other DNA
atcgatgattgcctggacaagggctacttccacgagtctgccgacgggtcctgctatctctgtagactc

SEQ ID NO: 51605 - DNA, 30 bp, synthetic construct
  source 1..30: mol_type = other DNA
ttcatcaactacctgaatatcttccaaatc

SEQ ID NO: 51606 - DNA, 36 bp, synthetic construct
  source 1..36: mol_type = other DNA
agccggatcgtggtcgatctgaacactgacgtttcc

SEQ ID NO: 51607 - DNA, 36 bp, synthetic construct
  source 1..36: mol_type = other DNA
caggccgggccgcagaatataagcttcagtggaacc

SEQ ID NO: 51608 - DNA, 30 bp, synthetic construct
  source 1..30: mol_type = other DNA
aagtggatgcccatcgacctgggcattggc

SEQ ID NO: 51609 - DNA, 69 bp, synthetic construct
  source 1..69: mol_type = other DNA
tttaaatacgacctgttttcaagcaacgacgtcatcaccctgacattcaacggtgtcaactataacctg

SEQ ID NO: 51610 - DNA, 69 bp, synthetic construct
  source 1..69: mol_type = other DNA
actacaaccatcttcatcggcattaataacatcattcatcacaccgggtctatcgactttgatacactg

SEQ ID NO: 51611 - DNA, 252 bp, synthetic construct
  source 1..252: mol_type = other DNA
tccgggatgctttccggcgatacctccactgctaacgacaccaaacacaatgacaccgtcaacccaatcgtcgagaagggagactctagtggaagcaacgctaccgaatattgggccagcgccaaagccgagaaattccacctgcccacatgcgaatgggccgagaagatttccgatgataataagatcatctaccaaacccgcgacgacgccatcgaggacggaaaggttccctgcggtgcttgcaatccc

SEQ ID NO: 51612 - DNA, 108 bp, synthetic construct
  source 1..108: mol_type = other DNA
gtgtccaatatcggcgctggagataactacggctctatcaccaaggccttttcccaatctaataagagcatttcctttagcgacgtcaagggcgatgcaattggactc

SEQ ID NO: 51613 - DNA, 45 bp, synthetic construct
  source 1..45: mol_type = other DNA
atcggcgtgcccttcggggccgacatgtactttgctttggtttct

SEQ ID NO: 51614 - DNA, 48 bp, synthetic construct
  source 1..48: mol_type = other DNA
ttcaagtccctgggggtcaatccgaatagctctgccatggctgaaggg

SEQ ID NO: 51615 - DNA, 153 bp, synthetic construct
  source 1..153: mol_type = other DNA
atgtgtgccagcatccactccgcctcccggattaagatcattgaatatgacagtagtttttattcaattgtttgtcaacattgcgagtctgcaccctgcatcaaaatctgccctaccgatgctattacggacgagggcgtggacaaggagaag

SEQ ID NO: 51616 - DNA, 63 bp, synthetic construct
  source 1..63: mol_type = other DNA
gaccgcgaggaaggccctgcatgcataaaggcctgtacaaagcgggctatcaccgtagctgac

SEQ ID NO: 51617 - DNA, 42 bp, synthetic construct
  source 1..42: mol_type = other DNA
gtgggacccagcaacattgctttcgagctgagcaagatcaat

SEQ ID NO: 51618 - DNA, 213 bp, synthetic construct
  source 1..213: mol_type = other DNA
agcatgattatggggcccggtgactccaacgagcctgccccgggagaggtccagtacatgaacgtgactaacaacatctccgaatacgaaaactcttcttatgacctgaccgacgaaaacggcacccagatctcctactacgatttcaaggagaacgtgaccgagggacagaatgtcactgcgttcaacgcgagctcttctgcaaacatctat

SEQ ID NO: 51619 - DNA, 36 bp, synthetic construct
  source 1..36: mol_type = other DNA
aagctgccttctgtgaccggcagctgttcccatccc

SEQ ID NO: 51620 - DNA, 66 bp, synthetic construct
  source 1..66: mol_type = other DNA
ctgcactctattccgcaagagtcatacctgtccttcctgattcctagcaagtccatcggcaatggc

SEQ ID NO: 51621 - DNA, 54 bp, synthetic construct
  source 1..54: mol_type = other DNA
acccacaaccaggcttccctgcatagcatcggaacggcgtacctgtctgatctc

SEQ ID NO: 51622 - DNA, 42 bp, synthetic construct
  source 1..42: mol_type = other DNA
acctactccacaccggatagcatttataagctggaccgatac

SEQ ID NO: 51623 - DNA, 42 bp, synthetic construct
  source 1..42: mol_type = other DNA
gctcgatttggtaaccccaatctcgacttttactctccttct

SEQ ID NO: 51624 - DNA, 90 bp, synthetic construct
  source 1..90: mol_type = other DNA
gtgctgaatccctacgacgtggtcaccaacctctatctgtcgggccaattctccactacacctggggccagcgaggtttctgcttgcttc

SEQ ID NO: 51625 - DNA, 84 bp, synthetic construct
  source 1..84: mol_type = other DNA
ccactgatcttcggacccgacgccttccctgccaacgaactcctgaatattaactacaacggcgtgcagtttgctctgaagttg

SEQ ID NO: 51626 - DNA, 36 bp, synthetic construct
  source 1..36: mol_type = other DNA
ttcttcatcaactacctgaaccagttcatattcatg

SEQ ID NO: 51627 - DNA, 36 bp, synthetic construct
  source 1..36: mol_type = other DNA
cagtactgcggcatcgacctggtgctccaaccactc

SEQ ID NO: 51628 - DNA, 39 bp, synthetic construct
  source 1..39: mol_type = other DNA
atcttcggcggacctcagcctgggatttcccatccatcc

SEQ ID NO: 51629 - DNA, 33 bp, synthetic construct
  source 1..33: mol_type = other DNA
ggccggctgttcgtggcccagagccccgacgcc

SEQ ID NO: 51630 - DNA, 42 bp, synthetic construct
  source 1..42: mol_type = other DNA
gcccgcttcggggaccccaacctgaacttctattccccgtcc

SEQ ID NO: 51631 - DNA, 39 bp, synthetic construct
  source 1..39: mol_type = other DNA
cactacgccaacgagatcacagacctgatttacacctac

SEQ ID NO: 51632 - DNA, 33 bp, synthetic construct
  source 1..33: mol_type = other DNA
gtaagcggactcggtgctgacgcacttgccggc

SEQ ID NO: 51633 - DNA, 72 bp, synthetic construct
  source 1..72: mol_type = other DNA
atcatgaacgcttccaataacagcttccgcatccgcttccactatagcttcaagtgcatcatttggtacttt

SEQ ID NO: 51634 - DNA, 33 bp, synthetic construct
  source 1..33: mol_type = other DNA
ctcttcggagacctgaagggcatcattacaccc

SEQ ID NO: 51635 - DNA, 42 bp, synthetic construct
  source 1..42: mol_type = other DNA
gaaggcatcctgcggggctacctgagcattatccacgggaac

SEQ ID NO: 51636 - DNA, 39 bp, synthetic construct
  source 1..39: mol_type = other DNA
ttcaagcccgctgagttcgccttctcattgtccgacatc

SEQ ID NO: 51637 - DNA, 195 bp, synthetic construct
  source 1..195: mol_type = other DNA
agcctggccattgacggaccttctaacaacaatgttactgatgacaatggcgtgacttacgtcaacgtgacagagcagatgacctctaacctcaactccactccgaccgactattacgatggcgttgagcacgttgactacaactcaccggagataaaggctaagtacaacctgaccaacagcagcgtgtcctac

SEQ ID NO: 51638 - DNA, 195 bp, synthetic construct
  source 1..195: mol_type = other DNA
tccatggccatcggcggcagcgacaacaacacagtcgtggacgacggcgtgacatttgtgaatgtgaccgacgagatgacctctaacctgaatgggtccggcaaagtctttgtagatgacggggtctacaacattgactacaacaatgctgaggatgtgatcgaatacaacctcactaacaacagcaagagttat

SEQ ID NO: 51639 - DNA, 36 bp, synthetic construct
  source 1..36: mol_type = other DNA
atgtatggaggccctcgctacggaatcctgaacccc

SEQ ID NO: 51640 - DNA, 42 bp, synthetic construct
  source 1..42: mol_type = other DNA
gcccggcccgagaacgctatcttcgaactgagcaagatcaat

SEQ ID NO: 51641 - DNA, 78 bp, synthetic construct
  source 1..78: mol_type = other DNA
tttttcggcgatgtcctctccgtgaccgacagctttgtgctggccttctctgggattcggatcaacctgaacttcaac

SEQ ID NO: 51642 - DNA, 42 bp, synthetic construct
  source 1..42: mol_type = other DNA
acccggcccgagaacgccgtgttcgaactgagcaagatcaat

SEQ ID NO: 51643 - DNA, 81 bp, synthetic construct
  source 1..81: mol_type = other DNA
atcttcggaccaaacgcctttccccctactgagtcgctcgctttgaatctgggcggcgtcaactacgaaatcctccttagc

SEQ ID NO: 51644 - DNA, 30 bp, synthetic construct
  source 1..30: mol_type = other DNA
acccagatcaacattcacgctagcttcgcc

SEQ ID NO: 51645 - DNA, 51 bp, synthetic construct
  source 1..51: mol_type = other DNA
ctgtactctgtgaaccctgccgattcttatttgctcgccatggattatctg

SEQ ID NO: 51646 - DNA, 36 bp, synthetic construct
  source 1..36: mol_type = other DNA
gccaaccccttccactttgctttcaccatggacttc

SEQ ID NO: 51647 - DNA, 63 bp, synthetic construct
  source 1..63: mol_type = other DNA
gggcacgcgggcttcaatgcggcagatgctctgaccttcgtgttcaacggagcccagttcgat

SEQ ID NO: 51648 - DNA, 42 bp, synthetic construct
  source 1..42: mol_type = other DNA
agccggcccgaaaacgtagccttcgagatttccaagatcaat

SEQ ID NO: 51649 - DNA, 75 bp, synthetic construct
  source 1..75: mol_type = other DNA
tttggggatgtcctgtctgtgaccgacagcttcgtgctggccttctccggcattcggatcaacctcaacttcaac

SEQ ID NO: 51650 - DNA, 54 bp, synthetic construct
  source 1..54: mol_type = other DNA
ccctggtcccccatatcacaacaagtgatctactacacgtctcaaatagatatc

SEQ ID NO: 51651 - DNA, 294 bp, synthetic construct
  source 1..294: mol_type = other DNA
gcccatcccgggcacgggaccgaatacgtagaggaagtgtcttcctctggttcctcttcgcctcaaagcgtgtccccttccacatccggaggcgatagcagtcagtcctccgggtcctcttctggcggcagcagcggcggaggaagcagccagagcagcggatataacgtggccggcagctccgacgctagcactaacgacaacctgaaccacaatagtaccaaccagtcagctgttaataacagcagttccaatctggtcgtgaacgaagattcacaattgttttctatcacc

SEQ ID NO: 51652 - DNA, 33 bp, synthetic construct
  source 1..33: mol_type = other DNA
gccggccccgagaacatcagcttctctggaact

SEQ ID NO: 51653 - DNA, 30 bp, synthetic construct
  source 1..30: mol_type = other DNA
ggctggatgacaatcaccatggggattggc

SEQ ID NO: 51654 - DNA, 81 bp, synthetic construct
  source 1..81: mol_type = other DNA
ttcgggcctaatgtgttccccgccgccgagaacgttactctgaatctttcgggctcagtatttaacgtgccattgggcagg

SEQ ID NO: 51655 - DNA, 33 bp, synthetic construct
  source 1..33: mol_type = other DNA
aaaaccctcaagattgagttcatcatgcttccc

SEQ ID NO: 51656 - DNA, 54 bp, synthetic construct
  source 1..54: mol_type = other DNA
atcctgccttcaaattctccatctgccgacgctttcgccaccattttgggaaca

SEQ ID NO: 51657 - DNA, 63 bp, synthetic construct
  source 1..63: mol_type = other DNA
ctggagcaggtcggcatctctcctagcggcgtggctgacatggccgtcaacttcatgatctac

SEQ ID NO: 51658 - DNA, 33 bp, synthetic construct
  source 1..33: mol_type = other DNA
aaaaccctcaagatcggtctgattatgcttccc

SEQ ID NO: 51659 - DNA, 54 bp, synthetic construct
  source 1..54: mol_type = other DNA
atgctcccgagcaattcgccttctgccgacgctttcgctaccatccttggaacc

SEQ ID NO: 51660 - DNA, 42 bp, synthetic construct
  source 1..42: mol_type = other DNA
cctcacagcttcgactgggtgctcgaagagttcatgggtatc

SEQ ID NO: 51661 - DNA, 288 bp, synthetic construct
  source 1..288: mol_type = other DNA
ctgaacaccgccatagagcactccaatgagaacaacgagatcatgtcctcaaaccaatatcattatatcatgaacgactatattcgtaatatccctacactcgaacgcgaggctctcgaggagctgagcgacgacgtcatcaagaacaagcggcccagcctggactctaagggcgacctcaaggaaatcgtggatgaaaagctgaccgactataaccgcaagtactacgaggactacgatattattataaactctagcctgattgccatcgagatccatttgcgaatg

SEQ ID NO: 51662 - DNA, 108 bp, synthetic construct
  source 1..108: mol_type = other DNA
gacttctactggctccacgaccagattgctgggtttctgagccccgtcggattcctcaagaccctgtacctgttctatatggccaaagccatatgctctgctccgtac

SEQ ID NO: 51663 - DNA, 36 bp, synthetic construct
  source 1..36: mol_type = other DNA
caggccggaccccagaacataagtttttccggaacc

SEQ ID NO: 51664 - DNA, 30 bp, synthetic construct
  source 1..30: mol_type = other DNA
aagtggatgcccctggacttcggaatcggc

SEQ ID NO: 51665 - DNA, 93 bp, synthetic construct
  source 1..93: mol_type = other DNA
ggacacaatcccctggactccctgttctttacctttagcatgcagggcaatgtcgggttagagatcgggcagatgtcacaaaacttggagttt

SEQ ID NO: 51666 - DNA, 42 bp, synthetic construct
  source 1..42: mol_type = other DNA
atgaagtctcggcccgttatgggactgatcgttgttggtggt

SEQ ID NO: 51667 - DNA, 45 bp, synthetic construct
  source 1..45: mol_type = other DNA
gccacatccgctaccaacctcggctctagcctggagatcgtagac

SEQ ID NO: 51668 - DNA, 42 bp, synthetic construct
  source 1..42: mol_type = other DNA
gttgctagcgcctttcatgcatcgtataaccctaccttctcc

SEQ ID NO: 51669 - DNA, 66 bp, synthetic construct
  source 1..66: mol_type = other DNA
atcgctgtacctgctgtatccaatatcacgtctcacgccgccgtgaacagctacatcatgaactac

SEQ ID NO: 51670 - DNA, 243 bp, synthetic construct
  source 1..243: mol_type = other DNA
cggggctttctgtattcaaacactagcaacgactacaccaacgagtccgtgtttgaccaaatttcacccgatcaattcttctccattagtaacggaggcggcgacgatagctatgtggagacagccggagccagctccgccgaagcaaaccccaagaatagctccgtggctgtgacgaatgacagtggctcttacggggttaacttttcccgcgatggcttctccgtgtccacaagaggtgat

SEQ ID NO: 51671 - DNA, 36 bp, synthetic construct
  source 1..36: mol_type = other DNA
gaggcaggaccacagaacatcagttttgggggttcc

SEQ ID NO: 51672 - DNA, 57 bp, synthetic construct
  source 1..57: mol_type = other DNA
atgaagcacattctgataatcatcggcgccaaggaagcccttgactacgctctcgat

SEQ ID NO: 51673 - DNA, 273 bp, synthetic construct
  source 1..273: mol_type = other DNA
accggcatgtttaacgggcataccagttctcctacggccacaaacgatagctcctctcacgacaatacctctactcaaactgtcaagccttctattgacaatgactcgtcgagtagtgccaagacagaatactgggcctccgccaaagcagagaagttccacacaccagattgcgaatgggcacagaagatcagcgaagcaaataagatcgtctaccattcccgagacgatgctgttgctgatggcaaagtgccttgcaccgcctgcaatcct

SEQ ID NO: 51674 - DNA, 51 bp, synthetic construct
  source 1..51: mol_type = other DNA
tcctacatgagctatgtcaattccatgtcatactacaactcctattattac

SEQ ID NO: 51675 - DNA, 30 bp, synthetic construct
  source 1..30: mol_type = other DNA
gcgggaccagggaacgtatcatttagtggg

SEQ ID NO: 51676 - DNA, 30 bp, synthetic construct
  source 1..30: mol_type = other DNA
cagtggatgcccatttcgcttggcattggc

SEQ ID NO: 51677 - DNA, 30 bp, synthetic construct
  source 1..30: mol_type = other DNA
gcaggccccgagaaggtttcattctctggg

SEQ ID NO: 51678 - DNA, 30 bp, synthetic construct
  source 1..30: mol_type = other DNA
cagtggatgccgatcagtttaggcattggc

SEQ ID NO: 51679 - DNA, 33 bp, synthetic construct
  source 1..33: mol_type = other DNA
ctcagcctgctcaatgtcagcatcgcactggcc

SEQ ID NO: 51680 - DNA, 39 bp, synthetic construct
  source 1..39: mol_type = other DNA
taccagacaggaccccagaacattagcttctctggtacc

SEQ ID NO: 51681 - DNA, 30 bp, synthetic construct; identical to SEQ ID NO: 51608
  source 1..30: mol_type = other DNA

SEQ ID NO: 51682 - DNA, 276 bp, synthetic construct
  source 1..276: mol_type = other DNA
gctactggcatgttcaatgatcatacctctagccctgccgtcaccaatgactcatcatcgtcggacaacgccagtacacagactgtgaagccttctatcgacaacgacagcagtagcagcgccaagaccgagtactgggcttctgccaaggccgagaagtttcacacaccagactgcgaatgggcccagaagatctccgatgctaataagattgtttaccattcccgtgacgatgcagtggccgacggcaaggtcccttgtactgcttgcaacccc

SEQ ID NO: 51683 - DNA, 51 bp, synthetic construct
  source 1..51: mol_type = other DNA
acctatgtagcttatgttgggtctatgtcgcgatactcctactattattac

SEQ ID NO: 51684 - DNA, 273 bp, synthetic construct
  source 1..273: mol_type = other DNA
accggaatgttcaacggacatgctagcggctccaccgcttcgcatgatagctccgtcaacgacaattctcccaaggaaactgtcaagccggtgtcagataataactcctctgcgagcgccaacactgagtattgggctagcgccaaagccgagaagttccatacacctgactgcgaatgggcacaaaagatttccgagagcaataagatcgtatatcattcacggtccgatgccatcgcggatgggaaagtgccctgcactgcctgtaacccc

SEQ ID NO: 51685 - DNA, 75 bp, synthetic construct
  source 1..75: mol_type = other DNA
ttcgggaacgtgctgggcgtgaccgacagcatgatctttgtcttcaacggagcccggttcgacttctcctttaat

SEQ ID NO: 51686 - DNA, 51 bp, synthetic construct
  source 1..51: mol_type = other DNA
tcccaaaaaagcctgcggaacctgactattggcaagtacaaaatcagccat

SEQ ID NO: 51687 - DNA, 39 bp, synthetic construct
  source 1..39: mol_type = other DNA
ctgcaggacgggccacagaacgtatcgttcaatggtacc

SEQ ID NO: 51688 - DNA, 30 bp, synthetic construct
  source 1..30: mol_type = other DNA
cagtggatgcccgtgaacctgggtatcggc

SEQ ID NO: 51689 - DNA, 39 bp, synthetic construct
  source 1..39: mol_type = other DNA
agccagatcgtggccgacctgaacacctccgatagcgtt

SEQ ID NO: 51690 - DNA, 39 bp, synthetic construct
  source 1..39: mol_type = other DNA
ctgcaggacggaccccagaacgtttctttttctggaaca

SEQ ID NO: 51691 - DNA, 30 bp, synthetic construct
  source 1..30: mol_type = other DNA
cagtggatgcccgtgaacctgggaatctcc

SEQ ID NO: 51692 - DNA, 42 bp, synthetic construct
  source 1..42: mol_type = other DNA
gttaaacccgagaatgcggtagccgaactgagcaagatcaac

SEQ ID NO: 51693 - DNA, 39 bp, synthetic construct
  source 1..39: mol_type = other DNA
ttccagcggggcccgcaaaacatcagctttgatggaacc

SEQ ID NO: 51694 - DNA, 30 bp, synthetic construct; identical to SEQ ID NO: 51576
  source 1..30: mol_type = other DNA

SEQ ID NO: 51695 - DNA, 45 bp, synthetic construct
  source 1..45: mol_type = other DNA
gtgaagcccgagaacgttctgaccgaactctctcgggttaacgtg

SEQ ID NO: 51696 - DNA, 60 bp, synthetic construct
  source 1..60: mol_type = other DNA
gagaccggcggcatcgatgaattagttaagtctatcattccctacatgcaagacagtaag

SEQ ID NO: 51697 - DNA, 36 bp, synthetic construct
  source 1..36: mol_type = other DNA
caggtcggaccacaaaacattagcttctctggaaca

SEQ ID NO: 51698 - DNA, 30 bp, synthetic construct; identical to SEQ ID NO: 51608
  source 1..30: mol_type = other DNA

SEQ ID NO: 51699 - DNA, 87 bp, synthetic construct
  source 1..87: mol_type = other DNA
atgaagctgaacatcgtggatagcctgtattacaccgtgattaccatcgccactgtcggctacggggacatctaccctctcactccc

SEQ ID NO: 51700 - DNA, 54 bp, synthetic construct
  source 1..54: mol_type = other DNA
atccccaagctgggcaacctcttctccaccgccgacattagcctctctgttgct

SEQ ID NO: 51701 - DNA, 60 bp, synthetic construct
  source 1..60: mol_type = other DNA
gagaacttcgacaagctcagcgatatcggttcgtttagcgcaattaaccacgctctgaac

SEQ ID NO: 51702 - DNA, 102 bp, synthetic construct
  source 1..102: mol_type = other DNA
tccttcggcatgtgggacgagattcttggcggaaagccacaccaaactctcctcgggatggtccgacctatccgaagcgatcatagatttcaggaacccgcc

SEQ ID NO: 51703 - DNA, 42 bp, synthetic construct
  source 1..42: mol_type = other DNA
aacaccgatatcgccaatacaactctcgagctgtccaagctg

SEQ ID NO: 51704 - DNA, 33 bp, synthetic construct
  source 1..33: mol_type = other DNA
gagaggggacctcagaacatccagttcgacggc

SEQ ID NO: 51705 - DNA, 30 bp, synthetic construct
  source 1..30: mol_type = other DNA
cagtggatgcccgtgaacctgggaatcggc

SEQ ID NO: 51706 - DNA, 36 bp, synthetic construct
  source 1..36: mol_type = other DNA
caggccggtccacaaaatataaacttctctggaacc

SEQ ID NO: 51707 - DNA, 30 bp, synthetic construct
  source 1..30: mol_type = other DNA
cactggatgcccatcaccctgggcattggg

SEQ ID NO: 51708 - DNA, 300 bp, synthetic construct
  source 1..300: mol_type = other DNA
agtaacttctccgcaaccgacgtgcagacagatgctgccgatgatgttaaggacacaggcggcaaaccaaacgtgaccgacgtcagcggagaccaggagtattacgtggtgcccgtggcccacctgaataaggtcaccgtgaatgggcaggacaggtccgacgcaatcagcggctctgcggtcggggttcaggccaacgtgatcgaccagggccaggtgactattaagcccggcgagattgtcatcgagactccacctggcgtcccgcctgaggttgccgttcaaaggcctgaagttaat

SEQ ID NO: 51709 - DNA, 42 bp, synthetic construct
  source 1..42: mol_type = other DNA
gtcaagcccagcaacgtcgtgttcgaactctccaagatcaat

SEQ ID NO: 51710 - DNA, 39 bp, synthetic construct
  source 1..39: mol_type = other DNA
atggactccagcgccatcaaccagctgctcgctaacgat

SEQ ID NO: 51711 - DNA, 66 bp, synthetic construct
  source 1..66: mol_type = other DNA
tttaactataacctgttcctgcctggggactacatcaacttcgccttcaatggctttgagttcaag

SEQ ID NO: 51712 - DNA, 42 bp, synthetic construct
  source 1..42: mol_type = other DNA
gccgggcccagcaacatcggagtggagattagcaagatcaat

SEQ ID NO: 51713 - DNA, 42 bp, synthetic construct
  source 1..42: mol_type = other DNA
gtcggaccttcaaacgttggcgtagagatgtccaagatcaac

SEQ ID NO: 51714 - DNA, 39 bp, synthetic construct
  source 1..39: mol_type = other DNA
ctggagcggggtccgcaaaatatacagcaggggtttacg

SEQ ID NO: 51715 - DNA, 30 bp, synthetic construct
  source 1..30: mol_type = other DNA
cagtggatgccaactgatatgggcattggg

SEQ ID NO: 51716 - DNA, 54 bp, synthetic construct
  source 1..54: mol_type = other DNA
cccggcctgtctgcattgcgcacgggtgacatcactaccttagcccaatcggcg

SEQ ID NO: 51717 - DNA, 78 bp, synthetic construct
  source 1..78: mol_type = other DNA
ttcttcaagggctggggtgccgaccccaacaccagcctgcaacaaccctgttctaacctacaaaatcttagtcttgaa

SEQ ID NO: 51718 - DNA, 42 bp, synthetic construct
  source 1..42: mol_type = other DNA
gtgaaaccgagcaacgttatgttcgagctgagcaaggtcaat

SEQ ID NO: 51719 - DNA, 36 bp, synthetic construct
  source 1..36: mol_type = other DNA
caggccggaccccaaaatataagtttcagcggaaca

SEQ ID NO: 51720 - DNA, 30 bp, synthetic construct
  source 1..30: mol_type = other DNA
aagtggatgccagtggacttgggaatcggc

SEQ ID NO: 51721 - DNA, 225 bp, synthetic construct
  source 1..225: mol_type = other DNA
gctgccttcaattccaccaatcactctagcactagtggcaggggctatagttcagtcgacgatttcatcaataacaatctgaggcctagcggagatgaggaggtggagtactcttattatccctctcgggaatacgacgttagctacaacgaagacaacgccagcgacttctggggcacaatcttcggcgaatcccagagattgagtggcgagaaccattctctg

SEQ ID NO: 51722 - DNA, 42 bp, synthetic construct
  source 1..42: mol_type = other DNA
gtgggaccgtccaacatctcggtcggactgagcaagatcaat

SEQ ID NO: 51723 - DNA, 30 bp, synthetic construct
  source 1..30: mol_type = other DNA
gatgtcggccccaccctgttcgatatcccc

SEQ ID NO: 51724 - DNA, 42 bp, synthetic construct
  source 1..42: mol_type = other DNA
gttaaacccagcaacgtggtctttgaactctccaaggtcaat

SEQ ID NO: 51725 - DNA, 45 bp, synthetic construct
  source 1..45: mol_type = other DNA
gtcaagcccgagaacgtggcctccgagatcagcaagaagaatgtc

SEQ ID NO: 51726 - DNA, 36 bp, synthetic construct
  source 1..36: mol_type = other DNA
caggccggccctcaaaacatcacattcaagggaacc

SEQ ID NO: 51727 - DNA, 30 bp, synthetic construct
  source 1..30: mol_type = other DNA
aagtggatgcccctggacttcgggattggc

SEQ ID NO: 51728 - DNA, 30 bp, synthetic construct
  source 1..30: mol_type = other DNA
gcccgggacctcaacaataagctgaagaac

SEQ ID NO: 51729 - DNA, 237 bp, synthetic construct
  source 1..237: mol_type = other DNA
tctatgatttacgacaccaactactgggccctcgtgatccggaatattgatagtggaaatggtttatatggactggatggctacttctacacacccgtctggggctatctgctggccctggaggaatggttcaacgacagtttcctgaatctgggcgagtccgcggttcgagtatcagaaatcgtctacttcgagaacggaaatcaccagaccacggctatgattacttccgttgct

SEQ ID NO: 51730 - DNA, 36 bp, synthetic construct
  source 1..36: mol_type = other DNA
cagagggggcctcagaacgtacacttcgacggagtg

SEQ ID NO: 51731 - DNA, 30 bp, synthetic construct; identical to SEQ ID NO: 51688
  source 1..30: mol_type = other DNA

SEQ ID NO: 51732 - DNA, 270 bp, synthetic construct
  source 1..270: mol_type = other DNA
atgtccaaggaaaaagtgaatatcaccatcaagaatagcaaggggaaaattgtcgtcaacaagaccgtgaaaaccaacgccaaggggcaggccaaagtcgacctgaatctgaagaagggaaagtacaacgtccgggccacctacgacggcaacgagaactatactggcaacagcacagccaggaacctcacaatcaaggagaaagtggtacaagctgcgctacaatcgagcaacagcgcaagtagttcgcaaaatagtgaaagagaggaa

SEQ ID NO: 51733 - DNA, 132 bp, synthetic construct
  source 1..132: mol_type = other DNA
tggaacccgggcgagcatgaggttggacgcagaagcataggcaatggtctagaacgcgttggctacgacgacggatatttccgggtcgtggaccaggatggaaatattgtcactcatggctggggaaacctg

SEQ ID NO: 51734 - DNA, 36 bp, synthetic construct
  source 1..36: mol_type = other DNA
cagggcggcccacataacgtgcattttagcggggag

SEQ ID NO: 51735 - DNA, 30 bp, synthetic construct
  source 1..30: mol_type = other DNA
cagtggatgcccatcaacatgggacttggc

SEQ ID NO: 51736 - DNA, 39 bp, synthetic construct
  source 1..39: mol_type = other DNA
cttgagcggggacctcagaatctccaattttcgggcact

SEQ ID NO: 51737 - DNA, 30 bp, synthetic construct; identical to SEQ ID NO: 51705
  source 1..30: mol_type = other DNA

SEQ ID NO: 51738 - DNA, 45 bp, synthetic construct
  source 1..45: mol_type = other DNA
ccctggctggcctacaattatctgggcaaacctgctgcaatggtc

SEQ ID NO: 51739 - DNA, 39 bp, synthetic construct
  source 1..39: mol_type = other DNA
tttcagagcggaccgcaaaatgtggtcttctccggatac

SEQ ID NO: 51740 - DNA, 30 bp, synthetic construct
  source 1..30: mol_type = other DNA
ggatggctgccactgaccttcggaatcggg

SEQ ID NO: 51741 - DNA, 39 bp, synthetic construct
  source 1..39: mol_type = other DNA
ttccagtccgggccccagaacgttgcgttttctggctat

SEQ ID NO: 51742 - DNA, 30 bp, synthetic construct
  source 1..30: mol_type = other DNA
ggttggctgcccctgaccttcggaatcggc

SEQ ID NO: 51743 - DNA, 30 bp, synthetic construct
  source 1..30: mol_type = other DNA
gaggcccgcgagatcaaccagaagttggaa

SEQ ID NO: 51744 - DNA, 33 bp, synthetic construct
  source 1..33: mol_type = other DNA
gcggcgggccctgaaaatgtttcgttctctggg

SEQ ID NO: 51745 - DNA, 30 bp, synthetic construct
  source 1..30: mol_type = other DNA
cagtggatgcccatatctttaggcattggc

SEQ ID NO: 51746 - DNA, 297 bp, synthetic construct
  source 1..297: mol_type = other DNA
agcaactttagcgcaaccgatgtgcaggccgacactgcggacgatatcgaggacgtgtccggcaagcctaatgtgaccgacgtgtctggcgaccaggaatactatgtcatgcctgttgctaacctgcacaaggtcacagtgaacggacaggatcggagcgacgccatcgtcgggtccgccgttggagtacaggccaaagttattgaccagggccaggtgactatcaagccaggagaaatcgtgattcagaccccacccggggtaccggccgaggtagctgttcaacgccctgaactt

SEQ ID NO: 51747 - DNA, 102 bp, synthetic construct
  source 1..102: mol_type = other DNA
ggccaaatggacctgaacgtccttctgaatcccatgaatacgactcagcttgaaaatctgacacaaaatgcttccgcaaactctaccaacatcttcggactg

SEQ ID NO: 51748 - DNA, 117 bp, synthetic construct
  source 1..117: mol_type = other DNA
ttcttccctctggattccctgctcaatatggtcaactctattagccttcccctgctcgacgtggtgacaggcaccaacgacccactgatctttatcggcgagttttattccacggac

SEQ ID NO: 51749 - DNA, 42 bp, synthetic construct
  source 1..42: mol_type = other DNA
tacatgatcgttggggccggcaacgtgcataccatctatgac

SEQ ID NO: 51750 - DNA, 54 bp, synthetic construct
  source 1..54: mol_type = other DNA
gtgccccggttctcctccgtactgggcaccgccgacctgtctatttctctctcc

SEQ ID NO: 51751 - DNA, 30 bp, synthetic construct
  source 1..30: mol_type = other DNA
agcaaccccaataatgtgaacttctctggc

SEQ ID NO: 51752 - DNA, 33 bp, synthetic construct
  source 1..33: mol_type = other DNA
cactggatgcccatcaatctcggaattaacccc

SEQ ID NO: 51753 - DNA, 63 bp, synthetic construct
  source 1..63: mol_type = other DNA
gtgatgtttcaatggtacgactacctgagcatgcagtacaagaacctgatagtcggcattgac

SEQ ID NO: 51754 - DNA, 42 bp, synthetic construct
  source 1..42: mol_type = other DNA
atcagcaacaccatctctgaggacgtttctcttctcacgggc

SEQ ID NO: 51755 - DNA, 30 bp, synthetic construct
  source 1..30: mol_type = other DNA
ctcgaatatggactaggggaagtgacatat

SEQ ID NO: 51756 - DNA, 78 bp, synthetic construct
  source 1..78: mol_type = other DNA
ttcggcagccacgtgctcgactactttgacttcattcccctgtccctcggcggtttccaattcgacctgatcttgggc

SEQ ID NO: 51757 - DNA, 36 bp, synthetic construct
  source 1..36: mol_type = other DNA
gtgaatacgacggccggcgccaatatcctgagcatt

SEQ ID NO: 51758 - DNA, 66 bp, synthetic construct
  source 1..66: mol_type = other DNA
ttcgggtccggagttctgtcatcattcgaccacctcgtcatgatattcaacggagtccacttctct

SEQ ID NO: 51759 - DNA, 87 bp, synthetic construct
  source 1..87: mol_type = other DNA
cttaagaacgacacactcgggatgaatctgatcacggccgggtcaatgagcgatggccggctgaagaagcagaagtctccattgagc

SEQ ID NO: 51760 - DNA, 39 bp, synthetic construct
  source 1..39: mol_type = other DNA
gacggcgtgttcaaggagatccctcctaccgaacagggc

SEQ ID NO: 51761 - DNA, 195 bp, synthetic construct
  source 1..195: mol_type = other DNA
agcctgagctttaatgagggccacaccgagaagcccgagttcgagaacgtcacggaggaaatgaccagtgacctgaaccagaccgaccaggtttattacgaccggtccgtggatgagatcgactacaacgagaacgacacatctattctcaacgtgaaccagcaatacgaatttaatcaaagccagtatcaacaa

SEQ ID NO: 51762 - DNA, 36 bp, synthetic construct
  source 1..36: mol_type = other DNA
ttctttgtgaaccctgttagtaaataccaagtctac

SEQ ID NO: 51763 - DNA, 42 bp, synthetic construct
  source 1..42: mol_type = other DNA
atcatcaatctgattaactataacggcgacaaactgctcgag

SEQ ID NO: 51764 - DNA, 231 bp, synthetic construct
  source 1..231: mol_type = other DNA
aaagtagtcgggtacaaaacggttcggaaatatgggtttataccacactatgggtggaagcttatgcctgtagtcagtaaaggagaagtacacttttcgcaatggaaatacgtcaagggagtttactataccctggggtggtacaaagtgaaggagccaatttataaagtgtactatatctctgatgaagccttaacgtccgcccccctgaaaaacgtgaagaagaccgcg

SEQ ID NO: 51765 - DNA, 39 bp, synthetic construct
  source 1..39: mol_type = other DNA
ctgcagagcgggccgcaggtcgtctccttctctggatac

SEQ ID NO: 51766 - DNA, 30 bp, synthetic construct
  source 1..30: mol_type = other DNA
acctggatgccactgaacctgggaatctca

SEQ ID NO: 51767 - DNA, 30 bp, synthetic construct
  source 1..30: mol_type = other DNA
gaggccaaggacatcaaccagaaactggaa

SEQ ID NO: 51768 - DNA, 297 bp, synthetic construct
  source 1..297: mol_type = other DNA
agcaacttctctgccaccgatgtgcaggcggatacagcggaggacatcgaggacgctggaggcaagcctaacgtcaccgacgtttccggagatcaggagtactatgtgatgccagtggccaacctgcacaaagtgaccgtgaatggccaggaccggagcgacgcaattgctgggtccgccgtcggggttcaggccaacgtgattgatcaggggcaggtcacaatcaagcccggcgagatcgtgatcgaaactccgcctggcgtctccgctgatgtcgccgttcaacgacctgaactc

SEQ ID NO: 51769 - DNA, 300 bp, synthetic construct
  source 1..300: mol_type = other DNA
tctcagaaccctatggaccagccgcaaaattacactcccgaccaaataagtgctaagcccaatagtcaatccggcaatagcgactattacctgctgccactcaacggactgcacaaggtcacagttaatggcgtggattactctgacgatattcggaacggcgcagtggccgtgcacacccgagtcatggatgagggccagatcaccatggacagtagcaccgggacaattacgattcaggcgccagaggatctccaagacatagccgtcaaggccccttcctctagtagcagttctaca

SEQ ID NO: 51770 - DNA, 30 bp, synthetic construct
  source 1..30: mol_type = other DNA
agcattgtgaataacaagatcacccttgcc

SEQ ID NO: 51771 - DNA, 42 bp, synthetic construct
  source 1..42: mol_type = other DNA
accaagcccgacaatgtgtcattcgagatggccaagatcaac

SEQ ID NO: 51772 - DNA, 42 bp, synthetic construct
  source 1..42: mol_type = other DNA
gtggagaacaacttcattgaggacgttatcctcatggataac

SEQ ID NO: 51773 - DNA, 72 bp, synthetic construct
  source 1..72: mol_type = other DNA
atcaaacccggtgtcggcataaatatcgctgctattagccagacatccaattcatttaagtgcttttcccag

SEQ ID NO: 51774 - DNA, 300 bp, synthetic construct
  source 1..300: mol_type = other DNA
atgattgtcgtgaacaacagcgactctgatgacgcagttgaggagtcttcggactccggtagcagctcatccaactctgggtcttcctctagttcctcggacgctgtcacctactcacaagcgcagtctatgtaccccgacacctcctctaacgtgatctccaacgccttcgacgaggccgatgctaataaggatggcttattgaccggaagcgagatcaacgagttcaagcggctggccaaactcgccatcaataccgcctccgagagcgacagcactacatataacgaacatggtagc

SEQ ID NO: 51775 - DNA, 57 bp, synthetic construct
  source 1..57: mol_type = other DNA
tattgcaaggccgaagggctggactctcgaaccgtaaagggcagcaccgagtacaac

SEQ ID NO: 51776 - DNA, 300 bp, synthetic construct
  source 1..300: mol_type = other DNA
agtagcttcgccggaactgccactgatgcgaactcgcatcaaacttctgacgcaaccgggaaacccaacgttaccgacacttccggcaactctgagtactatatcatccctgtcgacggactccagcacgtgattgtcaatggcaaggacatgagctacctgatacaagatgatgctatcgccattcacgcccgagttatagaccagggccagattaccgtgaacaacaaggacaagtccatcgagattacaactccgtctggcatgtccccaaaccaggccgttcgcaaacctaatcag

SEQ ID NO: 51777 - DNA, 36 bp, synthetic construct
  source 1..36: mol_type = other DNA
caggaaaccctgtacatggacttctatctggagaac

SEQ ID NO: 51778 - DNA, 54 bp, synthetic construct
  source 1..54: mol_type = other DNA
accgcctctatctggagcattttcaaggtcaagagttactacaactccccttat

SEQ ID NO: 51779 - DNA, 30 bp, synthetic construct
  source 1..30: mol_type = other DNA
aacaacgacaacaatcgggacatccagtac

SEQ ID NO: 51780 - DNA, 300 bp, synthetic construct
  source 1..300: mol_type = other DNA
tccaacttctccgctaccgatgtgcagacagacgctgccgacgacgtcaaggacacaggcggcaaacccaacgtgaccgacgtgtctggggatcaggagtactacgtgatgcctgtggccaacctgcacaaggtgaccgtcaacggacaggacaggagcgacgcaatcgccgggagcgccgtcggcgtgcaggccaatgtcatcgacgaaggtcaggtgaccattaagcctggcgagatcgtgattgaaactcctcctggggtccctcctgaggttgcagtacaacgtcctgagctcaac

SEQ ID NO: 51781 - DNA, 30 bp, synthetic construct
  source 1..30: mol_type = other DNA
tctcagatctccgtgcacgctagcttcgcc

SEQ ID NO: 51782 - DNA, 63 bp, synthetic construct
  source 1..63: mol_type = other DNA
ctgtactccgtggatcagaccgacagctacatcctgatctgggactatattgcccctaagttc

SEQ ID NO: 51783 - DNA, 39 bp, synthetic construct
  source 1..39: mol_type = other DNA
agctatatgagttacgtgtcccggatgagctactactac

SEQ ID NO: 51784 - DNA, 45 bp, synthetic construct
  source 1..45: mol_type = other DNA
attaacaaccaccagatctacggcaatggcctgaatccccatatc

SEQ ID NO: 51785 - DNA, 39 bp, synthetic construct
  source 1..39: mol_type = other DNA
gtgctttgggatttcggcgtctttgcgccaccgattcaa

SEQ ID NO: 51786 - DNA, 48 bp, synthetic construct
  source 1..48: mol_type = other DNA
cagggaactctgggcacctttagcggcttcttctccaccgagacaggc

SEQ ID NO: 51787 - DNA, 54 bp, synthetic construct
  source 1..54: mol_type = other DNA
atgcccggcatccacgccgagattagcaacggcttttccgtcgtgttccaaact

SEQ ID NO: 51788 - DNA, 48 bp, synthetic construct
  source 1..48: mol_type = other DNA
cagggatacatggggcagttctctggttttttcctgaccgagaacggc

SEQ ID NO: 51789 - DNA, 294 bp, synthetic construct
  source 1..294: mol_type = other DNA
aacttcagcgccaccgatgtacagaccgacgatagcaatccagcatccgaggctaccggcaaacctaacgtgacagatgtgtccggggaccaggaatattacgttgtccccgtggccggccttcacaaagtggttgtcaacggcaaagacaggtctgacgccatagcgggtagcgctgtcggcgtgcaggctaaggtcatggatcagggagaagtcaatataaagcccgggctgattgaaatcactactcctcctggcgtgccacctgaagtggcggtgcagcgcccggcattg

SEQ ID NO: 51790 - DNA, 297 bp, synthetic construct
  source 1..297: mol_type = other DNA
tcgaactttagtgctaccgacgtgcagaccgacgactctgatgtggcctctgaggccacaggcaagcccaacgtgaccgacgtgtccggggaccaggagtactacatcgtgcccgtggccaacctgcacaaagtgacagtcaacgggcaggaccggagcgacgccatctctggaggcgccgtcggcgtgcaggctaaggtcattgaccagggccaggtgtccattaagcctggggaaatcgtcatcactacgccaccggacataagcgtcgagaaggcagttcagagaccagaagtt

SEQ ID NO: 51791 - DNA, 48 bp, synthetic construct
  source 1..48: mol_type = other DNA
atcggcaccttcggagagttcaacggctttttcacaacggagaccggc

SEQ ID NO: 51792 - DNA, 30 bp, synthetic construct
  source 1..30: mol_type = other DNA
atggacatgaacatccctgccattcctgac

SEQ ID NO: 51793 - DNA, 297 bp, synthetic construct
  source 1..297: mol_type = other DNA
acatccaacttcgctgctgtggactctccttcaaatacagctaccgactccggaggaaccggcaagccaaacgtgaccgacaccagcggaaacgcagagtactacatcgtccctgtcgccaacctgcacaaggtgaccgtgaatggcgtggataggagcgacgccattagcggcagtgctgttggtgtccaggctaaggtcatggacgaaggacagatctctattaaacccggagaaattatcatcgtgacccctaacgggatcagcccgcaagacgcggtccagagacccaagact

SEQ ID NO: 51794 - DNA, 297 bp, synthetic construct
  source 1..297: mol_type = other DNA
tccaattttagtgctaccgatgtccagaccgacgactccaacgtggctgactccgccacggggaagcctaacgtgaccgacgtcagtggagaccaggagtactacgtggtgcccgtcgccaacctccacaaagtcaccgtcaacgggcaggataggtctgacgctatcgccggcggcgcagttggcgtacaggccaaagtaatagacgagggccaggttacaatcaagcccggggaagttgtgattacaacgccgcctggtgtccctcctgaggtcgctgtgcatcgacctgaactg

SEQ ID NO: 51795 - DNA, 297 bp, synthetic construct
  source 1..297: mol_type = other DNA
tccaacttctccgctacggaagtgcagaccgacgactctgatgtggctagcgacgccaccgggaagcctaacgtgacagacgtctctggggaccaggagtactacgtggtgccagtggcaaacctccacaaggtgactgtgaatggacaggataggagcgacgctatttccggaggagccgtcggcgtgcaggctaaggtcatcgatcagggcgaggtttcgatcaaacctggcgaggtcgtgatcactacgcccccggatgtacccgttgacaaggccgtgcataggcctgaactc

SEQ ID NO: 51796 - DNA, 297 bp, synthetic construct
  source 1..297: mol_type = other DNA
agcaacttctctgccaccgatgttcagaccgacgacgccgacgtggtggaggatgccagcggcaaaccaaacgtcactgatgtcagcggcgatgcagagtactacgtcatgcctgtggctaacctgcacaaggtcactgtgaatggccaggaccggtccgatgccattgccggctctgccgtcggcgttcaggcacgcgtgatcgacgagggccaggtgaccatcaaacccggggaaatcgtgatcacaacaccacctgggatttccgtggacatggcagtccagcgcccagaactt

SEQ ID NO: 51797 - DNA, 297 bp, synthetic construct
  source 1..297: mol_type = other DNA
agtaattttagtgctaccgacgtgcaggctgacactgccgaggatgtggaccaaggctccggcaagcccaatgtgacagacgtgtctggcgaccaggagtactacgtcatgcccgtcgccaacctgcacaaggtgaccgtcaacggacaggaccgcagcgatagcatcgctggctccgcggtcggggtccaggcccgggtcatcgatgaaggacaggtgactatcaagcctggcgagatcgtgattcagacaccaccgggcattagcgtggatcaagcagtccaaaggccagaagtc

SEQ ID NO: 51798 - DNA, 51 bp, synthetic construct
  source 1..51: mol_type = other DNA
cagggctatatgggaacctttagcggcttcttcgtgtcctccacaaacggc

SEQ ID NO: 51799 - DNA, 297 bp, synthetic construct
  source 1..297: mol_type = other DNA
tccaacttctccgctaccgatgtccaggctgacactgccgacgacctggatcagggaaccgggaaacccaacgtgacagacgtcagcggcgaccaggagtactatgtggtccctgtcgccaatctccacaaggttaccgtgaacggacaggatcggtcagacgctattgctgggtccgcggtcggcgtccaggcccgcgtgatcgacgaaggccaggttataatcaagccaggcgagattgtgatcgagactccaccgggcattagtgttgaccaagcagtacagcggccggaagtg

SEQ ID NO: 51800 - DNA, 57 bp, synthetic construct
  source 1..57: mol_type = other DNA
ctccctagccccgtctggtacaccggcgactcctctctggccttcgtgttcacacag

SEQ ID NO: 51801 - DNA, 45 bp, synthetic construct
  source 1..45: mol_type = other DNA
ggcgcatttgattccatcaccaacaacggactgggggctaataac

SEQ ID NO: 51802 - DNA, 297 bp, synthetic construct
  source 1..297: mol_type = other DNA
agcaacttctctgcaaccgacgtccaggccgacaccacatccgacgtcaaagacacaggaggcaaaccaaacgtgactgatgtctccgggacagaggagtactacatcgtgcccgtcgccaacctgcacaaggtgaccgtgaacggacaggaccgctctgacgccatttctggcggcgctgtcggcgtgcacgccaaggttatagacaacggccaagtgtctataaagcccggggaaattatcatcaatacccctcctgacgtgtccgtgaatgacgcagtccgtcggcctgagatc

SEQ ID NO: 51803 - DNA, 78 bp, synthetic construct
  source 1..78: mol_type = other DNA
tccttcttctctgatggaatggccagcttcctacaagattgtattggcatccggttcgagggtcatacatccgtacag

SEQ ID NO: 51804 - DNA, 33 bp, synthetic construct
  source 1..33: mol_type = other DNA
atgaaggagaacgaactcccttactatggcgtg

SEQ ID NO: 51805 - DNA, 297 bp, synthetic construct
  source 1..297: mol_type = other DNA
agcaatttctccgccacggatgtgcagactgacaccgctgatcaggtcgaggatgcatctggcaagcccaacgtcaccgatgtgtccggagatcaggagtactacgtcatgcctgttgctaacctgcacaaggtgaccgtgaacggccaggaccggagcgactctatcgctgggtccgccgtcggagtccaggccaacgtcattgaccaggggcaggtcgtcattaaacccggcgagatcgtgatcacaacgccgcccggagtcccgcccgaaaaggcagtacagcgacccgaactc

SEQ ID NO: 51806 - DNA, 297 bp, synthetic construct
  source 1..297: mol_type = other DNA
agcaatttctctgcaaccgacgtgcagaccgacgacgccgccgtcaccgacggggctacaggcaagcctaacgtgacagacgtctctggcgacagccagtactacgtggtccccgtcgccaacctgcacaaagtgactgtgaacggccaggacaggtccgatgccatctccggcggcgctgtcggagtggctgcccgcgtgattgatggcggccagattcagatcaagcccggcgagatcatcattacaacccctcctggagtcagcgtgcaggacgcggtacagaggcccaacata

SEQ ID NO: 51807 - DNA, 36 bp, synthetic construct
  source 1..36: mol_type = other DNA
tcctacatcgctagcaccttcggactgtctgatgcc

SEQ ID NO: 51808 - DNA, 297 bp, synthetic construct
  source 1..297: mol_type = other DNA
tctaacttctccgcggacgtgcagaccgatgccaccgatgatgtgacccaaaacgcgtccggcaaacctaacgtgactgacgtcagcggagaccaggagtactacgtggtgcctgtggctggcctccacaaggtcaccgtcaacggccaagatcggagcgatgccatcgccggctctgccgtcggagtgcaggccaaggtggtcgaccagggcgaaatcaagattaaacctgggctggtcgagattacaactcctcctggcgtaccacctgaagtggcagtgcagaggccagagatc

SEQ ID NO: 51809 - DNA, 294 bp, synthetic construct
  source 1..294: mol_type = other DNA
tctaacttctccgccgacgtgcagactgacgccaccgacgccgctgaggaagcaagcggcaagccaaacgtgacagacgttagtggtgaccaggaatactatgtggtgcccgttgccggcctgaacaaggtgacggtcaacgggcaggataggtccgacgccatcgctggcggcgccgtcggagtgcaggctaaggtcattgaccagggcgaaatcaagatcaagcccggactcatcgagattaccacccctcctggcgtgccacctgaggtggctgtcaaacgaccagaactc

SEQ ID NO: 51810 - DNA, 48 bp, synthetic construct
  source 1..48: mol_type = other DNA
atcggcaccctgggcgagttctccggatactttagtacacaggttggg

SEQ ID NO: 51811 - DNA, 57 bp, synthetic construct
  source 1..57: mol_type = other DNA
agttctcaaaaatcactcaaggacctgaagattggcaactacaaaatcagccatctg

SEQ ID NO: 51812 - DNA, 33 bp, synthetic construct
  source 1..33: mol_type = other DNA
atgagcatgaacattcctacgccaccaatagac

SEQ ID NO: 51813 - DNA, 291 bp, synthetic construct
  source 1..291: mol_type = other DNA
agcaacttctctgccgtggatacccctacgcaagcaactgactccggtgctactggcaagccgaacgtgaccgacgtttcgggggacgcagaatactacgtcgtgcccgtggccaatcttcataaagtaaccgtcaatggagttgaccgttccgacgcaattgccggtggagccgttggggtgcaggctaaagtcatcgatgagggacaaatcagtatcaagcctggagagattatcatcactaccccgaatggaatatcgcccgataaggcagtccagaggccccggatg

SEQ ID NO: 51814 - DNA, 57 bp, synthetic construct
  source 1..57: mol_type = other DNA
gatgcctggggcgagggcattatcgaccttttaactggtttcgaaaacaccagcaag

SEQ ID NO: 51815 - DNA, 54 bp, synthetic construct
  source 1..54: mol_type = other DNA
ttcgaaggatacctgggcacctttaaggaaggctttttcaccacggagactgga

SEQ ID NO: 51816 - DNA, 45 bp, synthetic construct
  source 1..45: mol_type = other DNA
aaagccaacaataagaagaccttcaagggcaagctggctgtgaaa

SEQ ID NO: 51817 - DNA, 291 bp, synthetic construct
  source 1..291: mol_type = other DNA
tctaacttttctgcggttgacagtcccacacaagccaccgatggaggcgcgacaggcaaaccgaatgtcaccgatacctccggcaacgccgaatattatattgtcccggttgccaaccttcacaaggtaacagtcaatggagtggacaagtcaaatgctatctccgggagcgcagttggagttcaggcacgcgtgatggacgagggccaggtcaccatcaagcccggcgagatcgttatcgtcactcccgacgggatttctcccgacaaagccgtgcaacgtccaaagaca

SEQ ID NO: 51818 - DNA, 45 bp, synthetic construct
  source 1..45: mol_type = other DNA
ggatatctgggcgccttcgacgggtactttctgaccgagaacggc

SEQ ID NO: 51819 - DNA, 54 bp, synthetic construct
  source 1..54: mol_type = other DNA
atgaacgtggtggacttcgtgatgatcatgtctaccctggactacgatgaatgg

SEQ ID NO: 51820 - DNA, 69 bp, synthetic construct
  source 1..69: mol_type = other DNA
ttcgccaggacccctcggcctcttagatccggcatgaattgcaccgttggcgagggctacacaactctg

SEQ ID NO: 51821 - DNA, 33 bp, synthetic construct
  source 1..33: mol_type = other DNA
atggacgtttctagcttcctgaccaacatgccc

SEQ ID NO: 51822 - DNA, 39 bp, synthetic construct
  source 1..39: mol_type = other DNA
ggatacctgggcgagttcaccgggtttttcgagagcatc

SEQ ID NO: 51823 - DNA, 108 bp, synthetic construct
  source 1..108: mol_type = other DNA
ttcatcaaggacatccccacaagctttgtgaacgccaatcagatgccttccctcgagcacctgttcggcaccgattggatgggtcgcgacatgtttcaacgcactatc

SEQ ID NO: 51824 - DNA, 60 bp, synthetic construct
  source 1..60: mol_type = other DNA
cgatgttgtcatggatgcaggttcaactcgctggactcttcttgcaaagggttcaagatc

SEQ ID NO: 51825 - DNA, 48 bp, synthetic construct
  source 1..48: mol_type = other DNA
cagggcacattcggagagttcagcggctttttctccaccccaactggc

SEQ ID NO: 51826 - DNA, 291 bp, synthetic construct
  source 1..291: mol_type = other DNA
tctaatttctctgccgtggatgctcctatggacgccactgattctggagcaacaggcaagcctaatgtgacggatacgtccggaaacgccgaatattacatcgtcccggtagcaaacctgcacaaagtgactgtcaacggggttgatcggagtgatgccatctccggaggggctgtcggtgtccaggctaaagtgatggatgaggggcaaatcagcattaagcccggggaaataatcatcaacacccctaacggcatatctcccgaccaagcggtgcaaaggcccaaagtg

SEQ ID NO: 51827 - DNA, 291 bp, synthetic construct
  source 1..291: mol_type = other DNA
agccaacacccggtggaaaaaatgccggacgaatatacacaagaccagatctccgcgaagccgaccagccagcagggcgacagcgaatattatctgctcccattgaacggcctgaaaaaggtcaccgtgaacgggcaggacaggagcagcgacataagacagggcagtatcgccgtacatacccgagtgatggacgagggccagatcctcatggacagcagcacaggcaccatcactattactgccccggacgaccttgtggacgtcgccgtaaaggcgccagtcatcggt

SEQ ID NO: 51828 - DNA, 30 bp, synthetic construct
  source 1..30: mol_type = other DNA
atggagatgacaattcctaccatccctgac

SEQ ID NO: 51829 - DNA, 45 bp, synthetic construct
  source 1..45: mol_type = other DNA
ggctacatggggcagttcgacgggtttttcctcacgcaaaacaat

SEQ ID NO: 51830 - DNA, 177 bp, synthetic construct
  source 1..177: mol_type = other DNA
agcctcagcttcgacaacgatgactcgtcgcaaccacactacgagaacgtcaccaaggaaatgacagagaacgtgtccgctaacgaggtgacctatgacaaggccgtggacggcaaggactacaacgagaatgggacgtcgcaacttgatatgcagtacatccaatcgaaggagaaa

SEQ ID NO: 51831 - DNA, 33 bp, synthetic construct
  source 1..33: mol_type = other DNA
gggccccagatgggcattgagcctctgttcacc

SEQ ID NO: 51832 - DNA, 51 bp, synthetic construct
  source 1..51: mol_type = other DNA
ttctcctacatggcctacgtcaattccatgcgctactacaactattattac

SEQ ID NO: 51833 - DNA, 162 bp, synthetic construct
  source 1..162: mol_type = other DNA
gtgatgggtggcatttctaccgccgtggatacatacgctccggactactctggagacgagcactttcatcaagaagtatacgactattttcaaaagttagagaccattgagggacaggactccatcgtggtcgacactgccgacatccaaaaccagatcatc

SEQ ID NO: 51834 - DNA, 36 bp, synthetic construct
  source 1..36: mol_type = other DNA
ttcatcaacccctacggcacttttcaaccgtacaat

SEQ ID NO: 51835 - DNA, 198 bp, synthetic construct
  source 1..198: mol_type = other DNA
ctgagcttcgacgacggcacagaggatgtcaagaacgaaacccactatgagaatgtgactgtggagatgaccaccaacctcaacaagtctaagggcgtcgtgttcgacgagtccgaccgcgtcgacttcaatcaaaataaaactagtcagatcctggacgtggagaagaatccctactacaataacacaaaccctgac

SEQ ID NO: 51836 - DNA, 294 bp, synthetic construct
  source 1..294: mol_type = other DNA
tcatcatttggggcagccgctgtcaatggcaacgacacaggaacagggaccggcaaaccgaacatgaccgatagcacaggcgacgccgaatactacatgattcccgttgccggcctgcaaaaagtgactgtcaatggagttgacatgtcctccgagatacgaggcaacgcaattggggtgcacgcaaacgtgctggaccaaggcgacgtccaaattaagacaaaggagcacgccattatcatacaagccccgcccgggatgaccccgcaacaagccgttcatagcccagaacca

SEQ ID NO: 51837 - DNA, 249 bp, synthetic construct
  source 1..249: mol_type = other DNA
tctggaatgttctcgtccgataattccactaccgacgtggaggctcagtccgagacagtcgaccctatatcggaagacgacgatacaaccaccgagcccaccgagtattgggcctccgctaaggctgagaagtttcacctgcctacctgcgaatgggcagagaagatcagcgaggataacaagattatataccaaagccgagaggatgccattgccgacggcaaggtgccttgtggcgcatgcaatccc

SEQ ID NO: 51838 - DNA, 288 bp, synthetic construct
  source 1..288: mol_type = other DNA
actttcggtgctgcggctgtcactggagacgacaccggcaccggcaccgggaagccaaatatgaccgacacaaccggcgacgccgagtactatctgctgcccgtcgctgggctccagaaggtggttgtgaatggcgtcgatatgagtagtgaaattcggggcaacgccattggagttcatgctcgggtgctggaccagggcgacgtgcagatcaagacatctgagcacgccatttatattcaagccccaagcgggatgagcccccaagaggccgtacactcgccggag

SEQ ID NO: 51839 - DNA, 87 bp, synthetic construct
  source 1..87: mol_type = other DNA
ctggtggccggagctgattccatcaccgatgccatcttagatcaagctgatatcagccgggatgacgctgagggcgcactggaaatc

SEQ ID NO: 51840 - DNA, 90 bp, synthetic construct
  source 1..90: mol_type = other DNA
ctccttgtggccggggccgactccattaccgacgccatcctggatcaggcagacatcagccgagatgacgctgagggcgctttggagatt

SEQ ID NO: 51841 - DNA, 36 bp, synthetic construct
  source 1..36: mol_type = other DNA
aagatgcccagcgttactggctcctgctctcatcct

SEQ ID NO: 51842 - DNA, 33 bp, synthetic construct
  source 1..33: mol_type = other DNA
ttcatgaatccttattctgtatatacggtctac

SEQ ID NO: 51843 - DNA, 30 bp, synthetic construct
  source 1..30: mol_type = other DNA
ctgggctacagcctgcccaagtccttgcag

SEQ ID NO: 51844 - DNA, 60 bp, synthetic construct
  source 1..60: mol_type = other DNA
tgggcacctgctcccgagttctttaccaactccgaagcctatgccatcgttcttggtagc

SEQ ID NO: 51845 - DNA, 180 bp, synthetic construct
  source 1..180: mol_type = other DNA
gtgtctctgagtttcgacgacgggaacgatggacagcctcatttcgagaatgtgaccgaggagatgaccaagaatatcaccgccaacgaagttatatacgataaagaggtcgacggcatcgactacaacgagaatggcagctccctcattgacacccagtatatcaaggagaacgaaacg

SEQ ID NO: 51846 - DNA, 39 bp, synthetic construct
  source 1..39: mol_type = other DNA
ctgatcatgaacccctacgattctagtgccgtgtatcaa

SEQ ID NO: 51847 - DNA, 279 bp, synthetic construct
  source 1..279: mol_type = other DNA
ggcatctctatgggattcaacggggacaatcagaccaatatcacccaaaataacacaacccacctgcccgtcgacgtgacacacaacattagcctatatgagaaccggtccatcgacaacttcgacgagagtggcttgaaccaagatacagtggtggagtacaccgcctctaacaatacagacgacacttattattctgattatgacgacagcagctatcaagaatatcagactgacgattactcatatcaagattccggctctgattattaccaatac

SEQ ID NO: 51848 - DNA, 42 bp, synthetic construct
  source 1..42: mol_type = other DNA
ggatacatggggcagttcgacgggttttttctgaccgaaacc

SEQ ID NO: 51849 - DNA, 33 bp, synthetic construct
  source 1..33: mol_type = other DNA
ctgttcgtgaacccctacaacatgtacaccatc

SEQ ID NO: 51850 - DNA, 42 bp, synthetic construct
  source 1..42: mol_type = other DNA
ggctacatgggaaagttcgacgggttcttcgccactgagacg

SEQ ID NO: 51851 - DNA, 39 bp, synthetic construct
  source 1..39: mol_type = other DNA
gtgcccaagatcttcaaccctgtcctggccgactacacg

SEQ ID NO: 51852 - DNA, 69 bp, synthetic construct
  source 1..69: mol_type = other DNA
aacgctatttacggctggaacttcataatgcagatagcaaatggcggctatgaagtgctgaacacagag

SEQ ID NO: 51853 - DNA, 72 bp, synthetic construct
  source 1..72: mol_type = other DNA
ggcattcccttctttaatacattcttcaagtcccacatcatgggcaacgaggtttgcatcactatccatatt

SEQ ID NO: 51854 - DNA, 33 bp, synthetic construct
  source 1..33: mol_type = other DNA
gtggccagcctgggcgaatccgcgatctctggc

SEQ ID NO: 51855 - DNA, 60 bp, synthetic construct
  source 1..60: mol_type = other DNA
accctgatcaacgtagtgttcggccaaattgaagctgacgtctggcacaatgctgaactg

SEQ ID NO: 51856 - DNA, 33 bp, synthetic construct
  source 1..33: mol_type = other DNA
gcaggccccgagaacatcagcttctctggaaca

SEQ ID NO: 51857 - DNA, 36 bp, synthetic construct
  source 1..36: mol_type = other DNA
atcattaacccatatgggtcatttcaaatctatacc

SEQ ID NO: 51858 - DNA, 180 bp, synthetic construct
  source 1..180: mol_type = other DNA
gtcagtctgtctttcgaggataaccacgtggatgaaggccctcactttgtgaacgtcaccaaggagatgactagcgatctcaacgacaccgaggacgtgtattacgacaagtccgctgatgccattgactacaatcagaatcagacacagttcgacatccctcacggcaacaccactcag

SEQ ID NO: 51859 - DNA, 90 bp, synthetic construct
  source 1..90: mol_type = other DNA
aacatttgcctgaaatacgggctcgagaaccctaccgtgaatattgactcatcgatcgggccagatcagatccccgttattgtttatgtc

SEQ ID NO: 51860 - DNA, 84 bp, synthetic construct
  source 1..84: mol_type = other DNA
aacaaggaggtcacctacgagtacattgacggctatatttatgaaaccaagggcatcactacctgggtggacattagcgacatc

SEQ ID NO: 51861 - DNA, 36 bp, synthetic construct
  source 1..36: mol_type = other DNA
tttatcaacccctacggccaatttcaagtttacatg

SEQ ID NO: 51862 - DNA, 33 bp, synthetic construct
  source 1..33: mol_type = other DNA
cgcaccctggagataagcttcatcgctttgcct

SEQ ID NO: 51863 - DNA, 48 bp, synthetic construct
  source 1..48: mol_type = other DNA
tttaaacaaagtcagtgcccctgcatctgctcttcctctctgaacaac

SEQ ID NO: 51864 - DNA, 222 bp, synthetic construct
  source 1..222: mol_type = other DNA
tggaacatgcagagcgtcctgttcaatgatcagttaactcaagagcagaaggagaaagtcatggaagccatgaaccaggaggtgactgaagtgcaggaaggccagatactgaacgagactccagacaccagcaaccaaaccggacaaggctacaccgagatggggaaagtttataaggaccctagcactggcaaacttatcatggtgcagaacaagacaaac

SEQ ID NO: 51865 - DNA, 36 bp, synthetic construct
  source 1..36: mol_type = other DNA
tgcttcggctacaagagcgtgtccgggatctatccc

SEQ ID NO: 51866 - DNA, 48 bp, synthetic construct
  source 1..48: mol_type = other DNA
ctgaacttctgcaatatcgatgcgccagtgtacaaggaggctgttgac

SEQ ID NO: 51867 - DNA, 42 bp, synthetic construct
  source 1..42: mol_type = other DNA
ctgaccattaaccccaccgaaatcagctccgcctactacgtg

SEQ ID NO: 51868 - DNA, 51 bp, synthetic construct
  source 1..51: mol_type = other DNA
tcccgcgagagttggaagtccatcaaaattggcaacttctctatgagccat

SEQ ID NO: 51869 - DNA, 33 bp, synthetic construct
  source 1..33: mol_type = other DNA
ctgatcgagagcggaggtgcacagggaaacagc

SEQ ID NO: 51870 - DNA, 51 bp, synthetic construct
  source 1..51: mol_type = other DNA
tccagggaaagttggaagagcatcaaggtcggcaacttttcaatgtctcat

SEQ ID NO: 51871 - DNA, 36 bp, synthetic construct
  source 1..36: mol_type = other DNA
atcattaacccggcggacgtcggttccgtttaccgc

SEQ ID NO: 51872 - DNA, 51 bp, synthetic construct
  source 1..51: mol_type = other DNA
tccattaattctcttaagaacctgactatcggcaaatacaaaattagccac

SEQ ID NO: 51873 - DNA, 201 bp, synthetic construct
  source 1..201: mol_type = other DNA
atgcataactacaaatccaaaaacaataaaattaattacaactatatcgtgaatgagaagcataacctcgttggcacgggaaatatcgacgccgactacaattggtggggcaagaataagctgttcaaggtcagcaaatccttcaagataaagaagttcgtggtcatgtatctgaacgcgccccacaaactgtccatacct

SEQ ID NO: 51874 - DNA, 153 bp, synthetic construct
  source 1..153: mol_type = other DNA
accaggcactacttcaacgattacatcaagacaaacaagagcaacattaagcacaacaatctgaaaaccaagatcaaggccattaagaagcggaactcctacgagctcaagattgtctgcgacggccagactctggtcaagaactattattat

SEQ ID NO: 51875 - DNA, 180 bp, synthetic construct
  source 1..180: mol_type = other DNA
ttctggaacctcgattccggtagccaggacgacgggcctcattggatcaacgtgactgaagaaatgactaccaacctgaacgaaaccgagccagtgtattacgatgccagcgtggacgacgtggactacaactcgaatcagacgctcaccgagctgaacgtcacaaccgagccttcctat

SEQ ID NO: 51876 - DNA, 51 bp, synthetic construct
  source 1..51: mol_type = other DNA
tcccttaaatctttcaaaagcctcagaattggaaaccacgagatcagtcat

SEQ ID NO: 51877 - DNA, 63 bp, synthetic construct
  source 1..63: mol_type = other DNA
gaactggaggatatgctgctcgaccttcccaacaccatgaacatgctgatcagccataaccac

SEQ ID NO: 51878 - DNA, 30 bp, synthetic construct
  source 1..30: mol_type = other DNA
atcggctccaagaacatttatagcgtgtac

SEQ ID NO: 51879 - DNA, 30 bp, synthetic construct
  source 1..30: mol_type = other DNA
gtgcccacaatcgcctttacccctttcaac

SEQ ID NO: 51880 - DNA, 54 bp, synthetic construct
  source 1..54: mol_type = other DNA
tcgtcgcaaaagagcctccggaacctgaccatcggcaagtacaagatgtcacac

SEQ ID NO: 51881 - DNA, 33 bp, synthetic construct
  source 1..33: mol_type = other DNA
atcctgggccccaagaacgtctactctgtgtat

SEQ ID NO: 51882 - DNA, 285 bp, synthetic construct
  source 1..285: mol_type = other DNA
tcaaacttctcggcgaccgatatgccaagcgacgctaccgacgtcggaactggcaaacccaatgtgacagacgtcagcggagactctgagtactacatcgtccccgtggccaacctgcacaaggtcaccgtgaacggcgtcgaccgctccgacgccattagtaattctgccatcggcgtgcaggctcgagtgatagatgaaggccaggtctccatcaagcccggagaaattatcattaccacacctaacggggtatcggtccaagacgccgttagatcaccagca

SEQ ID NO: 51883 - DNA, 51 bp, synthetic construct
  source 1..51: mol_type = other DNA
tctcagaagtcccttaaacacatgacgatcggtggctacaaaatgagccac

SEQ ID NO: 51884 - DNA, 36 bp, synthetic construct
  source 1..36: mol_type = other DNA
ggcctgctcgggcccaagaacgtgtatcaggcatac

SEQ ID NO: 51885 - DNA, 30 bp, synthetic construct
  source 1..30: mol_type = other DNA
aacctgatcaaccccaaggacgccaatcag

SEQ ID NO: 51886 - DNA, 45 bp, synthetic construct
  source 1..45: mol_type = other DNA
tcccttatcgtcggccccgtggatattatggggggttactatgtt

SEQ ID NO: 51887 - DNA, 48 bp, synthetic construct
  source 1..48: mol_type = other DNA
atcaaaaccctgcgggatatcaagattggcaactacgacatgagccac

SEQ ID NO: 51888 - DNA, 30 bp, synthetic construct
  source 1..30: mol_type = other DNA
acccggggccctatgctgttcgacatgccc

SEQ ID NO: 51889 - DNA, 42 bp, synthetic construct
  source 1..42: mol_type = other DNA
tacagcatcatgggccccaagaacgtgtatcaagtttaccaa

SEQ ID NO: 51890 - DNA, 54 bp, synthetic construct
  source 1..54: mol_type = other DNA
gccagccagaagtccctgaaagacctcaagatcggcaacaggaagattagtagc

SEQ ID NO: 51891 - DNA, 36 bp, synthetic construct
  source 1..36: mol_type = other DNA
cggctagttggaccgaagaacgtctattctgtatat

SEQ ID NO: 51892 - DNA, 39 bp, synthetic construct
  source 1..39: mol_type = other DNA
ttcaatatggtcggtgcaaagaacgtgtatagcgtctac

SEQ ID NO: 51893 - DNA, 30 bp, synthetic construct
  source 1..30: mol_type = other DNA
ttctactccaccacctacaacatctcctct

SEQ ID NO: 51894 - DNA, 39 bp, synthetic construct
  source 1..39: mol_type = other DNA
tacgggctggtcggcgccaagaacgtatatggggtctat

SEQ ID NO: 51895 - DNA, 87 bp, synthetic construct
  source 1..87: mol_type = other DNA
atgaagctgaacatacttgattccttatactacactgtcatcacaatcgccactgttggctacggggatatccatcctctcactcct

SEQ ID NO: 51896 - DNA, 39 bp, synthetic construct
  source 1..39: mol_type = other DNA
tacgggattctgggccccaagaacgtgtatcagatctac

SEQ ID NO: 51897 - DNA, 39 bp, synthetic construct
  source 1..39: mol_type = other DNA
ttcggcaatatttacgggcttgggaacataacgttgggc

SEQ ID NO: 51898 - DNA, 57 bp, synthetic construct
  source 1..57: mol_type = other DNA
gccttccccgacaacaatccaaccaagctgctcaacatgattcctatcggcaacctg

SEQ ID NO: 51899 - DNA, 66 bp, synthetic construct
  source 1..66: mol_type = other DNA
aaactgccctcggtaaccggctcctgttctcacccttgtggtaacgggcttggtgctgctctcttc

SEQ ID NO: 51900 - DNA, 96 bp, synthetic construct
  source 1..96: mol_type = other DNA
ttcgacaccagctttaattcaattctggataccgtctggttcatcgtggtgacagccagtaccgtcggctatggcgatatgacccctaacactcct

SEQ ID NO: 51901 - DNA, 51 bp, synthetic construct
  source 1..51: mol_type = other DNA
tcttacagccactcactggaatcgttacaacgatgtagtttcgtcgaatgg

SEQ ID NO: 51902 - DNA, 36 bp, synthetic construct
  source 1..36: mol_type = other DNA
atcgtcggcgccgggaacgtgcacacaatctacgac

SEQ ID NO: 51903 - DNA, 69 bp, synthetic construct
  source 1..69: mol_type = other DNA
atggcctacggctggaataccatttttcaactaatgacacagggctacgaggcgcttaactctgaagcc

SEQ ID NO: 51904 - DNA, 210 bp, synthetic construct
  source 1..210: mol_type = other DNA
atgggactgagcgacaactccctctacgtctccaaggagaagctgcaggagattactggcaaggaccaccttacgcaaattctaatcaagacaaacgagaatgtcaacgataccaagatcgccgacgagatcgaggataaatatggagaagacctacttaccttcacaaccgaggagcaggtgcagatgatgagccaaatcactagcatc

SEQ ID NO: 51905 - DNA, 276 bp, synthetic construct
  source 1..276: mol_type = other DNA
tcaatgcaatcagccgatatcaatgactccgatagcggaaagccggtccaatcggagtccagcgggccctctgagtattacctgatccccgtggctggcctgactcacgtgaccgtcaacggagtcgaccggtctcatctcattaagaactccagcatcaccgtgcacacaaccgtgattgacgccggcgagatcatcatccaacctaaaaagggcacaattatcatcaccactcccaagggaatcgacattgagaaagccgttaagatgcctgcc

SEQ ID NO: 51906 - DNA, 48 bp, synthetic construct
  source 1..48: mol_type = other DNA
ttcaacggcaccctcggaactctgaccgggttcttcgccactgaactt

SEQ ID NO: 51907 - DNA, 42 bp, synthetic construct
  source 1..42: mol_type = other DNA
attcttcacgtgatgaagatcaccaaagcagcacagttcagt

SEQ ID NO: 51908 - DNA, 33 bp, synthetic construct
  source 1..33: mol_type = other DNA
ggtttgcactcaacgtcctctaccgtggaactg

SEQ ID NO: 51909 - DNA, 162 bp, synthetic construct
  source 1..162: mol_type = other DNA
gtgatgggtggcatttccactgctgtggatacatacgcacccgactactctggcgacgagcagttccatcaagccgtttacgactacttccaaaaactggacaccatcgagggccaggatagcatcgtggtcaacaccgccgacatcataaaccagaatatt

SEQ ID NO: 51910 - DNA, 225 bp, synthetic construct
  source 1..225: mol_type = other DNA
tttctgctgaaccagactcagaccgtgaaggtggacaacgtggagttcgaaatccctgccgactatgtatcggagcccctgagaaccgacgtgaactacgatgggaacatcaaatcatccgctatgggttggtctaataaggataactacattgagatcggcggatgcggattcggccggaacacatatcaggacgtcaggatctaccgcctcctcttcggtatc

SEQ ID NO: 51911 - DNA, 87 bp, synthetic construct
  source 1..87: mol_type = other DNA
ggatacaaggccaacggcatcacctacatttttctgcaaaatatggaggtcaactcatttctggggcagtcttcctatccattgccc

SEQ ID NO: 51912 - DNA, 87 bp, synthetic construct
  source 1..87: mol_type = other DNA
aaccagttatctcaagttcacgccatttctggcattgctcaaattaatctcaataccttcattaactcccttggttatattgcgtat

SEQ ID NO: 51913 - DNA, 33 bp, synthetic construct
  source 1..33: mol_type = other DNA
ttcatgctgaaatacctactgcccgctaagcag

SEQ ID NO: 51914 - DNA, 39 bp, synthetic construct
  source 1..39: mol_type = other DNA
ttcattctgagcaacgggtttgcctacggcatcttctcc

SEQ ID NO: 51915 - DNA, 51 bp, synthetic construct
  source 1..51: mol_type = other DNA
gtgtattacgccgagggcggcctctatgccattgccgtgcaacagatatac

SEQ ID NO: 51916 - DNA, 63 bp, synthetic construct
  source 1..63: mol_type = other DNA
accatctattttgcgtcgttttccaatttctatggcctctctaacctgtcttcctccttgtca

SEQ ID NO: 51917 - DNA, 90 bp, synthetic construct
  source 1..90: mol_type = other DNA
gggtacaaggagggaggcgtggtccccatcttcctccctggcatggactccaactggtttgccctgaatagcgcttatcctcttccacag

SEQ ID NO: 51918 - DNA, 54 bp, synthetic construct
  source 1..54: mol_type = other DNA
tctttcgctgcctatggcaatagctatgggctgggcaacatcaacattagtcca

SEQ ID NO: 51919 - DNA, 90 bp, synthetic construct
  source 1..90: mol_type = other DNA
ggatacaaaagcggcggcgtgatcccaatcctgctgcctgggatgaacattaagtggttcgctaacaattccgcctatcctttgccacag

SEQ ID NO: 51920 - DNA, 90 bp, synthetic construct
  source 1..90: mol_type = other DNA
ggctacaaggctggcggcatcgtgcccattctgacacccgatatggaccctacctggttcgcatcacacgccagctatccactcccatac

SEQ ID NO: 51921 - DNA, 54 bp, synthetic construct
  source 1..54: mol_type = other DNA
ctgggccgcgagaaccttctgctttccggattctggtactatctcttccttgga

SEQ ID NO: 51922 - DNA, 81 bp, synthetic construct
  source 1..81: mol_type = other DNA
accacaatcggcgggagctttctgggcatcttcggcggactgactgggtttaccattagcgggatctcttcaatattcctc

SEQ ID NO: 51923 - DNA, 180 bp, synthetic construct
  source 1..180: mol_type = other DNA
atgggcaccttcaaccaccagaaccctagcaatacaaactccagcttcgatgacttcatcaacaataacctggcgagttcatccgaagacagcgaggaggtggagtactattacccaagtaccgactacgacgtccccaagaacaacaatgactccaaactgcaggatatctctaagctg

SEQ ID NO: 51924 - DNA, 54 bp, synthetic construct
  source 1..54: mol_type = other DNA
gaaaaggcctgggagtcttcctccgagaaattttttgctgtgccaagcatcagc

SEQ ID NO: 51925 - DNA, 57 bp, synthetic construct
  source 1..57: mol_type = other DNA
ttctttgcgagctatggcaatgccctcggcctggctaacgtgtccatcggacctttc

SEQ ID NO: 51926 - DNA, 81 bp, synthetic construct
  source 1..81: mol_type = other DNA
atgtttgaccttatgctgaacgccatttctttcgcctcatacggcaatttttacgggctctctaacatagcaatcagttcc

SEQ ID NO: 51927 - DNA, 57 bp, synthetic construct
  source 1..57: mol_type = other DNA
cagttcggcatcgtcggcggtgaccttgttggcgaatccaccgttactgtgatgacc

SEQ ID NO: 51928 - DNA, 90 bp, synthetic construct
  source 1..90: mol_type = other DNA
ggctacaaggccggcggcatcgtgccaattctcatgcccaacatgaacacaacctggttcgctagcaatgcctcctatcctctgccttac

SEQ ID NO: 51929 - DNA, 186 bp, synthetic construct
  source 1..186: mol_type = other DNA
gtgtctctgtccttcgacgatgggaatagcacaaaggagaatgtatcccatgtgcaaaacgtaaccaaggagatgaccaccgacctcaaccaaacgaataccgtatcattcgataagaaatacgacggcgtcgactacaacaacaagagcagcgtcgccactacaaagcacaataagtccgtgaat

SEQ ID NO: 51930 - DNA, 81 bp, synthetic construct
  source 1..81: mol_type = other DNA
atgttcaacctcatggacagtactattttcttcgcatcttacgggaactttctcgggctgggcaatatttctataggcgcc

SEQ ID NO: 51931 - DNA, 63 bp, synthetic construct
  source 1..63: mol_type = other DNA
gacaccatttacttcgcctcctattcaaacttttacggtttaggttcggtgtctataagctcg

SEQ ID NO: 51932 - DNA, 300 bp, synthetic construct
  source 1..300: mol_type = other DNA
gccttcgtggctgctgacgccgccctggagcacgagaagggcaaggggttcgactggacatatattggcggcatcgggcaggactacgagatcgagcttacctccgaccccaatgtgttcatggaaagcgagggctacaagggcctctctttcaccgtgatcgataccttccgagactcctctgtctgcgagctgatctacggggtcagcgagggaaaccacattagtgaacgacggatgtaccaggtgacagatggcgacgtcatgactcctgtcatcgtcgaagtccgtctatttcgc

SEQ ID NO: 51933 - DNA, 57 bp, synthetic construct
  source 1..57: mol_type = other DNA
cagcccatcgtggtcgacctgattggcgacaccgctatcgcctccctctcttctggg

SEQ ID NO: 51934 - DNA, 150 bp, synthetic construct
  source 1..150: mol_type = other DNA
atcaaggtcggcatcgtgtactgggacgtgtatctctacctgaacaacgccctgatgtatgctggcctttccgaaggctacaagcagcagctgtctcccatgctccctttcatgaccagcatcctgtaccgatacgttcacattggagac

SEQ ID NO: 51935 - DNA, 45 bp, synthetic construct
  source 1..45: mol_type = other DNA
ctggccggcggaaatattacccacaaccagatctccgtgaacagc

SEQ ID NO: 51936 - DNA, 57 bp, synthetic construct
  source 1..57: mol_type = other DNA
gaactgatccccggcttctattaccaaatttataactcagctgaaccttactctctg

SEQ ID NO: 51937 - DNA, 36 bp, synthetic construct
  source 1..36: mol_type = other DNA
accaactacaatatgcacgagatcaacccttctacc

SEQ ID NO: 51938 - DNA, 90 bp, synthetic construct
  source 1..90: mol_type = other DNA
ggctacaaggccggtggagttgtacctatcctgatgcccgggatggacacctcctggttcgcaagcaacgctgcctatcctctgccattc

SEQ ID NO: 51939 - DNA, 90 bp, synthetic construct
  source 1..90: mol_type = other DNA
ggctacaaggccggtggcgtcgtgcctatcctgatgcccggcatggacacctcctggtttgcaagcaacgccgcttatccactcccattc

SEQ ID NO: 51940 - DNA, 279 bp, synthetic construct
  source 1..279: mol_type = other DNA
gtcaccggaggcatcatcaacaccgacaacactgacaataacaccacactggagaacaattccaccaacgccaccattaatcttactgataacacaagcgggctcaacaacgggaacgggacagccgacgtgaacgtcgagggcggcgacctgaataacaacgatacctactacgaaatggtcaatggcgagaagcgatacatgtctgaggaggaatatgcagagaagtaccccgacatatatcaacaaagaaagaacggcaacttcgagaatgttgca

SEQ ID NO: 51941 - DNA, 42 bp, synthetic construct
  source 1..42: mol_type = other DNA
ttcggcaatatttacggccttagcaatattacactgtcactc

SEQ ID NO: 51942 - DNA, 51 bp, synthetic construct
  source 1..51: mol_type = other DNA
atcccctggttcgggggcatgacaggcggcctcgacgtgctgttgggaagt

SEQ ID NO: 51943 - DNA, 39 bp, synthetic construct
  source 1..39: mol_type = other DNA
ctgagctaccaggggatttccttcggcatcgtggatctg

SEQ ID NO: 51944 - DNA, 90 bp, synthetic construct
  source 1..90: mol_type = other DNA
ggctacaaggcaggcggcatcgtgccaattctcatgcccggaatggacacaacctggttcgcgtcaaacgccgcttatccactgcctttc

SEQ ID NO: 51945 - DNA, 90 bp, synthetic construct
  source 1..90: mol_type = other DNA
gggtacaagccaggcggcgtggtccccatcctcatgcccgggatggacacctcctggttcgctagcaacgcagcctatcctctgcctttt

SEQ ID NO: 51946 - DNA, 90 bp, synthetic construct
  source 1..90: mol_type = other DNA
ctccacctggtcaagccctacatcctgccatcccctatcgatgtctgtcactctgcgatccattccctctcaagtggttccctgatcgag

SEQ ID NO: 51947 - DNA, 90 bp, synthetic construct
  source 1..90: mol_type = other DNA
ggctacaagccaggcggagtggtccccatcctgatgcctgggatggacaccagctggttcgccacaaacgctgcctatcctctcccattc

SEQ ID NO: 51948 - DNA, 45 bp, synthetic construct
  source 1..45: mol_type = other DNA
taccccctgagcaacttcgatttccaatttatgttcttatcgggg

SEQ ID NO: 51949 - DNA, 69 bp, synthetic construct
  source 1..69: mol_type = other DNA
cagcacaacgtgtaccggataatgcagaaccaggaggtggtcatcagcgaggaaattatacaagaagat

SEQ ID NO: 51950 - DNA, 90 bp, synthetic construct
  source 1..90: mol_type = other DNA
ggctacaaggccggcggcgtggtccctatcctgatgcccggaatggacaccagctggttcgcatccaacgctgcctatcctctgccattt

SEQ ID NO: 51951 - DNA, 66 bp, synthetic construct
  source 1..66: mol_type = other DNA
gacaccatctattttgcatcgtactccaacttctttggcctatccaatatttccctgagttctatg

SEQ ID NO: 51952 - DNA, 90 bp, synthetic construct
  source 1..90: mol_type = other DNA
ggatacaaggccgatggcatcgtgcctattctgatgcccggcatggatccagcttggtttgccgctaacgctgctgcacctctgccattc

SEQ ID NO: 51953 - DNA, 75 bp, synthetic construct
  source 1..75: mol_type = other DNA
agccagaaggagattattatcttcatcttcgactacttcaaaaagctgttcatcatcggctggaactggatcgtg

SEQ ID NO: 51954 - DNA, 66 bp, synthetic construct
  source 1..66: mol_type = other DNA
gacaccatttacttcgcctcatattccaatttctacgggctgggcaatatctcactttcttctatg

SEQ ID NO: 51955 - DNA, 45 bp, synthetic construct
  source 1..45: mol_type = other DNA
accagttatggctcttacgggctctccaacctgaacatcagctct

SEQ ID NO: 51956 - DNA, 90 bp, synthetic construct
  source 1..90: mol_type = other DNA
gggtacaagtccggcggaattgtgccaatcctgatgcccggcatggacgccagctggttctcatcaaattccgcgtaccctctgcctttc

SEQ ID NO: 51957 - DNA, 90 bp, synthetic construct
  source 1..90: mol_type = other DNA
ggctacaaggccggtggcgtcgtgcccatcctgatgcccgggatggacaccagctggtttgccgctaacgccgcatatccactccctttc

SEQ ID NO: 51958 - DNA, 90 bp, synthetic construct
  source 1..90: mol_type = other DNA
ggctataaggcaggcggagtcgtgcccatcctgatgcctggcatggacacctcctggttcgcctcgaatgccgcttacccactgccattt

SEQ ID NO: 51959 - DNA, 84 bp, synthetic construct
  source 1..84: mol_type = other DNA
atgttcgacttagtctactccaccgtctcattcgcgtcttacggcaacgcctttgggctgtccaacgtggctctctcttccttt

SEQ ID NO: 51960 - DNA, 90 bp, synthetic construct
  source 1..90: mol_type = other DNA
ggctaccggcctggaggcgtcgtgcccatcctcatgcccggaatggacaccagctggtttgcggcaaatgccgcttatccactgcctttc

SEQ ID NO: 51961 - DNA, 300 bp, synthetic construct
  source 1..300: mol_type = other DNA
ctcctgggcctgccaatggacacattctccgaggtgcccctggccaactcttccgtggtgtccgatctgatgaaccctgaaccctcttctctcaacgaggtcggcatcgacgactcttcctattcaactgaaacaacctattacaccgggtctgctagcaagtctaaaagttccagctccaataacgaggagaaatatgaatccgaaagtactaactccgggagtagcagcgacagcggaagcggaagcagctccggctccggctctggatcctcctctggtagtggtagtggctcaagc

SEQ ID NO: 51962 - DNA, 294 bp, synthetic construct
  source 1..294: mol_type = other DNA
caggacgacaccgaagggaacatacctggtgtcgacatggccgcactgtggagccttaacggtggcttccactggatctaccccgggtccagcttcgacgagcaggtcctgatcattattaacgaccaggccgccgagcacatctttggcgccgacctcctggagaacatccgccaacacgactgggtcgagggaaacagcagagccgacgctgtgactatgtctatcaccactgtgaatcctctgcctattatccctgacatcttgatgggcaacattcgcttccacattatc

SEQ ID NO: 51963 - DNA, 90 bp, synthetic construct
  source 1..90: mol_type = other DNA
gggtacaaggccggcggaatcgtgcccattctgatgcctgacatgaacacaacctggttcgctagcaacgccgcatacccactgcctttc

SEQ ID NO: 51964 - DNA, 66 bp, synthetic construct
  source 1..66: mol_type = other DNA
aacaccatcttcttcgcgtcttattctaacatttacggcctgtccaatatcgctctcgctccattt

SEQ ID NO: 51965 - DNA, 42 bp, synthetic construct
  source 1..42: mol_type = other DNA
cttccaaaagcagggaagctcattatcggcaagtactctacc

SEQ ID NO: 51966 - DNA, 39 bp, synthetic construct
  source 1..39: mol_type = other DNA
ctgcccaacaatatgccacctttcgtgcaagactacccc

SEQ ID NO: 51967 - DNA, 72 bp, synthetic construct
  source 1..72: mol_type = other DNA
tacaacaccctcttttttgcgagttactctaacgtattcggactgggcaacgtgaccctggggagttttgac

SEQ ID NO: 51968 - DNA, 30 bp, synthetic construct
  source 1..30: mol_type = other DNA
ccctttttcaccaaatctctgcctgaagtg

SEQ ID NO: 51969 - DNA, 39 bp, synthetic construct
  source 1..39: mol_type = other DNA
ggcaccagctatcggaacctgatcttcatgaactactct

SEQ ID NO: 51970 - DNA, 36 bp, synthetic construct
  source 1..36: mol_type = other DNA
cacaacaagaatatcctgttctcaaacttcctggac

SEQ ID NO: 51971 - DNA, 36 bp, synthetic construct
  source 1..36: mol_type = other DNA
ccccatcggcacaacatgattttcatcgactaccag

SEQ ID NO: 51972 - DNA, 42 bp, synthetic construct
  source 1..42: mol_type = other DNA
tcctatggcaactacttcggactgagtaacatcactattggc

SEQ ID NO: 51973 - DNA, 39 bp, synthetic construct
  source 1..39: mol_type = other DNA
ccagtggagtacatcgaaggccacgaacctcctaccgag

SEQ ID NO: 51974 - DNA, 54 bp, synthetic construct
  source 1..54: mol_type = other DNA
attttcttcgcatcctattccaatttctatggactgggcaacatcacattgggc

SEQ ID NO: 51975 - DNA, 39 bp, synthetic construct
  source 1..39: mol_type = other DNA
gatagctttcacgccaagaacctgatcttcaccgactac

SEQ ID NO: 51976 - DNA, 222 bp, synthetic construct
  source 1..222: mol_type = other DNA
tcctggaatatgcagtcaatcgtatttaatgacgaccttacccaagagcagcggcaggaaatgatgcaggacatgcaacaggttacagagctggaccaggggcaagagttgaacgaaactcctgatgttagtaactcttccggcaagggatacaccgaaatggggaaagtatacgaagatccttcaaccgggaagatgatcatgatccggaaccaatcctca

SEQ ID NO: 51977 - DNA, 39 bp, synthetic construct
  source 1..39: mol_type = other DNA
gtgccaacaattgcccaagaattcggcatgaacaacctg

SEQ ID NO: 51978 - DNA, 63 bp, synthetic construct
  source 1..63: mol_type = other DNA
atggccctcaacatccccgggggagaatttctgaccggatctctggacgtcataagtcaatca

SEQ ID NO: 51979 - DNA, 30 bp, synthetic construct
  source 1..30: mol_type = other DNA
cccatcttcaccgacaacctgcctcacatc

SEQ ID NO: 51980 - DNA, 36 bp, synthetic construct
  source 1..36: mol_type = other DNA
atccctcatagcaccgccctgattatcgaggactac

SEQ ID NO: 51981 - DNA, 36 bp, synthetic construct
  source 1..36: mol_type = other DNA
cctcaccggcccaacatgattttcatcgactacgag

SEQ ID NO: 51982 - DNA, 39 bp, synthetic construct
  source 1..39: mol_type = other DNA
ctgccaaacagccagtccctgatcattggcaattacccc

SEQ ID NO: 51983 - DNA, 36 bp, synthetic construct
  source 1..36: mol_type = other DNA
atgcccaacacccctaacatcctgtttgacaacttc

SEQ ID NO: 51984 - DNA, 33 bp, synthetic construct
  source 1..33: mol_type = other DNA
gtggctcctaccatcggagtgtccagcctgaac

SEQ ID NO: 51985 - DNA, 57 bp, synthetic construct
  source 1..57: mol_type = other DNA
cctaacattgctggcgccctgtccaagacaaccagccccatcactatgggttctccc

SEQ ID NO: 51986 - DNA, 39 bp, synthetic construct
  source 1..39: mol_type = other DNA
cccaagcacgagtccgtgctgatcaccaacgtacctacc

SEQ ID NO: 51987 - DNA, 39 bp, synthetic construct
  source 1..39: mol_type = other DNA
ccccagatagctcagtacttcaacgtggacattacccaa

SEQ ID NO: 51988 - DNA, 33 bp, synthetic construct
  source 1..33: mol_type = other DNA
cctaacgtgcccaacccaatgttcgagaactac

SEQ ID NO: 51989 - DNA, 33 bp, synthetic construct
  source 1..33: mol_type = other DNA
ccccggaacagcaacattctgatcaatgactac

SEQ ID NO: 51990 - DNA, 36 bp, synthetic construct
  source 1..36: mol_type = other DNA
cctcacaacaagaatatcctcgtaaatgactaccct

SEQ ID NO: 51991 - DNA, 33 bp, synthetic construct
  source 1..33: mol_type = other DNA
cctaacgtgcccaatccaatgttcgagaactac

SEQ ID NO: 51992 - DNA, 39 bp, synthetic construct
  source 1..39: mol_type = other DNA
cccgtggagtacatcgacggccacgaaccaccgagtgaa

SEQ ID NO: 51993 - DNA, 36 bp, synthetic construct
  source 1..36: mol_type = other DNA
ctgcccaacgtgcacacacctaccatcggcaactac

SEQ ID NO: 51994 - DNA, 33 bp, synthetic construct
  source 1..33: mol_type = other DNA
ctgggctttcctagcgtgatcttcgagaactac

SEQ ID NO: 51995 - DNA, 60 bp, synthetic construct
  source 1..60: mol_type = other DNA
agcagttcctctgccgatcctctggcttaccgcatcctggagaagttcagggacgttaga

SEQ ID NO: 51996 - DNA, 36 bp, synthetic construct
  source 1..36: mol_type = other DNA
ctgaacttccggaatgactttatgagcgattacccc

SEQ ID NO: 51997 - DNA, 114 bp, synthetic construct
  source 1..114: mol_type = other DNA
ctggagccaccttgcccatggaagtccaatttcaacatcgaatgcgccggctgcggcggcacccggatgattaagagcctgatcaacctcgacttctatcaagcgttcaggttc

SEQ ID NO: 51998 - DNA, 33 bp, synthetic construct
  source 1..33: mol_type = other DNA
cccggcttcgactttctcaaatcaaccaagctg

SEQ ID NO: 51999 - DNA, 90 bp, synthetic construct
  source 1..90: mol_type = other DNA
ggctataagagtgatggcgtggtccccatctttctgcccggaatggttaaagacgtcttcgtccaaaactctgcttacccacttcctgcc

SEQ ID NO: 52000 - DNA, 33 bp, synthetic construct
  source 1..33: mol_type = other DNA
ccccagaacaaggacatcctggtggagaactac

SEQ ID NO: 52001 - DNA, 30 bp, synthetic construct
  source 1..30: mol_type = other DNA
agccagatctctgtgcacgcctcctttgcc

SEQ ID NO: 52002 - DNA, 81 bp, synthetic construct
  source 1..81: mol_type = other DNA
atcattcaatgccgccccggtagactgatctatttcaacctgggactttgtgaatcactggtcaaggatgtcctcttgcgg

SEQ ID NO: 52003 - DNA, 33 bp, synthetic construct
  source 1..33: mol_type = other DNA
cccaacgccgggaagctgattatcggcgactac

SEQ ID NO: 52004 - DNA, 39 bp, synthetic construct
  source 1..39: mol_type = other DNA
ctccctaatgctcataatagcctggtggctaactacccc

SEQ ID NO: 52005 - DNA, 69 bp, synthetic construct
  source 1..69: mol_type = other DNA
agcaccttcggcactacaccaatcagctccatctcttactccctggccctctgcaccaacatggacatc

SEQ ID NO: 52006 - DNA, 30 bp, synthetic construct
  source 1..30: mol_type = other DNA
gtgtacagcctgaatatccccgacaacctc

SEQ ID NO: 52007 - DNA, 36 bp, synthetic construct
  source 1..36: mol_type = other DNA
attcccaacgcccggctgatcttcccttactaccac

SEQ ID NO: 52008 - DNA, 93 bp, synthetic construct
  source 1..93: mol_type = other DNA
ttcggcactagctacaacctgttcgactacttctacttcgttgtggtgaccctcgccaccgtcggatacggcgacatcattcccctgacattt

SEQ ID NO: 52009 - DNA, 33 bp, synthetic construct
  source 1..33: mol_type = other DNA
agtccctcccgctttttcatccccaactttccc

SEQ ID NO: 52010 - DNA, 294 bp, synthetic construct
  source 1..294: mol_type = other DNA
gctgccttctgcgctgccgagatggacgctgaagaaggcacaggagagcggccatctttcgactggcccggcgatgggctgagccccgagatgaccgcttccgcccttagaggctgtgccgagacccagatggagcgcggaggatggaacggggttaggatcgacggccctgacgggacttgcttcgagctggggcgcgagtctggcgatgtgtctgtttctcgggaggtcctgcgagtctgtccaagcgagaaggagatcgtgcctgccgtctacgaggccttcatttggttt

SEQ ID NO: 52011 - DNA, 33 bp, synthetic construct
  source 1..33: mol_type = other DNA
ttcccagagcggtttctgatccccaactacccc

SEQ ID NO: 52012 - DNA, 51 bp, synthetic construct
  source 1..51: mol_type = other DNA
cagccacgcgtcgaggaattggttggagacaccacctttatgtggtttagc

SEQ ID NO: 52013 - DNA, 36 bp, synthetic construct
  source 1..36: mol_type = other DNA
atgggcagcgtgattatcatcggaccgttccggacg

SEQ ID NO: 52014 - DNA, 54 bp, synthetic construct
  source 1..54: mol_type = other DNA
gctcctaggctcagcgaccccctggccggctttttcgggtttggtagaggactt

SEQ ID NO: 52015 - DNA, 60 bp, synthetic construct
  source 1..60: mol_type = other DNA
aactgccctaataacgccatccgggtccacgacaacgtgcccctgtgccatatgcacttt

SEQ ID NO: 52016 - DNA, 297 bp, synthetic construct
  source 1..297: mol_type = other DNA
ggatgcatcggcgattcctctgacgattcctcaagcgaggctactgtatccgaagacacctcgtccgaagcagcagtatctgaagatacagacgactccgaatccgatgatgagagctaccagtcatcttcatcaagcgacaggtctaatccatactgggcttccacaatccgcgacaaatttcatagaagctcttgcgaatgggcacaggagattgatgacgtgaacctggtcacctaccctaaccgggacgctgctatcgccgacggcaaagtgccctgcaaggtttgcgagcct

SEQ ID NO: 52017 - DNA, 90 bp, synthetic construct
  source 1..90: mol_type = other DNA
ggctataagtccggcggcattgtgcccatcctcgcacctaatatggacgtctcttggttcaccgccaacgctagctaccctctgccatat

SEQ ID NO: 52018 - DNA, 186 bp, synthetic construct
  source 1..186: mol_type = other DNA
gacaacgcctgcgttaatgtcttgcgacggggaatgggcttcgacatcctggggactagctccatcgccggaattaccgaggcagaagctgaggttcgcaagaattgcaactggagcgtttcttcattcccacacacctcacttcaaaaccaaacatccttctaccctctgcgacaccatttgcct

SEQ ID NO: 52019 - DNA, 30 bp, synthetic construct
  source 1..30: mol_type = other DNA
ctgcggcaccagcccatcaccaacgatgtg

SEQ ID NO: 52020 - DNA, 33 bp, synthetic construct
  source 1..33: mol_type = other DNA
ttcctcgagtcatggggaatgcagggtaacagc

SEQ ID NO: 52021 - DNA, 294 bp, synthetic construct
  source 1..294: mol_type = other DNA
acattcggcgctgctagtgttactggggacgacaccggcaccggcaccggcaagcccaacatgacagatacaaccggggatgccgaatactacctgctgcctgtggccggattacagaaagtagttgtcaacggggtcgacatgtctagcgagatcagaggcaacgccgttggcgtacacgccagggtcctcgatgagggcgacgtccagatcaagacgagcgagcacgctatttacattcaagcaccaagcggcatgactcctcaagaagctgtgcatatgcctgagtggttt

SEQ ID NO: 52022 - DNA, 36 bp, synthetic construct
  source 1..36: mol_type = other DNA
cactacatcgacatcagcacctatctgacaaggatt

SEQ ID NO: 52023 - DNA, 45 bp, synthetic construct
  source 1..45: mol_type = other DNA
atccccaacaatacaatcactatcattaccaaccacgcatctcac

SEQ ID NO: 52024 - DNA, 81 bp, synthetic construct
  source 1..81: mol_type = other DNA
gtgactgttggtagcagtctcactggagtccttggcggcctgaccgggttcaccattagcggaatcgcatctttgttcgaa

SEQ ID NO: 52025 - DNA, 99 bp, synthetic construct
  source 1..99: mol_type = other DNA
tacggattcaaggagctcgtgaaccccggcatcagcctgatctacaacgctattgggaccaagctggcccctaatatggtgacactggtcgtgttcgat

SEQ ID NO: 52026 - DNA, 33 bp, synthetic construct
  source 1..33: mol_type = other DNA
gatctcgagggcgacggggcaatggactctctg

SEQ ID NO: 52027 - DNA, 33 bp, synthetic construct
  source 1..33: mol_type = other DNA
gtgaaacccagcggcaactacctgaagtacatc

SEQ ID NO: 52028 - DNA, 291 bp, synthetic construct
  source 1..291: mol_type = other DNA
tacctgaagacaactgccgccaagccaacagagatcagaatcaccagcaacgagaccctgaataaaggggacagcctgactatacaactgactgacctcaacaaaactgcaattagcgagaacgtctccatcgttataaaaaacaccgacggggccgttgtggtcaccgggactgtatccacaaacagcaagggcctcgccaacttcgatttggatctggaaaagggcgagtatacagtcaatgtaacctttaatggaaacaacaactttacggggagcaacgctacacaa

SEQ ID NO: 52029 - DNA, 75 bp, synthetic construct
  source 1..75: mol_type = other DNA
gccacagtcggcggctcctttatgggcgtcctcggtggactgagcggattcactatatcgggagtggcttctctt

SEQ ID NO: 52030 - DNA, 51 bp, synthetic construct
  source 1..51: mol_type = other DNA
gactacgctttctccttcttctccatcaccggcatggaaaacgagatcttc

SEQ ID NO: 52031 - DNA, 78 bp, synthetic construct
  source 1..78: mol_type = other DNA
atcactattggcggaaccagcctgatggggctgctcggcggcttagtcggcttcaccttcactggggttggatctctg

SEQ ID NO: 52032 - DNA, 78 bp, synthetic construct
  source 1..78: mol_type = other DNA
acagctactgtcggtggtagcctcgccgggatcttcggcggactgactggattcaccctgagttccggttttagctcg

SEQ ID NO: 52033 - DNA, 87 bp, synthetic construct
  source 1..87: mol_type = other DNA
atgttcgacctggtgcacctgaccgtcaactccctagccactgccaacgtttacggcctggccaatattacgatctcgtactttgat

SEQ ID NO: 52034 - DNA, 81 bp, synthetic construct
  source 1..81: mol_type = other DNA
tctgccacacttggaggcagtctctttggcctgtttggcggcatcaccgggttcaccacatctggaatctcttccctgggt

SEQ ID NO: 52035 - DNA, 54 bp, synthetic construct
  source 1..54: mol_type = other DNA
atccagcccatcgtggaagacgaggtcggcgatactaccttcatgacactctcc

SEQ ID NO: 52036 - DNA, 33 bp, synthetic construct
  source 1..33: mol_type = other DNA
gggctgggcgccgaggtatcccaattcgatgac

SEQ ID NO: 52037 - DNA, 45 bp, synthetic construct
  source 1..45: mol_type = other DNA
ctcttctacatcaaccagaatcagacctacctgctggcattcgac

SEQ ID NO: 52038 - DNA, 78 bp, synthetic construct
  source 1..78: mol_type = other DNA
gtcaccgttggtggaactgccctgatgggccccctgggcggactctctgggtttacggtttccggtggcagtgtatcc

SEQ ID NO: 52039 - DNA, 297 bp, synthetic construct
  source 1..297: mol_type = other DNA
ttcatgggctccaacaacaatcaggaggacaccgtggtggctaacgacacatcttccgacgtttctgacgtctcacaaggcaaggtcagcgaggtcaagaatgccactgtctctagtaacagcaacgagcccaagaaatacgaagactggcagaaggactacgataccggcatggtggatgaggacgggaaccctatctaccggagcgtcgtctctacatccggcggacagaacgatcccgaagtctacgaatcctattggagcgagaacggcccaatcaatgagaccaaaatcggc

SEQ ID NO: 52040 - DNA, 78 bp, synthetic construct
  source 1..78: mol_type = other DNA
gtgaccgttggagggtccgccctcatggggcctctcggtggactggctggattcactgtatccggaatcaccggtttt

SEQ ID NO: 52041 - DNA, 84 bp, synthetic construct
  source 1..84: mol_type = other DNA
agcgctaccctggggggcagtctgtttgggcttttcggtggaatcaccggctttacaatcgccggcatttcttccctcttcgcc

SEQ ID NO: 52042 - DNA, 81 bp, synthetic construct
  source 1..81: mol_type = other DNA
gtcaccgttggcggcaccgcgctcatgggtcccctcggaggactgacaggcttcaccatctctgggattagctcattgttt

SEQ ID NO: 52043 - DNA, 36 bp, synthetic construct
  source 1..36: mol_type = other DNA
atgatcgagatttactggctgcaaaggcttggaaac

SEQ ID NO: 52044 - DNA, 165 bp, synthetic construct
  source 1..165: mol_type = other DNA
ccaacgcaacatgacattatggccatttacgggctgggcggaaccatcgactacatcaagagcaacgacaaggccaaggaactgcctgacaaggtggtcgatgctctgacccgctacgtggactccatcgaaaaggagaagggcgagaacaacgacaccaatcat

SEQ ID NO: 52045 - DNA, 33 bp, synthetic construct
  source 1..33: mol_type = other DNA
tatggcctggccaacatcaccctggggtacttc

SEQ ID NO: 52046 - DNA, 45 bp, synthetic construct
  source 1..45: mol_type = other DNA
gtctactatacctacggcggcctttacgccatcgctgtggtacag

SEQ ID NO: 52047 - DNA, 267 bp, synthetic construct
  source 1..267: mol_type = other DNA
gccggcaccagtcctgagaagctggacgggcagaaaaccttctatctgaatggcactgaaatgaccgccgatgcatattcatttaggggcatggtctacgttgtgactgacgacacccagtctgctgagactctcgggctatacggtgtcattcctggccaaactgaatacgtctgcaacgtttggattgacaccggagacgtgttctacgaggtcacatccgtggtgacagccaaggatgtgaccgataactttaacacaagaaga

SEQ ID NO: 52048 - DNA, 300 bp, synthetic construct
  source 1..300: mol_type = other DNA
gtgctgaactccggatctaataacgctcctgctgtgaacaactctaccactaacgcgtcacaaaacatttccgtcgagcaggttaacaccgaggaggtcgcttcctctgatagtagcgggtctagtcgctcctccacacacgtgattattggcgaggacgggtgctattaccgggtggacgatagcggcaatatcctggagagcttaggaccgtctaaaaagtattaccctaacggctacggcggcaaagatcctgtgtcctaccccaatgccgaaccagccaaccgctacatcaagaag

SEQ ID NO: 52049 - DNA, 213 bp, synthetic construct
  source 1..213: mol_type = other DNA
agctggaacatgcagagcatcgtgttcaacgatgacctcacacaagagcagcggcaggagatgatgcaggacatgcagcaagtgacggaactggaccagggtcaggaactgaacgagacaccagacgtgtcaaatagcagtggcaagggatatactgagatgggcaaagtgtaccgagacagtgacacggggaagttaatcatggtggaagga

SEQ ID NO: 52050 - DNA, 300 bp, synthetic construct
  source 1..300: mol_type = other DNA
gtgttcaataataatcattcaagtaacaattcccctgctaacgctaacaactcggttaattcgaatattagttccgagtctcacgtcgaacaggtcaacaccgaggacgccgagtcccagagcaacaccaactctaacacacatctcgtgatgggcgaggatggctactattacacttgcgatgacgacggaaacatattggaatctgttgggcccagcaagaagtactaccccgacgacccctctgccgtggaccaccctgaggccgagtcatactatccatacatgcaacatcagctg

SEQ ID NO: 52051 - DNA, 90 bp, synthetic construct
  source 1..90: mol_type = other DNA
ggctacaaggccggcggggtggtccccatctttatgcctggaatgaacgcctcctggttcgctgcaaatagcgcctatccattgcctcag

SEQ ID NO: 52052 - DNA, 75 bp, synthetic construct
  source 1..75: mol_type = other DNA
gtggctacttttggaggaagcttcgccggcctcttcggaggcctgaccggctttaccatttccgggatcacatcc

SEQ ID NO: 52053 - DNA, 294 bp, synthetic construct
  source 1..294: mol_type = other DNA
ctgatcctggacaataactcctctctccctgatcctaactcaaatcagagtgtcaacataaccaacaatacacccgtgaaccaggccccaacactcaaggtggtcgagaagaataccaataacaatactaatatctctaacaataccacaaaccctgatgctggcaccgtcctcgagatcaaggacctgggcaacggcgagattcggtacaagattgccgacggaaacggaggatatacttacaaaaccgtgaaggagtccaacaacaataaccagaacaacagcaagaacaag

SEQ ID NO: 52054 - DNA, 42 bp, synthetic construct
  source 1..42: mol_type = other DNA
aacgcggtcggccttcccatgaatttcatcgagtacatgctg

SEQ ID NO: 52055 - DNA, 300 bp, synthetic construct
  source 1..300: mol_type = other DNA
ttccagttcaacaacaatgtcagcaccttcatcatcattaacgaaacacaggtggccgagaatgggacatttgccgggatgctgatggatgcctactcctacggcgtgtcgaatcaaactgtctgtattcaaactccagaccacaacattatcaacgctaccaccgacgagaagggcgagttcaaagtcgtaaacgcagaatacggctccggcgacgtgcactgctatagtaacttcactttcgctgggaatggcaagtaccagccttgcatctacgagggtaacgtttctgtgactaga

SEQ ID NO: 52056 - DNA, 84 bp, synthetic construct
  source 1..84: mol_type = other DNA
accgccactgtcggaggctccatggccgggattgccggcggactgactgggttcactgtctcgggtgccgtatcattgatcgac

SEQ ID NO: 52057 - DNA, 72 bp, synthetic construct
  source 1..72: mol_type = other DNA
gcaacatttggcgggtcttttgctgggctatttggtggcttgactggcttcactatttccggcgttacgagc

SEQ ID NO: 52058 - DNA, 300 bp, synthetic construct
  source 1..300: mol_type = other DNA
tatcagttcaacaataacgtgcctaccttcatggtcatcaatgagaccgaggtgcacgagaacagcagttttgctggcgtcctgatggatgcttactcttatggcgtcgcaaaccagacagtcacgtaccagaccccgaaccacgaaattaagaacgtcactaccaacgagaacggcgagttcaaagtggacaacgtgcagtccgggtccggagacgctaattactactcttcctttacattcgccgggaacggcaagtaccaagcttgttcctatgagggcaacgtcagcgtcatcaag

SEQ ID NO: 52059 - DNA, 285 bp, synthetic construct
  source 1..285: mol_type = other DNA
acattcggagccgctgctaccggagacgacaccggcaccgggacaggcaaacccaacatgaccgacaccactggcgatgcagagtattacttgattcccgtggcggggctccagaaggtgactgtgaatggcatcgacatgagctccgagatccggggcaacgccatcggagttcatgcgagggtactggatcagggcgacgtgcagattaagacatctgagcacgccattattatcaagactccggtcgggatgaacccttacgaggccgtgcacaaacctgaa

SEQ ID NO: 52060 - DNA, 81 bp, synthetic construct
  source 1..81: mol_type = other DNA
gtgacgatcggcggaagcactaccggaatcctcggtggcctgaccgggtttaccttctcgggggtagtttctctcatcgag

SEQ ID NO: 52061 - DNA, 264 bp, synthetic construct
  source 1..264: mol_type = other DNA
ggagaaagcatgggcctggaagtaaacgtaaacgagttctacgacgacacaaacctggccgacggatggatttactcctcttacattaatgacctctttctataccaagttgactgcctgggcgccaccaaccagatggagcggcagctcgtcgtcgatagtatcgccgatttctccaacgaccccgagatcacactgcactttgtggaaaataacaccatatcgaagttctaccttgtggaaggcaaaaccttcggacatcag

SEQ ID NO: 52062 - DNA, 69 bp, synthetic construct
  source 1..69: mol_type = other DNA
acctttggcggcagctacatgggcctcttcggcggactgaacgggtttactgttagtggcactatctcc

SEQ ID NO: 52063 - DNA, 297 bp, synthetic construct
  source 1..297: mol_type = other DNA
atctttctgcaagatcgcaataacctcgagaaccagagcgggacactgacaattaagaacaagacagtgtcctacgacaactgcggcaaatgtgttaaagtgatcgacgggaatacaatccaggtctacggcatcggagcggtgcaattaagccagatcgatctcaaggattcggactcggcaaagaagtttgtcgaggaaaagtgtctcggcaagaccgtgtaccttaacattgataacgagacacccaaggggtactgcatctatagattcaggcggtaccagtccgggatcacc

SEQ ID NO: 52064 - DNA, 69 bp, synthetic construct
  source 1..69: mol_type = other DNA
acaactaccatctacgatgggattaaccggatgatctcacacaccggcaccatcgacttcaattcactc

SEQ ID NO: 52065 - DNA, 39 bp, synthetic construct
  source 1..39: mol_type = other DNA
cggtactcatgcgttggcgccgtcggcataccggggtgg

SEQ ID NO: 52066 - DNA, 72 bp, synthetic construct
  source 1..72: mol_type = other DNA
tactttattcaagcgtataagaccagcgtttctatgggtctggacatgatggatctgtccgtcgtctcacca

SEQ ID NO: 52067 - DNA, 72 bp, synthetic construct
  source 1..72: mol_type = other DNA
gctacctttggaggttccttggccgggccgttcggcggactgactggattcacaatctctgggataacagga

SEQ ID NO: 52068 - DNA, 72 bp, synthetic construct
  source 1..72: mol_type = other DNA
actaccattggcggcagtttcatgggcgtcttcggtggcttgaccgggtttacaacatccgggatcattagc

SEQ ID NO: 52069 - DNA, 75 bp, synthetic construct
  source 1..75: mol_type = other DNA
acaaccatcggcggctctttcatgggcgcctttggtggcctgaccggattcactacaagcggcatcgtgtccatc

SEQ ID NO: 52070 - DNA, 84 bp, synthetic construct
  source 1..84: mol_type = other DNA
aacattaaattccttggcctgtccctacaacctattcttggaggatttaacggctttactgtatccggcaacaagagttacctg

SEQ ID NO: 52071 - DNA, 72 bp, synthetic construct
  source 1..72: mol_type = other DNA
acaactatcggcggctccttcatgggtgcctttggggggcttaccggattcactacctctggaattgtgtcc

SEQ ID NO: 52072 - DNA, 282 bp, synthetic construct
  source 1..282: mol_type = other DNA
atcttcaacaataatgcttctactaataacgtcaacaacagcatatccaataataccagttcaaacatcaacgtcgagaagattaataccgaggaagtctcaagccaatcgaatagtaacacccacctggtcatcgctgaggacggccactactatacctgcgatgataacggcaagattctcgagaagctgggcccttctaagaagtactaccccaacgacccaagcgccgtggagtaccccgacgctgagtcctattacccgtacaagcagcggcaactc

SEQ ID NO: 52073 - DNA, 39 bp, synthetic construct
  source 1..39: mol_type = other DNA
agcaaggaggaaatctattccgagacctacctggatctg

SEQ ID NO: 52074 - DNA, 90 bp, synthetic construct
  source 1..90: mol_type = other DNA
ggttataaagctggcggcgtcgtgcctatctacctgcctggaatgaccgctgactggttcgctgcaaacagcgcctatcccttgccacag

SEQ ID NO: 52075 - DNA, 48 bp, synthetic construct
  source 1..48: mol_type = other DNA
accccaatcaaggaccccacttccgagctgattgctaggacatctcct

SEQ ID NO: 52076 - DNA, 72 bp, synthetic construct
  source 1..72: mol_type = other DNA
gctacattcggtggatcactgttcgggatctttggaggactgaccggcttcactgtgtccggggttgcaagc

SEQ ID NO: 52077 - DNA, 72 bp, synthetic construct
  source 1..72: mol_type = other DNA
gtcacaatcggggggtctataactggaatcttcggtggtctcactggctttaccgttagcggcgtggcatcc

SEQ ID NO: 52078 - DNA, 60 bp, synthetic construct
  source 1..60: mol_type = other DNA
atttacgaaggggcccaccggatctacctttgggggagctatttcatcaccctcgaagcc

SEQ ID NO: 52079 - DNA, 72 bp, synthetic construct
  source 1..72: mol_type = other DNA
gccaccttcggaggcagcatcgctggcatttttggaggacttgccggattcaccatttccggggtggcatcc

SEQ ID NO: 52080 - DNA, 72 bp, synthetic construct
  source 1..72: mol_type = other DNA
gccaccatcggaggttctttcgccggaattttcggcggtctgactggctttacggtcagcggggctacgagc

SEQ ID NO: 52081 - DNA, 48 bp, synthetic construct
  source 1..48: mol_type = other DNA
atgtacatgagctacggccccatctatttcacctatatgctgtactca

SEQ ID NO: 52082 - DNA, 60 bp, synthetic construct
  source 1..60: mol_type = other DNA
aaccctgcctacacaatccccgagttcacaacgcagggcttgtatctcactgggaagtcc

SEQ ID NO: 52083 - DNA, 93 bp, synthetic construct
  source 1..93: mol_type = other DNA
ttccacggccaaccgcaacttgccgtgatttatggtgcaacccctgccgtggctgttaacgagcggcagcagaattattgggtcctgttggtg

SEQ ID NO: 52084 - DNA, 297 bp, synthetic construct
  source 1..297: mol_type = other DNA
taccagtttaacaacgatgtttctactttcatcatcattaatgagacagaggtgcagaacaacacttctttctctggcctgctgatggactcttactcctacggcgtggccaatcagacaattagctaccagactccaaaccacgagatcattaacgtgaccaccgataacaacggcgagttcaacgttagtgccgtaaaatccggctctgacgagggcaattgttatagcaatttcacattcgctggcaacggcaagtaccaggcctgctcctatgaaggtaacgtctccgtcaaa

SEQ ID NO: 52085 - DNA, 75 bp, synthetic construct
  source 1..75: mol_type = other DNA
gccaccttcggcggcggcttcttcgggcttaccgggggactgactgggtttactctctccttctcggggagcaca

SEQ ID NO: 52086 - DNA, 81 bp, synthetic construct
  source 1..81: mol_type = other DNA
gcgacctttggcggttccttccttggtgccttcggcggcctgactggctttaccattagcggtatcgcttccctcttcacc

SEQ ID NO: 52087 - DNA, 60 bp, synthetic construct
  source 1..60: mol_type = other DNA
gcaacattcggcggcgccttcgccggaattttcggcggtctgaccggctttgcttctatc

SEQ ID NO: 52088 - DNA, 81 bp, synthetic construct
  source 1..81: mol_type = other DNA
atcactttcggggggtctctctacggaatcttcggaggcttgaccggttttactgtgtctgggatctcatccgtctttatc

SEQ ID NO: 52089 - DNA, 51 bp, synthetic construct
  source 1..51: mol_type = other DNA
aacgccgtcaatccgggagtttacgggttcgccaatatcaccataggttac

SEQ ID NO: 52090 - DNA, 78 bp, synthetic construct
  source 1..78: mol_type = other DNA
gtgacttttggcggcagctttaccggactgttcggcggcctgaccggctttaccgtttcgggcgtgtcatctctcttc

SEQ ID NO: 52091 - DNA, 279 bp, synthetic construct
  source 1..279: mol_type = other DNA
tatttaatttcgccgcctagtttcgcgggttccgacgataaagtcaccattgacatcggccaggacggatatatggtggccactatcaacgagagtttacaatataaatctgagaagatccctgacggcgaagtcaacaactctaagaccatcattaaatggaaggacgccaggaacatttccttcgtggatgtgatggggaagaagagctacgctatcgtgtcttgtctgccatacatcgttttcaatatcattctcaagacccggtggtacatggaa

SEQ ID NO: 52092 - DNA, 51 bp, synthetic construct
  source 1..51: mol_type = other DNA
cccgatatcacggtcccccttgcggggttgttcggattcggacggggcatc

SEQ ID NO: 52093 - DNA, 84 bp, synthetic construct
  source 1..84: mol_type = other DNA
tctgccacggtcgggggttccttcctgggcctctttggaggcctgaccggcttcacggtgtccggaatcagctctctgtttgcc

SEQ ID NO: 52094 - DNA, 54 bp, synthetic construct
  source 1..54: mol_type = other DNA
ctgcagtactttcttaattccggcaatctcatccccttcctgggggactattac

SEQ ID NO: 52095 - DNA, 66 bp, synthetic construct
  source 1..66: mol_type = other DNA
tccgggctgggcagcgctccggtctcatctattccctacgccatgaacctcatcggaaacatcgag

SEQ ID NO: 52096 - DNA, 57 bp, synthetic construct
  source 1..57: mol_type = other DNA
atgtacttcatcctatggggtagctatagcgagcattctcaagcttttccctttaga

SEQ ID NO: 52097 - DNA, 36 bp, synthetic construct
  source 1..36: mol_type = other DNA
ggcatcaaccttgccggaacactgctgtctttgggg

SEQ ID NO: 52098 - DNA, 33 bp, synthetic construct
  source 1..33: mol_type = other DNA
cccagacttttctcacctgagggcgtggatgct

SEQ ID NO: 52099 - DNA, 279 bp, synthetic construct
  source 1..279: mol_type = other DNA
acactgacaactattgagtccaataagaacatcgagaatagcgtatcgtcgaggctcaccctggaccacgtggctaacctcattagtcaggtcaacgccaacggcgagggctatagctactacaagatcaccgtcgagaagaacaagctgacgatccagtcctggaatcgcaaaggagagaaacttgtcatgcccctgaagatcgactccaaatatgaactgtattctggtaacgactacctgatttctaaaaatgacgagggaaaaatcgtgatccgc

SEQ ID NO: 52100 - DNA, 48 bp, synthetic construct
  source 1..48: mol_type = other DNA
gtggtgctgagcgacggcggcatgcccgctaccggagtcttctttgct

SEQ ID NO: 52101 - DNA, 90 bp, synthetic construct
  source 1..90: mol_type = other DNA
gggttcaaggctggcggcgtcgtgccaatctttctgcccggaatgaccgccgactggtttgccgcaaacgctgcctaccctcttcctcaa

SEQ ID NO: 52102 - DNA, 105 bp, synthetic construct
  source 1..105: mol_type = other DNA
ggcgagagcgtcggcctggaagtaaatgtaaacgacttctaccttaagaatgccagaataccacaactgttgcaagtggtcgatgaactgcactactgggtctac

SEQ ID NO: 52103 - DNA, 48 bp, synthetic construct
  source 1..48: mol_type = other DNA
atcattgcctggggcatgaagaactgctttggcttcgagaaactcctg

SEQ ID NO: 52104 - DNA, 90 bp, synthetic construct
  source 1..90: mol_type = other DNA
agcacaatcctggatctgttttccttctctctcaacttccctgagttcgacctggaagagctgctccttaatattcctgagacctacacc

SEQ ID NO: 52105 - DNA, 189 bp, synthetic construct
  source 1..189: mol_type = other DNA
gcagtctcggacgctgacgttgaaatcacctggtctgattcgcaattttcttactatagcactgacggatctaccgtgaccgtctccgccaacgggacctggctgtcctccgagattacagtgccctctaaggtcagccactcgagcgaatacacggtaaccgcgatcggcaatgctaagaacagttct

SEQ ID NO: 52106 - DNA, 285 bp, synthetic construct
  source 1..285: mol_type = other DNA
ttcgtcacaccggagcaactgacaatcaacaagattgacaactccaagatcgacaattacgtggagatcagcggaactatttcgagttacaccattaccaaatccaacaccaagatcatcaagattactgacaacaccgggtctatcaatgtcgtgatcttcccttctactgagatcaacatggagctgaacgaaggagaaagtattcaactaacagggaaggtgacaagttataacggacagctcgagctcatcctggacgatccaactaagattcaccgaaat

SEQ ID NO: 52107 - DNA, 33 bp, synthetic construct
  source 1..33: mol_type = other DNA
agccagctgatcctggacctgaacacctcactc

SEQ ID NO: 52108 - DNA, 39 bp, synthetic construct
  source 1..39: mol_type = other DNA
gagctccagcaacagagcgaccagtgcctggaaggactg

SEQ ID NO: 52109 - DNA, 291 bp, synthetic construct
  source 1..291: mol_type = other DNA
tacttcggtctgagtaataataataccaatataaggaacaactccgtcaatgatagcatggtcaataacaccaccaacataaccaacaatacagttgactccctcgccgacaactccgataaaggactggtctatagtcctcaaaaaggggaatacgtcgacccttctggtcaatacgagaaggattctcgggggaataccgtccacacataccagggtagtgacggcgtcatctacgaggagtactacgacggcgatgggaacccaataagtagcgaagaatactatatc

SEQ ID NO: 52110 - DNA, 42 bp, synthetic construct
  source 1..42: mol_type = other DNA
ctgatgtatgtctcttacggcatgacctatgtgaactacgtg

SEQ ID NO: 52111 - DNA, 288 bp, synthetic construct
  source 1..288: mol_type = other DNA
ggctacgttaatcccgagcggctggacatcaaccagatcgacaagtccaagattgacaaccagattgaggtcgacgccacaatcgctagcgtgacacagaccaagaccaacaccaagatcgtgaagctgtctgatgacacaggcaatatcaccctcgtcattttcccttccgtcggctacgaggacaatctcacaaagaaccagaaggttaaagttatcgccaaggtatcacaatacaacaacgatatggagcttatccttgaggagagcaagaacctgatcatttct

SEQ ID NO: 52112 - DNA, 66 bp, synthetic construct
  source 1..66: mol_type = other DNA
gctagcgcccgggccgtggagattcacaccttcgacgtcttctacgaaggcatttttcaaatatac

SEQ ID NO: 52113 - DNA, 66 bp, synthetic construct
  source 1..66: mol_type = other DNA
atggtgtcaactattccgggttcggaagtcctcacgtctacactgaacatgatttcttcgagccaa

SEQ ID NO: 52114 - DNA, 42 bp, synthetic construct
  source 1..42: mol_type = other DNA
gtcggcatagacaaggtcatagaggccctgaagatcgcaaaa

SEQ ID NO: 52115 - DNA, 183 bp, synthetic construct
  source 1..183: mol_type = other DNA
atggcgctgagcggggagcccatcgtcgggaactccaccgaatcctacgagaatgtgaccgtggaaatgacttctaacatcagcaacggatctacggaccattacgtgaaggagcctcacgtcgacttcaattccgccgaggacattaacaagtacaacctgaccaagaacgacctgagttat

SEQ ID NO: 52116 - DNA, 291 bp, synthetic construct
  source 1..291: mol_type = other DNA
ctgattgtggacgaaacccatcaccaaacggaaaacaacaagataaataacacaaccaccggaaccatctctaacaactcaacaaacatttcaacaaacatcacgaacaataccacaatctctgatattaataataccaacgacagcaatgtgaacccaggagatatcatacaaaagaaagtattcacggtcaaagagaatgaaaagggccagaacgaagggatggagcctggcacctacattatctattacactgccaacgacggtccgctgaagattgagaagatcaag

SEQ ID NO: 52117 - DNA, 294 bp, synthetic construct
  source 1..294: mol_type = other DNA
gcttattccggaatgaacatgcagaagaatgtctctgacaacgcccagtctaactccacgaataccggggagctgaagaacaacaccaccgggaataacaataacacaaccgttggcgacaacagcgtgctgaacaagtctgacctcaacaagactaacaagacatacaagatttacgacccacaatctgacggttatgtgacagtcgtcggcgagaagttcgacaacggggtcaacaggtggtacacctacgataaggacggcgtcaggtactataacacacggatatcccat

SEQ ID NO: 52118 - DNA, 93 bp, synthetic construct
  source 1..93: mol_type = other DNA
ttcggattttccgtatccggtaccccaacaccaagtctgctgaagttctctcaagcgggccagaacatgattgccggcggaatcttcggacct

SEQ ID NO: 52119 - DNA, 66 bp, synthetic construct
  source 1..66: mol_type = other DNA
gatacctggaacagtaccgtcggggctgtgtccaagatcctgggcgtggacagcgacacatctgcc

SEQ ID NO: 52120 - DNA, 66 bp, synthetic construct
  source 1..66: mol_type = other DNA
agcctgcgccggtccatgagagagaggaaggtggaccgcgaatacgaacgctactggcggagatac

SEQ ID NO: 52121 - DNA, 30 bp, synthetic construct; identical to SEQ ID NO: 52019
  source 1..30: mol_type = other DNA

SEQ ID NO: 52122 - DNA, 222 bp, synthetic construct
  source 1..222: mol_type = other DNA
gccactgatacgatcagtgaagatatcatctcggacgcagacgacacaccgctcgaaatcactgataacgatgtctataccgctaaggagagctccttctccaacctttctgacgaaattgaaaatactggcacatctctggacctgaaccaggactacgccttcaataatgagaccgacaataagaacggaattgtcatcggcaaggacaactttgtgctc

SEQ ID NO: 52123 - DNA, 90 bp, synthetic construct
  source 1..90: mol_type = other DNA
gggtacaaggctggaggcgtggtccccatcttcctgcccggcatgagcgctgattggtttgctgccaactccgcctatccacttcctcag

SEQ ID NO: 52124 - DNA, 66 bp, synthetic construct
  source 1..66: mol_type = other DNA
ctgatcggaggatacgatagctcttcaagcgggcgctacgagtcgagtagctccgcctcttctggc

SEQ ID NO: 52125 - DNA, 105 bp, synthetic construct
  source 1..105: mol_type = other DNA
gtcactgagtctatggccaattctgtgaccatcgaggacctgaacatcacacggtacatgaggtcccacacaatcaaaaaggctatggagaccatgagccagatc

SEQ ID NO: 52126 - DNA, 42 bp, synthetic construct
  source 1..42: mol_type = other DNA
ggactctgggagctgggcctgcttagtcctggagtagtccac

SEQ ID NO: 52127 - DNA, 51 bp, synthetic construct
  source 1..51: mol_type = other DNA
cctgatgtgtccaccctgatcgcaatgaagttcgggatgggaagaggcctg

SEQ ID NO: 52128 - DNA, 51 bp, synthetic construct
  source 1..51: mol_type = other DNA
ctcaactctgatactggagcatatgccttagcacaacgtggcgcttctatc

SEQ ID NO: 52129 - DNA, 30 bp, synthetic construct
  source 1..30: mol_type = other DNA
ccctatgtcctatactcgaatggcgggggc

SEQ ID NO: 52130 - DNA, 51 bp, synthetic construct
  source 1..51: mol_type = other DNA
ctcaattctgacatgggtgctctggcactggccgagcgaggcactaatttg

SEQ ID NO: 52131 - DNA, 243 bp, synthetic construct
  source 1..243: mol_type = other DNA
atgaaggagacatataacacccacactgcaagtcaagtcctatacctcacaagcccctacctgaatggcaactggatcaagaatcccgagaaatatgatgcccctacaaaccccgaacaatatcctacgttcgccaagaactcctatagctcctacgattacttcaaaattgacagcatcatcaagccctacaccaacgagaacggcaaacactggaccacatctaacatgacagtgcagaag

SEQ ID NO: 52132 - DNA, 30 bp, synthetic construct
  source 1..30: mol_type = other DNA
agccggtgcatgccaccggcatattgggac

SEQ ID NO: 52133 - DNA, 48 bp, synthetic construct
  source 1..48: mol_type = other DNA
ctgaacaataacgagggcgctctcgcacttgcccaaagaggaaccagc

SEQ ID NO: 52134 - DNA, 48 bp, synthetic construct
  source 1..48: mol_type = other DNA
ctggccaacagcgtgaccaacattcagatcaaccccaatcctatcgac

SEQ ID NO: 52135 - DNA, 291 bp, synthetic construct
  source 1..291: mol_type = other DNA
actatagagttacaacaagccaaaaatgaaaagcctgccgttaacaacacaaccgtcaccgtcgagtcaatcaataatgaaacagtgcaggatctgaacaatcaacaaagcgattccaataataaggcatctgagaaaagttcccaatccgccaataaagaatccgaatctggcatgcctgaggaaacacgcaaaatctacgccgcccgcgaacgggcggctcaagatggaatccccatgtatgagtatactcaaagcccggagctggttgagaagtaccagagcatggtg

SEQ ID NO: 52136 - DNA, 276 bp, synthetic construct
  source 1..276: mol_type = other DNA
atggtcattcaaaacgatgacggcggatctgccgagctcacacaaaaagtctccgacaaggtctcgcaaagtgtcgatgagagcagctcttccggctcgaaaattgttgacggcctggaaaaggtcagcaacgggcaggccggcgacgggtcctacatctacgaagaggctagcagcgacggcaacttccggcaatacgacgagaacggcaaactcattggctctacctatgaggaggaccaggcacagctcggcaatcccaatggggaattggag

SEQ ID NO: 52137 - DNA, 54 bp, synthetic construct
  source 1..54: mol_type = other DNA
ccgcagcaaacgaccatcattgcccacttctttggcctcaaacgaggtctggac

SEQ ID NO: 52138 - DNA, 48 bp, synthetic construct
  source 1..48: mol_type = other DNA
catcctgaccggacctttagctacaacggccactattttcctgtttgt

SEQ ID NO: 52139 - DNA, 30 bp, synthetic construct
  source 1..30: mol_type = other DNA
acacctagcatggacggtcggatcagtctg

SEQ ID NO: 52140 - DNA, 213 bp, synthetic construct
  source 1..213: mol_type = other DNA
tcatggaacatgcagagcgtcgtgtttaatgagaacatggacgaagagcagaagcagaaggtcatgcgagcaattaacgaagtcagtcagatcgaccaggggcaggaactcgaggacacaccggatctttcgaagtcaagtggcaacggctatactgaaatgggcaaagtatatcaggataaggatacaggcaaactgattatggtagagggc

SEQ ID NO: 52141 - DNA, 42 bp, synthetic construct
  source 1..42: mol_type = other DNA
gtcggcatggaggatagcagcggggacgcttacatcggacct

SEQ ID NO: 52142 - DNA, 282 bp, synthetic construct
  source 1..282: mol_type = other DNA
gtttacctgaacgtggacgaaggcaacaaggtgaccacaaaccagaccaacaacgcaagcaagaacatcactgtggatagggtcaacacggaggaagtcaagcagcaaccccaaaaggaggtttacgcctaccgctctgacggttctcctctttattcatacgaggagacacgcgactacatcgcccaaaaatatggacccgacatgatttggcacgtgcaagacaacaagtacatctctctcgacacacccggctacacctctgacggcaagcgattgtat

SEQ ID NO: 52143 - DNA, 30 bp, synthetic construct
  source 1..30: mol_type = other DNA
ctcctggccggcaacgaaatccagttgggc

SEQ ID NO: 52144 - DNA, 30 bp, synthetic construct
  source 1..30: mol_type = other DNA
atgatgacctacaacatgaacagcacattc

SEQ ID NO: 52145 - DNA, 48 bp, synthetic construct
  source 1..48: mol_type = other DNA
ctggccaacggcaatatcacccacaatcagctgtccgtgaacagcttc

SEQ ID NO: 52146 - DNA, 66 bp, synthetic construct
  source 1..66: mol_type = other DNA
gccctcaccaagtcctaccccatggattacgactccgccggcaaactgattgtcgatcctgctatc

SEQ ID NO: 52147 - DNA, 30 bp, synthetic construct
  source 1..30: mol_type = other DNA
aaccggatgacctccaagggcatcagcaat

SEQ ID NO: 52148 - DNA, 84 bp, synthetic construct
  source 1..84: mol_type = other DNA
gcccagagcactgccggcgactataccgcggggacgaacgctctgaccaccgtggctgaggaaatcgccaaatatgtgcctatc

SEQ ID NO: 52149 - DNA, 30 bp, synthetic construct
  source 1..30: mol_type = other DNA
atctacacattcccggctcacgtggagaac

SEQ ID NO: 52150 - DNA, 33 bp, synthetic construct
  source 1..33: mol_type = other DNA
agcgacggcgagcttcacgatgacctgggttca

SEQ ID NO: 52151 - DNA, 51 bp, synthetic construct
  source 1..51: mol_type = other DNA
ccgagaatgagcgaccccctcgccggctactttgggttctctagaggactg

SEQ ID NO: 52152 - DNA, 99 bp, synthetic construct
  source 1..99: mol_type = other DNA
tacggattcaagaatttgatacaaccgggcattagcatggtttataatgccgtcggcacacagatcgagcctaacatggtgaccctcgtggtcttcgac

SEQ ID NO: 52153 - DNA, 48 bp, synthetic construct
  source 1..48: mol_type = other DNA
ggccacgagaagggagtcctggaagaggtgaccaaggccagaacaggg

SEQ ID NO: 52154 - DNA, 51 bp, synthetic construct
  source 1..51: mol_type = other DNA
ggtaatgtgattatcgacaacgggaagcttagtaacctgctccactttgga

SEQ ID NO: 52155 - DNA, 285 bp, synthetic construct
  source 1..285: mol_type = other DNA
gccttctccctcggcggcaatcaccaggaaagcgctaagaacgccaccgacaacctgaccaagaacacagtgaataagaccgataacgccacaaacgataccaaggtggtcggcgacaacagcacatttaaaggcgctaacaacaccactaataagacatacaaggtttacaacccacaatccgattcttatgtcaccgtcattggcgaaaagttcgataacgacgtgcaccgctggtacacctatgacaaggacggagtccggtactacaacaccaggatctct

SEQ ID NO: 52156 - DNA, 51 bp, synthetic construct
  source 1..51: mol_type = other DNA
ggcaacgtgatcgtggataatgggaaacttcctaacttgctgaatttccac

SEQ ID NO: 52157 - DNA, 42 bp, synthetic construct
  source 1..42: mol_type = other DNA
gtcggaccttctaacgtgaccgtcgagctgagccggatcaat

SEQ ID NO: 52158 - DNA, 282 bp, synthetic construct
  source 1..282: mol_type = other DNA
attcagttgcaatcggcgaagaacgtgacacctgcggtcgtcaacaacactaccaacaatactaccgtgaatacgacggtggagcacatcaacaacgatactgctctgcaatcaaattccaataaccaggcatcccatagtgacagccaggctagtcagagcggaatgcccgaggacaggcagaaaatttacgctgcccgacaaaaagctgctgatgatgggattcctatgtatgagtatatccactctcctgagctggtcgagaaataccagaacatggtt

SEQ ID NO: 52159 - DNA, 93 bp, synthetic construct
  source 1..93: mol_type = other DNA
atgatcgtggagggagtgtcgccgattgattccattgacatggtcagcaacgccttcacatctaacggctacgctatcctggggtctacaacg

SEQ ID NO: 52160 - DNA, 45 bp, synthetic construct
  source 1..45: mol_type = other DNA
gtagtcggaatcatggccgacttccatgtctctagtaccttggcc

SEQ ID NO: 52161 - DNA, 270 bp, synthetic construct
  source 1..270: mol_type = other DNA
ggaaaggggatgaagaagaaagtgatcggctataagatcgtctggaaatatgggtggaagcagaaatacggctgggtgctgcggccagtcgttcggggtggccacgtccatttttcgcaatggcaatacgtcaaggcctaccatcctgtctggggcaaatggaagactaaggtgcccatttataagtattattacgtgaacgacgctgcactcacatccgccaagatcaagaagaccaagaaatgggttaaaacctacaactacatgaca

SEQ ID NO: 52162 - DNA, 42 bp, synthetic construct
  source 1..42: mol_type = other DNA
gtgggacccagcaacgttggcgtcgagatttctaagatcaat

SEQ ID NO: 52163 - DNA, 48 bp, synthetic construct
  source 1..48: mol_type = other DNA
ctggccatctacaatctatccccggagacagcagcacttgcttctcag

SEQ ID NO: 52164 - DNA, 30 bp, synthetic construct
  source 1..30: mol_type = other DNA
gacttcaagaacccatgggcttgcctgcag

SEQ ID NO: 52165 - DNA, 51 bp, synthetic construct
  source 1..51: mol_type = other DNA
ccatcaaccactagcatattcgctaagatctttgggattacacgcggtctt

SEQ ID NO: 52166 - DNA, 270 bp, synthetic construct
  source 1..270: mol_type = other DNA
acagacctgcctgggcccgtcaagtccaccgctggcgcctatgatgtgttcttgtttcaaccgaccgttgggggagaggtcgaggctggcacctaccaaatcgcactggagtcctctaacaagtactacacaccatacctgatatcggcatcaggagagcggaccgtcctggactacacctatgacggccagtactactccttcaccctcgagggcgaatcttacgtgtctctcatggccgagaacagcagcctgatccctaatgcacaa

SEQ ID NO: 52167 - DNA, 282 bp, synthetic construct
  source 1..282: mol_type = other DNA
ctgatgaacatgggaaactttagcatcagtcaccaagataatggaaccaacacaactaacactcaccctaacgtcagcacgaacacagacaactcccaccctacacaatcaacagatagcggtagttcctcaagttcgagtcagagcagcgggtcatcgtcaagcagctctggctcctcctcttccggaagcggaagctcttctagcggctctggaagcagtagtcaggacagttttactcccgggcaagcccctggcaccgctaacaagggagacttcgac

SEQ ID NO: 52168 - DNA, 33 bp, synthetic construct
  source 1..33: mol_type = other DNA
ctgatcgagtcaggaggcgcacaaggcaacagc

SEQ ID NO: 52169 - DNA, 216 bp, synthetic construct
  source 1..216: mol_type = other DNA
tcttggaacatgcaggacgtagttttcaaccaagacatgacccaggaacagaaggaggaaacaatgcaggctatgcaacaagtggctcaggtgacccagggcaaggagctcaacgagacccctgattcctccaattcttcgggcgaaggctacgtggagcagggaaaggtctaccgggaccccaaatccggcaagctggtcatggtcactgaaggc

SEQ ID NO: 52170 - DNA, 99 bp, synthetic construct
  source 1..99: mol_type = other DNA
tacggattcaagaatttaattcaacccgggatcagcctcgtgtacaacgccgtcggcacacagctggagcccaacatggtcaccctggtcgtgttcgat

SEQ ID NO: 52171 - DNA, 54 bp, synthetic construct
  source 1..54: mol_type = other DNA
accggcaacgtgatcctggacaatgggaaactcccgagtctcattaatgtggag

SEQ ID NO: 52172 - DNA, 222 bp, synthetic construct
  source 1..222: mol_type = other DNA
tggaacatgcaaagcgtgctgttcaacgagaacctgacaccagagcagaaggaacaggttatggaggccatgaaccaggaggtgacagaggtgcaagaaggccaggtccttaacgagacaccagacaccagcaatcaaaccgggcagggctacaccgagatggggaaagtttataaagacccgagcacagggaaaatgataatggtgcagaacaagacaaat

SEQ ID NO: 52173 - DNA, 39 bp, synthetic construct
  source 1..39: mol_type = other DNA
ccctacttcggcgtgatcgccgctctgtttgccttcatt

SEQ ID NO: 52174 - DNA, 222 bp, synthetic construct
  source 1..222: mol_type = other DNA
tggaacatgcagtctgttctctttaatgagaatctgacaccggaacaaaaggaacaagttatggaggctatgaaccaggaggttaccgaagtgcaagaagggcaggtcctgaatgaaacacccgatacttcaaatcagaccggacaaggctataccgagatgggcaaagtatacgaagaccccagcactgggaaaatgataatggtccgcaaccaatcctcc

SEQ ID NO: 52175 - DNA, 30 bp, synthetic construct
  source 1..30: mol_type = other DNA
ctgcggcaccagccactgaccaacgatgtc

SEQ ID NO: 52176 - DNA, 51 bp, synthetic construct
  source 1..51: mol_type = other DNA
cctgactcttctatggtcttcgcacgcgtctttggaatcacaaggggcctg

SEQ ID NO: 52177 - DNA, 51 bp, synthetic construct
  source 1..51: mol_type = other DNA
cctaccgcctccgagaggtttgctaggctgttcggaatcactagaggcttg

SEQ ID NO: 52178 - DNA, 51 bp, synthetic construct
  source 1..51: mol_type = other DNA
ccgaccttttctgagaaatttgctagcctgtttgggatcacacgcggcttg

SEQ ID NO: 52179 - DNA, 30 bp, synthetic construct
  source 1..30: mol_type = other DNA
ttcctgcggcaccagcccatcacaaacgac

SEQ ID NO: 52180 - DNA, 222 bp, synthetic construct
  source 1..222: mol_type = other DNA
tggaacatgcagtcagtgttgttcaacgagaacctgacccctgaacaaaaagagcaagtcatggacgctatgaaccaggaagtcacagaggtgcaggaaggccagatactgaacgaaacaccagacactagcaaccagactggacagggatacacagaaatgggcaaggtctataaggaccccagcaccggcaagctcatcatggtgcagaacaagaccaac

SEQ ID NO: 52181 - DNA, 279 bp, synthetic construct
  source 1..279: mol_type = other DNA
agcgacgtcaacgacaccgccattgcctccgacgagtccgacatcgacactctcgaggtcatttcgaacgatgagaaccccgtgctgaccgaggaaacccaggacagctctgatgacggcacttacacggccctacaaaagaagattacactggccggagatggcagcaccatcaacctgacccgggactaccagtataatgatgatttcaagctcacgactggagtattcatcaacaaggacatcactattaacggaaatgggcataccatcgatggg

SEQ ID NO: 52182 - DNA, 210 bp, synthetic construct
  source 1..210: mol_type = other DNA
ggatggaacctgcaaagcgttgtgttctctgatatgacacaggaggagaaacaggatgtgatggagtccatttccaacatcaccaaggtaacccagggcgaaaagctgaacagcacacccgacacctcggatcagtccggagagggctacgtggagcaggggaaagtgtataaagacagcaagactggcgagctgatcatggttgaaagt

SEQ ID NO: 52183 - DNA, 90 bp, synthetic construct
  source 1..90: mol_type = other DNA
atgcacgtgatcaacaaggataacttcatttaccactacctcatcattcttatttccgacgacttctggggcaacggcgatctgatgctg

SEQ ID NO: 52184 - DNA, 51 bp, synthetic construct
  source 1..51: mol_type = other DNA
ccgacatacagcgagagattcgcatccctgttcggcatcacacgaggactc

SEQ ID NO: 52185 - DNA, 30 bp, synthetic construct; identical to SEQ ID NO: 52019
  source 1..30: mol_type = other DNA

SEQ ID NO: 52186 - DNA, 51 bp, synthetic construct
  source 1..51: mol_type = other DNA
ccctcttattctgagaggtttgccaagttgttcggcatcacgagaggactg

SEQ ID NO: 52187 - DNA, 66 bp, synthetic construct
  source 1..66: mol_type = other DNA
atggacattttcggccccatagtcgggggttttgagatgatcatcgaaatgctacaatccggagga

SEQ ID NO: 52188 - DNA, 45 bp, synthetic construct
  source 1..45: mol_type = other DNA
gccaccctgagcctggtgcacggcgacatctctatctccatttca

SEQ ID NO: 52189 - DNA, 51 bp, synthetic construct
  source 1..51: mol_type = other DNA
ccccgcgcgagcgagcagttcgcccggttgtttggcatcacccgcggcttg

SEQ ID NO: 52190 - DNA, 30 bp, synthetic construct; identical to SEQ ID NO: 52019
  source 1..30: mol_type = other DNA

SEQ ID NO: 52191 - DNA, 90 bp, synthetic construct
  source 1..90: mol_type = other DNA
aacgaccggatcatgaacagcggatttttcgacgggattgagcagctcctgggcaccgatgccgagggcatctcccacgtgttcatccat

SEQ ID NO: 52192 - DNA, 30 bp, synthetic construct
  source 1..30: mol_type = other DNA
ttccggggcaatgtgctgaccaacgacgat

SEQ ID NO: 52193 - DNA, 51 bp, synthetic construct
  source 1..51: mol_type = other DNA
cctaacgcatctgagcacttcgccgaactgttcggcatcacgaggggtctg

SEQ ID NO: 52194 - DNA, 63 bp, synthetic construct
  source 1..63: mol_type = other DNA
gctgtccccacaatcaccgagattagctccggagtggccctgggcgaatacttcatcaactac

SEQ ID NO: 52195 - DNA, 39 bp, synthetic construct
  source 1..39: mol_type = other DNA
cccgacatcgctgccgagctgaacttcgcggagttttct

SEQ ID NO: 52196 - DNA, 51 bp, synthetic construct
  source 1..51: mol_type = other DNA
cctctcgcgtctgagaggtttgcccgcctgttcggtatcactcggggcctc

SEQ ID NO: 52197 - DNA, 273 bp, synthetic construct
  source 1..273: mol_type = other DNA
tctcaggtcgccaaggaagatagcaacctgagcatcgctgacaagaagatcaacgttggggacagcctggttgtcaaactcaccgactctagcggcaaggcaatcgccaatcagacagtcaatgtaaagctgactgacaaggacggcaccgtgatggatgaggacattaccaccgattctaagggcaaggctaagttcaaaatggaagagaacggcaaatactccgtggagtgcaagttcgatggcaacggccaatatgcctcctcctctacg

SEQ ID NO: 52198 - DNA, 51 bp, synthetic construct
  source 1..51: mol_type = other DNA
cctaacctctcaaaccagtttgcgaagctcgtcggcatcacaagaggcttg

SEQ ID NO: 52199 - DNA, 51 bp, synthetic construct
  source 1..51: mol_type = other DNA
cctgaatttagcaactccttcgcccggatattcggtatcacccgaggcctg

SEQ ID NO: 52200 - DNA, 51 bp, synthetic construct
  source 1..51: mol_type = other DNA
cctgagctgtccaataactttgcccgattagtcgggatcactaggggcctt

SEQ ID NO: 52201 - DNA, 51 bp, synthetic construct
  source 1..51: mol_type = other DNA
ccggaagttagcatgacattcgcccggatcttcggcatcacgcggggcctg

SEQ ID NO: 52202 - DNA, 51 bp, synthetic construct
  source 1..51: mol_type = other DNA
ccagatagctcactcgtcttcgcccgagctttcggcatcacaaggggcctg

SEQ ID NO: 52203 - DNA, 51 bp, synthetic construct
  source 1..51: mol_type = other DNA
ccaaattccagtaatcagtttgccaagctggtcggcataaccagagggctt

SEQ ID NO: 52204 - DNA, 33 bp, synthetic construct
  source 1..33: mol_type = other DNA
aaactggccaagaagctcttcgtggacaagaca

SEQ ID NO: 52205 - DNA, 72 bp, synthetic construct
  source 1..72: mol_type = other DNA
gaacaagtttttgcctaccccggaataggccaggcaaccgttgccgctgggctgcgctctgacgtacctctc

SEQ ID NO: 52206 - DNA, 51 bp, synthetic construct
  source 1..51: mol_type = other DNA
cctaatctctccaacgagttcgctcgcctggtcggcattacaagaggactc

SEQ ID NO: 52207 - DNA, 48 bp, synthetic construct
  source 1..48: mol_type = other DNA
gccaaaggctatgtctggcattactcggtgctgaagcagtactgcttg

SEQ ID NO: 52208 - DNA, 276 bp, synthetic construct
  source 1..276: mol_type = other DNA
tgcgccaccgacaacatcaacgggactgtggaagacggcagtaatatcaacttcgagcctaataataccagcacattcgacgagctgaactccgacattcagaacctgcatcctggcgatgtgtataagctgaacaatgattactcattttccggcaagaacaccgatacctctttcgaccacgtcattaacatcgacaaagataatgtgacaatcaacgggaatggtcatgctaagatgcaggaggcccatcacaacacgtttcaatatttaatg

SEQ ID NO: 52209 - DNA, 42 bp, synthetic construct
  source 1..42: mol_type = other DNA
ctgcagccgctgttctttaatcaccagaaccaatgccctgtt

SEQ ID NO: 52210 - DNA, 51 bp, synthetic construct
  source 1..51: mol_type = other DNA
ccccagagcagcatgatattcgcccgcatctttggcattactagaggcctc

SEQ ID NO: 52211 - DNA, 51 bp, synthetic construct
  source 1..51: mol_type = other DNA
cctgatgcatcctctatttttgcccgcttcttcggcatcagccgaggactt

SEQ ID NO: 52212 - DNA, 222 bp, synthetic construct
  source 1..222: mol_type = other DNA
tcctggaatatgcaaaacgtaatcttcaacgactccctcacgcaagaacagcgcgaggaggtcatgcaaaatatacagaatgtcaccgagatcaccgagggccaggaactgaacgagacacccgacacttccaacgttagcggaaaagggtacaccgagatgggcaaagtataccaagacccaagtaccggaaagatgattatggtgcagaaccaatcatcc

SEQ ID NO: 52213 - DNA, 51 bp, synthetic construct
  source 1..51: mol_type = other DNA
ccaaacatctctatcacctttgcacggctgttcgggattacaaggggtttg

SEQ ID NO: 52214 - DNA, 57 bp, synthetic construct
  source 1..57: mol_type = other DNA
gtttacgtattcctgattagcgtcaacgacatccagctgttcgagggcatcagtacc

SEQ ID NO: 52215 - DNA, 36 bp, synthetic construct
  source 1..36: mol_type = other DNA
ttcaacctgctggccaagagcaccgtgatctacgga

SEQ ID NO: 52216 - DNA, 42 bp, synthetic construct
  source 1..42: mol_type = other DNA
gggaacgttatcatggataacggcaagctgcccttctttaat

SEQ ID NO: 52217 - DNA, 30 bp, synthetic construct
  source 1..30: mol_type = other DNA
acccggatgaagaaccggggctggagtagc

SEQ ID NO: 52218 - DNA, 276 bp, synthetic construct
  source 1..276: mol_type = other DNA
gagaacttcaccgacctccaacatcagatcaccgagaaagactttgtatccctgaatgacgacattatcctgaaccagcagaccttcaacgaggagaacacattcatggacgggattagcatcaagaataagcagatctctatcgagggcaacaaccacactattttcgccaaggatagcaacttcaatcaagcaaaactgtttaatatcattaactctaacgtcacactgtccaacatgctgatctcccacttcaacttcaagaagtgctacttt

SEQ ID NO: 52219 - DNA, 69 bp, synthetic construct
  source 1..69: mol_type = other DNA
agcgtctacgagggctttatggaatctttcgctcacgtgaccgagctggtgtccgctgtcccacccgtg

SEQ ID NO: 52220 - DNA, 51 bp, synthetic construct
  source 1..51: mol_type = other DNA
cctaactttagcaatgcattcgccaagctcttcggcataacccgggggctg

SEQ ID NO: 52221 - DNA, 213 bp, synthetic construct
  source 1..213: mol_type = other DNA
agttggaatatgcagaacattgtgttcaatgagaacatggacgagcagcagaaacagcgcgtcaaaaacgcaattcaagaggtgtcacaattggatcaaggtcagcaactgaacgagacccctgacataagcaagagcagcggcgagggatttactgagatggggaaggtttaccgcgactctcaatccggcaaactgattatggtggaaggc

SEQ ID NO: 52222 - DNA, 54 bp, synthetic construct
  source 1..54: mol_type = other DNA
cccgagatctccatccacttggcgtctatattcggacttggaaggggactcgac

SEQ ID NO: 52223 - DNA, 291 bp, synthetic construct
  source 1..291: mol_type = other DNA
tccaattttagcgccactgacgtgcagaccgacgccgccgacgtgaactcgggcactggaaagccgaacgtgacagatgttagcggcaacgctgagtactatgtgatgcctgtggctaatctccaccgtgtcactgtcaatggggttgaccgaagcgacgcgattagcaacagcgcagtcggagttctcgctaaggttattgacgaaggccagatcagcattaagccaggcgaaatcatcatcacgacgccctctgggatttctcccgaggacgctgttaggagaccggga

SEQ ID NO: 52224 - DNA, 30 bp, synthetic construct
  source 1..30: mol_type = other DNA
aaccacctgaagtggaaaggctacaatcac

SEQ ID NO: 52225 - DNA, 72 bp, synthetic construct
  source 1..72: mol_type = other DNA
atgttcctcgcccgcggatttgtggacctcggcaatgtggtgacgaatatttacgatggcatctttcgcgtg

SEQ ID NO: 52226 - DNA, 279 bp, synthetic construct
  source 1..279: mol_type = other DNA
gctgccgagaacttaaccgacgacgctatgggcgatgactccaaggaaatcctggagacagtccaagaggacattactgctgatgggtcctctgatgttctcgagactgcacaaaatgatatttataccgcctccgacgattccttcaccaatctgactgacgagattgccgtgaaagatgtcgtggaccttactcacgactacaagtttaacaatgagaccgacgacgtgactgcggtccaattaactgagacaactaaccaggactacagtacactg

SEQ ID NO: 52227 - DNA, 63 bp, synthetic construct
  source 1..63: mol_type = other DNA
atgattcagatcctggattgccaaggtgccatgggcaccgtgacgaatgctgtggacaccgtc

SEQ ID NO: 52228 - DNA, 111 bp, synthetic construct
  source 1..111: mol_type = other DNA
tccctcgcttttgatgtcgttggtggaattgtgactggaaacgaagacattgatcgcgtcaattctaacaacggaaacttcttcgaatgttgggataacatgcgaaattcc

SEQ ID NO: 52229 - DNA, 51 bp, synthetic construct
  source 1..51: mol_type = other DNA
cctgacatcaccaccaatattgctaacattttcggtatcaggagaggactg

SEQ ID NO: 52230 - DNA, 39 bp, synthetic construct
  source 1..39: mol_type = other DNA
tttttcaagagcgctccgcacggcacctactacatgcat

SEQ ID NO: 52231 - DNA, 195 bp, synthetic construct
  source 1..195: mol_type = other DNA
gcgttacaagtcaaccccgacatgatggctaagacacacgagtcccaggccaagcaggccaccagccaggtttccaccggcgaggatttcacaagcaatgcctctgctggatctagcctggagcagagtggctatgccgaggtcggcaaggtctaccgggaccctgacactggcaaacttgttatggtacaagag

SEQ ID NO: 52232 - DNA, 213 bp, synthetic construct
  source 1..213: mol_type = other DNA
tcttggaacatgcaggccatcgtcttcaacgaggacgtcaccccggaacaacgacaggacgctataaacgcaatgaagcaggtgaccgaggtcgaccaaggccagcagctcaacgaaactcctgatgtcagcaacagctcgggagaaggctatgccgaaatggggaaagtctataaggaccccaagactggcaaaatgatcatgatcgagtct

SEQ ID NO: 52233 - DNA, 264 bp, synthetic construct
  source 1..264: mol_type = other DNA
gccgatctgaactgcactggcgatatcggcgatgtgctcaaggacggtggcgacatcaagtcattctacgacctgaacggagacataacggcggaaaactccagcttcaatatgcagagtgactatacattcgataatcagaccgacatgaactacaccaacggcatcaggatcgtcaaggctgacttcaccatcaacgggatcgagcgcgagaaagatgagacaattgtggctgtctaccacttcctgatcaagaaaatcttc

SEQ ID NO: 52234 - DNA, 30 bp, synthetic construct
  source 1..30: mol_type = other DNA
acccggatgaagaaccggggttggagctct

SEQ ID NO: 52235 - DNA, 246 bp, synthetic construct
  source 1..246: mol_type = other DNA
atgttctctatcgcattcggggacaataagaacttcgctggaacagtatccgtaactctgccatacgccctgagggatggcgaggacgccggccggatttatgtcgccttcgtgaaccccgagaccaacaagctcgaatccatgtccggcacctggagcgacggctatgttacatttgccactgaccacttttccgattacgctgtaatgcattctgaaccttccgacgactctggatcttctact

SEQ ID NO: 52236 - DNA, 30 bp, synthetic construct
  source 1..30: mol_type = other DNA
accgaacatcctctgttcaacgagtggaat

SEQ ID NO: 52237 - DNA, 42 bp, synthetic construct
  source 1..42: mol_type = other DNA
accatgagccccgaggccctggcttcttacctccctggttat

SEQ ID NO: 52238 - DNA, 66 bp, synthetic construct
  source 1..66: mol_type = other DNA
atggaaatcctgcccgtggactttagcaaggagatgttctacgtgctccggatgcaccttcctgtg

SEQ ID NO: 52239 - DNA, 267 bp, synthetic construct
  source 1..267: mol_type = other DNA
gtcattggccagcagggcaccgcccacaaggctaacgtgactaatgccagcaacactgtcaacaacacctcttccgtcaacgtggagaagatcaataccgagaatacagccaactccaatcaagagtcttccaaatccagcgactggatcgacagcgacggggctcaccacttctacgagaacggcaaggaatatgtcggatcgcgcgaaggccagcacatggacatcgatacccataactatgttaaggaacatgggatgggcgat

SEQ ID NO: 52240 - DNA, 126 bp, synthetic construct
  source 1..126: mol_type = other DNA
ggcacaggcggaatctacctggtcgaaattatgagccagctgttcaacgtcgctaatcccttcatccctatgacctacgccattaccctagttcgggaagcccaatggggtctaatttggtccaac

SEQ ID NO: 52241 - DNA, 30 bp, synthetic construct
  source 1..30: mol_type = other DNA
accgagcatccgctgtttgaaggcttcaac

SEQ ID NO: 52242 - DNA, 39 bp, synthetic construct
  source 1..39: mol_type = other DNA
cccattttcctgaagggcaccagcatccacatccttgac

SEQ ID NO: 52243 - DNA, 213 bp, synthetic construct
  source 1..213: mol_type = other DNA
agttggaacatgcagagcgttgtgtttagcgacatgagtcagcaggagaagcagcagaccatggaggccatgaaaaaggctgtcgaactgaaccaggggaaggaattaaacaacacaccgaactccacgtcgggatcaggcgagggctacgtggaactggggcaagtatataaagaccccgaaacaggcaagctcatcatgattcaagatggg

SEQ ID NO: 52244 - DNA, 30 bp, synthetic construct
  source 1..30: mol_type = other DNA
ttcctggagtctggcggacatgctggtaac

SEQ ID NO: 52245 - DNA, 33 bp, synthetic construct
  source 1..33: mol_type = other DNA
aagaccttcgagttcttcatcttcattttcccc

SEQ ID NO: 52246 - DNA, 66 bp, synthetic construct
  source 1..66: mol_type = other DNA
aatatgcctagtccacaattcttcgagcaccataaggcttacgccatcgtgctgggctcttctact

SEQ ID NO: 52247 - DNA, 213 bp, synthetic construct
  source 1..213: mol_type = other DNA
tcatggaacatgcagagcatcgtgttcaatgaggatatgacacagcaggagaaacagcaagtcatgcaaaccatcaagtctgtctccgaggttaatcagggtcaacaacttaatgaaacaccagacagcagcaacagcagcgggcagggttacactgagatggggaaggtttacaaagatccttctactgggaaacttatcatggtagaggga

SEQ ID NO: 52248 - DNA, 213 bp, synthetic construct
  source 1..213: mol_type = other DNA
agctggaacatgcagagcatagtgtttaacgaggacatgacacagcaggagaaacagcaagtgatgcagacaattaagtccgtctccgaagtaaaccaggggcacgaactgaacgatacgcccgatacatcaaattcaagtggtcaaggttataccgaaatgggcaaggtctacaaagaccccaaaacgggaaagcttattatggtggaaggc

SEQ ID NO: 52249 - DNA, 213 bp, synthetic construct
  source 1..213: mol_type = other DNA
tcctggaacatgcaggccatcgtgttcaatgacagcgtcactcctgaacaacgacaggacgccatcaatgctatgaagcaggtgaccgagatcgaccagggtcagcagctgaacgagacacctgatgtgtcctcgtcttctggcgaaggctactctgagctgggcaaggtctacaaggacagcaacaccggcaaactcatcatgatcgagaac

SEQ ID NO: 52250 - DNA, 213 bp, synthetic construct
  source 1..213: mol_type = other DNA
tcctggaacatgcaggccatcgtgtttaacgatgacgtcaccccggaccagaagcaggacgctatcaacgccatgaagcaggtgactgagatcgatcaaggccagcagctgaacgagacccctgacgtttcatcatctagcggagaaggatacagcgagctcggcaaggtctacaaggaccccaagactggcaagctgatcatgatcgagaac

SEQ ID NO: 52251 - DNA, 213 bp, synthetic construct
  source 1..213: mol_type = other DNA
tcctggaacatgcagaacatcgtgttcaatgagaatatggacgaacagcagaaacagaaagtcaagaacgctatcaccgaagtgtctcaaatcgaccagggcgaggagctcaaagattcgcccgacattagcaatagctctggcaacgggttcactgagatgggaaaagtttaccgtgatagtgacaccggcaagttgatcatggtcgaaggg

SEQ ID NO: 52252 - DNA, 210 bp, synthetic construct
  source 1..210: mol_type = other DNA
tggaacatgcaggccattgtcttcaatgacgatatttctccggaccaacggcaggacgccatcaacgctatgaaacaggtgactgagatcgatcaggggaagcagctcaacgagacacccgacgtctctagttcctctggcgagggctactccgaactgggcaaggtttacaaggaccctaagaccggcaagctgatcatgattgagaat

SEQ ID NO: 52253 - DNA, 213 bp, synthetic construct
  source 1..213: mol_type = other DNA
tcttggaacatgcaggctatcgtcttcaatgactctgtcacgccgcaagagcgacaggacgcaatcaatgccatgaagcaggtgaccgagatcgaccagggccagcacctgaaccagactcctgatgtatcgaacagctccggcgaaggctacgccgagctgggcaaggtctacaaagactccaacaccggcaaactcatcatgatcgagaac

SEQ ID NO: 52254 - DNA, 213 bp, synthetic construct
  source 1..213: mol_type = other DNA
agctggaatatgcaggccattgtattcaacgagagcatgactccacaagaaaagcagcaggtcatgcaaacgatcaagtcagtatccgaagtcaaccagggccaggaactgaaccaaacaccggacacaagcaacagctccggtcaaggctacactgagatggggaaggtctataaagacccatcaactggcaagctgattatggtggaggga

SEQ ID NO: 52255 - DNA, 36 bp, synthetic construct
  source 1..36: mol_type = other DNA
ggctccattatcccatctaattccgttatcttccgg

SEQ ID NO: 52256 - DNA, 213 bp, synthetic construct
  source 1..213: mol_type = other DNA
agctggaatatgcaggcaatcgtgtttaatgaggacatgacgccggaacagaagcaacaggtcatgcaaagcattaaatcagtatcggaggttaaccagggtcaacagctgaacgagacacccgatacaagtaattcgagtggacagggctatactgagatggggaaagtgtataaggacccgtctacgggcaaactgataatggtggagggt

SEQ ID NO: 52257 - DNA, 213 bp, synthetic construct
  source 1..213: mol_type = other DNA
tcatggaacatgcagagcgttgtgtttaatgacgatatgacacaggatcagaaacaggaagtgatgaatgctatgaagcaggtcagcgaggtcacacaaggccaggagctgaacgagacacctgatacaagcaacagcagcgggcagggctataccgaaatgggcaaagtgtataaagaccccgcaactggcaggctgatcatggtggaaggg

SEQ ID NO: 52258 - DNA, 210 bp, synthetic construct
  source 1..210: mol_type = other DNA
tggaacatgcagtctatcgtctttaacgagaatatggacgagcagcagaaacagaaggtcaaggacgccatcaccgaagtgtctcaaatcgatcagggcgaggaactcaaggactcacctgacatttcgaagtcttcgggcgatggatttaccgagatgggaaaagtgtaccgagacagcgatactggcaagctgatcatggtggaaggc

SEQ ID NO: 52259 - DNA, 213 bp, synthetic construct
  source 1..213: mol_type = other DNA
tcttggaacatgcaggccatcgtcttcaacgaggatatcaatccggagcagagacaggacgctatcaacgccatgaagcaggtaaccgaaatcgatcagggcaagcagctgaacgaaacacccgatgtctctagtagctcgggcgaaggatacgcagagctcgggaaggtctacaaagacagcaataccggcaagctgatcatgatcgagaac

SEQ ID NO: 52260 - DNA, 210 bp, synthetic construct
  source 1..210: mol_type = other DNA
agctggaacatgcagagtgtcatattccaagatactagccaggacccgtcccaagcggtacagcagagccctacaaacatcaccgaggtgaccgagggtcaggagctgaatgagactccagagtcctctgagtccagtggccagggctacatggagatggggaaagtgtataaggacccgtcgaccgggaagctcattatggttgaaggg

SEQ ID NO: 52261 - DNA, 78 bp, synthetic construct
  source 1..78: mol_type = other DNA
cacggcgagatcgtgccttggtttccattcctgaccgctatgagcgatcccgaggacacagctgccatgctcactgag

SEQ ID NO: 52262 - DNA, 72 bp, synthetic construct
  source 1..72: mol_type = other DNA
atggctctgatggagtttatcgatagtatatggtgcggactctgcgactttgcttcctacgtctggggcaac

SEQ ID NO: 52263 - DNA, 210 bp, synthetic construct
  source 1..210: mol_type = other DNA
tcttggaatatgcagagcgtgattttccaagatacaagccaggaccaaagccaggcggtgcaaagctcacaccctaacgtcacggaagtttcggagggccaggaactcaacgatactcctgaatccagtcaatcatcagggcaaggctatatggagatgggcaaagtgtacaaggaccccgctaccggcaagctgattatggtggaaggt

SEQ ID NO: 52264 - DNA, 210 bp, synthetic construct
  source 1..210: mol_type = other DNA
tcctggaacatgcagtccgtggtctttcaagagagtaaccagaacccccaaaacgttatcaacgagaactctcccgacgtgaccgaagtctctgagggccaggtcctgaatgagactcctgatacatcagacagcagtggccagggttacatggagatgggcaaagtgtataaggacccaagcactggcaaactcgtcatggtggaaggc

SEQ ID NO: 52265 - DNA, 42 bp, synthetic construct
  source 1..42: mol_type = other DNA
acaattggggccgagaacatggttggattgatcatcggtatg

SEQ ID NO: 52266 - DNA, 264 bp, synthetic construct
  source 1..264: mol_type = other DNA
gccgacctgaacaattccacaagcgacttaactcaagacaatagcgactttcaaaatctcaccaatactatggagcccgaccgggagaagtccgagtccgggatctccaccgactatttccaaaacaataatatcagcaacaaggacgattccaccgtctacataatcctcgataatgatgccgataaggagaatgtctaccttggggactacgtgacttggatcgtgtctgtgtacaatctgaacggcaatacggcgaaatgc

SEQ ID NO: 52267 - DNA, 267 bp, synthetic construct
  source 1..267: mol_type = other DNA
gcttacttcactctgcaaagtcagtacaagactatctctatgagcggcatcactatggaagtgcccacatccaatgcaactgttaacaacgtcagtgcaaactataacacttatgacgaccaggaaaataacctgtctgtgaagacctgggcttatcgggatatgaacgacgtcaatggcacagcacaggccgtactggagattggaacacaatatgggagtaacctggccaataatgtgacctacgacaacgtctccgtggctaat

SEQ ID NO: 52268 - DNA, 210 bp, synthetic construct
  source 1..210: mol_type = other DNA
tcctggaacatgcagagcatagtgttttccgacatgagccctgaggagcgccagaacgtcatggaaaccatcaatcaggtgtccgaggtcacacaaggccagcagctgaacgagactcccgacaccagcaactcttctgggcaagggtacactgagatgggccgcgtgtacaaggaccctgccaccggccggcttatcatggtggaagga

SEQ ID NO: 52269 - DNA, 210 bp, synthetic construct
  source 1..210: mol_type = other DNA
tcttggaacatgcagtccgttgtcttttctgacacatccaaccaacagagtcaggcggtccaatcacccaacgtcaacgtgaccgaagtcagcgagggacaggagctgaatgagactccagatagctctcaaaattcaggacagggatatatggagatgggccgcgtttataaagaccccagcaccggcaagctcatcatggttgaagag

SEQ ID NO: 52270 - DNA, 75 bp, synthetic construct
  source 1..75: mol_type = other DNA
cacggcgagatcgtgccttggttcccctttctgaccgccatgagcgatccagctgacacatccgccatgttgacc

SEQ ID NO: 52271 - DNA, 210 bp, synthetic construct
  source 1..210: mol_type = other DNA
agctggaacatgcagtctatcatatttagtgacatgagccaggacgagaaagactctattatggaggccatgaaggatgctaagcccatcgacaaggggcaggagatcgatactccacctgagatcagtcagtcctctgggcaaggctataccgaaatgggcaaagtgtacaaagacccgacgacaggaaaactgatcatggtcgaacag

SEQ ID NO: 52272 - DNA, 30 bp, synthetic construct
  source 1..30: mol_type = other DNA
cggaagtataactatacttctaataatgcc

SEQ ID NO: 52273 - DNA, 207 bp, synthetic construct
  source 1..207: mol_type = other DNA
agctggaatatgcagagcgtggtctttcaagacaaccagaaccaggagaaggccattcaagaatctagtcctgacgtgaccgaggtcagcgagggtcagaccctgaacgagacacccgagtcctcaaactccagcgggcaaggctacatggaaatgggcaaagtctacaaggacccatccactggcaagctcattatggtggaaggc

SEQ ID NO: 52274 - DNA, 228 bp, synthetic construct
  source 1..228: mol_type = other DNA
atggtcgacgtgctgatcgtcgagtcttctgtggctaagaacggctacgatgccagcgccatcgctgcctccataaacaaggcaattaacaacggactcctcatgggcgtcgatcacgtggagcccaaggacctgaacgtgaagcagggaagtaaagcggttggagtgtacttcaatgctctgcccggggaccggagctctccatcatgggacctgcctattgatggc

SEQ ID NO: 52275 - DNA, 207 bp, synthetic construct
  source 1..207: mol_type = other DNA
agctggaacatgcagtccgtggttttccaagataaccaggagtctcagaaagccctggacgagagtagcccagacgtcaccgaggtatccgaaggccaggtgctcaacgaaacacctgacaccagtgacagttcagggtccggctacatggagatgggaaaggtctacaaggacccctctactggcaagctgatcatggtggaggag

SEQ ID NO: 52276 - DNA, 51 bp, synthetic construct
  source 1..51: mol_type = other DNA
tggtgcatcatacatcgtcaatattgcgaaattgacagtcagaacctcctc

SEQ ID NO: 52277 - DNA, 210 bp, synthetic construct
  source 1..210: mol_type = other DNA
ggatggaatcttcaaagcgttatcttctccgacatgacccctgaggagaggcagagtacaatggagtccatttctgagatcaccgacgtcaagcagggcgaacagctgaactccactcccgataccagcgacaaatccggcgaaggatatgtagaacagggcaaagtataccgggacagcaagacaggcaacctgatcatggtagagagc

SEQ ID NO: 52278 - DNA, 207 bp, synthetic construct
  source 1..207: mol_type = other DNA
agctggaatatgcagtccgtggtttttcaagaaaaccagaaccctcaacaacaaataagcgagaactcacccgatgttaccgaggtggctgagggccaggccctgaacgaaactcctgacaccagcaactcctcgggtcaaggctacatggagatgggcaaagtctacaaggaccccagtaccggcaagctgattatggttgaaggt

SEQ ID NO: 52279 - DNA, 135 bp, synthetic construct
  source 1..135: mol_type = other DNA
gccgacggcggcttcggcggctccgatgacgccggcggcgaatccgctgacaaatatggatacgaagcatggaccggagatatcctcaccatcattactggagaccccgactacgagctgcctggcgaaactgaa

SEQ ID NO: 52280 - DNA, 42 bp, synthetic construct
  source 1..42: mol_type = other DNA
aggtccttcttcatcaagggccaccaatttcctgtttgtgcc

SEQ ID NO: 52281 - DNA, 45 bp, synthetic construct
  source 1..45: mol_type = other DNA
cagggatacatggggcagttcgacggcttctttttgacgcaaaat

SEQ ID NO: 52282 - DNA, 39 bp, synthetic construct
  source 1..39: mol_type = other DNA
gtgaaagaccccttcatcaagaacaccattctgatggat

SEQ ID NO: 52283 - DNA, 36 bp, synthetic construct
  source 1..36: mol_type = other DNA
aagaactttgtggacctgaaattcttcgatgagaac

SEQ ID NO: 52284 - DNA, 207 bp, synthetic construct
  source 1..207: mol_type = other DNA
tggaaccttcaaagcgttatcttctccgatatgagccccgaggaccggcaggccgctatggagagcatcaaggacattacaaacgtgacacaaggcgagaagctgaacgagacccctgacaccagcaattcttccggagaaggctacgtggagcagggcaaagtctacaaggactctaagaccggcaacctcatcatggtagagggc

SEQ ID NO: 52285 - DNA, 207 bp, synthetic construct
  source 1..207: mol_type = other DNA
tggaacttgcaaagtgttattttctccgacatgtcccctgaggaccggcagcaggcgatgcagtcaataagcgagatcaccaacgtgacacagggcgagcagctgaacgagactcccgacacaagcaatagtagcggggagggttatgttgaacaggggaaagtgtataaagattctaagaccggcaacctgatcatgatcgaggag

SEQ ID NO: 52286 - DNA, 102 bp, synthetic construct
  source 1..102: mol_type = other DNA
atctatggcttcaagaacctaatacaacccggaatcagcctggtttacaacgccatagggacccagctggctcccaacatggttacgctggtagtgttcgat

SEQ ID NO: 52287 - DNA, 30 bp, synthetic construct
  source 1..30: mol_type = other DNA
atgaacgagatcattgccttcctgagtgaa

SEQ ID NO: 52288 - DNA, 183 bp, synthetic construct
  source 1..183: mol_type = other DNA
gtcagcctgagctttgaggagaacaccgtggatgagggcccacactacgagaacgtgaccaaggaaatgacttccaacctcaactctaccgaggatgtgtacttcgacaagaccacagacggggtcgactacaaccagaatgagaccagccagctggacgtgaagtaccagtactccgacaat

SEQ ID NO: 52289 - DNA, 207 bp, synthetic construct
  source 1..207: mol_type = other DNA
agttggaacatgcagagcgtggtctttcaagatagtcaggatcagcagaaggccattgaggaatcatctcccgacgtcaccgaggtggctgagggccaggtgctcaatgaaacacccgacacaagcgacagcagcggccagggctacatggagatgggcaaggtttacaaagacccttctactggcaagctgatcatggttgaaggg

SEQ ID NO: 52290 - DNA, 207 bp, synthetic construct
  source 1..207: mol_type = other DNA
tggaatttacaaagcgtcatcttctctgacatgagcccggaccaacggcagcaggccatggagagcatctccgagatcaccaacgtcacccaaggcgaacagctgaacgagacacctgacaccagcgagatgtccggcgagggctacgtggagcagggaaaagtctacaaagactctaagacaggcaatctcattatggttgaggaa

SEQ ID NO: 52291 - DNA, 207 bp, synthetic construct
  source 1..207: mol_type = other DNA
tcttggaacatgcagggcgtggttttttcggacatgacccaggaggagaagcagaacgtcatggagcagatgagccaggtctcggaggtggaccagggccagcagctcaacgaaactcccgacgtgtccaacaagtctggcaaggggtacacagaaatgggcaaggtctaccaagatagcaatggcaaactgatcatggtggaagag

SEQ ID NO: 52292 - DNA, 207 bp, synthetic construct
  source 1..207: mol_type = other DNA
tcctggaacatgcagtctgtggttttccaagactcacaagaccagcagaaggctattgaggagagcagtccagatgtcactgaggtggccgagggccaggtgctgaacgagactcctgacacatctgattcaagcggtcagggctacatggagatgggcaccgtttacaaggacccaacaaccggcaagctcatcatggtggaagac

SEQ ID NO: 52293 - DNA, 228 bp, synthetic construct
  source 1..228: mol_type = other DNA
ttcaacgcccagatcactctcactaatggcgcttccacctacaaggggatcacaaactacgagggcgtctgtacaatttctaaggtcctggtcggggactatcagatccgggttatctgtgacggttacgagatgtataccggcaacgtcagcattagtaaaactaccggccagatccccattaccctcgtacaaaaagagatgcctacctacctgggcatgacactg

SEQ ID NO: 52294 - DNA, 255 bp, synthetic construct
  source 1..255: mol_type = other DNA
catcttacggcgatctacacctgggaaggcatcactgcctgtagtgttcgcgtcttctgcgaggattgcgattacctggctggcatcgagcaccctgagattgaatccaaagtgaaaatcccacctaccgaaaccgagatgggtacaaccgaatattatgttagtggtaccgtggaaggctacgactactattccgggaaggacgtgcaggacatccccgtggtcgtccccggcaacggctctgacaatctcata

SEQ ID NO: 52295 - DNA, 30 bp, synthetic construct
  source 1..30: mol_type = other DNA
tctacaggccttagcgacggacctgttccc

SEQ ID NO: 52296 - DNA, 204 bp, synthetic construct
  source 1..204: mol_type = other DNA
agctggaatatgcaatccgtcgtgttccaagatagccagcaacaacagcagattgagcagacctccccggacgtcaccgaagtgtccgagggccaggtgctgaacgagactccagatacaagtaacagctccggttccggctatatggagatgggcaaagtgtacaaggacccagctactgggaagctgatcatggtcgaaggg

SEQ ID NO: 52297 - DNA, 243 bp, synthetic construct
  source 1..243: mol_type = other DNA
gcccaggacacaaacaacatcaccgacctgaacaataacggcgctatcggtaacaaccctattatcgatgatgggaacggcagcctcgagatccagaacgccaacaaccttaccgcggtcggcacatttgataatctccaagtagaaattgacaaggctcccgagggctccgtgctgaacctcacgagagactacaacggggcctacggctctaggattcagttcaataaaaacctgactatt

SEQ ID NO: 52298 - DNA, 195 bp, synthetic construct
  source 1..195: mol_type = other DNA
tcttggaacatgcaggccatgattgatccatccgagaatgtccacgagcagatgcagcagaagatgaccgaggtggaccagggccagcagctcaacgacacgccagacacaagcaatagtagcgggcagggctacaccgagatgggcaaagtgtacaaggacccttcaactggcaaactgatcatggtagaaggc

SEQ ID NO: 52299 - DNA, 204 bp, synthetic construct
  source 1..204: mol_type = other DNA
tcttggaatatgcagagcgttgtctttcaagacaacccccaacaaagcgccatccaagattccagccctgatgttaccgaggtagaggaaggccaggtcctcaacgatacgccggatacgagcaactctagcgggcagggctacatggagatggggaaagtatataaagacccctcttccggcaagctgattatggtggagaat

SEQ ID NO: 52300 - DNA, 39 bp, synthetic construct
  source 1..39: mol_type = other DNA
aacttcgccctggacccagctaccgggatcattggttcc

SEQ ID NO: 52301 - DNA, 66 bp, synthetic construct
  source 1..66: mol_type = other DNA
ccaatgatccaagttattcccgagatgaacttcgctctggaccctgtcaccggagttattggaagt

SEQ ID NO: 52302 - DNA, 42 bp, synthetic construct
  source 1..42: mol_type = other DNA
accatgacacccgagggtctggccgcatacctgcctcaagag

SEQ ID NO: 52303 - DNA, 300 bp, synthetic construct
  source 1..300: mol_type = other DNA
gccctcaaccggagcgtgctagtcggcgagcaggtcaccttcgagattgtggttcagaacttagggcagatcgacctgaataacgtggtcgtccgcgaggactcctttaacggccttgtctatgattccttcatcgattacaccgggttgtggaccaagaacaacgatctgtcctggactctcaacgtgcccctggtcgctggcgaatatgccggattcttcgtgacattcaacactaccgctgaggggaaatttgtcaatgtggtggtcgccgattccaaggaattacggaactcaaaa

SEQ ID NO: 52304 - DNA, 36 bp, synthetic construct
  source 1..36: mol_type = other DNA
gttgcaggcctgggtgccgaccaactcgccgccgct

SEQ ID NO: 52305 - DNA, 195 bp, synthetic construct
  source 1..195: mol_type = other DNA
tcctggaacatgcaggccatgctggacccagaccacaacattcaggagcagatgcagcagaagatgaccgaggtggaccagggccaggagctgaatgagacacccgacacaagtaacagcagcggtcagggttacaccgaaatgggaaccgtctacaaggaccctgctactggcaaactcatcatggttgaaggc

SEQ ID NO: 52306 - DNA, 135 bp, synthetic construct
  source 1..135: mol_type = other DNA
gtgaacggagactttgggggctctgacgacgctggcggcggagtcgccgatgactatggctacgaagcatggaccggcgacatcctcaccatcataactggagaccccaattacgagctgcctggcgaaactgag

SEQ ID NO: 52307 - DNA, 54 bp, synthetic construct
  source 1..54: mol_type = other DNA
cccaacatcacaactgtgtttgcactgcgctttggcttgggacgtggattagac

SEQ ID NO: 52308 - DNA, 201 bp, synthetic construct
  source 1..201: mol_type = other DNA
agttggaatatgcagagcgtcgtattccaagatagccagcagcagccgatcgagcagagctcccctgacgtgacggaggttagcgaaggacaggcattgaatgagacccctgacacgtctaactcttccggtcaaggttacatggagatgggcaaggtctacaaagatccttctacggggaagctgattatggtcgagggg

SEQ ID NO: 52309 - DNA, 36 bp, synthetic construct
  source 1..36: mol_type = other DNA
atgaacgtgaatctggatcccataagtggagttctt

SEQ ID NO: 52310 - DNA, 69 bp, synthetic construct
  source 1..69: mol_type = other DNA
ctctccatggacgacatcaacgccgagattgacaaggtttgcgctgcggcggatgagctgagcaacagt

SEQ ID NO: 52311 - DNA, 252 bp, synthetic construct
  source 1..252: mol_type = other DNA
gcatctgacatcaaccacacaccatccgatcccacgacctttaatgataccacaccaatcaacgagtatcagcccctgaccgataatttcgatgatagtaacaataccaacgagaacttacaacctggaacctttgaggagctgaaatacgacattgaaaacctgaaaagcggcgacacatacgacataaataaggactactacttcaatgacaacggcgaaaatatacatagcaataatcgtgtaatcgag

SEQ ID NO: 52312 - DNA, 45 bp, synthetic construct
  source 1..45: mol_type = other DNA
acgatgcaacccgagagcctggccgcttatctccctcacggatac

SEQ ID NO: 52313 - DNA, 156 bp, synthetic construct
  source 1..156: mol_type = other DNA
tacatgaccgactggaatgggctgggccacattaacgacgagatgtccagcatcgattacggaagccatgactcctctaccaccgactctatctacgacgatagcacaggagagctccgggacgatacactgaactacaagatcttcgaggaatac

SEQ ID NO: 52314 - DNA, 33 bp, synthetic construct
  source 1..33: mol_type = other DNA
tttaggctggacggcagctccttccaactatgg

SEQ ID NO: 52315 - DNA, 210 bp, synthetic construct
  source 1..210: mol_type = other DNA
ctcctgaccaccatcgactattctaatgacatcatcgatagcattgactccaagaacgagatgagcaagattactgaagccatcgatttctgctacgcctccggcaagggctctaagaagattgtcctggtggacttcaaccaaaacgcgaacatgaaactgtacaacgacggcaagaagggaatctgtatcaatcagagcaagttcgtg

SEQ ID NO: 52316 - DNA, 102 bp, synthetic construct
  source 1..102: mol_type = other DNA
ctttacggcttcaaacaccttatccaaccggggattagcctcatctacaacgccgttggtacacagctggcccctaacatggtgacgcttgtggtctttgac

SEQ ID NO: 52317 - DNA, 69 bp, synthetic construct
  source 1..69: mol_type = other DNA
aagaccctcatggacacaccaactgtgtccctgatcgtccctggcgtggaggagtggaaaaagagcatc

SEQ ID NO: 52318 - DNA, 42 bp, synthetic construct
  source 1..42: mol_type = other DNA
accatgacacccgaagccctggctgcatatttgccccaagag

SEQ ID NO: 52319 - DNA, 201 bp, synthetic construct
  source 1..201: mol_type = other DNA
tcctggaatatgcaggccatggtcgacccaactgaaagcatccaagagaaaatgcaacagcaacagcagacgaccgaagtctcgcaagggcatgaactgaacgatacacctgataccagcaattcttccggccaagggtacactgagatgggcagagtgtataaagatcctagcaccggcaagcttatcatggtggagggc

SEQ ID NO: 52320 - DNA, 60 bp, synthetic construct
  source 1..60: mol_type = other DNA
atggccatcctcgaggacatttggaatggcttctgcgattttgtgaactacctgtggtgt

SEQ ID NO: 52321 - DNA, 201 bp, synthetic construct
  source 1..201: mol_type = other DNA
tcctggaacatgcaaagcgtggtcttccaaaaccaggagcagcagacattcgacgaatcgagccccgatgtgaccgaggtgtctgagggccaagtgctgaacgaaactccagatagcagcaacagcagcggccaaggctacatggagatgggaaaggtctacaaagatccttctaccggcaaactgattatggtggaagga

SEQ ID NO: 52322 - DNA, 39 bp, synthetic construct
  source 1..39: mol_type = other DNA
gctaccttcggcggtagcttcgccggactgtttggcgga

SEQ ID NO: 52323 - DNA, 63 bp, synthetic construct
  source 1..63: mol_type = other DNA
ctctctaacttcgactttcaatttatgttcctgtcctacttttgcaagaatacccctacatca

SEQ ID NO: 52324 - DNA, 45 bp, synthetic construct
  source 1..45: mol_type = other DNA
atgggcatcttcattaagaacgtgaacggtgactacctcctggag

SEQ ID NO: 52325 - DNA, 198 bp, synthetic construct
  source 1..198: mol_type = other DNA
agctggaacatgcaggctatgatcgacccgtctcaaaacatacaggagcagatgcaacagcagaagacgacccaagtagatcagggccagcagctgaatgacacacccgacactagtaacagcagcggacaggggtacactgaaatgggcaaggtctacaaggatcctgccaccggaaaacttattatggtggaaggc

SEQ ID NO: 52326 - DNA, 198 bp, synthetic construct
  source 1..198: mol_type = other DNA
agctggaacatgcaggccatgattgatccgaatcagaacattcaggagcagatgcagcaacagaccatgactgaggtagaccagggacagcagctcaacgagacaccagacacctccaactctagcgggcagggctacactgagatggggaaagtgtataaggacccttccaccggcaaactgatcatggttgagggt

SEQ ID NO: 52327 - DNA, 39 bp, synthetic construct
  source 1..39: mol_type = other DNA
gtgaagcctgagaacgtcgccaatgaactgagccatgtc

SEQ ID NO: 52328 - DNA, 63 bp, synthetic construct
  source 1..63: mol_type = other DNA
atgggcatcctcaccgagatctgggactggctggtcgattttggagtctttatatggggaaac

SEQ ID NO: 52329 - DNA, 198 bp, synthetic construct
  source 1..198: mol_type = other DNA
tcctggaatatgcaggccatgattgaccccgagcacaacgtgcaggagcagatgcagcagaagactatgaccgaggtcgaccagggccaccagctgaacgagacccctgatacaagtaacagctctggtcaaggctacaccgagatggggaaagtttacaaggaccctgcaactggaaaactcatcatggtagagggc

SEQ ID NO: 52330 - DNA, 198 bp, synthetic construct
  source 1..198: mol_type = other DNA
agttggaacatgcaggccatgatcgatccaactcaaaatatacaggaacagatgcaacagcagaagaccacagaggtggaccagggccagcagctcaatgagacccctgacactagcaactcttctggtcaaggatacaccgagatgggaaaggtctataaagacccagctactggcaagctgattatggttgaaggg

SEQ ID NO: 52331 - DNA, 42 bp, synthetic construct
  source 1..42: mol_type = other DNA
ttcgaagtgatctttactcatacaatcactactagtcttgaa

SEQ ID NO: 52332 - DNA, 30 bp, synthetic construct
  source 1..30: mol_type = other DNA
atgatttacctgattagtgaaacatctctg

SEQ ID NO: 52333 - DNA, 198 bp, synthetic construct
  source 1..198: mol_type = other DNA
agctggaacatgcaggctatgattgatcctactacctctatccacgaccagatgcagcagaaggaaaccgtcgaggtggaccagggccagcagctgaatgagacacctgacactagcaactcctcggggcagggatacacggaaatgggaaaggtctacaaggacccagccaccggcaagctcatcatggtagaggga

SEQ ID NO: 52334 - DNA, 63 bp, synthetic construct
  source 1..63: mol_type = other DNA
atcaacaccctggagatacagcctcatatctccttccaaatgctatccttttcattcttcatt

SEQ ID NO: 52335 - DNA, 72 bp, synthetic construct
  source 1..72: mol_type = other DNA
gtcctgactgtgctcctgctgtccatcttagccgtcagcgctgccccttctcccgagatgatgtcatgggtc

SEQ ID NO: 52336 - DNA, 51 bp, synthetic construct
  source 1..51: mol_type = other DNA
aatccagccctgcataaaatctggttcctgcactggaacagttggtcttcc

SEQ ID NO: 52337 - DNA, 33 bp, synthetic construct
  source 1..33: mol_type = other DNA
ttcctcgagaactacggtcaggtgcacatctca

SEQ ID NO: 52338 - DNA, 36 bp, synthetic construct
  source 1..36: mol_type = other DNA
atcttcattaagtccgttggccaggcacagatgagc

SEQ ID NO: 52339 - DNA, 30 bp, synthetic construct
  source 1..30: mol_type = other DNA
ccctacgtgctgtatagcaacggcggcgga

SEQ ID NO: 52340 - DNA, 33 bp, synthetic construct
  source 1..33: mol_type = other DNA
ttcatcgagagctttgggaaggcacacacaccc

SEQ ID NO: 52341 - DNA, 33 bp, synthetic construct
  source 1..33: mol_type = other DNA
ctcatcgagtccggaggctccgaaggatacagc

SEQ ID NO: 52342 - DNA, 33 bp, synthetic construct
  source 1..33: mol_type = other DNA
ttcctgaaggaggcgggcagtgttcacactcca

SEQ ID NO: 52343 - DNA, 36 bp, synthetic construct
  source 1..36: mol_type = other DNA
gagggaggcgagggcgagttcctcgaaatcggtctg

SEQ ID NO: 52344 - DNA, 111 bp, synthetic construct
  source 1..111: mol_type = other DNA
atcttttcatccggaacctctaacaatgttcaacccaatatcactattaccttcgaccaagtttatgcgagtgactttgagagtgacgggaagcccacgatccacataatg

SEQ ID NO: 52345 - DNA, 36 bp, synthetic construct
  source 1..36: mol_type = other DNA
ttcatcttcctcctgaactttagccatgctcacgcc

SEQ ID NO: 52346 - DNA, 36 bp, synthetic construct
  source 1..36: mol_type = other DNA
atctttctggagagcttcggccacgctcatacacct

SEQ ID NO: 52347 - DNA, 252 bp, synthetic construct
  source 1..252: mol_type = other DNA
tctgaactgtccgatgataatctgactgaaattgacgaagatatggaatccactttccacaacaccacatttgaggatttgtcgcaaaaaataaacgacacacccgagaatcaaaccctcactctgaccgacgattatcaatatgacggcggagatattcacggcatcgtcatttccaaatcaatcaccatcgacggcgcaggccacaccattgacgctaaccattcttcccgcattttcaatgtgactgcc

SEQ ID NO: 52348 - DNA, 123 bp, synthetic construct
  source 1..123: mol_type = other DNA
gcttctggagaccccgacggcctcgagaagtccgccgaggacgcaggcgtcggcgaggacgtggaaagtgccgtcatcgaaagcccgttcccggattacacctatgagcctctggacaagatt

SEQ ID NO: 52349 - DNA, 30 bp, synthetic construct
  source 1..30: mol_type = other DNA
tacagcaaggctggcatctccctgtctttg

SEQ ID NO: 52350 - DNA, 42 bp, synthetic construct
  source 1..42: mol_type = other DNA
tttctcatattcatcgagtctctcggacacgctcatactccc

SEQ ID NO: 52351 - DNA, 33 bp, synthetic construct
  source 1..33: mol_type = other DNA
ttcctgaaggaggccggatcagctcacactcca

SEQ ID NO: 52352 - DNA, 30 bp, synthetic construct
  source 1..30: mol_type = other DNA
atcctgaaggacattggcaacgctaatgcc

SEQ ID NO: 52353 - DNA, 30 bp, synthetic construct
  source 1..30: mol_type = other DNA
ctggagcagttccctaaggcacacacaccc

SEQ ID NO: 52354 - DNA, 33 bp, synthetic construct
  source 1..33: mol_type = other DNA
tttctcgagagcctgggttctttccacactcca

SEQ ID NO: 52355 - DNA, 33 bp, synthetic construct
  source 1..33: mol_type = other DNA
gtcattacccattttaatcaaggacatatccac

SEQ ID NO: 52356 - DNA, 36 bp, synthetic construct
  source 1..36: mol_type = other DNA
gaaggcggcgagggcgagttccttgaaatcggactg

SEQ ID NO: 52357 - DNA, 30 bp, synthetic construct
  source 1..30: mol_type = other DNA
ttcctggagaacctcaagatcgctcatgcc

SEQ ID NO: 52358 - DNA, 228 bp, synthetic construct
  source 1..228: mol_type = other DNA
gctaagtactccttcgacatccaggacgtcgaggcctttgagcgcagcgcctgggagagcggcacaccagtgactaacggcaagaactggcgggtcaagaaatatgacaagacaattgccgctgtgaacggaaaggaaaccatctatgtccgtattgagaagagttctaacacaatccacgggcaccctatctccgagtctgagtacaataagctgctcaaggaacat

SEQ ID NO: 52359 - DNA, 36 bp, synthetic construct
  source 1..36: mol_type = other DNA
ctgattttcatcgagagctttggtcaagcgcacatc

SEQ ID NO: 52360 - DNA, 30 bp, synthetic construct
  source 1..30: mol_type = other DNA
taccccttctcaatccactctcaaatcgtg

SEQ ID NO: 52361 - DNA, 195 bp, synthetic construct
  source 1..195: mol_type = other DNA
gcattacaaatcaatcccgacatgatggccaagacccaggagtcccaggcccagaaggctgcctctcaagtttctaccggagaggacttcaataacaataactccgcttcctctagcctggaggaatctggatattccgaggtcggcaaggtctatcgggaccctgacaccggcaagctcgtgatggtacaggac

SEQ ID NO: 52362 - DNA, 195 bp, synthetic construct
  source 1..195: mol_type = other DNA
agctggaacatgcaggccatgattgatccggagaatagcatccaggaacagatgcagcagaagaccaccgaggtggaccagggccagcagctcaatgagacccctgactcttccaactcctcggggcagggttacaccgagatgggcaaagtgtacaaagacccggcgacgggaaagctgatcatggtcgaaggt

SEQ ID NO: 52363 - DNA, 33 bp, synthetic construct
  source 1..33: mol_type = other DNA
ttcatcgagtccttcgggcaagttcacacatct

SEQ ID NO: 52364 - DNA, 195 bp, synthetic construct
  source 1..195: mol_type = other DNA
gcgttgcaagttaaccctgatatgatggccaagacacaggagtctcaggcgcagcaagcagctagtgatgtttccacgggcgagacatttacctcaaattccaccgctggatcttccctagagcagtctgggtactccgaagttgggaaagtgtacagggatcccgacaccggcaaactggtcatggttcagggc

SEQ ID NO: 52365 - DNA, 78 bp, synthetic construct
  source 1..78: mol_type = other DNA
ttcccttggggcggcaccgacccacaaatgtctgtgctgggcatctcttgtcggtgcaactactgtagaagtggaagg

SEQ ID NO: 52366 - DNA, 108 bp, synthetic construct
  source 1..108: mol_type = other DNA
tttcacctgcacgatatgattaaccctggggttagcaatatctacaacgccctcggcacacagatcgctcccaacatggtcaccgtagttatctttcgcttcttcgat

SEQ ID NO: 52367 - DNA, 51 bp, synthetic construct
  source 1..51: mol_type = other DNA
cctaagatttcagacccactggctggctttttcgggttcaaacggggcctg

SEQ ID NO: 52368 - DNA, 90 bp, synthetic construct
  source 1..90: mol_type = other DNA
tatcggagctacttctccaacaacgcttctggcctgaatgccacccaagatataagtagcataagggccaacatgacaaacatcccttgg

SEQ ID NO: 52369 - DNA, 33 bp, synthetic construct
  source 1..33: mol_type = other DNA
ttcctggccagcgtgggcaaggcccacaccccc

SEQ ID NO: 52370 - DNA, 195 bp, synthetic construct
  source 1..195: mol_type = other DNA
tcttggaacatgcaggctatgatcgaccctagcgagaacattcaggaacagatgcagcagaagacaacagagatcgaccagggcacccagctcgatgacgcacctgacacctcaaactccagcggtcagggctacaccgagatgggaaaggtttacaaggacccatccactggcaagctgatcatggtcgaaggg

SEQ ID NO: 52371 - DNA, 33 bp, synthetic construct
  source 1..33: mol_type = other DNA
accatcggctctagcatgctctcgtcctcacac

SEQ ID NO: 52372 - DNA, 102 bp, synthetic construct
  source 1..102: mol_type = other DNA
atttatggcttcaagaacctgattcaacccgggatttcccttgtgtataacgctatcggcacccagctggcccctaacatggtcacactcgttgtctttgac

SEQ ID NO: 52373 - DNA, 54 bp, synthetic construct
  source 1..54: mol_type = other DNA
gccccgcggttctccgaccccctggctggattctttggctttggtagaggactg

SEQ ID NO: 52374 - DNA, 39 bp, synthetic construct
  source 1..39: mol_type = other DNA
ttggcctacgaccctgtgaacggcgttctgggatctagc

SEQ ID NO: 52375 - DNA, 66 bp, synthetic construct
  source 1..66: mol_type = other DNA
ctcctgagcatggacgacgttggcgaaggcgtcgccaaggttgaagccgctgccgatgaactgatg

SEQ ID NO: 52376 - DNA, 30 bp, synthetic construct
  source 1..30: mol_type = other DNA
ttcctggccgcttgcctttgggaagacagc

SEQ ID NO: 52377 - DNA, 51 bp, synthetic construct
  source 1..51: mol_type = other DNA
ccggccatgcccacaagccacttcgtgctttattatgttagtcaaatcgag

SEQ ID NO: 52378 - DNA, 243 bp, synthetic construct
  source 1..243: mol_type = other DNA
ctcttcaacccttttaacgccaaagagccaactaagctcaagatcacctctgataacgagcaatatgaaggaggcaagctgtccgtgaagctgacagacctgaacaacacacccattagcaaggaaatcgtgaatgtgaccatcacaaacaagaaggggaaagtggttgtcgacgacatcgtgaagactgatagcaagggcatggagatgaagatcacacttgtcataattcagcaccgcaat

SEQ ID NO: 52379 - DNA, 54 bp, synthetic construct
  source 1..54: mol_type = other DNA
gagaacagcaacctcgtgctggagttcagctccaaggacttcatcaacctgttt

SEQ ID NO: 52380 - DNA, 54 bp, synthetic construct
  source 1..54: mol_type = other DNA
atgtgcaacgccgacatgaagatgatcctcaagattgtcatcgaggtgctgaat

SEQ ID NO: 52381 - DNA, 99 bp, synthetic construct
  source 1..99: mol_type = other DNA
cccttcatcctcggcgccgtggacaagattctgcctatggactatgatgactcctggtacgagtgctacaactacgtcaagaatagccaggaagatgag

SEQ ID NO: 52382 - DNA, 30 bp, synthetic construct
  source 1..30: mol_type = other DNA
gaatatgccagctccatggggtcatctgcc

SEQ ID NO: 52383 - DNA, 195 bp, synthetic construct
  source 1..195: mol_type = other DNA
atgggctacgataagtggatcaaggtcaaggtggatatgatccacgccgatccaatttcacaaggctttgtgatgtctgccgacaagctcaaggacctgaatctgaagaacacagtcgcatccattgtgaccgctgaatatgtcgataagaactacactcggatcaaaacctccggcgatagcttctacatcctg

SEQ ID NO: 52384 - DNA, 60 bp, synthetic construct
  source 1..60: mol_type = other DNA
ggcagcatcgctaagttcctctgcgcgagtcagagcgccctgattcccgacgtaacaagt

SEQ ID NO: 52385 - DNA, 66 bp, synthetic construct
  source 1..66: mol_type = other DNA
atggtgctggagtccaccgtgccttttttggcctctgccgctcccaacctcttcggagtcctttac

SEQ ID NO: 52386 - DNA, 57 bp, synthetic construct
  source 1..57: mol_type = other DNA
atgctgtggcacgtgatgatgacctgcatcctcggcaacggcgactggatgttcgag

SEQ ID NO: 52387 - DNA, 102 bp, synthetic construct
  source 1..102: mol_type = other DNA
atgctggtggagcccggcatatctggctacggcgatgctgtttggtactgcttcgtggcttgtacctccatcggcttcggggatctggtcgaggccacattt

SEQ ID NO: 52388 - DNA, 33 bp, synthetic construct
  source 1..33: mol_type = other DNA
atgctgatcctgaagaacatcatcttcgtgata

SEQ ID NO: 52389 - DNA, 63 bp, synthetic construct
  source 1..63: mol_type = other DNA
acacctgccgaccaggagaaagtcctgaacttggttggcaagaaaaagaccatcattgttgaa

SEQ ID NO: 52390 - DNA, 144 bp, synthetic construct
  source 1..144: mol_type = other DNA
tatgccacaagttgggacaacatgaatgatgagcccacttctatcccttacaatgggaccgacggcatgaacgccgaaagcaacaccaacgacgacggcaccctcaagacaaactccctgaactacggagtgttcgaggcttac

SEQ ID NO: 52391 - DNA, 228 bp, synthetic construct
  source 1..228: mol_type = other DNA
gaggacacctcttggactgacgtgaacagcgagtccgagctgatcgaagccctcaatggcggaaccaagaacatcaggattgtcagtgacattacaatgacaggcgacctcaacatccctgccggcgttcgcgtgctgatcccctacgctgctggcgacacctccggactgaaagtcggcggggagaccttccggattgccggttcatcttatgtgcacctgactgtc

SEQ ID NO: 52392 - DNA, 57 bp, synthetic construct
  source 1..57: mol_type = other DNA
tatcggtcctacatggagaccagcgatcggtctctgaaagccaaggacgacattatc

SEQ ID NO: 52393 - DNA, 84 bp, synthetic construct
  source 1..84: mol_type = other DNA
tacatgagcaacataactcagaaaacgcagaccacactgaccaacctcctgaaggaggagcgggactacctgatcaacaagatt

SEQ ID NO: 52394 - DNA, 174 bp, synthetic construct
  source 1..174: mol_type = other DNA
ctggccgtgaaccccgacatgatcactcaaacacaatccaccaaggacgtcagcaccgccgacactttctcccaaaattacacaaacgcctctggaatggaagattctggatactccgaggttgggaaagtataccaggatccgactaccggcgaactcgtcatggtgtcctcc

SEQ ID NO: 52395 - DNA, 45 bp, synthetic construct
  source 1..45: mol_type = other DNA
ctgcctcaacctgctaccgcctcactagccagtatccttgcactg

SEQ ID NO: 52396 - DNA, 30 bp, synthetic construct
  source 1..30: mol_type = other DNA
gatagtattagcaattacttctgctctcag

SEQ ID NO: 52397 - DNA, 60 bp, synthetic construct
  source 1..60: mol_type = other DNA
atggccatggcgatacctggcggagacttcctgactacgggtctcaacctgatctctcag

SEQ ID NO: 52398 - DNA, 141 bp, synthetic construct
  source 1..141: mol_type = other DNA
tacgccacttcttgggacggcatggacgagcctactccaatcccttacaacggggaagcgggcatgaatgccccttccaacacgaacgacgacggaacactcaaggagaactccctcaactatggggttttcgaggcctat

SEQ ID NO: 52399 - DNA, 57 bp, synthetic construct
  source 1..57: mol_type = other DNA
ctgcccggcgcccagttgttaaccgaaggggacttcattacctttatcaagctggtg

SEQ ID NO: 52400 - DNA, 60 bp, synthetic construct
  source 1..60: mol_type = other DNA
atgatccagatcttaagttgcagcccctctatggacaccctgattggcgctgttaagctg

SEQ ID NO: 52401 - DNA, 75 bp, synthetic construct
  source 1..75: mol_type = other DNA
ctggccttcgacctggtggctagcatcgtgaccaatgacgggacagatctccacaacgacaacctgaagaacggc

SEQ ID NO: 52402 - DNA, 186 bp, synthetic construct
  source 1..186: mol_type = other DNA
tctaccgggctgcaggacattgtgttcgagaaccaccagaaccagagtcagcagacagtggagatcgagcagggccaggaggtgaccgacacaatggaacagattaatgagagcagctccgggtacactaaaactggaaccgtctataccgaccctaagaccggcaagaagtacatgacatcaacc

SEQ ID NO: 52403 - DNA, 54 bp, synthetic construct
  source 1..54: mol_type = other DNA
tacgacctgatctttaagtctgacgactcctcaaatatcatctttcgaggaatt

SEQ ID NO: 52404 - DNA, 138 bp, synthetic construct
  source 1..138: mol_type = other DNA
gcgtcgggagatcccgacggcctcgagaaatccgctgaggatagcggcctggacgaggacttctccgtggaggatatcaagggaatacccgaagccgtcctgcctgactacgccttcgccaacgaccccgataaccag

SEQ ID NO: 52405 - DNA, 105 bp, synthetic construct
  source 1..105: mol_type = other DNA
ttccacatctccaacatcattaatcctggggtcagcaacatctacaacgccctgggcacacagatcgctcccaacatggttaccgttgttatattcgacttccgc

SEQ ID NO: 52406 - DNA, 294 bp, synthetic construct
  source 1..294: mol_type = other DNA
gattctcttaagatcaagtccgacatgtccaagatcgccctggctatcaagacagtctacggggaaggccagggcagccgtcagacagttaacatttactccacctatcctttcaaggtcaacgtcggctccgactacctgagctgcaacgtgcacctcaaggactctactaacaagcacattgaggtgcccagcaaatccaacctcaaatctacctcaataagcctgaagaagggcaccaatattgtaaccgttgagtggccagtcggtggagagaacatgctgatctcaacg

SEQ ID NO: 52407 - DNA, 60 bp, synthetic construct
  source 1..60: mol_type = other DNA
gcctggagcgacgtggagcccttctgcgacgtcgccgcttgggacgtgttctacgatgcc

SEQ ID NO: 52408 - DNA, 138 bp, synthetic construct
  source 1..138: mol_type = other DNA
gtgaacgaatgggatgactctccactgggcttcgacgacgagcctcagagcatcccctacgacgacgtcgtgattgacaacggcggcacagataccgtggatgacagttccctgaattacggagtcctcgaaacctac

SEQ ID NO: 52409 - DNA, 60 bp, synthetic construct
  source 1..60: mol_type = other DNA
ttcgatgggcccgtggaggccattaagaacgtcgaaggctgggacatcctgtacaacacc

SEQ ID NO: 52410 - DNA, 123 bp, synthetic construct
  source 1..123: mol_type = other DNA
aacgggctgggcgaggaccagggctacttcggaggcgccgacgatgctggatccgacgctgtgtctgagaccgggtacaagccatggttcgagtccttttgggagcctccttctggagaaatc

SEQ ID NO: 52411 - DNA, 126 bp, synthetic construct
  source 1..126: mol_type = other DNA
ttctccggccacggcgaggatgacgggtactttggaggctctgacgacgccgctagcgagcagattgaggcctccaactacgagccgtggttttcgtcgatatgggagccaccaagcggagagatc

SEQ ID NO: 52412 - DNA, 105 bp, synthetic construct
  source 1..105: mol_type = other DNA
tgctacatgagcatgcagtccgggactgccgtctctgacttcgtgacccaagggacgggcctggttttcatagtgtaccctactgtgttcaacgtgttcggacag

SEQ ID NO: 52413 - DNA, 45 bp, synthetic construct
  source 1..45: mol_type = other DNA
ggcatgcctactagcgagttcgtgctgaaatatgtttcacaagtc

SEQ ID NO: 52414 - DNA, 126 bp, synthetic construct
  source 1..126: mol_type = other DNA
tacaacggccacggcgaagatgacggctacttcggcggaagcgacgacgccgcttcggagcaaatcgaggccacccacttcgagccatggtttagctctatctgggagccaccttccggggaaatc

SEQ ID NO: 52415 - DNA, 150 bp, synthetic construct
  source 1..150: mol_type = other DNA
ttccctgccggggtcgactatgggagccaggagtcatttatcggcatgattggcaccgccatagctcctgtgttcgctcctctgttcccctactactccgtctggttgcaacgaagactcagttaccctcactctgtccattattctgag

SEQ ID NO: 52416 - DNA, 126 bp, synthetic construct
  source 1..126: mol_type = other DNA
ttctctgggcacggcgaggacgacggatacttcggcggtgccgacgatgctgccggggaagccatcgaagaatccggtttcaccccttggtttagctccatctgggagcctccaagtggagaaatt

SEQ ID NO: 52417 - DNA, 132 bp, synthetic construct
  source 1..132: mol_type = other DNA
agcgggcacggcgaggatgatggatacttcggcggctccgacgacgccggcggcgaagccatcgagcagaacaatccgggatatcacgtctgggcgcaaccactttgggagccaccatctggggaaatagag

SEQ ID NO: 52418 - DNA, 126 bp, synthetic construct
  source 1..126: mol_type = other DNA
taccacgggcacggcgaggacgacggctacttcggcggcgctgatgacgccgccggcgagcagatcgagaagaccggattcgagccttggttctctagcatctgggagccaccttctggcgaaata

SEQ ID NO: 52419 - DNA, 138 bp, synthetic construct
  source 1..138: mol_type = other DNA
gcatccggcgaccccgacggcctcgaaaagtctgccgaggacgccgggctgccagaaggatttagcatcgagaagatcggcggaatccctgaggctattttccccgactacgccgtggctagtgcccctgataaccag

SEQ ID NO: 52420 - DNA, 189 bp, synthetic construct
  source 1..189: mol_type = other DNA
atggcagttcaaactaatcccgaaattatacactcaagtcaggagcaaagccaaagtcaaggcgagcaggtgtcctcgggtcaagaggttaataatagtagttcgggtggctcctcccaaaatgggtacagcgaagtcgggaaagtatataaagaccctgagaccggcaagctggtcatggtatctagt

SEQ ID NO: 52421 - DNA, 63 bp, synthetic construct
  source 1..63: mol_type = other DNA
atcaactggagcgggatcagccccttcaatggaattgacggatggaacatcgtttacaacgca

SEQ ID NO: 52422 - DNA, 63 bp, synthetic construct
  source 1..63: mol_type = other DNA
atgaacatcgacaccacactctttggaggttttatcaagggttttggccaactgtttagcaat

SEQ ID NO: 52423 - DNA, 240 bp, synthetic construct
  source 1..240: mol_type = other DNA
aacgattctaacgtgaccaatgacaatgactggagctacgacaagaacgaatatcctaagaacgagtaccggctggatgagctccccgtctctcacaagagcgcctacgaggttaggcaatttttcgaggattcagactcagacaacgacggtgtcctgaaagaccgcgagattaacaccttcgattataagatcaagcattcacaatacactttcaacggaccctatggctactctgga

SEQ ID NO: 52424 - DNA, 141 bp, synthetic construct
  source 1..141: mol_type = other DNA
gccagcggagatcccgacggactggaaaagagtgccgaagattccggactggctgaggacttctccgtggaagaaatcaaggggattccggacgctattttcccggattacgcctttgcctccaatcctgataaccaaggc

SEQ ID NO: 52425 - DNA, 138 bp, synthetic construct
  source 1..138: mol_type = other DNA
gcctccggagatcccgacggcctcgagaagtctgccgaggatgcagggctggacgagaattttaccgtggaagaggtcaacggcgtgcccgaagctgccctgcccgactacgctttcgccaacgaccctgaaaaccag

SEQ ID NO: 52426 - DNA, 141 bp, synthetic construct
  source 1..141: mol_type = other DNA
gccagcggcgacccagacgggctggagaagtccgctgaggattcaggcctcgccgaggatttctctatcgaagaaatcaatggtatcccggacgccatttttccggattacgctttcgcggacaaccccgattcgcaaccc

SEQ ID NO: 52427 - DNA, 180 bp, synthetic construct
  source 1..180: mol_type = other DNA
agctggaatatgcaggccatgatcgaccctgaccaaaacatacacgagcagatgcagcagaagatgaccgaggtcgaccagggacagcagctcaacgagacaccagacacatccaactatactgagatgggcaaagtttataaagaccccgctaccggcaagctgattatggtggaagag

SEQ ID NO: 52428 - DNA, 141 bp, synthetic construct
  source 1..141: mol_type = other DNA
gcctcaggtgaccctgatggtcttgaaaagtctgccgaagattctggactggccgaggactttagcgtggaagagatcaaggggattccagaggcggcgtttcccgattatgcatttgccgacaatccagacaaccagggg

SEQ ID NO: 52429 - DNA, 105 bp, synthetic construct
  source 1..105: mol_type = other DNA
tttcacgtgtctaagatcattacacccggcgttagcaacatttacaattccctgggcaccaaaatcgcccctaacatggtgaccgctgtgatcttcgacttccgg

SEQ ID NO: 52430 - DNA, 138 bp, synthetic construct
  source 1..138: mol_type = other DNA
gcctccggcgaccctgatggactcgagaagtcagctgaggactctgggctgccagaggattttagtatcgaagagattaagggcatccccgacgccatcttccctgactacgcattcgccaacgctcccgacaaccag

SEQ ID NO: 52431 - DNA, 231 bp, synthetic construct
  source 1..231: mol_type = other DNA
ttttgggactccggagaaggcgaaggaggagtggcagggatagccagagatgtcaaggagaccgagaacggattcgtattttccctggaggacgcttctggggaagaaactcgatgtttttttaaagatcgccctgaacccggcgccgcctatagggtcgagggatctatgtccgacgatgggaccatgctctttgtttcttccctggagttgcttctgcccgcacgagag

SEQ ID NO: 52432 - DNA, 141 bp, synthetic construct
  source 1..141: mol_type = other DNA
gcttccggcgatcccgatggcctggagaagtcagctgaagactccggcctcgctgaagacttctctgtagaggagatcaagggaatccccgaggcacctttacctgactatgcgttcgcgagcaatcctgacaaccagggc

SEQ ID NO: 52433 - DNA, 72 bp, synthetic construct
  source 1..72: mol_type = other DNA
gccgattcttcctggacctggggcagcaacactctgggagacttcgggatcagtgctgcggcggccgcgacc

SEQ ID NO: 52434 - DNA, 108 bp, synthetic construct
  source 1..108: mol_type = other DNA
ttccacgtgtccaagatgataaccccgggggtcagcaatatctacaacgccctgggcactaaaattgctcctaacatggtcaccgccgtgatcttcttctttgatcgg

SEQ ID NO: 52435 - DNA, 138 bp, synthetic construct
  source 1..138: mol_type = other DNA
gcttctggcgaccccgacggactcgagaagtccgccgaggatagcggcctcgaggaggactttgctgtggaggagatcaacgggattcccgaggccgccctgcccgattacgccttcgcaagtgatcctgagaaccag

SEQ ID NO: 52436 - DNA, 141 bp, synthetic construct
  source 1..141: mol_type = other DNA
gccagcggagatcctgacgggctggaaaagagcgccgaggacagtggcatccctgaagacttttccattgaggagatcaatggaatccctgacgccattttccccgattatgcattcgcttcggcgccagataatcaacca

SEQ ID NO: 52437 - DNA, 33 bp, synthetic construct
  source 1..33: mol_type = other DNA
aacgctaccgctggggccgacatcctgagcatc

SEQ ID NO: 52438 - DNA, 33 bp, synthetic construct
  source 1..33: mol_type = other DNA
aatgttggtttagacctgttcgggatagcttcc

SEQ ID NO: 52439 - DNA, 45 bp, synthetic construct
  source 1..45: mol_type = other DNA
ggctttgtgtttgcggcacccggggccgtgaatacttacgctgac

SEQ ID NO: 52440 - DNA, 138 bp, synthetic construct
  source 1..138: mol_type = other DNA
gcctccggcgaccccgacgggctggagaagtccgccgaggattctggagtggcagaggatttcagtgtcgaggagatcaacggcattcctgacgccatctttcccgactacgctttcgctaatgacccagataaccag

SEQ ID NO: 52441 - DNA, 105 bp, synthetic construct
  source 1..105: mol_type = other DNA
ttccacctgtcccatgtgatcaatcccggggtcagctatatttacaacaacatcggcacacagatcgctcctaacatggttaccgccgtgatcttcgacttccgc

SEQ ID NO: 52442 - DNA, 138 bp, synthetic construct
  source 1..138: mol_type = other DNA
gcttccggcgaccccgacggcctggagaagagtgccgaggatagcggcctccctgaggatttctctgtggaggagatcaacggaatccccgaagccattttccctgactacgcctttgccaacgaccctgacaaccag

SEQ ID NO: 52443 - DNA, 201 bp, synthetic construct
  source 1..201: mol_type = other DNA
gctgattcaatcgaagtgccggccgacgacagcctgggtcccgtgtatctggaccgagccgatagtattatagtcactttacctgccatcggtggaatgaccgggaccgccttcccggagccactcgttgccgccggctccgtacccgacaccgtgaaaaacgacgccgtaaatccagcgacgggtggcggcattcgcgga

SEQ ID NO: 52444 - DNA, 138 bp, synthetic construct
  source 1..138: mol_type = other DNA
gcttctggcgaccccgacggcctggagaagagcgccgaggattccgggctccctgaggacttttccgtggaggagattaagggaatccctggggccatattcccggattacgcgtttgcgtcaaatcccgataaccaa

SEQ ID NO: 52445 - DNA, 138 bp, synthetic construct
  source 1..138: mol_type = other DNA
gctagtggcgatccagatggcctggagaagtccgccgaggacgctggactcaaagaggactacagcgtggaggaaatcaagggcattcctgaatctacctttcccgattacgccttcgccaacgacccagagaaccag

SEQ ID NO: 52446 - DNA, 198 bp, synthetic construct
  source 1..198: mol_type = other DNA
gcctccatagaggtgccaagcggggacaacaatcccatccggaccgatatcagcgacaaaattctgatctccctccctcaaatcagcatccagaccgagacttctcatcctgagcctctggtggctgctggatccgtgtccgacgaaattgtcaagaacggcacactcaaggctgcccctggtggtgacatcgatgga

SEQ ID NO: 52447 - DNA, 138 bp, synthetic construct
  source 1..138: mol_type = other DNA
gcaagtggcgaccctgatggactggagaaatccgccgaggacgctggcgtgcctgaggacttttccatcgaggaaattaaaggcatccccgacgctatcttccccgattacgccttcgcctctaaccccgataatcag

SEQ ID NO: 52448 - DNA, 138 bp, synthetic construct
  source 1..138: mol_type = other DNA
gcctctggcgatcctgatggactggagaagtccgccgaggacgccaaactccctgaggacttcagcgtggaggaaatcaagggcattcccgacgccatctttcccgattacgcattcgctaacgcccccgataaccaa

SEQ ID NO: 52449 - DNA, 165 bp, synthetic construct
  source 1..165: mol_type = other DNA
acaaacgggctgaccaactccttcgagaatagtctgcatgctggcggcgccgatttttccatttctagcaaggagactggagacagcgttttctcgcaaatcaactacctcgtggtcaacgtcaaggaactgcagctgcttgagcatttacaaaccatccatcag

SEQ ID NO: 52450 - DNA, 225 bp, synthetic construct
  source 1..225: mol_type = other DNA
gctcaccctgggcatggctccgaatacgcggaagaggtgacctcttccgacgccgggtcctcgtcacacgtctctgggagcggtggcggctcaccatcaagcggcggatctagtagtggctcgagtggcagccatgttagtggcagtggcggtggaagcccatctagcggaggatcttcctcgggttccagtggcagctatgtgtcagggtccggaggttccagc

SEQ ID NO: 52451 - DNA, 42 bp, synthetic construct
  source 1..42: mol_type = other DNA
cagtcagctgttagcgccgtgttcgatgacgacgattccctc

SEQ ID NO: 52452 - DNA, 282 bp, synthetic construct
  source 1..282: mol_type = other DNA
atcctcatggtttaccggactagcgatgccaacggatatgtgaagatgaacatcaatcttcccccgggtacctacatcattacggccgaatacaagggactcaaagcatctaatacaatcaaggtactcagcgtcctcgaaaccaaagatctggttatgaaatatcgggacggttccaagttcgaggccaaaatcctggacggccaaggcaaaccctacgccgggcagactgttaaatttaacattaacgtgaaactccaagtaatgatggtcctccttgct

SEQ ID NO: 52453 - DNA, 180 bp, synthetic construct
  source 1..180: mol_type = other DNA
gccctgtcggtcaacccggacatgatctcggagcagactagtactcaggacgtctccaccgctgacaccttcacgcaaaattataccgacgccggcggcctcgaggactctggatactccgaagttggaaaagtctacgaagacccgaatacgggggaactcgtgatggtctctggtgag

SEQ ID NO: 52454 - DNA, 33 bp, synthetic construct
  source 1..33: mol_type = other DNA
atgagcggcgagatcttcggatacacatatggc

SEQ ID NO: 52455 - DNA, 138 bp, synthetic construct
  source 1..138: mol_type = other DNA
tataacggacacggcgaggaggacgggtactttggcggttccgacgatgctggcggcgacgccatcgtggagaataaccccgactacgactacgagtggttcacctctatttgggagccaccttccggagaaatcgag

SEQ ID NO: 52456 - DNA, 177 bp, synthetic construct
  source 1..177: mol_type = other DNA
gcactgtccgctaaccccgagatgatcactcaatcccaaacgacgcaggacgtgtctacggctgataccttcacgcaaaattactccgatgccggaggcctggaggacagcggctatagcgaggttgggaaagtgtaccaggaccctaccaccggcgagctcgtgatggtatccggg

SEQ ID NO: 52457 - DNA, 30 bp, synthetic construct
  source 1..30: mol_type = other DNA
accatcctgagcaagaccggcatgcctaaa

SEQ ID NO: 52458 - DNA, 177 bp, synthetic construct
  source 1..177: mol_type = other DNA
gccctctctgtgaaccccgacatgattactcaaagtcaatccactgaggacgtctcgactgcggatacctttagccaaaattatacctctgccggaggcctggaagacagcggctacaacgaggtcggcaaggtctatgaagatcctaccaccggcgagctcgttatggttagcgga

SEQ ID NO: 52459 - DNA, 135 bp, synthetic construct
  source 1..135: mol_type = other DNA
ttcaacgggcacggcgaggacgacggctacttcggcggtgccgatgacgccgcgggagaggccatcaatgaaagccagggcggcaaatacgagccttgggcctctgctatctgggaaccaccttccggggaaatc

SEQ ID NO: 52460 - DNA, 177 bp, synthetic construct
  source 1..177: mol_type = other DNA
gctctgagcgctaaccccgacttgatttccgactctcccaacaccaaggacgtgtccaccgccgacaccttcaatgagacttatagtgatgcaggcggcatcgaagattctgggtacaacgaggtcggcaaagtttatgaagatcctacaaccggcaagctcgtcatggtgtcagga

SEQ ID NO: 52461 - DNA, 213 bp, synthetic construct
  source 1..213: mol_type = other DNA
gtgagtgtcatcctgggaggcagcagtgacacatctgaggaaggcgacgtgcaatacgtgaatgtcaccaagaacattactaaatacgaagactctggagatgtgatccagaccgaggatggctcctacgttgcttcgagtgattacgtggacaatgtgactgagggcgagaacgttaccgctttcaattcatcaaactccggaaacctctat

SEQ ID NO: 52462 - DNA, 45 bp, synthetic construct
  source 1..45: mol_type = other DNA
ctggacgtgaacaaccaatattcggacgtctacaatcgctatgcc

SEQ ID NO: 52463 - DNA, 180 bp, synthetic construct
  source 1..180: mol_type = other DNA
cctgaccggtttaccgtgcacatcaacgtcaacgatcttgagaagctcaacatcacatacgtttctacggaccagaacctggagaagttcacaaataacaacgtgaccttcaaggaaatctgccacattgacgactataagatctacaagatttcctacaattccatcgaaagctctcca

SEQ ID NO: 52464 - DNA, 138 bp, synthetic construct
  source 1..138: mol_type = other DNA
gctagtggcgatcccgacgggctggagaagtccgccgaagacgctggagtgccagaggacttcagcatcgaggagatcaacggcattcccgaggccatcttccctgactacgcatttgcctctgctcctgacaaccag

SEQ ID NO: 52465 - DNA, 177 bp, synthetic construct
  source 1..177: mol_type = other DNA
gcactgagcgccaaccccgatatgattactcaaagtcaaagcacccaggacgtttctaccgctgataccttcacacaaaattataccgatgccggcggcctggaggacagcggctactccgaagtcggcaaggtctaccaagacccaaccactggggagcttgtgatggtgtctggt

SEQ ID NO: 52466 - DNA, 180 bp, synthetic construct
  source 1..180: mol_type = other DNA
gccctcagcgcaaaccccgagctgatcagtaatagcccaaataccaaggacgtgtccaccgccgacacattcaatcaaacttttagcaacgctagcgggatggaggactctgggttcaacgaggtcggcaaagtctacgaggaccctaacactggcgaactggtcatgtctatggttggt

SEQ ID NO: 52467 - DNA, 141 bp, synthetic construct
  source 1..141: mol_type = other DNA
gcgagcggcgaccccgacggcctggaaaagtctgccgaggactctggactggccgaagactttgctattgaggagatcaatggcatccccgacgctatcttccccgactatgcatttgctgataaccccgattcccaacca

SEQ ID NO: 52468 - DNA, 138 bp, synthetic construct
  source 1..138: mol_type = other DNA
gcctctggcgaccccgatggcctggagaagtccgccgaggatagcgggctcgctgaggacttcagtattgagcagatcaacggcattcctgacgccatatttcccgattacgctttcgcttcttcccctgacaatcag

SEQ ID NO: 52469 - DNA, 177 bp, synthetic construct
  source 1..177: mol_type = other DNA
gcactcagcgctaaccccgaactgatcagcaattctccaaacacaaaggatgtgtctaccgccgacacctttaatcaaacgtactccgacgccggcggaattgaggactccggattcaacgaggtcggcaaggtctacgaggaccctaacaccggcgagctcgttatggtgtcaggt

SEQ ID NO: 52470 - DNA, 177 bp, synthetic construct
  source 1..177: mol_type = other DNA
gccctgagcgctaatcccgacatgataactcaatcccaatcgacacaagatgtttctactgccgagaccttctcccaaaattataccgacgctggtggcctggaggacagcggatattccgaagtcggcaaggtctacgaggaccctgccaccggcgagcttgtgatggtctctggt

SEQ ID NO: 52471 - DNA, 177 bp, synthetic construct
  source 1..177: mol_type = other DNA
gccctctccgctaaccctgaactgatcagcaatagccacaacaccaaggatgtgtccacggctgatactttcaaccaaacttactctgatgccggcggaattgaggacggcggctacaacgaggtcggcaaagtttacgaagaccccgctaccggcaagctcgtcatggtctctgga

SEQ ID NO: 52472 - DNA, 177 bp, synthetic construct
  source 1..177: mol_type = other DNA
gctctctccgcaaaccccgacatgatcacacaaactcagagcaccaaggacgtctccaccgccgatactttctcccaaaattataccaacgccggcggactggaggacagcggctataatgaggtcggcaaggtctacgaggaccctacaaccggcgagcttgttatggtctctgga

SEQ ID NO: 52473 - DNA, 222 bp, synthetic construct
  source 1..222: mol_type = other DNA
ggatacaagttctacaaagagaccaccgatcgcacaccaatcagcacaaagatcaacgagatccgcgagaagtccaattacgtgaaaatcgacgacctccccgactactataccaatgccgtgatatcagtggaagacagacgattttacaagcacggcgccgtcgattacatcggtatcttgagggccatcttcttcaacatcaagaacaagaccctgcaa

SEQ ID NO: 52474 - DNA, 141 bp, synthetic construct
  source 1..141: mol_type = other DNA
gctagcggcgatcccgatggtctcgagaagagcgccgaagactcaggtctggccgaggatttcagcatcgaggagatcaagggcatccctgacgctatattccccgattatgcttttgctagctcacccgacgaccagggc

SEQ ID NO: 52475 - DNA, 177 bp, synthetic construct
  source 1..177: mol_type = other DNA
gccctgagcgctaaccccgacatgatcaccaaaacccagtcaacacaagatgtttcaacggcagacaccttttcacaaaattacaccaacgccggaggcctcgaggacagtggatactctgaggttggcaaggtctaccaagacccgactactggcgaacttgttatggtttctggg

SEQ ID NO: 52476 - DNA, 129 bp, synthetic construct
  source 1..129: mol_type = other DNA
tacgggacacttgatctgtccgtccgggacgtgttcaatctgttctgggaccacctgagcggcaggacctacgaccggatccaggagaatgacgagtggttctccgatagaatcctctgggaataccgg

SEQ ID NO: 52477 - DNA, 126 bp, synthetic construct
  source 1..126: mol_type = other DNA
tccgtgttcgattctggcgagagcgacgccgaagcagccgacgacgctgacgcatatcaagctgatagcgtctacgcgtcgtccgactgcgacgatgacgatgacgacaacaagtgtatcgaggct

SEQ ID NO: 52478 - DNA, 219 bp, synthetic construct
  source 1..219: mol_type = other DNA
gagaactccaccgagaacactgtgtcttccaacgctagtcagagctctagtaataccacatccaccggcaacgcttctacaaacgggaagactaaaatttggagcgagcaaagtaatagctacatatatcaagaatcatcctctgatggcaatatccggcaatatgatgcaaacggcaagcttatagggagtacctatgacgaggatcaggcaaaactc

SEQ ID NO: 52479 - DNA, 126 bp, synthetic construct
  source 1..126: mol_type = other DNA
tacaacgggcacggcgaggatgatggctacttcggtggtgccgacgatgcagccggaaaagccgtggagaagaccggcttcgagccttggatgtcctctatctgggagcctcctagcggagaaatc

SEQ ID NO: 52480 - DNA, 135 bp, synthetic construct
  source 1..135: mol_type = other DNA
tatcacggacacggcgaggacgacgggtacttcggcggagccgacgacgccgccggcgatgctattaatgagagccagggcggcaaatacgaaccctgggctagttccatctgggagccaccttctggggaaatc

SEQ ID NO: 52481 - DNA, 42 bp, synthetic construct
  source 1..42: mol_type = other DNA
aagctcatagaacacttcatcggcgccggcgacgctctgcca

SEQ ID NO: 52482 - DNA, 225 bp, synthetic construct
  source 1..225: mol_type = other DNA
atgagcatgggagatggccagctcgtgttcgacggcctgcttacctccggggttgaaggcaacctgggctccacccacgacaatgcattcaaccccgacctgggatactacctgacaaacatggggaacttcatctcgtcgtctaatactacatttgtgaccaataccccaagtctgaaccagcccacactgctctctggcctggtcttcctgaagtcccttgaa

SEQ ID NO: 52483 - DNA, 126 bp, synthetic construct
  source 1..126: mol_type = other DNA
gccagcggcgatcccgacgggctggagaagagcgccgaggactccgctgtgtccgaggatgtggagaccacagtcgtggagtctcccttccctgactacacctacgaaccactcgacaagcttggc

SEQ ID NO: 52484 - DNA, 126 bp, synthetic construct
  source 1..126: mol_type = other DNA
gcttctggcgaccctgacggactcgagaagtctgccgaggatgctgctgttggagaggatgttgaagcccctgtcatggagtccccatttccggattacacctacgagcccctggacaaacttggc

SEQ ID NO: 52485 - DNA, 39 bp, synthetic construct
  source 1..39: mol_type = other DNA
ggcctggttttcaagtgcaacaaggagggtctcactctg

SEQ ID NO: 52486 - DNA, 216 bp, synthetic construct
  source 1..216: mol_type = other DNA
gaggcatactccaccaccatctatgacaattggtgcgactacgaaattatcggacccggcgccgtggagctgaaaaaggtcggtggcgctctgactgagcttagtatccctgagaaagtcagcgatggcaccgaggagtacaccgtgacccggattgccgccgaggcctgccaagataacggcctcatccacaaggttaccgtgccatctactgtc

SEQ ID NO: 52487 - DNA, 123 bp, synthetic construct
  source 1..123: mol_type = other DNA
gcttccggcaaccccgacggcctcgagaagaccgctgaagacgccgacgtcggagaggacgtggagtctccaatccttgagagccctttccccgactacacttacgaacctctggacaaaatc

SEQ ID NO: 52488 - DNA, 225 bp, synthetic construct
  source 1..225: mol_type = other DNA
gccgacgatattagcgacgaaatcatttccgacggcggccaggacacactcaaaattatgcaagacgatatctacacaaccggcgaatctagtttctccaatctgaccgacgagattgagaacgctggaaccactctcgatctgaccaaggactacactttcaacaacgagaccgacaacaatacaggcatcttaattagcaaagacaactttgtcctcaacgga

SEQ ID NO: 52489 - DNA, 51 bp, synthetic construct
  source 1..51: mol_type = other DNA
cacgtgcaaatgtttgcggaagatttcatcctcaacctgctgggagtgttt

SEQ ID NO: 52490 - DNA, 147 bp, synthetic construct
  source 1..147: mol_type = other DNA
ggctacgggttaacctctagttcgactaataccaacaacgtggtcagcggcgatgctctcgttgccgaccttcgcggcaccggcgatggcacagcatctctgggaggcggcgagttcgcccacaacgtgacactgaagtatcaaacc

SEQ ID NO: 52491 - DNA, 129 bp, synthetic construct
  source 1..129: mol_type = other DNA
atcgcctctggcgatcccgacggcctggagaagagcgccgaggacagttccgtcgctgaggacgtggagagccccgtgctcgaggcaccgttcccggattatacctatgaacctctggataagcttgga

SEQ ID NO: 52492 - DNA, 108 bp, synthetic construct
  source 1..108: mol_type = other DNA
ggcaggtaccctattgctcccattgacgttatcaagaccatcctgagccccatcattcctagtctcgccgtgtccccaagcgtgtctacaatcgtattccaaattcgt

SEQ ID NO: 52493 - DNA, 135 bp, synthetic construct
  source 1..135: mol_type = other DNA
taccacggcctgggcgaggacgacggcaagtttggcggagctgacgaccagggggccgacgccatcggagagctggaccacaactacaagccatggttcagctctatctgggaaccgccatccggcgaaatcgag

SEQ ID NO: 52494 - DNA, 126 bp, synthetic construct
  source 1..126: mol_type = other DNA
agcgggctgggcgaggaccagggttactttggaggcagtgacgataaggggtccgacggggtttctgaaaccggctatgaaccctggttcaactctttctgggagccaccttccggcgaaatcgag

SEQ ID NO: 52495 - DNA, 126 bp, synthetic construct
  source 1..126: mol_type = other DNA
ttcaacggccacggcgagaaggacgggtacttcggcggcgccgacgatgctgccggcgaagcaattgaagccaccggatttgaaccttgggctagcgcaatctgggagccaccttccggggaaatc

SEQ ID NO: 52496 - DNA, 288 bp, synthetic construct
  source 1..288: mol_type = other DNA
atgtccttcaacggcctcgtctacgatagctggtacgacaacaccgggctgtggaccaagaaccgggacctgacatggactatgaatagtcccctgttcctcggcgaaattagcagcttctatgtcgttttcaataccaccaagaccggcgtgttcaccaacatcgtgtccgtggatagcaaagaaacagggaagaaatccgccaaggacaatatcgaggtcatcaagcctgacttcgctgtcgagaagattgcacttaaccgatctttcaagcaatgttgctgctcc

SEQ ID NO: 52497 - DNA, 108 bp, synthetic construct
  source 1..108: mol_type = other DNA
gtcttccacctgtccaacatgatcaaccctggggtcagcaatatctacaacgccctgggcacccagatcgctcccaacttggtaacagtggtcatctttgacttccgc

SEQ ID NO: 52498 - DNA, 288 bp, synthetic construct
  source 1..288: mol_type = other DNA
atggcgccccaagaatacacctctttcactgtggtcttcaacgctgccatcgccggcaatgtgaccaacgtggtcatcgccggctcgaacatgaccggcaacgtgacaaactcctgcgatgccgaaattgtgaataagaccgagcctacacctgggtccactcctgagccaacgcctaagcacgacgagccagtaacccaatatgcagacaagcacgctactggcaaccccatcatccttctgctccttgttatcatgggaacaattcccatccggatcaggaagaaa

SEQ ID NO: 52499 - DNA, 162 bp, synthetic construct
  source 1..162: mol_type = other DNA
agctggaacatgcaggctatcgtctttaacgaagacgtcacacccgagcaacgacaggacgccattaatgccatgaagcaggtcacggaggtcgatcagggccaacagctgaacgaaactcctgacctacaagggtcagagaaccggcaggacgacaatgat

SEQ ID NO: 52500 - DNA, 42 bp, synthetic construct
  source 1..42: mol_type = other DNA
atgccgaagaacagcatcggaatgctggagtccgactatatg

SEQ ID NO: 52501 - DNA, 216 bp, synthetic construct
  source 1..216: mol_type = other DNA
gctgatattcaggacgacaacatgacaatcctctcttccggcggtaaccactttataacgtcggatctgtccaatgacgacattcagagccagttcgacaacgccaacgatggcgatactttcgagtttaccgaccccgagtaccaggacatcagcctggtggtggacaagaagctgaacatcatctctaagaaagactccgtcgtctacgttagc

SEQ ID NO: 52502 - DNA, 126 bp, synthetic construct
  source 1..126: mol_type = other DNA
ttcaacgggcacggcgaggatgatggatacttcggcggtgccgacgacgcagcgggcgaagctatcgaggagtctggattcgagccctggtttagctccatctgggagcctccaagtggcgaaatc

SEQ ID NO: 52503 - DNA, 120 bp, synthetic construct
  source 1..120: mol_type = other DNA
ttcatcaaccactcttcgaagactgacaccacactctctatgatcagcaacagtaacctcgatgcctccaatgagtacacagttcagcttaaggatgtgctgatcatgaacctgatcctg

SEQ ID NO: 52504 - DNA, 126 bp, synthetic construct
  source 1..126: mol_type = other DNA
ttcaacggccacggagaggacgacggatacttcggcggcgccgatgacgctgccggagaagcaatcgaggaaaccggctttaagccctggtttagttcgatttgggagcctccttctggcgaaatc

SEQ ID NO: 52505 - DNA, 126 bp, synthetic construct
  source 1..126: mol_type = other DNA
ttcaacggccacggcgaggatgacggatacttcggcggagccgacgacgctgccggcgaggcaattgaggaaaccgggtttgagccttggttctctagcatctgggaaccaccttccggcgaaatc

SEQ ID NO: 52506 - DNA, 108 bp, synthetic construct
  source 1..108: mol_type = other DNA
taccacatcgctgacatgatcaatcccggcgtcagctatatctacaacgccgttggcacccagattgcacctaacatggtgacagccgtgatttttgacgatcggttt

SEQ ID NO: 52507 - DNA, 126 bp, synthetic construct
  source 1..126: mol_type = other DNA
gcctccggcgacccagacggcctcgagaagtccgctgaggacagcaaagtgcccgaaactctggagggatctacctttcacttcgagtctcccatgcctgattacaccatcggcgaaacaagtgtg

SEQ ID NO: 52508 - DNA, 54 bp, synthetic construct
  source 1..54: mol_type = other DNA
atgacctccaacgccttcacaagcaatggctacgccgttctgggccagtctatc

SEQ ID NO: 52509 - DNA, 126 bp, synthetic construct
  source 1..126: mol_type = other DNA
ttcaacgggcacggagaagatgatggctacttcggcggcagcgacgacgcagcctccgaggctatcgaagccacccacttcgagccttggttctcctctatctgggagcctccaagcggagagatt

SEQ ID NO: 52510 - DNA, 285 bp, synthetic construct
  source 1..285: mol_type = other DNA
atgctcaacattgacctgatcgaggctggcgaatcctacgtgtttaccatcaccctcaagcccatgacaaacggcactctgaccaatgtcgtcaacgtgacatcaaacgagaacaagactgtgaagaactctacaatcagtgtcaatgtactgcctgttgtgaatttaaccgtggtcaagactgtcgatgtgacagtcatttacgtgaatgacgaggtgacttttaccgttaatgtgaccaacaacggaccatccaacgccaccggcgtcaaggttacagacttc

SEQ ID NO: 52511 - DNA, 102 bp, synthetic construct
  source 1..102: mol_type = other DNA
cacctgagctccatgatccaacccggagtatctaacatatataatgccctgggcacccagatagcaccgaacctggtgaccgtcgtgatcttcgactttcgc

SEQ ID NO: 52512 - DNA, 126 bp, synthetic construct
  source 1..126: mol_type = other DNA
gcatctggcgatcccgatgggctcgagaaatccgctgaggacgccaacgtcagcgaggataaggccacagtggtcatcaccccacctttccctgactacacctttgagcccttcgaaagcattggc

SEQ ID NO: 52513 - DNA, 96 bp, synthetic construct
  source 1..96: mol_type = other DNA
atggtggtcgaggataagaaccctctggatgccttcgtcatgaccagcaatgcctttacatccaacggctacgtggtcctggggcagtctatcgcc

SEQ ID NO: 52514 - DNA, 198 bp, synthetic construct
  source 1..198: mol_type = other DNA
atgactgaaggcgtcctgattgacaggaacgtgaccatcaacgggaacggcttcactatcgacgccaagggcaagtctcggatctttgaggtgaccgccggcttcattaatataaccgacgttaccctgaagaacggcaacgccgacaacggcggagctctctacttctccaatgccattagcaactccaacataaat

SEQ ID NO: 52515 - DNA, 54 bp, synthetic construct
  source 1..54: mol_type = other DNA
attacctcttcttacaacgacagctctatcgccaacaagattaccatcaagtgc

SEQ ID NO: 52516 - DNA, 285 bp, synthetic construct
  source 1..285: mol_type = other DNA
atgtcctataatattactgttttacccgtcctcaccgccgacgacattaacatgacctacaaggacggcacacagttcatggctaagctggtggatggcaagggacaccctctggagaacgcagggatcacctttaacatcaacggcgtattctacacacggtacaccaatagcagcggcatcgcctgcctcaatatcaacctgatggccggagagtacatcatcactagtcaatacgagaacgccgtgatttctaacaagattaccatctccgctaaggaagac

SEQ ID NO: 52517 - DNA, 126 bp, synthetic construct
  source 1..126: mol_type = other DNA
gctagcggcaaccctgatgggctcgagaagtctgccgaggacgccaatgtttctgaggaaaaagctaccgtggccgtggagcctccttttcccgactacacattcgagcctctggaatcattgggc

SEQ ID NO: 52518 - DNA, 126 bp, synthetic construct
  source 1..126: mol_type = other DNA
ttcaacggccacggcgaggatgatggctacttcggtggctctgacgacgctgcctccgaagtcatagaaggcaccgggtttcagccatggtttagctccatctgggaaccaccaagcggagagatt

SEQ ID NO: 52519 - DNA, 126 bp, synthetic construct
  source 1..126: mol_type = other DNA
gccgggcacggcgaggacgatggctatttcggcggctccgatgaccaggggagcgacggcgtcagcgagaccggatacaagccctggtttgagtctttctgggaaccacctagtggcgaaatcgag

SEQ ID NO: 52520 - DNA, 285 bp, synthetic construct
  source 1..285: mol_type = other DNA
atgatcaacgagaccgaagtcgcgcaaaatgggagctttagcgggatgctggtggacgcatacggccagggagtggccaacaagaccatcacctaccacaagcccgggtaccagatgggcacactcgtggatgtcaccaccacggaagacggatctttcactattaacaacgctcagtatctggacaatgcctccgacggcaactactacggcgacttcacctttgccggcgatgggaagtataaagagtgccgttatgaaggcaacgttactgtggtggctaag

SEQ ID NO: 52521 - DNA, 102 bp, synthetic construct
  source 1..102: mol_type = other DNA
cacctgagctccatgatacaacccggggtttcctatatctataacgccctgggtacccaaatagccccaaatatggtgactgtagtaatattcgattttcga

SEQ ID NO: 52522 - DNA, 126 bp, synthetic construct
  source 1..126: mol_type = other DNA
ttcaatgggcacggcgaggatgacggctactttggcggaagtgatgacgcagcttctgaggctatcgagtccaccaacttcaagccatggttttcaagcatctgggagcctccatccggcgaaatc

SEQ ID NO: 52523 - DNA, 285 bp, synthetic construct
  source 1..285: mol_type = other DNA
atgagctacaacatcaccgtgctccctgtgcttaccgccgacgaaatcgacatggcctacaaggacggcactcagttccgagcgaagctcgtggacggcaagggcaacagcctcgagaatgctggcatcacatttaatattaacggagtgttttacacccgatatacaaactcctccgggatcgcctctctgaacatcaaccttatgcctggcgaatacatcatcacaagccaatatggcagtgctgtgatttccaacaagattaccatttccctgaagaaggat

SEQ ID NO: 52524 - DNA, 99 bp, synthetic construct
  source 1..99: mol_type = other DNA
tatcagttctcctacatgatcttccccggaatcaactacatatatcaaggtgtcggcgtcagcattgcccctaacctggtgaccaatatcgtgttcgat

SEQ ID NO: 52525 - DNA, 285 bp, synthetic construct
  source 1..285: mol_type = other DNA
atgatcaacgagactgaggtagcacagaatggctcctttagcggcatgctggtcgatgcctatgggcagggcgtggccaataagaccatcacataccacaagcccggcaaccagatgggtaccctggttgacgtgaagacaaacgacggcggcagtttcaccattgagaaagcacagtacctcgccaatgcttctggagaaaactactacggcaatttcaccttcgccggcgacggcaaatacgccggatgcagttacgagggcaatgtgactgtggtggcaaac

SEQ ID NO: 52526 - DNA, 126 bp, synthetic construct
  source 1..126: mol_type = other DNA
tacaacggccacggcgaggacgacgggtacttcggcggtgccgatgacgccgctggggaggctatcgaggaatctgggtttgagccctggttctctagcatttgggagcctccatccggagagatt

SEQ ID NO: 52527 - DNA, 102 bp, synthetic construct
  source 1..102: mol_type = other DNA
ttccacctgtccaaggtcatctcccctggcgtgtctaacatctacaacgtactcggcaccaagatcgcacctaacctcgtcactgtcgtcatcttcgacttt

SEQ ID NO: 52528 - DNA, 126 bp, synthetic construct
  source 1..126: mol_type = other DNA
ttttccgggcacggagaggacgacggctacttcggtggctccgatgacgccgctagcgaggccatcgaggctaccaacttcaagccatggtttgcttcaatttgggagccaccttctggcgaaatc

SEQ ID NO: 52529 - DNA, 126 bp, synthetic construct
  source 1..126: mol_type = other DNA
ttcaacggccacggcgaggatgacgggtacttcggcggagccgacgacgccgctggagaagcaattgaggagtccggctttaagccctgggccagtagcatctgggagccaccttctggagagatt

SEQ ID NO: 52530 - DNA, 105 bp, synthetic construct
  source 1..105: mol_type = other DNA
tttgacatttccgcactgatcaatcccggggtcagcaacatttacaacgccctcggcacccagatcgctcctaatatggtgacagtcgttatcttcgactttcgc

SEQ ID NO: 52531 - DNA, 126 bp, synthetic construct
  source 1..126: mol_type = other DNA
gccagtggcgacccggatgggctcgagaagagcgccgaggacgcatccgtccccgagaacaagaccacagaggtggtggcttctcccttccctgactacacctacgaaccactggaagtaataggc

SEQ ID NO: 52532 - DNA, 36 bp, synthetic construct
  source 1..36: mol_type = other DNA
agcaacggctctatttccgtgatcgggcagaaccag

SEQ ID NO: 52533 - DNA, 126 bp, synthetic construct
  source 1..126: mol_type = other DNA
gccagcggcgaccccgatggactggagaagagtgcagaagacgccaacgtcgccgaggacgtggccaccgaagtttttgcgtctccatttcctgactatacatacgagccactggcttccattggc

SEQ ID NO: 52534 - DNA, 126 bp, synthetic construct
  source 1..126: mol_type = other DNA
gcttccggggaccccgatggactcgaggcaagcgctgagcatattaaccccgagtctctggaggccgaacaagtcatcaacccaatcatgcctgactacaccatcgagggcttcgacgagaatccc

SEQ ID NO: 52535 - DNA, 198 bp, synthetic construct
  source 1..198: mol_type = other DNA
atgactgaggacgtgctcatcgatcggaacgtcaccatcaatggcaatggcttcaccattgacgccaacggcaaatcccggatctttggagtcacagctggcttcattaacgtgaccgacgtcacactgaagaacgggaacgccgacaacggcggagctctctacttctccaacgccatctctaactccaacatcaac

SEQ ID NO: 52536 - DNA, 57 bp, synthetic construct
  source 1..57: mol_type = other DNA
atcatcaccctgtcttacaatgattcgtcgattgccaacaagatcacaatcaagtgc

SEQ ID NO: 52537 - DNA, 105 bp, synthetic construct
  source 1..105: mol_type = other DNA
taccacatctccgatatgatctaccctggagtgtcgctcatttataatactctcgggaccaagatcgcgcctaacatggtgacagtcgttatcttcgacttccgg

SEQ ID NO: 52538 - DNA, 126 bp, synthetic construct
  source 1..126: mol_type = other DNA
gcctctgagaaccctgacggcctcgagaaatcagccgaagatgctaacgtgtccgaggagaaggcaattgttgtaattgtccctcccttccctgattacaccttcgagcccctggagtctatcggt

SEQ ID NO: 52539 - DNA, 60 bp, synthetic construct
  source 1..60: mol_type = other DNA
cggattgataacaagctgaggctcgccatcgtgcactacgctgacaatccacctttccag

SEQ ID NO: 52540 - DNA, 93 bp, synthetic construct
  source 1..93: mol_type = other DNA
tctgttggcgccttctctcggacacagcagctaatttggtacctctccaactatgactcttccccatattcgtttgactacctggagaaggat

SEQ ID NO: 52541 - DNA, 33 bp, synthetic construct
  source 1..33: mol_type = other DNA
ttcctgaagagcgttggacccgcacatacacct

SEQ ID NO: 52542 - DNA, 102 bp, synthetic construct
  source 1..102: mol_type = other DNA
tacaacattaaagcagtgatccagcccggcattagccaggtttacaactttctcggaacacagatagaacctaatatggtgacgctcattgtcttcgactgg

SEQ ID NO: 52543 - DNA, 102 bp, synthetic construct
  source 1..102: mol_type = other DNA
ttcgacataaagcagatcatagatcctggcatttccaaagtgtacagcgctcttggaccgcagatagaacctaatatggtgacactcgttgtcttcgactgg

SEQ ID NO: 52544 - DNA, 45 bp, synthetic construct
  source 1..45: mol_type = other DNA
gcaggcggagccatcgggcacaactttgctagcgtgaccggattc

SEQ ID NO: 52545 - DNA, 33 bp, synthetic construct
  source 1..33: mol_type = other DNA
agccatatcgttgtggaccttaacacggatgtc

SEQ ID NO: 52546 - DNA, 219 bp, synthetic construct
  source 1..219: mol_type = other DNA
gccgctgagaacattacaaacgatgccatcggcgatgacagcaaggaaatcctggagacggtacagaaggatatcaccaccgacgacagcacagatatcctcaagacgactcagaacgacatttataccgcctctgacgactcctttacaaaccttaccgatgagatcgctcggaacgacgtggtcgagctgacccacaactacaccttcaactctgag

SEQ ID NO: 52547 - DNA, 48 bp, synthetic construct
  source 1..48: mol_type = other DNA
ctcatgctgtacaagcttaatctgagccccaacgtggagaccttccgg

SEQ ID NO: 52548 - DNA, 39 bp, synthetic construct
  source 1..39: mol_type = other DNA
cagagcaagggcgtgcagttgcaacaattatatcttcag

SEQ ID NO: 52549 - DNA, 42 bp, synthetic construct
  source 1..42: mol_type = other DNA
acagtacagttccgtctcctaagcaacggcatcatgatgaac

SEQ ID NO: 52550 - DNA, 102 bp, synthetic construct
  source 1..102: mol_type = other DNA
ttccacttgagcaaaatgattacacccggggtttccaacatctacaacgccctcggcacccagatcgctcctaacatggtgaccgtggtcattttcgacttt

SEQ ID NO: 52551 - DNA, 51 bp, synthetic construct
  source 1..51: mol_type = other DNA
ctcacctggtccaacgttggggagtctatacttggactgtctattcggtac

SEQ ID NO: 52552 - DNA, 123 bp, synthetic construct
  source 1..123: mol_type = other DNA
tccggcctgggcgaggacgaaggctacttcggcggagcagacggagctggggccgacgccattaccgagacaggttacgagccatggttcgagtccttctgggagcctcctagcggggaaatc

SEQ ID NO: 52553 - DNA, 216 bp, synthetic construct
  source 1..216: mol_type = other DNA
gccgaaggcaacttcaccgcattacaaaatgagatcaactcttccggcgatagcattgacatcaagaacgactatgtctatgacaacgcgacggattactcttacaacgagggcattagcgtcaaggcaatcctgccactcaccgtgacatccacgcaactcaccgagcctatcaagcccgagttcctcaagagcatggagaaaactcttaggttc

SEQ ID NO: 52554 - DNA, 54 bp, synthetic construct
  source 1..54: mol_type = other DNA
atgaccgccatcttcggaccccagcctgatggaaccctggctggagatggtgtc

SEQ ID NO: 52555 - DNA, 195 bp, synthetic construct
  source 1..195: mol_type = other DNA
tttgggttcggcttcattgaccagaacacaatggaacagagccaatacgaagacaatcagaaccaggcctcctctgtgaacaactcccacctgtccaacatcgacaatgtgtctgtggacagtgacaacagtagctacaacatcagcggcgtggatgagaatgggactccagtccggattaacattgtgcatgga

SEQ ID NO: 52556 - DNA, 57 bp, synthetic construct
  source 1..57: mol_type = other DNA
aacgaccctacctggatttctggcgtcgacatcgactctgtttccttgacaccaagc

SEQ ID NO: 52557 - DNA, 30 bp, synthetic construct
  source 1..30: mol_type = other DNA
ctgcccggcatcttccggtcactcaagctg

SEQ ID NO: 52558 - DNA, 33 bp, synthetic construct
  source 1..33: mol_type = other DNA
aacgtgtttagctccttcatcggcggacttatt

SEQ ID NO: 52559 - DNA, 39 bp, synthetic construct
  source 1..39: mol_type = other DNA
cccgatattgcggctgacctgaacttctttgcatcggaa

SEQ ID NO: 52560 - DNA, 216 bp, synthetic construct
  source 1..216: mol_type = other DNA
cagcacctgaacgtggtggtctccgggtctatggagccagccttctaccgcggcgacatcgtgatggtgcagaaggctagtttcctgggcatccaggagttcaacgtgaacgatattcagaagggagacgttgtcgtctacgatgccaagtggtacaaccagcctgtcattcaccggtcctttccactggtcaaggggttcatgatcatcattagg

SEQ ID NO: 52561 - DNA, 192 bp, synthetic construct
  source 1..192: mol_type = other DNA
gggttcgggttcatcgaccagaacactatggagcagagccagtatacagataatcagaaccaggcttcaagcgtcaacaatacgcatatgaataacatcaacaacgtgtccgtcgatagcgacaattcatcctacaacatctccggagtggacgagaatgggactcccgttcggataaacattgttcacggg

SEQ ID NO: 52562 - DNA, 120 bp, synthetic construct
  source 1..120: mol_type = other DNA
gtcttcgactcgggggaatctgacgctgagactgctgccgacgcggatgcttaccccgctgattctgtctacgcctccgactgcgacgacgatgacgatgacaacaagtgtatcgaagct

SEQ ID NO: 52563 - DNA, 30 bp, synthetic construct
  source 1..30: mol_type = other DNA
gagaagatcctgagcaacaccgacctcaaa

SEQ ID NO: 52564 - DNA, 279 bp, synthetic construct
  source 1..279: mol_type = other DNA
gtcgtggtgctggacgatgtccccgacgtgcagtacagcgaccggatcgtggtcactgggaggctgattaaggtgacaggcgagggcattgtcaacgccaccgtgtatctgtccatcaacggagtcaactaccacgtcaaaaccgacgtgaacggatattatagctacctctacactgccaataaggtcggactcaacaacatcaccgctcgctttaacggcaatagcgtgtacaactacgacgacatcagtaattccttcatcgtagtcaaacaggac

SEQ ID NO: 52565 - DNA, 108 bp, synthetic construct
  source 1..108: mol_type = other DNA
ttccacatctccgacatgatctaccccggggtcagcttcatttataatacactgggcactcagatcgcccctaacatggtgaccgtggtcatcttccggttttttgac

SEQ ID NO: 52566 - DNA, 216 bp, synthetic construct
  source 1..216: mol_type = other DNA
gccatccacatcttcatgagccagaacccccttgtgaaggagggcgagaagaccgtgaatgacatgctgaaccgctctgttcgcgttgtgacccctgtggactccgtgatagcgacatctcccacaatgacaactgtcatttatatgatcgcacccgataagctcaaggctgtgaacttcgagtggactcaggacgaactgaaatacgtccctaaa

SEQ ID NO: 52567 - DNA, 261 bp, synthetic construct
  source 1..261: mol_type = other DNA
gcaatacatctgataggtcccaaccacaacccgagtggagactactccactttcaacgtgttgaaggtcaactcaacaattaatatggacgacgagaccgaatacgtctacgacaatgtcaccatcaactacaccgtggacaatttgacggatatattagttacggtggttgatctggaatcaggcgatatctacaactttaccacaactaacagctccatcaacttggacttggacgccggaagctatcagataacgttg

SEQ ID NO: 52568 - DNA, 198 bp, synthetic construct
  source 1..198: mol_type = other DNA
gctgaggaggatctcgagaatctgaccacaaagaatacccctgaaccgataatcatcaccgagaacaactttcaagaatatttcgatgacaagaattctctcaatagttcattcgagaacaagaccgtggtgctcgaaggcgagttcgacgaccttggcgtcgtgaatatcgacgcctacatttccctcctgatgatg

SEQ ID NO: 52569 - DNA, 105 bp, synthetic construct
  source 1..105: mol_type = other DNA
taccacatatctgacatgatcaatcccggcgtgtcccacatctacaacctgctcgggacacagattgcccctaacatggtgaccgtggtcattttcgacttccgg

SEQ ID NO: 52570 - DNA, 69 bp, synthetic construct
  source 1..69: mol_type = other DNA
tctggtcttggttctacccctgtggcttccattccctacgcccttaatctgatcctgaacatcgatctg

SEQ ID NO: 52571 - DNA, 87 bp, synthetic construct
  source 1..87: mol_type = other DNA
taccggtcttacttttcaaacacagccagcggcctcaacgctaccgaggacattaactccatccggaacaatatgacttctctgtat

SEQ ID NO: 52572 - DNA, 108 bp, synthetic construct
  source 1..108: mol_type = other DNA
ttccacctatcctcgatgatcaaccctggcgtctcctacatctacaatgccctgggcacacagattgctcccaacctggtcaccgtcgttatttttgattttcgcttc

SEQ ID NO: 52573 - DNA, 102 bp, synthetic construct
  source 1..102: mol_type = other DNA
gacgacgctcaagccgaaacccaacaagcagacgcggactccggcgactccatcttcctggccgaatccgatgatagcgattcccaaaccgatgacgtgtac

SEQ ID NO: 52574 - DNA, 99 bp, synthetic construct
  source 1..99: mol_type = other DNA
cacatctccaacatgattaaccccggtgtctcaaatatttacaatgccctggggacccagatcgctcctaacatggtcaccgtcgtcatatttgacttt

SEQ ID NO: 52575 - DNA, 105 bp, synthetic construct
  source 1..105: mol_type = other DNA
tttcacttatcgtcctcaatagtgctgggcgtgtccaacatctacaacactatgggcacccagattgcacctaatatggtaacagtagttatcttcgacttccgg

SEQ ID NO: 52576 - DNA, 192 bp, synthetic construct
  source 1..192: mol_type = other DNA
gcttctggcaacgcaacccaaaaaatagcctctgttgagactgactcgagctctgacgtcatcctgtcaaagtcaattggtgacgagatcctcaccgacactgacaatgggactttccgcgagctgcaggataagattgatgctgctgacgagggtggcaccgtgtacctcgagaacgactatgtcaatatt

SEQ ID NO: 52577 - DNA, 102 bp, synthetic construct
  source 1..102: mol_type = other DNA
ttcgtcgggttaagcaaatctatcaatgaaggcatcaatcttatctatatttgggtcggcaccgagattgccccgaacctcgttaccaacgtggtctttgac

SEQ ID NO: 52578 - DNA, 237 bp, synthetic construct
  source 1..237: mol_type = other DNA
atcggcgtgactatcggcctgcctagcgggacatatgacgccaacgtgaccgttgacaacacaacggtcaatgctgtggttactgttttgagcaccgtgaagggttccgacgtcgctaagatgtacaagaatgacacccagtactacgccacattcctggacaccgagggcaagttcctggccgatcggacaactgtgatttccacctctatggagtgttcaacgtcggccaagtac

SEQ ID NO: 52579 - DNA, 39 bp, synthetic construct
  source 1..39: mol_type = other DNA
tttggcgagggtgacagcttcgaaatgctgttcgctaac

SEQ ID NO: 52580 - DNA, 273 bp, synthetic construct
  source 1..273: mol_type = other DNA
atggaccggaacctgaaacacctggccatcgcttgcatcaaggcctacactctcaaggacgatgaggttatgtccggcaacaagaatatcgccaccgaatacgctggaggcagctacttctccgttaaggtaactaccgccgacggccacgtcgtcgtcggagacagcgtcaaattcaaaattgacgacaaaagttctaccgtcaagacagactctaacggcatcgcaaagatcaagattagccaaataccgaagaagtacatcatcaccaca

SEQ ID NO: 52581 - DNA, 45 bp, synthetic construct
  source 1..45: mol_type = other DNA
cccgtgatgggcaacgtgcagctgcaacaatatttcttccaagtc

SEQ ID NO: 52582 - DNA, 33 bp, synthetic construct
  source 1..33: mol_type = other DNA
atcagcagcagtcaagccgagttcacccatccc

SEQ ID NO: 52583 - DNA, 33 bp, synthetic construct
  source 1..33: mol_type = other DNA
ctgggccagttccctgtctacaacgacgtaccc

SEQ ID NO: 52584 - DNA, 33 bp, synthetic construct
  source 1..33: mol_type = other DNA
gacatcggccagttcgctacatatcctgatctt

SEQ ID NO: 52585 - DNA, 114 bp, synthetic construct
  source 1..114: mol_type = other DNA
atgcagggcgattgggtcggctacgccgacgtcgagatggatcaggacatgattagtatcagtgtatcggacgacgagatctcagtggacctggtcaaggagggcgaaatcctt

SEQ ID NO: 52586 - DNA, 30 bp, synthetic construct
  source 1..30: mol_type = other DNA
tcctacctgtttgatcaatcagtaaaagca

SEQ ID NO: 52587 - DNA, 195 bp, synthetic construct
  source 1..195: mol_type = other DNA
accccttttggcattcaactgcaagatatgcaggtcgagattgacgaggatctgttgaaacagattgccgacgctaccggaggcagatatttccgcgcaacagacaacactaagctggctgaaatctacgccgagatcaacaagatggagaaggccaggaccactgtggacagcttccccgtgtacaaggaactg

SEQ ID NO: 52588 - DNA, 225 bp, synthetic construct
  source 1..225: mol_type = other DNA
gccgagacagattactacactgtcgatgtggtcaatcccaccggcgacattgacctggggaacatcagcgtcaaggttatagacaatgaaacctctctggacaagattacctatcacatcgacccaagttataacgagatggagctgatcaacgacctcaaagtcccactgaataactcctgcgagtactacactgtttcatggaacgtccactcctactttgag

SEQ ID NO: 52589 - DNA, 90 bp, synthetic construct
  source 1..90: mol_type = other DNA
atggtcgctacgtttggaaccctggccgggatggaggaggatgacgaggagggcatcaccaacctggtgcacgacactttcacaccactg

SEQ ID NO: 52590 - DNA, 270 bp, synthetic construct
  source 1..270: mol_type = other DNA
atgaagaccgaaccttacgctgtcacacttacaaacattattgaccggaattataatccatcgggggattacgcctctttcaacgtgctgaaggtcaactcctccatcatcctcgataataagactgaatatgtatatggaaacgtggccattagctacgacgtggacaacctgaccaacgtgacggttacggtggtcgacctggagtctggcgaggtggacaatttcaccatcactaactccacaatttctttgatccacctgctcaag

SEQ ID NO: 52591 - DNA, 270 bp, synthetic construct
  source 1..270: mol_type = other DNA
atgagctacaacatcaccgtattacctgtcctgtttgccaacgacctcgaaatgaggttccaggatgggtccacatttaacgctctcgtgctcaacggacagggcaccccactggctaacgccgccgtcacattcaacatcaatggcgtgttctacactcgttatacgaactcatcgggaatcgccatcctgaatatcaacctgatggcaggcaagtacatcattacctctgagttcgacggcatgaagattcctctgaagaacattatc

SEQ ID NO: 52592 - DNA, 45 bp, synthetic construct
  source 1..45: mol_type = other DNA
ctcccccaaccggcaaccgctagcatccagtccattttggctctg

SEQ ID NO: 52593 - DNA, 270 bp, synthetic construct
  source 1..270: mol_type = other DNA
atgggcggagcaatcggcgctggccgaacccagctctccggctatgtcgacatcgacaattgtatcttcgagtctaataaggccaacggcgccactttcatcaactgcaatggcggagccatctactgcctcggatacgtggtcataaaaaactgcacccttaagaataactacgcttatgactacggcggcgccgtttacgccgaatacatcctggtcaactacaatacaagcagcaagtccattgatatcctgtactggcaatgtgga

SEQ ID NO: 52594 - DNA, 273 bp, synthetic construct
  source 1..273: mol_type = other DNA
atgtatctgactgcctctaaggtgacagtgaagaaaaccgcacgcaaattcgttttgcaagccaagctcaaaatcaacgggaagctggtcaagggcaaaaagatcacattcaagtttaaggggaagacctaccgggccaagaccaatagcaagggcattgctaaagtaatcattaagaagaatgtggtcaagaagctcaaaaagggaaagacttacgccgtcaaggtgtcctacctgaaggactccgtgaagagtagcgttaaagtagtcaag

SEQ ID NO: 52595 - DNA, 96 bp, synthetic construct
  source 1..96: mol_type = other DNA
tacaaggtttatgttatggacctcggcggcgaaatcaagtccaaggaggtcaacgaattcaatgccaaactggaggagatcagcgagatctttaca

SEQ ID NO: 52596 - DNA, 270 bp, synthetic construct
  source 1..270: mol_type = other DNA
gtgaatgctacaatggcagggaacctgaccaacgtcatctttgcgaattcggccgagaacaagacaatcgtcaacaagacctctaataacataacggttatacccaacgtgatcctgtccctgaccgaagtgacaaacgtgaccgaggctgtggtcggcgactccattaagtacacaattactatccacaactccggactgagcgacgccaccgacatcaaggtctgggacatcctccctgccaacgtgaaatacgacctagaccacaag

SEQ ID NO: 52597 - DNA, 204 bp, synthetic construct
  source 1..204: mol_type = other DNA
tcctcctacaacacaacccttaaggaggaaagtgaaattgatcacaacacttactacgtctctaacaatgtctctgaggtcaacaatagcagccaatcgactgtggatgccaagactattatatcaaaaatcaattacgaaggttacggcctgaccggtaacctgccgatcaacctgatcaacaacatctcttacaccctcaac

SEQ ID NO: 52598 - DNA, 36 bp, synthetic construct
  source 1..36: mol_type = other DNA
atggacattaattggaccgtccgcatcaacaaccct

SEQ ID NO: 52599 - DNA, 66 bp, synthetic construct
  source 1..66: mol_type = other DNA
atcaacgaccctacaactcaagggattaatgatagcgcccgggctatgaaatacgtctttcctaac

SEQ ID NO: 52600 - DNA, 33 bp, synthetic construct
  source 1..33: mol_type = other DNA
ctgatgagcaattacctgaacctgaccatcgag

SEQ ID NO: 52601 - DNA, 36 bp, synthetic construct
  source 1..36: mol_type = other DNA
gcgttaatctcaaagtacctcggagctgacgagatg

SEQ ID NO: 52602 - DNA, 267 bp, synthetic construct
  source 1..267: mol_type = other DNA
atgagcgtgactaataagagctacgccgcttccgccaagaccaaagctctcactgccaccttcaagaccgctaagggaaacccaattgcggggaagaaggtcaccttctccctggacggcaagaagtacaccgccacaacaaatgctaacggagtggcaaccgtgaacgtctctctgaataagaaggggacctacaactttaccgtgaaatatggaggtgacagtacatacgccgccatcaacaagaccgccaagctgactatcaaa

SEQ ID NO: 52603 - DNA, 36 bp, synthetic construct
  source 1..36: mol_type = other DNA
gatgtgactagcactctacaaaccatggactaccgg

SEQ ID NO: 52604 - DNA, 204 bp, synthetic construct
  source 1..204: mol_type = other DNA
atggataagaatttcgccaacgccagaaaactaacggtcggagacgaaatctcctttgagcggaactgcatcgagattaccaaagtgatacgtcgacttgactatagcctggaatacgtgtataacagccctgtggctacaaccgtgcccaaccacaagactgtgtccttcgcatacatgtcacataacaccctgccatctgac

SEQ ID NO: 52605 - DNA, 36 bp, synthetic construct
  source 1..36: mol_type = other DNA
aagtttgacggcacacccgagacttactcaaatttc

SEQ ID NO: 52606 - DNA, 51 bp, synthetic construct
  source 1..51: mol_type = other DNA
gcctcacctcttatcaatgaagctagcggactgcttttcggcaatccaggg

SEQ ID NO: 52607 - DNA, 183 bp, synthetic construct
  source 1..183: mol_type = other DNA
accttctccttcggggaacatgacaagaacgcaactgccgagaacaacaataccacacacttcgagaatgtgacagtgcagatgacttctaacctgaataacaagaacaacagcgtggaatacgactatgtggctgacaccgtggactataacgccaactactccatgaacgttggttatgac

SEQ ID NO: 52608 - DNA, 201 bp, synthetic construct
  source 1..201: mol_type = other DNA
gcctctgacaaccagacctccgccgacaacctacaaatcaacgacataaacgctaacgtcatcgatgaagagatcaatcaacatacaaacgatatgaacgtgatcaaggagaacacgagcgagaaggagagcatcatctccgacaatctgctgagcagcagcaatacaaatgataagctatcagccccgaaggagggtacg

SEQ ID NO: 52609 - DNA, 198 bp, synthetic construct
  source 1..198: mol_type = other DNA
tcctggaacatgcaggccatgattgaccctacacaaaacgtccaggagcagatgcagcaacagaagatgacagaggtggaccagggtcagcagctgaatgagactccagatacgagcaacagtagcggccaaggctacaccgaaatgggcaaggtttataaagaccctgctaccggcaagatgatcatggtcgaaggc

SEQ ID NO: 52610 - DNA, 42 bp, synthetic construct
  source 1..42: mol_type = other DNA
tgccccaataacgtgctgatgctggctgacgatgtgatgtct

SEQ ID NO: 52611 - DNA, 42 bp, synthetic construct
  source 1..42: mol_type = other DNA
atgacagctgacgtcgtgatagacatcgcccgcgaagttgtg

SEQ ID NO: 52612 - DNA, 63 bp, synthetic construct
  source 1..63: mol_type = other DNA
atgctgaattcaatgtcttcactgttcgtcgaccttgtaaaaagtataccacaatatataaaa

SEQ ID NO: 52613 - DNA, 69 bp, synthetic construct
  source 1..69: mol_type = other DNA
attcctttcatcgagatccccatcaactggattaccatgctggtggccgggtttggaggcatcatcggc

SEQ ID NO: 52614 - DNA, 33 bp, synthetic construct
  source 1..33: mol_type = other DNA
gtgagcaacgtcaattcttccaacgacatcgct

SEQ ID NO: 52615 - DNA, 66 bp, synthetic construct
  source 1..66: mol_type = other DNA
ggaggccgggccctgatgggcaccctcggtggactgaatggcttcactgtctatgggatctctact

SEQ ID NO: 52616 - DNA, 30 bp, synthetic construct
  source 1..30: mol_type = other DNA
ggcatgcccctggacgctgagaccaacaat

SEQ ID NO: 52617 - DNA, 87 bp, synthetic construct
  source 1..87: mol_type = other DNA
tatcggagctacttctctaacaacgccagcggcctgaacgcgacggaagatatctcctcaatacggaagaacgtgacctccatctac

SEQ ID NO: 52618 - DNA, 30 bp, synthetic construct
  source 1..30: mol_type = other DNA
ggcatgcctctggacgccgaggttaataac

SEQ ID NO: 52619 - DNA, 33 bp, synthetic construct
  source 1..33: mol_type = other DNA
ttcggcatgcccctggacgccgaggtagataac

SEQ ID NO: 52620 - DNA, 54 bp, synthetic construct
  source 1..54: mol_type = other DNA
atgtacgacggcatgaacgatctgaaggaatgggagttcatcatgacccctaac

SEQ ID NO: 52621 - DNA, 30 bp, synthetic construct
  source 1..30: mol_type = other DNA
ggattgtctagcattagttctaccgtgact

SEQ ID NO: 52622 - DNA, 141 bp, synthetic construct
  source 1..141: mol_type = other DNA
gccctggacaacgatacaatagtgcaatccgacgacagcaacaatttcaatcaaggatataacaagtctatgctgcttatctctgacaacggcggcaccaacattctcgattccgctggacggatcagccagttctcggtc

SEQ ID NO: 52623 - DNA, 261 bp, synthetic construct
  source 1..261: mol_type = other DNA
atgaccaagctgaacgtcacgaaaatatggaacgatgccaataatcaagatggcatccgcccatcctcaatcaccgttgttctttctaacgataccagcaaggttgctgaatacgtgttgaacgactccaacaactggaagcatacattcactgatctgcccgtctataacaacgggcagcagattaactatactatcgaagaagtcacaattgtcgataactacaaatctgaggtgacaaaaaatactgcttataactgg

SEQ ID NO: 52624 - DNA, 57 bp, synthetic construct
  source 1..57: mol_type = other DNA
atggtgtccaacgccttcacaagcaacggctacgctgtgctaggaaacactgatgtg

SEQ ID NO: 52625 - DNA, 123 bp, synthetic construct
  source 1..123: mol_type = other DNA
tctaatgacagcaaggagtcaagcaatgccgggcagagtgcccagagtagcaagcaatcctcaagtgaacctgattacaatagtgacgaatatgtcaagaaatgggaccagagccagcagggc

SEQ ID NO: 52626 - DNA, 51 bp, synthetic construct
  source 1..51: mol_type = other DNA
ggagaggacggacaccagtacaagcggatgtataatccagacacaggcgaa

SEQ ID NO: 52627 - DNA, 117 bp, synthetic construct
  source 1..117: mol_type = other DNA
gactgcaagggcagcgactgcgagaaatgcgtaattgcgtgccctaacaacgtcctcattaaggaaggcgacgatacagtagttcgtaaccccctgacatgcaagcactgcaaggtg

SEQ ID NO: 52628 - DNA, 30 bp, synthetic construct
  source 1..30: mol_type = other DNA
atctgtcccaacgactgcattaccgtgaat

SEQ ID NO: 52629 - DNA, 63 bp, synthetic construct
  source 1..63: mol_type = other DNA
atcaataactatgccaacaacggcgctagcgtgtactccctcctgagcatcatcgacatcaat

SEQ ID NO: 52630 - DNA, 30 bp, synthetic construct
  source 1..30: mol_type = other DNA
accctgggagacctctaccctcggagtttc

SEQ ID NO: 52631 - DNA, 39 bp, synthetic construct
  source 1..39: mol_type = other DNA
agcgacatcaaggccgtgatcgacaccgctaccgatggt

SEQ ID NO: 52632 - DNA, 84 bp, synthetic construct
  source 1..84: mol_type = other DNA
tataccaacgtgtacccgctgagcatgaaaaagtccctctacattatcaatggcactctggacgcccagaacttcaactttact

SEQ ID NO: 52633 - DNA, 90 bp, synthetic construct
  source 1..90: mol_type = other DNA
tacaggtcttattttgcgtcatctgcgagcggcctcaatgctaccaaggacatcaattccatccgggacaacatgacatccctccaaatt

SEQ ID NO: 52634 - DNA, 174 bp, synthetic construct
  source 1..174: mol_type = other DNA
tctgacgccacatcaaggaccatcattaatcgggacctcgctctcgctctggacggcgagctggacgtgtcctgcgacctggggttcgtttttgcctcccgtgattccttcgactgtcagtttgattctagctacgtggaagcccacgagtttttcaagaacaatctctctgtt

SEQ ID NO: 52635 - DNA, 147 bp, synthetic construct
  source 1..147: mol_type = other DNA
agcgaggataataagcttactctgggaatgctgaatcaacgatttaacaaggatttccggaacggccacctgctggtctacatcgacggcaagcttgtcttcaatgggacaacaaccgacaatttgctgcaaattattttcgatctg

SEQ ID NO: 52636 - DNA, 78 bp, synthetic construct
  source 1..78: mol_type = other DNA
gccggcaatcacgagattactgtggagttcagcgataacgacggcaacacaaacacctacaccgagaacatcacaatc

SEQ ID NO: 52637 - DNA, 93 bp, synthetic construct
  source 1..93: mol_type = other DNA
taccggagctatttcgcctctagcacgtcgggtctgaacgctactaaggacattaatagtattcgggacaatatgacaattttgcaaatctcc

SEQ ID NO: 52638 - DNA, 42 bp, synthetic construct
  source 1..42: mol_type = other DNA
gagtccgtgctgcgggactacctgagcatcattcacggcaac

SEQ ID NO: 52639 - DNA, 57 bp, synthetic construct
  source 1..57: mol_type = other DNA
ctcggcggcgctctgggcatggcagcaatgagctcgtccgctagtggattcctgctg

SEQ ID NO: 52640 - DNA, 39 bp, synthetic construct
  source 1..39: mol_type = other DNA
gccgtcatagcggcagtgttcggcactgctgacgatctg

SEQ ID NO: 52641 - DNA, 30 bp, synthetic construct
  source 1..30: mol_type = other DNA
ctggacgtctcaaagccaactctggcaaac

SEQ ID NO: 52642 - DNA, 78 bp, synthetic construct
  source 1..78: mol_type = other DNA
gggcaaccccaactggctgtcatctacggagccgcccctagcctggctgtgaacgagatggccaatgctctcgttggc

SEQ ID NO: 52643 - DNA, 222 bp, synthetic construct
  source 1..222: mol_type = other DNA
gtgtgcagcgtccgggacttaaaccgttcttttaaggacggattcaagttcgaggctaagctgatggatgggcaggtcaaagccttcgctaaccagattatcacatttaacattaacggcgtgttctacgataggaccaccgacaacgaggacattgcccgcctgaacatcaacctgatggccggcaagtacaattactacttcaatagacaacagtttgtc

SEQ ID NO: 52644 - DNA, 174 bp, synthetic construct
  source 1..174: mol_type = other DNA
gccaacgataacgtgacatctgacgatagcccagtcgacattgagaatgaggagatcttgattcaaaacgcggtttacttcaatagcagtgtcgagaatgacggaattggcacccaggagaatccttacaagtacctgagctggcactgcctgatcttctacgggcttctcttt

SEQ ID NO: 52645 - DNA, 255 bp, synthetic construct
  source 1..255: mol_type = other DNA
accaagaccgtcaagatctggtggaagaagtttaccttaactgccagtctcaagaacggcaagaaggcactgaagggaaaaaagatctccttcaaattcaaggggaagacttactccgccaagacaaattctaagggcctcgccaaggttacaattaagcgcaaagtgattcggcaactcaaacgcgggaaaagttacaaggtatcaatagtgtatctgcggaacaccattactcgtatagtgaaggtcaagcgc

SEQ ID NO: 52646 - DNA, 180 bp, synthetic construct
  source 1..180: mol_type = other DNA
tacctaaatagtaatagcccaaatgataccaacataccgcctgaagacaccatcaccgtgaatgacagcatcaccgatattgccaaccctgacgagaatggaacagtctggctggaggagaacggcactctcaccgaggctaaggtgacagaaagtactgggaacgggtctgcatcctcc

SEQ ID NO: 52647 - DNA, 105 bp, synthetic construct
  source 1..105: mol_type = other DNA
gtgcagtacttcggcggccacaatccctctctgatcggctctatgctgcccgcatctctcaacgggaccctgcggtgcattccttgttccgctgacctgttccac

SEQ ID NO: 52648 - DNA, 42 bp, synthetic construct
  source 1..42: mol_type = other DNA
aacgttatgagcgtggtctccaccatgttcgctggtctcatc

SEQ ID NO: 52649 - DNA, 105 bp, synthetic construct
  source 1..105: mol_type = other DNA
ggcgagtctgtcgggctcgaagtgaatagcgacaacttctacaacgagaccaacctggccgatggatggatttactccatgaacatcaacgacctgttcctgtac

SEQ ID NO: 52650 - DNA, 39 bp, synthetic construct
  source 1..39: mol_type = other DNA
atggtggccatgttccaaactcttctgtcatcgctcctg

SEQ ID NO: 52651 - DNA, 45 bp, synthetic construct
  source 1..45: mol_type = other DNA
ctacctcaacccgagaccgccacaatcgctggcattttggcactg

SEQ ID NO: 52652 - DNA, 252 bp, synthetic construct
  source 1..252: mol_type = other DNA
atgatcaagaccatatattatgatagcaacgggtcccagatcacaagcaccgtccgcaagctgtccgacttcaagggggacgagaagtacagctttgcttcaaccctcggatcatatttcactgacaactacgtcgacatcgatcatatctctgtccaaataataaaggacaacgaagtgcttaatgagtttaattcgacgatgaacaagaacaagctgacgtccattcccaactcaaacaacagcagcaaa

SEQ ID NO: 52653 - DNA, 87 bp, synthetic construct
  source 1..87: mol_type = other DNA
tataggagctacttctccaataacgccagtggcctgaacgctacacaagacatatcctctatccggagcaacgtgacctctatctac

SEQ ID NO: 52654 - DNA, 252 bp, synthetic construct
  source 1..252: mol_type = other DNA
atgattgtaaaagtcacggtgcctgaagacgctaagggcaatgttacggtcaagattgggaacactaccaaggtcgtggatgtgaccggcggcgagaacacaatcgcaatccccggagttggagagggcactcacgacgtggaggtcgtctattccggcgacgacaaatatgactccaagacaataacaaagaccatcaccgtctttaaatccatcaacaatgacgaacagatgtctcgtggctgggagcac

SEQ ID NO: 52655 - DNA, 84 bp, synthetic construct
  source 1..84: mol_type = other DNA
aagcttagcgctacctaccctacattcatcgacgccctgtttgggctcaagaaccccggcatgctcctgaatgcactgctccac

SEQ ID NO: 52656 - DNA, 252 bp, synthetic construct
  source 1..252: mol_type = other DNA
ccgactctttacgctagcgacctcgagatgagctataaggacggctccacattcaatgctacggtcctcgacggccagggcaaccctctcaaggacgcaattgttaagtttaacatcaacgggatcttctacaaccacaagaccgactctaacgggattgcaatgctgaacatcacgctgatgtctagcaaatacatcatcactagcgaatacgacggactgaaagtatcaaataccatcaccatcaaagac

SEQ ID NO: 52657 - DNA, 39 bp, synthetic construct
  source 1..39: mol_type = other DNA
ctgatctccatgttccaaactttgctggctagccttctg

SEQ ID NO: 52658 - DNA, 30 bp, synthetic construct
  source 1..30: mol_type = other DNA
gcttttcctacaccaagctttggtcaagca

SEQ ID NO: 52659 - DNA, 30 bp, synthetic construct
  source 1..30: mol_type = other DNA
cagagcttccactccatgatcgccgattac

SEQ ID NO: 52660 - DNA, 45 bp, synthetic construct
  source 1..45: mol_type = other DNA
ctgccccaacctgccaccgcttcgctcgcaagtctctgggcacta

SEQ ID NO: 52661 - DNA, 30 bp, synthetic construct
  source 1..30: mol_type = other DNA
gccgacatcgcacacgcggtaacacctatt

SEQ ID NO: 52662 - DNA, 84 bp, synthetic construct
  source 1..84: mol_type = other DNA
atcgcctgtcccaacaacgtgctggccaaggatggcgacgacaccgtcgtcggaaacgctttcgcatgcaagcactgccgagtg

SEQ ID NO: 52663 - DNA, 30 bp, synthetic construct
  source 1..30: mol_type = other DNA
atctgtcccaatgactgcattaccgtgaac

SEQ ID NO: 52664 - DNA, 30 bp, synthetic construct
  source 1..30: mol_type = other DNA
agcggcaactaccccttctataccgatctg

SEQ ID NO: 52665 - DNA, 39 bp, synthetic construct
  source 1..39: mol_type = other DNA
ctggccagccttatgacctccctgatctctggcttgatc

SEQ ID NO: 52666 - DNA, 30 bp, synthetic construct; identical to SEQ ID NO: 52664
  source 1..30: mol_type = other DNA

SEQ ID NO: 52667 - DNA, 39 bp, synthetic construct
  source 1..39: mol_type = other DNA
gccatcgcactcgtgcaaacgctcctggctggcattctg

SEQ ID NO: 52668 - DNA, 102 bp, synthetic construct
  source 1..102: mol_type = other DNA
cacatgtataacacctacatgaaggacctcagtggcgaaatctcaagcaaggaggtccgagaattcaatggcgagctgaacgccctggagaagtactttaaa

SEQ ID NO: 52669 - DNA, 159 bp, synthetic construct
  source 1..159: mol_type = other DNA
atgcactcgcaaaacggtaccagcgagttcgccggcttcaagactatcgtgctggacaaatatgttccgattaagactggcgataactttaaggttgtatttaaaaataacgccgtgccctaccaagctttttcaaggcaacactatgttgttggacct

SEQ ID NO: 52670 - DNA, 54 bp, synthetic construct
  source 1..54: mol_type = other DNA
cagtcctggaacgacatcagcctcaagaacaagactgtttgtctaaaagtctac

SEQ ID NO: 52671 - DNA, 69 bp, synthetic construct
  source 1..69: mol_type = other DNA
cagttacaaactagtctcaacctgtctgccgaaatattatctctgtgccacaacctgctggagcttgac

SEQ ID NO: 52672 - DNA, 30 bp, synthetic construct
  source 1..30: mol_type = other DNA
agcggcaactaccccttctataccgatctc

SEQ ID NO: 52673 - DNA, 186 bp, synthetic construct
  source 1..186: mol_type = other DNA
gccgagggcaacttcacagccctgcaggacgagatcaacctgagcaccggctccatcgacattaaccaggactatgtatacgacaacggcaccgattacgagctgaaaaagggcatcgtcctcaacaagaatgactttacaattaacggcaataagcagcccgggtttaatcaatgtcaatggaac

SEQ ID NO: 52674 - DNA, 30 bp, synthetic construct
  source 1..30: mol_type = other DNA
agcggcaactttcctttttatagcgacctg

SEQ ID NO: 52675 - DNA, 147 bp, synthetic construct
  source 1..147: mol_type = other DNA
aacctctctgacggcctgaacgagcggatgatcagcgaggaagagttcagctccctcgagacaattgccatcgagtccagtgattacctcctgaacaaccccggcaaccctgagaactgggaggacgacaggacctgcaataaggag

SEQ ID NO: 52676 - DNA, 30 bp, synthetic construct
  source 1..30: mol_type = other DNA
ggcaacttcccctactatgatgacgttaca

SEQ ID NO: 52677 - DNA, 69 bp, synthetic construct
  source 1..69: mol_type = other DNA
tatgccacacccctgggcggaatcgggttctacgtggcaaacatgattacctttggcgcttacgactac

SEQ ID NO: 52678 - DNA, 90 bp, synthetic construct
  source 1..90: mol_type = other DNA
tttcggagcctgggagagctgactatcacctcctctacaagtcccatctacatgcccgtccaatttctagaggtcatttggggacaaggg

SEQ ID NO: 52679 - DNA, 30 bp, synthetic construct
  source 1..30: mol_type = other DNA
ggcaactttcctttctacaccgaccttccc

SEQ ID NO: 52680 - DNA, 30 bp, synthetic construct
  source 1..30: mol_type = other DNA
agcggcaactatcccttctacaccgatctc

SEQ ID NO: 52681 - DNA, 42 bp, synthetic construct
  source 1..42: mol_type = other DNA
aagctcatcgagcaattcatcggaacaggcgacgcactgcca

SEQ ID NO: 52682 - DNA, 30 bp, synthetic construct
  source 1..30: mol_type = other DNA
agcggcaactatcccttctacacggactta

SEQ ID NO: 52683 - DNA, 30 bp, synthetic construct
  source 1..30: mol_type = other DNA
agcggcaactaccccttctataccgatctt

SEQ ID NO: 52684 - DNA, 159 bp, synthetic construct
  source 1..159: mol_type = other DNA
gccaagacagacacaaagatcaccgtgacctctaattccactttatacgatggggattactttagcataagcctgaacgacgccaacgggactccaattaccaaccagacagtgaagatgggcattatcgacgctaaggtcgtgaagatcctcaagaag

SEQ ID NO: 52685 - DNA, 90 bp, synthetic construct
  source 1..90: mol_type = other DNA
atctaccggagttacttctctaataacaccagcggcctgaacgcgacccaagacatctcaagcattcgggagaacgtgtcctccatttac

SEQ ID NO: 52686 - DNA, 30 bp, synthetic construct
  source 1..30: mol_type = other DNA
tccgagagcctgggcatcaccgaaaacacc

SEQ ID NO: 52687 - DNA, 36 bp, synthetic construct
  source 1..36: mol_type = other DNA
gtgagcgccatgtccaccattatggctggccttatc

SEQ ID NO: 52688 - DNA, 30 bp, synthetic construct
  source 1..30: mol_type = other DNA
agcggcaactttcctttttacactggtcct

SEQ ID NO: 52689 - DNA, 42 bp, synthetic construct
  source 1..42: mol_type = other DNA
aaactgatcgagaagtttatcggtactggcgacgctcttccc

SEQ ID NO: 52690 - DNA, 30 bp, synthetic construct
  source 1..30: mol_type = other DNA
agcggcaactatcccttttacacggactta

SEQ ID NO: 52691 - DNA, 75 bp, synthetic construct
  source 1..75: mol_type = other DNA
atttccaagtacttctctatctacaacgacgagatgagcagtaacgtggaccagatgctcaacttcctgtactac

SEQ ID NO: 52692 - DNA, 39 bp, synthetic construct
  source 1..39: mol_type = other DNA
atcgtggaggtcatgggcaagggtaacgctctgccttct

SEQ ID NO: 52693 - DNA, 66 bp, synthetic construct
  source 1..66: mol_type = other DNA
ctgcccgggataaacgtccctatcaatctcctgaccctcattattagcggctttgggggggtagtt

SEQ ID NO: 52694 - DNA, 48 bp, synthetic construct
  source 1..48: mol_type = other DNA
cagaccttgatacaagactttgtcggcgagtctggaagtgctgttagc

SEQ ID NO: 52695 - DNA, 96 bp, synthetic construct
  source 1..96: mol_type = other DNA
tataaggtctacgtgatggacctgggaggcgagattcagtccaaggaagtgaatgagttcaacgccaagctcgaggagatcagcgagatcttcatg

SEQ ID NO: 52696 - DNA, 39 bp, synthetic construct
  source 1..39: mol_type = other DNA
atcgagcagttcgtcggcaaagggaacgctctgactagc

SEQ ID NO: 52697 - DNA, 48 bp, synthetic construct
  source 1..48: mol_type = other DNA
aagctgatcgagacctacgttggcacgggttccagcttatcaagcgct

SEQ ID NO: 52698 - DNA, 33 bp, synthetic construct
  source 1..33: mol_type = other DNA
gatgcagactacagtgataactactgcaatatg

SEQ ID NO: 52699 - DNA, 42 bp, synthetic construct
  source 1..42: mol_type = other DNA
aagctgatcgagcagttcatcggctccggggatgctcttccc

SEQ ID NO: 52700 - DNA, 189 bp, synthetic construct
  source 1..189: mol_type = other DNA
gtgagcctgtcctttgacgatggctccggcggtggccaggatcacttcgagaacgtcactgaggaaatgacaaagaacgtgaacaacagctccgtcgtgttcgacatcgaaaccgacgggattgactacaatgagaatggatcgtcacaactaaacagccagtacctgaagagtaacgaggaagagacc

SEQ ID NO: 52701 - DNA, 36 bp, synthetic construct
  source 1..36: mol_type = other DNA
aacgataatggctacttcatcgactatagctcgatg

SEQ ID NO: 52702 - DNA, 138 bp, synthetic construct
  source 1..138: mol_type = other DNA
ggagaatccgtcggcctcgaagttaatgtcaacgactactacgatgagaccaacctggctgacggctggatttactctaactatatcaatgacctgttcgtataccaggtcgatgtgctcggcgccacgactgacatg

SEQ ID NO: 52703 - DNA, 69 bp, synthetic construct
  source 1..69: mol_type = other DNA
ctggggattggaactacaggacaggtgctcaaggtctcctctagcggaatccctgcctgggaaaacgac

SEQ ID NO: 52704 - DNA, 48 bp, synthetic construct
  source 1..48: mol_type = other DNA
cagaagctcatcgaggaagtggttggcaagggttctgcactgtcctcc

SEQ ID NO: 52705 - DNA, 60 bp, synthetic construct
  source 1..60: mol_type = other DNA
atccccggcatctccattcctattaccctcctgacaatcctagtgtccggattcggtggc

SEQ ID NO: 52706 - DNA, 39 bp, synthetic construct
  source 1..39: mol_type = other DNA
gccctgatcgagcacttcatcggtgctggggatgctctg

SEQ ID NO: 52707 - DNA, 30 bp, synthetic construct
  source 1..30: mol_type = other DNA
ctcggcgtgatccccgcactgattgctgcc

SEQ ID NO: 52708 - DNA, 174 bp, synthetic construct
  source 1..174: mol_type = other DNA
gctgcagacgacaacgccaacggcattatctccgtcgacgataacgatgagctcatcctggacgaggctattgatgacgatgtctcttccgccaacaacaattacgacgaggaactgatcctcgagacgcctgccgacgacctggtcaagcagcaactccaagtactgagacgc

SEQ ID NO: 52709 - DNA, 42 bp, synthetic construct
  source 1..42: mol_type = other DNA
atacagcagttcgttgggaccgggtcagcactaaccagtacc

SEQ ID NO: 52710 - DNA, 138 bp, synthetic construct
  source 1..138: mol_type = other DNA
gtctttacatatcctttcgacatcgagcactggggcgtgatattacaaaacactgagtccggcaacgggctgttcggcctcaccggctacttctacacgccggcttggggttacattctggggttcgaggacctcatc

SEQ ID NO: 52711 - DNA, 48 bp, synthetic construct
  source 1..48: mol_type = other DNA
caggcactgatcgccgaaatcgttgggcaaggagaagcactgtcaagt

SEQ ID NO: 52712 - DNA, 75 bp, synthetic construct
  source 1..75: mol_type = other DNA
agccagatcaacgttgaagccttcttctgcaactggtgctttaataccgacaatcactttgatttcttcacatgg

SEQ ID NO: 52713 - DNA, 30 bp, synthetic construct
  source 1..30: mol_type = other DNA
aacttccccttctataccgatctacctctg

SEQ ID NO: 52714 - DNA, 213 bp, synthetic construct
  source 1..213: mol_type = other DNA
gccggcagcaatatgaccagcaacgctacttccaaggcctactctaacaataccacggtagtcagcaccccaagcttgaccgttcgagagatctcaaacactcccaacgtggtggtcggagacccggtgtcgttcaccgtgattgtgactaacgacggcgactgcgtgctcggcgacgtgatgttcatgttccaaactttctcactgaaggac

SEQ ID NO: 52715 - DNA, 51 bp, synthetic construct
  source 1..51: mol_type = other DNA
caggctctcatttcacaattctttgaagcagggtccgctcttaccggcgcc

SEQ ID NO: 52716 - DNA, 45 bp, synthetic construct
  source 1..45: mol_type = other DNA
gagctgatcaacaccttcctcgacaagggcagcgcactgactggc

SEQ ID NO: 52717 - DNA, 51 bp, synthetic construct
  source 1..51: mol_type = other DNA
caggcgttgataagccaatttttcgaggcaggctctggattaacaactgcc

SEQ ID NO: 52718 - DNA, 240 bp, synthetic construct
  source 1..240: mol_type = other DNA
gccaaagtgatctatagcggcgacaagaaatatgattcgaatagcacatggaccgagatcgtcgtcgaaggagacgagaaccacaacggctccgacgaccatgtatcgaatagtcaatactcggataagcacagttccggcggtatctccctggccgattaccctaccgctaaccccatctggattctgctcctcatcctggtgactgtctgtacaactcagatcaggcggttcaagaag

SEQ ID NO: 52719 - DNA, 30 bp, synthetic construct
  source 1..30: mol_type = other DNA
gaatacgcaactacaatgggtagcactgcc

SEQ ID NO: 52720 - DNA, 45 bp, synthetic construct
  source 1..45: mol_type = other DNA
aagctcatcgagtccttcattggtactggcgatgctctgccaagc

SEQ ID NO: 52721 - DNA, 48 bp, synthetic construct
  source 1..48: mol_type = other DNA
cagaagctgatcgagtccgtgatgggcgccggtgacgctcttagtggg

SEQ ID NO: 52722 - DNA, 45 bp, synthetic construct
  source 1..45: mol_type = other DNA
cagaagctgattgagaccttcattggaactggcgacgctcttccc

SEQ ID NO: 52723 - DNA, 45 bp, synthetic construct
  source 1..45: mol_type = other DNA
aagctgatcgagagcttcgttgggactggcgatgctattccttcc

SEQ ID NO: 52724 - DNA, 45 bp, synthetic construct
  source 1..45: mol_type = other DNA
aagctgatcgagtccttcattggctctggcgatgcacttccatct

SEQ ID NO: 52725 - DNA, 42 bp, synthetic construct
  source 1..42: mol_type = other DNA
gcgttcaagatcctggggggcgccattacccttgactactcc

SEQ ID NO: 52726 - DNA, 45 bp, synthetic construct
  source 1..45: mol_type = other DNA
aagctgattgagaccttcatcggcaacggtgacgctttgccaagc

SEQ ID NO: 52727 - DNA, 51 bp, synthetic construct
  source 1..51: mol_type = other DNA
caggccctgatcgaggaaacaattggcaccggatctagtgcaagcttgagt

SEQ ID NO: 52728 - DNA, 201 bp, synthetic construct
  source 1..201: mol_type = other DNA
caagccatcgtttttaatgaggatatatctccggaccagcgacaggatgccattaacgccatgaaacaggttacagagatcgaccaggggaagcagctcaatgacacccctgatgtcagctcatctagtggagagggctacagcgagctcggaaaagtttacaaggacagcaacaccggaaaactgatcatgatcgagaac

SEQ ID NO: 52729 - DNA, 147 bp, synthetic construct
  source 1..147: mol_type = other DNA
gactattctgaatcctcatctgaaaccgagatccagacttgggacgattacggctctttcaaatacaccgtgaaggggtcctctacctacgcctatgtatctgcatccgtgaacattgggttatattccgagaacaactactccttt

SEQ ID NO: 52730 - DNA, 72 bp, synthetic construct
  source 1..72: mol_type = other DNA
aagcccatgctggagataatgcaggccggcgacgctatggaatatgcaatgacttacgggacacaccaatac

SEQ ID NO: 52731 - DNA, 57 bp, synthetic construct
  source 1..57: mol_type = other DNA
atgttacctagcaactctccttccgctgacgccttcgccacaatcctcggaacaacc

SEQ ID NO: 52732 - DNA, 66 bp, synthetic construct
  source 1..66: mol_type = other DNA
agcaagaccgggatgcccatttactccaacggcaaaatcgccaccggaaagttcaaggagacaaac

SEQ ID NO: 52733 - DNA, 42 bp, synthetic construct
  source 1..42: mol_type = other DNA
gccttcatcgagtccttcatcggggctggtgacgcaattccc

SEQ ID NO: 52734 - DNA, 240 bp, synthetic construct
  source 1..240: mol_type = other DNA
atgtctaagaacacccaggtccacgacgagctgcccgacggactccaatatctttaccacacactcaccaagggcgtattcaatcctgacaccgggatttggtccatcggcgacctgaacgtggaggacggcaaggtctttctgtatatcacttgcaaagccctgacctccggagagaagatcaataaggctaacctgacaagcgataccagtaacctgaacaacgagagctacgaggag

SEQ ID NO: 52735 - DNA, 72 bp, synthetic construct
  source 1..72: mol_type = other DNA
gcttgccccaacaacgtgctcatcaaagagggcgacgacaccgtcgcccggagccctatgacctgcaagcac

SEQ ID NO: 52736 - DNA, 33 bp, synthetic construct
  source 1..33: mol_type = other DNA
ctgggcatcatccccgctataattatagctgct

SEQ ID NO: 52737 - DNA, 48 bp, synthetic construct
  source 1..48: mol_type = other DNA
cagaagctgattgagaccatcgtcggcaccggggatgcattgtctggg

SEQ ID NO: 52738 - DNA, 54 bp, synthetic construct
  source 1..54: mol_type = other DNA
aacgagctcctgatggtggctcccaacttcgccaatgccaagaacctggaaaca

SEQ ID NO: 52739 - DNA, 48 bp, synthetic construct
  source 1..48: mol_type = other DNA
cagggactgatcgagaacttcattgggactggcgatgccttgccatca

SEQ ID NO: 52740 - DNA, 33 bp, synthetic construct
  source 1..33: mol_type = other DNA
atcaatgacgccggaggcattagcgataaccag

SEQ ID NO: 52741 - DNA, 45 bp, synthetic construct
  source 1..45: mol_type = other DNA
atcccactggcttcgactggcagttgggaggcccttttcgaactc

SEQ ID NO: 52742 - DNA, 75 bp, synthetic construct
  source 1..75: mol_type = other DNA
cccaataacgtcctgattaaggagggcgaggacaccatagttaggagtcctctcacatgcaagcactgtaaagtg

SEQ ID NO: 52743 - DNA, 30 bp, synthetic construct
  source 1..30: mol_type = other DNA
tttcagttatttcaacaatacagcgttctc

SEQ ID NO: 52744 - DNA, 30 bp, synthetic construct
  source 1..30: mol_type = other DNA
tggaatcagcggctgatcttcaacatcgac

SEQ ID NO: 52745 - DNA, 165 bp, synthetic construct
  source 1..165: mol_type = other DNA
gctagcgacgtgaacgacaccgtgattgctagcgaggacgggctcgccattgagctcagtcaagcggattccgatgaaggaatctccgccgtcgagaacgaggagatcatcagcgaaggcaacgccggcacattctctgagctgcagtccaatatcaccgagaaa

SEQ ID NO: 52746 - DNA, 60 bp, synthetic construct
  source 1..60: mol_type = other DNA
tatgacaccatcttctttgcgagctatggcaacatctacgggctgggcaacattacattg

SEQ ID NO: 52747 - DNA, 39 bp, synthetic construct
  source 1..39: mol_type = other DNA
ctcttgccctcaaagccttaccgatactcatttgatgtg

SEQ ID NO: 52748 - DNA, 144 bp, synthetic construct
  source 1..144: mol_type = other DNA
gggttcaagaacgatatcttcgccggctttgtcgtgaacagcgtcaaaaagtggctcgagatgaagttcctggacttccttaatggatatgggatggagctgcaccacttttccctgcatggactgttccatacacaatcactc

SEQ ID NO: 52749 - DNA, 48 bp, synthetic construct
  source 1..48: mol_type = other DNA
cagaagctgatcgagtccgtgatgggcgctggagacgccttgagcggg

SEQ ID NO: 52750 - DNA, 69 bp, synthetic construct
  source 1..69: mol_type = other DNA
atggaaggcgtgcagtacattatgaacaatgacgagatgctggcgcgcctaggcatctcttcaagactc

SEQ ID NO: 52751 - DNA, 30 bp, synthetic construct
  source 1..30: mol_type = other DNA
agcgtggtcgccgctcaagctcccatcatt

SEQ ID NO: 52752 - DNA, 51 bp, synthetic construct
  source 1..51: mol_type = other DNA
gcaccaaagctctctgaccctctggccgggttctttgggtttggtcgcggc

SEQ ID NO: 52753 - DNA, 99 bp, synthetic construct
  source 1..99: mol_type = other DNA
atgtacaagtcttacctgctggacctgggcaacgagattgatagcaacgagatgaacagcttgaattcgtcattcaatgacatctcttccaagtttcaa

SEQ ID NO: 52754 - DNA, 186 bp, synthetic construct
  source 1..186: mol_type = other DNA
agcgatagcaagttcatcgtgacatgcaactctacactccacgacggcgactccttctccatcaagctgactgacatgaacaatacaccaattagcaaccaggtggtcaacattatgattatcgacgccaccggaggcgagaattatcaacaagtaactaccgacgagtctggtaacggaatgctc

SEQ ID NO: 52755 - DNA, 42 bp, synthetic construct
  source 1..42: mol_type = other DNA
gctctcagtcttgtttacggcgacctgtctatttcaatctcc

SEQ ID NO: 52756 - DNA, 39 bp, synthetic construct
  source 1..39: mol_type = other DNA
tggctcggcttcaagaacgaggcactggctttcgtagcc

SEQ ID NO: 52757 - DNA, 141 bp, synthetic construct
  source 1..141: mol_type = other DNA
atgctctctctcttcgcttatatctgtaccttttacaactttaacattgtgatcaaaatgatcggcaacaacgacactaccattcaagttgatcttcgcaaaaagtcatccatgaaggacgagattatgtatagtaatttg

SEQ ID NO: 52758 - DNA, 39 bp, synthetic construct
  source 1..39: mol_type = other DNA
agcgtcatctccgttgtggcggcccaagcaccagtgatc

SEQ ID NO: 52759 - DNA, 30 bp, synthetic construct
  source 1..30: mol_type = other DNA
ctcggcctgattcccgagatctacctgaag

SEQ ID NO: 52760 - DNA, 30 bp, synthetic construct
  source 1..30: mol_type = other DNA
taccacgccaccattggcatcaacatcgac

SEQ ID NO: 52761 - DNA, 33 bp, synthetic construct
  source 1..33: mol_type = other DNA
cgcaccctggagatcagcttcatcgctcttccg

SEQ ID NO: 52762 - DNA, 48 bp, synthetic construct
  source 1..48: mol_type = other DNA
ggcgacttcacaacctttatgagcaactacatcggattcaggagaggc

SEQ ID NO: 52763 - DNA, 84 bp, synthetic construct
  source 1..84: mol_type = other DNA
tatatctaccggatcaatagcagcatcaacaaccagtttaatgagactatcaccaagtcccgggacttcatgctgggcaagatt

SEQ ID NO: 52764 - DNA, 105 bp, synthetic construct
  source 1..105: mol_type = other DNA
agctggaacatgcaggccattgtcttcaattacgacatcacacctgagcaaaagcaggatgccatcaacgctaggaaacacgtgaccgagatcgacagaggtcag

SEQ ID NO: 52765 - DNA, 84 bp, synthetic construct
  source 1..84: mol_type = other DNA
tacgtgtataggatcaacagctctatcaatattcagttcaacgagaccatgacaaagtcccgggacttcatgctgggcaacatc

SEQ ID NO: 52766 - DNA, 90 bp, synthetic construct
  source 1..90: mol_type = other DNA
agtagcctctatgcctacctggaccccgtggttgatcaggtcgagaaccaggtccgttccggcgagatcacaattacgttccaatctata

SEQ ID NO: 52767 - DNA, 33 bp, synthetic construct
  source 1..33: mol_type = other DNA
ggcctggagatgaccaccagcactatctctaca

SEQ ID NO: 52768 - DNA, 135 bp, synthetic construct
  source 1..135: mol_type = other DNA
atgcagaagctgaagaacccaaagtggcggggcaacatgattaagcattcaaaccaacacccttgcgacctgcggaagaagaacagcttcaccgatcccatgaatttcatcaattacaacatcaacttctacgac

SEQ ID NO: 52769 - DNA, 42 bp, synthetic construct
  source 1..42: mol_type = other DNA
gcagtcagcgccgctcccaatcccaacatcatgttcggcatt

SEQ ID NO: 52770 - DNA, 33 bp, synthetic construct
  source 1..33: mol_type = other DNA
ggactgaccttctttttcttcgggacaactgct

SEQ ID NO: 52771 - DNA, 57 bp, synthetic construct
  source 1..57: mol_type = other DNA
cctagccaccacatccccgagttcacaactcagggattatacctcactgacaaagcc

SEQ ID NO: 52772 - DNA, 84 bp, synthetic construct
  source 1..84: mol_type = other DNA
tacatgagccacattaccgaagagactcagacaaacgtcaagaacttgttgcaaaaggaacgggacttcctcatcaacaagatt

SEQ ID NO: 52773 - DNA, 225 bp, synthetic construct
  source 1..225: mol_type = other DNA
atgacactgacggcagcctccatcttcaacatcagcgctgacaacgtggtgctggagaacgtctccctcatcaacggcaatgacatcaatggctctgccatatatgccgagggaaataacatcattatcaagaacagcatcctcctgaacaacaccgacgtcgtgatttacgccactaagtccctaacggcaaactataactggtggggtaacaccgctgatacc

SEQ ID NO: 52774 - DNA, 87 bp, synthetic construct
  source 1..87: mol_type = other DNA
agctatatgtccaacatcaccaacaagacacagaacaatctgaagggcctgctcaaggaggaacgggactacatcatcaacaagatt

SEQ ID NO: 52775 - DNA, 39 bp, synthetic construct
  source 1..39: mol_type = other DNA
accggcttcaacgccaatctgagccccaactactccttt

SEQ ID NO: 52776 - DNA, 33 bp, synthetic construct
  source 1..33: mol_type = other DNA
ggcgtcagcatgttaggaatggcagccatgagc

SEQ ID NO: 52777 - DNA, 87 bp, synthetic construct
  source 1..87: mol_type = other DNA
tcctacatgtctcacataacagaacagagccaaaccaatatcaagaacctgctgcaaaaagagcgggacttcatcatcaacaagatc

SEQ ID NO: 52778 - DNA, 30 bp, synthetic construct
  source 1..30: mol_type = other DNA
ctcctgatcggaggcagccagcttagctcc

SEQ ID NO: 52779 - DNA, 30 bp, synthetic construct
  source 1..30: mol_type = other DNA
atggcgcattatagtgcttatagtggacgg

SEQ ID NO: 52780 - DNA, 36 bp, synthetic construct
  source 1..36: mol_type = other DNA
tttgccatcaacctgttcgagattgtgaagttcagc

SEQ ID NO: 52781 - DNA, 114 bp, synthetic construct
  source 1..114: mol_type = other DNA
tctaacatcggggccggcgacaattacggaagcatcaccaaggctttctcgcaaagcaataagagtatatccttctctgatgtgaaggagttctattttcaatatttcccttgt

SEQ ID NO: 52782 - DNA, 87 bp, synthetic construct
  source 1..87: mol_type = other DNA
tcctacatgagccacattaccgagcagacacagaccaacgtgaagaatctgttgcaaaaggaacgggacttcctgatcaacaagatc

SEQ ID NO: 52783 - DNA, 33 bp, synthetic construct
  source 1..33: mol_type = other DNA
ggcatcagtctcctggccataggagcttctcag

SEQ ID NO: 52784 - DNA, 66 bp, synthetic construct
  source 1..66: mol_type = other DNA
cacatcctagtttacatagatggcattctggtcctcaacgccactactactgacgatctgactcag

SEQ ID NO: 52785 - DNA, 75 bp, synthetic construct
  source 1..75: mol_type = other DNA
ggggaacacgagatcaaggtggtcttcaccgacggcaacggaaacacaaatacatacactgaaaacatcaccatc

SEQ ID NO: 52786 - DNA, 30 bp, synthetic construct
  source 1..30: mol_type = other DNA
ctgcacatcattcccggcatcatattcgcc

SEQ ID NO: 52787 - DNA, 81 bp, synthetic construct
  source 1..81: mol_type = other DNA
gggcagaactgggccccatttgtcccctgggtctgcccctatctgatagcatctggcgaaatcgcacaatatggcgttgga

SEQ ID NO: 52788 - DNA, 222 bp, synthetic construct
  source 1..222: mol_type = other DNA
gacgggtccaagttcagcgccacactcgtggacagcaaaggaaacccccggtccggcgtcaacatcacattcaacataaacggagtgttctacaaccgcaccaccgatgagaacggcaccgcaaggctcaatatcaacctgatgcccggcgaatacatcatcacgagccaatatgggtcatcaatgacaagcaataagatcaccatcgccgccaaggaggag

SEQ ID NO: 52789 - DNA, 33 bp, synthetic construct
  source 1..33: mol_type = other DNA
gagttgaagatcatccccatgatcattttcgcc

SEQ ID NO: 52790 - DNA, 87 bp, synthetic construct
  source 1..87: mol_type = other DNA
acctacatccactctattaactcgagcatcaacaatcagtttaacgagactatgaccaagtcacgggacttcatgctgggcaacatc

SEQ ID NO: 52791 - DNA, 30 bp, synthetic construct
  source 1..30: mol_type = other DNA
ctgggcgtcatccctacaattgtgttcgcc

SEQ ID NO: 52792 - DNA, 39 bp, synthetic construct
  source 1..39: mol_type = other DNA
caggcactgatcagccagtttttcgaggctggaagtgcc

SEQ ID NO: 52793 - DNA, 87 bp, synthetic construct
  source 1..87: mol_type = other DNA
agctacatgtccaacatcgccaatacaactcaggacacaatccaaaaccttctgaagaccgagaaagacttcctgatcaacaagatc

SEQ ID NO: 52794 - DNA, 30 bp, synthetic construct
  source 1..30: mol_type = other DNA
aaggtgctgagcttcggcgacatcgttctg

SEQ ID NO: 52795 - DNA, 153 bp, synthetic construct
  source 1..153: mol_type = other DNA
gctcaccccgggcatggcagcgagtaccacatcgaagaagtcagtagtagtaattccgccccgtctagtagtggcagtggttctagcggcagcggttcctccgggagctctagctccggtagcggcagtagcggcagtggctcgagcgggagc

SEQ ID NO: 52796 - DNA, 222 bp, synthetic construct
  source 1..222: mol_type = other DNA
atgacctctaactgggccccttacgtgttgcttgaggatacacgcgttcattacgtccaaaacatctccttcatctctttcgatgggaaaacctggaaggacgcctatgaccttggatacatcacttgcctgaaagtttataccgtggcggacgacaccaaaatcatcaacaacgaaaacatcactgttgattacggctgttgtagatgtcgatgttgttct

SEQ ID NO: 52797 - DNA, 222 bp, synthetic construct
  source 1..222: mol_type = other DNA
atggaaggaggaaacatcgcgaggatcattgtccctggacttaatgaaagtaccgtggccgccgttaactacctgggggatgacaaatataacccagccaataccaccgtggagatagtcgtgtctaagaagaacctgaccatatcggcttctgcggaaccaatcttcgtcggtgacaacgcaaccgtggtggtgactggatttcccgtgactagctacgga

SEQ ID NO: 52798 - DNA, 222 bp, synthetic construct
  source 1..222: mol_type = other DNA
atgaagaatggcggcgctgtctacctcgataatattaaacagggggaatgtgacaataccacctttagtaatagtcatttcgagaataacaccgccggtgtcaatggtggtgccattgactggcatgacggggccacaaacggccggatcgtggactcctccttcgtgaacaattctgcgaaggcgaaagtgccaactgtctggcttatgatcgtgacgctg

SEQ ID NO: 52799 - DNA, 30 bp, synthetic construct
  source 1..30: mol_type = other DNA
ctgaagctgattcccgtgatcatcttcgcc

SEQ ID NO: 52800 - DNA, 60 bp, synthetic construct
  source 1..60: mol_type = other DNA
ttcaagattttccggcttaaactgctcttctttaagaagaccatccccctgttcttcatc

SEQ ID NO: 52801 - DNA, 30 bp, synthetic construct
  source 1..30: mol_type = other DNA
ctgaagctgatccccgtgattatcttcgct

SEQ ID NO: 52802 - DNA, 99 bp, synthetic construct
  source 1..99: mol_type = other DNA
atgtacaaatcctatctcgtggatctgggcaatgagatcgactccaacgagattaacaccctgaacacaagcttcagcgacatcgcctctaagttcgaa

SEQ ID NO: 52803 - DNA, 90 bp, synthetic construct
  source 1..90: mol_type = other DNA
aacactaccgttggagagcccgttttttgtagctcttgtatcgactgcttctggtgccggtacacccctctgtgcaacctctacaaaaag

SEQ ID NO: 52804 - DNA, 30 bp, synthetic construct
  source 1..30: mol_type = other DNA
agcgtggcagccgccaacgctcctattatc

SEQ ID NO: 52805 - DNA, 99 bp, synthetic construct
  source 1..99: mol_type = other DNA
atgtacaaatcctatctctctgacctcggcaccgagattggcagcaacgagatgaagagtctgaattccagcttctcggacatcgcaagtagattcgag

SEQ ID NO: 52806 - DNA, 102 bp, synthetic construct
  source 1..102: mol_type = other DNA
ggctgcgatcccgccgtgttttgggcgcgccgtgcccacctccgggatatcgcggcgcaactctttcctccggattggagctacctctctgcaatagtagca

SEQ ID NO: 52807 - DNA, 159 bp, synthetic construct
  source 1..159: mol_type = other DNA
gcttacagctctggcctgctcgacaccttcaccgctaccgggcagacctatgagagcaacggcattacgtttcaatacccagactcctggaccgaggccaactgcgtctccgatggggctatcggagccgtggtggacagcaacaactctaacatcagt

SEQ ID NO: 52808 - DNA, 195 bp, synthetic construct
  source 1..195: mol_type = other DNA
ttcgccggggttgggggggaatctgttggtttggaagtgaacagtaacgactactataatgatactaatctggccgacggatggatctactcggttaacctggatgacaagtttctggacgacgtcaactccctgaaccccgtgacacagaccgagcggcagctcgtcgtggattccgtcgcggacttttccaat

SEQ ID NO: 52809 - DNA, 45 bp, synthetic construct
  source 1..45: mol_type = other DNA
atccccttggctcctaccggcacctggggtgccttgttcgaactg

SEQ ID NO: 52810 - DNA, 135 bp, synthetic construct
  source 1..135: mol_type = other DNA
atgtacaagaactacatgagcgacctgagtggccagatagactccaaggaggttaaagaattcaataacgagctcaggcacctggagcggtacttcaagaagatcaaccgcttctgcctgatcaacatcaaccac

SEQ ID NO: 52811 - DNA, 99 bp, synthetic construct
  source 1..99: mol_type = other DNA
atctacaggtcctacatggagacatcggaccggtctctaaaggccaaggacgacattatcgatgtcagaaacaccatcctcgacaaccggactcatgtg

SEQ ID NO: 52812 - DNA, 30 bp, synthetic construct
  source 1..30: mol_type = other DNA
ctgaaagtgatacctactatcttctttgcc

SEQ ID NO: 52813 - DNA, 51 bp, synthetic construct
  source 1..51: mol_type = other DNA
gtgtgcagagagttttaccacaaggccatctacctgaatggcggcaacgaa

SEQ ID NO: 52814 - DNA, 216 bp, synthetic construct
  source 1..216: mol_type = other DNA
atggacggacttcagtttaaagctcggctgatcgataacctgggcaagcccttccctaaatgggatgtccggtttaatatcaacggggtcctgtacaaccgcccgaccgactcctacgacctggcaaagctcaagattaacctcccaagcggcgagtacatcatcacctcctcctataacggggccaatattgccaacaagatcacaatttctccg

SEQ ID NO: 52815 - DNA, 96 bp, synthetic construct
  source 1..96: mol_type = other DNA
agttacatcaccaacatcatcaacacaacgcaaaattcgtactctctgctgatcaatctgaagttctgcctcaacattcggtccaagatccaaaac

SEQ ID NO: 52816 - DNA, 216 bp, synthetic construct
  source 1..216: mol_type = other DNA
atgaagacaaccgaatacgagagcgcttacttcgggctaacggatagcgagaacgagggcgtttggaagaacgtcgacgggtccgagcctaaattcatcaactggtctgacggcgaacccaataacgagcggggcatcgagaattacgccatgttttactacaaatcgcccgaatacaagtggaatgacggggacttttccttagactactctcaa

SEQ ID NO: 52817 - DNA, 30 bp, synthetic construct
  source 1..30: mol_type = other DNA
ctgaaagtgatcccggctatctttttcgcc

SEQ ID NO: 52818 - DNA, 147 bp, synthetic construct
  source 1..147: mol_type = other DNA
gcctccgatgtcaatgacactgtgatcgcattcgaggacaccagccagaacgagctttatgattgcaacgagagtgttacggataatctcaaggcctccgaggagaacaacatcgactgtagcgctcagcactacaacaccttcttc

SEQ ID NO: 52819 - DNA, 30 bp, synthetic construct
  source 1..30: mol_type = other DNA
ggaagcggccttctggccgatgcttctgcg

SEQ ID NO: 52820 - DNA, 147 bp, synthetic construct
  source 1..147: mol_type = other DNA
gccgccgacgacaacgccaacggcatcatctctgtggacgacaatgaggaactgattcttgatgaagctatcgatgatgatgtgtcaagtgccaacaataactacgacgaggagctcattctggagactccagctgacgaccttgtc

SEQ ID NO: 52821 - DNA, 33 bp, synthetic construct
  source 1..33: mol_type = other DNA
gagctgtcaatcatccccgtgattttcctggcc

SEQ ID NO: 52822 - DNA, 33 bp, synthetic construct
  source 1..33: mol_type = other DNA
agcatcgtggacgagatcgcttactccaacatt

SEQ ID NO: 52823 - DNA, 30 bp, synthetic construct
  source 1..30: mol_type = other DNA
gtcgtgacggcacaaaacccttaccttctg

SEQ ID NO: 52824 - DNA, 30 bp, synthetic construct
  source 1..30: mol_type = other DNA
ctgcagattatccccatgatcttctttgcc

SEQ ID NO: 52825 - DNA, 99 bp, synthetic construct
  source 1..99: mol_type = other DNA
atctataggtcctacatggagactagcgataagtctctcaaggccaaagacgacattatcgatgtccggaataccatcctggacaataggacacatgtg

SEQ ID NO: 52826 - DNA, 33 bp, synthetic construct
  source 1..33: mol_type = other DNA
gagctgaagctcatccccgtgattctgttcgcc

SEQ ID NO: 52827 - DNA, 33 bp, synthetic construct
  source 1..33: mol_type = other DNA
gtgaccgactctttcctcaaggataccatcctg

SEQ ID NO: 52828 - DNA, 126 bp, synthetic construct
  source 1..126: mol_type = other DNA
atcgacctcgtggcccgggtgctggctaagtactacctgaaccccaagggaaccctgatttatggaggcgaggaggccgaagctacttactaccacggctccaccatctctgccgtcaacacaagt

SEQ ID NO: 52829 - DNA, 63 bp, synthetic construct
  source 1..63: mol_type = other DNA
gccaccgacaagaactggggaaacgctatctataaatatatcattagcctgtacaatagattg

SEQ ID NO: 52830 - DNA, 96 bp, synthetic construct
  source 1..96: mol_type = other DNA
tataagtcttacattttcgggctcggagacgagatcaatagcggcgaggtggaagccctgaacgagtccttctccgagatcagtagcaagttcgat

SEQ ID NO: 52831 - DNA, 84 bp, synthetic construct
  source 1..84: mol_type = other DNA
tacatgagcaacataactcaaaagacgcagactaccctgaacaatctgcttaaggaggagcgggactacctcatcaacaaaatc

SEQ ID NO: 52832 - DNA, 96 bp, synthetic construct
  source 1..96: mol_type = other DNA
tacaagtcctatatcattgagctgggagacgagatcaatagcggcgaggtggaagccctcaacgggtccttctcggaaatcagctctaagttcgac

SEQ ID NO: 52833 - DNA, 84 bp, synthetic construct
  source 1..84: mol_type = other DNA
tacatgagcaacatcactgagaagacccagcggacaatgaacaacctgctgaaggaggagcgggactacctgatcaataagatt

SEQ ID NO: 52834 - DNA, 84 bp, synthetic construct
  source 1..84: mol_type = other DNA
tacctgagcaacattactcaaaagactcagacatccatcaacggcctgctgaaaaaggagcgggaccacatcctcaacaaaatc

SEQ ID NO: 52835 - DNA, 87 bp, synthetic construct
  source 1..87: mol_type = other DNA
agctacatgtcccacatcaccgagcaaacccagactaacatccggaacctattacaaaaggagcgggacttcctcatcaacaagatt

SEQ ID NO: 52836 - DNA, 96 bp, synthetic construct
  source 1..96: mol_type = other DNA
tataagtcttacgtgatcgagctcggcgacgaaatcaacagcggcgaggtcgaagccctgaatggaagcttctccgaaataagctctaagttcgat

SEQ ID NO: 52837 - DNA, 141 bp, synthetic construct
  source 1..141: mol_type = other DNA
gcctcagctaacaccactgaaagtaccttgctctccgttgacgagagctacgttggtaacgatgtggccctgggctcctccaatgaggagagcatcgagaatgacgacgaaaattccaaactcatcaagcggaggggggat

SEQ ID NO: 52838 - DNA, 138 bp, synthetic construct
  source 1..138: mol_type = other DNA
agtgaggatatgagcgagtcccggctgaacgagaccgacgacgtcagctacatctggatcgctgacgacgatggaaacgtgaagctcatccaaaccacggacaatcacttcgaaggctctgctagtccgggttcggca

SEQ ID NO: 52839 - DNA, 42 bp, synthetic construct
  source 1..42: mol_type = other DNA
aaccttattctggcatcgcaaggagtcgtgaagggagccaat

SEQ ID NO: 52840 - DNA, 33 bp, synthetic construct
  source 1..33: mol_type = other DNA
tacggcatgtatatcgccgcattgaagggtgag

SEQ ID NO: 52841 - DNA, 30 bp, synthetic construct
  source 1..30: mol_type = other DNA
ctgaaggtcataccaatgatcattttcgcc

SEQ ID NO: 52842 - DNA, 156 bp, synthetic construct
  source 1..156: mol_type = other DNA
gtgctgaataaccctgttgtgttcgaaattgtggtccggaacaccggcgacatcaagctgagtgacgtgaaggtcagcgagaatcctcatgacggcctgaaatacatctcttggtacgacaactccgccctctggcgatacaacggggatcttacc

SEQ ID NO: 52843 - DNA, 153 bp, synthetic construct
  source 1..153: mol_type = other DNA
tcctacatcacactgagcgacgatacacctgagagcgagctcaacgagaccgatgacatcacctacatttggatggaggacgacaacggcaacgtgaagctaatacaaacgaccgaaaatcacttcgagggctcagctggtgcaccacctagc

SEQ ID NO: 52844 - DNA, 87 bp, synthetic construct
  source 1..87: mol_type = other DNA
agctatatgtccaacatcaccaagaagaccgaaactaatatcgagaacatcctgaagaaggagcgggactacatcatcaacaagatt

SEQ ID NO: 52845 - DNA, 87 bp, synthetic construct
  source 1..87: mol_type = other DNA
agctacatttccaacatcaccgacaagacacagcagaacctgaactctctcctgaaggaggagcgggatttcctcctgaacaagatt

SEQ ID NO: 52846 - DNA, 30 bp, synthetic construct
  source 1..30: mol_type = other DNA
agcttcggccctagggtcttcgacatgccc

SEQ ID NO: 52847 - DNA, 51 bp, synthetic construct
  source 1..51: mol_type = other DNA
gattgttggccttattgcgctgacggattcaaatccagatctatcatttgc

SEQ ID NO: 52848 - DNA, 36 bp, synthetic construct
  source 1..36: mol_type = other DNA
cggtggtccagcgcctcttactgcaagatcaggtgc

SEQ ID NO: 52849 - DNA, 36 bp, synthetic construct
  source 1..36: mol_type = other DNA
atgatcgttggttttagcatggctggcaagtctggc

SEQ ID NO: 52850 - DNA, 210 bp, synthetic construct
  source 1..210: mol_type = other DNA
atggctttcgatgacttcatcaagaaccacgaaaatgagactaaaaccatcctcgaaattcacatgaatgctaccgtgttcatcaataacaacacagacgaggccgccgggctgctctccgccgacattgtcaaagacgtggaggtggagaacaacgcactcaagggtttcccgttaatttctgatctgaacgataccttcaagaagatg

SEQ ID NO: 52851 - DNA, 87 bp, synthetic construct
  source 1..87: mol_type = other DNA
tatatctaccggatcaacagccaaatcaacgacagctttaatcaaaccttagacaagggaagactgtacctcctcaacaagctgaat

SEQ ID NO: 52852 - DNA, 63 bp, synthetic construct
  source 1..63: mol_type = other DNA
gcaatttatggatggaatttcattatcttcctgcaagaacatcctgacctgttgggcagaggc

SEQ ID NO: 52853 - DNA, 210 bp, synthetic construct
  source 1..210: mol_type = other DNA
tcctccagtagctctgattctagctcttcgaatagcaacaacgggccgtccgtggtctcaacccacgacgaggagaattatcaggccggcgacggcagccactataaacaggtcgagtactccgacgggaacttccggcaatatgactataacggcaagctcatcggatctagctacgactcggatcagaagtacctgcctagcatggag

SEQ ID NO: 52854 - DNA, 87 bp, synthetic construct
  source 1..87: mol_type = other DNA
aactacatctccaatatctctagcaccgctcaagaaaactttaaggaactgctgaaacaggagcgggacttcctcatcaacaagatc

SEQ ID NO: 52855 - DNA, 33 bp, synthetic construct
  source 1..33: mol_type = other DNA
ctgggcctgatccctgctgcgattattattgca

SEQ ID NO: 52856 - DNA, 129 bp, synthetic construct
  source 1..129: mol_type = other DNA
gccgccaacaacggcgtcaacacaaatgacatcattaacgacgaaaccaagtctcagctggtggatctccgggactcagagcttcagagcatggaggattacaagcaggcttacggctccgatgtaacc

SEQ ID NO: 52857 - DNA, 72 bp, synthetic construct
  source 1..72: mol_type = other DNA
ggccttattaacgtggatcgcaagaccaagaaaatcaccctcaacttcacacaacgtaatgagctggagttc

SEQ ID NO: 52858 - DNA, 54 bp, synthetic construct
  source 1..54: mol_type = other DNA
agcgagtacaacgtcgtctcaaagtccgtaaaaaccaagtccgtggtcggaaaa

SEQ ID NO: 52859 - DNA, 207 bp, synthetic construct
  source 1..207: mol_type = other DNA
atgaatgagattctgaacggaggcaacacagtgatcgacctaacggacaattacaagtacagggacggcgacgaggcctttgtgaatggaatcgtgattaataagtccatcactattaatggcaacggcatcaccatcgacggatctaacaccgctcggattttccaaatcagcgccgacaacgtcatcatcaacaacatcaccttt

SEQ ID NO: 52860 - DNA, 87 bp, synthetic construct
  source 1..87: mol_type = other DNA
tcctacattactaacatcatcaacacaacccagaacagctttgatggcctcatcaagcaggagcgggacttcctgatcaacaagatt

SEQ ID NO: 52861 - DNA, 33 bp, synthetic construct
  source 1..33: mol_type = other DNA
ctgggcattatccccgctataataacagcgacg

SEQ ID NO: 52862 - DNA, 99 bp, synthetic construct
  source 1..99: mol_type = other DNA
atctaccggtcttacatggagacctccgatgtgtcccttaaggccaaggacgacattatcgatgttcggaacacaatcctcgacaacagaactcatgtg

SEQ ID NO: 52863 - DNA, 126 bp, synthetic construct
  source 1..126: mol_type = other DNA
tcctacatcgagcccaaggagattgtcgtgaatgagattaccaggaacacaatcagcgcgcgacaatggctattacaagagttactcatacaattgaagtgtcttcaagtggccaaggcagctttc

SEQ ID NO: 52864 - DNA, 30 bp, synthetic construct
  source 1..30: mol_type = other DNA
atcgccgggatcggcgctaatgccattgcc

SEQ ID NO: 52865 - DNA, 66 bp, synthetic construct
  source 1..66: mol_type = other DNA
acaactgtccaagttgatctccggaagaagtcctctatcaaggacgagctggcttattcgaacctg

SEQ ID NO: 52866 - DNA, 33 bp, synthetic construct
  source 1..33: mol_type = other DNA
atcagcgttgctgctgcgcaagcccctgttatc

SEQ ID NO: 52867 - DNA, 207 bp, synthetic construct
  source 1..207: mol_type = other DNA
atgaatgtgacctacaacggggataacaactttaacccctctagcgccgtggctaacttcaccgtcggtgctatcgactccgccgtgactgtgaacctcaccaacattacatacggcgacaacgagaccattaagttcaacgtgacggacggagccactgggaccgtcaatatcactgttacgggactagtgctgatgctgctcata

SEQ ID NO: 52868 - DNA, 207 bp, synthetic construct
  source 1..207: mol_type = other DNA
atgaacaatacagccgccaagaacggtggcgctgtgtacctggacaacatccaggggagcaaatgtgacaacaccaccttcaccaactcccggtttgagaacaatagtgcagctgtgaacggcggcgccattgactggcacgacggcgccacaaatggaaaaatcgaggactcctctttcgtcaacaacagcgccaaggctaacgga

SEQ ID NO: 52869 - DNA, 30 bp, synthetic construct
  source 1..30: mol_type = other DNA
ctcgactaccagaacctgctgttcaccaac

SEQ ID NO: 52870 - DNA, 117 bp, synthetic construct
  source 1..117: mol_type = other DNA
ggcgaatacatcgatcttgaggacaacattaatgactattacgaggaaaccaacctggccgacggctggatatattctccttacctgaacgactgcttctggaacaagctcattatt

SEQ ID NO: 52871 - DNA, 168 bp, synthetic construct
  source 1..168: mol_type = other DNA
atggagctgaagaggatcgtgctcgactccgacaccgaactggaccccacaaatgagcggagagagtaccttaacgggatcaagctcgacgtcgacgatctgactattgatggcaacggatacgccattgacgctctgaaaagcgcccgcatcttctattgcactggc

SEQ ID NO: 52872 - DNA, 90 bp, synthetic construct
  source 1..90: mol_type = other DNA
atggctagcgttgattcggcgttcgtgaccgagggcctctcccgcgaggaaatgtacttcctcctgctgatctctatcctgaaccagatc

SEQ ID NO: 52873 - DNA, 168 bp, synthetic construct
  source 1..168: mol_type = other DNA
gacgacatctttaacgtgacactgaacactaacgacctcaaggacctgaatgtgtcctacatcgtctctgatgaggatattagcgagttctccaccgagaacgtcgagttcgatgagatttataagaatgacaaacttcgcatccacaaggtcgattcggccgcgtac

SEQ ID NO: 52874 - DNA, 99 bp, synthetic construct
  source 1..99: mol_type = other DNA
atttacagaagctacatggagacctccgaccgctctctgaaggccaaggacgatatcatcgatgtccgtaacacaatcctcgacaacaggactcatgtt

SEQ ID NO: 52875 - DNA, 84 bp, synthetic construct
  source 1..84: mol_type = other DNA
taccggtcctacatatcgtcctcttctaatctcacggccgagtctgacaccaactcaataaggcagactctgaatagcagcatc

SEQ ID NO: 52876 - DNA, 99 bp, synthetic construct
  source 1..99: mol_type = other DNA
atttaccggagctacatggagacctctgacacatccctcaaggccaaggacgacatcatggacgttaggaataccatcctggataacaggactcatgtc

SEQ ID NO: 52877 - DNA, 81 bp, synthetic construct
  source 1..81: mol_type = other DNA
attcaattgatttacggacatggatatgacgccctgcatccattcatccatttcgatctggactcactctttatcatacac

SEQ ID NO: 52878 - DNA, 99 bp, synthetic construct
  source 1..99: mol_type = other DNA
atttatcggacatacatggagacatccgacaccagcctgaaggccaaggacgacatcatggacgttaggaataccatcctcgacaacaggactcatgtg

SEQ ID NO: 52879 - DNA, 99 bp, synthetic construct
  source 1..99: mol_type = other DNA
atttatagaagctacatggatacatccgaccgctctctcaaggccaaggatgacatcatcgacgtccggaatactatcctggacaatagaacccatgtg

SEQ ID NO: 52880 - DNA, 84 bp, synthetic construct
  source 1..84: mol_type = other DNA
atttacaagatcaacctcgagatcaacgacctgtttaatcaaaccctagtcaagggccgcctgttcctgttcaataagctgaag

SEQ ID NO: 52881 - DNA, 99 bp, synthetic construct
  source 1..99: mol_type = other DNA
atctacaggtcttacatgaacacaagcgacgtgtccctgaaggccaaggacgatatcatcgatgttcgaaacaccattctcgacaatagaacccatgta

SEQ ID NO: 52882 - DNA, 204 bp, synthetic construct
  source 1..204: mol_type = other DNA
atggagtaccaggggatggagttcgaagagcttgaagagggctataagctcaaacggggaaaagacgagaagaccgtaacggttcccgagagcattgacggaaagcccgtggtctctatcggcgctaaggcctttaaggacttctccgccgtaaccgctgttggggatctgaccgtgtactactgcggcgtggtgctcgtaacc

SEQ ID NO: 52883 - DNA, 204 bp, synthetic construct
  source 1..204: mol_type = other DNA
atgcctaaggagaacctcacaatctccgctagcgccgatcccatcacggttggggaggatgcagtgatcgtagttaccgggtttaaggacgctaccggcaacgtggccgtgtctgtcaatggcaaaacgtatacggccgtactgatggtcaagctgatcttactccaactgatggttatcaaattcctgctgctttttcgcgta

SEQ ID NO: 52884 - DNA, 204 bp, synthetic construct
  source 1..204: mol_type = other DNA
atgtttgatggagagtccctcgacgccaacttcgacaacggcacactcgtggatcggatcgcaggcctggagcccggcgattctctggagtacaccgttacgtattcaaatgacagcgacgtgacggtcgactactatatgcttgccaagaccctgaagacactcgaggagtccaaggacgtggcagagaatggtggcaagcac

SEQ ID NO: 52885 - DNA, 138 bp, synthetic construct
  source 1..138: mol_type = other DNA
tacaacggtttgggcgaggaccagggctatttcggcggcgctgacgacgccggctctgatgggagcaaggtcagcggcaacctccacctggtcaagctgaaagtctgttcccttcaatttaagcttctgagtgttctg

SEQ ID NO: 52886 - DNA, 99 bp, synthetic construct
  source 1..99: mol_type = other DNA
atttaccgcacctacatggacacatctaacaccagcctgtccgccaaggatgacatcatggacgtcagaaacactatcctcgacaataggacacatgtc

SEQ ID NO: 52887 - DNA, 99 bp, synthetic construct
  source 1..99: mol_type = other DNA
atctaccggtcttatatgaacacctccgatgtgtctctaaaggccaaggacgacattatcgatgtcaggaacacaatcctcgacaacaggactcatgtc

SEQ ID NO: 52888 - DNA, 99 bp, synthetic construct
  source 1..99: mol_type = other DNA
atctaccgctcttacatggagaccagcgatacatccctgaaggccaaggacgacatcatcgacgttcgaaacaccattctcgacaacaggactcatgtt

SEQ ID NO: 52889 - DNA, 51 bp, synthetic construct
  source 1..51: mol_type = other DNA
accgagtttgccttctccattctcgaggacaagagccctaccctccttaac

SEQ ID NO: 52890 - DNA, 99 bp, synthetic construct
  source 1..99: mol_type = other DNA
atctacaggagctacatggacacctctgataggagcctgaaggccaaggacgatatcattgacgttcgtaacaccatcctcgacaaccggactcatgta

SEQ ID NO: 52891 - DNA, 33 bp, synthetic construct; identical to SEQ ID NO: 52600
  source 1..33: mol_type = other DNA

SEQ ID NO: 52892 - DNA, 81 bp, synthetic construct
  source 1..81: mol_type = other DNA
tatcgaaactattttcaaacaagcactcttagttctaccgccgatgtcgaccagttgagaagtaacttgacatcaagagga

SEQ ID NO: 52893 - DNA, 30 bp, synthetic construct
  source 1..30: mol_type = other DNA
tccaagctgagcgcccagggattctacgcc

SEQ ID NO: 52894 - DNA, 93 bp, synthetic construct
  source 1..93: mol_type = other DNA
ttctactccgactacacggattccgttggatcatctgtaaccagcgatagtgaagatttggctcaaaatataactaacctcaaggacaagttt

SEQ ID NO: 52895 - DNA, 198 bp, synthetic construct
  source 1..198: mol_type = other DNA
atggctaactggctcgttaagggaaaaatcatcaccttcaaattcaacggcaagacatacaaggttaagaccaatgccaaggggatcgctcaaaaagcgctcaacaagaatgtgatcaaaaagctgaagaaggggaagacttacatcgtgaaagtcagctacttcaaggacaacattaaaaccaccgtgaaggtccga

SEQ ID NO: 52896 - DNA, 87 bp, synthetic construct
  source 1..87: mol_type = other DNA
tatatctacaagattaacctcgagatcaacgatatgttcaatcaaacattggccaagggccgccttttcctgttcaataagctggat

SEQ ID NO: 52897 - DNA, 108 bp, synthetic construct
  source 1..108: mol_type = other DNA
aaggtctgcatcggactccagacatacaaatctgatagcaaccccgtgcctgtgtccgtgaccaagctggccaagcaggtcaacgctgcctacgacaatggaggtgat

SEQ ID NO: 52898 - DNA, 120 bp, synthetic construct
  source 1..120: mol_type = other DNA
gccaagattgagacccctgacacctacgacgaggatggctaccccatcgacggcggcctgatggacaggcacctgggcgtgatcgacccatgcaagaccggatactcatgtcgattgcgg

SEQ ID NO: 52899 - DNA, 33 bp, synthetic construct
  source 1..33: mol_type = other DNA
gccgacaaggggcccaaaatttgggatatctct

SEQ ID NO: 52900 - DNA, 30 bp, synthetic construct
  source 1..30: mol_type = other DNA
ctcggcctgatccccctgattgtgttcgcc

SEQ ID NO: 52901 - DNA, 33 bp, synthetic construct; identical to SEQ ID NO: 52027
  source 1..33: mol_type = other DNA

SEQ ID NO: 52902 - DNA, 195 bp, synthetic construct
  source 1..195: mol_type = other DNA
gctcctggaaagtgcatgggaggcgacacctttactaaccgccaggaggtgctgcctagcggggaacactacatcgaatgcgacatcaatacactggacgctgactcccggggcgccgagaggattgtctactcttccgacgacttcgatgtgtactacacttctgaccactacgagacattcgagaagctcaac

SEQ ID NO: 52903 - DNA, 126 bp, synthetic construct
  source 1..126: mol_type = other DNA
gccgaaaattccaccgacatccggagcgtggattgccagaagatcctgcaaacgagccagaacggcatgtacgctaccgatgaggcatctttcaacgacctcgccgacgagattgagaacacaggc

SEQ ID NO: 52904 - DNA, 111 bp, synthetic construct
  source 1..111: mol_type = other DNA
tatagccagaatacaatgtccagttctctcaacattgagtccgaatttaaccaccgtctaatactggacaatgtggccaataccatatcctcgaaagtcgcgcactataga

SEQ ID NO: 52905 - DNA, 30 bp, synthetic construct
  source 1..30: mol_type = other DNA
gctggtctgggcgctgatgcacttgccgca

SEQ ID NO: 52906 - DNA, 39 bp, synthetic construct
  source 1..39: mol_type = other DNA
gagctgaagcagaaagaccctgtccgctttaaccaactt

SEQ ID NO: 52907 - DNA, 102 bp, synthetic construct
  source 1..102: mol_type = other DNA
atctaccaaaactatcttgtgtcgttaagcgatgagctcaataacaatgaagtgaacgatctcatcaataagatcgacaagatcaacgactacgtgaagaaa

SEQ ID NO: 52908 - DNA, 192 bp, synthetic construct
  source 1..192: mol_type = other DNA
atggagattatctgtaaagtcgaaaataccggccgattcgtgaatatcgctaacgtgacaggcaatgagttcgattatgacctgtctaacaatagggccaacgcatctgtgctcataaatcctgcatgcgacatggaggtggtcaagacagtgaacgagtctaacccaaactattctctggaatactgctgt

SEQ ID NO: 52909 - DNA, 192 bp, synthetic construct
  source 1..192: mol_type = other DNA
atgggacccatgcgcctcgatgtcgtcgacgtcgggacttgcgaatgtaaagacctctccgagaatggcgagaccctgaatgacaaacgagaaacccagaccgacacccagaacaccgtgaatatcagagcttggagcctggtgctgctcgtgtcgtccgtcgtactattttcaatattcttaggttcgctg

SEQ ID NO: 52910 - DNA, 33 bp, synthetic construct
  source 1..33: mol_type = other DNA
aagaccttcgacttctttagctttgtacttccc

SEQ ID NO: 52911 - DNA, 99 bp, synthetic construct
  source 1..99: mol_type = other DNA
atgtataaacggtacatctctgacctgagcggcgaaatccagtcccgggaagtggccgagttcaagaacaagctcggcgagatcagcgagatcttcact

SEQ ID NO: 52912 - DNA, 36 bp, synthetic construct
  source 1..36: mol_type = other DNA
atggtcttcgcaaaggctttcggggttactagagga

SEQ ID NO: 52913 - DNA, 51 bp, synthetic construct
  source 1..51: mol_type = other DNA
gagaccatcctgagggactatctctcaatgatccacggaaacgtgctctac

SEQ ID NO: 52914 - DNA, 30 bp, synthetic construct
  source 1..30: mol_type = other DNA
atggtgcaggagactgtgactggtacactg

SEQ ID NO: 52915 - DNA, 93 bp, synthetic construct
  source 1..93: mol_type = other DNA
atgattaagcacacaaacaatacctgcgatctgaggcgcaagaccgatctgcgcgaccctctgaccttcaataacctgagaatcaacatcaag

SEQ ID NO: 52916 - DNA, 42 bp, synthetic construct
  source 1..42: mol_type = other DNA
gcagtcagtgccgctcctaaccctgagctgatgctttgggtg

SEQ ID NO: 52917 - DNA, 33 bp, synthetic construct
  source 1..33: mol_type = other DNA
tgcagcttcggcaacgtcgactacggcaagacc

SEQ ID NO: 52918 - DNA, 33 bp, synthetic construct
  source 1..33: mol_type = other DNA
gctgacccatcccctgatatgatggcatgggtc

SEQ ID NO: 52919 - DNA, 87 bp, synthetic construct
  source 1..87: mol_type = other DNA
tacgtgtataagatcaacactgaaatcaacgacctctacaatcagaccctcaacaagggtcgcctgtgcctgttcaacaagctgaag

SEQ ID NO: 52920 - DNA, 96 bp, synthetic construct
  source 1..96: mol_type = other DNA
atgatcaagcacaacaatcccacatgcgacctccggaggaagaccagcatcgtggaccctatgaccttccacaacctgcgcatcgacttcaaggat

SEQ ID NO: 52921 - DNA, 51 bp, synthetic construct
  source 1..51: mol_type = other DNA
tcaatcctcgccgtctctgctgcacccgggcccgagatgatgtcctgggta

SEQ ID NO: 52922 - DNA, 81 bp, synthetic construct
  source 1..81: mol_type = other DNA
cccgttggcctcgacactgaccagatttacacccgacccgctccccaatcccaaatggatgcagggcagctgctcaagtgt

SEQ ID NO: 52923 - DNA, 99 bp, synthetic construct
  source 1..99: mol_type = other DNA
atgtacaaggattacctgtccgacttcactagcgagatcaacaataccgaggtggaaaacctcaagaacaagatcgacaacatcaagacatatctgaag

SEQ ID NO: 52924 - DNA, 186 bp, synthetic construct
  source 1..186: mol_type = other DNA
atggacgacaagggctgggccaccaagtacaacgctacaactgatgaaaatggacgggcaacggtgcagctgttcgccctcgagaatggcaactatactgtgcactccgtctacaacgggacaatcttcctgtccaagtctaagtccatatccgatctgaacattgacgacggttacgataagtat

SEQ ID NO: 52925 - DNA, 84 bp, synthetic construct
  source 1..84: mol_type = other DNA
aaccagacttggagccctttcgtgccctggatctgcccatacctgatcgcctccggcgagattgctaagtacacaaccgacatc

SEQ ID NO: 52926 - DNA, 30 bp, synthetic construct
  source 1..30: mol_type = other DNA
agcttcggccccatggtctttgatatgcct

SEQ ID NO: 52927 - DNA, 69 bp, synthetic construct
  source 1..69: mol_type = other DNA
cccatcttcgagaccaacgatgacgcctttatgctgcttctcctgaagaagtactatacctactctcag

SEQ ID NO: 52928 - DNA, 186 bp, synthetic construct
  source 1..186: mol_type = other DNA
atgaaagggaaagtcatcacgttcaaattcaagggcaaaacctacatggtcaaaacgaactccaagggaatagcccagaaaacactcaaaaagaaggtcatcaagaagttcaagaaggggaagaagtacacagtcaaggtggcatatggcaaggacagcatccggactacagtgaaagttcgtgtc

SEQ ID NO: 52929 - DNA, 99 bp, synthetic construct
  source 1..99: mol_type = other DNA
atgtacaacgattatctttccgacctctctggagaaatcgccagcaaggaggtcaaggagttcaacggcgaactgaataccctgaagaaccacttcaag

SEQ ID NO: 52930 - DNA, 57 bp, synthetic construct
  source 1..57: mol_type = other DNA
gccgatagcatatcagactatattcaaataatctctcggtctcgctggatgaagggc

SEQ ID NO: 52931 - DNA, 48 bp, synthetic construct
  source 1..48: mol_type = other DNA
ttcgccaaagagtggcctgtacattctctgaagtttatagccagcgct

SEQ ID NO: 52932 - DNA, 99 bp, synthetic construct
  source 1..99: mol_type = other DNA
atgtataacaattacgtctccgacctgtctggcgaaattagcagtaaagaagttaaagagttcaactcccaactgaacagcctcgagcggtacttcgag

SEQ ID NO: 52933 - DNA, 99 bp, synthetic construct
  source 1..99: mol_type = other DNA
atgtacaacacctacgtgtccgacctgtccggggaaatcgagagccgggagtttaggcaattcaattctcaactacactcattgggcaactactttcgg

SEQ ID NO: 52934 - DNA, 84 bp, synthetic construct
  source 1..84: mol_type = other DNA
tacatgagcaatattaccgagaagacccagacaaccatcactgacctgctcaagaaggaacgggacttcctcatcaacaaaatc

SEQ ID NO: 52935 - DNA, 87 bp, synthetic construct
  source 1..87: mol_type = other DNA
tcctacatgagcaatatcactgagaagacccagaaccagatcaagacactgctgaaaatcgagcgggacttcctcatcaacaagatc

SEQ ID NO: 52936 - DNA, 30 bp, synthetic construct
  source 1..30: mol_type = other DNA
acaaccctgggcgccgaggtgctttccatc

SEQ ID NO: 52937 - DNA, 99 bp, synthetic construct
  source 1..99: mol_type = other DNA
atgtataagacctacatcgccgacctctccggcgagattcagagcaacgaagtgaatgagtttaaatccaagctgtctgagatctccgagatcttcact

SEQ ID NO: 52938 - DNA, 99 bp, synthetic construct
  source 1..99: mol_type = other DNA
atgtacaacaattacatctccgacctgagcggcgaggtgcagtctaaggaggtcaaggagtttaacgaggaactgaagattctcgggaagtacttcaag

SEQ ID NO: 52939 - DNA, 99 bp, synthetic construct
  source 1..99: mol_type = other DNA
atgtacaatcggtacattggggacctgagcggacagatcaattccaaggaagtaaatgaatttaagaaccagctgaacgtcctcggcacctacttcaag

SEQ ID NO: 52940 - DNA, 99 bp, synthetic construct
  source 1..99: mol_type = other DNA
atgtacaacaattatatggacgatctctcctctgagatctcttctaaggaagtgaacgaattcaacaaccagctgaacaatctgggcaagtacttcaag

SEQ ID NO: 52941 - DNA, 87 bp, synthetic construct
  source 1..87: mol_type = other DNA
tcatatataagcaatataacgcaaaagactcagaagaatatgcagaacctcctgaagactgagcgggacttcatcatcaacaagatc

SEQ ID NO: 52942 - DNA, 99 bp, synthetic construct
  source 1..99: mol_type = other DNA
atgtacaataactacatctccgatctgagcggcgaagtgcagtctaaggagtttaaggagttcaacgacgaactcaagaccctgggcaagtacttcaag

SEQ ID NO: 52943 - DNA, 99 bp, synthetic construct
  source 1..99: mol_type = other DNA
ctgtacaacaactacatgtctgacctgagcggcgagattagtagtcgcgaggtgtccgaatttaacaatgagctcaaggccctgggcaagctcttcaaa

SEQ ID NO: 52944 - DNA, 51 bp, synthetic construct
  source 1..51: mol_type = other DNA
tacaatcccttgccgaacggtagaacaagtccggcgtggaacctccctatc

SEQ ID NO: 52945 - DNA, 99 bp, synthetic construct
  source 1..99: mol_type = other DNA
atgtataacaactacatgagcgatctttctggcgaaatctcttctagggaggtgtcacaatttaacaaccagctgaacgggctgggcaagtacttcaag

SEQ ID NO: 52946 - DNA, 87 bp, synthetic construct
  source 1..87: mol_type = other DNA
atctactccaactacttctccaacggcaatacgttttcggcacacgacgatgcacaacagattagacagaacctgactaccagtaag

SEQ ID NO: 52947 - DNA, 36 bp, synthetic construct
  source 1..36: mol_type = other DNA
gtgaacgccctgcttaccgtggctcccaacttctcc

SEQ ID NO: 52948 - DNA, 87 bp, synthetic construct
  source 1..87: mol_type = other DNA
tcctacattagcaacatcactaacaccactcaagaaaattttaagaagatcctggagaaagagcgggacttcctcatcaacatgatc

SEQ ID NO: 52949 - DNA, 102 bp, synthetic construct
  source 1..102: mol_type = other DNA
cacatgtataattcttacatggccgatctgaccgaagaggtcaatagtaaagaagttaaagagttcaataacggcctgatgaacatcgagaagtacttcaag

SEQ ID NO: 52950 - DNA, 75 bp, synthetic construct
  source 1..75: mol_type = other DNA
atgaacaagaccgtgtacctcgacgtcgataacgctaagaacaaggacgccgataactatacactggccatcgtg

SEQ ID NO: 52951 - DNA, 60 bp, synthetic construct
  source 1..60: mol_type = other DNA
gccgaggtcatgtatatccctccaagcgagttcgagaagggcgtgctgggggtggttata

SEQ ID NO: 52952 - DNA, 99 bp, synthetic construct
  source 1..99: mol_type = other DNA
atgtataagaactacatgaacgatctaacgggggagatcagctccaaggagctgaatgagttcaatagtcagctcaataccctgggccggtacttcaag

SEQ ID NO: 52953 - DNA, 87 bp, synthetic construct
  source 1..87: mol_type = other DNA
ggctacatgagccatattactgaccaaatgcagaccaatatcaagaacctgctgaacgaggagcgggacttcctcatcaacaagatt

SEQ ID NO: 52954 - DNA, 99 bp, synthetic construct
  source 1..99: mol_type = other DNA
atgtataagaactacatcaacgaccttggcggagagatccagagccgcgagaccgccgagctgaacaacaagctggaggagatttccgaactcttcacc

SEQ ID NO: 52955 - DNA, 99 bp, synthetic construct
  source 1..99: mol_type = other DNA
atgtataacaagtacatgaaggacctgtccggggaaatcgctagcaaggaggttcgtgaattcaacggcgagctcaacgccctgggaaagtacttcaag

SEQ ID NO: 52956 - DNA, 102 bp, synthetic construct
  source 1..102: mol_type = other DNA
atgtaccgcaactatattgccgacctatccggagagatcgagtctggcgaggtccgcgagtttaattacaagctgcagaatatcagccgtcgatttagcttg

SEQ ID NO: 52957 - DNA, 120 bp, synthetic construct
  source 1..120: mol_type = other DNA
gtgcacttcatccccgtcggcggagcccctgccgccatggctaccgcaaccggagttggcaccggaactgctatgttggctgccgggcacgtgaatgacggctatcaccacgcttattgg

SEQ ID NO: 52958 - DNA, 84 bp, synthetic construct
  source 1..84: mol_type = other DNA
tacatgagcaacatcaccggcaaaattcagacaaacatggataacctgctgaagaaggagcgggacttcctcatcaacaagatt

SEQ ID NO: 52959 - DNA, 99 bp, synthetic construct
  source 1..99: mol_type = other DNA
atgtacaaatcctacatggccgacctgggaggccagatcaattccaaggaagtgaaagaattcaacggcgaactgaacgatctcggcaagtacttcaaa

SEQ ID NO: 52960 - DNA, 42 bp, synthetic construct
  source 1..42: mol_type = other DNA
accgacagctttctagtgaatccgacttcggctgtaacacag

SEQ ID NO: 52961 - DNA, 87 bp, synthetic construct
  source 1..87: mol_type = other DNA
tcttatatctccaagatcagtcaggagatccagacaaacacccactccttcctgaagaccgagcgggactacatcatcaataagatc

SEQ ID NO: 52962 - DNA, 96 bp, synthetic construct
  source 1..96: mol_type = other DNA
atgtacaataattatgtttctgacctgtctgatgagattgcctccaaggaggtcaatgaattcaaccgggagctgaagatcctcgagaagtatttc

SEQ ID NO: 52963 - DNA, 84 bp, synthetic construct
  source 1..84: mol_type = other DNA
tacatcacaaacattatcaatacgactcagaacagcttcaagaccctcattacacaagaaagggacttcctgatcaacaagatt

SEQ ID NO: 52964 - DNA, 87 bp, synthetic construct
  source 1..87: mol_type = other DNA
tcctacatgagcaacatgacccagaagatgcagacaaatatccacaacttcctcaaggtggagcgggactacctgatcaacaagatc

SEQ ID NO: 52965 - DNA, 30 bp, synthetic construct
  source 1..30: mol_type = other DNA
gtggtcgcggctcagaatcctttcattatc

SEQ ID NO: 52966 - DNA, 87 bp, synthetic construct
  source 1..87: mol_type = other DNA
atgttcggcaacaacgataccacaatccaggtggacctgcggaaaaagtctagcatcaaggacgagattatgtactccaacatcgat

SEQ ID NO: 52967 - DNA, 60 bp, synthetic construct
  source 1..60: mol_type = other DNA
atcgctgcactcctgctgtcggtcatttctgtagtggcagcgcaaaacccatacatcatc

SEQ ID NO: 52968 - DNA, 54 bp, synthetic construct
  source 1..54: mol_type = other DNA
atctctagcatgaagatgagcctgcctagccggggacggatgcagtccatgcca

SEQ ID NO: 52969 - DNA, 36 bp, synthetic construct
  source 1..36: mol_type = other DNA
cccagcatcgccaacgagttcggcatgaacaatgtg

SEQ ID NO: 52970 - DNA, 177 bp, synthetic construct
  source 1..177: mol_type = other DNA
ggaaagattatcaagttcaagttcaacggcaagacctacaaggccaagaccaacaagaagggcatagcacagaagatactgacaaagaaggttataaagaaactcaagaaggggaaaaagtacacggtgcaagtaacatataagaaggacactatcaaaaccacagtcaagattaag

SEQ ID NO: 52971 - DNA, 42 bp, synthetic construct
  source 1..42: mol_type = other DNA
acaaacgggctcaccaactccttcgagaatagcatatggtgg

SEQ ID NO: 52972 - DNA, 87 bp, synthetic construct
  source 1..87: mol_type = other DNA
agctacatcactaaaattaccaatacaacccagaactccttcaagggcctgatcaagcaggagcgggactacctcatcaacaagatc

SEQ ID NO: 52973 - DNA, 84 bp, synthetic construct
  source 1..84: mol_type = other DNA
tacacaaccaacatcatcaacgacattacaaatcatacgcaagaggttatcaaaaccggccgggataacatcctgagcaagctg

SEQ ID NO: 52974 - DNA, 30 bp, synthetic construct
  source 1..30: mol_type = other DNA
ccctacgtgctgtatagcaacgggggcggc

SEQ ID NO: 52975 - DNA, 66 bp, synthetic construct
  source 1..66: mol_type = other DNA
atgacagagaacgagaacaagttccctgactacgtgaccttcccccggacctttgagaactacaaa

SEQ ID NO: 52976 - DNA, 87 bp, synthetic construct
  source 1..87: mol_type = other DNA
atgctcggcaacaaggacaccacaattcaggtggacctgcggaaaaagtctagcattcgcgacgagatcatctactctggacttgac

SEQ ID NO: 52977 - DNA, 48 bp, synthetic construct
  source 1..48: mol_type = other DNA
ctcctgctgagcgtgatctctgtggtcgccgcgcaaagtccaattgtc

SEQ ID NO: 52978 - DNA, 66 bp, synthetic construct
  source 1..66: mol_type = other DNA
aaggttggcgacgagcagatcacaattgccaaccagaccgtctggtacaacggagacatcggttac

SEQ ID NO: 52979 - DNA, 87 bp, synthetic construct
  source 1..87: mol_type = other DNA
agctacatcactaacatcaccaacacaacccaggaatcctttaagacactgataacacaagaaagagacttcctcatcaacaagatt

SEQ ID NO: 52980 - DNA, 48 bp, synthetic construct
  source 1..48: mol_type = other DNA
tacgatacccagatctgtaccgacgccatcaataataaccatagagtt

SEQ ID NO: 52981 - DNA, 90 bp, synthetic construct
  source 1..90: mol_type = other DNA
atgtctgacttcaacatcgacctgttctacttcattaatcacaacctgtccaatcccttttcggatatcctgatgcccaacttgacacac

SEQ ID NO: 52982 - DNA, 111 bp, synthetic construct
  source 1..111: mol_type = other DNA
acacatcttttcctatctccgtcgacggtggaatccaagggaagcaaaaatgttactgacatgattaaccgctctgttgagattcctgcttccgttcgactcatgatgagt

SEQ ID NO: 52983 - DNA, 36 bp, synthetic construct
  source 1..36: mol_type = other DNA
tcttccatcaaggatgagttgcttttttccgactac

SEQ ID NO: 52984 - DNA, 30 bp, synthetic construct
  source 1..30: mol_type = other DNA
agcgtggtggcagcccaagccccgatagtc

SEQ ID NO: 52985 - DNA, 78 bp, synthetic construct
  source 1..78: mol_type = other DNA
tatcagtcctacttccaaccccaagagttcaacactacaagcgacatcagtactgtccgttctagcgccttcgagaag

SEQ ID NO: 52986 - DNA, 60 bp, synthetic construct
  source 1..60: mol_type = other DNA
cagggcggcatcctcgctgccgccgtaccgttttctatccacatgaacctgcatggatgc

SEQ ID NO: 52987 - DNA, 54 bp, synthetic construct
  source 1..54: mol_type = other DNA
atggcactccaagcaaaccccgacatgatggcaaaaacccaggagagccaagca

SEQ ID NO: 52988 - DNA, 84 bp, synthetic construct
  source 1..84: mol_type = other DNA
tataccactaactacctcaataccatcaccaaccacaccaagacagtgatcatcaactcccggaacaacttcctgagccagatt

SEQ ID NO: 52989 - DNA, 90 bp, synthetic construct
  source 1..90: mol_type = other DNA
gggtaccaatactcgtctgttaaggacattcaggacatccctgctactggacatcacgacgatccctctacccaccgctacgataggttc

SEQ ID NO: 52990 - DNA, 72 bp, synthetic construct
  source 1..72: mol_type = other DNA
gacaggagcctgaaagccaaggatgatatcatcgatgttcgcaatacaatactggacaatagaacccacgtg

SEQ ID NO: 52991 - DNA, 171 bp, synthetic construct
  source 1..171: mol_type = other DNA
atgagcgagctggataatgacgcgtctaaggaaaatatcaaactgggcgaatatgtgacctggatctttgaagccaaaaacaagggccctaacattgcaaaaaatgtgaaagtctacattaaactcgtggatgggctcaagttcattaagtacaatgtgaacaaaggaatt

SEQ ID NO: 52992 - DNA, 93 bp, synthetic construct
  source 1..93: mol_type = other DNA
gtcttccacgccgccaatgacccaggcatggacccctacgatgtgacattcactgcaacggcagaaggccctcctaaggagatgaagcttcag

SEQ ID NO: 52993 - DNA, 84 bp, synthetic construct
  source 1..84: mol_type = other DNA
atctacatcatttctagtgatgccatcatgaattacactttgttctcccgttactttaacctgcacctgtccctgcttgatgtg

SEQ ID NO: 52994 - DNA, 168 bp, synthetic construct
  source 1..168: mol_type = other DNA
atcacattcaagttccggggcaagacctacaaagtaaagacgaacaagaacggaatcgctcaaaagaccctgaagaagaacgtcattaagaagctgaaaaaggggaagacctataccgtgaagctgatttacctcaaggacacaatcaagacaaccgtcaaggttaaa

SEQ ID NO: 52995 - DNA, 39 bp, synthetic construct
  source 1..39: mol_type = other DNA
atgcccgacctgatcgatggcagcgagaacgttagtgtg

SEQ ID NO: 52996 - DNA, 93 bp, synthetic construct
  source 1..93: mol_type = other DNA
tacttcggcctgacaaaccagaacaacacaaacactaccaacgtgaacaataccaccaacaccaccaatagcacaatgctcctgctgcgaaat

SEQ ID NO: 52997 - DNA, 63 bp, synthetic construct
  source 1..63: mol_type = other DNA
ctggacgattaccgcgagatcgggctggacagcagggcattcggacaagtccgcgaatcagag

SEQ ID NO: 52998 - DNA, 81 bp, synthetic construct
  source 1..81: mol_type = other DNA
gatgcatacgctactgctcgagccctcaatgagggaatggaagttgaagacaagcttgatttccacaacctcgactggtgg

SEQ ID NO: 52999 - DNA, 162 bp, synthetic construct
  source 1..162: mol_type = other DNA
atgaatgaaattctcaatggtcgcaatactgtcatctatctgaccgacaactataagtacagctacggggacgaagccttcgtccacggcatcctgatcaagaagtccatcaccatcaacggaaacggcatcacgatcgacgggtcaaataccgcgcgcatt

SEQ ID NO: 53000 - DNA, 66 bp, synthetic construct
  source 1..66: mol_type = other DNA
atgaaggtatcgaaggatgataactgccagatcgacgagaattgttccgacggaacctgtgcaccg

SEQ ID NO: 53001 - DNA, 69 bp, synthetic construct
  source 1..69: mol_type = other DNA
atgaaagttagcaaagatgataattgccagatcgacgggaactgctccaacggcacatgtgctcctgtc

SEQ ID NO: 53002 - DNA, 162 bp, synthetic construct
  source 1..162: mol_type = other DNA
gcactcatgcaaattggcgacgttgagtctgtcgagtttaatgaagtttggggccagggccacacacaagccgaacgcagtggaagcgccaacggcaactttatcaattgggtcaataagtgcatgagtaatgagagcgattttttcctcatcgacttcttc

SEQ ID NO: 53003 - DNA, 72 bp, synthetic construct
  source 1..72: mol_type = other DNA
gctgactactccgagtcctcctctgaaactgagattcagacctgggatgactatgaggcaagtaacatcctt

SEQ ID NO: 53004 - DNA, 48 bp, synthetic construct
  source 1..48: mol_type = other DNA
atgagcgagcacaacacacctgagtacatcaccttcccacggactttc

SEQ ID NO: 53005 - DNA, 48 bp, synthetic construct
  source 1..48: mol_type = other DNA
atcttctacattggaggtaacggctttatcgagccactgagacttgtg

SEQ ID NO: 53006 - DNA, 159 bp, synthetic construct
  source 1..159: mol_type = other DNA
atgaagatcgaggaaatcgacgctatcaaattcaagaacgatcaggccaccgaggttaaagagaacgtggtcaaggacgagaccatcaccctcactattaatggcaacattagccgcaaacggaacctgcaatgggacacttgctccacaaggacttgg

SEQ ID NO: 53007 - DNA, 39 bp, synthetic construct
  source 1..39: mol_type = other DNA
acatccaacttttcggctaccgacgtgcagactgatgcc

SEQ ID NO: 53008 - DNA, 90 bp, synthetic construct
  source 1..90: mol_type = other DNA
gcaagcgaaatcggcgacaccattgcttctgagaacgccaacacaattgagctgtccgccgataatgaggccatcctggagactttgcac

SEQ ID NO: 53009 - DNA, 39 bp, synthetic construct
  source 1..39: mol_type = other DNA
ctgtctctggtgcacggcgacatctctatatccataagc

SEQ ID NO: 53010 - DNA, 42 bp, synthetic construct
  source 1..42: mol_type = other DNA
gggagctctgtcgtgtccttcggccccatggttttcgacatg

SEQ ID NO: 53011 - DNA, 30 bp, synthetic construct
  source 1..30: mol_type = other DNA
atgagcaagatcaacgtggacgccttctac

SEQ ID NO: 53012 - DNA, 135 bp, synthetic construct
  source 1..135: mol_type = other DNA
gagaatgtgaccatggacaacaccatgtccatccaagacacggtcaacaacgtgaacgactctgacaccatctacctgacacccggcacctacatcgagagcgggatcaagatcgataagaacatcacacttcaa

SEQ ID NO: 53013 - DNA, 48 bp, synthetic construct
  source 1..48: mol_type = other DNA
ggcctgggagtggagcacgagttctactatgaccagggtagcatgagc

SEQ ID NO: 53014 - DNA, 57 bp, synthetic construct
  source 1..57: mol_type = other DNA
atgatcacattcaaaaagtttaaggagaatgccaccatcgaggacattgtgaacatc

SEQ ID NO: 53015 - DNA, 153 bp, synthetic construct
  source 1..153: mol_type = other DNA
agtgtgacctttaacatcaatggcgtgttctacaataagccgacagattcgagcggaaccgctaagctcaatatcaatctgatgcctggcgagtatataatcacgtctatgtacaacgggatggccatcgccaacaccattaccatcaaggac

SEQ ID NO: 53016 - DNA, 48 bp, synthetic construct
  source 1..48: mol_type = other DNA
agccagctcgtggacgatctgcacaccatctattactacatcaagttc

SEQ ID NO: 53017 - DNA, 33 bp, synthetic construct
  source 1..33: mol_type = other DNA
gccaccgctagctccttcgactcgcaacaacac

SEQ ID NO: 53018 - DNA, 36 bp, synthetic construct
  source 1..36: mol_type = other DNA
gagtgcctgaagcaggagtacttttttcaacaacct

SEQ ID NO: 53019 - DNA, 72 bp, synthetic construct
  source 1..72: mol_type = other DNA
ttcacacccactatagaagttaaagaagtcgatatcaaggatattaaccggggcatgatcgacgctacattt

SEQ ID NO: 53020 - DNA, 42 bp, synthetic construct
  source 1..42: mol_type = other DNA
agccagctggtcattgacctcaagactagcggacactcatgg

SEQ ID NO: 53021 - DNA, 36 bp, synthetic construct
  source 1..36: mol_type = other DNA
cggaagatctacctgacctattacatgctgtggttc

SEQ ID NO: 53022 - DNA, 75 bp, synthetic construct
  source 1..75: mol_type = other DNA
cggcacgagattagcgtggagttctccgggtctgacggcaagacccatacattttcggaaacagtcgtgatcgag

SEQ ID NO: 53023 - DNA, 108 bp, synthetic construct
  source 1..108: mol_type = other DNA
tccagtgataagtacactccaaccgtcagcctcccggtatcgggaaagaccattgtcgtggacgcaggacatggcatccctgacgagggcatccacctgctgactctc

SEQ ID NO: 53024 - DNA, 63 bp, synthetic construct
  source 1..63: mol_type = other DNA
atggccgatatcaactgggatgcctacgcaaagcccttcgccgacggcatcattcctggatct

SEQ ID NO: 53025 - DNA, 42 bp, synthetic construct
  source 1..42: mol_type = other DNA
ccctactatatggatgactttgctgtgtcgtctgagaagatc

SEQ ID NO: 53026 - DNA, 60 bp, synthetic construct
  source 1..60: mol_type = other DNA
atgtccgtgaactgggatgcctactctgcctttttcaatgacggcatcattcctgctagc

SEQ ID NO: 53027 - DNA, 36 bp, synthetic construct
  source 1..36: mol_type = other DNA
tctatcgtatacgccgacctgagtatatcaatatct

SEQ ID NO: 53028 - DNA, 36 bp, synthetic construct
  source 1..36: mol_type = other DNA
atgagcgatctgatcgacgagattaccgagatgacc

SEQ ID NO: 53029 - DNA, 33 bp, synthetic construct
  source 1..33: mol_type = other DNA
agcaggatcgtggtcgacctgaacgcagatgtt

SEQ ID NO: 53030 - DNA, 84 bp, synthetic construct
  source 1..84: mol_type = other DNA
agtgaggaggaaacaccactgaatagcatcgtgattgtctctaacgccttcacatccaacggctacaagatgtacaaattctgg

SEQ ID NO: 53031 - DNA, 48 bp, synthetic construct
  source 1..48: mol_type = other DNA
atgagcaactgggacgcttacgctggccacttcgccgatggaatcccc

SEQ ID NO: 53032 - DNA, 48 bp, synthetic construct
  source 1..48: mol_type = other DNA
atgaacgactggagcggctacaccgattactttgccgacggtatccca

SEQ ID NO: 53033 - DNA, 33 bp, synthetic construct
  source 1..33: mol_type = other DNA
atgcggaaaatccacaagtacacaccaaagtcc

SEQ ID NO: 53034 - DNA, 63 bp, synthetic construct
  source 1..63: mol_type = other DNA
ggcgccctcatcatctcacaagggttctactccaagaccgccatacaacaacttagcgagaac

SEQ ID NO: 53035 - DNA, 120 bp, synthetic construct
  source 1..120: mol_type = other DNA
atgaacggccagtggaagtggacacaatgggacaatggagaggaaggggccacctaccacaagtaccccgtctcaaatgacgtggagattcagaaggtcgaagtgcagctgaacatcaag

SEQ ID NO: 53036 - DNA, 30 bp, synthetic construct
  source 1..30: mol_type = other DNA
cttccgcaaccagaaaccgctacaatcgcc

SEQ ID NO: 53037 - DNA, 48 bp, synthetic construct
  source 1..48: mol_type = other DNA
cttacacaaccagcatctcctacattcggcgcctttctggctctcaac

SEQ ID NO: 53038 - DNA, 30 bp, synthetic construct
  source 1..30: mol_type = other DNA
atgatgatggtgctgggcatcgaagatcct

SEQ ID NO: 53039 - DNA, 78 bp, synthetic construct
  source 1..78: mol_type = other DNA
ttcagcgatctgcaaaagaaaatcgacggcgccgacgaaggctccaccattctcctggagaataactacgcttacgac

SEQ ID NO: 53040 - DNA, 45 bp, synthetic construct
  source 1..45: mol_type = other DNA
atctcttccgctcctaccaatgtggacaacagcgtcagattcggc

SEQ ID NO: 53041 - DNA, 30 bp, synthetic construct
  source 1..30: mol_type = other DNA
atgatggttattctcggcattgaagacccc

SEQ ID NO: 53042 - DNA, 30 bp, synthetic construct
  source 1..30: mol_type = other DNA
atgattgagatcctgggccttagtgacccc

SEQ ID NO: 53043 - DNA, 42 bp, synthetic construct
  source 1..42: mol_type = other DNA
tgggaggacctgcggaaggagtacagcgatatagttggagaa

SEQ ID NO: 53044 - DNA, 48 bp, synthetic construct
  source 1..48: mol_type = other DNA
gccggctggatcgacatgaccgccattttcgctccatatgcggggtgg

SEQ ID NO: 53045 - protein, 34 aa, unidentified
  source 1..34: note = methanogen bacteria
DEKGYEYIYSTGDMVRFLPDGTLAIVDRRDSQVK

SEQ ID NO: 53046 - protein, 11 aa, unidentified
  source 1..11: note = methanogen bacteria
NRVELPEVESA

SEQ ID NO: 53047 - protein, 62 aa, unidentified
  source 1..62: note = methanogen bacteria
KIRYVDDVTVQVANNNGSNELVAYVVASKEFAPDSLSEHIREYVSKHKPDYMIPSFIIPLNK

SEQ ID NO: 53048 - protein, 18 aa, unidentified
  source 1..18: note = methanogen bacteria
GKVDKKALPKVNLEHLHA

SEQ ID NO: 53049 - protein, 37 aa, unidentified
  source 1..37: note = methanogen bacteria
NYVEDVTVQTIKRGSNYELVAYVIESKKTDNLDEIIT

SEQ ID NO: 53050 - protein, 13 aa, unidentified
  source 1..13: note = methanogen bacteria
IGKSKPEYMIPSF

SEQ ID NO: 53051 - protein, 20 aa, unidentified
  source 1..20: note = methanogen bacteria
GKVDKKALPEIDPDSLHEKY

SEQ ID NO: 53052 - protein, 77 aa, unidentified
  source 1..77: note = methanogen bacteria
ILDDSNAKVLIVSDETYERSNDLINDDVTILNISNILKEDIGVLSTLPVVYNDLACILYTSGTTGIPKGVKVTRKSI

SEQ ID NO: 53053 - protein, 42 aa, unidentified
  source 1..42: note = methanogen bacteria
IKQGSNYELVAYVVPSTETDNLEEIITKHIENSKPEYMIPSF

SEQ ID NO: 53054 - protein, 17 aa, unidentified
  source 1..17: note = methanogen bacteria
VDKKALPEVDLDTLHEK

SEQ ID NO: 53055 - protein, 24 aa, unidentified
  source 1..24: note = methanogen bacteria
GTTGIPKGVKITRKSIVNYIEYYA

SEQ ID NO: 53056 - protein, 13 aa, unidentified
  source 1..13: note = methanogen bacteria
SNMTQEDTFALYA

SEQ ID NO: 53057 - protein, 44 aa, unidentified
  source 1..44: note = methanogen bacteria
IFVSLFVGACLNIIPEEIKLNMKKLNEHFINNNITHAHLPTQVA

SEQ ID NO: 53058 - protein, 60 aa, unidentified
  source 1..60: note = methanogen bacteria
NEFESSSLKILVTGGEKLGEIDYSTEYILVDSYGPTEACVSVTAIKEQDKIGYSSIGHLL

SEQ ID NO: 53059 - protein, 34 aa, unidentified
  source 1..34: note = methanogen bacteria
IKNANNNELAAYVVANCEVENINDLVCDYVNEHK

SEQ ID NO: 53060 - protein, 24 aa, unidentified
  source 1..24: note = methanogen bacteria
KALPDIDLDALRVEYVAPTNETEK

SEQ ID NO: 53061 - protein, 42 aa, unidentified
  source 1..42: note = methanogen bacteria
EKNNISCTARDILNHKTPYLIAQNVDSAEIISYDTVEGEVDL

SEQ ID NO: 53062 - protein, 21 aa, unidentified
  source 1..21: note = methanogen bacteria
PIQSFYFDQIKSDEYMQPFFL

SEQ ID NO: 53063 - protein, 14 aa, unidentified
  source 1..14: note = methanogen bacteria
QSALNELTNLHDML

SEQ ID NO: 53064 - protein, 11 aa, unidentified
  source 1..11: note = methanogen bacteria
ENGKAVQEIKH

SEQ ID NO: 53065 - protein, 21 aa, unidentified
  source 1..21: note = methanogen bacteria
IEINLIHYNDESYIIFVIHHL

SEQ ID NO: 53066 - protein, 15 aa, unidentified
  source 1..15: note = methanogen bacteria
NALPEVDRDTLLTEY

SEQ ID NO: 53067 - protein, 20 aa, unidentified
  source 1..20: note = methanogen bacteria
YRYDTDKTYTFKDISTLNQE

SEQ ID NO: 53068 - protein, 19 aa, unidentified
  source 1..19: note = methanogen bacteria
EINNFFNYSFNEITDSTLY

SEQ ID NO: 53069 - protein, 14 aa, unidentified
  source 1..14: note = methanogen bacteria
FDYTSIKKIYNLFN

SEQ ID NO: 53070 - protein, 15 aa, unidentified
  source 1..15: note = methanogen bacteria
PIDVTNKELYYNKER

SEQ ID NO: 53071 - protein, 20 aa, unidentified
  source 1..20: note = methanogen bacteria
YNIKSNNYNKINIPLNNETI

SEQ ID NO: 53072 - protein, 27 aa, unidentified
  source 1..27: note = methanogen bacteria
FLDENNISKFEYVTAIFSLYLSRIDRT

SEQ ID NO: 53073 - protein, 59 aa, unidentified
  source 1..59: note = methanogen bacteria
LNNYFDINSFYSIYDFTGFNDISIINGEGSALTINIYDNSIELIYNTDLFNKTYIEHMI

SEQ ID NO: 53074 - protein, 48 aa, unidentified
  source 1..48: note = methanogen bacteria
NIESLINNIGESPNQICCDIDILSNEEKNLISRFSKAKTIEFNENKTL

SEQ ID NO: 53075 - protein, 26 aa, unidentified
  source 1..26: note = methanogen bacteria
PSLGLSIANEDINLKYMLLAGAKFDN

SEQ ID NO: 53076 - protein, 54 aa, unidentified
  source 1..54: note = methanogen bacteria
NFDSISNIYLDVDNDNLIAYYTTNQDLNIDKVKNALKNELPPYMIPSIFIKLDE

SEQ ID NO: 53077 - protein, 13 aa, unidentified
  source 1..13: note = methanogen bacteria
IDKFALKKTTHNR

SEQ ID NO: 53078 - protein, 31 aa, unidentified
  source 1..31: note = methanogen bacteria
TFMEVLNLDYILMDDDFVSLGRNSLSAMKLQ

SEQ ID NO: 53079 - protein, 88 aa, unidentified
  source 1..88: note = methanogen bacteria
KEKLDYNISSNEIMELSTPLNITNHIKFNLNNQSIDKLKYAFDKSCPLSESQLNVYLDEKVNKLGTRYNNPFKIELNNEYSIEDIKIA

SEQ ID NO: 53080 - protein, 28 aa, unidentified
  source 1..28: note = methanogen bacteria
ELYPVLSSRINNNDTPSFTFDAKLEIIE

SEQ ID NO: 53081 - protein, 30 aa, unidentified
  source 1..30: note = methanogen bacteria
LIVKNNESTSLYVDFHHLIMDGTSADILLN

SEQ ID NO: 53082 - protein, 87 aa, unidentified
  source 1..87: note = methanogen bacteria
FEKNIDSHYMDDAERFFDNMLTDTEEVSPLLTPIQTDKSLDDEFTNELNLDVDIESFLKKHGLTHNQFFCSVFAYTLSRFTGSSKVL

SEQ ID NO: 53083 - protein, 27 aa, unidentified
  source 1..27: note = methanogen bacteria
NLIEDGRGHIDLADSVGMYVRTLPLLM

SEQ ID NO: 53084 - protein, 42 aa, unidentified
  source 1..42: note = methanogen bacteria
KNQNISSFLDYSSNLINLTMKYDLYPFRLLANKYDLNSNILF

SEQ ID NO: 53085 - protein, 33 aa, unidentified
  source 1..33: note = methanogen bacteria
LKHDYTNDISFYIFNSQENKFGIRVEFSDKYSK

SEQ ID NO: 53086 - protein, 49 aa, unidentified
  source 1..49: note = methanogen bacteria
DEISDVTVQTVDNNGNNELVAYVVLSNNLDVNLNDYISSYVDERKPDYM

SEQ ID NO: 53087 - protein, 23 aa, unidentified
  source 1..23: note = methanogen bacteria
KALPEIDINSLRAEYAAPTNTIE

SEQ ID NO: 53088 - protein, 11 aa, unidentified
  source 1..11: note = methanogen bacteria
NVDEDYIKEFL

SEQ ID NO: 53089 - protein, 10 aa, unidentified
  source 1..10: note = methanogen bacteria
ENEENYQIFA

SEQ ID NO: 53090 - protein, 24 aa, unidentified
  source 1..24: note = methanogen bacteria
KSISSFMDHTSNLVYNVMKYNYYA

SEQ ID NO: 53091 - protein, 10 aa, unidentified
  source 1..10: note = methanogen bacteria
HEYDLTSNIL

SEQ ID NO: 53092 - protein, 56 aa, unidentified
  source 1..56: note = methanogen bacteria
IPEWIMDGDGNSYLNDYATTEREDLISDLSIDIIQKGKEYDLIVEYSDKYSNNFIK

SEQ ID NO: 53093 - protein, 72 aa, unidentified
  source 1..72: note = methanogen bacteria
MLNVNELKEINYISKEDINLLDSYNQTEHELIYDDILDAFNDNLSKNPNNKLVSFKDISYTYAEGAYIAKQI

SEQ ID NO: 53094 - protein, 26 aa, unidentified
  source 1..26: note = methanogen bacteria
KDTSSKAIIADDNTYERAKTLGKDVI

SEQ ID NO: 53095 - protein, 15 aa, unidentified
  source 1..15: note = methanogen bacteria
KYGKLSCILYTSGTT

SEQ ID NO: 53096 - protein, 77 aa, unidentified
  source 1..77: note = methanogen bacteria
YVSYYTNRTNMTSNDVLALFSSISFDVGAIKSIFAPIYSGSCLDIIPKSFRLNMKELNKYFNDNNITHADFPTQIAK

SEQ ID NO: 53097 - protein, 63 aa, unidentified
  source 1..63: note = methanogen bacteria
FFKENDSVELKILVTGGEKLGEINTKNFEQLIDAYGPTETCVSICSIKKLDKIDSSSIGHLLY

SEQ ID NO: 53098 - protein, 36 aa, unidentified
  source 1..36: note = methanogen bacteria
VEDTTVQINKNSSNYELIAYVVVSEEIYNLKESICS

SEQ ID NO: 53099 - protein, 13 aa, unidentified
  source 1..13: note = methanogen bacteria
PEIDINSLRAEYV

SEQ ID NO: 53100 - protein, 50 aa, unidentified
  source 1..50: note = methanogen bacteria
DSLTAIKLLSYLDSPGITAADILTLHTPYAIAENIKEDTLDLDMYTLESG

SEQ ID NO: 53101 - protein, 51 aa, unidentified
  source 1..51: note = methanogen bacteria
LNEPQLNVYLDIIANNMVNSYLIPLNIVISKEYDVDEIHNALNVMLDVHPI

SEQ ID NO: 53102 - protein, 51 aa, unidentified
  source 1..51: note = methanogen bacteria
YLVKGLKPPITFKSNADDEFVNTFLTKGFDLNECLSKFLVVEKEDKYELFA

SEQ ID NO: 53103 - protein, 18 aa, unidentified
  source 1..18: note = methanogen bacteria
NQSVSDFMNQMSDLVYDV

SEQ ID NO: 53104 - protein, 28 aa, unidentified
  source 1..28: note = methanogen bacteria
KDTSSKVVLVSDETYTRAKDMVDDSIVL

SEQ ID NO: 53105 - protein, 19 aa, unidentified
  source 1..19: note = methanogen bacteria
VVVDNDLDGEALSDSICDY

SEQ ID NO: 53106 - protein, 11 aa, unidentified
  source 1..11: note = methanogen bacteria
EVDVEGLRVEY

SEQ ID NO: 53107 - protein, 88 aa, unidentified
  source 1..88: note = methanogen bacteria
GGDSISAIRVISFIQKNGISCSAKDVLTYKTPYMIAQNIGEIDRVSYDAVEGEVALLPIQSYFFDQINTNEFSQEFILKAKNDLDLEI

SEQ ID NO: 53108 - protein, 33 aa, unidentified
  source 1..33: note = methanogen bacteria
FDELTKIHDMLRVNYRYEGDNVVQEILPVDTRI

SEQ ID NO: 53109 - protein, 33 aa, unidentified
  source 1..33: note = methanogen bacteria
EINEIRLTGDFNTAISDFVNESISSIDMNNNLI

SEQ ID NO: 53110 - protein, 24 aa, unidentified
  source 1..24: note = methanogen bacteria
PYPYKNWVEDVNSLVENISDNEKQ

SEQ ID NO: 53111 - protein, 31 aa, unidentified
  source 1..31: note = methanogen bacteria
NTESKVVIVDDDTYERAELLNDDVILLNISD

SEQ ID NO: 53112 - protein, 40 aa, unidentified
  source 1..40: note = methanogen bacteria
FGNDDVYGMFANISFDAGSWAICQTIYAGACLSIVPDDIK

SEQ ID NO: 53113 - protein, 85 aa, unidentified
  source 1..85: note = methanogen bacteria
VDHGVTHTMITTQVGKLFMESVEDTSLDVLMVGGEKLGDFESPEDYLLIDGFGPTETFAFISSINNNDKIDSSSIGDINYNTKFY

SEQ ID NO: 53114 - protein, 11 aa, unidentified
  source 1..11: note = methanogen bacteria
EVDRSGLHVEY

SEQ ID NO: 53115 - protein, 51 aa, unidentified
  source 1..51: note = methanogen bacteria
GGDSLTAIKVLSYLEDYNVTAADILSLRTPFAIAESIKEDTLDLDVYTLED

SEQ ID NO: 53116 - protein, 16 aa, unidentified
  source 1..16: note = methanogen bacteria
NNYNAIGMYVNTLPML

SEQ ID NO: 53117 - protein, 25 aa, unidentified
  source 1..25: note = methanogen bacteria
NQNVSDFMEYMSGLVYDVMKYNYYP

SEQ ID NO: 53118 - protein, 12 aa, unidentified
  source 1..12: note = methanogen bacteria
AKEYGIDSSILF

SEQ ID NO: 53119 - protein, 24 aa, unidentified
  source 1..24: note = methanogen bacteria
DTQASVLIVDNSTYEHAELLADDA

SEQ ID NO: 53120 - protein, 10 aa, unidentified
  source 1..10: note = methanogen bacteria
IRKYGLSEDD

SEQ ID NO: 53121 - protein, 94 aa, unidentified
  source 1..94: note = methanogen bacteria
DAIKLDMASMNDYFIEHGVTHTEISTQVAKLFISQVDETSLKVLTTGGEKLGGSEIDVDYRFVDSYGPTEACVDVTSIDSDERIDPSSIGFLLD

SEQ ID NO: 53122 - protein, 11 aa, unidentified
  source 1..11: note = methanogen bacteria
EVDTDNLRAGY

SEQ ID NO: 53123 - protein, 12 aa, unidentified
  source 1..12: note = methanogen bacteria
SVFYNLVNNIDF

SEQ ID NO: 53124 - protein, 35 aa, unidentified
  source 1..35: note = methanogen bacteria
DDYKYDLSLDEIRSISNQDSTLNHYFDAISNIFQN

SEQ ID NO: 53125 - protein, 20 aa, unidentified
  source 1..20: note = methanogen bacteria
SLGCIYATLIAEKLEKDRVV

SEQ ID NO: 53126 - protein, 31 aa, unidentified
  source 1..31: note = methanogen bacteria
ELIYNADLFSNSYMEHMAANIKSLISSTSEL

SEQ ID NO: 53127 - protein, 15 aa, unidentified
  source 1..15: note = methanogen bacteria
LDSSSNSIANDLKEN

SEQ ID NO: 53128 - protein, 13 aa, unidentified
  source 1..13: note = methanogen bacteria
EFDLVQGSDFAIL

SEQ ID NO: 53129 - protein, 37 aa, unidentified
  source 1..37: note = methanogen bacteria
ESNDFTKIVNAYGMTEIMATANICNTAKKDNSIGKSM

SEQ ID NO: 53130 - protein, 14 aa, unidentified
  source 1..14: note = methanogen bacteria
NSYSSLDVNYTFND

SEQ ID NO: 53131 - protein, 48 aa, unidentified
  source 1..48: note = methanogen bacteria
DEVNDLLDSVNGDGENAYTDYFKMDLSSFLKDNSITYNQFFASVFAYT

SEQ ID NO: 53132 - protein, 16 aa, unidentified
  source 1..16: note = methanogen bacteria
IKYSSGLINSVMKYDL

SEQ ID NO: 53133 - protein, 10 aa, unidentified
  source 1..10: note = methanogen bacteria
NYIGSSDLTI

SEQ ID NO: 53134 - protein, 44 aa, unidentified
  source 1..44: note = methanogen bacteria
VKYPDNALVSYNNISYSYAEGAFIADKIRKLLIDFGVEPGDCVS

SEQ ID NO: 53135 - protein, 36 aa, unidentified
  source 1..36: note = methanogen bacteria
EDSDSHVVIASDETYDKVNSLCEDIILNISDLFNDD

SEQ ID NO: 53136 - protein, 32 aa, unidentified
  source 1..32: note = methanogen bacteria
SNMNSSDVYALFASIGFDVGAIKSIFVPLYCG

SEQ ID NO: 53137 - protein, 44 aa, unidentified
  source 1..44: note = methanogen bacteria
VTGGEKLGEVDYSGNYLFIDSYGPTEACVSVTAIEEKDKIDSSS

SEQ ID NO: 53138 - protein, 21 aa, unidentified
  source 1..21: note = methanogen bacteria
TYIDSFNISAGDILSLRTPYA

SEQ ID NO: 53139 - protein, 19 aa, unidentified
  source 1..19: note = methanogen bacteria
SGEYSVDDIGTALGVMFDV

SEQ ID NO: 53140 - protein, 28 aa, unidentified
  source 1..28: note = methanogen bacteria
SSDVFKRDLYTILGGRVVGVDDSFLKAS

SEQ ID NO: 53141 - protein, 16 aa, unidentified
  source 1..16: note = methanogen bacteria
IDENDLLDNMGDLIAD

SEQ ID NO: 53142 - protein, 28 aa, unidentified
  source 1..28: note = methanogen bacteria
SYNAILNDMLCVKALSDISYVSSNDLVL

SEQ ID NO: 53143 - protein, 36 aa, unidentified
  source 1..36: note = methanogen bacteria
PDKDLVTYMNRSYSYGESAFIADKIAKSLTDLGVES

SEQ ID NO: 53144 - protein, 15 aa, unidentified
  source 1..15: note = methanogen bacteria
VSDKTYNRADEISDC

SEQ ID NO: 53145 - protein, 41 aa, unidentified
  source 1..41: note = methanogen bacteria
SLDENDVYGLYSAIGFDMSTFVIDVVITAGACLAVIPDEIK

SEQ ID NO: 53146 - protein, 24 aa, unidentified
  source 1..24: note = methanogen bacteria
DMLKLNDYFIDHNVSHAAIPTPVA

SEQ ID NO: 53147 - protein, 57 aa, unidentified
  source 1..57: note = methanogen bacteria
FMKSVDDTSLDVLHIGGEKLGDFVCSEAYRVIDSYGPTESFAYVCSIDNSDKVDPSS

SEQ ID NO: 53148 - protein, 31 aa, unidentified
  source 1..31: note = methanogen bacteria
LTYLDGFNISAGDVLGLRTPYAIAGSVRNIS

SEQ ID NO: 53149 - protein, 25 aa, unidentified
  source 1..25: note = methanogen bacteria
SNDVFKRDLFTVLDGGVVDLDDSFL

SEQ ID NO: 53150 - protein, 41 aa, unidentified
  source 1..41: note = methanogen bacteria
VMDNDNSDVNIIKSVRENIDSDDGDLLDDMSDLIADLSAGI

SEQ ID NO: 53151 - protein, 33 aa, unidentified
  source 1..33: note = methanogen bacteria
FEELSDISYVSCDDLALLDAYNDTAHVLDYVDV

SEQ ID NO: 53152 - protein, 12 aa, unidentified
  source 1..12: note = methanogen bacteria
EDKSYTYGESAF

SEQ ID NO: 53153 - protein, 10 aa, unidentified
  source 1..10: note = methanogen bacteria
INEIASMLNG

SEQ ID NO: 53154 - protein, 35 aa, unidentified
  source 1..35: note = methanogen bacteria
PKEYVLSDVYGPTETVLSITSTDVVDKIDDSSVGF

SEQ ID NO: 53155 - protein, 19 aa, unidentified
  source 1..19: note = methanogen bacteria
SGRYKIDAIISALESMLNV

SEQ ID NO: 53156 - protein, 29 aa, unidentified
  source 1..29: note = methanogen bacteria
SDDVYGMHCSYVFDMHVHALYSPIVSGGS

SEQ ID NO: 53157 - protein, 29 aa, unidentified
  source 1..29: note = methanogen bacteria
AESGMETTIKLLCFGGMKLGELNAPDSIG

SEQ ID NO: 53158 - protein, 16 aa, unidentified
  source 1..16: note = methanogen bacteria
SENLAISTSIFANRRI

SEQ ID NO: 53159 - protein, 10 aa, unidentified
  source 1..10: note = methanogen bacteria
DDSVANDDLS

SEQ ID NO: 53160 - protein, 24 aa, unidentified
  source 1..24: note = methanogen bacteria
VLDSESYGITFNVSRVGDYYVING

SEQ ID NO: 53161 - protein, 18 aa, unidentified
  source 1..18: note = methanogen bacteria
ELDGKVDLGFVYASRDSF

SEQ ID NO: 53162 - protein, 19 aa, unidentified
  source 1..19: note = methanogen bacteria
IDEVSSLLNDVDGYAGSVS

SEQ ID NO: 53163 - protein, 30 aa, unidentified
  source 1..30: note = methanogen bacteria
TVSSFLNAVFAYAYSRFIGGDKVYYTFTVN

SEQ ID NO: 53164 - protein, 25 aa, unidentified
  source 1..25: note = methanogen bacteria
TNASVGDFLSGVSNLILESMGNSVY

SEQ ID NO: 53165 - protein, 34 aa, unidentified
  source 1..34: note = methanogen bacteria
SEFGLSNSITFEYNYDLNDTTGVGDEIVFSDRAD

SEQ ID NO: 53166 - protein, 12 aa, unidentified
  source 1..12: note = methanogen bacteria
NDLDDGFLVSLN

SEQ ID NO: 53167 - protein, 34 aa, unidentified
  source 1..34: note = methanogen bacteria
MDSIDETSLDVLVTGGEKLGEFSSPESYSLIDSY

SEQ ID NO: 53168 - protein, 17 aa, unidentified
  source 1..17: note = methanogen bacteria
DSMDNLDKLDYSSDGFV

SEQ ID NO: 53169 - protein, 22 aa, unidentified
  source 1..22: note = methanogen bacteria
ISFNDFLNQVNDVYDSAIQHSM

SEQ ID NO: 53170 - protein, 16 aa, unidentified
  source 1..16: note = methanogen bacteria
NIENYTDYACFYSVYD

SEQ ID NO: 53171 - protein, 42 aa, unidentified
  source 1..42: note = methanogen bacteria
NIYEDYLELIYNADLFSNSYMEHMAANIKSLINSASELPNIM

SEQ ID NO: 53172 - protein, 18 aa, unidentified
  source 1..18: note = methanogen bacteria
KDIDILSDNEKKTISEFS

SEQ ID NO: 53173 - protein, 20 aa, unidentified
  source 1..20: note = methanogen bacteria
ELDSSSNSIANDLKENYGIG

SEQ ID NO: 53174 - protein, 16 aa, unidentified
  source 1..16: note = methanogen bacteria
DDCEFDLVQGSDFAIL

SEQ ID NO: 53175 - protein, 46 aa, unidentified
  source 1..46: note = methanogen bacteria
GSKLNALPESNDFTKIVNAYGMTEIMATANICNTAKKDNSIGKSMA

SEQ ID NO: 53176 - protein, 20 aa, unidentified
  source 1..20: note = methanogen bacteria
ESVLIDDNFVGLGGNSLSAM

SEQ ID NO: 53177 - protein, 14 aa, unidentified
  source 1..14: note = methanogen bacteria
NSYSSLDVNYNFNN

SEQ ID NO: 53178 - protein, 52 aa, unidentified
  source 1..52: note = methanogen bacteria
ERDEVNDLLDSVNGDGENAYTDYFKMDLSSFLKDNSITYNQFFASVFAYTLS

SEQ ID NO: 53179 - protein, 11 aa, unidentified
  source 1..11: note = methanogen bacteria
LIEDGRGHVNL

SEQ ID NO: 53180 - protein, 19 aa, unidentified
  source 1..19: note = methanogen bacteria
FIKYSSGLINSVMKYDLYS

SEQ ID NO: 53181 - protein, 81 aa, unidentified
  source 1..81: note = methanogen bacteria
NEINYIGSSDLTILDNYNQTEHDLFYNDIMDAFNDNLVKYPDNALVSYNNISYSYAEGAFIADKIRKLLIDCGVEPGDCVS

SEQ ID NO: 53182 - protein, 40 aa, unidentified
  source 1..40: note = methanogen bacteria
ILEDSDSHVVIASDETYDRVNSLCEGIILNISDLFNDDIG

SEQ ID NO: 53183 - protein, 43 aa, unidentified
  source 1..43: note = methanogen bacteria
AEYDLDDGDVYGMFSNIGFDVGNFAINVVMCAGACLNVIPEEI

SEQ ID NO: 53184 - protein, 18 aa, unidentified
  source 1..18: note = methanogen bacteria
LKLNDYFISHNVSHTYVT

SEQ ID NO: 53185 - protein, 55 aa, unidentified
  source 1..55: note = methanogen bacteria
MENVDKTSLDILLVGGEKLGNLIMPKDYHIIDAYGPTESFTFISLMDNNDKLDSS

SEQ ID NO: 53186 - protein, 20 aa, unidentified
  source 1..20: note = methanogen bacteria
YIDGFNISAGDILSLRTPYA

SEQ ID NO: 53187 - protein, 20 aa, unidentified
  source 1..20: note = methanogen bacteria
ISGEYSVDDIGTALGVMFDV

SEQ ID NO: 53188 - protein, 30 aa, unidentified
  source 1..30: note = methanogen bacteria
ISSDVFKRDLYTILGGRVVGVDDSFLKASA

SEQ ID NO: 53189 - protein, 16 aa, unidentified
  source 1..16: note = methanogen bacteria
DIDENDLLDNMGDLIA

SEQ ID NO: 53190 - protein, 32 aa, unidentified
  source 1..32: note = methanogen bacteria
ILNDMLCVKALGDISYVSSDDLVLLDEFNNTE

SEQ ID NO: 53191 - protein, 36 aa, unidentified
  source 1..36: note = methanogen bacteria
PDKDLVTYMNRSYSYGEGAFIADKIAKSLTDLGVES

SEQ ID NO: 53192 - protein, 16 aa, unidentified
  source 1..16: note = methanogen bacteria
VSDETYNRADEISDCV

SEQ ID NO: 53193 - protein, 40 aa, unidentified
  source 1..40: note = methanogen bacteria
SLDENDVYGLYSAIGFDMSTFVIDVVITAGACLAVIPDEI

SEQ ID NO: 53194 - protein, 73 aa, unidentified
  source 1..73: note = methanogen bacteria
IDHNVSHAAIPTPVAKLFMKSVDDTSLDVLHIGGEKLGDFVCSEAYRVIDSYGPTESFAYVCSIDNSDKVDPS

SEQ ID NO: 53195 - protein, 27 aa, unidentified
  source 1..27: note = methanogen bacteria
TYLDGFNISAGDVLGLRTPYAIAGSVR

SEQ ID NO: 53196 - protein, 11 aa, unidentified
  source 1..11: note = methanogen bacteria
SIEDIKSALNV

SEQ ID NO: 53197 - protein, 28 aa, unidentified
  source 1..28: note = methanogen bacteria
SNDVFKRDLFTVLDGGVVDLDDSFLRAS

SEQ ID NO: 53198 - protein, 38 aa, unidentified
  source 1..38: note = methanogen bacteria
VMDNDNSDVNIIKSVRENIDSDDGDLLDDMSDLIADLS

SEQ ID NO: 53199 - protein, 32 aa, unidentified
  source 1..32: note = methanogen bacteria
FEELSDISYVSCDDLALLDAYNDTAHVLDYVD

SEQ ID NO: 53200 - protein, 10 aa, unidentified
  source 1..10: note = methanogen bacteria
INEIASMLNG

SEQ ID NO: 53201 - protein, 17 aa, unidentified
  source 1..17: note = methanogen bacteria
NVRDTSIKHIQAIGEKL

SEQ ID NO: 53202 - protein, 36 aa, unidentified
  source 1..36: note = methanogen bacteria
VPPKEYVLSDVYGPTETVLSITSTDVVDKIDDSSVG

SEQ ID NO: 53203 - protein, 20 aa, unidentified
  source 1..20: note = methanogen bacteria
ISGRYKIDAIISALESMLDV

SEQ ID NO: 53204 - protein, 16 aa, unidentified
  source 1..16: note = methanogen bacteria
SVSDKEDVPYLVKGSK

SEQ ID NO: 53205 - protein, 10 aa, unidentified
  source 1..10: note = methanogen bacteria
IVENNEDYNL

SEQ ID NO: 53206 - protein, 29 aa, unidentified
  source 1..29: note = methanogen bacteria
DVYGMHCSYVFDMHVHALYSPIVSGGSLY

SEQ ID NO: 53207 - protein, 58 aa, unidentified
  source 1..58: note = methanogen bacteria
AESGMETTIKLLCFGGMKLGELNAPDSIGPFESYGPSENLAISTSIFANRRIDNSSIG

SEQ ID NO: 53208 - protein, 17 aa, unidentified
  source 1..17: note = methanogen bacteria
DDSVADDLSLISDVYSL

SEQ ID NO: 53209 - protein, 13 aa, unidentified
  source 1..13: note = methanogen bacteria
SSDVLDSESYGIT

SEQ ID NO: 53210 - protein, 20 aa, unidentified
  source 1..20: note = methanogen bacteria
GELDGKVDLGFVYASRDSFD

SEQ ID NO: 53211 - protein, 21 aa, unidentified
  source 1..21: note = methanogen bacteria
DIDEVSSLLNDVDGYAGSVSL

SEQ ID NO: 53212 - protein, 39 aa, unidentified
  source 1..39: note = methanogen bacteria
ITVSSFLNAVFAYAYSRFIGGDKVYYTFTVNGRHEDYSQ

SEQ ID NO: 53213 - protein, 27 aa, unidentified
  source 1..27: note = methanogen bacteria
CTNASVGDFLSGVSNLILESMGNSVYP

SEQ ID NO: 53214 - protein, 40 aa, unidentified
  source 1..40: note = methanogen bacteria
SEFGLSNSITFEYNYDLNDTTGVGDEIVFSDRADCVSDLL

SEQ ID NO: 53215 - protein, 17 aa, unidentified
  source 1..17: note = methanogen bacteria
FVNDLDDGFLVSLNHVD

SEQ ID NO: 53216 - protein, 36 aa, unidentified
  source 1..36: note = methanogen bacteria
SIDETSLDVLVTGGEKLGEFSSPESYSLIDSYGPTE

SEQ ID NO: 53217 - protein, 12 aa, unidentified
  source 1..12: note = methanogen bacteria
VDSMDNLDKLDY

SEQ ID NO: 53218 - protein, 42 aa, unidentified
  source 1..42: note = methanogen bacteria
TIINTQSWGGALKTSDDRRVNYAGWDSSHWDTNTTGGDAGAI

SEQ ID NO: 53219 - protein, 19 aa, unidentified
  source 1..19: note = methanogen bacteria
LYNVTFINCNGSGRGGAVF

SEQ ID NO: 53220 - protein, 93 aa, unidentified
  source 1..93: note = methanogen bacteria
CNFTNNAALGTDISTLFLNLTDLNQIKYGTSLPDKDSFGLNKVFVLIQYNGDQKVSYTLYSINPDNDEWTILEFTTETGPSPTDWVTDEYFGG

SEQ ID NO: 53221 - protein, 49 aa, unidentified
  source 1..49: note = methanogen bacteria
GTVDNCRFIDSNSARRGGGAYMTGSDNIVFKNSYFENCTSGTNGGGLDW

SEQ ID NO: 53222 - protein, 26 aa, unidentified
  source 1..26: note = methanogen bacteria
ANYGRVINCTFNNTRAARSAGAIYYD

SEQ ID NO: 53223 - protein, 44 aa, unidentified
  source 1..44: note = methanogen bacteria
TVINTKSYGGTLKHSTYGRNNVIYAGWDASHWDTNTTGGDAGAI

SEQ ID NO: 53224 - protein, 20 aa, unidentified
  source 1..20: note = methanogen bacteria
YVYNATFINTTSQGRGGAVF

SEQ ID NO: 53225 - protein, 46 aa, unidentified
  source 1..46: note = methanogen bacteria
SCKFIGDEALGIATNTWKDYTKNRDDNNPDTKLDYKLTGHGGAIAF

SEQ ID NO: 53226 - protein, 29 aa, unidentified
  source 1..29: note = methanogen bacteria
HDVVIKKSEFIYNYARRDGGAINIAENSF

SEQ ID NO: 53227 - protein, 27 aa, unidentified
  source 1..27: note = methanogen bacteria
ATIEDCIFTNNSCGDDGGAINWEGNLG

SEQ ID NO: 53228 - protein, 84 aa, unidentified
  source 1..84: note = methanogen bacteria
IYNSTFTITNAVGLNGHHSKGGAVNVIGDYSVITKSKFQMTSAAVDGGAIYATGNYINITDSSFNKCNVSHTYEAKYDHGGGAI

SEQ ID NO: 53229 - protein, 13 aa, unidentified
  source 1..13: note = methanogen bacteria
TFDQTNARIGGTL

SEQ ID NO: 53230 - protein, 10 aa, unidentified
  source 1..10: note = methanogen bacteria
FVSTSGGSVY

SEQ ID NO: 53231 - protein, 77 aa, unidentified
  source 1..77: note = methanogen bacteria
NNSEISMSNATLSGGAVYIEGQYATIENSNLSNAVAKGSSYTASNLGGIVYIHGNDASIIGSRFANGQAYHGGIVYL

SEQ ID NO: 53232 - protein, 36 aa, unidentified
  source 1..36: note = methanogen bacteria
CVIKNSVCSKEAGGIYFSNNNLKTDYVYLPKDIRMI

SEQ ID NO: 53233 - protein, 24 aa, unidentified
  source 1..24: note = methanogen bacteria
DSTFVKSYAGDGGAVYYYASLSNP

SEQ ID NO: 53234 - protein, 26 aa, unidentified
  source 1..26: note = methanogen bacteria
LKIENCTFIKNIAYYNGGAVLYLINS

SEQ ID NO: 53235 - protein, 54 aa, unidentified
  source 1..54: note = methanogen bacteria
VILPSKRTDVTMQGTTNKFISESLFELNEDYEFAITHYSDIETPVITVYLDRPR

SEQ ID NO: 53236 - protein, 10 aa, unidentified
  source 1..10: note = methanogen bacteria
VIVTEENFTA

SEQ ID NO: 53237 - protein, 23 aa, unidentified
  source 1..23: note = methanogen bacteria
KGFNNTFIDNVAETSGAALAWLN

SEQ ID NO: 53238 - protein, 44 aa, unidentified
  source 1..44: note = methanogen bacteria
LKIIDTESHSNGALSLVNCNDSKIYNVTFKGAITIRNGGSISWV

SEQ ID NO: 53239 - protein, 54 aa, unidentified
  source 1..54: note = methanogen bacteria
STNGIIDLCDFFDSAASYNGGAIFLYNIDNFNVSNSNFSNTHALYGNGGGIFVN

SEQ ID NO: 53240 - protein, 17 aa, unidentified
  source 1..17: note = methanogen bacteria
LSFESYMAAEDYAGGIF

SEQ ID NO: 53241 - protein, 62 aa, unidentified
  source 1..62: note = methanogen bacteria
STIANSKFNGPDAIWVNESAIAYLINNYITGSNPNKNITYLEKPYDARYNKYDYAVWNDGDL

SEQ ID NO: 53242 - protein, 10 aa, unidentified
  source 1..10: note = methanogen bacteria
WTNTTTWILN

SEQ ID NO: 53243 - protein, 30 aa, unidentified
  source 1..30: note = methanogen bacteria
SVNGDGENAYTDYFKMDLSSFLKDNSITYN

SEQ ID NO: 53244 - protein, 29 aa, unidentified
  source 1..29: note = methanogen bacteria
KYSSGLINSVMKYDLYSFRILVNDYDLNS

SEQ ID NO: 53245 - protein, 17 aa, unidentified
  source 1..17: note = methanogen bacteria
IGFDVGAIKSIFVPLYC

SEQ ID NO: 53246 - protein, 13 aa, unidentified
  source 1..13: note = methanogen bacteria
VDYSGNYLFIDSY

SEQ ID NO: 53247 - protein, 18 aa, unidentified
  source 1..18: note = methanogen bacteria
FDVTLAMYSSIVVGGATT

SEQ ID NO: 53248 - protein, 19 aa, unidentified
  source 1..19: note = methanogen bacteria
DEVSSLLNDVDGYAGSVSL

SEQ ID NO: 53249 - protein, 22 aa, unidentified
  source 1..22: note = methanogen bacteria
NASVGDFLSGVSNLILESMGNS

SEQ ID NO: 53250 - protein, 25 aa, unidentified
  source 1..25: note = methanogen bacteria
GQLIIHGNGAILECGDEYGNNKGKL

SEQ ID NO: 53251 - protein, 46 aa, unidentified
  source 1..46: note = methanogen bacteria
FDVYEPGGVIHNYNTAYFRGCAFLANSAKTAIGLYTAGGVLYAEPY

SEQ ID NO: 53252 - protein, 16 aa, unidentified
  source 1..16: note = methanogen bacteria
ELMNALCCINTLTPGM

SEQ ID NO: 53253 - protein, 25 aa, unidentified
  source 1..25: note = methanogen bacteria
VPITINGNGATIKRTGDKNDDDHFA

SEQ ID NO: 53254 - protein, 12 aa, unidentified
  source 1..12: note = methanogen bacteria
TVFAYLASICQA

SEQ ID NO: 53255 - protein, 22 aa, unidentified
  source 1..22: note = methanogen bacteria
SVFNDLIQYTDNVHYNNMTHLI

SEQ ID NO: 53256 - protein, 23 aa, unidentified
  source 1..23: note = methanogen bacteria
SFNNMLVTRNMIINNDWASTYYS

SEQ ID NO: 53257 - protein, 16 aa, unidentified
  source 1..16: note = methanogen bacteria
LSALIAYNTLIHNLNS

SEQ ID NO: 53258 - protein, 17 aa, unidentified
  source 1..17: note = methanogen bacteria
IITAYNLMWSYSITSNP

SEQ ID NO: 53259 - protein, 10 aa, unidentified
  source 1..10: note = methanogen bacteria
NVDILYLNNL

SEQ ID NO: 53260 - protein, 10 aa, unidentified
  source 1..10: note = methanogen bacteria
GSFSPDLKTK

SEQ ID NO: 53261 - protein, 11 aa, unidentified
  source 1..11: note = methanogen bacteria
PLGMDSAYALI

SEQ ID NO: 53262 - protein, 25 aa, unidentified
  source 1..25: note = methanogen bacteria
VYTDNGGLVKYSDLYSWVSNEILNY

SEQ ID NO: 53263 - protein, 32 aa, unidentified
  source 1..32: note = methanogen bacteria
PIPDIPEIIPNIPEVNPNIPNIPEVNPNIPNI

SEQ ID NO: 53264 - protein, 20 aa, unidentified
  source 1..20: note = methanogen bacteria
NLPDGDMIYLSILKMLYSEY

SEQ ID NO: 53265 - protein, 35 aa, unidentified
  source 1..35: note = methanogen bacteria
YIPKVNPNAPKVNPNAPKVNPNAPKVNPNAPKVNP

SEQ ID NO: 53266 - protein, 15 aa, unidentified
  source 1..15: note = methanogen bacteria
YHDLMLLKLYDYNLY

SEQ ID NO: 53267 - protein, 10 aa, unidentified
  source 1..10: note = methanogen bacteria
INHIYTQNSI

SEQ ID NO: 53268 - protein, 17 aa, unidentified
  source 1..17: note = methanogen bacteria
AYDKNGNMICSNDYYIN

SEQ ID NO: 53269 - protein, 46 aa, unidentified
  source 1..46: note = methanogen bacteria
HSYEPNDVVYTADGKAILAKDMEYMNFHGGFSVDMYGRPYYASLND

SEQ ID NO: 53270 - protein, 21 aa, unidentified
  source 1..21: note = methanogen bacteria
DDGFVHDCHGNLLFKQPLKGN

SEQ ID NO: 53271 - protein, 70 aa, unidentified
  source 1..70: note = methanogen bacteria
DKVSFFEKYIGNSFFHPLATLSFVDDINVKDTIAGVSHPVIFNCRTNLELAHALRTINNYGAKGSEIIIN

SEQ ID NO: 53272 - protein, 15 aa, unidentified
  source 1..15: note = methanogen bacteria
ECYIGLKKEFSLINK

SEQ ID NO: 53273 - protein, 88 aa, unidentified
  source 1..88: note = methanogen bacteria
DFDKIIDLYYDLWSNPSVVNPLDGVNPNDLSNDELGKLIIDNMARILLIGFVDTRLQHRFPTLWTNAEELHLSYIQVKVSILMKQNTL

SEQ ID NO: 53274 - protein, 33 aa, unidentified
  source 1..33: note = methanogen bacteria
YVKEGYDYLVVWGHISPIKVASIQNHFLKYDVD

SEQ ID NO: 53275 - protein, 67 aa, unidentified
  source 1..67: note = methanogen bacteria
LLKYPNMYKFMIPNIVSGVQSIISGMMRDNLINESVYNYWCDEILSRYVNVYTKDVLLFYTDIHNYL

SEQ ID NO: 53276 - protein, 18 aa, unidentified
  source 1..18: note = methanogen bacteria
MDNRVMLFEDKINSYPNA

SEQ ID NO: 53277 - protein, 15 aa, unidentified
  source 1..15: note = methanogen bacteria
QYGDIIDALDVYDSV

SEQ ID NO: 53278 - protein, 24 aa, unidentified
  source 1..24: note = methanogen bacteria
ESLKDAYNQIFDKLSEFRDNDGLL

SEQ ID NO: 53279 - protein, 26 aa, unidentified
  source 1..26: note = methanogen bacteria
EHNTYVAYKNGNFIVTKEYYINDQKP

SEQ ID NO: 53280 - protein, 78 aa, unidentified
  source 1..78: note = methanogen bacteria
NSNFTDSFTENNNGENFGGTIFITGHDVDLVGCNFNNSEARSSDGGTIYIIGHDVRVINSTIDNSSARKGGAIYIDGV

SEQ ID NO: 53281 - protein, 50 aa, unidentified
  source 1..50: note = methanogen bacteria
NTFAKTGNSYTANNLGGAVYIKGNNANIIGSEIENASAYQGGGLYLEGDY

SEQ ID NO: 53282 - protein, 62 aa, unidentified
  source 1..62: note = methanogen bacteria
NCNFTNNSAGDDGGAINWEGNLGFVKYSKFYNNTAVAFADPVTGASSSRGGTVFIKGDNVTI

SEQ ID NO: 53283 - protein, 21 aa, unidentified
  source 1..21: note = methanogen bacteria
GFNNTFRSNIALTNGSALAWI

SEQ ID NO: 53284 - protein, 45 aa, unidentified
  source 1..45: note = methanogen bacteria
STFRFNTAIKNGGAIDSNAANIGIYNITFEANYAGEYGAALCRES

SEQ ID NO: 53285 - protein, 86 aa, unidentified
  source 1..86: note = methanogen bacteria
ANGFGENNTFIDNKAGISGAALAWLGVNGIDIHNYTFINNTASKSGGGIYVRSDSANCKVSNCKFDNNYVTDIRDSHGGAIDWHGT

SEQ ID NO: 53286 - protein, 13 aa, unidentified
  source 1..13: note = methanogen bacteria
QYEAFDDYAGGIF

SEQ ID NO: 53287 - protein, 92 aa, unidentified
  source 1..92: note = methanogen bacteria
GGNSTIINSTFIGPDAVWVGEHGEAHLAENYITGAYPNKDVKYLEEPYNSRYNKYDYAIWNDGKLYLNKNTFDYIVFNNGTITSPTTLWILD

SEQ ID NO: 53288 - protein, 81 aa, unidentified
  source 1..81: note = methanogen bacteria
TNVTIDLCNITSSSATYRGGAIYVENINDASIINSNFDDISTPWGNGGTLYIDGNVTLYNDTFTNFKASTGYAGAIYFCNG

SEQ ID NO: 53289 - protein, 83 aa, unidentified
  source 1..83: note = methanogen bacteria
KWGSAIWGYINNMSINNCRFINCSAKFEGGAINLVGKVLTITNSTFINNTADENGGSLIVMGIKTVIKDCIFINSHSGMEGCF

SEQ ID NO: 53290 - protein, 21 aa, unidentified
  source 1..21: note = methanogen bacteria
FINNWAGVDGGAIYEHDIANY

SEQ ID NO: 53291 - protein, 13 aa, unidentified
  source 1..13: note = methanogen bacteria
TAGRNGGAVCSDS

SEQ ID NO: 53292 - protein, 19 aa, unidentified
  source 1..19: note = methanogen bacteria
SIDGIFDSNAAAFGGAVYS

SEQ ID NO: 53293 - protein, 99 aa, unidentified
  source 1..99: note = methanogen bacteria
NYTVIVTNLDTENVIGNSSSQDFQVFKINSTIKLNDISDIYYEDNVSISFEVENKTIVNIRIQNQDGEVVYDNNVTSDMIQVPNLNAGNYTVTVTNLET

SEQ ID NO: 53294 - protein, 17 aa, unidentified
  source 1..17: note = methanogen bacteria
IKITQKLPSDATGTITY

SEQ ID NO: 53295 - protein, 21 aa, unidentified
  source 1..21: note = methanogen bacteria
FANGTLINVINVNESFVLSNL

SEQ ID NO: 53296 - protein, 48 aa, unidentified
  source 1..48: note = methanogen bacteria
AGSYVIYGYYSGDSNHKSSRDSITITVNKAINNVIVSGENTAYPQNTT

SEQ ID NO: 53297 - protein, 73 aa, unidentified
  source 1..73: note = methanogen bacteria
TADIDGEYAVVIGDKKIIVNVINGIGTGTFVLDAGKYTATIEYTNKNYENNIKSIPFNVAKEDVTLSIEVLDK

SEQ ID NO: 53298 - protein, 30 aa, unidentified
  source 1..30: note = methanogen bacteria
SNIDGNIFASVDGEYNVIINGRTIPVTVKN

SEQ ID NO: 53299 - protein, 63 aa, unidentified
  source 1..63: note = methanogen bacteria
KITQKLPSDAKGTITYTYANETLIKVIKVDESFVLSNLDAGSYVIYGYYSGDTNHKSSRDSLT

SEQ ID NO: 53300 - protein, 10 aa, unidentified
  source 1..10: note = methanogen bacteria
TIADKKIIVK

SEQ ID NO: 53301 - protein, 12 aa, unidentified
  source 1..12: note = methanogen bacteria
INGNTIPVTVKN

SEQ ID NO: 53302 - protein, 13 aa, unidentified
  source 1..13: note = methanogen bacteria
NIKITQKLPSDAT

SEQ ID NO: 53303 - protein, 80 aa, unidentified
  source 1..80: note = methanogen bacteria
SVGSVEQINVTLPDNATGQVLLDINGQQYYANITEGLAQFNITGLKAGEYKFNVTYIGDYKYLDNNTNSALKVSKLQPAF

SEQ ID NO: 53304 - protein, 33 aa, unidentified
  source 1..33: note = methanogen bacteria
DELIKFETSDNITGLVKVEIDNKNYTAFINEGK

SEQ ID NO: 53305 - protein, 14 aa, unidentified
  source 1..14: note = methanogen bacteria
ITLYFEGNEKYLNS

SEQ ID NO: 53306 - protein, 42 aa, unidentified
  source 1..42: note = methanogen bacteria
ETVVVYVDAVGDVALRIGSYINTTALVDGKAVFVVKDLATGD

SEQ ID NO: 53307 - protein, 14 aa, unidentified
  source 1..14: note = methanogen bacteria
TEADFTVAKSAPDV

SEQ ID NO: 53308 - protein, 26 aa, unidentified
  source 1..26: note = methanogen bacteria
NGTVKGEELGIDNGKVELIVNDLAAG

SEQ ID NO: 53309 - protein, 10 aa, unidentified
  source 1..10: note = methanogen bacteria
IAEGKANLTL

SEQ ID NO: 53310 - protein, 23 aa, unidentified
  source 1..23: note = methanogen bacteria
LTGNWISATFEVNKFGSELTINV

SEQ ID NO: 53311 - protein, 43 aa, unidentified
  source 1..43: note = methanogen bacteria
IVRQKEIIKVNVTECATGDVIITVAGKDYIVEIKNGFATLELD

SEQ ID NO: 53312 - protein, 34 aa, unidentified
  source 1..34: note = methanogen bacteria
EAPIDATGKVNVTIFDGVQNKTYIVYVNDGIGIL

SEQ ID NO: 53313 - protein, 16 aa, unidentified
  source 1..16: note = methanogen bacteria
FEGNEKYLNASAKNNF

SEQ ID NO: 53314 - protein, 23 aa, unidentified
  source 1..23: note = methanogen bacteria
GSYINTTDLVGGKAVFVVKDLAA

SEQ ID NO: 53315 - protein, 33 aa, unidentified
  source 1..33: note = methanogen bacteria
VNGTVKGEELIIDNGKVELKVNDLAAGVYDVEV

SEQ ID NO: 53316 - protein, 23 aa, unidentified
  source 1..23: note = methanogen bacteria
VKQAPVTVDVEVGDINVIGKEII

SEQ ID NO: 53317 - protein, 15 aa, unidentified
  source 1..15: note = methanogen bacteria
NYTRPIAEGKANLTL

SEQ ID NO: 53318 - protein, 24 aa, unidentified
  source 1..24: note = methanogen bacteria
LTGNWTSATFNVDRLSSELTINVT

SEQ ID NO: 53319 - protein, 36 aa, unidentified
  source 1..36: note = methanogen bacteria
KTVNVTYNGDGRFLTSTNSTNFTVGKATKDIILIVE

SEQ ID NO: 53320 - protein, 19 aa, unidentified
  source 1..19: note = methanogen bacteria
GKHNVTLTYAGDDKYESAS

SEQ ID NO: 53321 - protein, 23 aa, unidentified
  source 1..23: note = methanogen bacteria
VRVDGKDYTVPVSGGKGILVVLS

SEQ ID NO: 53322 - protein, 80 aa, unidentified
  source 1..80: note = methanogen bacteria
PHSVEVVFNGSDKYEPDSDSASFNVAKAEFSPDDIKVIDKGNNTIVVVVPNNATGNVTVKIGNNTYNATVKDGIATITLD

SEQ ID NO: 53323 - protein, 83 aa, unidentified
  source 1..83: note = methanogen bacteria
KTATIRYSGDDNYEATETAVNFTVNKCGAPINAESEDIKVGDDATITVTFPKDATGRAILGLAGEEYYADIIDVKSKNFLYLI

SEQ ID NO: 53324 - protein, 12 aa, unidentified
  source 1..12: note = methanogen bacteria
MNERDIIINFEN

SEQ ID NO: 53325 - protein, 56 aa, unidentified
  source 1..56: note = methanogen bacteria
LYDLGETYNVKITDKNGNPIKKGYACFLIYNRIFYSNITEAGIATCTLPLDLNFTG

SEQ ID NO: 53326 - protein, 42 aa, unidentified
  source 1..42: note = methanogen bacteria
LAASEAISIGTKTLVSLDQTTIGSRMVNNLNKYNFTFKEGKH

SEQ ID NO: 53327 - protein, 18 aa, unidentified
  source 1..18: note = methanogen bacteria
RSLGGTVICHNCKFIDND

SEQ ID NO: 53328 - protein, 32 aa, unidentified
  source 1..32: note = methanogen bacteria
RNEGSLTLINCSIYSNDCNNEIIYNLGILATY

SEQ ID NO: 53329 - protein, 29 aa, unidentified
  source 1..29: note = methanogen bacteria
DCAIIGYDNNPTKVKFDKPWSNAKTGFIK

SEQ ID NO: 53330 - protein, 18 aa, unidentified
  source 1..18: note = methanogen bacteria
LEGRAYHDYSNLWNNALS

SEQ ID NO: 53331 - protein, 13 aa, unidentified
  source 1..13: note = methanogen bacteria
GLINYYSKTFTSL

SEQ ID NO: 53332 - protein, 44 aa, unidentified
  source 1..44: note = methanogen bacteria
PFISISSGLISDFLTQSNHLMMSIDSNENLRYLRDRIYSSTYSH

SEQ ID NO: 53333 - protein, 20 aa, unidentified
  source 1..20: note = methanogen bacteria
FWDLYNGAHNYGFHNLNNSL

SEQ ID NO: 53334 - protein, 71 aa, unidentified
  source 1..71: note = methanogen bacteria
TKAFRNSGLKKTDVNNKDKDTQTIIKEKIEQLYKDIGSKIAKNNPDYDKYTSMNLEYENNIGTDNIDYLWY

SEQ ID NO: 53335 - protein, 46 aa, unidentified
  source 1..46: note = methanogen bacteria
NILIDINNTIDINYDTYNNMVSFNYTDSIKKNIYNGIFKRESYISH

SEQ ID NO: 53336 - protein, 14 aa, unidentified
  source 1..14: note = methanogen bacteria
EFYEKILEDNLENK

SEQ ID NO: 53337 - protein, 13 aa, unidentified
  source 1..13: note = methanogen bacteria
NEEYYLLGQSYNE

SEQ ID NO: 53338 - protein, 22 aa, unidentified
  source 1..22: note = methanogen bacteria
LYESISEDLSEYRKSDINEDYI

SEQ ID NO: 53339 - protein, 58 aa, unidentified
  source 1..58: note = methanogen bacteria
FYQIRYLLDNYRLAYCALNDKDKLIVNKYLYEQCNELIKAFDGVELNGVAIESYVEKL

SEQ ID NO: 53340 - protein, 20 aa, unidentified
  source 1..20: note = methanogen bacteria
MTTKNNQNIFSNDISEMDSN

SEQ ID NO: 53341 - protein, 20 aa, unidentified
  source 1..20: note = methanogen bacteria
KILHYGNTNELKKLTEIYNQ

SEQ ID NO: 53342 - protein, 13 aa, unidentified
  source 1..13: note = methanogen bacteria
RTLNLDNELMPNE

SEQ ID NO: 53343 - protein, 15 aa, unidentified
  source 1..15: note = methanogen bacteria
NKYINTDITEPNVNF

SEQ ID NO: 53344 - protein, 58 aa, unidentified
  source 1..58: note = methanogen bacteria
GYITVKVSYAAKDYYDKIVAELPNKEEVLDRLGQLNPIKTLTFSEIDATGLIDRINLF

SEQ ID NO: 53345 - protein, 15 aa, unidentified
  source 1..15: note = methanogen bacteria
ACPVGHHILTTWFQK

SEQ ID NO: 53346 - protein, 16 aa, unidentified
  source 1..16: note = methanogen bacteria
SQWKFDKDYNGYVNIE

SEQ ID NO: 53347 - protein, 23 aa, unidentified
  source 1..23: note = methanogen bacteria
INEYYYEFCNETMNTMKIIMEKL

SEQ ID NO: 53348 - protein, 40 aa, unidentified
  source 1..40: note = methanogen bacteria
ILDKDNNIIFESVNYTIGRLIDNENFLNNIFNKKQYFMNI

SEQ ID NO: 53349 - protein, 52 aa, unidentified
  source 1..52: note = methanogen bacteria
YLKNIKAELYDDIMNGILDKTKNFNEWVKKQEKLEYSTLLKKYSDIFDQLGK

SEQ ID NO: 53350 - protein, 21 aa, unidentified
  source 1..21: note = methanogen bacteria
IVLDNEINVIINQLDENTIDN

SEQ ID NO: 53351 - protein, 40 aa, unidentified
  source 1..40: note = methanogen bacteria
DTQADLAEMKSKIYSQLAYFINFWDTYNNNKRNPNILNMK

SEQ ID NO: 53352 - protein, 22 aa, unidentified
  source 1..22: note = methanogen bacteria
FDDKIDLNALNINQMKDLFLNN

SEQ ID NO: 53353 - protein, 19 aa, unidentified
  source 1..19: note = methanogen bacteria
TIIKLYNDIHNKILEYKKE

SEQ ID NO: 53354 - protein, 67 aa, unidentified
  source 1..67: note = methanogen bacteria
GALNKLNEEYHEAYKNILDNVIKNMDEYIESHYNNFEEMRKEIIDYLEKIYNNEEVKPSINNDDMKA

SEQ ID NO: 53355 - protein, 14 aa, unidentified
  source 1..14: note = methanogen bacteria
DQYNEIKKIMKNKT

SEQ ID NO: 53356 - protein, 48 aa, unidentified
  source 1..48: note = methanogen bacteria
GSWDLIEEKYPNIAKEIKSYLFGKHENLLKYAIIEGDPENGYETIRQN

SEQ ID NO: 53357 - protein, 14 aa, unidentified
  source 1..14: note = methanogen bacteria
YKKEDKDIGISEKI

SEQ ID NO: 53358 - protein, 10 aa, unidentified
  source 1..10: note = methanogen bacteria
KSILEPNLEE

SEQ ID NO: 53359 - protein, 15 aa, unidentified
  source 1..15: note = methanogen bacteria
DTFCAYKEFSKLMEN

SEQ ID NO: 53360 - protein, 17 aa, unidentified
  source 1..17: note = methanogen bacteria
ETYPLIAKDVINKLYEN

SEQ ID NO: 53361 - protein, 10 aa, unidentified
  source 1..10: note = methanogen bacteria
IEISKKGDEE

SEQ ID NO: 53362 - protein, 17 aa, unidentified
  source 1..17: note = methanogen bacteria
IKNHFSSNEDNNAPNQQ

SEQ ID NO: 53363 - protein, 23 aa, unidentified
  source 1..23: note = methanogen bacteria
KEINPNDYIDYIELDNWLIEKEA

SEQ ID NO: 53364 - protein, 27 aa, unidentified
  source 1..27: note = methanogen bacteria
EKNKMYAYELNSKYSSNSNLKGSNYDV

SEQ ID NO: 53365 - protein, 11 aa, unidentified
  source 1..11: note = methanogen bacteria
LNQLIIDSYKL

SEQ ID NO: 53366 - protein, 17 aa, unidentified
  source 1..17: note = methanogen bacteria
FTNNTAGRNGGAVCSDS

SEQ ID NO: 53367 - protein, 23 aa, unidentified
  source 1..23: note = methanogen bacteria
TISIDGIFDSNAAAFGGAVYSFN

SEQ ID NO: 53368 - protein, 10 aa, unidentified
  source 1..10: note = methanogen bacteria
KVITVDESFI

SEQ ID NO: 53369 - protein, 72 aa, unidentified
  source 1..72: note = methanogen bacteria
SVLKITGRSPLVKVGSSEKTLSIYGIGTMTLRRDSIVSIEDPIDAVAQYRSLSKDNLPSTVAAPSNEIRFLT

SEQ ID NO: 53370 - protein, 41 aa, unidentified
  source 1..41: note = methanogen bacteria
NGTIIKVITVDESFILAGLNAGTYTIYANNCCKSIQRNNSL

SEQ ID NO: 53371 - protein, 15 aa, unidentified
  source 1..15: note = methanogen bacteria
NVTATSNLTNETNSS

SEQ ID NO: 53372 - protein, 81 aa, unidentified
  source 1..81: note = methanogen bacteria
DEIVYVGNTTSFRIVVTNTGDCNLSDVVVTDVDYSAGLEYADKYDNGSRLWNYLGEGKWALVGDLEVGQSADFLVYFNVLA

SEQ ID NO: 53373 - protein, 10 aa, unidentified
  source 1..10: note = methanogen bacteria
SNLTNETNSS

SEQ ID NO: 53374 - protein, 82 aa, unidentified
  source 1..82: note = methanogen bacteria
TVQKIAVEKVVYVGNTTSFVIVVTNTGDCNLSDVVVTDVDYSAGLVYAEKYDNSSREWTYDNGKWTLVGDLNVGQSAEFTVY

SEQ ID NO: 53375 - protein, 44 aa, unidentified
  source 1..44: note = methanogen bacteria
DCNLSDVVVTDVDFSQGLEFNGVWTNGSREWTYDGNNHWTLVGD

SEQ ID NO: 53376 - protein, 53 aa, unidentified
  source 1..53: note = methanogen bacteria
LSDVVVTDVDFSAGLEYANRYENGTRYWNYLGNGKWILDGDLEVGASADFLVY

SEQ ID NO: 53377 - protein, 50 aa, unidentified
  source 1..50: note = methanogen bacteria
SEVVVTDVDYSAGLEYADKYDNSSREWTYDNGKWTLVGDLEVGQSAEFTV

SEQ ID NO: 53378 - protein, 48 aa, unidentified
  source 1..48: note = methanogen bacteria
VVTDVDFSQGLEFNGVWTNGNREWTYDGNNHWTLVGDLNVGQSADFTV

SEQ ID NO: 53379 - protein, 50 aa, unidentified
  source 1..50: note = methanogen bacteria
VVTNTGDCSLSDVVVTDVDFSQGLEFNGVWTDGNREWTYDGNNHWTLVGD

SEQ ID NO: 53380 - protein, 11 aa, unidentified
  source 1..11: note = methanogen bacteria
GVGESADFTVY

SEQ ID NO: 53381 - protein, 59 aa, unidentified
  source 1..59: note = methanogen bacteria
DCNLSDVVVTDVDYSQGLEYANKYENSTRLWNYLGEGKWALVGDLEPGMSAEFTVYFNV

SEQ ID NO: 53382 - protein, 11 aa, unidentified
  source 1..11: note = methanogen bacteria
TSNLTNETNNT

SEQ ID NO: 53383 - protein, 62 aa, unidentified
  source 1..62: note = methanogen bacteria
DCNLSDVVVTDVDYSEGLVYANRYDNSSREWTYENGKWTLVGDLEVGQSAEFTVYFLVNATG

SEQ ID NO: 53384 - protein, 12 aa, unidentified
  source 1..12: note = methanogen bacteria
NVTATSNLTNET

SEQ ID NO: 53385 - protein, 79 aa, unidentified
  source 1..79: note = methanogen bacteria
KITIDQVVYVGNTTSFRIVVTNTGDCNLSDVVVTDVDYSEGLVYINKYDNGSREWTYDNGKWTLVGELGVGESADFTVY

SEQ ID NO: 53386 - protein, 12 aa, unidentified
  source 1..12: note = methanogen bacteria
ATSNLTNETNNT

SEQ ID NO: 53387 - protein, 84 aa, unidentified
  source 1..84: note = methanogen bacteria
ITIEDVVYVGNITSFKIVVTNTGDCNLSEVVVTDVDYSEGLEYANKYDNSSRLWTYDGNGHWTLVGDLGVGESAEFTVYFKVLA

SEQ ID NO: 53388 - protein, 60 aa, unidentified
  source 1..60: note = methanogen bacteria
VVTNTGDCSLSDVVVTDVDYSEGLVYANRYDNGSREWTYENGKWTLVGDLGVGESADFTV

SEQ ID NO: 53389 - protein, 29 aa, unidentified
  source 1..29: note = methanogen bacteria
SDDVDNNDLISLPLYSTLEIDDNVDMQND

SEQ ID NO: 53390 - protein, 42 aa, unidentified
  source 1..42: note = methanogen bacteria
SSNVSKLITINPVNTVLSLSLSNDTLLVGDSLTVTAVVNASQ

SEQ ID NO: 53391 - protein, 24 aa, unidentified
  source 1..24: note = methanogen bacteria
KVLFYINDILNDTVDVNIDGLARL

SEQ ID NO: 53392 - protein, 32 aa, unidentified
  source 1..32: note = methanogen bacteria
QFGDYVDYGNVTFLIDDKPYTVKLVDSVANKT

SEQ ID NO: 53393 - protein, 34 aa, unidentified
  source 1..34: note = methanogen bacteria
SVNTVLSLSLSNDTLLVGEPLTVTAVVNATQGKV

SEQ ID NO: 53394 - protein, 21 aa, unidentified
  source 1..21: note = methanogen bacteria
FYINNVLNDTVDVGRNGVAIL

SEQ ID NO: 53395 - protein, 55 aa, unidentified
  source 1..55: note = methanogen bacteria
EVSGWDCDWKVNGNVTLQVRVKDQFGDYIDYGDVVFLIDGKAYTVKLVDSVANKT

SEQ ID NO: 53396 - protein, 41 aa, unidentified
  source 1..41: note = methanogen bacteria
SSNITKLVDVSPLQTALSLSLDEDIIFVDDSLTATAVVNAT

SEQ ID NO: 53397 - protein, 17 aa, unidentified
  source 1..17: note = methanogen bacteria
GTVDVDSDGVAVLTLSN

SEQ ID NO: 53398 - protein, 33 aa, unidentified
  source 1..33: note = methanogen bacteria
LTAVFSDDEGIYLNSSDKTEFTVFSMTFIEVSG

SEQ ID NO: 53399 - protein, 43 aa, unidentified
  source 1..43: note = methanogen bacteria
YTLQVRVKDQFGDYIKDGEVFFYIEGDAYTVELVDSVANKTIS

SEQ ID NO: 53400 - protein, 10 aa, unidentified
  source 1..10: note = methanogen bacteria
QYDILVIFNT

SEQ ID NO: 53401 - protein, 41 aa, unidentified
  source 1..41: note = methanogen bacteria
SYVIKLIDIKPVNTVLSLSLSNGTLLVGEPLTATAVVNATQ

SEQ ID NO: 53402 - protein, 24 aa, unidentified
  source 1..24: note = methanogen bacteria
INGVLNDTVGVDSDGVAVLTLNNL

SEQ ID NO: 53403 - protein, 10 aa, unidentified
  source 1..10: note = methanogen bacteria
DYNITAVFTD

SEQ ID NO: 53404 - protein, 14 aa, unidentified
  source 1..14: note = methanogen bacteria
NNISEWILLLKHMF

SEQ ID NO: 53405 - protein, 70 aa, unidentified
  source 1..70: note = methanogen bacteria
TGRTPALIFFGDGQGPMAGNGFVREGYRFRGWSRTRDGNAEYMDCSDISALGKIHMVKLYAVWEEVRSDA

SEQ ID NO: 53406 - protein, 45 aa, unidentified
  source 1..45: note = methanogen bacteria
GVIVEELIDPHLEVLSNTTTSGKYEAGTWNIGNLANGSSATLTIV

SEQ ID NO: 53407 - protein, 13 aa, unidentified
  source 1..13: note = methanogen bacteria
MFTITVTNNGPCN

SEQ ID NO: 53408 - protein, 45 aa, unidentified
  source 1..45: note = methanogen bacteria
TGVYVGESLSPHLKMISNKTTIGEYDGSTWIIGNLNSGEVHNLTI

SEQ ID NO: 53409 - protein, 14 aa, unidentified
  source 1..14: note = methanogen bacteria
EITKRVWGATRFVN

SEQ ID NO: 53410 - protein, 15 aa, unidentified
  source 1..15: note = methanogen bacteria
IVFEIIVRNKGPCDA

SEQ ID NO: 53411 - protein, 48 aa, unidentified
  source 1..48: note = methanogen bacteria
NVNVTEVLSSHLKMIENDAYVGNYDVDKGVWYIGDLAKNDWCYLLIRA

SEQ ID NO: 53412 - protein, 32 aa, unidentified
  source 1..32: note = methanogen bacteria
VEVSEALPDQLKLINVTGDGYYDATNGIWYIG

SEQ ID NO: 53413 - protein, 32 aa, unidentified
  source 1..32: note = methanogen bacteria
YVVDLQITKEVNTDKTEIDITESIVFTIKVYN

SEQ ID NO: 53414 - protein, 49 aa, unidentified
  source 1..49: note = methanogen bacteria
GVYVAEPLSNILISQGDIKTPGTTYDGYTWYIGNLTSGSEAILMIIAKP

SEQ ID NO: 53415 - protein, 30 aa, unidentified
  source 1..30: note = methanogen bacteria
YVLEELDSHLELYSYVATDGTTYVGNTWNI

SEQ ID NO: 53416 - protein, 21 aa, unidentified
  source 1..21: note = methanogen bacteria
KLTKNETGNGYYSLADGIWYI

SEQ ID NO: 53417 - protein, 17 aa, unidentified
  source 1..17: note = methanogen bacteria
KNETNAGYYNVTEGIWH

SEQ ID NO: 53418 - protein, 33 aa, unidentified
  source 1..33: note = methanogen bacteria
TDVYVYETLSDKLALNRFVASVGRWDGNIWYIG

SEQ ID NO: 53419 - protein, 32 aa, unidentified
  source 1..32: note = methanogen bacteria
VYVLEELDSHLGDYTYVATSGTYDGHKWDIGF

SEQ ID NO: 53420 - protein, 31 aa, unidentified
  source 1..31: note = methanogen bacteria
NLIKNETTVGKYDGSVWDIGNLAKGQVAYLT

SEQ ID NO: 53421 - protein, 48 aa, unidentified
  source 1..48: note = methanogen bacteria
NVFVREILDPALRLVKWNATKYASFGYDNYTWVIGDMAVGENATLTIV

SEQ ID NO: 53422 - protein, 10 aa, unidentified
  source 1..10: note = methanogen bacteria
ETNNYDNIAP

SEQ ID NO: 53423 - protein, 46 aa, unidentified
  source 1..46: note = methanogen bacteria
NVTEVLSSHLKMIEYITWDSYYDVTEGVWHIGTLNKYDWRQLIIIT

SEQ ID NO: 53424 - protein, 46 aa, unidentified
  source 1..46: note = methanogen bacteria
TNVEVSEVLSPYLDYMGHNTKFGNYSNTKGIWSIGNLAAGARANLT

SEQ ID NO: 53425 - protein, 19 aa, unidentified
  source 1..19: note = methanogen bacteria
KDTNPYNNRDEVTIAALPV

SEQ ID NO: 53426 - protein, 45 aa, unidentified
  source 1..45: note = methanogen bacteria
VTVYNDGPCDATGIYVTESLSDKLRLVKNITSVGEWDGYTWNIPK

SEQ ID NO: 53427 - protein, 14 aa, unidentified
  source 1..14: note = methanogen bacteria
LEISKMVNVSSAVV

SEQ ID NO: 53428 - protein, 58 aa, unidentified
  source 1..58: note = methanogen bacteria
VVRNNGPCDATGVYVSEVLDSHLKLVSNSTDVGSYDGSSWVIGNLTNQSSAVLVIEAL

SEQ ID NO: 53429 - protein, 37 aa, unidentified
  source 1..37: note = methanogen bacteria
PCDASGVYVGETLNSNLELVSCNATVGDYNGFIWNIG

SEQ ID NO: 53430 - protein, 15 aa, unidentified
  source 1..15: note = methanogen bacteria
PCDATGVVVAEALNS

SEQ ID NO: 53431 - protein, 12 aa, unidentified
  source 1..12: note = methanogen bacteria
TVGGYDGYTWNV

SEQ ID NO: 53432 - protein, 44 aa, unidentified
  source 1..44: note = methanogen bacteria
DSAKAIVVDCNFTGNSAKYGGGIFIFADDGKLENCIFTNNFATT

SEQ ID NO: 53433 - protein, 20 aa, unidentified
  source 1..20: note = methanogen bacteria
SGVGSLVNCIFTNNSASRYG

SEQ ID NO: 53434 - protein, 27 aa, unidentified
  source 1..27: note = methanogen bacteria
ISAGSDQTEILTANATVNVLKPEFKVE

SEQ ID NO: 53435 - protein, 72 aa, unidentified
  source 1..72: note = methanogen bacteria
GEQVIYEIVIHNTGEADLTNIVVEEMPDASLIFDHVDSGRFKYSVVPGKYIWTLDKLAKGTYEGFKLYFNTT

SEQ ID NO: 53436 - protein, 21 aa, unidentified
  source 1..21: note = methanogen bacteria
RISVKSDEIPEEIISSNNTTV

SEQ ID NO: 53437 - protein, 12 aa, unidentified
  source 1..12: note = methanogen bacteria
FTVEKICLYPNV

SEQ ID NO: 53438 - protein, 96 aa, unidentified
  source 1..96: note = methanogen bacteria
GQITFEIVIHNTGNTNLENVKISEILPEGLVYDHFVDYLNLWTYNNDLTWSATRAIVPGQYVGFFVTFNTTKAGKSVNNVVVSADKANSTSANTSF

SEQ ID NO: 53439 - protein, 85 aa, unidentified
  source 1..85: note = methanogen bacteria
FTIEKILVEDNIVNGGQATFEIVIHNTGNAPLTNVTVKEYDFKGLIYNNFADYLGLWTYNGDLSWTMNSKLHPGEYAELLIIFNT

SEQ ID NO: 53440 - protein, 41 aa, unidentified
  source 1..41: note = methanogen bacteria
ASAESGETGILIANATLHVIDDKKPDPEHNSSNDYKMDVFK

SEQ ID NO: 53441 - protein, 96 aa, unidentified
  source 1..96: note = methanogen bacteria
GQITFEIVVHNTGNKNLENVKISEILPEGLIYDHFVDNIDLWTYNGDLTWSATRAIVPGEYAGFFITFNTTKAGKSVNNVNVSADNTNSTGANTSF

SEQ ID NO: 53442 - protein, 78 aa, unidentified
  source 1..78: note = methanogen bacteria
FTIEKILIKDNIANGAQATFEIVIHNTGNAPLTNMIVREYFSEGLSKLVPGEYVGFFVTFNTTKDGVFTNIVVANSTE

SEQ ID NO: 53443 - protein, 20 aa, unidentified
  source 1..20: note = methanogen bacteria
DNRFSNNVSVSVHNETVDIR

SEQ ID NO: 53444 - protein, 40 aa, unidentified
  source 1..40: note = methanogen bacteria
VIVGEQAIFEITVQNTGKINIDKLKLSEFDFEGLIYDHYM

SEQ ID NO: 53445 - protein, 29 aa, unidentified
  source 1..29: note = methanogen bacteria
LGHWINDGITWTLNTTLVPGEVTSLFIVF

SEQ ID NO: 53446 - protein, 44 aa, unidentified
  source 1..44: note = methanogen bacteria
NFTNVVLANNDVLDTNELLSANSLEDGIYVSADVEVVKPEYTIE

SEQ ID NO: 53447 - protein, 81 aa, unidentified
  source 1..81: note = methanogen bacteria
AYGISAGDNYALSGGSSASSNLRIVMEIMAGTYDPSSVASLNYPFGSVSAYGPAYDYIMAGIAQIVTAFGISDRTAAAGTI

SEQ ID NO: 53448 - protein, 11 aa, unidentified
  source 1..11: note = methanogen bacteria
MTTPFSSGSGF

SEQ ID NO: 53449 - protein, 36 aa, unidentified
  source 1..36: note = methanogen bacteria
LDGDLSHAIFHGNSVYSGTLMEDLADNATRTSISDM

SEQ ID NO: 53450 - protein, 13 aa, unidentified
  source 1..13: note = methanogen bacteria
HEGDDIPHIVSVS

SEQ ID NO: 53451 - protein, 60 aa, unidentified
  source 1..60: note = methanogen bacteria
TDVLTVIDSLPAGLEFVKTVNVIGAVKVSEDKNGQVIIWKLTNISTNNATIVVRVKVNSL

SEQ ID NO: 53452 - protein, 10 aa, unidentified
  source 1..10: note = methanogen bacteria
PKGSSRTVNC

SEQ ID NO: 53453 - protein, 12 aa, unidentified
  source 1..12: note = methanogen bacteria
KLNELIPDEFEY

SEQ ID NO: 53454 - protein, 22 aa, unidentified
  source 1..22: note = methanogen bacteria
YCDLPDGTVYNETTGVWSIPEL

SEQ ID NO: 53455 - protein, 34 aa, unidentified
  source 1..34: note = methanogen bacteria
VTLKDLFPSDYFEFINCTLPDGTVYNETTGVWTI

SEQ ID NO: 53456 - protein, 27 aa, unidentified
  source 1..27: note = methanogen bacteria
KAGITVDVYDLPYPVKSVNNNTPYYND

SEQ ID NO: 53457 - protein, 80 aa, unidentified
  source 1..80: note = methanogen bacteria
NVTDTLPDGLKFVGYVVKDANEAAKYVNVNNQTVTWFITNIAGKSKATITVWVKVVGLGDNIISDSTFITNNVTRDPAVK

SEQ ID NO: 53458 - protein, 27 aa, unidentified
  source 1..27: note = methanogen bacteria
IPDEFEFMYSSDDVAYNNETGVWTIPE

SEQ ID NO: 53459 - protein, 13 aa, unidentified
  source 1..13: note = methanogen bacteria
DGTVYNETTGVWS

SEQ ID NO: 53460 - protein, 28 aa, unidentified
  source 1..28: note = methanogen bacteria
PDGLEFIKTLSISNAKNISEVREGQVIT

SEQ ID NO: 53461 - protein, 38 aa, unidentified
  source 1..38: note = methanogen bacteria
NINLKDLFSPENFKLINCTDSNGKSYDVTDDVWIIPVI

SEQ ID NO: 53462 - protein, 11 aa, unidentified
  source 1..11: note = methanogen bacteria
GNNIIGTAEVN

SEQ ID NO: 53463 - protein, 22 aa, unidentified
  source 1..22: note = methanogen bacteria
EDEWNYDNNKAIKPVNIVPLPK

SEQ ID NO: 53464 - protein, 23 aa, unidentified
  source 1..23: note = methanogen bacteria
TVVNVGSDNYMDNLTLIDSLPDG

SEQ ID NO: 53465 - protein, 23 aa, unidentified
  source 1..23: note = methanogen bacteria
TVNVIGAVKVSENQNGQVITWML

SEQ ID NO: 53466 - protein, 19 aa, unidentified
  source 1..19: note = methanogen bacteria
YCDLPDGTSYNETTGVWTI

SEQ ID NO: 53467 - protein, 11 aa, unidentified
  source 1..11: note = methanogen bacteria
YTNNDDKKIVD

SEQ ID NO: 53468 - protein, 44 aa, unidentified
  source 1..44: note = methanogen bacteria
ISEFDVIDSLPVGLEFNGTLSIVGADLIKESVDGQVVKWAITNI

SEQ ID NO: 53469 - protein, 14 aa, unidentified
  source 1..14: note = methanogen bacteria
YNQYLSLWDKNDPD

SEQ ID NO: 53470 - protein, 30 aa, unidentified
  source 1..30: note = methanogen bacteria
KYFDDLIHSGVKEIVLDFDIVLTDGEESQY

SEQ ID NO: 53471 - protein, 54 aa, unidentified
  source 1..54: note = methanogen bacteria
LDADDLIIEGNGHTIDAQGKTRIFDCIGKNITIKNIILKNGFTEDDGGAIHNNG

SEQ ID NO: 53472 - protein, 15 aa, unidentified
  source 1..15: note = methanogen bacteria
IIDCEFIGNNVEKDV

SEQ ID NO: 53473 - protein, 24 aa, unidentified
  source 1..24: note = methanogen bacteria
YLDKKIHESKSKEIILNQDITFEN

SEQ ID NO: 53474 - protein, 45 aa, unidentified
  source 1..45: note = methanogen bacteria
DDLVIDGNGHTIDGANKSRIFIITGKNITLKNITFKNGVTHDNYH

SEQ ID NO: 53475 - protein, 13 aa, unidentified
  source 1..13: note = methanogen bacteria
WNDDVISSDDVTI

SEQ ID NO: 53476 - protein, 15 aa, unidentified
  source 1..15: note = methanogen bacteria
SILGNNTASKGGAIY

SEQ ID NO: 53477 - protein, 14 aa, unidentified
  source 1..14: note = methanogen bacteria
NTIISGFSPYMQLI

SEQ ID NO: 53478 - protein, 15 aa, unidentified
  source 1..15: note = methanogen bacteria
GVRHSVISNCIAGHD

SEQ ID NO: 53479 - protein, 70 aa, unidentified
  source 1..70: note = methanogen bacteria
IDNILVVDNKATNNGGGIALDAASSQGTTSISNSLFKANTADYGGAIYCSNMFTNILDSNFANDHANYGG

SEQ ID NO: 53480 - protein, 27 aa, unidentified
  source 1..27: note = methanogen bacteria
IILQQLLLDNKVGVIDSKIVGCIAGRD

SEQ ID NO: 53481 - protein, 30 aa, unidentified
  source 1..30: note = methanogen bacteria
ITCRVNKAEDKGGSIYISGSDLSFTDSMFI

SEQ ID NO: 53482 - protein, 13 aa, unidentified
  source 1..13: note = methanogen bacteria
ISGDNVLINNSLF

SEQ ID NO: 53483 - protein, 14 aa, unidentified
  source 1..14: note = methanogen bacteria
KIIGSDFDKCTAYE

SEQ ID NO: 53484 - protein, 17 aa, unidentified
  source 1..17: note = methanogen bacteria
SGNGAIVNGSTFAYCMA

SEQ ID NO: 53485 - protein, 12 aa, unidentified
  source 1..12: note = methanogen bacteria
DDATISGSDFEM

SEQ ID NO: 53486 - protein, 13 aa, unidentified
  source 1..13: note = methanogen bacteria
VDGINAKIDGASF

SEQ ID NO: 53487 - protein, 12 aa, unidentified
  source 1..12: note = methanogen bacteria
QIYLSNAELYIE

SEQ ID NO: 53488 - protein, 44 aa, unidentified
  source 1..44: note = methanogen bacteria
KTFKALIRNSKFLDLKANITAGAIGTKEGGELYIENCEFENITS

SEQ ID NO: 53489 - protein, 16 aa, unidentified
  source 1..16: note = methanogen bacteria
NVTIIDSKFRDTYSEF

SEQ ID NO: 53490 - protein, 17 aa, unidentified
  source 1..17: note = methanogen bacteria
FVLKNTEFINSHAKYNG

SEQ ID NO: 53491 - protein, 10 aa, unidentified
  source 1..10: note = methanogen bacteria
FFNNVAIAGS

SEQ ID NO: 53492 - protein, 13 aa, unidentified
  source 1..13: note = methanogen bacteria
TGSQFNLENITFA

SEQ ID NO: 53493 - protein, 59 aa, unidentified
  source 1..59: note = methanogen bacteria
TTATYSPAIYLVGSKIRIIDSKFINLKANLTAGAMSLREGGELYISNCEFINTTSSRNA

SEQ ID NO: 53494 - protein, 11 aa, unidentified
  source 1..11: note = methanogen bacteria
TEFINNRVTFN

SEQ ID NO: 53495 - protein, 16 aa, unidentified
  source 1..16: note = methanogen bacteria
KFFNNVASEGNAIYAY

SEQ ID NO: 53496 - protein, 25 aa, unidentified
  source 1..25: note = methanogen bacteria
TFKNNTNAVFSVFTKKYTIDTTTEL

SEQ ID NO: 53497 - protein, 75 aa, unidentified
  source 1..75: note = methanogen bacteria
ELALVNNTINVDTLPAKFDLRDWGWVSSVKDQGWMGACWTFGMSGSLESALLKATGIPFNVSMNNMKTVMKYSPY

SEQ ID NO: 53498 - protein, 34 aa, unidentified
  source 1..34: note = methanogen bacteria
LSWLGAIPYGVDTYDELGKITMPITTGKDIHVQD

SEQ ID NO: 53499 - protein, 21 aa, unidentified
  source 1..21: note = methanogen bacteria
NGTQIKLAILKYGSLDVSFFG

SEQ ID NO: 53500 - protein, 16 aa, unidentified
  source 1..16: note = methanogen bacteria
VSFDGKTWQDAYDLGY

SEQ ID NO: 53501 - protein, 10 aa, unidentified
  source 1..10: note = methanogen bacteria
YTVADDSKII

SEQ ID NO: 53502 - protein, 83 aa, unidentified
  source 1..83: note = methanogen bacteria
FVYGISAGDNYALSGGSSAASHRRIIAEILWGTYNPGNEAALNYPYGAESIYGPLFDYCCAAWAKLFSAFGMSYDASAGAALA

SEQ ID NO: 53503 - protein, 10 aa, unidentified
  source 1..10: note = methanogen bacteria
MTSPFSYGTE

SEQ ID NO: 53504 - protein, 11 aa, unidentified
  source 1..11: note = methanogen bacteria
YIPYGMWDSVF

SEQ ID NO: 53505 - protein, 35 aa, unidentified
  source 1..35: note = methanogen bacteria
APELSDAALSGNDVYVGSLMSSLAAETSRTSISAM

SEQ ID NO: 53506 - protein, 21 aa, unidentified
  source 1..21: note = methanogen bacteria
HDSGNASKSSTVIYAQNMDKG

SEQ ID NO: 53507 - protein, 38 aa, unidentified
  source 1..38: note = methanogen bacteria
NTFSKIKCNHSLNSNVNKYLEFRWSNNDTKMTSVLILD

SEQ ID NO: 53508 - protein, 20 aa, unidentified
  source 1..20: note = methanogen bacteria
RNYNPSGDYASFNVLKVNSS

SEQ ID NO: 53509 - protein, 98 aa, unidentified
  source 1..98: note = methanogen bacteria
NDTKTFYVLKVGSSIEFDYLNVTSYGMPFRLDYDVDNETLLNICIYDSEGNVVFDKNFNEISELPEDMSNLTEEAYLGYYFFIYRNLTVGNYSFEFTN

SEQ ID NO: 53510 - protein, 75 aa, unidentified
  source 1..75: note = methanogen bacteria
VTSIPFTVAKADVALSVEVLDKVYTADIKGNVFASVDGEYTVVIGNNIIPVTVLNGVGAFDVGVLNVGNYTVRVM

SEQ ID NO: 53511 - protein, 18 aa, unidentified
  source 1..18: note = methanogen bacteria
VNESTFKVTQFGTNFNIA

SEQ ID NO: 53512 - protein, 53 aa, unidentified
  source 1..53: note = methanogen bacteria
NSIIIAPSLPDGASGNVTYFFANGTVIGVLNVGESFVIPALDVGSHVVYANYS

SEQ ID NO: 53513 - protein, 37 aa, unidentified
  source 1..37: note = methanogen bacteria
VNASANLSYFGKRMKMNSKELQNFNNYLGDTQKQFRK

SEQ ID NO: 53514 - protein, 31 aa, unidentified
  source 1..31: note = methanogen bacteria
GASALEMGTKMKLSKNDMKDLTQMTAVMSSA

SEQ ID NO: 53515 - protein, 11 aa, unidentified
  source 1..11: note = methanogen bacteria
KEGRSQTDAIL

SEQ ID NO: 53516 - protein, 55 aa, unidentified
  source 1..55: note = methanogen bacteria
KKKSKDWLKLLDYPGKIPKYIAYHMALDEGCKDPQKCFFGVADTHINKIMNTAYP

SEQ ID NO: 53517 - protein, 17 aa, unidentified
  source 1..17: note = methanogen bacteria
PMNNKVEDFRDGKTKSI

SEQ ID NO: 53518 - protein, 38 aa, unidentified
  source 1..38: note = methanogen bacteria
ESILRNILTARGFANPGTYEYYANSKRSNQQVWDQVRC

SEQ ID NO: 53519 - protein, 27 aa, unidentified
  source 1..27: note = methanogen bacteria
EMIVEIGQMLGLGGSLVHGSWKGEGHM

SEQ ID NO: 53520 - protein, 16 aa, unidentified
  source 1..16: note = methanogen bacteria
AMVAGKLYDMTQFQKR

SEQ ID NO: 53521 - protein, 64 aa, unidentified
  source 1..64: note = methanogen bacteria
FRGTPGVVFGSNEKSHSSKRVSGPNGSNSKKGDVTIFNVNNDFSNARIYGIDDLDNHIKETTKE

SEQ ID NO: 53522 - protein, 40 aa, unidentified
  source 1..40: note = methanogen bacteria
ETINAKSEMNGYFQMLGYSTRQVDEFNKALDVTVKKFPRL

SEQ ID NO: 53523 - protein, 40 aa, unidentified
  source 1..40: note = methanogen bacteria
EMKKAMPVVSMITSEYLRAGRNVNEASLAVKDILQGEFQR

SEQ ID NO: 53524 - protein, 34 aa, unidentified
  source 1..34: note = methanogen bacteria
EIISEAKDTVDDLTSKKERLAEKLDTLEKGTYAY

SEQ ID NO: 53525 - protein, 28 aa, unidentified
  source 1..28: note = methanogen bacteria
ATSVQNALNELENTKLTDKEVTVLIRRK

SEQ ID NO: 53526 - protein, 44 aa, unidentified
  source 1..44: note = methanogen bacteria
GNEIADAKEELGNATSLTEYLDKWLWLQVKQIKNAFVDWDIHND

SEQ ID NO: 53527 - protein, 27 aa, unidentified
  source 1..27: note = methanogen bacteria
TQALAKDWGLEGVGTRFVDKIKEEGLG

SEQ ID NO: 53528 - protein, 34 aa, unidentified
  source 1..34: note = methanogen bacteria
TDALYDFFHMDTFASDLEQFKQGFQDMFKDLDFD

SEQ ID NO: 53529 - protein, 41 aa, unidentified
  source 1..41: note = methanogen bacteria
PAPASASDGTSDHPSFMEDVSAILGFDVQSWVDSFSSDPLG

SEQ ID NO: 53530 - protein, 10 aa, unidentified
  source 1..10: note = methanogen bacteria
SQWVYSSFVK

SEQ ID NO: 53531 - protein, 17 aa, unidentified
  source 1..17: note = methanogen bacteria
TDENVSASNKGKSIAHW

SEQ ID NO: 53532 - protein, 42 aa, unidentified
  source 1..42: note = methanogen bacteria
LALIALANTFGFSGSMAHGSWTDPSGKKTAHVWAVINGVKMD

SEQ ID NO: 53533 - protein, 18 aa, unidentified
  source 1..18: note = methanogen bacteria
TGMQQRGSWRPSASAGGN

SEQ ID NO: 53534 - protein, 40 aa, unidentified
  source 1..40: note = methanogen bacteria
DVDGDYIVNINGKETVVNVRDGVGNSPVDLNAGEYTTSTR

SEQ ID NO: 53535 - protein, 67 aa, unidentified
  source 1..67: note = methanogen bacteria
ISESVFKVYNAINNVIVNVEDVIYGEQSLIIIIADADGNYIVNINGKRVTVNVAGGKGNASVALDAN

SEQ ID NO: 53536 - protein, 31 aa, unidentified
  source 1..31: note = methanogen bacteria
VSYGTSAVIKISADVDGNYTVNINGTTINVN

SEQ ID NO: 53537 - protein, 52 aa, unidentified
  source 1..52: note = methanogen bacteria
FTLPRLDSGEYLIIANYTGDHNYLSAVSMLKIKINTPTGNVVVSVEDVSYGT

SEQ ID NO: 53538 - protein, 38 aa, unidentified
  source 1..38: note = methanogen bacteria
SVINIVAEVDGTYTVKINGKTVTVNVFNGVGSNSISLD

SEQ ID NO: 53539 - protein, 39 aa, unidentified
  source 1..39: note = methanogen bacteria
GSYSTETSFLGNYDLNVTEADFEVKKAEMSLNISVANVT

SEQ ID NO: 53540 - protein, 78 aa, unidentified
  source 1..78: note = methanogen bacteria
NVEYVVYASVDGMYNVTVGSASMTVNVINGICKFDVGVLDAGDYNATVRFSGSKNYNNNTNATNFTVEKADIFLLISV

SEQ ID NO: 53541 - protein, 67 aa, unidentified
  source 1..67: note = methanogen bacteria
YETIVNEVGFIVNKIDNDFRILVNDIVLGSSSIINLISTIDGIYEISINDTVGNITVKNGVGSYDAG

SEQ ID NO: 53542 - protein, 29 aa, unidentified
  source 1..29: note = methanogen bacteria
DSGVYDLTLKVSVTIMSIHGVEQPLSQYS

SEQ ID NO: 53543 - protein, 25 aa, unidentified
  source 1..25: note = methanogen bacteria
AVGYFRNKDDDEKITDLDKLFNEMR

SEQ ID NO: 53544 - protein, 12 aa, unidentified
  source 1..12: note = methanogen bacteria
GYFRDSDDKDKK

SEQ ID NO: 53545 - protein, 10 aa, unidentified
  source 1..10: note = methanogen bacteria
DLDKLFREKF

SEQ ID NO: 53546 - protein, 65 aa, unidentified
  source 1..65: note = methanogen bacteria
CENTTSFWVFAAYPIEAEDTYIIYNTNNYFKAKFYDENHNVLSNKYVVFNVGGKDYARLTDDYGW

SEQ ID NO: 53547 - protein, 14 aa, unidentified
  source 1..14: note = methanogen bacteria
IYNEKTTNKIVIFS

SEQ ID NO: 53548 - protein, 41 aa, unidentified
  source 1..41: note = methanogen bacteria
AHNSSADFYATFLDNKAKPLSNTPVIFKVNGSDYTVNTNMD

SEQ ID NO: 53549 - protein, 15 aa, unidentified
  source 1..15: note = methanogen bacteria
KTNIVTIVPSIQAKN

SEQ ID NO: 53550 - protein, 15 aa, unidentified
  source 1..15: note = methanogen bacteria
KATFIGANNDYLNNT

SEQ ID NO: 53551 - protein, 25 aa, unidentified
  source 1..25: note = methanogen bacteria
VTFEIGSRKYPAMTDEKGIAILNVP

SEQ ID NO: 53552 - protein, 58 aa, unidentified
  source 1..58: note = methanogen bacteria
STEHIPKNGVIVKTISKLDSGKYPINVKFEGNNNYNPLNATAVLKVNKLSTTLKLSYV

SEQ ID NO: 53553 - protein, 59 aa, unidentified
  source 1..59: note = methanogen bacteria
VTLTALVNPSSAGGNVVFTVNGKNYTSKISRGKATYKLSDLSAGSYTVNAVYKGDVNHK

SEQ ID NO: 53554 - protein, 41 aa, unidentified
  source 1..41: note = methanogen bacteria
SEKLVITLTNPDSKAVSNVNIKVSLAGKDYTLTTDKNGKAS

SEQ ID NO: 53555 - protein, 25 aa, unidentified
  source 1..25: note = methanogen bacteria
ASSSINFNVVERYVVITAPDVTKNY

SEQ ID NO: 53556 - protein, 29 aa, unidentified
  source 1..29: note = methanogen bacteria
TNQDFKAVGNAGIKVSLAGKDYTLTTDKN

SEQ ID NO: 53557 - protein, 20 aa, unidentified
  source 1..20: note = methanogen bacteria
ADIVFVGNSEYLPESTLVKV

SEQ ID NO: 53558 - protein, 21 aa, unidentified
  source 1..21: note = methanogen bacteria
VNGKDYTVKISGGKATLKLSD

SEQ ID NO: 53559 - protein, 70 aa, unidentified
  source 1..70: note = methanogen bacteria
VSNAEIRVSLDGTVYTLTTDKNGKASLDLGLDSGIYDAYIVFVGNEDYKSETKIVKITINRLITNIGLSY

SEQ ID NO: 53560 - protein, 46 aa, unidentified
  source 1..46: note = methanogen bacteria
NPSSTEGIVVFTVNDKDYEVKLSGGKAILKLSDLAPASYDVEATYV

SEQ ID NO: 53561 - protein, 74 aa, unidentified
  source 1..74: note = methanogen bacteria
ISNTIIFTVEEPKYKISAPDVTKYYHGPERFVVTVKDKKNNPIVNGKVTITLNGVPYNRTTDANGQASMAINLD

SEQ ID NO: 53562 - protein, 54 aa, unidentified
  source 1..54: note = methanogen bacteria
GSNCTAVLTAVGKYYAIAVFNDDNYDITINNDTFDVLKAINNIKVEVNSVNYPN

SEQ ID NO: 53563 - protein, 15 aa, unidentified
  source 1..15: note = methanogen bacteria
INNIKIEVNDTIYPN

SEQ ID NO: 53564 - protein, 51 aa, unidentified
  source 1..51: note = methanogen bacteria
TVKLTADIAGVYTVKLNGTELHINVDENKGTGFKSLNLTPGKYNASVIYTD

SEQ ID NO: 53565 - protein, 24 aa, unidentified
  source 1..24: note = methanogen bacteria
GYFRDKDESKKSNNNLDELFNQEL

SEQ ID NO: 53566 - protein, 22 aa, unidentified
  source 1..22: note = methanogen bacteria
GYFRNEDDKDKVQDLDKLFNER

SEQ ID NO: 53567 - protein, 24 aa, unidentified
  source 1..24: note = methanogen bacteria
VGYFRNEDDKDKVQDLDKLFNERG

SEQ ID NO: 53568 - protein, 23 aa, unidentified
  source 1..23: note = methanogen bacteria
VGYFRNNDNKDKVQDLDKLFNER

SEQ ID NO: 53569 - protein, 11 aa, unidentified
  source 1..11: note = methanogen bacteria
GYFRNKRNDEF

SEQ ID NO: 53570 - protein, 22 aa, unidentified
  source 1..22: note = methanogen bacteria
YFRDEDDKDKVQDLDKLFDEKV

SEQ ID NO: 53571 - protein, 24 aa, unidentified
  source 1..24: note = methanogen bacteria
EIFAKGSQISITGDAVAYIENTTF

SEQ ID NO: 53572 - protein, 91 aa, unidentified
  source 1..91: note = methanogen bacteria
ITSSYAPAVYVKSAKASIVNSKFLDLKANITAGAIATKEGGELYIENCEFENVTSSKNGGAIYADVAGENDVTGNVTIIDTQFKDTYSEFG

SEQ ID NO: 53573 - protein, 30 aa, unidentified
  source 1..30: note = methanogen bacteria
FVLNNTEFINSHAKYNGGAIYLSNTNTEIN

SEQ ID NO: 53574 - protein, 19 aa, unidentified
  source 1..19: note = methanogen bacteria
KFFNNLASAGSAVYAYDNS

SEQ ID NO: 53575 - protein, 30 aa, unidentified
  source 1..30: note = methanogen bacteria
SIKNSTFENNANPIYTVFDKESVLENNDYI

SEQ ID NO: 53576 - protein, 21 aa, unidentified
  source 1..21: note = methanogen bacteria
DKGGQVMGSTDARFYLENVTF

SEQ ID NO: 53577 - protein, 71 aa, unidentified
  source 1..71: note = methanogen bacteria
TTATYAPAIYLVGSKAKIIDSKFINLKANMTAGAMSLREGGELYIKNCEFINTTSSRNAGAIYVDITGYQG

SEQ ID NO: 53578 - protein, 11 aa, unidentified
  source 1..11: note = methanogen bacteria
DGNVTIIDSKF

SEQ ID NO: 53579 - protein, 16 aa, unidentified
  source 1..16: note = methanogen bacteria
WLSNCEFINNHATFNG

SEQ ID NO: 53580 - protein, 35 aa, unidentified
  source 1..35: note = methanogen bacteria
KFFNNVASEGNAIYAYDSSLNIKGSTFKNNTNAIY

SEQ ID NO: 53581 - protein, 63 aa, unidentified
  source 1..63: note = methanogen bacteria
NNTINVDILPAKFDLRDWEWVSSVKNQGWMGACWTFGMSGALESALLKATGISFNISMNNMKT

SEQ ID NO: 53582 - protein, 29 aa, unidentified
  source 1..29: note = methanogen bacteria
LLSWLGAIPYDTDTYDELGKITMPIITDQ

SEQ ID NO: 53583 - protein, 11 aa, unidentified
  source 1..11: note = methanogen bacteria
DDDLIAAVGTY

SEQ ID NO: 53584 - protein, 23 aa, unidentified
  source 1..23: note = methanogen bacteria
SYTVEIYVNDELKLTQEGVSPYV

SEQ ID NO: 53585 - protein, 26 aa, unidentified
  source 1..26: note = methanogen bacteria
DSYIPIKKGDVFKAAITSNWVPYLLL

SEQ ID NO: 53586 - protein, 14 aa, unidentified
  source 1..14: note = methanogen bacteria
SFDGKTWKDAYDLG

SEQ ID NO: 53587 - protein, 36 aa, unidentified
  source 1..36: note = methanogen bacteria
LKVYTVADDSKIINNKDITVDYGSGSYFSVKVVTAD

SEQ ID NO: 53588 - protein, 12 aa, unidentified
  source 1..12: note = methanogen bacteria
VGYFRNKDDIDK

SEQ ID NO: 53589 - protein, 23 aa, unidentified
  source 1..23: note = methanogen bacteria
GYFRNEDDKDKVQDLDKLFNEKL

SEQ ID NO: 53590 - protein, 24 aa, unidentified
  source 1..24: note = methanogen bacteria
VGYFRNEDDKDKVQDLDKLFNERQ

SEQ ID NO: 53591 - protein, 23 aa, unidentified
  source 1..23: note = methanogen bacteria
GYFRNEDDKDKVQDLDKLFNEKL

SEQ ID NO: 53592 - protein, 24 aa, unidentified
  source 1..24: note = methanogen bacteria
VGYFRNEDDKDKVQDLDKLFENKW

SEQ ID NO: 53593 - protein, 23 aa, unidentified
  source 1..23: note = methanogen bacteria
GYFRNEDDKDKVQDLDKLFENKR

SEQ ID NO: 53594 - protein, 13 aa, unidentified
  source 1..13: note = methanogen bacteria
TFDSNGVDVIEGY

SEQ ID NO: 53595 - protein, 16 aa, unidentified
  source 1..16: note = methanogen bacteria
RFFNNFAGEGNAIYAY

SEQ ID NO: 53596 - protein, 32 aa, unidentified
  source 1..32: note = methanogen bacteria
SFNIKGSTFKNNKNAVFSVFTKKYTIDKNTEL

SEQ ID NO: 53597 - protein, 66 aa, unidentified
  source 1..66: note = methanogen bacteria
TLVNNTINVDVIPAKFDLRDWGWVSSVKNQGWMGACWTFGMTGSLESVLLKATGIPFNVSMNNMKT

SEQ ID NO: 53598 - protein, 32 aa, unidentified
  source 1..32: note = methanogen bacteria
LLSWLGTVPYDVETYDELGKITMPIVTDNSIH

SEQ ID NO: 53599 - protein, 19 aa, unidentified
  source 1..19: note = methanogen bacteria
VSFDGKTWQDAYDLGYIAC

SEQ ID NO: 53600 - protein, 47 aa, unidentified
  source 1..47: note = methanogen bacteria
CGFNCQYNVPIFHESYQYGLYRDKYMSLDEYKKQYFDSSRKYTVGLL

SEQ ID NO: 53601 - protein, 37 aa, unidentified
  source 1..37: note = methanogen bacteria
LNQTYYEKKFSHFNDKYKLIHAEDPDLKVSTGERISF

SEQ ID NO: 53602 - protein, 10 aa, unidentified
  source 1..10: note = methanogen bacteria
GAYGGGFVDY

SEQ ID NO: 53603 - protein, 96 aa, unidentified
  source 1..96: note = methanogen bacteria
IDEVESSQSDEGILEAGNNVINVVNVKDSYNETSKTWDEDGFNLAGATIKVYDSSNKLISTHKTDSNGNAIIKNLGSSVYYLEVSFSTYEPIVTEK

SEQ ID NO: 53604 - protein, 95 aa, unidentified
  source 1..95: note = methanogen bacteria
DILLLVDYNSHNEKVDVLMNMSRRVAYISTTDFDKSRAWLVEYAKYMHIDMFSESAYSVLTAKYLKELLARSPANKDYNVAYTFSVFSKQILNNT

SEQ ID NO: 53605 - protein, 74 aa, unidentified
  source 1..74: note = methanogen bacteria
IHIVGASAANNTFDTIENTYIGSYFQARDIAESNILQSNMKNYLSYVKYLIDPEKYSNPTDDENNAPLMSPECG

SEQ ID NO: 53606 - protein, 25 aa, unidentified
  source 1..25: note = methanogen bacteria
AGSDPSQSGNAKSASDSSSSQDASS

SEQ ID NO: 53607 - protein, 26 aa, unidentified
  source 1..26: note = methanogen bacteria
STGGAKSYEISEKSAAKSSSSTESSM

SEQ ID NO: 53608 - protein, 20 aa, unidentified
  source 1..20: note = methanogen bacteria
KSYNNTATFYGGAFYQMYDE

SEQ ID NO: 53609 - protein, 81 aa, unidentified
  source 1..81: note = methanogen bacteria
FFNITVTYNENSHYSQSSITQLFNKPDEILSVSIDDIYYGQNLISNITLKYSTGSLINGTVELLIGNHSYSAQSNSLFIID

SEQ ID NO: 53610 - protein, 77 aa, unidentified
  source 1..77: note = methanogen bacteria
DFIITAQYGESQVSNNIKVLPILITNNLVMKYKDGSKFQATALDGQGNPYPLTNVQFNINGVLYTRLTNENGVASLN

SEQ ID NO: 53611 - protein, 18 aa, unidentified
  source 1..18: note = methanogen bacteria
ITSFYNGYSAGNTVVISW

SEQ ID NO: 53612 - protein, 43 aa, unidentified
  source 1..43: note = methanogen bacteria
MLPSGFVFVSASSGNVTAGQKVSWIIDRLNVGDVREFWIVARS

SEQ ID NO: 53613 - protein, 30 aa, unidentified
  source 1..30: note = methanogen bacteria
WTNVVEVNSTENVTVVDSNVTIDVRPLTVV

SEQ ID NO: 53614 - protein, 58 aa, unidentified
  source 1..58: note = methanogen bacteria
NATNITVKDVLPGEFAFVNATAGYTRSGQLVSWTIDKLDVNGVETFWIIAKTIATNAT

SEQ ID NO: 53615 - protein, 15 aa, unidentified
  source 1..15: note = methanogen bacteria
TGKFDVNVVEVNATL

SEQ ID NO: 53616 - protein, 45 aa, unidentified
  source 1..45: note = methanogen bacteria
TVCDSLPDGFAFVNATGVYTRNGQEIKWYFDTLKPGQIVELWITA

SEQ ID NO: 53617 - protein, 46 aa, unidentified
  source 1..46: note = methanogen bacteria
TIKDVLPDGFTFVGASDNYKQSGQVVEWYFDKLTKGEYKLWIVAKS

SEQ ID NO: 53618 - protein, 32 aa, unidentified
  source 1..32: note = methanogen bacteria
AFVNATGNPTRNGQEIKWHFDKLTKGYFELEI

SEQ ID NO: 53619 - protein, 28 aa, unidentified
  source 1..28: note = methanogen bacteria
TVVKEVSAKTIDVLGLVNFTITITNNGK

SEQ ID NO: 53620 - protein, 62 aa, unidentified
  source 1..62: note = methanogen bacteria
ATNVSIADIMDLSVFNITNHNGTYVQKGNELVWNIGSLNVGETYKVWIEAKALTHGTFTNVV

SEQ ID NO: 53621 - protein, 38 aa, unidentified
  source 1..38: note = methanogen bacteria
SDNVSVKVIPVVNLTVVKTVDVKKIALNGLITFTINVT

SEQ ID NO: 53622 - protein, 61 aa, unidentified
  source 1..61: note = methanogen bacteria
ATNVDIDDVLPNELEFIDATEGYIYGHQLTVSLIEPGKSFVFNITARGLTAGNWTNIVNVD

SEQ ID NO: 53623 - protein, 12 aa, unidentified
  source 1..12: note = methanogen bacteria
TVVKTADEIIVA

SEQ ID NO: 53624 - protein, 82 aa, unidentified
  source 1..82: note = methanogen bacteria
NYTISITNPSDFNATNIWVFDYLMDGFEFVNATEGYYLTQGIVSWNIHNITKGETLELWIVVKTTKVGNLTNNVNVICDESD

SEQ ID NO: 53625 - protein, 19 aa, unidentified
  source 1..19: note = methanogen bacteria
ANVNVTEINGEVVFTVNVT

SEQ ID NO: 53626 - protein, 59 aa, unidentified
  source 1..59: note = methanogen bacteria
LVNVTDIIPVGFEFVESSDKGYNSTTGRLTIPFIKAGESYVFTITLKAVINGTLTNVVN

SEQ ID NO: 53627 - protein, 71 aa, unidentified
  source 1..71: note = methanogen bacteria
VDLNDTTIGDVVTFTITVINNGPSKATNIKVVDSLDLNGFRHLTGDLNTTIDSLASGENCTIVIQAATTAN

SEQ ID NO: 53628 - protein, 24 aa, unidentified
  source 1..24: note = methanogen bacteria
NRVTVKCDQNDTIKSANASVYVYS

SEQ ID NO: 53629 - protein, 69 aa, unidentified
  source 1..69: note = methanogen bacteria
DVINFTITVKNHGMSNATNVHIIDELNSAFEFVNASAGYKLSGKTVTWNISRIANETTYSVWIVVRVLT

SEQ ID NO: 53630 - protein, 80 aa, unidentified
  source 1..80: note = methanogen bacteria
LTVVKVVEGDDDATIGDVITYTIIVTNNGPSNATNIKVIDIPDKGLKILGDKYETVIGFLESGNSTNITIQVRTTAKGTY

SEQ ID NO: 53631 - protein, 49 aa, unidentified
  source 1..49: note = methanogen bacteria
TNVHIIDELNSAFEFVDASAGYTRNGQTVTWNIPKLANETSYSVWIVVR

SEQ ID NO: 53632 - protein, 41 aa, unidentified
  source 1..41: note = methanogen bacteria
TVKNTTSTVNVAPVVNLTVVKSADVSVVDVNGEVVFTVNVT

SEQ ID NO: 53633 - protein, 65 aa, unidentified
  source 1..65: note = methanogen bacteria
QYTVVIGNYSVLVTVLNGVGAFDVGVLDVGSYTVRVIFAGNDNYNGNVNESTFEVTQSGTKFNIV

SEQ ID NO: 53634 - protein, 17 aa, unidentified
  source 1..17: note = methanogen bacteria
DVEYINVNYVNNVTSIP

SEQ ID NO: 53635 - protein, 47 aa, unidentified
  source 1..47: note = methanogen bacteria
TVAKANVALSVEVLDVVYSADVDGQYSVVIGDNIIPVTVLNGVGAFN

SEQ ID NO: 53636 - protein, 53 aa, unidentified
  source 1..53: note = methanogen bacteria
SVIKVLNVGESFTMPVLDAGSYVVYANYSGDSNYAPARDSLTITVNRAVNNVL

SEQ ID NO: 53637 - protein, 13 aa, unidentified
  source 1..13: note = methanogen bacteria
TITVVADVDGEYY

SEQ ID NO: 53638 - protein, 68 aa, unidentified
  source 1..68: note = methanogen bacteria
VVNVSNGMGVSVVALDAGSYFADVGYVNVNYVNNVISIPFSVVKAGVALSVEVLDVVYSADVEGNVFA

SEQ ID NO: 53639 - protein, 19 aa, unidentified
  source 1..19: note = methanogen bacteria
LDVVYSADVGGNVFASVDG

SEQ ID NO: 53640 - protein, 10 aa, unidentified
  source 1..10: note = methanogen bacteria
LNVDESFVLS

SEQ ID NO: 53641 - protein, 30 aa, unidentified
  source 1..30: note = methanogen bacteria
SGDSNYAPARDSLTITVNKAINNVLVFGQD

SEQ ID NO: 53642 - protein, 38 aa, unidentified
  source 1..38: note = methanogen bacteria
LITVVADVDGEYYVDVGGKIIVVNVSNGMGVNTIALDA

SEQ ID NO: 53643 - protein, 70 aa, unidentified
  source 1..70: note = methanogen bacteria
GSYEEAIPVENASITLIKENDVTKIYTTTTDKKGTYSLKDISSGNYELSINYKTYSTYKKNITINSALTV

SEQ ID NO: 53644 - protein, 21 aa, unidentified
  source 1..21: note = methanogen bacteria
QTVPIVDGKAVVDISDLEPGN

SEQ ID NO: 53645 - protein, 35 aa, unidentified
  source 1..35: note = methanogen bacteria
TVSVSCNENDTIITTNATVDVLPVTANITKEANVT

SEQ ID NO: 53646 - protein, 67 aa, unidentified
  source 1..67: note = methanogen bacteria
VNFTISVNYTSDVNATNVTIKDVLPDGFTFVGASGNYKQTGQVVEWYFDKLTNGEYKLWIVAKSNAV

SEQ ID NO: 53647 - protein, 14 aa, unidentified
  source 1..14: note = methanogen bacteria
STILGDNATVDVIP

SEQ ID NO: 53648 - protein, 26 aa, unidentified
  source 1..26: note = methanogen bacteria
ASITKKANITLIGNNTLVKFTIGVNY

SEQ ID NO: 53649 - protein, 50 aa, unidentified
  source 1..50: note = methanogen bacteria
ATNVTICDVLPDGFAFVNATGNPTRNGQEIKWHFDTLTKGYFELEIVARS

SEQ ID NO: 53650 - protein, 37 aa, unidentified
  source 1..37: note = methanogen bacteria
INAQAKIDAFGNRLQMSGSKLDSFKSDLSSLQSEFRK

SEQ ID NO: 53651 - protein, 43 aa, unidentified
  source 1..43: note = methanogen bacteria
SDDMTELSRTVAIASSAFVSEGRTQEDAILAVSDALDGQMKRM

SEQ ID NO: 53652 - protein, 23 aa, unidentified
  source 1..23: note = methanogen bacteria
TDGVMRLWNAFINHPDVQGALSA

SEQ ID NO: 53653 - protein, 27 aa, unidentified
  source 1..27: note = methanogen bacteria
GCSPGIVPALEKVLEVFGVVWNAIVSL

SEQ ID NO: 53654 - protein, 14 aa, unidentified
  source 1..14: note = methanogen bacteria
FKKMAEDVFSQCHY

SEQ ID NO: 53655 - protein, 18 aa, unidentified
  source 1..18: note = methanogen bacteria
YDSNKYGNWMTAFQHGDM

SEQ ID NO: 53656 - protein, 17 aa, unidentified
  source 1..17: note = methanogen bacteria
HACGLPAYKVHGHWNKF

SEQ ID NO: 53657 - protein, 74 aa, unidentified
  source 1..74: note = methanogen bacteria
TVINSTFINNNVNGNGGAIAFVNTKDGIIINSTFIDNTAVGSGGAVYINRGGYIIDSEFYNNQASNGGAVRLNS

SEQ ID NO: 53658 - protein, 77 aa, unidentified
  source 1..77: note = methanogen bacteria
TINNSIFINNTATNEGGAIYSYRTANITDSTFTSNNASSQGGAITCSIETSSNPTHINNSTFNGNTASAYPAISGRY

SEQ ID NO: 53659 - protein, 15 aa, unidentified
  source 1..15: note = methanogen bacteria
YISNTATMYGGANFF

SEQ ID NO: 53660 - protein, 15 aa, unidentified
  source 1..15: note = methanogen bacteria
TYTNNTARNGGANYF

SEQ ID NO: 53661 - protein, 20 aa, unidentified
  source 1..20: note = methanogen bacteria
GTYNSNNAKYGGANYFYNKV

SEQ ID NO: 53662 - protein, 11 aa, unidentified
  source 1..11: note = methanogen bacteria
NAAINGGANYF

SEQ ID NO: 53663 - protein, 36 aa, unidentified
  source 1..36: note = methanogen bacteria
FINNTATKGGAIYVETESTNNNFSSLFYDNKAIQSG

SEQ ID NO: 53664 - protein, 36 aa, unidentified
  source 1..36: note = methanogen bacteria
NFIGNTAGYGGGIFFSRKTNSNRFNGDFIDNTALSC

SEQ ID NO: 53665 - protein, 16 aa, unidentified
  source 1..16: note = methanogen bacteria
ALGQLNETVGNGGAIT

SEQ ID NO: 53666 - protein, 13 aa, unidentified
  source 1..13: note = methanogen bacteria
TDNNASLYGGAVN

SEQ ID NO: 53667 - protein, 47 aa, unidentified
  source 1..47: note = methanogen bacteria
FETFDNVVFNGEFIANSAVKGGAIATVDGIIRDVSFKDNHAEDGGAV

SEQ ID NO: 53668 - protein, 30 aa, unidentified
  source 1..30: note = methanogen bacteria
NCNFTANHANNEGGAVYFADNGEVANCNFT

SEQ ID NO: 53669 - protein, 22 aa, unidentified
  source 1..22: note = methanogen bacteria
YSGNVTDSIFTANTAGFGGAVY

SEQ ID NO: 53670 - protein, 48 aa, unidentified
  source 1..48: note = methanogen bacteria
DYDGTVENCNFTANTAEYGGAVYFDNDSANIMNCNFINNNASSYGGAV

SEQ ID NO: 53671 - protein, 43 aa, unidentified
  source 1..43: note = methanogen bacteria
FTGNTADSSSGGAVVMDSGNVINSIFTANKAARTGGAIYVGAK

SEQ ID NO: 53672 - protein, 13 aa, unidentified
  source 1..13: note = methanogen bacteria
SGQFYNNQAGQSG

SEQ ID NO: 53673 - protein, 41 aa, unidentified
  source 1..41: note = methanogen bacteria
NNTFDGIFKDNTAGYGAGMFFYKDANGNNIKGDFINNTAQS

SEQ ID NO: 53674 - protein, 10 aa, unidentified
  source 1..10: note = methanogen bacteria
FINNTASLNG

SEQ ID NO: 53675 - protein, 15 aa, unidentified
  source 1..15: note = methanogen bacteria
SRFNKNDAVSGGAIH

SEQ ID NO: 53676 - protein, 87 aa, unidentified
  source 1..87: note = methanogen bacteria
GEAFGWWHDVGSMIDAITSNIGRLWNAFINHPDVQAAISIISKALGDLINWVGNAGREVLKFFGISTGSNWDVVRSIIDGIGAAWNG

SEQ ID NO: 53677 - protein, 13 aa, unidentified
  source 1..13: note = methanogen bacteria
GQGIYNALKPIVC

SEQ ID NO: 53678 - protein, 28 aa, unidentified
  source 1..28: note = methanogen bacteria
GCSPGIVPALQKVQEVFSTVWNAIAGFI

SEQ ID NO: 53679 - protein, 11 aa, unidentified
  source 1..11: note = methanogen bacteria
NEDALKTSIGV

SEQ ID NO: 53680 - protein, 44 aa, unidentified
  source 1..44: note = methanogen bacteria
AYDDIPFPNIKLIKDTSNEWDMKGPLVGRYQTNKGFKVKDFLNG

SEQ ID NO: 53681 - protein, 10 aa, unidentified
  source 1..10: note = methanogen bacteria
AEDVFGQTQY

SEQ ID NO: 53682 - protein, 48 aa, unidentified
  source 1..48: note = methanogen bacteria
DDDHHGNWLNAFNAGSMNCKHGAEALIALASVFGFSGEMVHGHWNQFG

SEQ ID NO: 53683 - protein, 27 aa, unidentified
  source 1..27: note = methanogen bacteria
PKSLGFKDLIEVLKDLLSDDPKPNDNS

SEQ ID NO: 53684 - protein, 78 aa, unidentified
  source 1..78: note = methanogen bacteria
MVLMGIFVNNTAAKNGGAVYLDNIKQGECDNTTFSNSRFENNSAGVNGGAIDWHEGATNGAIVDSEFVNNVAGANGGG

SEQ ID NO: 53685 - protein, 22 aa, unidentified
  source 1..22: note = methanogen bacteria
GLVDDCNFINNSAVKNGGAVYL

SEQ ID NO: 53686 - protein, 38 aa, unidentified
  source 1..38: note = methanogen bacteria
INAQANIDAFGKRIGMSKSEVESFKNSMGDLQSEFRKV

SEQ ID NO: 53687 - protein, 60 aa, unidentified
  source 1..60: note = methanogen bacteria
DAVGASALEMGVKLGISKDKMVDLSRTTAIMSSAFVKEGRTQEDAILAVSDAMDGQLKRL

SEQ ID NO: 53688 - protein, 53 aa, unidentified
  source 1..53: note = methanogen bacteria
QAGVMRLWSAFIHHPDVENTIKTIGAVWQWLVEVTKPVVDWLHGIWDEMFPAS

SEQ ID NO: 53689 - protein, 24 aa, unidentified
  source 1..24: note = methanogen bacteria
VFMTVWNAIVSLLSGIIPTVLSAI

SEQ ID NO: 53690 - protein, 15 aa, unidentified
  source 1..15: note = methanogen bacteria
KIIGKYATSIGFKVG

SEQ ID NO: 53691 - protein, 15 aa, unidentified
  source 1..15: note = methanogen bacteria
FKQIAEDVFSQCHYA

SEQ ID NO: 53692 - protein, 18 aa, unidentified
  source 1..18: note = methanogen bacteria
FDSNKWGSWMNAFQHGDM

SEQ ID NO: 53693 - protein, 21 aa, unidentified
  source 1..21: note = methanogen bacteria
DAIIAMAHSMGLPASKVHGHW

SEQ ID NO: 53694 - protein, 85 aa, unidentified
  source 1..85: note = methanogen bacteria
FGNYSVSNFTVYKYESEITIHDMKDVVYGENVLIGFEVKNPTIVHVKITDSEGNIIYDEDETNYSILFTNLDVGDYVINITNMET

SEQ ID NO: 53695 - protein, 17 aa, unidentified
  source 1..17: note = methanogen bacteria
DENHTAVTETATITVNK

SEQ ID NO: 53696 - protein, 15 aa, unidentified
  source 1..15: note = methanogen bacteria
STLTLDDVVLDYGET

SEQ ID NO: 53697 - protein, 23 aa, unidentified
  source 1..23: note = methanogen bacteria
TGITAKIDGVNVTVNGYTIPISG

SEQ ID NO: 53698 - protein, 82 aa, unidentified
  source 1..82: note = methanogen bacteria
DDNHNPVNVTSKITVNKVESTLTVGDIVFDYDGEGSGDVSFTGASKVTANVINQPKAVVSVNDNKITVSGLAAGTYTLNVTT

SEQ ID NO: 53699 - protein, 17 aa, unidentified
  source 1..17: note = methanogen bacteria
DENHTAVTETAGITVNK

SEQ ID NO: 53700 - protein, 27 aa, unidentified
  source 1..27: note = methanogen bacteria
STLTLDDVELDYGDSKNVTVATEGATG

SEQ ID NO: 53701 - protein, 56 aa, unidentified
  source 1..56: note = methanogen bacteria
DIVFDYDGEGSGDVSFTGASEVLANVVNQPSAVISVNDNKITVSGLGAGTYTLNVT

SEQ ID NO: 53702 - protein, 17 aa, unidentified
  source 1..17: note = methanogen bacteria
DENHTAVTETATITVNK

SEQ ID NO: 53703 - protein, 41 aa, unidentified
  source 1..41: note = methanogen bacteria
STLTLDDVELDYGDSKNVTVATEGATGITAKIDGVNVTVNG

SEQ ID NO: 53704 - protein, 39 aa, unidentified
  source 1..39: note = methanogen bacteria
VVTAEDTSDITNYIYGLIKVTGESGESGESGGVDYSALA

SEQ ID NO: 53705 - protein, 14 aa, unidentified
  source 1..14: note = methanogen bacteria
IGGDESGGSDWITD

SEQ ID NO: 53706 - protein, 12 aa, unidentified
  source 1..12: note = methanogen bacteria
SSGGSGDDDLTG

SEQ ID NO: 53707 - protein, 75 aa, unidentified
  source 1..75: note = methanogen bacteria
DNYNSKSTSVSFEILEHVKNDTEIEANPSVNGTTVTIVTTVDEAATGNVTIDVVGQTFLVPVSKGKAVFTYDFFP

SEQ ID NO: 53708 - protein, 21 aa, unidentified
  source 1..21: note = methanogen bacteria
DNFNEASTTTSFTVLETSPEM

SEQ ID NO: 53709 - protein, 10 aa, unidentified
  source 1..10: note = methanogen bacteria
NVTITATVNK

SEQ ID NO: 53710 - protein, 17 aa, unidentified
  source 1..17: note = methanogen bacteria
GQAVYLPVNNGQAVYDV

SEQ ID NO: 53711 - protein, 17 aa, unidentified
  source 1..17: note = methanogen bacteria
NTVVAVKVVDGVAVWET

SEQ ID NO: 53712 - protein, 13 aa, unidentified
  source 1..13: note = methanogen bacteria
EMLLENTPIDAIV

SEQ ID NO: 53713 - protein, 14 aa, unidentified
  source 1..14: note = methanogen bacteria
VTITVNVNERATGF

SEQ ID NO: 53714 - protein, 21 aa, unidentified
  source 1..21: note = methanogen bacteria
ENYVLYMVLSDGKVVLEDVLS

SEQ ID NO: 53715 - protein, 12 aa, unidentified
  source 1..12: note = methanogen bacteria
IPVEDGKAVFTY

SEQ ID NO: 53716 - protein, 11 aa, unidentified
  source 1..11: note = methanogen bacteria
GQAVYLAVNNG

SEQ ID NO: 53717 - protein, 16 aa, unidentified
  source 1..16: note = methanogen bacteria
NKVVAVKVVDGVAVWE

SEQ ID NO: 53718 - protein, 12 aa, unidentified
  source 1..12: note = methanogen bacteria
DEGKVVLEDVLT

SEQ ID NO: 53719 - protein, 13 aa, unidentified
  source 1..13: note = methanogen bacteria
KDTPISAVTNVNK

SEQ ID NO: 53720 - protein, 11 aa, unidentified
  source 1..11: note = methanogen bacteria
STTASFSVFET

SEQ ID NO: 53721 - protein, 11 aa, unidentified
  source 1..11: note = methanogen bacteria
DELKNTNIDVN

SEQ ID NO: 53722 - protein, 15 aa, unidentified
  source 1..15: note = methanogen bacteria
AGQVVYLAVNNGQVV

SEQ ID NO: 53723 - protein, 16 aa, unidentified
  source 1..16: note = methanogen bacteria
VAGYDVTISAKINENA

SEQ ID NO: 53724 - protein, 20 aa, unidentified
  source 1..20: note = methanogen bacteria
ALDGKVVVIRAVDGVAVWET

SEQ ID NO: 53725 - protein, 69 aa, unidentified
  source 1..69: note = methanogen bacteria
VTKKDTPIDISVDSIENNVTITVNVDSDATGLVEISIGDEAIYLPVNNGKVTGEFMISGGDYEVTATYL

SEQ ID NO: 53726 - protein, 44 aa, unidentified
  source 1..44: note = methanogen bacteria
ANTTSAEFTVKDHEKINTTISAEAAVDESAVTITINVNDGATGF

SEQ ID NO: 53727 - protein, 19 aa, unidentified
  source 1..19: note = methanogen bacteria
AGKKYYVPVDGGKATFVDD

SEQ ID NO: 53728 - protein, 26 aa, unidentified
  source 1..26: note = methanogen bacteria
PAKASASFTVIEHNETKMNTPISVEV

SEQ ID NO: 53729 - protein, 10 aa, unidentified
  source 1..10: note = methanogen bacteria
TVNVNENATG

SEQ ID NO: 53730 - protein, 31 aa, unidentified
  source 1..31: note = methanogen bacteria
IDGEAIYLPVNNGMASCGFVLPGGDYMVTAT

SEQ ID NO: 53731 - protein, 34 aa, unidentified
  source 1..34: note = methanogen bacteria
NVDGESVYLPLSNGVAACGIVLPAGMHEVSATYL

SEQ ID NO: 53732 - protein, 43 aa, unidentified
  source 1..43: note = methanogen bacteria
TISTKFTVKGHEKANTTIAAAVSVDNNTVTLTVTVNNEATGFV

SEQ ID NO: 53733 - protein, 14 aa, unidentified
  source 1..14: note = methanogen bacteria
GKKYYVPVEKGKAT

SEQ ID NO: 53734 - protein, 33 aa, unidentified
  source 1..33: note = methanogen bacteria
VEFTVKDHEKVDPSIKSQAAVDGNTVTITVNVN

SEQ ID NO: 53735 - protein, 30 aa, unidentified
  source 1..30: note = methanogen bacteria
GKKYYVPVDVGKAVFSNDYNAGTYSADITY

SEQ ID NO: 53736 - protein, 13 aa, unidentified
  source 1..13: note = methanogen bacteria
NTAEDSTSFTVIE

SEQ ID NO: 53737 - protein, 15 aa, unidentified
  source 1..15: note = methanogen bacteria
TKKDTPIDIAVDSVE

SEQ ID NO: 53738 - protein, 20 aa, unidentified
  source 1..20: note = methanogen bacteria
GDESIYLPVNNGVAIGEFLL

SEQ ID NO: 53739 - protein, 20 aa, unidentified
  source 1..20: note = methanogen bacteria
TSAEFTVKDHEKVDSSIKSQ

SEQ ID NO: 53740 - protein, 14 aa, unidentified
  source 1..14: note = methanogen bacteria
VDGNTVTIAVNVNE

SEQ ID NO: 53741 - protein, 19 aa, unidentified
  source 1..19: note = methanogen bacteria
GKKYYVPVDAGNAKLVIDY

SEQ ID NO: 53742 - protein, 13 aa, unidentified
  source 1..13: note = methanogen bacteria
DDNYNTAKTSTSF

SEQ ID NO: 53743 - protein, 16 aa, unidentified
  source 1..16: note = methanogen bacteria
TKKDTLIDIAVDSVEN

SEQ ID NO: 53744 - protein, 13 aa, unidentified
  source 1..13: note = methanogen bacteria
VTITVTVDANATG

SEQ ID NO: 53745 - protein, 39 aa, unidentified
  source 1..39: note = methanogen bacteria
ISIGDEAVYIPVNNGAAIGEFLLPGGDYEVTATYLGDNK

SEQ ID NO: 53746 - protein, 22 aa, unidentified
  source 1..22: note = methanogen bacteria
ISIEGNADFTGIFDSEFINNSA

SEQ ID NO: 53747 - protein, 47 aa, unidentified
  source 1..47: note = methanogen bacteria
GNTSTLVINNTVFDGNYAPYAGALCLKGAKNLIISDSNFTNNKGTDE

SEQ ID NO: 53748 - protein, 21 aa, unidentified
  source 1..21: note = methanogen bacteria
NLTESTIMNSKFENNSARTGG

SEQ ID NO: 53749 - protein, 14 aa, unidentified
  source 1..14: note = methanogen bacteria
GNLNTTTFNHNQFT

SEQ ID NO: 53750 - protein, 22 aa, unidentified
  source 1..22: note = methanogen bacteria
QGNATNNKFEKSIFMKNTATTH

SEQ ID NO: 53751 - protein, 20 aa, unidentified
  source 1..20: note = methanogen bacteria
DENNTFNKCIFMDNYAPYGG

SEQ ID NO: 53752 - protein, 24 aa, unidentified
  source 1..24: note = methanogen bacteria
AVSNSSQTLNITDCIFTNTKEPEK

SEQ ID NO: 53753 - protein, 25 aa, unidentified
  source 1..25: note = methanogen bacteria
IYFISDANELYITNSEFKALTARAG

SEQ ID NO: 53754 - protein, 17 aa, unidentified
  source 1..17: note = methanogen bacteria
DLNGTVIAETNFIDNKA

SEQ ID NO: 53755 - protein, 16 aa, unidentified
  source 1..16: note = methanogen bacteria
VEGNAKDVVIIDSNFT

SEQ ID NO: 53756 - protein, 18 aa, unidentified
  source 1..18: note = methanogen bacteria
NNTNIVISSSFDGNYAPY

SEQ ID NO: 53757 - protein, 25 aa, unidentified
  source 1..25: note = methanogen bacteria
AISLGTTESLYIFDSNFTNNKGTSA

SEQ ID NO: 53758 - protein, 21 aa, unidentified
  source 1..21: note = methanogen bacteria
GNLTNARILETEFINNSARAG

SEQ ID NO: 53759 - protein, 16 aa, unidentified
  source 1..16: note = methanogen bacteria
VEGIMDNSTFLKSFFQ

SEQ ID NO: 53760 - protein, 25 aa, unidentified
  source 1..25: note = methanogen bacteria
AVQGNATNNKFNVLLFTANTGTTHG

SEQ ID NO: 53761 - protein, 39 aa, unidentified
  source 1..39: note = methanogen bacteria
MGGAVIFNNDVSGIAIDNCKFINNSAAKNGGALYVNGAF

SEQ ID NO: 53762 - protein, 15 aa, unidentified
  source 1..15: note = methanogen bacteria
IGNSEFISNVATNNG

SEQ ID NO: 53763 - protein, 20 aa, unidentified
  source 1..20: note = methanogen bacteria
LFENLTFSDNRAENNDGGAI

SEQ ID NO: 53764 - protein, 14 aa, unidentified
  source 1..14: note = methanogen bacteria
FFKNTAKNYGGAIN

SEQ ID NO: 53765 - protein, 25 aa, unidentified
  source 1..25: note = methanogen bacteria
KENEYVDVDFINNKASNGGAMGGYG

SEQ ID NO: 53766 - protein, 21 aa, unidentified
  source 1..21: note = methanogen bacteria
SFEGCLFANNSATNNGGAVCY

SEQ ID NO: 53767 - protein, 15 aa, unidentified
  source 1..15: note = methanogen bacteria
ENTSFARNTAGSGGA

SEQ ID NO: 53768 - protein, 12 aa, unidentified
  source 1..12: note = methanogen bacteria
NCFFADNAARTG

SEQ ID NO: 53769 - protein, 28 aa, unidentified
  source 1..28: note = methanogen bacteria
ISNKFNKDLFINNSAANNASVIYYQGSS

SEQ ID NO: 53770 - protein, 67 aa, unidentified
  source 1..67: note = methanogen bacteria
NATYTLRKVNTTGNNNKTKGGAVYIADEDNVIENSKFYNNTASTNRPYNNKGNDPSSSDDGFGGAIF

SEQ ID NO: 53771 - protein, 10 aa, unidentified
  source 1..10: note = methanogen bacteria
TIDAREKVPI

SEQ ID NO: 53772 - protein, 10 aa, unidentified
  source 1..10: note = methanogen bacteria
TIDAGGKSRI

SEQ ID NO: 53773 - protein, 15 aa, unidentified
  source 1..15: note = methanogen bacteria
IVLESDIILSSSDES

SEQ ID NO: 53774 - protein, 13 aa, unidentified
  source 1..13: note = methanogen bacteria
NGHTIDAMENTRI

SEQ ID NO: 53775 - protein, 73 aa, unidentified
  source 1..73: note = methanogen bacteria
IYFSGDDLVIADSKFISNEAEDCGAVAVNSATTKIRNTEFVENGAYDYGAIEISSGDVLIDNCRFDSNYANRS

SEQ ID NO: 53776 - protein, 21 aa, unidentified
  source 1..21: note = methanogen bacteria
CQFIDNDCCAVYLSHYNARIL

SEQ ID NO: 53777 - protein, 14 aa, unidentified
  source 1..14: note = methanogen bacteria
KFENSVSDDGIAIY

SEQ ID NO: 53778 - protein, 38 aa, unidentified
  source 1..38: note = methanogen bacteria
VYLYFQDDNYNLIKVMDFDLLVNNTKIDYVFSNRYQDF

SEQ ID NO: 53779 - protein, 12 aa, unidentified
  source 1..12: note = methanogen bacteria
GAIYANTDVYVD

SEQ ID NO: 53780 - protein, 93 aa, unidentified
  source 1..93: note = methanogen bacteria
FFESNYADDCGDAVFAKGSVYINNISDDYPCRFISNSVDDGDGGAICCAGSLYLNNGLFISNSAFKKGGAICCDGVFTSKGSLFEKNTAHGSH

SEQ ID NO: 53781 - protein, 99 aa, unidentified
  source 1..99: note = methanogen bacteria
AYGGAVYSGSNAFVYNSSFEDNECILHLPSGGAVYAVKNIYVNIDQDVTKPFYSYFRGNVAANGGALYSGSGSVRCVNSFFELNHGEFSSVVYGSDVDF

SEQ ID NO: 53782 - protein, 43 aa, unidentified
  source 1..43: note = methanogen bacteria
GAGDVSVANFETDDCGLFNCSGCSLVNDYEKYSELEKVLIRTA

SEQ ID NO: 53783 - protein, 25 aa, unidentified
  source 1..25: note = methanogen bacteria
IDDAVIGGSARDHSNRFDIVASYAA

SEQ ID NO: 53784 - protein, 51 aa, unidentified
  source 1..51: note = methanogen bacteria
SKEDLNEIKDYLLDPNNKEVVKLAKGQSFNLEVSYISFKGIFGKMYFDDRT

SEQ ID NO: 53785 - protein, 12 aa, unidentified
  source 1..12: note = methanogen bacteria
DCAIDRIISTKL

SEQ ID NO: 53786 - protein, 78 aa, unidentified
  source 1..78: note = methanogen bacteria
SSSYMISNNYNPELNTRTVYKTVIGVSAVAGVIGGAFGGYVAIEGFFEQISYMLLDMETYGEIPGFSLYSEYTMVAIP

SEQ ID NO: 53787 - protein, 48 aa, unidentified
  source 1..48: note = methanogen bacteria
TAALNDTVKVSVLKATPTINVSAENATYSSDVIITVITDAGGKYNITV

SEQ ID NO: 53788 - protein, 12 aa, unidentified
  source 1..12: note = methanogen bacteria
GSIVGVLAPTVA

SEQ ID NO: 53789 - protein, 21 aa, unidentified
  source 1..21: note = methanogen bacteria
GLMEGNAYHDYSNLWSNVLSF

SEQ ID NO: 53790 - protein, 10 aa, unidentified
  source 1..10: note = methanogen bacteria
TGFSVYSAFT

SEQ ID NO: 53791 - protein, 47 aa, unidentified
  source 1..47: note = methanogen bacteria
FGVAGNPQGYPGSQGAGNPQGYPGSQGAAGSHGSGEISLNDGYQNSA

SEQ ID NO: 53792 - protein, 78 aa, unidentified; identical to SEQ ID NO: 53786
  source 1..78: note = methanogen bacteria

SEQ ID NO: 53793 - protein, 31 aa, unidentified
  source 1..31: note = methanogen bacteria
ENTVYKDVINVNNDKDNNLEINNQDNEVSRS

SEQ ID NO: 53794 - protein, 51 aa, unidentified
  source 1..51: note = methanogen bacteria
FKNNTGAYGVGVYFYYEGIAENCAFINNKMEENILPGTAIYFDDGFGKVNN

SEQ ID NO: 53795 - protein, 44 aa, unidentified
  source 1..44: note = methanogen bacteria
METNTGLDALIGKAFSRAGKKIGNEFLPIIKDVKRGFIDLDNEL

SEQ ID NO: 53796 - protein, 31 aa, unidentified
  source 1..31: note = methanogen bacteria
FNLDKNTTLVNQLIELTNNATFMKKLLELTK

SEQ ID NO: 53797 - protein, 10 aa, unidentified
  source 1..10: note = methanogen bacteria
GATFNKLIEL

SEQ ID NO: 53798 - protein, 28 aa, unidentified
  source 1..28: note = methanogen bacteria
NLTVTGPNGTIVMDKCSVYPNPIVDISV

SEQ ID NO: 53799 - protein, 20 aa, unidentified
  source 1..20: note = methanogen bacteria
KDEYYIDDIAVWTVVVSNAN

SEQ ID NO: 53800 - protein, 65 aa, unidentified
  source 1..65: note = methanogen bacteria
TNVTLRDFFPGSNFEFINCTLANGTSYTGDTWYIGDLANGTNVTFTVYSRAIAVGTAKHNVTVSC

SEQ ID NO: 53801 - protein, 28 aa, unidentified
  source 1..28: note = methanogen bacteria
ETEWNLTNNKNNKTVVVVSLPDPVKNVS

SEQ ID NO: 53802 - protein, 13 aa, unidentified
  source 1..13: note = methanogen bacteria
PNGTKKYANLTVY

SEQ ID NO: 53803 - protein, 19 aa, unidentified
  source 1..19: note = methanogen bacteria
KDEYFVDDIAVWTVVVSNA

SEQ ID NO: 53804 - protein, 50 aa, unidentified
  source 1..50: note = methanogen bacteria
RITNITAKSNATITIRVKVVGIGDNIIRNSTFIANNVTNDPAVKYVGNLT

SEQ ID NO: 53805 - protein, 32 aa, unidentified
  source 1..32: note = methanogen bacteria
LTVVGPNGTVNSTDLTVYPVPIVDISVNITSL

SEQ ID NO: 53806 - protein, 11 aa, unidentified
  source 1..11: note = methanogen bacteria
MILLFGLLLCL

SEQ ID NO: 53807 - protein, 75 aa, unidentified
  source 1..75: note = methanogen bacteria
YVDDNYENNVTSIPFTVSKADVALTVEVLDKVYTADVNGIVFASADGEYKVVIGNYETPVIVKDGVGSFDVAFEV

SEQ ID NO: 53808 - protein, 28 aa, unidentified
  source 1..28: note = methanogen bacteria
SEIAYGGAVEIAQGLPGDATGSVTYSFA

SEQ ID NO: 53809 - protein, 53 aa, unidentified
  source 1..53: note = methanogen bacteria
TVSKADVALTVEVLDKVYSADVCGIVFASVDGEYKVVIGNYETLVIVKDGVGS

SEQ ID NO: 53810 - protein, 12 aa, unidentified
  source 1..12: note = methanogen bacteria
DDNYNPNYNETA

SEQ ID NO: 53811 - protein, 13 aa, unidentified
  source 1..13: note = methanogen bacteria
ITYGGAVEIAQGL

SEQ ID NO: 53812 - protein, 29 aa, unidentified
  source 1..29: note = methanogen bacteria
TIIKVVGVNESFVLSGLNAGSYVIYANYS

SEQ ID NO: 53813 - protein, 16 aa, unidentified
  source 1..16: note = methanogen bacteria
EIESWMEDLVTEGEHQ

SEQ ID NO: 53814 - protein, 23 aa, unidentified
  source 1..23: note = methanogen bacteria
HVVYAGEEGNGDGDDENDYGTYV

SEQ ID NO: 53815 - protein, 40 aa, unidentified
  source 1..40: note = methanogen bacteria
SKIQFSFEDDDTGDGGDENDKGNGEKDTSNGRDVYIASGT

SEQ ID NO: 53816 - protein, 89 aa, unidentified
  source 1..89: note = methanogen bacteria
ISNSYMSSYDWDDKYVVYVEDGVEDGNVVLDDNYWSGDVYKREYDEEANEEIEVLAVSNIELHNYLELILKVSPEDDPLIPGKEYEFYA

SEQ ID NO: 53817 - protein, 52 aa, unidentified
  source 1..52: note = methanogen bacteria
KFEGLPKSNFIFYVENMNGHTEEFENCEVPVENGQTSFTIEDDQYAMHCEIS

SEQ ID NO: 53818 - protein, 56 aa, unidentified
  source 1..56: note = methanogen bacteria
SAPNFGGGIYNEGDMTITYSILCHNCAKIGNDIYHNGTSLYVSNSFLTSGESDFAP

SEQ ID NO: 53819 - protein, 66 aa, unidentified
  source 1..66: note = methanogen bacteria
ISNYGEYVLYAENTEDCVLNDIWWGTNSPDENTTNIELNNYVIFSLTAQNEIVENESNVFNVAFIK

SEQ ID NO: 53820 - protein, 26 aa, unidentified
  source 1..26: note = methanogen bacteria
GASASIVVVFNATSPYINAYNTAYVH

SEQ ID NO: 53821 - protein, 75 aa, unidentified
  source 1..75: note = methanogen bacteria
VTVAPGENVEFTIRVMNSGNTTLNYVFVVEKPSEGLVYIDYANKTGNWTYDGIDKWTLAGGLDANETAEFIVIYN

SEQ ID NO: 53822 - protein, 69 aa, unidentified
  source 1..69: note = methanogen bacteria
YGETVEFTIVVRNTGETNLTDVFVEERPSEGLVYLDYVNKTGNWNKDGGIWTLAGNLELGGTAEFTVIY

SEQ ID NO: 53823 - protein, 68 aa, unidentified
  source 1..68: note = methanogen bacteria
VGETVGFTIVVTNIGDQDLTGVFVEEQIPEGLVYLDYVNKTGSWDKEGNKWTLAGNLEYGGTAELVII

SEQ ID NO: 53824 - protein, 75 aa, unidentified
  source 1..75: note = methanogen bacteria
KKGEKVEFVIIVTNNGDEDLTGVFVKEEIPDGLAYSSFISESGKWFFNGADMWIYDGTLAAGESSNLTIIFDTEK

SEQ ID NO: 53825 - protein, 65 aa, unidentified
  source 1..65: note = methanogen bacteria
YTIVVNNTGECDLTGVFVEEQAPDGLVYVDFVDESNKWTYDEETHVFTYNGVLVPGEVVQFVVIF

SEQ ID NO: 53826 - protein, 49 aa, unidentified
  source 1..49: note = methanogen bacteria
YTIQVTNTGDCDLTNVFVEEQAPEGLVYIDYVNRTGTWDKHGNKWTYVG

SEQ ID NO: 53827 - protein, 66 aa, unidentified
  source 1..66: note = methanogen bacteria
GNITSYTIEVTNTGDCDLTRVFVEEQAPEGLVYVDYVEIVGSWDKQGNKWTYEGTLAPGDSVAFVV

SEQ ID NO: 53828 - protein, 32 aa, unidentified
  source 1..32: note = methanogen bacteria
PKFDIVKVASDEVVYAGNTTSYTIEVTNYIMG

SEQ ID NO: 53829 - protein, 21 aa, unidentified
  source 1..21: note = methanogen bacteria
IAVEGNASSILIFNSDFINNT

SEQ ID NO: 53830 - protein, 19 aa, unidentified
  source 1..19: note = methanogen bacteria
DELNTFDGCIFYNNYAPYG

SEQ ID NO: 53831 - protein, 18 aa, unidentified
  source 1..18: note = methanogen bacteria
LGNTDYLVISESNFTNHI

SEQ ID NO: 53832 - protein, 21 aa, unidentified
  source 1..21: note = methanogen bacteria
TNANIVDSLFENNSARAGGAI

SEQ ID NO: 53833 - protein, 16 aa, unidentified
  source 1..16: note = methanogen bacteria
VENNMNQVQIYDTYFI

SEQ ID NO: 53834 - protein, 22 aa, unidentified
  source 1..22: note = methanogen bacteria
EEDATNNFFDSVTFVSNIAQTH

SEQ ID NO: 53835 - protein, 10 aa, unidentified
  source 1..10: note = methanogen bacteria
IFYNNYAPYG

SEQ ID NO: 53836 - protein, 16 aa, unidentified
  source 1..16: note = methanogen bacteria
LNLTDCLFGINDDEYP

SEQ ID NO: 53837 - protein, 44 aa, unidentified
  source 1..44: note = methanogen bacteria
DTYSLVIDGSSFYGLSARAGGAIYVEGDLNTADINGSNFIGNKA

SEQ ID NO: 53838 - protein, 19 aa, unidentified
  source 1..19: note = methanogen bacteria
EGNSNVLILTECNFINNSA

SEQ ID NO: 53839 - protein, 17 aa, unidentified
  source 1..17: note = methanogen bacteria
TYTVIDNSRFDSNYAPY

SEQ ID NO: 53840 - protein, 12 aa, unidentified
  source 1..12: note = methanogen bacteria
TMFILNSGSTHG

SEQ ID NO: 53841 - protein, 50 aa, unidentified
  source 1..50: note = methanogen bacteria
DINNTIYECEFINNYGRYGTALAVNKNSENLNITKSVFASFNESSKEVIA

SEQ ID NO: 53842 - protein, 52 aa, unidentified
  source 1..52: note = methanogen bacteria
ITNLYIADCNFSGNVVRAGGAIYVEKKIEKSLIENCLFKENTITTANEEYGG

SEQ ID NO: 53843 - protein, 83 aa, unidentified
  source 1..83: note = methanogen bacteria
YTAFVSFEGDDNYNSANNETAFEVAQTGTNFNIIANTTEIVYGDVINITQSIPSDATGSVIYKFANGSIIKVLNVNESFVLSG

SEQ ID NO: 53844 - protein, 22 aa, unidentified
  source 1..22: note = methanogen bacteria
FNSTVSGTYTNNKAGDDGGANY

SEQ ID NO: 53845 - protein, 22 aa, unidentified
  source 1..22: note = methanogen bacteria
SNSTVSGTYTNNNAVDGGGANY

SEQ ID NO: 53846 - protein, 48 aa, unidentified
  source 1..48: note = methanogen bacteria
TVSGTYTNNKAGYGGANYFFDEVSNTNITGTYTDNNATEHGGANYFYD

SEQ ID NO: 53847 - protein, 10 aa, unidentified
  source 1..10: note = methanogen bacteria
ATASRDRLDV

SEQ ID NO: 53848 - protein, 47 aa, unidentified
  source 1..47: note = methanogen bacteria
SGAISAATGTESGEYSALTNVISGFIGDYLGGGNSGGSGDSDSLTAL

SEQ ID NO: 53849 - protein, 13 aa, unidentified
  source 1..13: note = methanogen bacteria
GGGNSGSSGNSDS

SEQ ID NO: 53850 - protein, 33 aa, unidentified
  source 1..33: note = methanogen bacteria
GAISAATGSESGEYSGLTNGSSGSSGSSGNSDS

SEQ ID NO: 53851 - protein, 10 aa, unidentified
  source 1..10: note = methanogen bacteria
EGGSNDALNA

SEQ ID NO: 53852 - protein, 14 aa, unidentified
  source 1..14: note = methanogen bacteria
SAATGSESGEYSGL

SEQ ID NO: 53853 - protein, 73 aa, unidentified
  source 1..73: note = methanogen bacteria
TNTTSKDVEILGHVLKDTPITANVAMNGNRVTLTVKVDENATGFVELKFGDNVFNIALKDGIGTLTTSLPYGS

SEQ ID NO: 53854 - protein, 90 aa, unidentified
  source 1..90: note = methanogen bacteria
DENYNKNSTKLEFTIVEPAKENTPISMDIVTDENYVGMTVAVDDAATGLVKFQVIGSTGEYTIYADLINGKAILEDTLPIGDYTVFATYM

SEQ ID NO: 53855 - protein, 35 aa, unidentified
  source 1..35: note = methanogen bacteria
GTVVNIEVVDGVATLTTTLSPNSYYVDVTYLGDDD

SEQ ID NO: 53856 - protein, 39 aa, unidentified
  source 1..39: note = methanogen bacteria
DVAFIMVDLDKAATGLVKFYVIWKETGENYTVYMDVVDG

SEQ ID NO: 53857 - protein, 10 aa, unidentified
  source 1..10: note = methanogen bacteria
NVFNIALKDG

SEQ ID NO: 53858 - protein, 17 aa, unidentified
  source 1..17: note = methanogen bacteria
TDENYVGMTVAVDDAAT

SEQ ID NO: 53859 - protein, 20 aa, unidentified
  source 1..20: note = methanogen bacteria
TGEYTLYADVIGGKAVLEDT

SEQ ID NO: 53860 - protein, 11 aa, unidentified
  source 1..11: note = methanogen bacteria
VIGNRVTLTVN

SEQ ID NO: 53861 - protein, 11 aa, unidentified
  source 1..11: note = methanogen bacteria
ATYMGDSVFNT

SEQ ID NO: 53862 - protein, 18 aa, unidentified
  source 1..18: note = methanogen bacteria
VNGNRVTLTVNVDENATG

SEQ ID NO: 53863 - protein, 11 aa, unidentified
  source 1..11: note = methanogen bacteria
SKNNKINYNYI

SEQ ID NO: 53864 - protein, 18 aa, unidentified
  source 1..18: note = methanogen bacteria
LDISLGIDENGNLSIGDL

SEQ ID NO: 53865 - protein, 63 aa, unidentified
  source 1..63: note = methanogen bacteria
VKKSKIIKKVIPKAKRVVHYVKKSVEKIKGTVSKFKKTVKNVNRAVKRASNSVKRFVSKFKFW

SEQ ID NO: 53866 - protein, 15 aa, unidentified
  source 1..15: note = methanogen bacteria
TLNDANVTAKNIELT

SEQ ID NO: 53867 - protein, 12 aa, unidentified
  source 1..12: note = methanogen bacteria
TDLNVSFVPDDS

SEQ ID NO: 53868 - protein, 14 aa, unidentified
  source 1..14: note = methanogen bacteria
TLNDASITAKDIEL

SEQ ID NO: 53869 - protein, 28 aa, unidentified
  source 1..28: note = methanogen bacteria
DDSGIVKVSDNGTVTALKTGIANITITV

SEQ ID NO: 53870 - protein, 29 aa, unidentified
  source 1..29: note = methanogen bacteria
DDSGIVKVSDNGTVTALKAGTAQVTITVG

SEQ ID NO: 53871 - protein, 82 aa, unidentified
  source 1..82: note = methanogen bacteria
MGGAIFFEGNDLLIADSKFMSNEAYEYGAVFADSLTAEVRNTEFSKNAAEDYGALAVLGGDVLIYKCNFTDNSARYYGGAIL

SEQ ID NO: 53872 - protein, 69 aa, unidentified
  source 1..69: note = methanogen bacteria
ACNFTNNVAEGEYSNEAHDCGAVSVESVTTEIINTEFIGNGAYDCGAVGIFEGNALIENCTFDSNYANR

SEQ ID NO: 53873 - protein, 58 aa, unidentified
  source 1..58: note = methanogen bacteria
TSVHLDVLNIGEDNADIVATVFDEYGNLVNRGDVTFTINGLDYTVKIANGIAKFNALL

SEQ ID NO: 53874 - protein, 69 aa, unidentified
  source 1..69: note = methanogen bacteria
SSNFIMVSNKPISTSMNVSVSSSNSNPLKISAVILDKNGNKVESGMVTFNVDGEDYKINVNDGEANFTH

SEQ ID NO: 53875 - protein, 62 aa, unidentified
  source 1..62: note = methanogen bacteria
KNIVVSYDDLYCYASSKRTLSKEIGIKDVSIYLSVDNNYNPVVITADIVDKDGFSVNCGKVT

SEQ ID NO: 53876 - protein, 20 aa, unidentified
  source 1..20: note = methanogen bacteria
NVEGSDFTVDVKNGVADLKY

SEQ ID NO: 53877 - protein, 73 aa, unidentified
  source 1..73: note = methanogen bacteria
KSNSTYDFFDISAIKTYLEFNFDSVNVFNPVNISCTVRDLNSNLVNRGYVTFIINNDESKVKVENGVASLEYL

SEQ ID NO: 53878 - protein, 64 aa, unidentified
  source 1..64: note = methanogen bacteria
SSNTISLNVSKTSVDLSVGVDVEKNVHTIRVKISKPVSDYVTIRLNDNPYSVKSDNGQAILILE

SEQ ID NO: 53879 - protein, 25 aa, unidentified
  source 1..25: note = methanogen bacteria
KSDEATFDFTVNKKATRISCDDVFY

SEQ ID NO: 53880 - protein, 46 aa, unidentified
  source 1..46: note = methanogen bacteria
SQISCPITFVDEFGHEVSGCKLSVNIDGKLYDVTTNDSGIGLLKFS

SEQ ID NO: 53881 - protein, 47 aa, unidentified
  source 1..47: note = methanogen bacteria
IQMYHKNELLEAFIEKHFHNGTYDKTESEKIKNQTYYLLDNYSIWSG

SEQ ID NO: 53882 - protein, 24 aa, unidentified
  source 1..24: note = methanogen bacteria
SNFIVEDNPERLNMIRQLENCFGD

SEQ ID NO: 53883 - protein, 46 aa, unidentified
  source 1..46: note = methanogen bacteria
PMKHLRRNLDPKVCFFFDRTRFEEDQINNLYEAYKWYTSTYGNTVH

SEQ ID NO: 53884 - protein, 11 aa, unidentified
  source 1..11: note = methanogen bacteria
LVFKCNKEGLT

SEQ ID NO: 53885 - protein, 14 aa, unidentified
  source 1..14: note = methanogen bacteria
NETSDEAGSAELSN

SEQ ID NO: 53886 - protein, 12 aa, unidentified
  source 1..12: note = methanogen bacteria
FEGNVSESVIFN

SEQ ID NO: 53887 - protein, 45 aa, unidentified
  source 1..45: note = methanogen bacteria
SASNQITGSGSVESVELSDSFQYLDSLIHSGVKVITLDSDIMAQH

SEQ ID NO: 53888 - protein, 60 aa, unidentified
  source 1..60: note = methanogen bacteria
NLDVEGLTIDGGGHEINANAFSRIFNVTADGVTLKNIRFIRPKGTAIHNSGSLRIENCTL

SEQ ID NO: 53889 - protein, 19 aa, unidentified
  source 1..19: note = methanogen bacteria
TFSNNRCEVIHNKATLSVA

SEQ ID NO: 53890 - protein, 11 aa, unidentified
  source 1..11: note = methanogen bacteria
SVFSNSEFIRA

SEQ ID NO: 53891 - protein, 27 aa, unidentified
  source 1..27: note = methanogen bacteria
FNDSDATLDVVMCRFSDNFTVEGNSFL

SEQ ID NO: 53892 - protein, 22 aa, unidentified
  source 1..22: note = methanogen bacteria
RGVLSVESSSFISNAVNENSGG

SEQ ID NO: 53893 - protein, 10 aa, unidentified
  source 1..10: note = methanogen bacteria
ISNEGDLTVR

SEQ ID NO: 53894 - protein, 21 aa, unidentified
  source 1..21: note = methanogen bacteria
SVFESNEMAVGGAIYLHLNRF

SEQ ID NO: 53895 - protein, 29 aa, unidentified
  source 1..29: note = methanogen bacteria
CRFVSNKSMGYAAAINGSTYADYYDFNIY

SEQ ID NO: 53896 - protein, 40 aa, unidentified
  source 1..40: note = methanogen bacteria
SKDTGVIAVHSGALKIINCKFTKNRGRKYIIKNNDFLQIY

SEQ ID NO: 53897 - protein, 42 aa, unidentified
  source 1..42: note = methanogen bacteria
NKAPNIITNLSKSMYSNGLLTNFSIFNAKFLNNKVKDAVIYN

SEQ ID NO: 53898 - protein, 20 aa, unidentified
  source 1..20: note = methanogen bacteria
IEGSDADIEGKVYGSGVVEE

SEQ ID NO: 53899 - protein, 12 aa, unidentified
  source 1..12: note = methanogen bacteria
DNASEGIYNIGD

SEQ ID NO: 53900 - protein, 18 aa, unidentified
  source 1..18: note = methanogen bacteria
RLSGNSVGIVNMANLSIS

SEQ ID NO: 53901 - protein, 19 aa, unidentified
  source 1..19: note = methanogen bacteria
AISGHEKNSVINKGRIRME

SEQ ID NO: 53902 - protein, 14 aa, unidentified
  source 1..14: note = methanogen bacteria
DNSGPIFNKGALNI

SEQ ID NO: 53903 - protein, 17 aa, unidentified
  source 1..17: note = methanogen bacteria
SDNKNGAIKNRGELTVG

SEQ ID NO: 53904 - protein, 17 aa, unidentified
  source 1..17: note = methanogen bacteria
SSKDGGAIKNSGRLTVD

SEQ ID NO: 53905 - protein, 35 aa, unidentified
  source 1..35: note = methanogen bacteria
IFNKDILVIDKSSFELNTSGKKGSAIYNSGDVKIA

SEQ ID NO: 53906 - protein, 20 aa, unidentified
  source 1..20: note = methanogen bacteria
SLDGYECCGEDCHCQDENFT

SEQ ID NO: 53907 - protein, 76 aa, unidentified
  source 1..76: note = methanogen bacteria
NETVFEIVPKSVSVVVSVEDIVYGEDAIVWVYGEIDGEYIVGIYNQNYTVNVFDGKGNTTVSDLFVDEDILVSVSI

SEQ ID NO: 53908 - protein, 82 aa, unidentified
  source 1..82: note = methanogen bacteria
YSAYNTTIFNIAPKGISVVISVGNITYGEDTAVIVQSDVAGDYIVTIRDENYTVFVNGGTGVTFIPNLGVGNQIVVTVKRDD

SEQ ID NO: 53909 - protein, 77 aa, unidentified
  source 1..77: note = methanogen bacteria
TAFNETTFNINPKLTNVLVSVDDITYGENASANIVAEIDGMYTLSVNGTEYPIEVIDGKASQVISGLTVGNYVVQIA

SEQ ID NO: 53910 - protein, 61 aa, unidentified
  source 1..61: note = methanogen bacteria
QTTFYVVPKPISLVVSVEDITYEEKAMVIVVSDVDGEYLVYVDDAPYVVDVLGGTGNVSVS

SEQ ID NO: 53911 - protein, 75 aa, unidentified
  source 1..75: note = methanogen bacteria
AVNFTSFDVAVKEIDVSVSVGDIIFGESALVVVVSDVDGEYLVYVDGAPYVVDVLGGTGNVSVSDLTVGSYAVNV

SEQ ID NO: 53912 - protein, 82 aa, unidentified
  source 1..82: note = methanogen bacteria
AYGVSAGDNYALSGGSSASSHLRIVTEILAGTYDPANQATINFPYGSGSISGPLFDYLMAAIAYVVTLCGVSQATAAAGTLA

SEQ ID NO: 53913 - protein, 11 aa, unidentified
  source 1..11: note = methanogen bacteria
MTTAFSNGTEN

SEQ ID NO: 53914 - protein, 12 aa, unidentified
  source 1..12: note = methanogen bacteria
YYIPLGLWSTVF

SEQ ID NO: 53915 - protein, 36 aa, unidentified
  source 1..36: note = methanogen bacteria
FAPSVSSALLHGSSPQVGALANDLAHQFSRTSISSM

SEQ ID NO: 53916 - protein, 71 aa, unidentified
  source 1..71: note = methanogen bacteria
QSSNFIMVSDKPVNTSINLNVSSSKNNPFEINALVLDKNGNRVESGMVTFNVDGEDYKVKVNDGEANLTHI

SEQ ID NO: 53917 - protein, 82 aa, unidentified
  source 1..82: note = methanogen bacteria
NIVVSYDDLYCYASSKMTLSKEIEIKDISIYLSVDNNYNPVVITAEVVDKDGFSVNCGKVTFNVEGSDFTVDVKNGLASLKY

SEQ ID NO: 53918 - protein, 74 aa, unidentified
  source 1..74: note = methanogen bacteria
YKSNSVYDYFDISAIKTYLEFNFDTVNVFNPVNISCTVRDLDSNLVNRGYVTFIINNVESKVKVENGVASLEYL

SEQ ID NO: 53919 - protein, 65 aa, unidentified
  source 1..65: note = methanogen bacteria
SSNSISLNVSKTSVDLSVDVSVVKNVHTIMVTISKPVSDYVVIKLNNNPYSVKSDNGQAILILEN

SEQ ID NO: 53920 - protein, 34 aa, unidentified
  source 1..34: note = methanogen bacteria
YEINAYMDSYIYKSDEATSDFTVDKKATKIYCDD

SEQ ID NO: 53921 - protein, 16 aa, unidentified
  source 1..16: note = methanogen bacteria
YNNKAESGGAINWYAD

SEQ ID NO: 53922 - protein, 26 aa, unidentified
  source 1..26: note = methanogen bacteria
FEGSNTDYNWFGNNGSNYNQKPYNNS

SEQ ID NO: 53923 - protein, 46 aa, unidentified
  source 1..46: note = methanogen bacteria
STFNNNTANYGGAIQSYNENGNIINSTFNSNKANSNGGAIYWYNSH

SEQ ID NO: 53924 - protein, 13 aa, unidentified
  source 1..13: note = methanogen bacteria
TFNNNEAREGGAI

SEQ ID NO: 53925 - protein, 10 aa, unidentified
  source 1..10: note = methanogen bacteria
NSGTNGGAIL

SEQ ID NO: 53926 - protein, 16 aa, unidentified
  source 1..16: note = methanogen bacteria
NADYNWFGNNEINYNQ

SEQ ID NO: 53927 - protein, 34 aa, unidentified
  source 1..34: note = methanogen bacteria
NPNMIGLSDISEITFKLYSYDGSEIREYDNSILY

SEQ ID NO: 53928 - protein, 20 aa, unidentified
  source 1..20: note = methanogen bacteria
LSLSTTRGTLSKDTARLSEI

SEQ ID NO: 53929 - protein, 94 aa, unidentified
  source 1..94: note = methanogen bacteria
WDLNRTINGNNNTEITLNKNYTYNPEIDSDFINGIIINRTLTINGNKNTINGSDLARIFNIIADDVIIDNIIFTNGNADTGGAIYWEGDYGTLS

SEQ ID NO: 53930 - protein, 11 aa, unidentified
  source 1..11: note = methanogen bacteria
STFNNNNASEY

SEQ ID NO: 53931 - protein, 10 aa, unidentified
  source 1..10: note = methanogen bacteria
NKANRGGAIT

SEQ ID NO: 53932 - protein, 28 aa, unidentified
  source 1..28: note = methanogen bacteria
PNEIYYQNFEGSNADNNWFGNNASNYDQ

SEQ ID NO: 53933 - protein, 12 aa, unidentified
  source 1..12: note = methanogen bacteria
LNTAFGARPLRA

SEQ ID NO: 53934 - protein, 49 aa, unidentified
  source 1..49: note = methanogen bacteria
VNRDIALQVKVKDQFGDYIEDGNVTFLIDGEAFTVSLVDCVANKTVSFA

SEQ ID NO: 53935 - protein, 13 aa, unidentified
  source 1..13: note = methanogen bacteria
VSKLIDIEPVNTS

SEQ ID NO: 53936 - protein, 66 aa, unidentified
  source 1..66: note = methanogen bacteria
SLSDDTLLVGESLTVTAVVNATQGKVLFYINGVLNDTVDVVSDGVACLVLDNLYYGGYNVTAVFTD

SEQ ID NO: 53937 - protein, 16 aa, unidentified
  source 1..16: note = methanogen bacteria
SSNRSAFSVYSNTVLE

SEQ ID NO: 53938 - protein, 18 aa, unidentified
  source 1..18: note = methanogen bacteria
EAFTVSLVDCVANKTVSF

SEQ ID NO: 53939 - protein, 15 aa, unidentified
  source 1..15: note = methanogen bacteria
LVGEPLTVTAVVNAT

SEQ ID NO: 53940 - protein, 27 aa, unidentified
  source 1..27: note = methanogen bacteria
VLFYINNVLNNTVVLDSMGAAVLTLNN

SEQ ID NO: 53941 - protein, 20 aa, unidentified
  source 1..20: note = methanogen bacteria
KANFTVIYPTEIITQDLTKY

SEQ ID NO: 53942 - protein, 42 aa, unidentified
  source 1..42: note = methanogen bacteria
FTFRLLDNQGNPVGAGISATININGVFYTRTTDANGYITLNI

SEQ ID NO: 53943 - protein, 13 aa, unidentified
  source 1..13: note = methanogen bacteria
VLDVDVYDVCYPD

SEQ ID NO: 53944 - protein, 27 aa, unidentified
  source 1..27: note = methanogen bacteria
AFAIVSASVDGEYIVSFNNKNYTVIVS

SEQ ID NO: 53945 - protein, 67 aa, unidentified
  source 1..67: note = methanogen bacteria
ESLVVSVANVSYGDIPLVFVNASVGGKYRVVVEGTDINKVVLINSSFSLSFVELPILGVKSNYNVNV

SEQ ID NO: 53946 - protein, 37 aa, unidentified
  source 1..37: note = methanogen bacteria
INVLFSVNPIPSSLNISDCEFVFGGVGNINFTYYGAL

SEQ ID NO: 53947 - protein, 20 aa, unidentified
  source 1..20: note = methanogen bacteria
ANIFIDDNHIILSNLDAGNY

SEQ ID NO: 53948 - protein, 18 aa, unidentified
  source 1..18: note = methanogen bacteria
KTVNVEVDKADPHLSLNV

SEQ ID NO: 53949 - protein, 50 aa, unidentified
  source 1..50: note = methanogen bacteria
NVSIILKSEVDGVYSVDINGSAVIVVVENGIGFLSIKKSVNVYNASVSLI

SEQ ID NO: 53950 - protein, 48 aa, unidentified
  source 1..48: note = methanogen bacteria
DYCIFSVYMNMTYEFIVEPKVASINYGESISFYAGINDDNATGNVIFF

SEQ ID NO: 53951 - protein, 79 aa, unidentified
  source 1..79: note = methanogen bacteria
PKFYDICVLPANSTINSNDLTVSYDANPININYVCENATGIMYHVYDMDKNLVEYSTVGLNEKITLYNLVVGKYSIILT

SEQ ID NO: 53952 - protein, 63 aa, unidentified
  source 1..63: note = methanogen bacteria
KQYMINIELGEIKLNTTIKSAKYPNDVIVTITTDISGKYQVFINNSYLKEINLVKNNPYNLII

SEQ ID NO: 53953 - protein, 25 aa, unidentified
  source 1..25: note = methanogen bacteria
EDIKIFKVYNGTINLNLDVSDISYP

SEQ ID NO: 53954 - protein, 29 aa, unidentified
  source 1..29: note = methanogen bacteria
LTINLKTNVSGKYRIQILERNFIKEINLI

SEQ ID NO: 53955 - protein, 21 aa, unidentified
  source 1..21: note = methanogen bacteria
IMESINLGILPPNSYTINISS

SEQ ID NO: 53956 - protein, 70 aa, unidentified
  source 1..70: note = methanogen bacteria
EAKSIQKIVKINESIDYHSTVIISKNTSLYYHNGTKLEAKLVDANGNAIINENIEFEINGKNYTRITDSN

SEQ ID NO: 53957 - protein, 98 aa, unidentified
  source 1..98: note = methanogen bacteria
IARIAINLDVGEYTVNIYYAGNKNQKSAKNTVIVSVLSTINGTNIVKIFHNDTQYYATFKDSKGNYLANGMEVTFNINGVMYHRKVNGNMGLVRLNIN

SEQ ID NO: 53958 - protein, 77 aa, unidentified
  source 1..77: note = methanogen bacteria
EYILTAINPVNNEMISNIIKVIPRIIENNDLVKYFKNNSQYRIKVLDDKGNAVGANEKVIFNINGVMYERFTDDDGY

SEQ ID NO: 53959 - protein, 77 aa, unidentified
  source 1..77: note = methanogen bacteria
ITAQYKGSMVSNKIKVLPIITAGDLIKKQGTPDAFKAKIVDGKGKPIAAQYVTFNINGVMYQRLTDNNGIAKLNINL

SEQ ID NO: 53960 - protein, 11 aa, unidentified
  source 1..11: note = methanogen bacteria
SNYVTVTNWVN

SEQ ID NO: 53961 - protein, 67 aa, unidentified
  source 1..67: note = methanogen bacteria
IKKDTPITASAVVNGNRVTLTVNVDENATGFVKVTVGSTVTNIEVVDGTATLTTVLVPNSYFVDVTY

SEQ ID NO: 53962 - protein, 21 aa, unidentified
  source 1..21: note = methanogen bacteria
KTSVTFTITDIAKKNTNIDLN

SEQ ID NO: 53963 - protein, 41 aa, unidentified
  source 1..41: note = methanogen bacteria
VYEDAALVKVDINESATGLVKFYMVGKESGEEYTMYMDVID

SEQ ID NO: 53964 - protein, 22 aa, unidentified
  source 1..22: note = methanogen bacteria
VATYMGDSVFNTNTTSKDVEIL

SEQ ID NO: 53965 - protein, 68 aa, unidentified
  source 1..68: note = methanogen bacteria
HLMKDTPIDVEVETNANRVTLTVKVDENATGFVEVKSGVSVSNIALENGEATLTITLPYGSYTLDVTY

SEQ ID NO: 53966 - protein, 35 aa, unidentified
  source 1..35: note = methanogen bacteria
EEYTLYADVINGKAVLEYVLLTGDYTVVATYMGDD

SEQ ID NO: 53967 - protein, 63 aa, unidentified
  source 1..63: note = methanogen bacteria
PISARADVSGNRVTLTVNVDENATGFVRLAVGGTVANIEVVDGVAKLTTNLLPNSYFVEVTYL

SEQ ID NO: 53968 - protein, 64 aa, unidentified
  source 1..64: note = methanogen bacteria
TKVTFTVTEVAKENTTIDLDVLVYEDTALIMVDLDKAATGLVKLYMVLKETGEDYTMYMDVVDG

SEQ ID NO: 53969 - protein, 48 aa, unidentified
  source 1..48: note = methanogen bacteria
VVNGNRVTLTVNVDENATGFVELKFGDNVFNIALTDGVGTLTTSLPYG

SEQ ID NO: 53970 - protein, 11 aa, unidentified
  source 1..11: note = methanogen bacteria
SLDITYLGDEN

SEQ ID NO: 53971 - protein, 39 aa, unidentified
  source 1..39: note = methanogen bacteria
EGLDAQIGKTFSRAGKKLGNEFLPSIKDLKKAFIELDNE

SEQ ID NO: 53972 - protein, 59 aa, unidentified
  source 1..59: note = methanogen bacteria
MFGPILSGQGTPMLLYMAKFSPFFLQHNMFYKWLSNDVKNIESVLNLPSVMDTVGIDCY

SEQ ID NO: 53973 - protein, 19 aa, unidentified
  source 1..19: note = methanogen bacteria
TVFGAYDGNVAEYGPDNYF

SEQ ID NO: 53974 - protein, 80 aa, unidentified
  source 1..80: note = methanogen bacteria
GDGGMLDDECEEEFDVVDVFVDAVYADLKDVGGVNVFGSAVQKTVVSSESDVLVNPSASKSIVSVANADKNIGFIPSMFS

SEQ ID NO: 53975 - protein, 35 aa, unidentified
  source 1..35: note = methanogen bacteria
DALIGKSFSRAGKKIGNEFLPQLKEIKKAFIEIDE

SEQ ID NO: 53976 - protein, 87 aa, unidentified
  source 1..87: note = methanogen bacteria
NTKLTFTVTEVSKENTAIDLNIIPVDEDSVVFVVSLNKSATGLVKFYIISKESGKNATSYMDVKNGYARIIVHDFDSGNYTVVATYM

SEQ ID NO: 53977 - protein, 10 aa, unidentified
  source 1..10: note = methanogen bacteria
AVIGAFVPTV

SEQ ID NO: 53978 - protein, 29 aa, unidentified
  source 1..29: note = methanogen bacteria
LEGSVYHDYSNLWGNALSFTMLGFSMGNL

SEQ ID NO: 53979 - protein, 81 aa, unidentified
  source 1..81: note = methanogen bacteria
GKGNDPFSEIYKDPIFKEALDNCLKDGMNSMETLRNAYPDLVNYWYKSVDALFSNPQASAQDVVNLFDTLNLITSTTAVNG

SEQ ID NO: 53980 - protein, 11 aa, unidentified
  source 1..11: note = methanogen bacteria
NTENNNIIEDH

SEQ ID NO: 53981 - protein, 18 aa, unidentified
  source 1..18: note = methanogen bacteria
ANNAIISNYLGPLNYLDS

SEQ ID NO: 53982 - protein, 16 aa, unidentified
  source 1..16: note = methanogen bacteria
LGIMYMSNSMVSYLSL

SEQ ID NO: 53983 - protein, 16 aa, unidentified
  source 1..16: note = methanogen bacteria
DDMQVSSVAAADFYDD

SEQ ID NO: 53984 - protein, 23 aa, unidentified
  source 1..23: note = methanogen bacteria
NDFNGDHMDIFGYKFPLFAFDSD

SEQ ID NO: 53985 - protein, 81 aa, unidentified
  source 1..81: note = methanogen bacteria
IRVVRYDANGGQGSTPATVFFCDGEGSLPENGFTREGYTFGGWSRKADGSDPISADAELSALGKIHFLKLYAVWNKEEVQQ

SEQ ID NO: 53986 - protein, 80 aa, unidentified
  source 1..80: note = methanogen bacteria
YTITSTNPATGENAANNITVLSTITGDDIVKYYKNGTQYTATFLDGEGNPLNNGTASFNINGVMYGRKIVNGTAKLNINL

SEQ ID NO: 53987 - protein, 83 aa, unidentified
  source 1..83: note = methanogen bacteria
GNLTDIVNSINNGTLISLINEAASKLNATLVNLTEAFKKVTVINGTEVDINATLAKLTNYVDFISKFKVENIAGFNATKSLEF

SEQ ID NO: 53988 - protein, 24 aa, unidentified
  source 1..24: note = methanogen bacteria
NTTSNIAAMLPSFDVNSSTLISPI

SEQ ID NO: 53989 - protein, 17 aa, unidentified
  source 1..17: note = methanogen bacteria
LSESIKAIDNGTLISLI

SEQ ID NO: 53990 - protein, 83 aa, unidentified
  source 1..83: note = methanogen bacteria
ENLTKGIGLYGDPEAPAVNVTVKFNINGVLYTRTTNATGDAKLNINLPVKDYVITTTYNGLSVANNIKVAEQFRIFTSLSSYF

SEQ ID NO: 53991 - protein, 12 aa, unidentified
  source 1..12: note = methanogen bacteria
NYLDIYFIFNDA

SEQ ID NO: 53992 - protein, 13 aa, unidentified
  source 1..13: note = methanogen bacteria
HVINGGRILEAYT

SEQ ID NO: 53993 - protein, 23 aa, unidentified
  source 1..23: note = methanogen bacteria
DYLFGVPSDRELEHFMWNNTNGY

SEQ ID NO: 53994 - protein, 13 aa, unidentified
  source 1..13: note = methanogen bacteria
NLVYGISIFTSHE

SEQ ID NO: 53995 - protein, 23 aa, unidentified
  source 1..23: note = methanogen bacteria
DWIFGVPSDRQLEHFMWNEINGY

SEQ ID NO: 53996 - protein, 35 aa, unidentified
  source 1..35: note = methanogen bacteria
EIGFNKFKNNKNGLILKNNNKIYSNTFSGNDMGIN

SEQ ID NO: 53997 - protein, 48 aa, unidentified
  source 1..48: note = methanogen bacteria
NTFKNNKICVVSNESNTFLGNVFYNNSMALKCLKSNKISNNTFSYNEK

SEQ ID NO: 53998 - protein, 13 aa, unidentified
  source 1..13: note = methanogen bacteria
ELFSNSFSYNTIG

SEQ ID NO: 53999 - protein, 17 aa, unidentified
  source 1..17: note = methanogen bacteria
SNNNIIKSNSFSNNYQN

SEQ ID NO: 54000 - protein, 20 aa, unidentified
  source 1..20: note = methanogen bacteria
RGNENKASGNIFKNNKYHAL

SEQ ID NO: 54001 - protein, 31 aa, unidentified
  source 1..31: note = methanogen bacteria
NIFKDTGNISLRVNGNSIKIKNNKFTGNKNT

SEQ ID NO: 54002 - protein, 13 aa, unidentified
  source 1..13: note = methanogen bacteria
TNSKKGILIHGDK

SEQ ID NO: 54003 - protein, 50 aa, unidentified
  source 1..50: note = methanogen bacteria
ISKNNITKSNKGLLIHGNHNNILQNVIKSNRIGVHNYKSKNNKINYNYIV

SEQ ID NO: 54004 - protein, 11 aa, unidentified
  source 1..11: note = methanogen bacteria
KDIMQMFYIKD

SEQ ID NO: 54005 - protein, 13 aa, unidentified
  source 1..13: note = methanogen bacteria
NLTSGISIFTSHT

SEQ ID NO: 54006 - protein, 23 aa, unidentified
  source 1..23: note = methanogen bacteria
DFIFGVPSDRNLEHFMWNNVNGY

SEQ ID NO: 54007 - protein, 10 aa, unidentified
  source 1..10: note = methanogen bacteria
RAVRTHPLSL

SEQ ID NO: 54008 - protein, 13 aa, unidentified
  source 1..13: note = methanogen bacteria
LNLYAGIPIFSSR

SEQ ID NO: 54009 - protein, 23 aa, unidentified
  source 1..23: note = methanogen bacteria
DYLFGVPSDRDLEHFMWNNVNGY

SEQ ID NO: 54010 - protein, 16 aa, unidentified
  source 1..16: note = methanogen bacteria
DDMQVSSVAAADFYDD

SEQ ID NO: 54011 - protein, 23 aa, unidentified
  source 1..23: note = methanogen bacteria
NDFNGDHMDIFGYKFPLFAFDSD

SEQ ID NO: 54012 - protein, 11 aa, unidentified
  source 1..11: note = methanogen bacteria
DELIHSGAGEV

SEQ ID NO: 54013 - protein, 21 aa, unidentified
  source 1..21: note = methanogen bacteria
IDGNNKTIDGGDLSRIFIVSA

SEQ ID NO: 54014 - protein, 46 aa, unidentified
  source 1..46: note = methanogen bacteria
GMSNEELMMFSSTVNDVGQRAILMGKSGEEAISLMQAAGRGLNGEF

SEQ ID NO: 54015 - protein, 83 aa, unidentified
  source 1..83: note = methanogen bacteria
ETLTDLGWSGAADDVEGYQMALDKALEKGGDMDGMLDTTTGHLETLKKNFRVAGRHVGEMFTPYIDMAVQKLNDLNDRFPGLF

SEQ ID NO: 54016 - protein, 57 aa, unidentified
  source 1..57: note = methanogen bacteria
TAGLHRLWSAFINNPNVQGFLKDLSNAWNDICEALAPVIDWARKAWNELFPPSATGS

SEQ ID NO: 54017 - protein, 15 aa, unidentified
  source 1..15: note = methanogen bacteria
GKVVNSAKSAWEAIG

SEQ ID NO: 54018 - protein, 41 aa, unidentified
  source 1..41: note = methanogen bacteria
AFGPSHSMSLSEAAGNLISAIDKGGKGLTNDELYVYESRLP

SEQ ID NO: 54019 - protein, 16 aa, unidentified
  source 1..16: note = methanogen bacteria
IASGFTLWGLLGNSDF

SEQ ID NO: 54020 - protein, 30 aa, unidentified
  source 1..30: note = methanogen bacteria
TVILTTSDSEDLQNAVSWLYGSFTSVDWDN

SEQ ID NO: 54021 - protein, 11 aa, unidentified
  source 1..11: note = methanogen bacteria
RMIMIPQELPV

SEQ ID NO: 54022 - protein, 30 aa, unidentified
  source 1..30: note = methanogen bacteria
DLIHSGVNEIVLDADIVLDKWERPKYAEGI

SEQ ID NO: 54023 - protein, 49 aa, unidentified
  source 1..49: note = methanogen bacteria
DVDRLVIDGNGHSIDACGKVGIFRCSGKNITIKNTTFKNGLSVGGGAIY

SEQ ID NO: 54024 - protein, 13 aa, unidentified
  source 1..13: note = methanogen bacteria
FEGNVSPYGSGIS

SEQ ID NO: 54025 - protein, 13 aa, unidentified
  source 1..13: note = methanogen bacteria
SNVINNKKDLTFM

SEQ ID NO: 54026 - protein, 23 aa, unidentified
  source 1..23: note = methanogen bacteria
DFSYLNSLIQESTDGIVSLENDI

SEQ ID NO: 54027 - protein, 10 aa, unidentified
  source 1..10: note = methanogen bacteria
LENYELDFFE

SEQ ID NO: 54028 - protein, 57 aa, unidentified
  source 1..57: note = methanogen bacteria
ITEDNITIEGNNHIIDAKNRTRIFQILGKNITIKKIIFKNGYASNKYGEHINGGGAI

SEQ ID NO: 54029 - protein, 22 aa, unidentified
  source 1..22: note = methanogen bacteria
TLEDCQFIENTSDNDGGAIQNN

SEQ ID NO: 54030 - protein, 13 aa, unidentified
  source 1..13: note = methanogen bacteria
NENNKFFNYDTKS

SEQ ID NO: 54031 - protein, 39 aa, unidentified
  source 1..39: note = methanogen bacteria
EIVDSGFYNNSSKNKSLINNNGELIIINTNFTNNNSQSE

SEQ ID NO: 54032 - protein, 25 aa, unidentified
  source 1..25: note = methanogen bacteria
QVLVKNSNFTNNSSTKNGGAIICRE

SEQ ID NO: 54033 - protein, 74 aa, unidentified
  source 1..74: note = methanogen bacteria
TIFEIKDSRFVNNNSNLKGGAIYSDGDEFKLHDCIFNGNHAFSVGGAIYNHGKLSCKNTDFTNNSAQNHGGAIA

SEQ ID NO: 54034 - protein, 23 aa, unidentified
  source 1..23: note = methanogen bacteria
DSGNVADCYFAGNTASSSGGAVS

SEQ ID NO: 54035 - protein, 23 aa, unidentified
  source 1..23: note = methanogen bacteria
CNFTSNEANGEKSSGGAIYFNGA

SEQ ID NO: 54036 - protein, 48 aa, unidentified
  source 1..48: note = methanogen bacteria
NVTNSIFTANKATRTGGAIFFKDNSVDNKFVADFYGNSAGQSGGAIFF

SEQ ID NO: 54037 - protein, 44 aa, unidentified
  source 1..44: note = methanogen bacteria
NTFDCIFKDNYAAYGGAMFFYKKANGNKIGGDFINNTAKSCGGA

SEQ ID NO: 54038 - protein, 21 aa, unidentified
  source 1..21: note = methanogen bacteria
SFINNSALGQVDSENGNGGAI

SEQ ID NO: 54039 - protein, 50 aa, unidentified
  source 1..50: note = methanogen bacteria
KETSMSIKVDDDEIVIELPEDATGNVTVSIDGKPQTVPVSGGRAVVDISG

SEQ ID NO: 54040 - protein, 10 aa, unidentified
  source 1..10: note = methanogen bacteria
VTYPGDDNYD

SEQ ID NO: 54041 - protein, 67 aa, unidentified
  source 1..67: note = methanogen bacteria
VSNSTSFEVPKVSDYPIDITEEDGKLVITVPDDATGSVTVSIDGKPQTVPVEDGKAVVDISGLEPGK

SEQ ID NO: 54042 - protein, 99 aa, unidentified
  source 1..99: note = methanogen bacteria
GVEVTYPGDKKYAPVSNATIVDIPKVVDYPFEVIAEDINVGQKTNITVNLPKDINGQVLVDIGGVGYYVTVTNGVAHIELPLDLKPGSYDAVVTFPGNE

SEQ ID NO: 54043 - protein, 25 aa, unidentified
  source 1..25: note = methanogen bacteria
NWTNVVVAKSNLTENKSADNVTFVE

SEQ ID NO: 54044 - protein, 71 aa, unidentified
  source 1..71: note = methanogen bacteria
LGNETYFMVIVKNTGNCDLHDIRVVEIFNSTEMAYVNHNKQNLWVKTGDVFAYQGVLAKGESVNFTIWFKT

SEQ ID NO: 54045 - protein, 10 aa, unidentified
  source 1..10: note = methanogen bacteria
ESENLTVMNN

SEQ ID NO: 54046 - protein, 13 aa, unidentified
  source 1..13: note = methanogen bacteria
DVYFMIVVTNIGN

SEQ ID NO: 54047 - protein, 37 aa, unidentified
  source 1..37: note = methanogen bacteria
DNVTVYEIYDSNELDSITLINGKKWTQFGNTFIYDGR

SEQ ID NO: 54048 - protein, 70 aa, unidentified
  source 1..70: note = methanogen bacteria
FVNDTVLWTITIVNVGPSVAKGVIVNDTLPDGVEIIGTISNGGQQSGRNIVWNIGDLKVKDLIVLTFATK

SEQ ID NO: 54049 - protein, 10 aa, unidentified
  source 1..10: note = methanogen bacteria
RSNNKAINTT

SEQ ID NO: 54050 - protein, 63 aa, unidentified
  source 1..63: note = methanogen bacteria
VLWTISVVNVGPSTAKDVIVNDTLPDGVIVIGEIPYHGVISGNTIVWKLGDLQVNAPVIITFT

SEQ ID NO: 54051 - protein, 63 aa, unidentified
  source 1..63: note = methanogen bacteria
KWTITVVNNGPSAAKDVVVNDTIPSGLEFVVPENCTFDGKYLIWNIATLEVNAPVTLELITKV

SEQ ID NO: 54052 - protein, 70 aa, unidentified
  source 1..70: note = methanogen bacteria
YVNDMVEWTIIVLNRGPSSAVGVVVNDTLPDGLEIISATPSVGEFNNKTRVWEIEKLDINEPVSLILVTK

SEQ ID NO: 54053 - protein, 14 aa, unidentified
  source 1..14: note = methanogen bacteria
DSNESNNHAQNTTV

SEQ ID NO: 54054 - protein, 62 aa, unidentified
  source 1..62: note = methanogen bacteria
KWNITVVNNGPSTARDVVVNDKLPDGVRLLKVPEGCTQKGNTVIWNIGNLKTNVPVSITLLT

SEQ ID NO: 54055 - protein, 59 aa, unidentified
  source 1..59: note = methanogen bacteria
VNAITVNLTDLVKWTIVVKNNGPSTARDVMVADVLPDGLKLIGADASVGSYSNGVWNVG

SEQ ID NO: 54056 - protein, 12 aa, unidentified
  source 1..12: note = methanogen bacteria
TDSSSETLVLIT

SEQ ID NO: 54057 - protein, 76 aa, unidentified
  source 1..76: note = methanogen bacteria
MSNNRANNTTDVKPVCDVEVTKLVNASEIYFNDLVEWTVVVKNNGPSTARDVKVVDVLPDGLKLVGADASVGSYSN

SEQ ID NO: 54058 - protein, 12 aa, unidentified
  source 1..12: note = methanogen bacteria
HSGAKEIALHSD

SEQ ID NO: 54059 - protein, 14 aa, unidentified
  source 1..14: note = methanogen bacteria
GNGHTIDAKGKARI

SEQ ID NO: 54060 - protein, 11 aa, unidentified
  source 1..11: note = methanogen bacteria
LVKFTIVVNNT

SEQ ID NO: 54061 - protein, 86 aa, unidentified
  source 1..86: note = methanogen bacteria
VMNATNVVVSDILPDEFVFYKVSEGNVTDGQKVSWTIDKFNTGDVKTFWIIARTIATNATTNVVTVTSKENKTNVTGKAVVNVVEI

SEQ ID NO: 54062 - protein, 48 aa, unidentified
  source 1..48: note = methanogen bacteria
TNVTICDVLPNGFVFDRAIDGYTRTGQEIKWHFDTVKSGEVIELWITA

SEQ ID NO: 54063 - protein, 45 aa, unidentified
  source 1..45: note = methanogen bacteria
TICDVLPDGFTFVDASEGYNQTGQKVEWYFDTLTKGVYQLWIVAK

SEQ ID NO: 54064 - protein, 49 aa, unidentified
  source 1..49: note = methanogen bacteria
ATNVTIRDVLPNGLAFINATGDKIVNGQEITWHFDTLTKGYYEFEIVAK

SEQ ID NO: 54065 - protein, 94 aa, unidentified
  source 1..94: note = methanogen bacteria
TVIKEVDVKSVDVLGLVNFTITVTNIGKINVTDVSFTDIMDLSAFEIKGYNGTFKPDGNELLFEIGSLKVGETYKVWIQAKALTNGTFTNVVNV

SEQ ID NO: 54066 - protein, 67 aa, unidentified
  source 1..67: note = methanogen bacteria
NFTIEVTNEDVLNATYLFIYDMIPGGFEFVNATEGYYKEGNMVFWQFERLSNGSSIKLWIVLKTKEV

SEQ ID NO: 54067 - protein, 25 aa, unidentified
  source 1..25: note = methanogen bacteria
NLTNEVEVYYAENSYRVYTNSTVEV

SEQ ID NO: 54068 - protein, 20 aa, unidentified
  source 1..20: note = methanogen bacteria
TAGADEIYLNEEITFTINVT

SEQ ID NO: 54069 - protein, 59 aa, unidentified
  source 1..59: note = methanogen bacteria
NVTVIDVVPYGFEFVKSNATGYDNKTGRLTVPVIEAGKSYIFTITLKAITNGTLTNYVN

SEQ ID NO: 54070 - protein, 85 aa, unidentified
  source 1..85: note = methanogen bacteria
ENVTVVNTTSDVNVLPVVNLTVNKTVDVTVIYVNDEVTFTVNVTNNGPSNATGVKGYDNVTGVLNIDLIEAGESYVFTITLKPMT

SEQ ID NO: 54071 - protein, 11 aa, unidentified
  source 1..11: note = methanogen bacteria
KNSSISVNVTP

SEQ ID NO: 54072 - protein, 21 aa, unidentified
  source 1..21: note = methanogen bacteria
TVDVTVIYVNDEVTFTVNVTN

SEQ ID NO: 54073 - protein, 47 aa, unidentified
  source 1..47: note = methanogen bacteria
TQMYHKNELLEDFIEKHFHNGTYDKTAAEKIKNQTYYLIDNYSIWSG

SEQ ID NO: 54074 - protein, 13 aa, unidentified
  source 1..13: note = methanogen bacteria
SNFIEEDNPERLN

SEQ ID NO: 54075 - protein, 16 aa, unidentified
  source 1..16: note = methanogen bacteria
DDMQVSSVAAADFYDD

SEQ ID NO: 54076 - protein, 23 aa, unidentified
  source 1..23: note = methanogen bacteria
NDFNGDHMDIFGYKFPLFAFDSD

SEQ ID NO: 54077 - protein, 16 aa, unidentified
  source 1..16: note = methanogen bacteria
DDMQVSSVAAADFYDD

SEQ ID NO: 54078 - protein, 23 aa, unidentified
  source 1..23: note = methanogen bacteria
NDFNGDHMDIFGYKFPLFAFDSD

SEQ ID NO: 54079 - protein, 12 aa, unidentified
  source 1..12: note = methanogen bacteria
YAKTYSAKLKVY

SEQ ID NO: 54080 - protein, 41 aa, unidentified
  source 1..41: note = methanogen bacteria
QGLDALIGKAFSRAGKKIGNDFLPFLKDIKKGFLELDDSLG

SEQ ID NO: 54081 - protein, 26 aa, unidentified
  source 1..26: note = methanogen bacteria
ISNTYDVSQSRAKVLVTLMTGCALAG

SEQ ID NO: 54082 - protein, 49 aa, unidentified
  source 1..49: note = methanogen bacteria
GMFGIDFFVDFLPFDYAMYYGWGEFAAWMSLNGVLGMGMVAALYNCVLM

SEQ ID NO: 54083 - protein, 13 aa, unidentified
  source 1..13: note = methanogen bacteria
KKGAEDLYKTVDK

SEQ ID NO: 54084 - protein, 10 aa, unidentified
  source 1..10: note = methanogen bacteria
IGITDDMANF

SEQ ID NO: 54085 - protein, 48 aa, unidentified
  source 1..48: note = methanogen bacteria
KELMETNQGLDALIGKAFSRAGKKLGNEFLPQIKDIKRAFLDMDNNMG

SEQ ID NO: 54086 - protein, 37 aa, unidentified
  source 1..37: note = methanogen bacteria
AMNRERMTALTSATMGSAAAGESFVNTMDKLTDTSLV

SEQ ID NO: 54087 - protein, 42 aa, unidentified
  source 1..42: note = methanogen bacteria
QELQNFTTTVNDVGQRAILMGKSGEEAVSLMQAAGRGLNGEF

SEQ ID NO: 54088 - protein, 83 aa, unidentified
  source 1..83: note = methanogen bacteria
EQLMDLGWSGAADDVEGYQKALDKALEAGGSMEGMMNTTTGKLETLKKNFRVAGRHVGEMFTPYIEQAVGWLNNLQKTCPGLF

SEQ ID NO: 54089 - protein, 40 aa, unidentified
  source 1..40: note = methanogen bacteria
GKAFGWWDSVQGMLGAIWAGINRLWSAFINHPDVQAAIQA

SEQ ID NO: 54090 - protein, 10 aa, unidentified
  source 1..10: note = methanogen bacteria
SGAVKAILEF

SEQ ID NO: 54091 - protein, 19 aa, unidentified
  source 1..19: note = methanogen bacteria
ITGQMDLQTALITIWNLIK

SEQ ID NO: 54092 - protein, 14 aa, unidentified
  source 1..14: note = methanogen bacteria
YNEFAKIPGKIRDA

SEQ ID NO: 54093 - protein, 67 aa, unidentified
  source 1..67: note = methanogen bacteria
VSNSTSFEVPKVSDYPIDITEKDGKLVITVPDDATGSVTVSIDGKPQTVPVSGGKAVVDISGLEPGK

SEQ ID NO: 54094 - protein, 41 aa, unidentified
  source 1..41: note = methanogen bacteria
CVGSPTSLGPGEAISALFSAIGKGGKHLTYEEMLVYNSRLP

SEQ ID NO: 54095 - protein, 17 aa, unidentified
  source 1..17: note = methanogen bacteria
ILTDFTFFGLFAADSIY

SEQ ID NO: 54096 - protein, 29 aa, unidentified
  source 1..29: note = methanogen bacteria
SLMMIDAGTKASSALSWLYGSFASITWDK

SEQ ID NO: 54097 - protein, 11 aa, unidentified
  source 1..11: note = methanogen bacteria
FSDILDTPVIW

SEQ ID NO: 54098 - protein, 62 aa, unidentified
  source 1..62: note = methanogen bacteria
QKLDALKAEIKPLRDDARIGRLDEEGQALLSQKEKELSEAKREFKAYWKGRREERYKMLGIQ

SEQ ID NO: 54099 - protein, 56 aa, unidentified
  source 1..56: note = methanogen bacteria
DASGNVNGTFINNVANQGGAIAVGDEGKISGNVNGIFINNTGYHSGGAISIDDTVR

SEQ ID NO: 54100 - protein, 34 aa, unidentified
  source 1..34: note = methanogen bacteria
VADNSGVVSVDEDGTVKALKEGKANITVKVGDAK

SEQ ID NO: 54101 - protein, 11 aa, unidentified
  source 1..11: note = methanogen bacteria
AVLLDTPVIWL

SEQ ID NO: 54102 - protein, 63 aa, unidentified
  source 1..63: note = methanogen bacteria
EQKLDALKAEIKPLRDDNRIGRLDEAGQALLAQKEKELSEAKREFKAYWKGRREERYKMLGIQ

SEQ ID NO: 54103 - protein, 13 aa, unidentified
  source 1..13: note = methanogen bacteria
INASSQLQYFGQR

SEQ ID NO: 54104 - protein, 17 aa, unidentified
  source 1..17: note = methanogen bacteria
IAQFSKSLETLQTQFKK

SEQ ID NO: 54105 - protein, 37 aa, unidentified
  source 1..37: note = methanogen bacteria
GKAFGWWDNVGEMLGAIWAGINRLWSAFINHPDVQAA

SEQ ID NO: 54106 - protein, 10 aa, unidentified
  source 1..10: note = methanogen bacteria
SGAVKAILEF

SEQ ID NO: 54107 - protein, 18 aa, unidentified
  source 1..18: note = methanogen bacteria
TGQMDLQTALITIWSLIK

SEQ ID NO: 54108 - protein, 11 aa, unidentified
  source 1..11: note = methanogen bacteria
FDGILDTPVIW

SEQ ID NO: 54109 - protein, 65 aa, unidentified
  source 1..65: note = methanogen bacteria
EREQKLDALKAEIKPLKDDARIGRLDEEGKALLAQKEQELREAQKEFKAYWKGRREERYKMLGIQ

SEQ ID NO: 54110 - protein, 24 aa, unidentified
  source 1..24: note = methanogen bacteria
AVYMYHSITVSNSKFKKNSVERSG

SEQ ID NO: 54111 - protein, 17 aa, unidentified
  source 1..17: note = methanogen bacteria
DEAHIHGCLFESNKADG

SEQ ID NO: 54112 - protein, 11 aa, unidentified
  source 1..11: note = methanogen bacteria
KADDYSGGAIR

SEQ ID NO: 54113 - protein, 19 aa, unidentified
  source 1..19: note = methanogen bacteria
IYADDNVYVTHCLFEDNKA

SEQ ID NO: 54114 - protein, 22 aa, unidentified
  source 1..22: note = methanogen bacteria
CTFRNNYAENEGGAIYSDTLIL

SEQ ID NO: 54115 - protein, 39 aa, unidentified
  source 1..39: note = methanogen bacteria
GNYDIEINVYGINTTFMEIVPSIISHLRIKTVKIYKVVF

SEQ ID NO: 54116 - protein, 52 aa, unidentified
  source 1..52: note = methanogen bacteria
DNYTFFRYNFETGEVTETLPSYYNLVDYGFVSTVKSQSNGGNCWAFATVGSL

SEQ ID NO: 54117 - protein, 11 aa, unidentified
  source 1..11: note = methanogen bacteria
IYGCNMMTEGG

SEQ ID NO: 54118 - protein, 80 aa, unidentified
  source 1..80: note = methanogen bacteria
MENPYEESTVWLFINGTADPEQISILSTSKIRFKLYAYNEDTGEITEFDDQMHPVNLRLISINEILSNNTVGLGDNITYS

SEQ ID NO: 54119 - protein, 21 aa, unidentified
  source 1..21: note = methanogen bacteria
LTNFFNTISQNKNAMDNLRNL

SEQ ID NO: 54120 - protein, 20 aa, unidentified
  source 1..20: note = methanogen bacteria
TTIEDVCKTCKEKLGDLGKE

SEQ ID NO: 54121 - protein, 26 aa, unidentified
  source 1..26: note = methanogen bacteria
GDALKWVSDQGEKIMKWLNDNPDVLY

SEQ ID NO: 54122 - protein, 27 aa, unidentified
  source 1..27: note = methanogen bacteria
SDSLKGESVSKSFEIKEIEDLISDDQS

SEQ ID NO: 54123 - protein, 83 aa, unidentified
  source 1..83: note = methanogen bacteria
FAYGVSAGDNYALSGGSSASSHLRIVTEILAGTYDPANQATINFPYGSGSISGPLFDYLMAAIAYVVTLCGVSQATAAAGTLA

SEQ ID NO: 54124 - protein, 11 aa, unidentified
  source 1..11: note = methanogen bacteria
MTTAFSNGTEN

SEQ ID NO: 54125 - protein, 12 aa, unidentified
  source 1..12: note = methanogen bacteria
YYIPLGLWSTVF

SEQ ID NO: 54126 - protein, 36 aa, unidentified; identical to SEQ ID NO: 53915
  source 1..36: note = methanogen bacteria

SEQ ID NO: 54127 - protein, 32 aa, unidentified
  source 1..32: note = methanogen bacteria
SVETMKNVVSDLSETTGRAGSQIRESFIKATA

SEQ ID NO: 54128 - protein, 44 aa, unidentified
  source 1..44: note = methanogen bacteria
DSFQKMMEGAGAQATLFGTDIQSMGDKFSGLAMKDTLMQKTLAE

SEQ ID NO: 54129 - protein, 99 aa, unidentified
  source 1..99: note = methanogen bacteria
TADEVKAKWKELDTNQRAAILGTAASMNEGKNANDNYKTSWAGLQEQMNVAKGRLERIAGEVLLPVLVPAMQIATDILQGLGDVISGVMSGPLGGFVSI

SEQ ID NO: 54130 - protein, 50 aa, unidentified
  source 1..50: note = methanogen bacteria
GKAFGWWTDVGSMIDAIGAGLQRMWDAFINHPDVQAAISMVSNALSTLWS

SEQ ID NO: 54131 - protein, 22 aa, unidentified
  source 1..22: note = methanogen bacteria
GVLTGQMDIQTAILSIWTSLSA

SEQ ID NO: 54132 - protein, 49 aa, unidentified
  source 1..49: note = methanogen bacteria
EENHILFMNVTDGQSIITDVLTPGDYTVDITYLGDVNYNKNATTETFTI

SEQ ID NO: 54133 - protein, 25 aa, unidentified
  source 1..25: note = methanogen bacteria
IKKDTAISSTATVKNGTVTITTNVD

SEQ ID NO: 54134 - protein, 19 aa, unidentified
  source 1..19: note = methanogen bacteria
QTFIVPVDNGRAVFTYDFN

SEQ ID NO: 54135 - protein, 74 aa, unidentified
  source 1..74: note = methanogen bacteria
IIMISSSDCTAISADYLSDSKLKSNNINIISNGTSLGFDLSNSLDGVELSGNEIIIHADKNAYLIKLSNVNNST

SEQ ID NO: 54136 - protein, 77 aa, unidentified
  source 1..77: note = methanogen bacteria
GDVDSASFTILKTTPTINVNTVNVNYPNDITVNIISNIDGTYIVKIANKTQNVNLKTNTPKQVRFTDLNAGNYNVSV

SEQ ID NO: 54137 - protein, 84 aa, unidentified
  source 1..84: note = methanogen bacteria
NAVLKNTPVNILKASSKVSINTIGNHEYGKGFDVNFHVVNHTSVSYIIKSKNGNVVVNATADSLNKISIPVLDAGEYIVTVFNC

SEQ ID NO: 54138 - protein, 80 aa, unidentified
  source 1..80: note = methanogen bacteria
TGDEASVNFTILKVTPNITVSVSDVGYPGNVIINVKSDVTGSYTVRVGKVSKTVDLVENKQSKVVFNGLNPGSYDVFVGY

SEQ ID NO: 54139 - protein, 87 aa, unidentified
  source 1..87: note = methanogen bacteria
INYNSVLKNTIVKVFKADSSVVINPISNVTYNNPTSIEFNIINRTKVTYIVKSISGEIVVKNTTVSGNSADISNLAVGNYIITIANA

SEQ ID NO: 54140 - protein, 81 aa, unidentified
  source 1..81: note = methanogen bacteria
NGYEQSKEFTISKATNNVEVNVVNTLLPDSVAVNIKADVDGVYNVSFGEFSVCVNVESGEGFAKIDLPMGIDYITTTSFAD

SEQ ID NO: 54141 - protein, 10 aa, unidentified
  source 1..10: note = methanogen bacteria
ELIHSGAKEI

SEQ ID NO: 54142 - protein, 14 aa, unidentified
  source 1..14: note = methanogen bacteria
GINPLFATIGSFQL

SEQ ID NO: 54143 - protein, 97 aa, unidentified
  source 1..97: note = methanogen bacteria
PAANINGIPSELKGDYVDSSGLPYFSEMDSYYNLRMTQDYFDHGYYGDALVNNTQIDNHRYSPFGANTTNDLGIAVTTTWLHSLAQFFGDFDIKTVA

SEQ ID NO: 54144 - protein, 57 aa, unidentified
  source 1..57: note = methanogen bacteria
DSFGIVGIIGNVLSGFALQAKTTLSGFPNVSISIGELQIPNLISGGVTGAFLADSGS

SEQ ID NO: 54145 - protein, 100 aa, unidentified
  source 1..100: note = methanogen bacteria
PAADLNLLPNEIKGSYVDSTGLPYFSEMDSYYNLRLTENYVDHGFVGDIKYDNNGTQMDMHRYAPDGNVINYELGIVYVTSFLHDMVNKFIGSHGIREVA

SEQ ID NO: 54146 - protein, 57 aa, unidentified
  source 1..57: note = methanogen bacteria
GFDTTVGIFGSLLNLLSLQSAARVVGGFPNVLISVAEMQMPSMLGSGMASPFLASTN

SEQ ID NO: 54147 - protein, 99 aa, unidentified
  source 1..99: note = methanogen bacteria
PAADLNILPNEIKGDYVDSSGLPYFSEMDSYYNLRLTEDYVDHGFVGDIDNGDGTYRDMHRYAPDGNIINYELGIVYLTSFLHDMANKFFGSYNIREVA

SEQ ID NO: 54148 - protein, 58 aa, unidentified
  source 1..58: note = methanogen bacteria
GVDSVLGIFNSLLSLLSLQSAARVAGGFPNVLISVAEMQMPNLLGAGMGSAFLANTNG

SEQ ID NO: 54149 - protein, 15 aa, unidentified
  source 1..15: note = methanogen bacteria
TPYEGSLSIGIYGDD

SEQ ID NO: 54150 - protein, 27 aa, unidentified
  source 1..27: note = methanogen bacteria
SSDVGVVKVVDGKLVAVGVGSAVVNVS

SEQ ID NO: 54151 - protein, 45 aa, unidentified
  source 1..45: note = methanogen bacteria
SADDLKIYVDGVAAINPVTSPGGLDLLYSIADKNIADVDASGKVI

SEQ ID NO: 54152 - protein, 11 aa, unidentified
  source 1..11: note = methanogen bacteria
IKEGTTSITIT

SEQ ID NO: 54153 - protein, 100 aa, unidentified
  source 1..100: note = methanogen bacteria
APAHDLNAFNDAESKALYTDPSGLPYFSEMDSYYHLRLTESYVDTGILGDEVINGTQMDMHRNAPDGRPWDYTPGIIYLTSYLYDLANQYLGHYSVKEVA

SEQ ID NO: 54154 - protein, 58 aa, unidentified
  source 1..58: note = methanogen bacteria
KGVDSVIGIFSQVFNLLSLQSASQVVGGFPNVLISVAEMQMPAMLGAGMTSMFLASTD

SEQ ID NO: 54155 - protein, 11 aa, unidentified
  source 1..11: note = methanogen bacteria
NTAKEDGGAIF

SEQ ID NO: 54156 - protein, 18 aa, unidentified
  source 1..18: note = methanogen bacteria
SSNKTTFNIFIKSILEVS

SEQ ID NO: 54157 - protein, 94 aa, unidentified
  source 1..94: note = methanogen bacteria
PAADLPGISDELKGDYIDSSGLPYFSEMDSYYNYRLTNDYVEHGYVGDQIINGSEWDMHRYAPTGNQINYELGIVYVTSFFHDMFSDHSVKEVA

SEQ ID NO: 54158 - protein, 10 aa, unidentified
  source 1..10: note = methanogen bacteria
SHTYPGFFDT

SEQ ID NO: 54159 - protein, 57 aa, unidentified
  source 1..57: note = methanogen bacteria
GIEGVTGIFGSLTGLLSLQSASRVVGGFPNVLVSVAEMQLPSLLGAGMPSAFLANTN

SEQ ID NO: 54160 - protein, 94 aa, unidentified
  source 1..94: note = methanogen bacteria
PAADLNILSDDMKGEYIDSSGLPYFSEMDSYYNYRLTNDYVEHGFVGDEMVNGSEWDMHRYAPTGNKINYELGIVYITSFFHSLFPDHTVKEVA

SEQ ID NO: 54161 - protein, 10 aa, unidentified
  source 1..10: note = methanogen bacteria
AHTFPGFFDT

SEQ ID NO: 54162 - protein, 58 aa, unidentified
  source 1..58: note = methanogen bacteria
RGIDGVTGLFGNLLGLLSLQSASRAINGFPNVLVSVAEMQLPSLLGSGMTSAFLASTD

SEQ ID NO: 54163 - protein, 99 aa, unidentified
  source 1..99: note = methanogen bacteria
PAADLNILPNEIKGDYVDSSGLPYFSEMDSYYNLRLTENYVNNGHVGDIDYGNGTQMDMHRYAPDGNVIDYEFGIVYITSFLHDIANQYFGSHGIREVA

SEQ ID NO: 54164 - protein, 59 aa, unidentified
  source 1..59: note = methanogen bacteria
RGIDGVLGIFGTLFGLLSLQSAGTVVGGFPNVLISVAEMQMPNLLGAGMGSAFLANSNG

SEQ ID NO: 54165 - protein, 97 aa, unidentified
  source 1..97: note = methanogen bacteria
PAADLTILPSDVKGDYVDSTGLPYFSEMDSYYNLRLTENYIDHGYAGDTIINNTEVDMHRLAPEGVNVSYELGISYVTALLHSLAGNFGDYSVKEVA

SEQ ID NO: 54166 - protein, 58 aa, unidentified
  source 1..58: note = methanogen bacteria
GFDFLTGIFSTLISMFSLQSASSAVGGFPNVMISVAEMQAPSLLGSGMGSAFLANSNG

SEQ ID NO: 54167 - protein, 99 aa, unidentified
  source 1..99: note = methanogen bacteria
PAADLNILPNEIKGDYVDSSGLPYFSEMDSYYNLRLTENYVDHGYVGDIKYDNGTQMDMHRYAPDGNVINYELGIVYVTSFIHDIVNQFFGHHGIREVA

SEQ ID NO: 54168 - protein, 58 aa, unidentified
  source 1..58: note = methanogen bacteria
GVDTVIGIFGSLLNLLSLQSTARVVGGFPNVLISVAEMQMPNLLGAGMGSAFLANSNG

SEQ ID NO: 54169 - protein, 94 aa, unidentified
  source 1..94: note = methanogen bacteria
PAADLNAIPDSARGDYVDSSGLPYFSEMDSYYNLRLTEDYVDHGFVGDEKINGSEWDMHRYAPTGNEINYELGIVYVTSFLHSIFGDHSVREIA

SEQ ID NO: 54170 - protein, 10 aa, unidentified
  source 1..10: note = methanogen bacteria
AHTFPGFFDT

SEQ ID NO: 54171 - protein, 58 aa, unidentified
  source 1..58: note = methanogen bacteria
GIGGVTGIFGSLTGLLSLQSASRTIGGFPNVLISVAEMQMPNLLGGGMAAPFLANTNG

SEQ ID NO: 54172 - protein, 11 aa, unidentified
  source 1..11: note = methanogen bacteria
YFNTETELADD

SEQ ID NO: 54173 - protein, 36 aa, unidentified
  source 1..36: note = methanogen bacteria
PAVGISPDGYDFTNASEAVLSGKPLDSIDSLLPVAV

SEQ ID NO: 54174 - protein, 18 aa, unidentified
  source 1..18: note = methanogen bacteria
ITPLWEAISGCTDLLSIP

SEQ ID NO: 54175 - protein, 98 aa, unidentified
  source 1..98: note = methanogen bacteria
QAADIGGVPNQLKANYIDADGLPYFSEMDSYFNYRMTQDYMDHGYLGDTLVNGSEWDMHSYYPTGRDVSSYQPMIAYVTSFLHGIVNMFQNMPLKEVA

SEQ ID NO: 54176 - protein, 11 aa, unidentified
  source 1..11: note = methanogen bacteria
SHTFAGFFDTD

SEQ ID NO: 54177 - protein, 56 aa, unidentified
  source 1..56: note = methanogen bacteria
GFDGILNAIGGLTGGFSLQSAANDVWPNVFISVAEMQIPKLLYGGLPGAFLANTNG

SEQ ID NO: 54178 - protein, 94 aa, unidentified; identical to SEQ ID NO: 54169
  source 1..94: note = methanogen bacteria

SEQ ID NO: 54179 - protein, 10 aa, unidentified
  source 1..10: note = methanogen bacteria
AHTFPGFFDT

SEQ ID NO: 54180 - protein, 58 aa, unidentified
  source 1..58: note = methanogen bacteria
GIEGVTGIFGSLTGLLSLQSASRTIGGFPNVLISVAEMQMPSLLGSGMTSAFLANTNG

SEQ ID NO: 54181 - protein, 99 aa, unidentified
  source 1..99: note = methanogen bacteria
TPAADLNFLDGDMKGDFVDSSGLPYFSEMDSYYNLRLTEDYLDHGFVGDIQENGHNVDMHRYAPDGNNISYELGIVYVTSFFHDMANKYIGEFSVREVA

SEQ ID NO: 54182 - protein, 57 aa, unidentified
  source 1..57: note = methanogen bacteria
GIDGILGIFNSLLSLLSLQSASRSIGGFPNVLISVGEMQMPNLLGSGMGSAFLASTD

SEQ ID NO: 54183 - protein, 10 aa, unidentified
  source 1..10: note = methanogen bacteria
SHTFAGFFDT

SEQ ID NO: 54184 - protein, 58 aa, unidentified
  source 1..58: note = methanogen bacteria
KGVDGVLGIFGNLTGLLSLQSASRVVGGFPNVLVSVAEMQQPSMLGAGMNSMFLASTN

SEQ ID NO: 54185 - protein, 99 aa, unidentified
  source 1..99: note = methanogen bacteria
PAADLPMLGDDIKANYVDSSGMPYFSEMDSYYNLRLTENYIDHGHVGDEIVNNSAWDMHRYAPDGNKINYELGIVYLTDWMHNMANSFFGGDHSVREVA

SEQ ID NO: 54186 - protein, 10 aa, unidentified
  source 1..10: note = methanogen bacteria
AHTFPGFFDT

SEQ ID NO: 54187 - protein, 57 aa, unidentified
  source 1..57: note = methanogen bacteria
GVDGVVGIFGSLTGLLSLQSASTVVGGFPNVLISVAEMQIPNMVGAGMNAMFLANTN

SEQ ID NO: 54188 - protein, 17 aa, unidentified
  source 1..17: note = methanogen bacteria
EVSFDEAGNYSVVVLFD

SEQ ID NO: 54189 - protein, 54 aa, unidentified
  source 1..54: note = methanogen bacteria
YYSSSKTVNVEVVDKVLNTTVVVDDVVCVVDEFVVLNASVFDENGDLVSNGNVT

SEQ ID NO: 54190 - protein, 10 aa, unidentified
  source 1..10: note = methanogen bacteria
AGNYNVVASF

SEQ ID NO: 54191 - protein, 17 aa, unidentified
  source 1..17: note = methanogen bacteria
RTAYIVINKLKLSSNIT

SEQ ID NO: 54192 - protein, 58 aa, unidentified
  source 1..58: note = methanogen bacteria
DEINIISNVISDNLTVNDGVAVFLINKTKRYVVNISDNQAILDVIFNQSGNYIVDVSF

SEQ ID NO: 54193 - protein, 23 aa, unidentified
  source 1..23: note = methanogen bacteria
CSVIVNVFDKFSRISISDLKAYV

SEQ ID NO: 54194 - protein, 37 aa, unidentified
  source 1..37: note = methanogen bacteria
ISVLVFDAKGNMIDTGILNIIINDKIYSIDLSKDYPL

SEQ ID NO: 54195 - protein, 41 aa, unidentified
  source 1..41: note = methanogen bacteria
SSVIEVCKKDLEVNFKIDDIYYGEDLTINVQSNDDADVEII

SEQ ID NO: 54196 - protein, 12 aa, unidentified
  source 1..12: note = methanogen bacteria
NAGKYESILYFN

SEQ ID NO: 54197 - protein, 71 aa, unidentified
  source 1..71: note = methanogen bacteria
KTANFNVNKRQLSAEFKVENKTFFIYLSQSINDTLLVKINNQDYVIYLTNGEAKLTLDNFDVGSYLAVVNY

SEQ ID NO: 54198 - protein, 23 aa, unidentified
  source 1..23: note = methanogen bacteria
ENYSFEIPKIKTKILVNNLVKYY

SEQ ID NO: 54199 - protein, 59 aa, unidentified
  source 1..59: note = methanogen bacteria
ELTLIDENGNYLANKSVIISISGVNYTRITDEKGKASIGINLNSGTYAPVVYFEGDGEF

SEQ ID NO: 54200 - protein, 72 aa, unidentified
  source 1..72: note = methanogen bacteria
SSKNSSMVIVKSTIEANNLVKCYRNASQFYATILDYNGNIVKNQVISFNINGVFYNRTTNENGVVKLNINLS

SEQ ID NO: 54201 - protein, 38 aa, unidentified
  source 1..38: note = methanogen bacteria
GEYIITTLNLVTGESASNNITVLSLIVENKNLVKYYRN

SEQ ID NO: 54202 - protein, 39 aa, unidentified
  source 1..39: note = methanogen bacteria
QYCVKILDDQGNPVGAGVTVRFNINGVFYERQTNESGIV

SEQ ID NO: 54203 - protein, 58 aa, unidentified
  source 1..58: note = methanogen bacteria
EYIITAEYKGCCVSNEITIKPILTANDLTKRYGDSDQFVATLVDGQGKAYAGQYVEFN

SEQ ID NO: 54204 - protein, 20 aa, unidentified
  source 1..20: note = methanogen bacteria
NGVFYKRLTDDNGQAKLNIR

SEQ ID NO: 54205 - protein, 16 aa, unidentified
  source 1..16: note = methanogen bacteria
TSSFGGFSTSNAVKIV

SEQ ID NO: 54206 - protein, 31 aa, unidentified
  source 1..31: note = methanogen bacteria
DLFSDIGNTSESVTEDDIQQMQSVVKSAMNK

SEQ ID NO: 54207 - protein, 18 aa, unidentified
  source 1..18: note = methanogen bacteria
TLIRKDLNSNTGKDFTGA

SEQ ID NO: 54208 - protein, 16 aa, unidentified
  source 1..16: note = methanogen bacteria
MNALNSKYETIRYDDG

SEQ ID NO: 54209 - protein, 98 aa, unidentified
  source 1..98: note = methanogen bacteria
QAADIGGVPNEIKANYMDADGLPYFSEMDSYFNLRMTQDYMDHGYFGDTLVNGSGWDMHSYYPSGRDVGSYQPMIAYVTSFLYGIVNMFHDMSLKEVA

SEQ ID NO: 54210 - protein, 10 aa, unidentified
  source 1..10: note = methanogen bacteria
SHTFAGFFDT

SEQ ID NO: 54211 - protein, 56 aa, unidentified
  source 1..56: note = methanogen bacteria
GIGGILDAINGLTGGFSLLSASRDVWPNVFVSVAEMQKPNILAGGLPGAFLANTNG

SEQ ID NO: 54212 - protein, 12 aa, unidentified
  source 1..12: note = methanogen bacteria
LKNGGANVKTKA

SEQ ID NO: 54213 - protein, 11 aa, unidentified
  source 1..11: note = methanogen bacteria
LQTIFKTCSIG

SEQ ID NO: 54214 - protein, 99 aa, unidentified
  source 1..99: note = methanogen bacteria
PAADLPSMGDDIKASYVDSSGLPYFSEMDSYYNLRLTENFANHGHVGDKIINGSAWDMHRYAPDGDEINYELGIVYITNWLHDVGNSFFGANHSLREVA

SEQ ID NO: 54215 - protein, 11 aa, unidentified
  source 1..11: note = methanogen bacteria
SHTFPGFFDTD

SEQ ID NO: 54216 - protein, 57 aa, unidentified
  source 1..57: note = methanogen bacteria
GFNGVFGIFGSLTGLLSLQSASRVVGGFPNVLISVAEMQIPSMLGGGMNSMFLANTN

SEQ ID NO: 54217 - protein, 98 aa, unidentified
  source 1..98: note = methanogen bacteria
QAADIHGIPNEIKADYVDANGLPYFSEMDSYFNLRMTQDYMDHGYFGDTLVNGSGWDMHSYYPTGREVGNYQPMIAYVTSALYGFINMFKEMSLTEVA

SEQ ID NO: 54218 - protein, 10 aa, unidentified
  source 1..10: note = methanogen bacteria
SHTYAGFFDT

SEQ ID NO: 54219 - protein, 57 aa, unidentified
  source 1..57: note = methanogen bacteria
GVGGIMNAIGGLTGGLSLQSASTVNVWPNVLVSVAEMQIPTVLSGGLAGAFLASTNG

SEQ ID NO: 54220 - protein, 39 aa, unidentified
  source 1..39: note = methanogen bacteria
VGSPTSLGPGEAISALFSAIGKGGKHLTYEEMLVYNSRL

SEQ ID NO: 54221 - protein, 14 aa, unidentified
  source 1..14: note = methanogen bacteria
GINPLFATIGSFQL

SEQ ID NO: 54222 - protein, 61 aa, unidentified
  source 1..61: note = methanogen bacteria
IIDNNLVVDAKVFNQYGYLVPGGNVLFHVDGVDYNVVVKNGIAKLSLPINKNNFEISAEYT

SEQ ID NO: 54223 - protein, 14 aa, unidentified
  source 1..14: note = methanogen bacteria
NLSTVQTTFDLPFS

SEQ ID NO: 54224 - protein, 54 aa, unidentified
  source 1..54: note = methanogen bacteria
LTLIYDTNLNPVNFTALVINQYGYGVSVGNVTFTIQNKNYTVNIKDGKASILHQ

SEQ ID NO: 54225 - protein, 59 aa, unidentified
  source 1..59: note = methanogen bacteria
GQLLKKSMVKFKFMKKTYKVKTNKKGKAVLKIKNKFKSGKYPIYTKSGSLKVKNIIKIK

SEQ ID NO: 54226 - protein, 98 aa, unidentified
  source 1..98: note = methanogen bacteria
AETYNISAVPNDMQDFYRDASGLPYFSEMDSYYNYRLTNNYVEKGILGDSVVNGTNWDEHSYYPNGRVVDYPPLITYVTTIFYQIANMFKDIPLKNVA

SEQ ID NO: 54227 - protein, 58 aa, unidentified
  source 1..58: note = methanogen bacteria
GVGSISETIINFIGVNDVQSLAQTAGSFPNVYISVSEMQIPDFITSGVSALIANQGSL

SEQ ID NO: 54228 - protein, 100 aa, unidentified
  source 1..100: note = methanogen bacteria
TPAADLNSLDADGKALYTDASGLPYFSEMDSYYNYRLTNDYVDHGYVGDEMVNGSEWDMHRYAPDGNKINYELGIVYLTSWMHDMANNFLGWHMSVKEVA

SEQ ID NO: 54229 - protein, 57 aa, unidentified
  source 1..57: note = methanogen bacteria
GVDGVLGIFSQVFGLLNLQSASVVVGGFPNVLISVAEMQMPSMLGAGMTSMFLASTD

SEQ ID NO: 54230 - protein, 99 aa, unidentified
  source 1..99: note = methanogen bacteria
PAADLNMLDDSIKSEYVDSSGLPYFSEMDSYYNYRLTNDYVEHGFVGDEMVNGSEWDMHRLAPTGNQINYELGIVWLTSWLHDVANSFLGGNYSVKEVA

SEQ ID NO: 54231 - protein, 60 aa, unidentified
  source 1..60: note = methanogen bacteria
QGVDGVLGIFGRVLNLLNLQSASVVVGGFPNVLISVAEMQTPSMLGAGMTSLFLANTNGA

SEQ ID NO: 54232 - protein, 99 aa, unidentified
  source 1..99: note = methanogen bacteria
PAADLNGLDADGKALYTDASGLPYFSEMDSYYNYRLTNDYIDHGFVGDEMVNGSEWDMHRYAPDGNKINYELGIVYLTSWMHDMANNFLGWHMSVKEVA

SEQ ID NO: 54233 - protein, 58 aa, unidentified
  source 1..58: note = methanogen bacteria
RGVDGVIGIFSQVFGLLNLQSASVVVGGFPNVLISVAEMQMPSMLGAGMTSMFLANTN

SEQ ID NO: 54234 - protein, 99 aa, unidentified
  source 1..99: note = methanogen bacteria
PAADLNYFDEEGKALYTDSSGLPYFSEMDSYYNYRLTNDYVDHGYAGDEMRDGVAWDMHRYSPDGETVNYELGITYVTSWLHDMANKYFGGNFSVKEVA

SEQ ID NO: 54235 - protein, 57 aa, unidentified
  source 1..57: note = methanogen bacteria
GVNGVVGIFSNVFNLLNLQSASVVVGGFPNVLISVAEMQMPSMLGSGMTSMFTASTD

SEQ ID NO: 54236 - protein, 99 aa, unidentified
  source 1..99: note = methanogen bacteria
PAADLNYFDDQGKALYTDSLGLPYFSEMDSYYNYRLTDDYVDHGYAGDEMRDGVVWDMHRNSPDGFELNYELGIAYVTAWLHDVANNYFGGSFSVKEIA

SEQ ID NO: 54237 - protein, 58 aa, unidentified
  source 1..58: note = methanogen bacteria
RGVDGVTGIFGRVFGLLNLQSASVVVGGFPNVLISVAEMQMPSMLGSGMTSMFTASTD

SEQ ID NO: 54238 - protein, 12 aa, unidentified
  source 1..12: note = methanogen bacteria
LNNGVGDVKTKA

SEQ ID NO: 54239 - protein, 11 aa, unidentified
  source 1..11: note = methanogen bacteria
LQTIFKTCAIG

SEQ ID NO: 54240 - protein, 98 aa, unidentified
  source 1..98: note = methanogen bacteria
QAADIGGVPNELKANYMDANGLPYFSEMDSYFNLRMTQDYMDHGYFGDTLVNGSGWDMHSYYPSGRDVGSYQPMIAYVTSFMYGLINMFQDMSLTEVA

SEQ ID NO: 54241 - protein, 56 aa, unidentified
  source 1..56: note = methanogen bacteria
GIGGIFDAISGLTGGFSLLTASHDVWPNVFVSVAEMQKPNLLFGGLPGSFLANTNG

SEQ ID NO: 54242 - protein, 84 aa, unidentified
  source 1..84: note = methanogen bacteria
TNITSEDFTIVGHIKKDTPISARADVSGNRVTLTVNIDENATGFVRLAVGGTVANIEVVDGVAKLTTNLLPNSYFVEVTYLGDD

SEQ ID NO: 54243 - protein, 34 aa, unidentified
  source 1..34: note = methanogen bacteria
KFGDNVFNIALTDGVGTLTTSLPYGNYSLDITYL

SEQ ID NO: 54244 - protein, 98 aa, unidentified
  source 1..98: note = methanogen bacteria
QSADIGGVPNDLKAYYSDANGLPYFSEMDSYFNYRMTEDYMDHGYFGDTLVNGSGWDMHSYYPSGRDVGSYQPMIAYVTSALYGLFNMFQSMSLLEVA

SEQ ID NO: 54245 - protein, 10 aa, unidentified
  source 1..10: note = methanogen bacteria
SHTFAGFFDT

SEQ ID NO: 54246 - protein, 56 aa, unidentified
  source 1..56: note = methanogen bacteria
GFNGVLTGIGGLTGGFSLQSAANNVWPNVLISVAEMQIPSLVTGGLVGSFLANTGG

SEQ ID NO: 54247 - protein, 16 aa, unidentified
  source 1..16: note = methanogen bacteria
SQYTNTQNTNTQTTVE

SEQ ID NO: 54248 - protein, 53 aa, unidentified
  source 1..53: note = methanogen bacteria
GNTAIYLSSENKTSTIKTGIFLKNTGINGGAIYNVGKLNLNKTYFNSNSVTKD

SEQ ID NO: 54249 - protein, 10 aa, unidentified
  source 1..10: note = methanogen bacteria
NADSKGGAIY

SEQ ID NO: 54250 - protein, 20 aa, unidentified
  source 1..20: note = methanogen bacteria
KGTLYLSQNSFKTNKANITG

SEQ ID NO: 54251 - protein, 18 aa, unidentified
  source 1..18: note = methanogen bacteria
TLTVKYSQFTNNNVNTYG

SEQ ID NO: 54252 - protein, 11 aa, unidentified
  source 1..11: note = methanogen bacteria
TRTNYVYNSTF

SEQ ID NO: 54253 - protein, 24 aa, unidentified
  source 1..24: note = methanogen bacteria
NYASTGGAIYVNGAGAVINKVFFK

SEQ ID NO: 54254 - protein, 11 aa, unidentified
  source 1..11: note = methanogen bacteria
FQNILDIPVCW

SEQ ID NO: 54255 - protein, 10 aa, unidentified
  source 1..10: note = methanogen bacteria
FASTTSVFYL

SEQ ID NO: 54256 - protein, 12 aa, unidentified
  source 1..12: note = methanogen bacteria
PHPRKLRDPRPC

SEQ ID NO: 54257 - protein, 20 aa, unidentified
  source 1..20: note = methanogen bacteria
PHLRGIPGDPLPAGSVDPAH

SEQ ID NO: 54258 - protein, 36 aa, unidentified
  source 1..36: note = methanogen bacteria
RSRLRDLHNHQGQGEPRPRNVQRRCHRCRDHKCQRY

SEQ ID NO: 54259 - protein, 17 aa, unidentified
  source 1..17: note = methanogen bacteria
HPAGRKLLDDPGIRFRP

SEQ ID NO: 54260 - protein, 12 aa, unidentified
  source 1..12: note = methanogen bacteria
GHLCRPRPHAPP

SEQ ID NO: 54261 - protein, 18 aa, unidentified
  source 1..18: note = methanogen bacteria
SPPGGTAPPSSGTPTACG

SEQ ID NO: 54262 - protein, 83 aa, unidentified
  source 1..83: note = methanogen bacteria
SIVSKLININPVKTALSLSLSKDVLFVGDSLSVKASVNATQGKVMFYLNDVLKGTVNVDSKGMASIVLKDLSYGTYNLNAKFS

SEQ ID NO: 54263 - protein, 14 aa, unidentified
  source 1..14: note = methanogen bacteria
SKENEGLAVPDEQN

SEQ ID NO: 54264 - protein, 75 aa, unidentified
  source 1..75: note = methanogen bacteria
IAGLLQELDKQGYTVENVPENGRQMIEEILDGVTNDLDSMSVATMREKAVDLVPSGTYRKQFESIPSWDQEQMIK

SEQ ID NO: 54265 - protein, 17 aa, unidentified
  source 1..17: note = methanogen bacteria
MPPSMARAGEYEELSEM

SEQ ID NO: 54266 - protein, 47 aa, unidentified
  source 1..47: note = methanogen bacteria
VPLQDYFTLKGNASPERKKELINQIYLSAKEHDMFNDLNIAKDPGAE

SEQ ID NO: 54267 - protein, 14 aa, unidentified
  source 1..14: note = methanogen bacteria
GVDMQDALDDPTGK

SEQ ID NO: 54268 - protein, 21 aa, unidentified
  source 1..21: note = methanogen bacteria
NTQTGIDELEKRYGKVSSDLK

SEQ ID NO: 54269 - protein, 14 aa, unidentified
  source 1..14: note = methanogen bacteria
DQMIEKYVSEKGEF

SEQ ID NO: 54270 - protein, 12 aa, unidentified
  source 1..12: note = methanogen bacteria
NLVIGLDESDED

SEQ ID NO: 54271 - protein, 15 aa, unidentified
  source 1..15: note = methanogen bacteria
KDIVDGIAEGLTPDE

SEQ ID NO: 54272 - protein, 16 aa, unidentified
  source 1..16: note = methanogen bacteria
AWKTVEDLADVYIDWC

SEQ ID NO: 54273 - protein, 30 aa, unidentified
  source 1..30: note = methanogen bacteria
LFKGWGNNPSVFFTTTLLHSTSNPYGLTYL

SEQ ID NO: 54274 - protein, 23 aa, unidentified
  source 1..23: note = methanogen bacteria
QLPGSRTGLMALFNPNWEYLLDF

SEQ ID NO: 54275 - protein, 37 aa, unidentified
  source 1..37: note = methanogen bacteria
GHMALGKNIPITSLVSDGFSLIFVVFPNVFNVIGSWS

SEQ ID NO: 54276 - protein, 14 aa, unidentified
  source 1..14: note = methanogen bacteria
GINPLFATIGSFQL

SEQ ID NO: 54277 - protein, 12 aa, unidentified
  source 1..12: note = methanogen bacteria
LASGTANAGAKA

SEQ ID NO: 54278 - protein, 11 aa, unidentified
  source 1..11: note = methanogen bacteria
LQDIFKTCPIG

SEQ ID NO: 54279 - protein, 11 aa, unidentified
  source 1..11: note = methanogen bacteria
YFNTETELTDD

SEQ ID NO: 54280 - protein, 36 aa, unidentified; identical to SEQ ID NO: 54173
  source 1..36: note = methanogen bacteria

SEQ ID NO: 54281 - protein, 18 aa, unidentified
  source 1..18: note = methanogen bacteria
ITPLWEAISGCTDLLSIP

SEQ ID NO: 54282 - protein, 12 aa, unidentified
  source 1..12: note = methanogen bacteria
NISIIFDLSKLP

SEQ ID NO: 54283 - protein, 76 aa, unidentified
  source 1..76: note = methanogen bacteria
MIVDNLKRPMTNISVSYKIDGNVTETTTDEKGQIFIPVDNMKPDTYKIDVQYKGEGNYHAMDKDITLLINKGITKL

SEQ ID NO: 54284 - protein, 33 aa, unidentified
  source 1..33: note = methanogen bacteria
LVITLTDNIGRALKGFNVSAELNGTENYTTDKH

SEQ ID NO: 54285 - protein, 24 aa, unidentified
  source 1..24: note = methanogen bacteria
TAKIVVNKIKTKLTANSVATFYNI

SEQ ID NO: 54286 - protein, 17 aa, unidentified
  source 1..17: note = methanogen bacteria
LIDAFGNPMSNATVSVN

SEQ ID NO: 54287 - protein, 56 aa, unidentified
  source 1..56: note = methanogen bacteria
TAEVVVNASNSKLIVTSLTTDYNSGEEFVVKLIDNLGNPVVGETLYFTLHATNNIT

SEQ ID NO: 54288 - protein, 14 aa, unidentified
  source 1..14: note = methanogen bacteria
DNEENPLSGISVSV

SEQ ID NO: 54289 - protein, 18 aa, unidentified
  source 1..18: note = methanogen bacteria
ATSKIIVNKQSATLTANT

SEQ ID NO: 54290 - protein, 18 aa, unidentified
  source 1..18: note = methanogen bacteria
ITLKNDQGSPISGVRVFV

SEQ ID NO: 54291 - protein, 17 aa, unidentified
  source 1..17: note = methanogen bacteria
TKLTVDSMTNSTNLIVS

SEQ ID NO: 54292 - protein, 15 aa, unidentified
  source 1..15: note = methanogen bacteria
TLKDGEGKPIKNASV

SEQ ID NO: 54293 - protein, 36 aa, unidentified
  source 1..36: note = methanogen bacteria
VGSDSYGVVVVKKITSKLTANAKAFKVKTKTKKYNV

SEQ ID NO: 54294 - protein, 56 aa, unidentified
  source 1..56: note = methanogen bacteria
TMEHWMDGAFELAPSYQEICERLNMTMEQVYSKLSIEGSPDHLVPVDLQHTAEINA

SEQ ID NO: 54295 - protein, 14 aa, unidentified
  source 1..14: note = methanogen bacteria
PEVYVTVAETLPVG

SEQ ID NO: 54296 - protein, 32 aa, unidentified
  source 1..32: note = methanogen bacteria
IINGTSSIDGALFEENFANYGGDSIHSISTAL

SEQ ID NO: 54297 - protein, 65 aa, unidentified
  source 1..65: note = methanogen bacteria
TFNVTVLDGQGKPLANVAVRFNINGVFYTKHTDSKGIAKLNINLMSGKYIITSEYDGLKISNTIT

SEQ ID NO: 54298 - protein, 46 aa, unidentified
  source 1..46: note = methanogen bacteria
WCGFVGSSGFENAVTGMMDSVDLTRDALLDKLEIKQDDSSWEHAVS

SEQ ID NO: 54299 - protein, 11 aa, unidentified
  source 1..11: note = methanogen bacteria
CIRVTSLFMFP

SEQ ID NO: 54300 - protein, 13 aa, unidentified
  source 1..13: note = methanogen bacteria
NSFFNNNKGSAVY

SEQ ID NO: 54301 - protein, 50 aa, unidentified
  source 1..50: note = methanogen bacteria
AQNNLIYSSRFTKNSGTYGGAVRNYYSTLIMNRNYISANSATYGGAIFSS

SEQ ID NO: 54302 - protein, 42 aa, unidentified
  source 1..42: note = methanogen bacteria
EIFDIEGMMDMYEDLAERLGYSNYSDMAASLDLGTEYREVVA

SEQ ID NO: 54303 - protein, 15 aa, unidentified
  source 1..15: note = methanogen bacteria
PEVSVKIGLTLPLTV

SEQ ID NO: 54304 - protein, 14 aa, unidentified
  source 1..14: note = methanogen bacteria
GINPLFATIGSFQL

SEQ ID NO: 54305 - protein, 44 aa, unidentified
  source 1..44: note = methanogen bacteria
YNPGLMTFDSFNQVHQIASGRYTNWHPFFHTFIEMLLYKIYSSP

SEQ ID NO: 54306 - protein, 11 aa, unidentified
  source 1..11: note = methanogen bacteria
FTTGFNFVILP

SEQ ID NO: 54307 - protein, 81 aa, unidentified
  source 1..81: note = methanogen bacteria
DSSGLPYFSEMDSYYNLRLTEDYIDHGFVGDEQINGSNWDMHRLAPDGNAINYELGIVHVTSFLHDLANKYFGNHSVKEVA

SEQ ID NO: 54308 - protein, 57 aa, unidentified
  source 1..57: note = methanogen bacteria
IEGVTGLFGSLFSLLSLQSASRVVGGFPNVLVSVAEMQIPSMLGGGMNSMFLANTNG

SEQ ID NO: 54309 - protein, 42 aa, unidentified
  source 1..42: note = methanogen bacteria
CIGSHTTLGVGEALSATASAIGKGGHGLTYEEMLIYNQRLPR

SEQ ID NO: 54310 - protein, 15 aa, unidentified
  source 1..15: note = methanogen bacteria
ADFTFFGLFPSQSIY

SEQ ID NO: 54311 - protein, 22 aa, unidentified
  source 1..22: note = methanogen bacteria
LYNRYHTVKLPEYLGFFGGRRF

SEQ ID NO: 54312 - protein, 14 aa, unidentified
  source 1..14: note = methanogen bacteria
GINPLFATIGSFQL

SEQ ID NO: 54313 - protein, 31 aa, unidentified
  source 1..31: note = methanogen bacteria
TFENNVKNAIYSYDSNLSVENTNFSENTQAI

SEQ ID NO: 54314 - protein, 79 aa, unidentified
  source 1..79: note = methanogen bacteria
QFYIYLIDGEGNSVVGVNITMNINGVFYNRTTNENGSARLNINLIPGEYILTATDPLTCLKMSYNITVLPVLTADDIHM

SEQ ID NO: 54315 - protein, 45 aa, unidentified
  source 1..45: note = methanogen bacteria
TAFKAKLVDGMGNALANIGIIFNINGVFYTKYTNSSGVACLNINL

SEQ ID NO: 54316 - protein, 21 aa, unidentified
  source 1..21: note = methanogen bacteria
EYIITSQYESAQISNKITISS

SEQ ID NO: 54317 - protein, 12 aa, unidentified
  source 1..12: note = methanogen bacteria
YTDLLNEGVLWL

SEQ ID NO: 54318 - protein, 54 aa, unidentified
  source 1..54: note = methanogen bacteria
PEFDTIDFVLINKNNLTINGNGHTINGLNQSRIFEIDAENVTLDSLNFINGTSK

SEQ ID NO: 54319 - protein, 10 aa, unidentified
  source 1..10: note = methanogen bacteria
IMDPALVAEG

SEQ ID NO: 54320 - protein, 10 aa, unidentified
  source 1..10: note = methanogen bacteria
LSIGTEQRLA

SEQ ID NO: 54321 - protein, 12 aa, unidentified
  source 1..12: note = methanogen bacteria
VLQEIFRTTSIP

SEQ ID NO: 54322 - protein, 16 aa, unidentified
  source 1..16: note = methanogen bacteria
DDLIHSGVKEIILDSD

SEQ ID NO: 54323 - protein, 17 aa, unidentified
  source 1..17: note = methanogen bacteria
ITIKNITFKNGYTTDEG

SEQ ID NO: 54324 - protein, 10 aa, unidentified
  source 1..10: note = methanogen bacteria
LSKGSSQLLA

SEQ ID NO: 54325 - protein, 11 aa, unidentified
  source 1..11: note = methanogen bacteria
LQNIFHTTAIP

SEQ ID NO: 54326 - protein, 14 aa, unidentified
  source 1..14: note = methanogen bacteria
GINPLFATIGSFQL

SEQ ID NO: 54327 - protein, 16 aa, unidentified
  source 1..16: note = methanogen bacteria
MGLTHQIHQSVGIDIS

SEQ ID NO: 54328 - protein, 19 aa, unidentified
  source 1..19: note = methanogen bacteria
LNENVVLTVNNKKYTFKAN

SEQ ID NO: 54329 - protein, 11 aa, unidentified
  source 1..11: note = methanogen bacteria
DADSYSAVVTF

SEQ ID NO: 54330 - protein, 63 aa, unidentified
  source 1..63: note = methanogen bacteria
NSASKNTDFIVSKNDVNIDLSVSNATYGEKIIVKTFLSDLKGNLINEKLKLEIAGNLYEITSN

SEQ ID NO: 54331 - protein, 15 aa, unidentified
  source 1..15: note = methanogen bacteria
VILNASKYDVKVSFE

SEQ ID NO: 54332 - protein, 11 aa, unidentified
  source 1..11: note = methanogen bacteria
DASTYPVNILF

SEQ ID NO: 54333 - protein, 61 aa, unidentified
  source 1..61: note = methanogen bacteria
SQYVNVNVGKTDPKLVINVSDIEYGSDVVIKNALTGINNADIYAVLSLVVNDKKYAITSNG

SEQ ID NO: 54334 - protein, 12 aa, unidentified
  source 1..12: note = methanogen bacteria
DVGKYSADITFD

SEQ ID NO: 54335 - protein, 43 aa, unidentified
  source 1..43: note = methanogen bacteria
ASRYSVKVLDEKGSPLAGVSVSFNINGVFYERKTNSDGVASLN

SEQ ID NO: 54336 - protein, 75 aa, unidentified
  source 1..75: note = methanogen bacteria
DYIITAEYDGSRVSNNIKVLNVIKTGDVVMKYRDGTRFGATILDNHGYPYPNQCVRFNINGVFYTRITDLNGVAN

SEQ ID NO: 54337 - protein, 22 aa, unidentified
  source 1..22: note = methanogen bacteria
KYIITSMYNGLSVSNTILINNL

SEQ ID NO: 54338 - protein, 16 aa, unidentified
  source 1..16: note = methanogen bacteria
MGLTDSIKQSTGINIS

SEQ ID NO: 54339 - protein, 16 aa, unidentified
  source 1..16: note = methanogen bacteria
MGLTHSIHQATGINIS

SEQ ID NO: 54340 - protein, 17 aa, unidentified
  source 1..17: note = methanogen bacteria
LMGVTHSIKDATGIDIS

SEQ ID NO: 54341 - protein, 17 aa, unidentified
  source 1..17: note = methanogen bacteria
LMGVTHSIHEATGLHIS

SEQ ID NO: 54342 - protein, 17 aa, unidentified
  source 1..17: note = methanogen bacteria
LAGIVNSLNQATGLDVS

SEQ ID NO: 54343 - protein, 16 aa, unidentified
  source 1..16: note = methanogen bacteria
MGLTHSIHEATGLNIS

SEQ ID NO: 54344 - protein, 15 aa, unidentified
  source 1..15: note = methanogen bacteria
GIVHSLNHATGLNIS

SEQ ID NO: 54345 - protein, 16 aa, unidentified
  source 1..16: note = methanogen bacteria
MGLSHAIHEATGLHVS

SEQ ID NO: 54346 - protein, 15 aa, unidentified
  source 1..15: note = methanogen bacteria
GIVHSINHSTGLNIS

SEQ ID NO: 54347 - protein, 16 aa, unidentified
  source 1..16: note = methanogen bacteria
MGLTHSIHQATGLHIS

SEQ ID NO: 54348 - protein, 16 aa, unidentified
  source 1..16: note = methanogen bacteria
MGLTHGIHKATGLHIS

SEQ ID NO: 54349 - protein, 15 aa, unidentified
  source 1..15: note = methanogen bacteria
GIVHSINHATGLHIS

SEQ ID NO: 54350 - protein, 16 aa, unidentified
  source 1..16: note = methanogen bacteria
MGLTHGLHQSTGLHIS

SEQ ID NO: 54351 - protein, 18 aa, unidentified
  source 1..18: note = methanogen bacteria
PLSGIAHPLHQATGLHIS

SEQ ID NO: 54352 - protein, 17 aa, unidentified
  source 1..17: note = methanogen bacteria
LVGIAHQLHQATGLHIS

SEQ ID NO: 54353 - protein, 77 aa, unidentified
  source 1..77: note = methanogen bacteria
TINSTIITVTVTLNKANITAKDMTLNVGENSTIEYTTTPADLNVSFVPDDSGIVKVSDNGTVTALKEGTANITITVG

SEQ ID NO: 54354 - protein, 16 aa, unidentified
  source 1..16: note = methanogen bacteria
MGLTHQIHESTGIDIS

SEQ ID NO: 54355 - protein, 16 aa, unidentified
  source 1..16: note = methanogen bacteria
MGLTHQIHESTGIDIS

SEQ ID NO: 54356 - protein, 16 aa, unidentified
  source 1..16: note = methanogen bacteria
MGLTHQLHQSTGIDIS

SEQ ID NO: 54357 - protein, 17 aa, unidentified
  source 1..17: note = methanogen bacteria
LMGLTHHLNQTTAIDIS

SEQ ID NO: 54358 - protein, 15 aa, unidentified
  source 1..15: note = methanogen bacteria
DPLKTFTSGINAHIS

SEQ ID NO: 54359 - protein, 12 aa, unidentified
  source 1..12: note = methanogen bacteria
VENNFIEDVILM

SEQ ID NO: 54360 - protein, 44 aa, unidentified
  source 1..44: note = methanogen bacteria
IKPGVGINIAAISQTSNVTLNQTMTDLVLNIIPENPLNALASSE

SEQ ID NO: 54361 - protein, 13 aa, unidentified
  source 1..13: note = methanogen bacteria
AAQCCGMDLGTSA

SEQ ID NO: 54362 - protein, 28 aa, unidentified
  source 1..28: note = methanogen bacteria
STSTPSVPFSGLATLTLVFTSVGLPVEI

SEQ ID NO: 54363 - protein, 14 aa, unidentified
  source 1..14: note = methanogen bacteria
VDDPFIENFILMDN

SEQ ID NO: 54364 - protein, 44 aa, unidentified
  source 1..44: note = methanogen bacteria
IKPGVGLNIPASDTLSNSTSSMALTDTILNIFPENPVHALTNGE

SEQ ID NO: 54365 - protein, 11 aa, unidentified
  source 1..11: note = methanogen bacteria
TFGTIGFESIL

SEQ ID NO: 54366 - protein, 11 aa, unidentified
  source 1..11: note = methanogen bacteria
QAYGIDFGTTA

SEQ ID NO: 54367 - protein, 17 aa, unidentified
  source 1..17: note = methanogen bacteria
LNSIVGGLNQATGLDIS

SEQ ID NO: 54368 - protein, 13 aa, unidentified
  source 1..13: note = methanogen bacteria
DPLMAVTMGTPVS

SEQ ID NO: 54369 - protein, 10 aa, unidentified
  source 1..10: note = methanogen bacteria
FSINATEQKA

SEQ ID NO: 54370 - protein, 11 aa, unidentified
  source 1..11: note = methanogen bacteria
LQVIFRTTSLN

SEQ ID NO: 54371 - protein, 30 aa, unidentified
  source 1..30: note = methanogen bacteria
RIYDSKGNIVYDKNFDEISELPDDMSNLTE

SEQ ID NO: 54372 - protein, 24 aa, unidentified
  source 1..24: note = methanogen bacteria
YLGYYFFIHRNLTVGKYTFELRNL

SEQ ID NO: 54373 - protein, 69 aa, unidentified
  source 1..69: note = methanogen bacteria
VIGYMVNGSFEIIKTTSEIEVYVEDIVYGEDLEIHIGVINTTIVNIIIKDYKGSIVYNDNVTSSPIIIR

SEQ ID NO: 54374 - protein, 67 aa, unidentified
  source 1..67: note = methanogen bacteria
NSSSQEFQVFKINSTIKLNDISDIYYEDNVSISFEVENKTIVNIKIQNQDGEVVYDNNITSDMIQVP

SEQ ID NO: 54375 - protein, 17 aa, unidentified
  source 1..17: note = methanogen bacteria
IDGEYTVTIAGKKIIVN

SEQ ID NO: 54376 - protein, 34 aa, unidentified
  source 1..34: note = methanogen bacteria
EGNVFASVDGNYVIVIGDITKIVSVKNGIGEFNL

SEQ ID NO: 54377 - protein, 39 aa, unidentified
  source 1..39: note = methanogen bacteria
LNVGDYNISVNYYENENYNSNSNTTTFKVTGTGTNFNII

SEQ ID NO: 54378 - protein, 22 aa, unidentified
  source 1..22: note = methanogen bacteria
ITYGENIKITQKLPSDATGTIT

SEQ ID NO: 54379 - protein, 44 aa, unidentified
  source 1..44: note = methanogen bacteria
YNPGIMTFDSFNQVHQIASGRYTNWHPFFHTFIEMILYKIYSSP

SEQ ID NO: 54380 - protein, 17 aa, unidentified
  source 1..17: note = methanogen bacteria
TSPKEESVKKEDVKKQD

SEQ ID NO: 54381 - protein, 30 aa, unidentified; identical to SEQ ID NO: 54273
  source 1..30: note = methanogen bacteria

SEQ ID NO: 54382 - protein, 24 aa, unidentified
  source 1..24: note = methanogen bacteria
QLPGSRTGIMALFNPNWSVLLDFN

SEQ ID NO: 54383 - protein, 37 aa, unidentified
  source 1..37: note = methanogen bacteria
GFMALGRNIPITSLVSDSFSLIFVVFPNVFNIMDPWV

SEQ ID NO: 54384 - protein, 30 aa, unidentified
  source 1..30: note = methanogen bacteria
LFKGWGSNPSVFFTTTLLHSTSNPYGLTYL

SEQ ID NO: 54385 - protein, 24 aa, unidentified
  source 1..24: note = methanogen bacteria
QLPGSRTGIMALFNPDWSVLLNVN

SEQ ID NO: 54386 - protein, 37 aa, unidentified
  source 1..37: note = methanogen bacteria
GYMALGRNIPITSLVSDGFSIIFVVFPNVFNIMDPWV

SEQ ID NO: 54387 - protein, 80 aa, unidentified
  source 1..80: note = methanogen bacteria
IIEASCDARLNRLTIVLSLTYSCVAAGVLGGIVGGYFCKSPTPFIPDRFAVDVGNPEIINFINDETIIQGAIRPEIPFEF

SEQ ID NO: 54388 - protein, 11 aa, unidentified
  source 1..11: note = methanogen bacteria
LQIIFKTTSIG

SEQ ID NO: 54389 - protein, 10 aa, unidentified
  source 1..10: note = methanogen bacteria
ELNTSNDTKA

SEQ ID NO: 54390 - protein, 11 aa, unidentified
  source 1..11: note = methanogen bacteria
LQIIFKTTSIG

SEQ ID NO: 54391 - protein, 11 aa, unidentified
  source 1..11: note = methanogen bacteria
LQIIFKTTAIG

SEQ ID NO: 54392 - protein, 44 aa, unidentified; identical to SEQ ID NO: 54379
  source 1..44: note = methanogen bacteria

SEQ ID NO: 54393 - protein, 17 aa, unidentified
  source 1..17: note = methanogen bacteria
TSPKEESVKKEDVKKQD

SEQ ID NO: 54394 - protein, 10 aa, unidentified
  source 1..10: note = methanogen bacteria
ISKGVPTQKA

SEQ ID NO: 54395 - protein, 11 aa, unidentified
  source 1..11: note = methanogen bacteria
LQVIFRTAAIG

SEQ ID NO: 54396 - protein, 10 aa, unidentified
  source 1..10: note = methanogen bacteria
LSINSSKSKA

SEQ ID NO: 54397 - protein, 11 aa, unidentified
  source 1..11: note = methanogen bacteria
LQIIFRTTAIS

SEQ ID NO: 54398 - protein, 10 aa, unidentified
  source 1..10: note = methanogen bacteria
ISTGVSTTKA

SEQ ID NO: 54399 - protein, 11 aa, unidentified
  source 1..11: note = methanogen bacteria
LQTIFRTTSID

SEQ ID NO: 54400 - protein, 10 aa, unidentified
  source 1..10: note = methanogen bacteria
ISTGVSTRKA

SEQ ID NO: 54401 - protein, 11 aa, unidentified
  source 1..11: note = methanogen bacteria
LQTIFRTTSID

SEQ ID NO: 54402 - protein, 10 aa, unidentified
  source 1..10: note = methanogen bacteria
ISSGVSTKKA

SEQ ID NO: 54403 - protein, 11 aa, unidentified
  source 1..11: note = methanogen bacteria
LQTIFRTTSLD

SEQ ID NO: 54404 - protein, 10 aa, unidentified
  source 1..10: note = methanogen bacteria
ISQGASTRNA

SEQ ID NO: 54405 - protein, 11 aa, unidentified
  source 1..11: note = methanogen bacteria
LQIIFRTTAIG

SEQ ID NO: 54406 - protein, 11 aa, unidentified
  source 1..11: note = methanogen bacteria
LSTNSGERNAM

SEQ ID NO: 54407 - protein, 11 aa, unidentified
  source 1..11: note = methanogen bacteria
LQVIFRTTSIS

SEQ ID NO: 54408 - protein, 10 aa, unidentified
  source 1..10: note = methanogen bacteria
IYNGVDTRKA

SEQ ID NO: 54409 - protein, 11 aa, unidentified
  source 1..11: note = methanogen bacteria
LQIIFRTTSIG

SEQ ID NO: 54410 - protein, 10 aa, unidentified
  source 1..10: note = methanogen bacteria
ISIGSTTTKA

SEQ ID NO: 54411 - protein, 11 aa, unidentified
  source 1..11: note = methanogen bacteria
LQIIFRTTAIS

SEQ ID NO: 54412 - protein, 11 aa, unidentified
  source 1..11: note = methanogen bacteria
LQILFRTTAIG

SEQ ID NO: 54413 - protein, 10 aa, unidentified
  source 1..10: note = methanogen bacteria
IYSGADTRKA

SEQ ID NO: 54414 - protein, 11 aa, unidentified
  source 1..11: note = methanogen bacteria
LQTIFRTTSIG

SEQ ID NO: 54415 - protein, 10 aa, unidentified
  source 1..10: note = methanogen bacteria
LGIHTNKRKA

SEQ ID NO: 54416 - protein, 11 aa, unidentified
  source 1..11: note = methanogen bacteria
LQIIFRTAPIG

SEQ ID NO: 54417 - protein, 79 aa, unidentified
  source 1..79: note = methanogen bacteria
TVFKANPTLNANIEDITYGNDAGLAINLSGVNGEKLNETLMITLNGEDYGTVDLNNGIGGLTFQNLSVGNYTVGIYFSG

SEQ ID NO: 54418 - protein, 10 aa, unidentified
  source 1..10: note = methanogen bacteria
LGIHTNERKA

SEQ ID NO: 54419 - protein, 11 aa, unidentified
  source 1..11: note = methanogen bacteria
LQIIFRTTSIG

SEQ ID NO: 54420 - protein, 47 aa, unidentified
  source 1..47: note = methanogen bacteria
TQMFHKNEALEAFIEKHFHNGTYDKTAAEKIKNQTYYLIDNYSIWSG

SEQ ID NO: 54421 - protein, 10 aa, unidentified
  source 1..10: note = methanogen bacteria
LSINQSIQKP

SEQ ID NO: 54422 - protein, 11 aa, unidentified
  source 1..11: note = methanogen bacteria
LQIIFRTTSIT

SEQ ID NO: 54423 - protein, 10 aa, unidentified
  source 1..10: note = methanogen bacteria
MSINQPEKKA

SEQ ID NO: 54424 - protein, 11 aa, unidentified
  source 1..11: note = methanogen bacteria
LQLIFRTTAIS

SEQ ID NO: 54425 - protein, 11 aa, unidentified
  source 1..11: note = methanogen bacteria
LETVFKTQAIG

SEQ ID NO: 54426 - protein, 10 aa, unidentified
  source 1..10: note = methanogen bacteria
LSINSSESKA

SEQ ID NO: 54427 - protein, 11 aa, unidentified
  source 1..11: note = methanogen bacteria
LQIIFRTTAIS

SEQ ID NO: 54428 - protein, 10 aa, unidentified
  source 1..10: note = methanogen bacteria
ISKGVSTRKA

SEQ ID NO: 54429 - protein, 11 aa, unidentified
  source 1..11: note = methanogen bacteria
LQTVFRTTSIG

SEQ ID NO: 54430 - protein, 10 aa, unidentified
  source 1..10: note = methanogen bacteria
FSINATEQKA

SEQ ID NO: 54431 - protein, 11 aa, unidentified
  source 1..11: note = methanogen bacteria
LQLIFRTTSLN

SEQ ID NO: 54432 - protein, 11 aa, unidentified
  source 1..11: note = methanogen bacteria
KFSFSVYENGG

SEQ ID NO: 54433 - protein, 30 aa, unidentified
  source 1..30: note = methanogen bacteria
LFKGWGSNPSVFFTRTLLHSTSNPYGLTYL

SEQ ID NO: 54434 - protein, 26 aa, unidentified
  source 1..26: note = methanogen bacteria
VSLPGSRTGIMVLFSPNWDYLFDSSL

SEQ ID NO: 54435 - protein, 37 aa, unidentified
  source 1..37: note = methanogen bacteria
LGYAALGNNITITSLVSDGYSLIFVVLPTAFNLMGPW

SEQ ID NO: 54436 - protein, 11 aa, unidentified
  source 1..11: note = methanogen bacteria
FSFSVYENGGG

SEQ ID NO: 54437 - protein, 30 aa, unidentified; identical to SEQ ID NO: 54433
  source 1..30: note = methanogen bacteria

SEQ ID NO: 54438 - protein, 26 aa, unidentified
  source 1..26: note = methanogen bacteria
VSLPGSRTGIMVLFSPNWDYLFDSSL

SEQ ID NO: 54439 - protein, 36 aa, unidentified
  source 1..36: note = methanogen bacteria
GYAALGNHITITSLVSDGYSLIFVVMPTAFNLMGPW

SEQ ID NO: 54440 - protein, 11 aa, unidentified
  source 1..11: note = methanogen bacteria
LQTIFRTTSIG

SEQ ID NO: 54441 - protein, 10 aa, unidentified
  source 1..10: note = methanogen bacteria
LDQTTIIRMD

SEQ ID NO: 54442 - protein, 11 aa, unidentified
  source 1..11: note = methanogen bacteria
LQIIFRTTSIN

SEQ ID NO: 54443 - protein, 11 aa, unidentified
  source 1..11: note = methanogen bacteria
LQVIFRTAPIN

SEQ ID NO: 54444 - protein, 30 aa, unidentified; identical to SEQ ID NO: 54384
  source 1..30: note = methanogen bacteria

SEQ ID NO: 54445 - protein, 24 aa, unidentified
  source 1..24: note = methanogen bacteria
QLPGSRTGIMALFNPNWSVLLDLN

SEQ ID NO: 54446 - protein, 36 aa, unidentified
  source 1..36: note = methanogen bacteria
GYMALGRNIPITSLVSDGFSLIFVVFPNVFNIMDPW

SEQ ID NO: 54447 - protein, 44 aa, unidentified
  source 1..44: note = methanogen bacteria
YNPGILTFDSFNQVHQIASGHYTNWHPFFHTFIEMLLYKIYSSP

SEQ ID NO: 54448 - protein, 16 aa, unidentified
  source 1..16: note = methanogen bacteria
EPEDETSPKAESVKKE

SEQ ID NO: 54449 - protein, 11 aa, unidentified
  source 1..11: note = methanogen bacteria
EGKSSKAETVK

SEQ ID NO: 54450 - protein, 12 aa, unidentified
  source 1..12: note = methanogen bacteria
YPLIGIAKPIET

SEQ ID NO: 54451 - protein, 58 aa, unidentified
  source 1..58: note = methanogen bacteria
ISNHIWGYDIFFEYQFATYVIKNGIWDHTWPHAYNAMLSVVMYAPIFNKLSGMTLTWI

SEQ ID NO: 54452 - protein, 13 aa, unidentified
  source 1..13: note = methanogen bacteria
GFSYGWMVQMARQ

SEQ ID NO: 54453 - protein, 31 aa, unidentified
  source 1..31: note = methanogen bacteria
TADSKPIASLFDALRIVSKNLNTIVLGGSIN

SEQ ID NO: 54454 - protein, 11 aa, unidentified
  source 1..11: note = methanogen bacteria
PAFRGQLSLQR

SEQ ID NO: 54455 - protein, 12 aa, unidentified
  source 1..12: note = methanogen bacteria
YPWFGIAHPIET

SEQ ID NO: 54456 - protein, 60 aa, unidentified
  source 1..60: note = methanogen bacteria
LISNHIWGYDIFFEYQFATYVIKNGIWDYTWPHAYNAMLSVVMYAPIYNKLSGMTLTWIL

SEQ ID NO: 54457 - protein, 13 aa, unidentified
  source 1..13: note = methanogen bacteria
GFSYGWMVQMARQ

SEQ ID NO: 54458 - protein, 32 aa, unidentified
  source 1..32: note = methanogen bacteria
LTADSKPIASLFDALKIVSGNVKTLTVSGAVH

SEQ ID NO: 54459 - protein, 10 aa, unidentified
  source 1..10: note = methanogen bacteria
PFRFMNIVSI

SEQ ID NO: 54460 - protein, 11 aa, unidentified
  source 1..11: note = methanogen bacteria
PSFRGQLSLQR

SEQ ID NO: 54461 - protein, 16 aa, unidentified
  source 1..16: note = methanogen bacteria
MGLTHQIHQSVGIDIS

SEQ ID NO: 54462 - protein, 17 aa, unidentified
  source 1..17: note = methanogen bacteria
RFEYNEAYDDGGAICCK

SEQ ID NO: 54463 - protein, 13 aa, unidentified
  source 1..13: note = methanogen bacteria
GGAISCDMLYFHE

SEQ ID NO: 54464 - protein, 41 aa, unidentified
  source 1..41: note = methanogen bacteria
SVNFSGNGWADRNPIVVHTCHYKGIEFNKDLDVDGNYTFEF

SEQ ID NO: 54465 - protein, 48 aa, unidentified
  source 1..48: note = methanogen bacteria
VGIEDSRYPSNHTIHVNYSDYINVLYRIYKTEDIDEGSEEYLLFTLCD

SEQ ID NO: 54466 - protein, 82 aa, unidentified
  source 1..82: note = methanogen bacteria
VIGNSSSQDFQVFKINSTIKLNDISDIYYEDNVSISFDVENKTIVNIRIQNQDGEVVYDNNVTSDMIQVPNLDAGNYTVTVT

SEQ ID NO: 54467 - protein, 27 aa, unidentified
  source 1..27: note = methanogen bacteria
TIQVIADIDGEYTVTIAGKKIIVNVIN

SEQ ID NO: 54468 - protein, 34 aa, unidentified
  source 1..34: note = methanogen bacteria
EGNVFASVDGDYIVVIKDNSKLVSVKNGVGEFNF

SEQ ID NO: 54469 - protein, 40 aa, unidentified
  source 1..40: note = methanogen bacteria
TDGEYTVVIGDKKIIVNVINGIGTGSIALDAGKYTANIEY

SEQ ID NO: 54470 - protein, 44 aa, unidentified
  source 1..44: note = methanogen bacteria
YNPGILTFDSFNQVHQIASGRYTNWHPFFHTFIEMLLYKIYSSP

SEQ ID NO: 54471 - protein, 26 aa, unidentified
  source 1..26: note = methanogen bacteria
DTSPKAETVEKEDVKKQEEPKETQTQ

SEQ ID NO: 54472 - protein, 72 aa, unidentified
  source 1..72: note = methanogen bacteria
MRGGAVYSSWTRLNIVESDFLNNTASQNAGALYFDKGDLTIEKSNFINNNAVKQLKNTANAIYAHDVNAYFK

SEQ ID NO: 54473 - protein, 17 aa, unidentified
  source 1..17: note = methanogen bacteria
STFDNGGIGVYADFADD

SEQ ID NO: 54474 - protein, 58 aa, unidentified
  source 1..58: note = methanogen bacteria
FINNRADDDNGGAIRSYSGKVTAVNTIFSENSAEHLGGAIYSYGDVYTDNCLFRFNKI

SEQ ID NO: 54475 - protein, 42 aa, unidentified
  source 1..42: note = methanogen bacteria
DAEQCYGGAIYAYENVHINNSTFENNRAEDYGGAIYADNIYI

SEQ ID NO: 54476 - protein, 23 aa, unidentified
  source 1..23: note = methanogen bacteria
PQMFYPSMMRSYSMPSWHPGFDM

SEQ ID NO: 54477 - protein, 17 aa, unidentified
  source 1..17: note = methanogen bacteria
LMMNAAGDSIYYVPTLT

SEQ ID NO: 54478 - protein, 16 aa, unidentified
  source 1..16: note = methanogen bacteria
SIHVSGRVLQQNTQTP

SEQ ID NO: 54479 - protein, 15 aa, unidentified
  source 1..15: note = methanogen bacteria
FKQDSVFLKGTTTDT

SEQ ID NO: 54480 - protein, 47 aa, unidentified
  source 1..47: note = methanogen bacteria
GMQLLNTMMLPGLNINPMLNTISSSDGGKVILQINGVNTTPEEIQTL

SEQ ID NO: 54481 - protein, 38 aa, unidentified
  source 1..38: note = methanogen bacteria
FQRINTNNRNRTGSYQFENSSPILREEISAGGDYSYQM

SEQ ID NO: 54482 - protein, 33 aa, unidentified
  source 1..33: note = methanogen bacteria
LSNQPHNDFNSFLKENGTDKGLIFDGSQQKINV

SEQ ID NO: 54483 - protein, 32 aa, unidentified
  source 1..32: note = methanogen bacteria
YANAASSRNYCEYNDVDTLFSERSELFSDKYS

SEQ ID NO: 54484 - protein, 23 aa, unidentified
  source 1..23: note = methanogen bacteria
IQSFTEQTINQGEEFKSDLNQAE

SEQ ID NO: 54485 - protein, 15 aa, unidentified
  source 1..15: note = methanogen bacteria
RLHFSNVSVTKSYYH

SEQ ID NO: 54486 - protein, 34 aa, unidentified
  source 1..34: note = methanogen bacteria
SQTNPTLMELADTEIRLDSYLAEKGNLLLQPYLN

SEQ ID NO: 54487 - protein, 30 aa, unidentified
  source 1..30: note = methanogen bacteria
HYKHNPIMESKREHGNVFLTMPENMKDWNK

SEQ ID NO: 54488 - protein, 16 aa, unidentified
  source 1..16: note = methanogen bacteria
NHFDSRGNNYSHTHSN

SEQ ID NO: 54489 - protein, 16 aa, unidentified
  source 1..16: note = methanogen bacteria
PFDERLYGETVIKDGN

SEQ ID NO: 54490 - protein, 30 aa, unidentified
  source 1..30: note = methanogen bacteria
NPFKNVSRTIMENKNAQAPFRRESFSDASR

SEQ ID NO: 54491 - protein, 44 aa, unidentified
  source 1..44: note = methanogen bacteria
YNPGILTFDSFNQVHQIASGRYSNWHPFFHTFIEMLLYKIYSSP

SEQ ID NO: 54492 - protein, 26 aa, unidentified
  source 1..26: note = methanogen bacteria
ETSPKAETVEKEDVKKQEEPKETQTQ

SEQ ID NO: 54493 - protein, 27 aa, unidentified
  source 1..27: note = methanogen bacteria
EARVKYWWQDDGSELFGGEGFVYPFDP

SEQ ID NO: 54494 - protein, 49 aa, unidentified
  source 1..49: note = methanogen bacteria
KIAYFISDGATGTITYYLDGTQVAQLPVGELYNIPNLSIGLHTYVLNYS

SEQ ID NO: 54495 - protein, 22 aa, unidentified
  source 1..22: note = methanogen bacteria
ENFDSDSFNLYVNMKPNDAQFG

SEQ ID NO: 54496 - protein, 73 aa, unidentified
  source 1..73: note = methanogen bacteria
VQGDAIELWRGSSDYPTSTKATVYIDNVQFCQLLAEGHTTLPLLSPGRHYLYAYFPGDSKNPKCYDACFVDVQ

SEQ ID NO: 54497 - protein, 68 aa, unidentified
  source 1..68: note = methanogen bacteria
HTDMELEIANAVIDYGETTVITSILPENATGTIDYYVMDQYYPDEDSLNESSQVEYFTDEIFIGRVNV

SEQ ID NO: 54498 - protein, 70 aa, unidentified
  source 1..70: note = methanogen bacteria
TLPILDGGNRIILAKYSGDRFYMNSAARTYLTINRIEPIFEVEASESEFDYGDSVYISHVLDDVATGTIE

SEQ ID NO: 54499 - protein, 10 aa, unidentified
  source 1..10: note = methanogen bacteria
TYLGEAPANE

SEQ ID NO: 54500 - protein, 10 aa, unidentified
  source 1..10: note = methanogen bacteria
GYHEIVAWYL

SEQ ID NO: 54501 - protein, 10 aa, unidentified
  source 1..10: note = methanogen bacteria
ATHSIYVNVK

SEQ ID NO: 54502 - protein, 24 aa, unidentified
  source 1..24: note = methanogen bacteria
NETNYGEIATICPVLPDDATGTIA

SEQ ID NO: 54503 - protein, 14 aa, unidentified
  source 1..14: note = methanogen bacteria
LSNGTYLGEASVNE

SEQ ID NO: 54504 - protein, 62 aa, unidentified
  source 1..62: note = methanogen bacteria
AAGTHEIVANYSGDLNYLAASCNANTIVNKTTIFEVDIDGEVNYGETALVRSVLPDDATGTI

SEQ ID NO: 54505 - protein, 10 aa, unidentified
  source 1..10: note = methanogen bacteria
GTYLGEASVN

SEQ ID NO: 54506 - protein, 12 aa, unidentified
  source 1..12: note = methanogen bacteria
DVGTYVIVANYS

SEQ ID NO: 54507 - protein, 23 aa, unidentified
  source 1..23: note = methanogen bacteria
PQLFYPSMSSTYILPSWEPAWSM

SEQ ID NO: 54508 - protein, 17 aa, unidentified
  source 1..17: note = methanogen bacteria
IMWESSGDSFYILPSIT

SEQ ID NO: 54509 - protein, 23 aa, unidentified
  source 1..23: note = methanogen bacteria
PKLFYPSMSSTYILPSWEPAWSM

SEQ ID NO: 54510 - protein, 17 aa, unidentified
  source 1..17: note = methanogen bacteria
IMWESSGDSFYILPSIS

SEQ ID NO: 54511 - protein, 83 aa, unidentified
  source 1..83: note = methanogen bacteria
FAYGVSAGDNYALSGGSSASSHLRIVTEILAGTYDPANQITINYPYGSGSISGPLFDYIIAAFAYIVTLCGVSQATASAGTLA

SEQ ID NO: 54512 - protein, 11 aa, unidentified
  source 1..11: note = methanogen bacteria
MTTAFSNGTEN

SEQ ID NO: 54513 - protein, 12 aa, unidentified
  source 1..12: note = methanogen bacteria
YYIPLGLWSPVF

SEQ ID NO: 54514 - protein, 38 aa, unidentified
  source 1..38: note = methanogen bacteria
FAPSVSSALLHGSSPQVGALATDLAHQFSRTSISSMAA

SEQ ID NO: 54515 - protein, 22 aa, unidentified
  source 1..22: note = methanogen bacteria
PYLFYPTMSSTYSLPRWGPSWD

SEQ ID NO: 54516 - protein, 16 aa, unidentified
  source 1..16: note = methanogen bacteria
MMGSTGDEYCFPINIY

SEQ ID NO: 54517 - protein, 13 aa, unidentified
  source 1..13: note = methanogen bacteria
LSVEMTLEGLKVN

SEQ ID NO: 54518 - protein, 36 aa, unidentified
  source 1..36: note = methanogen bacteria
EGETVPMVFLKFPDGIETEEGYPDKLFKGFDKKLIK

SEQ ID NO: 54519 - protein, 91 aa, unidentified
  source 1..91: note = methanogen bacteria
MNVTYDRLDFYNVTANVSDENGNAAGNGNVTFYVNGANYTAEIYRGIASVQVPLPLGLNSISAVFESPNYHPSNSSTTYEVSPIALDVNIV

SEQ ID NO: 54520 - protein, 80 aa, unidentified
  source 1..80: note = methanogen bacteria
TLEAVFEGDQSYIASKNSSWVNVTKSQTRINITRISYNSFNLFDIEADVFDQLNQTVSEGTITFIVNNVEYDTGRMISLA

SEQ ID NO: 54521 - protein, 34 aa, unidentified
  source 1..34: note = methanogen bacteria
GNNISVSFNALNYCLSTSHISYEVLPVDLMLNIS

SEQ ID NO: 54522 - protein, 22 aa, unidentified
  source 1..22: note = methanogen bacteria
PQLFYPSMSESFVLPSFGPGWD

SEQ ID NO: 54523 - protein, 17 aa, unidentified
  source 1..17: note = methanogen bacteria
IMWASSDTSFYIIPSLS

SEQ ID NO: 54524 - protein, 22 aa, unidentified
  source 1..22: note = methanogen bacteria
PYLFYPSMSAMYSLPHWGPAWD

SEQ ID NO: 54525 - protein, 19 aa, unidentified
  source 1..19: note = methanogen bacteria
ELMMGSTGADYYFPIHIYP

SEQ ID NO: 54526 - protein, 66 aa, unidentified
  source 1..66: note = methanogen bacteria
MVNGSFEITKTTSEVEVYVEDIVYGEDLEIHIGVINTTTVNIIIKDYKGSIVYNDNVTSSPVIIRN

SEQ ID NO: 54527 - protein, 83 aa, unidentified
  source 1..83: note = methanogen bacteria
IIGNSSSQDFQVFKINSTIKLNDISDIYYEDNVSISFEVENKTIVNIKIQNQDGEVVYDNNITSDMIQVPNLNAGNYTVTVTN

SEQ ID NO: 54528 - protein, 23 aa, unidentified
  source 1..23: note = methanogen bacteria
PYIFVDTMQSYYTLPCWDPGFNM

SEQ ID NO: 54529 - protein, 17 aa, unidentified
  source 1..17: note = methanogen bacteria
ESIRSNTDKLYYPTNYS

SEQ ID NO: 54530 - protein, 22 aa, unidentified
  source 1..22: note = methanogen bacteria
PYIFVDTMKSYYTLPCWDPGFS

SEQ ID NO: 54531 - protein, 17 aa, unidentified
  source 1..17: note = methanogen bacteria
EAIRSNTDKLYYPTNYS

SEQ ID NO: 54532 - protein, 23 aa, unidentified
  source 1..23: note = methanogen bacteria
PYIFVDTMKSFYTLPNWDPGFNM

SEQ ID NO: 54533 - protein, 18 aa, unidentified
  source 1..18: note = methanogen bacteria
ESIRSNSDTLYYPVDYSP

SEQ ID NO: 54534 - protein, 20 aa, unidentified
  source 1..20: note = methanogen bacteria
FMFPFFETSYTIPAWKGGFS

SEQ ID NO: 54535 - protein, 19 aa, unidentified
  source 1..19: note = methanogen bacteria
QVVMASIGEDYYYPRVIHP

SEQ ID NO: 54536 - protein, 12 aa, unidentified
  source 1..12: note = methanogen bacteria
LGLNSPYGKTKA

SEQ ID NO: 54537 - protein, 11 aa, unidentified
  source 1..11: note = methanogen bacteria
LQIIFKTCPIG

SEQ ID NO: 54538 - protein, 23 aa, unidentified
  source 1..23: note = methanogen bacteria
PRMFYPSMATNYSMPSWHPGFDM

SEQ ID NO: 54539 - protein, 18 aa, unidentified
  source 1..18: note = methanogen bacteria
TLMMDAAGDSLYYVPSLT

SEQ ID NO: 54540 - protein, 22 aa, unidentified
  source 1..22: note = methanogen bacteria
PRLFYPSMSSMFSLPIWEPTWD

SEQ ID NO: 54541 - protein, 17 aa, unidentified
  source 1..17: note = methanogen bacteria
FMMQTSGESYYFPINIY

SEQ ID NO: 54542 - protein, 42 aa, unidentified
  source 1..42: note = methanogen bacteria
FVKLTVGGTVTNIEVQDGVATLTTVLVPNSYFVDVTYLGDNN

SEQ ID NO: 54543 - protein, 84 aa, unidentified
  source 1..84: note = methanogen bacteria
NMNRTSVTFTITDITKKNTNIDLNIDVYEDAALVMVDVNESATGLVKLYMVGKESGEEYTMYMDVISIEPGNYTVVATYMGDSV

SEQ ID NO: 54544 - protein, 18 aa, unidentified
  source 1..18: note = methanogen bacteria
LDDMQVSSVAAADFYDDY

SEQ ID NO: 54545 - protein, 23 aa, unidentified
  source 1..23: note = methanogen bacteria
NDFNGDHMDIFGYKFPLFAFDSD

SEQ ID NO: 54546 - protein, 16 aa, unidentified
  source 1..16: note = methanogen bacteria
MDLTHSIHQATGINVS

SEQ ID NO: 54547 - protein, 23 aa, unidentified
  source 1..23: note = methanogen bacteria
HYLSYPSITSLFSLPYLHQIEGM

SEQ ID NO: 54548 - protein, 18 aa, unidentified
  source 1..18: note = methanogen bacteria
AMIWESSSEKFFIIPELS

SEQ ID NO: 54549 - protein, 22 aa, unidentified
  source 1..22: note = methanogen bacteria
PHLFYPTMEATYSLPKWAPGLD

SEQ ID NO: 54550 - protein, 17 aa, unidentified
  source 1..17: note = methanogen bacteria
IMMGSTGNDYWFPIYIY

SEQ ID NO: 54551 - protein, 22 aa, unidentified
  source 1..22: note = methanogen bacteria
PYLFYPTMSSTYSLPRWGPAWD

SEQ ID NO: 54552 - protein, 18 aa, unidentified
  source 1..18: note = methanogen bacteria
GVMMGSTGDDYFFPINIY

SEQ ID NO: 54553 - protein, 22 aa, unidentified
  source 1..22: note = methanogen bacteria
PKLFYPSMSSTYILPSWEPAWS

SEQ ID NO: 54554 - protein, 18 aa, unidentified
  source 1..18: note = methanogen bacteria
KVMWESSGDSFYILPSIS

SEQ ID NO: 54555 - protein, 23 aa, unidentified
  source 1..23: note = methanogen bacteria
PQLFYPSMSATYKLPSWNPAWSM

SEQ ID NO: 54556 - protein, 17 aa, unidentified
  source 1..17: note = methanogen bacteria
IMWESSGDSFYILPSIS

SEQ ID NO: 54557 - protein, 22 aa, unidentified
  source 1..22: note = methanogen bacteria
PPLFYPSMSANYKLPSWDSAWS

SEQ ID NO: 54558 - protein, 18 aa, unidentified
  source 1..18: note = methanogen bacteria
AIMWESSGDSFYILPSIS

SEQ ID NO: 54559 - protein, 18 aa, unidentified
  source 1..18: note = methanogen bacteria
AYKPLTNIFKLPYLMPSG

SEQ ID NO: 54560 - protein, 18 aa, unidentified
  source 1..18: note = methanogen bacteria
NIIWKSSSEKFFILPNIS

SEQ ID NO: 54561 - protein, 21 aa, unidentified
  source 1..21: note = methanogen bacteria
NISYASLTNVFKLPYLTPVNT

SEQ ID NO: 54562 - protein, 18 aa, unidentified
  source 1..18: note = methanogen bacteria
NIIWKSSSKKFFIIPSLS

SEQ ID NO: 54563 - protein, 22 aa, unidentified
  source 1..22: note = methanogen bacteria
PQLFYPSMSATYKLPSWNPVWS

SEQ ID NO: 54564 - protein, 18 aa, unidentified
  source 1..18: note = methanogen bacteria
SIMWESSGDSFYILPSIS

SEQ ID NO: 54565 - protein, 23 aa, unidentified
  source 1..23: note = methanogen bacteria
PQLFYPSMSATYKLPSWQPVWSM

SEQ ID NO: 54566 - protein, 18 aa, unidentified
  source 1..18: note = methanogen bacteria
KIMWESSGDSFYILPSIS

SEQ ID NO: 54567 - protein, 22 aa, unidentified
  source 1..22: note = methanogen bacteria
PQLFYPSMSATYKLPSWNPSWS

SEQ ID NO: 54568 - protein, 18 aa, unidentified
  source 1..18: note = methanogen bacteria
DVMWKSSGDSFYILPSIS

SEQ ID NO: 54569 - protein, 21 aa, unidentified
  source 1..21: note = methanogen bacteria
PLFYPSMIRSYQLPLWNPAWS

SEQ ID NO: 54570 - protein, 18 aa, unidentified
  source 1..18: note = methanogen bacteria
GLMWQSSGDAFYIIPSLT

SEQ ID NO: 54571 - protein, 23 aa, unidentified
  source 1..23: note = methanogen bacteria
PKLFYPTMSSTYILPSWEPAWSL

SEQ ID NO: 54572 - protein, 17 aa, unidentified
  source 1..17: note = methanogen bacteria
IMWESSGDSFYVLPSIS

SEQ ID NO: 54573 - protein, 22 aa, unidentified
  source 1..22: note = methanogen bacteria
PQLFYPSMSSTYILPSWDPKWS

SEQ ID NO: 54574 - protein, 18 aa, unidentified
  source 1..18: note = methanogen bacteria
KVMWESSGDSFYILPSIS

SEQ ID NO: 54575 - protein, 22 aa, unidentified
  source 1..22: note = methanogen bacteria
PQLFYPSMSATYKLPSWDPAWS

SEQ ID NO: 54576 - protein, 16 aa, unidentified
  source 1..16: note = methanogen bacteria
MWESSGDSFYILPSIT

SEQ ID NO: 54577 - protein, 11 aa, unidentified
  source 1..11: note = methanogen bacteria
GASMPFRDDDP

SEQ ID NO: 54578 - protein, 11 aa, unidentified
  source 1..11: note = methanogen bacteria
WTGDTGAVEDL

SEQ ID NO: 54579 - protein, 23 aa, unidentified
  source 1..23: note = methanogen bacteria
PQLFYPSMSATYKLPSWEPAWSM

SEQ ID NO: 54580 - protein, 17 aa, unidentified
  source 1..17: note = methanogen bacteria
IMWESSGDSFYILPSIS

SEQ ID NO: 54581 - protein, 22 aa, unidentified
  source 1..22: note = methanogen bacteria
PNLFYPSMSSTYTLPEWKPAYS

SEQ ID NO: 54582 - protein, 18 aa, unidentified
  source 1..18: note = methanogen bacteria
SVMWQSSGDSFYMVPKIS

SEQ ID NO: 54583 - protein, 23 aa, unidentified
  source 1..23: note = methanogen bacteria
PRLFYPSMMRTFVLPSWAPVWDM

SEQ ID NO: 54584 - protein, 18 aa, unidentified
  source 1..18: note = methanogen bacteria
TMMWQSSGDSLYMIPSLT

SEQ ID NO: 54585 - protein, 23 aa, unidentified
  source 1..23: note = methanogen bacteria
PNLFYPSMSATYILPEWKPAWSM

SEQ ID NO: 54586 - protein, 18 aa, unidentified
  source 1..18: note = methanogen bacteria
DIMWQSSGDSFYILPSIS

SEQ ID NO: 54587 - protein, 23 aa, unidentified
  source 1..23: note = methanogen bacteria
PNLFYPSMSSTYILPEWKPAWSM

SEQ ID NO: 54588 - protein, 17 aa, unidentified
  source 1..17: note = methanogen bacteria
IMWESSGDSFYILPSIS

SEQ ID NO: 54589 - protein, 22 aa, unidentified
  source 1..22: note = methanogen bacteria
YILASPSRFRVWKFPFWHTGGY

SEQ ID NO: 54590 - protein, 18 aa, unidentified
  source 1..18: note = methanogen bacteria
QIMIYSFGDTIYMRPSIS

SEQ ID NO: 54591 - protein, 11 aa, unidentified
  source 1..11: note = methanogen bacteria
GADMPFRGDDP

SEQ ID NO: 54592 - protein, 11 aa, unidentified
  source 1..11: note = methanogen bacteria
WTGDTGAVEDL

SEQ ID NO: 54593 - protein, 22 aa, unidentified
  source 1..22: note = methanogen bacteria
PDLFYPSMTSRYSLPQWNPGFD

SEQ ID NO: 54594 - protein, 17 aa, unidentified
  source 1..17: note = methanogen bacteria
LMLNASGESMYHVPVLT

SEQ ID NO: 54595 - protein, 23 aa, unidentified
  source 1..23: note = methanogen bacteria
PQMFYPSMQTNYSMPSWNPGFDM

SEQ ID NO: 54596 - protein, 17 aa, unidentified
  source 1..17: note = methanogen bacteria
LMMNAAGDSLYYIPTLT

SEQ ID NO: 54597 - protein, 23 aa, unidentified
  source 1..23: note = methanogen bacteria
PQMFYPTMTNRFSLPVWQPGFDM

SEQ ID NO: 54598 - protein, 17 aa, unidentified
  source 1..17: note = methanogen bacteria
LMLNAAGDSLYYVPSLT

SEQ ID NO: 54599 - protein, 23 aa, unidentified
  source 1..23: note = methanogen bacteria
PRLFYPSMTSRYSLPVWHPGFDM

SEQ ID NO: 54600 - protein, 17 aa, unidentified
  source 1..17: note = methanogen bacteria
LMMNAAGDSLYYIPSLT

SEQ ID NO: 54601 - protein, 22 aa, unidentified
  source 1..22: note = methanogen bacteria
PNLFYPTMSYRYSLPAWHPGFD

SEQ ID NO: 54602 - protein, 17 aa, unidentified
  source 1..17: note = methanogen bacteria
LMMNAAGESLYYIPSLT

SEQ ID NO: 54603 - protein, 23 aa, unidentified
  source 1..23: note = methanogen bacteria
PRMFYPTMTATYSMPSWNPGFDM

SEQ ID NO: 54604 - protein, 18 aa, unidentified
  source 1..18: note = methanogen bacteria
TLMMNAAGDSLYYIPKLT

SEQ ID NO: 54605 - protein, 23 aa, unidentified
  source 1..23: note = methanogen bacteria
PQMFYPSMQTNYSMPSWNPGFDM

SEQ ID NO: 54606 - protein, 17 aa, unidentified
  source 1..17: note = methanogen bacteria
LMMNAAGDSLYYIPTLT

SEQ ID NO: 54607 - protein, 23 aa, unidentified
  source 1..23: note = methanogen bacteria
PRMFYPTMAATYSMPRWYPGFDM

SEQ ID NO: 54608 - protein, 18 aa, unidentified
  source 1..18: note = methanogen bacteria
TLMMDAAGDSLYYIPKLT

SEQ ID NO: 54609 - protein, 23 aa, unidentified
  source 1..23: note = methanogen bacteria
PKMFYPSMSVNYSMPSWHPGFDM

SEQ ID NO: 54610 - protein, 17 aa, unidentified
  source 1..17: note = methanogen bacteria
LMMNAAGDSLYYVPSLT

SEQ ID NO: 54611 - protein, 23 aa, unidentified
  source 1..23: note = methanogen bacteria
PQMFYPTMAATYSMPSWNPGFDM

SEQ ID NO: 54612 - protein, 18 aa, unidentified
  source 1..18: note = methanogen bacteria
TLMMNAAGDSLYYIPTLT

SEQ ID NO: 54613 - protein, 23 aa, unidentified
  source 1..23: note = methanogen bacteria
PRMFYPTMAATYSMPVWNPGFDM

SEQ ID NO: 54614 - protein, 18 aa, unidentified
  source 1..18: note = methanogen bacteria
TLMMNAAGDSLYYIPKLA

SEQ ID NO: 54615 - protein, 23 aa, unidentified
  source 1..23: note = methanogen bacteria
PQMFYPTMTVSYSMPSWNPGFDM

SEQ ID NO: 54616 - protein, 17 aa, unidentified
  source 1..17: note = methanogen bacteria
LMMNAAGNSLYYIPSLT

SEQ ID NO: 54617 - protein, 23 aa, unidentified
  source 1..23: note = methanogen bacteria
PQMFYPTMSTMYSMPAWHPGFDM

SEQ ID NO: 54618 - protein, 18 aa, unidentified
  source 1..18: note = methanogen bacteria
TLMLNAAGESLYYVPTLT

SEQ ID NO: 54619 - protein, 19 aa, unidentified
  source 1..19: note = methanogen bacteria
FYPSMTSRFSLPVWKPGWN

SEQ ID NO: 54620 - protein, 17 aa, unidentified
  source 1..17: note = methanogen bacteria
LMMDATGDSFYYVPSLT

SEQ ID NO: 54621 - protein, 21 aa, unidentified
  source 1..21: note = methanogen bacteria
NLFYPTMTYRYSLPEWNPGFD

SEQ ID NO: 54622 - protein, 18 aa, unidentified
  source 1..18: note = methanogen bacteria
TLMVDAAGESLYYIPSLT

SEQ ID NO: 54623 - protein, 23 aa, unidentified
  source 1..23: note = methanogen bacteria
PSLFFPSMSAFYTLPSWKGGFDI

SEQ ID NO: 54624 - protein, 18 aa, unidentified
  source 1..18: note = methanogen bacteria
RLLMDYSGSSFYYPIHYS

SEQ ID NO: 54625 - protein, 44 aa, unidentified; identical to SEQ ID NO: 54447
  source 1..44: note = methanogen bacteria

SEQ ID NO: 54626 - protein, 32 aa, unidentified
  source 1..32: note = methanogen bacteria
NLTPEEVNSILNEPEDKTSPTETDEKEDTYDE

SEQ ID NO: 54627 - protein, 51 aa, unidentified
  source 1..51: note = methanogen bacteria
FPKGNPKKATNTTKKNKPTTTNTTKKNKPTTTKTTKKNKPTTTKTTKKNNP

SEQ ID NO: 54628 - protein, 23 aa, unidentified
  source 1..23: note = methanogen bacteria
PRMFYPSMATNYSMPIWYPGFDM

SEQ ID NO: 54629 - protein, 17 aa, unidentified
  source 1..17: note = methanogen bacteria
LMMNAAGDSLYYVPTLT

SEQ ID NO: 54630 - protein, 23 aa, unidentified
  source 1..23: note = methanogen bacteria
PPIFYPSMIKTYKLPLWSPTGNM

SEQ ID NO: 54631 - protein, 18 aa, unidentified
  source 1..18: note = methanogen bacteria
DLMWASSGNSFYTIPKLT

SEQ ID NO: 54632 - protein, 23 aa, unidentified
  source 1..23: note = methanogen bacteria
PQIFYPPMARSYSLPVWSSSVNM

SEQ ID NO: 54633 - protein, 18 aa, unidentified
  source 1..18: note = methanogen bacteria
DLIWSSSGNSLYVIPSLT

SEQ ID NO: 54634 - protein, 21 aa, unidentified
  source 1..21: note = methanogen bacteria
PIFYPSMIKAYDLPFWGPAGD

SEQ ID NO: 54635 - protein, 18 aa, unidentified
  source 1..18: note = methanogen bacteria
DIMWTSSGTSFYIIPSLT

SEQ ID NO: 54636 - protein, 23 aa, unidentified
  source 1..23: note = methanogen bacteria
PQMFYPSMKTNYSMPSWNPGFDV

SEQ ID NO: 54637 - protein, 18 aa, unidentified
  source 1..18: note = methanogen bacteria
TLMMNAAGDSLYYIPTLT

SEQ ID NO: 54638 - protein, 19 aa, unidentified
  source 1..19: note = methanogen bacteria
FYPSMIRSYDLPFWGPAGD

SEQ ID NO: 54639 - protein, 18 aa, unidentified
  source 1..18: note = methanogen bacteria
GAMWTSSETSFYVIPSLT

SEQ ID NO: 54640 - protein, 19 aa, unidentified
  source 1..19: note = methanogen bacteria
LYPVMEHLFILPSWKTVSG

SEQ ID NO: 54641 - protein, 18 aa, unidentified
  source 1..18: note = methanogen bacteria
MIMCASAGDSFYIVPRLS

SEQ ID NO: 54642 - protein, 23 aa, unidentified
  source 1..23: note = methanogen bacteria
PQMFYPSMMRSYSMPSWHPGFDM

SEQ ID NO: 54643 - protein, 18 aa, unidentified
  source 1..18: note = methanogen bacteria
TLMMNAAGDSLYYVPTLT

SEQ ID NO: 54644 - protein, 23 aa, unidentified
  source 1..23: note = methanogen bacteria
PEMFYPSMTSRYSLPVWHPGFDI

SEQ ID NO: 54645 - protein, 16 aa, unidentified
  source 1..16: note = methanogen bacteria
MMDAAGDSFYYVPSLT

SEQ ID NO: 54646 - protein, 78 aa, unidentified
  source 1..78: note = methanogen bacteria
IIGNDVYFMIVVTNTGNCDLSDVKVSEIFNSNNLTLVDYNNKSLWSMSGDVFTYYDVLAPGESVNFTIWFTTLVNGTV

SEQ ID NO: 54647 - protein, 16 aa, unidentified
  source 1..16: note = methanogen bacteria
TVNASSNMTDNKTANN

SEQ ID NO: 54648 - protein, 73 aa, unidentified
  source 1..73: note = methanogen bacteria
NLTAFKVIVTNTGDCDLSDVVVSEIYNHNQLKFARFSGDGWINSTDVYRYGGVLKPGESANFTIWFTTLVNGT

SEQ ID NO: 54649 - protein, 19 aa, unidentified
  source 1..19: note = methanogen bacteria
TDNKTANNETRVYKPNMTV

SEQ ID NO: 54650 - protein, 99 aa, unidentified
  source 1..99: note = methanogen bacteria
IGDQISFIVNVTNTGNCVLHNVTVTEIYKLNELSYVNHTNKDLWIKSGNIFKYKGNLAAGQSVVFTIVFDTLVNGTLVNTVNATSDETDNVTAKNKTLV

SEQ ID NO: 54651 - protein, 58 aa, unidentified
  source 1..58: note = methanogen bacteria
IIGDNVYFMIVVKNTGDCNLTDVKVTEIYNSNELTLVDFDNKSLWSMSGDVFAYNGVL

SEQ ID NO: 54652 - protein, 53 aa, unidentified
  source 1..53: note = methanogen bacteria
GSNFEFINCTLANGTSYTGDTWYIGNLNNGTNVTFTVYTRAIHDGIDIPHNVS

SEQ ID NO: 54653 - protein, 68 aa, unidentified
  source 1..68: note = methanogen bacteria
GTNASNIKLSELIPKEFEFMYSSDDVAYNNETGVWTIGNLANGTNVTLKIYTHAKVPASDIENKVNVT

SEQ ID NO: 54654 - protein, 20 aa, unidentified
  source 1..20: note = methanogen bacteria
NNLTVVGPRGATDMVNCTIA

SEQ ID NO: 54655 - protein, 27 aa, unidentified
  source 1..27: note = methanogen bacteria
SVNITSDKDEYFVDDIAVWTITVHNAA

SEQ ID NO: 54656 - protein, 13 aa, unidentified
  source 1..13: note = methanogen bacteria
PNGINNTDNCTVY

SEQ ID NO: 54657 - protein, 27 aa, unidentified
  source 1..27: note = methanogen bacteria
ISVNITSDKDEYFIDDIAVWTITVSNA

SEQ ID NO: 54658 - protein, 22 aa, unidentified
  source 1..22: note = methanogen bacteria
PYIFVDTMKSYYTLPCWDPGFN

SEQ ID NO: 54659 - protein, 17 aa, unidentified
  source 1..17: note = methanogen bacteria
EAIRSNTDKFYYPTNYT

SEQ ID NO: 54660 - protein, 19 aa, unidentified
  source 1..19: note = methanogen bacteria
YVKGIPLLNPTLRYQLKAS

SEQ ID NO: 54661 - protein, 87 aa, unidentified
  source 1..87: note = methanogen bacteria
RSLNEMMITSAINPIYTLQSRVDFTVHVLNELDFLSGNFGLMHGGFILKTLPGSDYGPRMMVGKLISWRNGITITPTLIGGMIIDFG

SEQ ID NO: 54662 - protein, 23 aa, unidentified
  source 1..23: note = methanogen bacteria
ITVISRLFSGEISFEQAVMGIIT

SEQ ID NO: 54663 - protein, 23 aa, unidentified
  source 1..23: note = methanogen bacteria
PQMFYPTMSKSYSMPSWHPGFDM

SEQ ID NO: 54664 - protein, 17 aa, unidentified
  source 1..17: note = methanogen bacteria
LMLNAAGDSLYYVPSLT

SEQ ID NO: 54665 - protein, 13 aa, unidentified
  source 1..13: note = methanogen bacteria
ASVRVLKAVTPNS

SEQ ID NO: 54666 - protein, 38 aa, unidentified
  source 1..38: note = methanogen bacteria
KRIIYSGGGKDIEDRSHHAWIIPLFTITSAVKGCQMNT

SEQ ID NO: 54667 - protein, 28 aa, unidentified
  source 1..28: note = methanogen bacteria
YRMPQTLSRGGIGLEYVLAIPGLNPLLP

SEQ ID NO: 54668 - protein, 23 aa, unidentified
  source 1..23: note = methanogen bacteria
PQMFYPTMSATYSMPSWNPGFDV

SEQ ID NO: 54669 - protein, 18 aa, unidentified
  source 1..18: note = methanogen bacteria
TLMMNAAGDSLYYVPSLT

SEQ ID NO: 54670 - protein, 40 aa, unidentified
  source 1..40: note = methanogen bacteria
LGRYPVAPIDVIKTILSPIFPSLVVSSELNSIVFTIRLPR

SEQ ID NO: 54671 - protein, 10 aa, unidentified
  source 1..10: note = methanogen bacteria
IFKNPLVSPD

SEQ ID NO: 54672 - protein, 28 aa, unidentified
  source 1..28: note = methanogen bacteria
KFMADPYDKLPQITYWLMGSLSAVNFDK

SEQ ID NO: 54673 - protein, 10 aa, unidentified
  source 1..10: note = methanogen bacteria
RTFISIEIPI

SEQ ID NO: 54674 - protein, 16 aa, unidentified
  source 1..16: note = methanogen bacteria
MGLTHSIHQATGINIS

SEQ ID NO: 54675 - protein, 10 aa, unidentified
  source 1..10: note = methanogen bacteria
LDLPVPLKDD

SEQ ID NO: 54676 - protein, 12 aa, unidentified
  source 1..12: note = methanogen bacteria
LYDGRMEFMDHL

SEQ ID NO: 54677 - protein, 12 aa, unidentified
  source 1..12: note = methanogen bacteria
SATMEITPFEAI

SEQ ID NO: 54678 - protein, 23 aa, unidentified
  source 1..23: note = methanogen bacteria
PQMFYPSMQTNYSMPSWNPGFDM

SEQ ID NO: 54679 - protein, 18 aa, unidentified
  source 1..18: note = methanogen bacteria
TLMMNAAGDSLYYIPTLT

SEQ ID NO: 54680 - protein, 22 aa, unidentified
  source 1..22: note = methanogen bacteria
PKLFYPSMSATYILPSWKPAWS

SEQ ID NO: 54681 - protein, 17 aa, unidentified
  source 1..17: note = methanogen bacteria
VMWESSGDSFYILPSIS

SEQ ID NO: 54682 - protein, 19 aa, unidentified
  source 1..19: note = methanogen bacteria
AYPPLAKLFVMPYFTPVGG

SEQ ID NO: 54683 - protein, 19 aa, unidentified
  source 1..19: note = methanogen bacteria
DMVWKSSSEKSFILPSISW

SEQ ID NO: 54684 - protein, 22 aa, unidentified
  source 1..22: note = methanogen bacteria
PYIFVDTMKSYYTLPCWDPGFN

SEQ ID NO: 54685 - protein, 17 aa, unidentified
  source 1..17: note = methanogen bacteria
ESIRSNTDKLYYPADYS

SEQ ID NO: 54686 - protein, 23 aa, unidentified
  source 1..23: note = methanogen bacteria
PQMFYPSMQTNYSMPSWNPGFDM

SEQ ID NO: 54687 - protein, 17 aa, unidentified
  source 1..17: note = methanogen bacteria
LMMNAAGDSLYYIPTLT

SEQ ID NO: 54688 - protein, 43 aa, unidentified
  source 1..43: note = methanogen bacteria
GSGGIYPVEIMNTIFGILYPYLPMTHGINIVREAQLGLLWNNY

SEQ ID NO: 54689 - protein, 14 aa, unidentified
  source 1..14: note = methanogen bacteria
GIWKFSFSVYENGG

SEQ ID NO: 54690 - protein, 30 aa, unidentified; identical to SEQ ID NO: 54433
  source 1..30: note = methanogen bacteria

SEQ ID NO: 54691 - protein, 25 aa, unidentified
  source 1..25: note = methanogen bacteria
SLPGSRTGIMVLFSPNWDYLFDSSL

SEQ ID NO: 54692 - protein, 36 aa, unidentified
  source 1..36: note = methanogen bacteria
GYAALGNNITITSLVSDGYSLIFVVLPTAFNLMGPW

SEQ ID NO: 54693 - protein, 44 aa, unidentified; identical to SEQ ID NO: 54470
  source 1..44: note = methanogen bacteria

SEQ ID NO: 54694 - protein, 20 aa, unidentified
  source 1..20: note = methanogen bacteria
LTPEQKVSPSETVKKEDEYD

SEQ ID NO: 54695 - protein, 23 aa, unidentified
  source 1..23: note = methanogen bacteria
LENSSAFFNIDDLSAVNIVFQLF

SEQ ID NO: 54696 - protein, 90 aa, unidentified
  source 1..90: note = methanogen bacteria
IHGSSLSLLNISANQHSALFGVPFTVHGDEFSVATPFAFSQYFNNFAYFSDIVRSVPTDMFLLYGQPVLDIASLFRPFFWGYLFLPKGMG

SEQ ID NO: 54697 - protein, 56 aa, unidentified
  source 1..56: note = methanogen bacteria
YDALFTTLNTYYPGGRKYFGGVDLYYGAANPTYLLDYMRTLFYALTPQQLPVKISL

SEQ ID NO: 54698 - protein, 19 aa, unidentified
  source 1..19: note = methanogen bacteria
ITFPEIVGKITLLSMSMST

SEQ ID NO: 54699 - protein, 13 aa, unidentified
  source 1..13: note = methanogen bacteria
EEIGNRLVPAVNN

SEQ ID NO: 54700 - protein, 32 aa, unidentified
  source 1..32: note = methanogen bacteria
EGADAFGDIGVLDFLTGDVWRPYADSYGSATL

SEQ ID NO: 54701 - protein, 15 aa, unidentified
  source 1..15: note = methanogen bacteria
IHSMFPDQTTSGLTW

SEQ ID NO: 54702 - protein, 39 aa, unidentified
  source 1..39: note = methanogen bacteria
GNTAVFPDPAWDVFSGIRTLTATLAIEMPEVVVGSTWYS

SEQ ID NO: 54703 - protein, 27 aa, unidentified
  source 1..27: note = methanogen bacteria
QALPALSLDFITEDPVRAGRSGGIYPA

SEQ ID NO: 54704 - protein, 14 aa, unidentified
  source 1..14: note = methanogen bacteria
TTLGPVIGATGYNL

SEQ ID NO: 54705 - protein, 38 aa, unidentified
  source 1..38: note = methanogen bacteria
AVVVQSSVSDYSLTNPVMALPYHLYFLATEGRADPSMT

SEQ ID NO: 54706 - protein, 13 aa, unidentified
  source 1..13: note = methanogen bacteria
VGRFQQEAVTLLG

SEQ ID NO: 54707 - protein, 23 aa, unidentified
  source 1..23: note = methanogen bacteria
ENSHLFYQIDGIEYLKILLGVIS

SEQ ID NO: 54708 - protein, 90 aa, unidentified
  source 1..90: note = methanogen bacteria
IHGSSIGVINFAGESHKPLLGSLRWTKTDEYAINTMFAFSQYFNGFGYFSEIIRAFPTDVFAIGELPILDLVVLFKPFQWGYLLFSQGRG

SEQ ID NO: 54709 - protein, 59 aa, unidentified
  source 1..59: note = methanogen bacteria
KSSQAINTLSNTIYPGLRLSTGGANFYWLSGDPYLCFDYMRNLFEPLKPTQIISRISMS

SEQ ID NO: 54710 - protein, 19 aa, unidentified
  source 1..19: note = methanogen bacteria
FTFPEAYAKITLLGKTQPS

SEQ ID NO: 54711 - protein, 58 aa, unidentified
  source 1..58: note = methanogen bacteria
GQINIHSDSATASLLVKSMIDNISLIPSSWNYANGDVWILGSHLFVFLPQIFISDVSL

SEQ ID NO: 54712 - protein, 50 aa, unidentified
  source 1..50: note = methanogen bacteria
CHSNYYHVHFTSNDDLILPNSITDLYNNIQVTLANFFYNFGYNGNVKIFS

SEQ ID NO: 54713 - protein, 10 aa, unidentified
  source 1..10: note = methanogen bacteria
GNASPERLKE

SEQ ID NO: 54714 - protein, 11 aa, unidentified
  source 1..11: note = methanogen bacteria
VDVGIKNKQIN

SEQ ID NO: 54715 - protein, 11 aa, unidentified
  source 1..11: note = methanogen bacteria
TMVINNSITIG

SEQ ID NO: 54716 - protein, 13 aa, unidentified
  source 1..13: note = methanogen bacteria
KYTQSKRQPKNLP

SEQ ID NO: 54717 - protein, 31 aa, unidentified
  source 1..31: note = methanogen bacteria
MQWVSQNIGIMMLNAGVDPFLHDLVISGILG

SEQ ID NO: 54718 - protein, 46 aa, unidentified
  source 1..46: note = methanogen bacteria
FGTVDGKWFVYLGDNQTSGSYLAAFGNAFTWMFAPMGFGDKWELSV

SEQ ID NO: 54719 - protein, 27 aa, unidentified
  source 1..27: note = methanogen bacteria
LAVLLDSSADSEGFITAASLANYTTVG

SEQ ID NO: 54720 - protein, 39 aa, unidentified
  source 1..39: note = methanogen bacteria
TDWINDTLTADLSDAVSTWCEDNEVADALSGLVVDGIIS

SEQ ID NO: 54721 - protein, 43 aa, unidentified
  source 1..43: note = methanogen bacteria
SYDWGLSYLGSNTTEGSALSDIGHALNPIFAWSGFGDHWEITV

SEQ ID NO: 54722 - protein, 28 aa, unidentified
  source 1..28: note = methanogen bacteria
LAVLLGDPGDAEGFITADALAAYCSSNT

SEQ ID NO: 54723 - protein, 40 aa, unidentified
  source 1..40: note = methanogen bacteria
SDYINDELVVWVQDHAAEAMDSAGVDTVVADMMLTGVIGG

SEQ ID NO: 54724 - protein, 45 aa, unidentified
  source 1..45: note = methanogen bacteria
SFTFTGEYLGDSATTDSILSAIGKALCWIFVPLGFGGSETWELTV

SEQ ID NO: 54725 - protein, 31 aa, unidentified
  source 1..31: note = methanogen bacteria
AVLLDSAVGIDGLPTMEVLTEYLSVTAYPEA

SEQ ID NO: 54726 - protein, 50 aa, unidentified
  source 1..50: note = methanogen bacteria
GDITGIGTYLTDWLNGYIEDPIGTSVEQWCADNNVSEPLTGLIMSAFIGG

SEQ ID NO: 54727 - protein, 44 aa, unidentified
  source 1..44: note = methanogen bacteria
SYDPSFNYLGADATTDSILQTIGQAVCVIFQPLGWADHWELTVG

SEQ ID NO: 54728 - protein, 28 aa, unidentified
  source 1..28: note = methanogen bacteria
LGTLFSLDEVGDAGEEYWDILAAYLTPA

SEQ ID NO: 54729 - protein, 50 aa, unidentified
  source 1..50: note = methanogen bacteria
GDFVGIGTYLTDWLNGFIENPIGTSVEEWCADNDVSDPLTGLIMSAFIGG

SEQ ID NO: 54730 - protein, 44 aa, unidentified
  source 1..44: note = methanogen bacteria
SYDGSFNYPGADATTDSILQSIGEVISIIFQPLGWEDHWELTVG

SEQ ID NO: 54731 - protein, 26 aa, unidentified
  source 1..26: note = methanogen bacteria
GTLFSFDEVSEAGEEYWAILATYITP

SEQ ID NO: 54732 - protein, 21 aa, unidentified
  source 1..21: note = methanogen bacteria
VADKEIDVTRLLYSSMVNGGI

SEQ ID NO: 54733 - protein, 15 aa, unidentified
  source 1..15: note = methanogen bacteria
FTHNYDYRFDRLKPA

SEQ ID NO: 54734 - protein, 10 aa, unidentified
  source 1..10: note = methanogen bacteria
SSIKACIKPV

SEQ ID NO: 54735 - protein, 10 aa, unidentified
  source 1..10: note = methanogen bacteria
AGSVVDIVLK

SEQ ID NO: 54736 - protein, 76 aa, unidentified
  source 1..76: note = methanogen bacteria
AEIISSKYDVNYDRLSTCLFVIGGSAAAGALGGVAGYWAVTAGTSAQPVQNGVSFQFGIEEDEVIEDAVVKTLFGR

SEQ ID NO: 54737 - protein, 64 aa, unidentified
  source 1..64: note = methanogen bacteria
RTNQGGAITWMGSDGEISYCSFKNNHVDYPNDGGAIYWAGENGKITYCEFLDNNAFCGSAVYWS

SEQ ID NO: 54738 - protein, 24 aa, unidentified
  source 1..24: note = methanogen bacteria
TNKGGAIVWNGDNGLVSNCAFKNN

SEQ ID NO: 54739 - protein, 43 aa, unidentified
  source 1..43: note = methanogen bacteria
GAIFWNGDDGRITDCEFYDNAAWLGSAIYWAGNDGVVEYSKFN

SEQ ID NO: 54740 - protein, 24 aa, unidentified
  source 1..24: note = methanogen bacteria
KKGKYTIKTTYNGLTNSNKIIVKK

SEQ ID NO: 54741 - protein, 36 aa, unidentified
  source 1..36: note = methanogen bacteria
YTGFIGAGNYYPDAYEEHIDWFTVGNFTLTFGFYID

SEQ ID NO: 54742 - protein, 25 aa, unidentified
  source 1..25: note = methanogen bacteria
MNGHLEYTYVFNVDNLAAAYSANPG

SEQ ID NO: 54743 - protein, 24 aa, unidentified
  source 1..24: note = methanogen bacteria
LMASAISVEGGGIVIENIAEFTAG

SEQ ID NO: 54744 - protein, 10 aa, unidentified
  source 1..10: note = methanogen bacteria
ELFEGNINNT

SEQ ID NO: 54745 - protein, 43 aa, unidentified
  source 1..43: note = methanogen bacteria
WEHVFTFSQVGAVANGDAISYFLVGGAGKVFEISLDPVLELFK

SEQ ID NO: 54746 - protein, 62 aa, unidentified
  source 1..62: note = methanogen bacteria
AIPKWQLQHSINISNWDSYIYLDNGRSFAGMGWGDLPQIAPFVSFMLSIMFRLNGNVYAGAI

SEQ ID NO: 54747 - protein, 62 aa, unidentified
  source 1..62: note = methanogen bacteria
YTGNPIPFFGQFAGTVSNVKVLDSGYMPDPWYYLTYLPNYLSSVMGGSTTAADLLTPSKNTP

SEQ ID NO: 54748 - protein, 14 aa, unidentified
  source 1..14: note = methanogen bacteria
RNFINTNCSNVSIF

SEQ ID NO: 54749 - protein, 12 aa, unidentified
  source 1..12: note = methanogen bacteria
SYFYNNSVGYNG

SEQ ID NO: 54750 - protein, 13 aa, unidentified
  source 1..13: note = methanogen bacteria
VSESLMDIDNSLF

SEQ ID NO: 54751 - protein, 78 aa, unidentified
  source 1..78: note = methanogen bacteria
KTNISIIQLNDTVYTRNNQNQIFFQILDNGGSNVERGKLILNIDNNNYTASVVNGIAEFDNVLLSHTGFFNCNVFYID

SEQ ID NO: 54752 - protein, 39 aa, unidentified
  source 1..39: note = methanogen bacteria
FGPSHSMSLSEAAGNLVSAIDKGGKGLTNDELYVYESRL

SEQ ID NO: 54753 - protein, 14 aa, unidentified
  source 1..14: note = methanogen bacteria
ASGFTLWGLLSSSN

SEQ ID NO: 54754 - protein, 27 aa, unidentified
  source 1..27: note = methanogen bacteria
ILTTSDSEDLQNAVSWLYGSFTSVDWD

SEQ ID NO: 54755 - protein, 22 aa, unidentified
  source 1..22: note = methanogen bacteria
ENSSYFYTIPKTIILTEFLRFF

SEQ ID NO: 54756 - protein, 90 aa, unidentified
  source 1..90: note = methanogen bacteria
LHGSSIAKLDISDMMHKSIFGIARNIRSDEFNVNTMFAFSQYYNNFNYFSAIPRAAPTDMFIVYGQPVWDLLILYRPFLIGYLFLSPAKG

SEQ ID NO: 54757 - protein, 51 aa, unidentified
  source 1..51: note = methanogen bacteria
MSWDTIVTVLNTSYPGGRVFTGGGQITKLGEYAANLIFPLFPEKSPDLVNN

SEQ ID NO: 54758 - protein, 19 aa, unidentified
  source 1..19: note = methanogen bacteria
GNWPELIAKVTLLGKSLNE

SEQ ID NO: 54759 - protein, 14 aa, unidentified
  source 1..14: note = methanogen bacteria
YFGTFILFELDTLT

SEQ ID NO: 54760 - protein, 23 aa, unidentified
  source 1..23: note = methanogen bacteria
TLQVDGVVFSLTKEYHYEILGKP

SEQ ID NO: 54761 - protein, 10 aa, unidentified
  source 1..10: note = methanogen bacteria
ISSGFTIGPL

SEQ ID NO: 54762 - protein, 11 aa, unidentified
  source 1..11: note = methanogen bacteria
ISTDFNIGPHY

SEQ ID NO: 54763 - protein, 11 aa, unidentified
  source 1..11: note = methanogen bacteria
ISTDFNIGPAY

SEQ ID NO: 54764 - protein, 10 aa, unidentified
  source 1..10: note = methanogen bacteria
IPDVYVGFYG

SEQ ID NO: 54765 - protein, 10 aa, unidentified
  source 1..10: note = methanogen bacteria
ISDDFNVGFW

SEQ ID NO: 54766 - protein, 11 aa, unidentified
  source 1..11: note = methanogen bacteria
SADFTIGPEYN

SEQ ID NO: 54767 - protein, 10 aa, unidentified
  source 1..10: note = methanogen bacteria
CSDFTYTFWY

SEQ ID NO: 54768 - protein, 11 aa, unidentified
  source 1..11: note = methanogen bacteria
ISTDFTVGPWY

SEQ ID NO: 54769 - protein, 10 aa, unidentified
  source 1..10: note = methanogen bacteria
SADFSIGPWY

SEQ ID NO: 54770 - protein, 11 aa, unidentified
  source 1..11: note = methanogen bacteria
ISTDFTVGPWY

SEQ ID NO: 54771 - protein, 10 aa, unidentified
  source 1..10: note = methanogen bacteria
STDFTVGPWY

SEQ ID NO: 54772 - protein, 10 aa, unidentified
  source 1..10: note = methanogen bacteria
SADFTIGPWY

SEQ ID NO: 54773 - protein, 39 aa, unidentified
  source 1..39: note = methanogen bacteria
VNTATVTGNEYDYNPNNNKASKTINVPKAADLSINKVVN

SEQ ID NO: 54774 - protein, 84 aa, unidentified
  source 1..84: note = methanogen bacteria
DLVKWTLTVRNIGPDSASNVTVSDILPAGLIYQSYSASVGSYINGIWYIGNLAKGDSVTLNIVCKVNKTGSITNVASVTATEYD

SEQ ID NO: 54775 - protein, 98 aa, unidentified
  source 1..98: note = methanogen bacteria
KTNNNDDESIDVPKAADLEIKKLVNNSSPNYHQYVKWSIIVKNNGPDDAHGVFVEDILPDGLVVMAANGDYDGKKWNIGTLNAFSSKTLEITTLVNKT

SEQ ID NO: 54776 - protein, 10 aa, unidentified
  source 1..10: note = methanogen bacteria
STDFTIGPWY

SEQ ID NO: 54777 - protein, 18 aa, unidentified
  source 1..18: note = methanogen bacteria
DNADLVQNFSNSFFKHFS

SEQ ID NO: 54778 - protein, 90 aa, unidentified
  source 1..90: note = methanogen bacteria
IHGSSINELNFFGVNHKTLLGVSRPIRGDEYVVNTMFAFSQYLNDFAYFSDIVRASTTDMFIIYGQPVLDIGMIFRPFLTGYLFLNQGQG

SEQ ID NO: 54779 - protein, 54 aa, unidentified
  source 1..54: note = methanogen bacteria
SLETIKIILNTSYPGSEVFNGGGDVNIFSYYIPTLFYPLKQDGILFGSNVCNFS

SEQ ID NO: 54780 - protein, 20 aa, unidentified
  source 1..20: note = methanogen bacteria
IHLPDFIVDLTLRGHIKNSR

SEQ ID NO: 54781 - protein, 16 aa, unidentified
  source 1..16: note = methanogen bacteria
GNMQVYLIESSKTPMT

SEQ ID NO: 54782 - protein, 58 aa, unidentified
  source 1..58: note = methanogen bacteria
WQLQHSINISNWDSYIYLDNGRSFAGMGWGDLPQIAPFVSFMLSIMFRLNGNTYAGAI

SEQ ID NO: 54783 - protein, 63 aa, unidentified
  source 1..63: note = methanogen bacteria
VYTGNPIPFFGQFAGTVSNVKVLDSGYLPDPWYYLTYLPHYLSSVMGGSTTAADLLTPSKNTP

SEQ ID NO: 54784 - protein, 10 aa, unidentified
  source 1..10: note = methanogen bacteria
ISADFTIGYW

SEQ ID NO: 54785 - protein, 10 aa, unidentified
  source 1..10: note = methanogen bacteria
FASGAIYSST

SEQ ID NO: 54786 - protein, 36 aa, unidentified
  source 1..36: note = methanogen bacteria
YVGFIGDGNLYPNAVENHIDWFKIGIYQLTFGYYID

SEQ ID NO: 54787 - protein, 26 aa, unidentified
  source 1..26: note = methanogen bacteria
MGGHLEYNVVFNADNLAAAYENNSEM

SEQ ID NO: 54788 - protein, 22 aa, unidentified
  source 1..22: note = methanogen bacteria
MACSIAVTGGQIVIEEPELFAV

SEQ ID NO: 54789 - protein, 10 aa, unidentified
  source 1..10: note = methanogen bacteria
EVFEESCGTE

SEQ ID NO: 54790 - protein, 38 aa, unidentified
  source 1..38: note = methanogen bacteria
WDGVFTFMGSEHSEGQILQWIVGGWDRPNVGVHWLEEL

SEQ ID NO: 54791 - protein, 17 aa, unidentified
  source 1..17: note = methanogen bacteria
IEHNKLFYEFSNVKFIS

SEQ ID NO: 54792 - protein, 90 aa, unidentified
  source 1..90: note = methanogen bacteria
IHGSSINELNIFKVSHNPILGISRAIRTDEYIVNTLFAFSQYHNGFQYFSDIIRAVPTDVFIVYGQPVLDIGMIFRPFLVGYLFLNQGQG

SEQ ID NO: 54793 - protein, 53 aa, unidentified
  source 1..53: note = methanogen bacteria
SVDTIKLVFNTVYPGALVFNGDNSLNTLADYIPSIFFPMAPNNLIPNVCECSM

SEQ ID NO: 54794 - protein, 17 aa, unidentified
  source 1..17: note = methanogen bacteria
HLPEAIIKIFLRDHINH

SEQ ID NO: 54795 - protein, 29 aa, unidentified
  source 1..29: note = methanogen bacteria
EAFGALGEMVAGYIANEYLASFICDGIIG

SEQ ID NO: 54796 - protein, 36 aa, unidentified
  source 1..36: note = methanogen bacteria
FPLGVEYGSAQSVLGMIGTAIAPIFAPLGFGTWQAA

SEQ ID NO: 54797 - protein, 28 aa, unidentified
  source 1..28: note = methanogen bacteria
TFGTLAGMEEDDEEGITSLVHDTFTPLS

SEQ ID NO: 54798 - protein, 19 aa, unidentified
  source 1..19: note = methanogen bacteria
ENNYLISNFSLNDFINIFS

SEQ ID NO: 54799 - protein, 90 aa, unidentified
  source 1..90: note = methanogen bacteria
IHGSSINEMNLFHVSHKPLLGVSRPIRSDEYVVNTMFAFSQYLNDFAYFSDIVRATTTDMFIIYGQPVLDVATIFRPFLIGYLFLKPAQG

SEQ ID NO: 54800 - protein, 53 aa, unidentified
  source 1..53: note = methanogen bacteria
SLDTIKIILNTSYPSSQSFNGGGTLNSLLYYMPTIFYPLVQDNLTMNVCNYSV

SEQ ID NO: 54801 - protein, 19 aa, unidentified
  source 1..19: note = methanogen bacteria
KFPDLIVDLTLRSHIKTSR

SEQ ID NO: 54802 - protein, 33 aa, unidentified
  source 1..33: note = methanogen bacteria
FGPSHSMSLSEAAGNLVSAIDKGGKGLTNDELY

SEQ ID NO: 54803 - protein, 18 aa, unidentified
  source 1..18: note = methanogen bacteria
HSALVSGFSLSSFLNYFS

SEQ ID NO: 54804 - protein, 90 aa, unidentified
  source 1..90: note = methanogen bacteria
IHGSSINELNFFGLKHDIILGVSRQIRTDEFNVNTMLAFSQYCNDFAYFSDIVRANATDMFLIYGQPVWDIGIVLKPFLWGYLFLNQGQG

SEQ ID NO: 54805 - protein, 52 aa, unidentified
  source 1..52: note = methanogen bacteria
SMDTIKILMNTVYPANEIFNGMGELSYFLNYVPSIFFSIMPDGISSNVVEVS

SEQ ID NO: 54806 - protein, 18 aa, unidentified
  source 1..18: note = methanogen bacteria
VLPDFLIDITLRGHVRNA

SEQ ID NO: 54807 - protein, 18 aa, unidentified
  source 1..18: note = methanogen bacteria
NQAVKTGLNFGNFYHLFS

SEQ ID NO: 54808 - protein, 90 aa, unidentified
  source 1..90: note = methanogen bacteria
IHGSSINELNFFGVKHNVLFGISRNMRSDEYIVNTLFAFSQYHNNFGYFSDIIRAAPTDMFIIYGQAVFDIAVIFRPFNIGYLFLNQGMG

SEQ ID NO: 54809 - protein, 53 aa, unidentified
  source 1..53: note = methanogen bacteria
NSMDTVKIIMNTAYPSGERFNGDGDWSFLFNYLASIFFPMTNANIPLNTVENS

SEQ ID NO: 54810 - protein, 18 aa, unidentified
  source 1..18: note = methanogen bacteria
PLPDPILSITLRDHMKTS

SEQ ID NO: 54811 - protein, 14 aa, unidentified
  source 1..14: note = methanogen bacteria
ENCFDIRNLTGLFS

SEQ ID NO: 54812 - protein, 90 aa, unidentified
  source 1..90: note = methanogen bacteria
IHGSSINELNIFGIDHNVLIGISRSIRSDEYNVNTLMAFSQYYNNFGYFSSIFRATPTDMFIVYGQAVLDIAVIFRPFNIGYLFLNQGMG

SEQ ID NO: 54813 - protein, 52 aa, unidentified
  source 1..52: note = methanogen bacteria
SYETIKIVMNTAYPGSEIFNGSGEWHNLLNYIASVFFPLTNINIPVNTVENS

SEQ ID NO: 54814 - protein, 18 aa, unidentified
  source 1..18: note = methanogen bacteria
ILPDSIVSITLRKHIKTT

SEQ ID NO: 54815 - protein, 24 aa, unidentified
  source 1..24: note = methanogen bacteria
LGEYLVASVGNEMLGSFLQNGLIG

SEQ ID NO: 54816 - protein, 37 aa, unidentified
  source 1..37: note = methanogen bacteria
LPFGVEYGSQESILGMIGSAIAPIFAPLGFSTWQAGI

SEQ ID NO: 54817 - protein, 26 aa, unidentified
  source 1..26: note = methanogen bacteria
FTTLGGLEEDDEEGTVALVQDLFTPL

SEQ ID NO: 54818 - protein, 15 aa, unidentified
  source 1..15: note = methanogen bacteria
VSCRLNINDFFPLFS

SEQ ID NO: 54819 - protein, 90 aa, unidentified
  source 1..90: note = methanogen bacteria
IHGSSINELNLFGIKHDLIAGISRSIRSDEYLVNTMLAFSQYHNGFGYFSDIVRAAPTDMFIIYGQAVFDIAVIFRPFNIGYLFLNQGMG

SEQ ID NO: 54820 - protein, 53 aa, unidentified
  source 1..53: note = methanogen bacteria
SLDTIKIIMNTAYPGGERFNGAGEWEYFFNYLASIFFPLTEVNLPINVVEHSV

SEQ ID NO: 54821 - protein, 18 aa, unidentified
  source 1..18: note = methanogen bacteria
PLPDSIISLTLRDHMKTT

SEQ ID NO: 54822 - protein, 15 aa, unidentified
  source 1..15: note = methanogen bacteria
SVETQLNIGNLIETF

SEQ ID NO: 54823 - protein, 90 aa, unidentified
  source 1..90: note = methanogen bacteria
IHGSSISELNIFGVNHKPLIGISRFMRSDEYLVNTLFAFSQYPNHFSYFSEIVRAAPTDMFIVYGQAILDIAVIFRPFNIGYLFLNPGMG

SEQ ID NO: 54824 - protein, 53 aa, unidentified
  source 1..53: note = methanogen bacteria
NSMDTIKILLNTAYPGGEVFNGDGTWNYLFNYIASTYFPLTSVNIPVNTVENS

SEQ ID NO: 54825 - protein, 18 aa, unidentified
  source 1..18: note = methanogen bacteria
QLPDSIISITLRNHIKTS

SEQ ID NO: 54826 - protein, 22 aa, unidentified
  source 1..22: note = methanogen bacteria
QDITVASLGASALIHEGTVLYQ

SEQ ID NO: 54827 - protein, 31 aa, unidentified
  source 1..31: note = methanogen bacteria
VIGGFITATGEVIPGVNEAMFYPVLGITSLQ

SEQ ID NO: 54828 - protein, 14 aa, unidentified
  source 1..14: note = methanogen bacteria
GGISNVAVLISNAG

SEQ ID NO: 54829 - protein, 44 aa, unidentified
  source 1..44: note = methanogen bacteria
WQTSLGGTEVINGVTYVGAQNIYFAQLSDSSIAHISPAVTQYFG

SEQ ID NO: 54830 - protein, 29 aa, unidentified
  source 1..29: note = methanogen bacteria
LNFAVGCTFSSGLLDLIFLGILPGAERTS

SEQ ID NO: 54831 - protein, 43 aa, unidentified
  source 1..43: note = methanogen bacteria
KITQKLPNNAKGTITYTYANGVLINIINVNESFVLSNLDAGTY

SEQ ID NO: 54832 - protein, 14 aa, unidentified
  source 1..14: note = methanogen bacteria
IIVNVKNGIGISTI

SEQ ID NO: 54833 - protein, 11 aa, unidentified
  source 1..11: note = methanogen bacteria
ITSKPFSIAKA

SEQ ID NO: 54834 - protein, 21 aa, unidentified
  source 1..21: note = methanogen bacteria
QEIIIGQLGLISLIHEGTILF

SEQ ID NO: 54835 - protein, 31 aa, unidentified
  source 1..31: note = methanogen bacteria
IFGKVINSTGELLPGAKEGMIATILGIPTLQ

SEQ ID NO: 54836 - protein, 14 aa, unidentified
  source 1..14: note = methanogen bacteria
SGIVFLASYISNLG

SEQ ID NO: 54837 - protein, 45 aa, unidentified
  source 1..45: note = methanogen bacteria
WQTSLGGTQVINGVTYVGAQNIYFAQLADSSIRHISPSVTQYFGG

SEQ ID NO: 54838 - protein, 29 aa, unidentified
  source 1..29: note = methanogen bacteria
LNFAVGCTFSSGLLDLIFLGILPGNDRTG

SEQ ID NO: 54839 - protein, 48 aa, unidentified
  source 1..48: note = methanogen bacteria
FLFTNSNSNTIPNLIGYSRSDVEILLHYLNLDYSISGYGYVVSQNIAE

SEQ ID NO: 54840 - protein, 23 aa, unidentified
  source 1..23: note = methanogen bacteria
TQIDENTKLELALDSKIKSSASE

SEQ ID NO: 54841 - protein, 22 aa, unidentified
  source 1..22: note = methanogen bacteria
PKLFYPSMSSTYILPSWEPAWS

SEQ ID NO: 54842 - protein, 17 aa, unidentified
  source 1..17: note = methanogen bacteria
VMWESSGDSFYILPSIS

SEQ ID NO: 54843 - protein, 22 aa, unidentified
  source 1..22: note = methanogen bacteria
PQLFYPSLSTTYKLPSWNPAWS

SEQ ID NO: 54844 - protein, 31 aa, unidentified
  source 1..31: note = methanogen bacteria
HFHNGTYDKTESEKIKNQTYYLLDNYSVWSG

SEQ ID NO: 54845 - protein, 13 aa, unidentified
  source 1..13: note = methanogen bacteria
SNFIEEDNPTRLN

SEQ ID NO: 54846 - protein, 29 aa, unidentified
  source 1..29: note = methanogen bacteria
GFFGWMGPYIAENIGNEVLGSFISNGLIG

SEQ ID NO: 54847 - protein, 16 aa, unidentified
  source 1..16: note = methanogen bacteria
FTAIPVFAIGPFVLTQ

SEQ ID NO: 54848 - protein, 37 aa, unidentified
  source 1..37: note = methanogen bacteria
VPFGVEYASDDSALGMIGTAVAPIFAPLGFGEWQAGI

SEQ ID NO: 54849 - protein, 28 aa, unidentified
  source 1..28: note = methanogen bacteria
LGTLAGIEDVEGDTDAMDAMVASLFTPL

SEQ ID NO: 54850 - protein, 26 aa, unidentified
  source 1..26: note = methanogen bacteria
GWLGPYLAERAGNEILGSFIADGLIG

SEQ ID NO: 54851 - protein, 16 aa, unidentified
  source 1..16: note = methanogen bacteria
FTAIPVFKFGPFVLTQ

SEQ ID NO: 54852 - protein, 37 aa, unidentified
  source 1..37: note = methanogen bacteria
VPFGVEYASADSALGMIGTAVSPIFAPLGFGEWQAGI

SEQ ID NO: 54853 - protein, 29 aa, unidentified
  source 1..29: note = methanogen bacteria
LGTLSGVEDVEADTDAMDAMVASLFTPLS

SEQ ID NO: 54854 - protein, 81 aa, unidentified
  source 1..81: note = methanogen bacteria
VNITNTGSSPITPSRSNREAGQNITIKGVVNGNIINTTKITDENGEIVLDAGDYLIIVSHKGDSYYTEVAETLFTNMAFNV

SEQ ID NO: 54855 - protein, 29 aa, unidentified
  source 1..29: note = methanogen bacteria
VGFEGLVEMIYGALGESMLSSFICDGIIG

SEQ ID NO: 54856 - protein, 16 aa, unidentified
  source 1..16: note = methanogen bacteria
FAAIPVFALGPFVVTQ

SEQ ID NO: 54857 - protein, 38 aa, unidentified
  source 1..38: note = methanogen bacteria
NVPAGVEPASADSALGVIGTAVSPIFAPLGFGEWQAGI

SEQ ID NO: 54858 - protein, 26 aa, unidentified
  source 1..26: note = methanogen bacteria
FASLAGVDEENEADMDGLVRELFTPL

SEQ ID NO: 54859 - protein, 30 aa, unidentified
  source 1..30: note = methanogen bacteria
DEGFAMLAGYMETVISDPTLLSFVNDGIIG

SEQ ID NO: 54860 - protein, 16 aa, unidentified
  source 1..16: note = methanogen bacteria
FGAIPVFALGPFVVTQ

SEQ ID NO: 54861 - protein, 37 aa, unidentified
  source 1..37: note = methanogen bacteria
LPFGVEYGSADSILGMIGSVIAPIFTPMGYGTWQAGI

SEQ ID NO: 54862 - protein, 26 aa, unidentified
  source 1..26: note = methanogen bacteria
FGTLSGVEEDDEAGMTAMVKDLFTPL

SEQ ID NO: 54863 - protein, 30 aa, unidentified
  source 1..30: note = methanogen bacteria
EAGFTALSEYLSEAITNPTLASFICDGLIG

SEQ ID NO: 54864 - protein, 15 aa, unidentified
  source 1..15: note = methanogen bacteria
FAAVPVFALGPIVIT

SEQ ID NO: 54865 - protein, 36 aa, unidentified
  source 1..36: note = methanogen bacteria
VPFGVEPGSAESVLGMIGSAISPIFAPLGFATWQAG

SEQ ID NO: 54866 - protein, 26 aa, unidentified
  source 1..26: note = methanogen bacteria
FGTLAGVEEDDEEGMSSMIQGLFTPL

SEQ ID NO: 54867 - protein, 26 aa, unidentified
  source 1..26: note = methanogen bacteria
DILANFARTFLNNPVLASFVCDGVIG

SEQ ID NO: 54868 - protein, 15 aa, unidentified
  source 1..15: note = methanogen bacteria
FAAIPVFAWGPIVIT

SEQ ID NO: 54869 - protein, 36 aa, unidentified
  source 1..36: note = methanogen bacteria
VPFGVEYASQGSVLGMIGSAISPIFGPLGFGQWQAG

SEQ ID NO: 54870 - protein, 26 aa, unidentified
  source 1..26: note = methanogen bacteria
GTLAGVDEANHAAMGNMLHGLFTPLS

SEQ ID NO: 54871 - protein, 32 aa, unidentified
  source 1..32: note = methanogen bacteria
YWLGDSYPHAVESSMHWFSIGSLDINLGYYID

SEQ ID NO: 54872 - protein, 22 aa, unidentified
  source 1..22: note = methanogen bacteria
AMGSLDYSVVFNMDNLEAADQS

SEQ ID NO: 54873 - protein, 15 aa, unidentified
  source 1..15: note = methanogen bacteria
FALGIESGDTAMMAA

SEQ ID NO: 54874 - protein, 11 aa, unidentified
  source 1..11: note = methanogen bacteria
FDAFNDTADIT

SEQ ID NO: 54875 - protein, 32 aa, unidentified
  source 1..32: note = methanogen bacteria
GWDGVFTISLHSTGWQVGGGEADMGFHWVEEL

SEQ ID NO: 54876 - protein, 29 aa, unidentified
  source 1..29: note = methanogen bacteria
VAFGSLAEWVGGFIANEYLASFICDGIIG

SEQ ID NO: 54877 - protein, 36 aa, unidentified
  source 1..36: note = methanogen bacteria
FPLGVEYGSADSVLGMIGNVIAPIFAPLGFGTWQAA

SEQ ID NO: 54878 - protein, 26 aa, unidentified
  source 1..26: note = methanogen bacteria
FGTLAGMEEDDEAGITKLIHDTFTPL

SEQ ID NO: 54879 - protein, 13 aa, unidentified
  source 1..13: note = methanogen bacteria
VTIPNAPSFSPEL

SEQ ID NO: 54880 - protein, 15 aa, unidentified
  source 1..15: note = methanogen bacteria
YIDGFDLAYTFTDLI

SEQ ID NO: 54881 - protein, 18 aa, unidentified
  source 1..18: note = methanogen bacteria
DFRAITDLLFNDSPLEFR

SEQ ID NO: 54882 - protein, 25 aa, unidentified
  source 1..25: note = methanogen bacteria
MLSKFVEGFIPNQYLASFICDGVIG

SEQ ID NO: 54883 - protein, 37 aa, unidentified
  source 1..37: note = methanogen bacteria
FPLGVKYGSADSILGMIGNAIAPVFAPLGFGTWQAAV

SEQ ID NO: 54884 - protein, 27 aa, unidentified
  source 1..27: note = methanogen bacteria
FGTLGGVGEDDESGMTHLVQETFTPLS

SEQ ID NO: 54885 - protein, 37 aa, unidentified
  source 1..37: note = methanogen bacteria
ENTIFGQYINPAVTAVVVQYIPWVPIQNLFIGEYGIV

SEQ ID NO: 54886 - protein, 51 aa, unidentified
  source 1..51: note = methanogen bacteria
GIFQWIIACISPVVNAIGLPTSTSSSFVLGFFRRDFGAAGLMTIQNQLTGV

SEQ ID NO: 54887 - protein, 80 aa, unidentified
  source 1..80: note = methanogen bacteria
YNTDVVDVEFTVRKVVNEVLVSAYVQKEAIDSVNITITADVDGIYVLNVGGVSKLISVEGGKGSTYCILPPRTYEANASF

SEQ ID NO: 54888 - protein, 21 aa, unidentified
  source 1..21: note = methanogen bacteria
HSAKVFTSKTQNQGFDSAYTP

SEQ ID NO: 54889 - protein, 27 aa, unidentified
  source 1..27: note = methanogen bacteria
QNEEDLKVYKTAIRNNLSKFPVIDVSG

SEQ ID NO: 54890 - protein, 20 aa, unidentified
  source 1..20: note = methanogen bacteria
DYLFMFNRTNVKDENDFFIK

SEQ ID NO: 54891 - protein, 11 aa, unidentified
  source 1..11: note = methanogen bacteria
GYSCDINTEFT

SEQ ID NO: 54892 - protein, 27 aa, unidentified
  source 1..27: note = methanogen bacteria
FMQNFDGVIAYTFLVFVVTKIKVMYEH

SEQ ID NO: 54893 - protein, 20 aa, unidentified
  source 1..20: note = methanogen bacteria
GQYVGDHVGNEILASLLNRG

SEQ ID NO: 54894 - protein, 37 aa, unidentified
  source 1..37: note = methanogen bacteria
LPGGEATYGLESSYLGMIGTAIAPIFAPLGFGTWQAA

SEQ ID NO: 54895 - protein, 25 aa, unidentified
  source 1..25: note = methanogen bacteria
STLGGFEDDDETGTISVINDLFTPL

SEQ ID NO: 54896 - protein, 26 aa, unidentified
  source 1..26: note = methanogen bacteria
TILANFAAGFISNPYLESFICDAVIG

SEQ ID NO: 54897 - protein, 36 aa, unidentified
  source 1..36: note = methanogen bacteria
FPLGVKYASAESYLGMIGNFIAPIFAPLGFGTWQAT

SEQ ID NO: 54898 - protein, 27 aa, unidentified
  source 1..27: note = methanogen bacteria
FGTISGMEGDENTGRMNHVLHDLFTPL

SEQ ID NO: 54899 - protein, 30 aa, unidentified
  source 1..30: note = methanogen bacteria
EGFGILGEMVAAALGDGMLTSFIVDGIIGG

SEQ ID NO: 54900 - protein, 36 aa, unidentified
  source 1..36: note = methanogen bacteria
FPAGVEYGSQESAIGMIGTAVAPVFAPLGFGSWQPA

SEQ ID NO: 54901 - protein, 25 aa, unidentified
  source 1..25: note = methanogen bacteria
SSLFGVAEEGAGIAAAMHGIFTPLT

SEQ ID NO: 54902 - protein, 25 aa, unidentified
  source 1..25: note = methanogen bacteria
LLGEWIISILGHSMLSSFLVDGVIG

SEQ ID NO: 54903 - protein, 35 aa, unidentified
  source 1..35: note = methanogen bacteria
FPAGVTYGSQESFIGMIGTAIAPIFAPLGFGSWQA

SEQ ID NO: 54904 - protein, 25 aa, unidentified
  source 1..25: note = methanogen bacteria
SSLFGVAEGSFAMMNAMHGVFTPLS

SEQ ID NO: 54905 - protein, 27 aa, unidentified
  source 1..27: note = methanogen bacteria
FGSIAEFVAGYIANEYLASFICDGIIG

SEQ ID NO: 54906 - protein, 36 aa, unidentified
  source 1..36: note = methanogen bacteria
FPLGVEYGSAESVLGMIGSAIAPIFAPLGFGTWQAA

SEQ ID NO: 54907 - protein, 26 aa, unidentified
  source 1..26: note = methanogen bacteria
FGTLAGLEEDDEEGITNLVHDTFTPL

SEQ ID NO: 54908 - protein, 22 aa, unidentified
  source 1..22: note = methanogen bacteria
TQWGEMAAAAIPNPYIASFVQK

SEQ ID NO: 54909 - protein, 36 aa, unidentified
  source 1..36: note = methanogen bacteria
FPLGVAYGSQQSILGMIGSAVAPIFAPLGFGTWQAA

SEQ ID NO: 54910 - protein, 25 aa, unidentified
  source 1..25: note = methanogen bacteria
GTLGGLDEDDEEGITSLVHDTFTPL

SEQ ID NO: 54911 - protein, 23 aa, unidentified
  source 1..23: note = methanogen bacteria
GEYLAEAVGNEVLGSLLEKGIIG

SEQ ID NO: 54912 - protein, 37 aa, unidentified
  source 1..37: note = methanogen bacteria
VPFGVEYGSQESVLGMIGSAIAPIFAPLGFSTWQAGI

SEQ ID NO: 54913 - protein, 26 aa, unidentified
  source 1..26: note = methanogen bacteria
FTTLGGLEEDDEEGTISLVHDLFTPL

SEQ ID NO: 54914 - protein, 25 aa, unidentified
  source 1..25: note = methanogen bacteria
WFGEYLAGAVGNEILGSFLQDGIIG

SEQ ID NO: 54915 - protein, 37 aa, unidentified
  source 1..37: note = methanogen bacteria
VPFGVEYGSQESVLGMIGSAIAPVFAPLGFSTWQAGI

SEQ ID NO: 54916 - protein, 26 aa, unidentified
  source 1..26: note = methanogen bacteria
FTTLGGLEEDDEEGTIALVHDLFTPL

SEQ ID NO: 54917 - protein, 29 aa, unidentified
  source 1..29: note = methanogen bacteria
AGFAALGEYLAEAVGNEMLGSFLQDGLIG

SEQ ID NO: 54918 - protein, 36 aa, unidentified
  source 1..36: note = methanogen bacteria
LPMGVEYGSQECVLGMIGTAIAPIFAPLGFGTWQAG

SEQ ID NO: 54919 - protein, 25 aa, unidentified
  source 1..25: note = methanogen bacteria
ATLGGLEEDDEEGVTQLVHDTFTPL

SEQ ID NO: 54920 - protein, 26 aa, unidentified
  source 1..26: note = methanogen bacteria
FSILTHAISSYMPHGILTSLICNGII

SEQ ID NO: 54921 - protein, 36 aa, unidentified
  source 1..36: note = methanogen bacteria
IFPWGGTNPKMSLLGIIGSFFAPIFAPLGFGTWQAA

SEQ ID NO: 54922 - protein, 26 aa, unidentified
  source 1..26: note = methanogen bacteria
FGTLAGMDSNDHARITNLIHDTFTPL

SEQ ID NO: 54923 - protein, 23 aa, unidentified
  source 1..23: note = methanogen bacteria
GEYLAGAVGNEVLGSFLEKGIIG

SEQ ID NO: 54924 - protein, 36 aa, unidentified
  source 1..36: note = methanogen bacteria
LPFGVEYGSQESILGMIGSIISPILIPLGFGTWQAG

SEQ ID NO: 54925 - protein, 26 aa, unidentified
  source 1..26: note = methanogen bacteria
FATLNGLEEDDEEGTMSVVQEIFTPL

SEQ ID NO: 54926 - protein, 26 aa, unidentified
  source 1..26: note = methanogen bacteria
VMLSNFVAGHIPNEYLASFICDAVIG

SEQ ID NO: 54927 - protein, 36 aa, unidentified
  source 1..36: note = methanogen bacteria
FPLGVKYGSADSILGMIGSFIAPIFAPLGFGTWQAA

SEQ ID NO: 54928 - protein, 25 aa, unidentified
  source 1..25: note = methanogen bacteria
GTLGGMDADDESGITHLIHDTFTPL

SEQ ID NO: 54929 - protein, 29 aa, unidentified
  source 1..29: note = methanogen bacteria
EAFGALGEFVAGFIANEYLSSFICDGIIG

SEQ ID NO: 54930 - protein, 36 aa, unidentified
  source 1..36: note = methanogen bacteria
FPLGVEYGSAESLLGMIGSFIAPIFAPLGFGTWQAA

SEQ ID NO: 54931 - protein, 26 aa, unidentified
  source 1..26: note = methanogen bacteria
FGTLAGMEEDDEEGITSLVHDTFTPL

SEQ ID NO: 54932 - protein, 23 aa, unidentified
  source 1..23: note = methanogen bacteria
GSWIASFISNYYLKAFICDAIIG

SEQ ID NO: 54933 - protein, 36 aa, unidentified
  source 1..36: note = methanogen bacteria
FPMGVKYGSGDSYLGMIGNAIAPIFIPLGFGTWQAA

SEQ ID NO: 54934 - protein, 26 aa, unidentified
  source 1..26: note = methanogen bacteria
FGTIAGMEEIDENGMSPFLHDLFTPL

SEQ ID NO: 54935 - protein, 30 aa, unidentified
  source 1..30: note = methanogen bacteria
DNGFIMLADFVAGYISNEYLRSFVCNGIIG

SEQ ID NO: 54936 - protein, 38 aa, unidentified
  source 1..38: note = methanogen bacteria
SYPWGVKYGSEQSVLGMIGNVVAPIFAPLGFGTWQATV

SEQ ID NO: 54937 - protein, 26 aa, unidentified
  source 1..26: note = methanogen bacteria
FGTLAGMQGDDGDGITSLVHDTFTPL

SEQ ID NO: 54938 - protein, 25 aa, unidentified
  source 1..25: note = methanogen bacteria
ALGAWVASFLGEGLFSSLICDGIIG

SEQ ID NO: 54939 - protein, 35 aa, unidentified
  source 1..35: note = methanogen bacteria
FPWGGTDPQMSLLGMIGTVIAPIFAPLGFGTWQAA

SEQ ID NO: 54940 - protein, 26 aa, unidentified
  source 1..26: note = methanogen bacteria
FGTLAGMEEDDEEGITALVHDTFTPL

SEQ ID NO: 54941 - protein, 29 aa, unidentified
  source 1..29: note = methanogen bacteria
GFFDALKEIVGGYISNELLSSFICDGIIG

SEQ ID NO: 54942 - protein, 36 aa, unidentified
  source 1..36: note = methanogen bacteria
IYPWGGTDPQMSLLGIIGSVISPIFAPLGFGTWQAA

SEQ ID NO: 54943 - protein, 26 aa, unidentified
  source 1..26: note = methanogen bacteria
FGTLAGMEEDDEEGITNLIHDTFNPL

SEQ ID NO: 54944 - protein, 26 aa, unidentified
  source 1..26: note = methanogen bacteria
NMLSEFLASFITNPYLTSFLCDAVIG

SEQ ID NO: 54945 - protein, 36 aa, unidentified
  source 1..36: note = methanogen bacteria
FPLGVKYGSADSLLGMIGSFIAPIFAPLGFGTWQAA

SEQ ID NO: 54946 - protein, 25 aa, unidentified
  source 1..25: note = methanogen bacteria
GTLGGMNEDDENGMTHLIQDTFTPL

SEQ ID NO: 54947 - protein, 29 aa, unidentified
  source 1..29: note = methanogen bacteria
DAFGMLSNFLAAHIPNVYLASFICDAVIG

SEQ ID NO: 54948 - protein, 36 aa, unidentified
  source 1..36: note = methanogen bacteria
FPLGVKYGSPDSILGMIGSFLAPIFAPLGFGTWQAA

SEQ ID NO: 54949 - protein, 25 aa, unidentified
  source 1..25: note = methanogen bacteria
GTLGGMDADDESGITHLIHDTFTPL

SEQ ID NO: 54950 - protein, 23 aa, unidentified
  source 1..23: note = methanogen bacteria
AVVVCPAIPNPFLASFVEKGIFG

SEQ ID NO: 54951 - protein, 36 aa, unidentified
  source 1..36: note = methanogen bacteria
FPLGVAYGSQQSLLGMIGSTIAPIFKPIGFGTWQAA

SEQ ID NO: 54952 - protein, 25 aa, unidentified
  source 1..25: note = methanogen bacteria
GTLGGLEEDDEEGIIRLVHDVFTPL

SEQ ID NO: 54953 - protein, 29 aa, unidentified
  source 1..29: note = methanogen bacteria
QGFRMLSGFVAGYIPNQYLSSFICDAVIG

SEQ ID NO: 54954 - protein, 36 aa, unidentified
  source 1..36: note = methanogen bacteria
FPLGVKYGSADSYLGMIGNFISPVFAPLGFGTWQAA

SEQ ID NO: 54955 - protein, 26 aa, unidentified
  source 1..26: note = methanogen bacteria
GTLAGMEGDDESGITHLIHDTFTPLS

SEQ ID NO: 54956 - protein, 29 aa, unidentified
  source 1..29: note = methanogen bacteria
QGFSALAEAVAGYISNEYLASFICDGIIG

SEQ ID NO: 54957 - protein, 36 aa, unidentified
  source 1..36: note = methanogen bacteria
FPLGVEYGSEQSVLGMIGTFISPIFAPLGFGTWQAA

SEQ ID NO: 54958 - protein, 26 aa, unidentified
  source 1..26: note = methanogen bacteria
FGTLAGMEEDDEEGITSLIQETFTPL

SEQ ID NO: 54959 - protein, 24 aa, unidentified
  source 1..24: note = methanogen bacteria
LAEWVGTFIANEYLASFICDGIIG

SEQ ID NO: 54960 - protein, 36 aa, unidentified
  source 1..36: note = methanogen bacteria
FPLGVEFGSADSVLGMIGGAIAPIFAPLGFGTWQAG

SEQ ID NO: 54961 - protein, 27 aa, unidentified
  source 1..27: note = methanogen bacteria
FGTLAGMEEDDEEGITQLVHDTFTPLS

SEQ ID NO: 54962 - protein, 27 aa, unidentified
  source 1..27: note = methanogen bacteria
FGMLAEFVGSFITNEYLASFICDGIIG

SEQ ID NO: 54963 - protein, 36 aa, unidentified
  source 1..36: note = methanogen bacteria
FPLGVEYGSADSVLGMIGNTIAPIFAPLGFGTWQAA

SEQ ID NO: 54964 - protein, 26 aa, unidentified
  source 1..26: note = methanogen bacteria
FGTLAGMEEDDEDGITSLVQDTFTPL

SEQ ID NO: 54965 - protein, 28 aa, unidentified
  source 1..28: note = methanogen bacteria
FFKFLSGEVAVYIANPYLKSFICDAVIG

SEQ ID NO: 54966 - protein, 37 aa, unidentified
  source 1..37: note = methanogen bacteria
FPLGVKYASADSLLGQIGSVIAPIFAPLGFGTWQAAV

SEQ ID NO: 54967 - protein, 27 aa, unidentified
  source 1..27: note = methanogen bacteria
FGTLSGISGDDNEGITRIVQDTFTPLS

SEQ ID NO: 54968 - protein, 26 aa, unidentified
  source 1..26: note = methanogen bacteria
GLLAEFVASYLGDGLLASFVCDGIIG

SEQ ID NO: 54969 - protein, 35 aa, unidentified
  source 1..35: note = methanogen bacteria
FPWGGSEPQMSLLGIIGTAIAPIFAPLGFGTWQAA

SEQ ID NO: 54970 - protein, 27 aa, unidentified
  source 1..27: note = methanogen bacteria
FGTLAGMEEDDEEGITNLVHDTFTPLS

SEQ ID NO: 54971 - protein, 22 aa, unidentified
  source 1..22: note = methanogen bacteria
PNLFYPSMSSTYILPSWEPAWS

SEQ ID NO: 54972 - protein, 17 aa, unidentified
  source 1..17: note = methanogen bacteria
VMWESSGDSFYILPSIS

SEQ ID NO: 54973 - protein, 19 aa, unidentified
  source 1..19: note = methanogen bacteria
GQIAASSIPNPYLASFVQK

SEQ ID NO: 54974 - protein, 36 aa, unidentified
  source 1..36: note = methanogen bacteria
FPLGVAYGSQQSLLGMIGSAVAPIFAPLGFGTWQAA

SEQ ID NO: 54975 - protein, 25 aa, unidentified
  source 1..25: note = methanogen bacteria
GTLGGLDEDDEEGITSLVRETFTPL

SEQ ID NO: 54976 - protein, 29 aa, unidentified
  source 1..29: note = methanogen bacteria
EAFGALGEFVSGFIANEYLSSFICDGIIG

SEQ ID NO: 54977 - protein, 36 aa, unidentified
  source 1..36: note = methanogen bacteria
FPLGVEYGSADSLLGMIGSFIAPIFAPLGFGTWQAA

SEQ ID NO: 54978 - protein, 26 aa, unidentified
  source 1..26: note = methanogen bacteria
FGTLAGMEEDDEEGITNLVHDTFTPL

SEQ ID NO: 54979 - protein, 29 aa, unidentified
  source 1..29: note = methanogen bacteria
EGFSLLADFVSGFIADEYLRSFVCDGIIG

SEQ ID NO: 54980 - protein, 36 aa, unidentified
  source 1..36: note = methanogen bacteria
FPLGVEYGSKESVLGIIGSAIAPIFAPLGFGFWQAA

SEQ ID NO: 54981 - protein, 25 aa, unidentified
  source 1..25: note = methanogen bacteria
GTLGGMNEDDEGGITDLIQNTFTPL

SEQ ID NO: 54982 - protein, 26 aa, unidentified
  source 1..26: note = methanogen bacteria
GILCGWLLEIFGEGLVSSLLINGVIG

SEQ ID NO: 54983 - protein, 35 aa, unidentified
  source 1..35: note = methanogen bacteria
LPPGVEYGSINSIIGIVGNWVAPIFEPLGFGFWQA

SEQ ID NO: 54984 - protein, 25 aa, unidentified
  source 1..25: note = methanogen bacteria
GTLFTISEDDQEGITGVLGQMFTPL

SEQ ID NO: 54985 - protein, 25 aa, unidentified
  source 1..25: note = methanogen bacteria
ALGEWVASLLGEGMFTSLICDGIIG

SEQ ID NO: 54986 - protein, 36 aa, unidentified
  source 1..36: note = methanogen bacteria
IYPWGGSEPQMSLLGMIGSAIAPIFAPLGFGTWQAA

SEQ ID NO: 54987 - protein, 26 aa, unidentified
  source 1..26: note = methanogen bacteria
FGTLAGMEEDDEEGITNLVHDTFTPL

SEQ ID NO: 54988 - protein, 26 aa, unidentified
  source 1..26: note = methanogen bacteria
GMLGDWILASLGETMLSSFLVDGLIG

SEQ ID NO: 54989 - protein, 36 aa, unidentified
  source 1..36: note = methanogen bacteria
FPAGVEYGSQESAIGTIGTVVAPVFAPLGFGEWQPA

SEQ ID NO: 54990 - protein, 24 aa, unidentified
  source 1..24: note = methanogen bacteria
SSLFGVAEEGAAINAAMHGIFTPL

SEQ ID NO: 54991 - protein, 26 aa, unidentified
  source 1..26: note = methanogen bacteria
GMLGEFVIASLGETMLSSFLVDGLIG

SEQ ID NO: 54992 - protein, 37 aa, unidentified
  source 1..37: note = methanogen bacteria
YFPAGVEYGSQESAIGTIGTVIAPVFAPLGFGEWQPA

SEQ ID NO: 54993 - protein, 24 aa, unidentified
  source 1..24: note = methanogen bacteria
SSLFGVAEEGAGIAAAMHGIFTPL

SEQ ID NO: 54994 - protein, 27 aa, unidentified
  source 1..27: note = methanogen bacteria
FGMLIDFTVLSLGDSMLSSFLVNGLIG

SEQ ID NO: 54995 - protein, 37 aa, unidentified
  source 1..37: note = methanogen bacteria
YFPAGVEYGSQESAIGTLGTAIAPVFAPLGFGEWQPS

SEQ ID NO: 54996 - protein, 24 aa, unidentified
  source 1..24: note = methanogen bacteria
SSLFGVAEEGAGIAAAMHGIFTPL

SEQ ID NO: 54997 - protein, 41 aa, unidentified
  source 1..41: note = methanogen bacteria
VDFLENTIFGQYINPAVTAVVVQYIPWVPIQNLFVGEYGIV

SEQ ID NO: 54998 - protein, 51 aa, unidentified
  source 1..51: note = methanogen bacteria
GIFQWIIACISPVVHAIGLPTSTSSSFVLGFFRRDFGAAGLMTIQSQLTGV

SEQ ID NO: 54999 - protein, 37 aa, unidentified
  source 1..37: note = methanogen bacteria
ENVLFGQYINPHITSLVVQYIPWVPIQDLIVGPYGIV

SEQ ID NO: 55000 - protein, 51 aa, unidentified
  source 1..51: note = methanogen bacteria
GIFQWIIACVSPLVNAIGLPDSTSSSFVLGFFRRDFGAAGLMTIKNSLTGV

SEQ ID NO: 55001 - protein, 11 aa, unidentified
  source 1..11: note = methanogen bacteria
HGRRGNRGWRY

SEQ ID NO: 55002 - protein, 26 aa, unidentified
  source 1..26: note = methanogen bacteria
GILGEGILGVLGETWISSLLVTGVIG

SEQ ID NO: 55003 - protein, 36 aa, unidentified
  source 1..36: note = methanogen bacteria
LPMGVEYGSQESITGQIGTLITPVFEPLGFGNWQTA

SEQ ID NO: 55004 - protein, 25 aa, unidentified
  source 1..25: note = methanogen bacteria
FGTLMGVGDEGEGLEPILADMFTPL

SEQ ID NO: 55005 - protein, 57 aa, unidentified
  source 1..57: note = methanogen bacteria
KGVDGVIGIFGSLTGLLNLQSASVVVGGFPNVLISVAEMQQPSMLGAGMNSMFLAST

SEQ ID NO: 55006 - protein, 39 aa, unidentified
  source 1..39: note = methanogen bacteria
IGSKTTLGVGEALSAMVSSIGKGGRGLTYEEMLIYNQRL

SEQ ID NO: 55007 - protein, 14 aa, unidentified
  source 1..14: note = methanogen bacteria
ANFTFFGLFSAQSP

SEQ ID NO: 55008 - protein, 25 aa, unidentified
  source 1..25: note = methanogen bacteria
MIRSGTKMSNALSWLYGSFASVSWD

SEQ ID NO: 55009 - protein, 13 aa, unidentified
  source 1..13: note = methanogen bacteria
LHGRRGNRGRRYG

SEQ ID NO: 55010 - protein, 22 aa, unidentified
  source 1..22: note = methanogen bacteria
PQLFYPSMSATYKMPSWNPAWS

SEQ ID NO: 55011 - protein, 18 aa, unidentified
  source 1..18: note = methanogen bacteria
DVMWASSGDSFYILPSIT

SEQ ID NO: 55012 - protein, 30 aa, unidentified
  source 1..30: note = methanogen bacteria
DAGFSALIDYLTPILGDGLVSSFVLNGVIG

SEQ ID NO: 55013 - protein, 35 aa, unidentified
  source 1..35: note = methanogen bacteria
LPPGVEEGSINSIIGIIGNAIAPVFAPLGFGFWQA

SEQ ID NO: 55014 - protein, 22 aa, unidentified
  source 1..22: note = methanogen bacteria
GTLFGVGDDGISAVLPTLFTPL

SEQ ID NO: 55015 - protein, 20 aa, unidentified
  source 1..20: note = methanogen bacteria
SDGLTLEEGVRLSAYLVNDK

SEQ ID NO: 55016 - protein, 10 aa, unidentified
  source 1..10: note = methanogen bacteria
NVTAITERSV

SEQ ID NO: 55017 - protein, 20 aa, unidentified
  source 1..20: note = methanogen bacteria
RNMDDAIAILDAAYNAGIDF

SEQ ID NO: 55018 - protein, 19 aa, unidentified
  source 1..19: note = methanogen bacteria
SLWIRRFPTEPNMDEKTQE

SEQ ID NO: 55019 - protein, 15 aa, unidentified
  source 1..15: note = methanogen bacteria
DIPELLKENYEDYMN

SEQ ID NO: 55020 - protein, 21 aa, unidentified
  source 1..21: note = methanogen bacteria
MDSQTAMLTVSSRQSEVIDLL

SEQ ID NO: 55021 - protein, 21 aa, unidentified
  source 1..21: note = methanogen bacteria
SIFIANMFEADMTQFTFNISK

SEQ ID NO: 55022 - protein, 13 aa, unidentified
  source 1..13: note = methanogen bacteria
TGGVNKLMEHDVS

SEQ ID NO: 55023 - protein, 14 aa, unidentified
  source 1..14: note = methanogen bacteria
KFILSSIGVNDILN

SEQ ID NO: 55024 - protein, 16 aa, unidentified
  source 1..16: note = methanogen bacteria
NSALNCVKQENMDLIL

SEQ ID NO: 55025 - protein, 12 aa, unidentified
  source 1..12: note = methanogen bacteria
SICIDTVNIVDS

SEQ ID NO: 55026 - protein, 18 aa, unidentified
  source 1..18: note = methanogen bacteria
NIVNLFTNGNTVVEHEVI

SEQ ID NO: 55027 - protein, 16 aa, unidentified
  source 1..16: note = methanogen bacteria
NSALNCVKQENMGLIL

SEQ ID NO: 55028 - protein, 13 aa, unidentified
  source 1..13: note = methanogen bacteria
YSICIDTVNIVDS

SEQ ID NO: 55029 - protein, 18 aa, unidentified
  source 1..18: note = methanogen bacteria
NIVNLFAGGNTVVEPGVI

SEQ ID NO: 55030 - protein, 27 aa, unidentified
  source 1..27: note = methanogen bacteria
NPFLTQIVLAVIPWKPIQDLFIGSYGI

SEQ ID NO: 55031 - protein, 52 aa, unidentified
  source 1..52: note = methanogen bacteria
GIFQLIIKLFNPIIQAIGLPTSTTQSFILGFFRRDFGAAGILKIRDTLTGVQ

SEQ ID NO: 55032 - protein, 17 aa, unidentified
  source 1..17: note = methanogen bacteria
WFGEYLAGALGNEILGS

SEQ ID NO: 55033 - protein, 37 aa, unidentified
  source 1..37: note = methanogen bacteria
VPFGVEYGSQESILGMIGSAIAPVFAPLGFSTWQAGI

SEQ ID NO: 55034 - protein, 26 aa, unidentified
  source 1..26: note = methanogen bacteria
FTTLGGLEEDDEEGTIALVHDLFTPL

SEQ ID NO: 55035 - protein, 13 aa, unidentified
  source 1..13: note = methanogen bacteria
DALTGVKKQNVDL

SEQ ID NO: 55036 - protein, 14 aa, unidentified
  source 1..14: note = methanogen bacteria
SGFTIGFETDYVID

SEQ ID NO: 55037 - protein, 18 aa, unidentified
  source 1..18: note = methanogen bacteria
TTIDLLISNFDSSNDTAI

SEQ ID NO: 55038 - protein, 10 aa, unidentified
  source 1..10: note = methanogen bacteria
LFATNEIQLG

SEQ ID NO: 55039 - protein, 13 aa, unidentified
  source 1..13: note = methanogen bacteria
IALTGVKEQKIGL

SEQ ID NO: 55040 - protein, 15 aa, unidentified
  source 1..15: note = methanogen bacteria
NSGYTIGFETDSVID

SEQ ID NO: 55041 - protein, 18 aa, unidentified
  source 1..18: note = methanogen bacteria
KTVDLLSSNMNSSNDFAI

SEQ ID NO: 55042 - protein, 10 aa, unidentified
  source 1..10: note = methanogen bacteria
LSVNEIQLGT

SEQ ID NO: 55043 - protein, 13 aa, unidentified
  source 1..13: note = methanogen bacteria
VALNGVKEQNINL

SEQ ID NO: 55044 - protein, 15 aa, unidentified
  source 1..15: note = methanogen bacteria
SGYTIGFETDSAFDS

SEQ ID NO: 55045 - protein, 18 aa, unidentified
  source 1..18: note = methanogen bacteria
KTVDLLASNMDSSNDVAI

SEQ ID NO: 55046 - protein, 10 aa, unidentified
  source 1..10: note = methanogen bacteria
LSVNEIQLGT

SEQ ID NO: 55047 - protein, 14 aa, unidentified
  source 1..14: note = methanogen bacteria
TALTGVKEQKIDLL

SEQ ID NO: 55048 - protein, 14 aa, unidentified
  source 1..14: note = methanogen bacteria
SGYSIGFETDSIID

SEQ ID NO: 55049 - protein, 18 aa, unidentified
  source 1..18: note = methanogen bacteria
KTVDLLGSNVNSSNDVAI

SEQ ID NO: 55050 - protein, 10 aa, unidentified
  source 1..10: note = methanogen bacteria
LSVNEIQLGT

SEQ ID NO: 55051 - protein, 14 aa, unidentified
  source 1..14: note = methanogen bacteria
AALTGVKEQKIDLL

SEQ ID NO: 55052 - protein, 15 aa, unidentified
  source 1..15: note = methanogen bacteria
NSGFTIGFETDSVID

SEQ ID NO: 55053 - protein, 18 aa, unidentified
  source 1..18: note = methanogen bacteria
KTVDLLASNMDSSNDLAI

SEQ ID NO: 55054 - protein, 10 aa, unidentified
  source 1..10: note = methanogen bacteria
LSVNEIHLGT

SEQ ID NO: 55055 - protein, 15 aa, unidentified
  source 1..15: note = methanogen bacteria
GAALTGVKQQNVDLL

SEQ ID NO: 55056 - protein, 15 aa, unidentified
  source 1..15: note = methanogen bacteria
NSGYTIGFETDSVFD

SEQ ID NO: 55057 - protein, 18 aa, unidentified
  source 1..18: note = methanogen bacteria
KTADLLLSNSNTFNDPTV

SEQ ID NO: 55058 - protein, 10 aa, unidentified
  source 1..10: note = methanogen bacteria
LSVNEIQLGT

SEQ ID NO: 55059 - protein, 13 aa, unidentified
  source 1..13: note = methanogen bacteria
AALSGVKKQKFDM

SEQ ID NO: 55060 - protein, 14 aa, unidentified
  source 1..14: note = methanogen bacteria
SGYTIGFETDNVID

SEQ ID NO: 55061 - protein, 17 aa, unidentified
  source 1..17: note = methanogen bacteria
TVDLLISNFDSSKDTAI

SEQ ID NO: 55062 - protein, 14 aa, unidentified
  source 1..14: note = methanogen bacteria
AALTGVKEQNVDLL

SEQ ID NO: 55063 - protein, 15 aa, unidentified
  source 1..15: note = methanogen bacteria
NSGYTIGFETDSVID

SEQ ID NO: 55064 - protein, 17 aa, unidentified
  source 1..17: note = methanogen bacteria
TVDLLASNWNSTNDPAI

SEQ ID NO: 55065 - protein, 10 aa, unidentified
  source 1..10: note = methanogen bacteria
GLGIKIEQHD

SEQ ID NO: 55066 - protein, 14 aa, unidentified
  source 1..14: note = methanogen bacteria
VALDGVKNQNADLL

SEQ ID NO: 55067 - protein, 15 aa, unidentified
  source 1..15: note = methanogen bacteria
SGYVIGFETDSVVDS

SEQ ID NO: 55068 - protein, 17 aa, unidentified
  source 1..17: note = methanogen bacteria
KTTDLLAADLSFTNPAI

SEQ ID NO: 55069 - protein, 10 aa, unidentified
  source 1..10: note = methanogen bacteria
LSVNEIPLGT

SEQ ID NO: 55070 - protein, 15 aa, unidentified
  source 1..15: note = methanogen bacteria
GVALSGVKEQNADLL

SEQ ID NO: 55071 - protein, 16 aa, unidentified
  source 1..16: note = methanogen bacteria
NSGYTIGFETDSVIDS

SEQ ID NO: 55072 - protein, 17 aa, unidentified
  source 1..17: note = methanogen bacteria
TVDLLASNWNSTNDPAI

SEQ ID NO: 55073 - protein, 10 aa, unidentified
  source 1..10: note = methanogen bacteria
LAGNEIQIGT

SEQ ID NO: 55074 - protein, 10 aa, unidentified
  source 1..10: note = methanogen bacteria
GLGVTIDYFD

SEQ ID NO: 55075 - protein, 92 aa, unidentified
  source 1..92: note = methanogen bacteria
GTITNTDITHPRYNSYPGQNITIEIYDEFDNLIETIHEKTNENNQIIYNMSNIPSETYKIVFYHEDDGYYANSTTGDLSFEKDQNISDEILA

SEQ ID NO: 55076 - protein, 38 aa, unidentified
  source 1..38: note = methanogen bacteria
EVLAAFSTYFNEKTNYIAYVYVNDELVNVQEGSAYNGY

SEQ ID NO: 55077 - protein, 12 aa, unidentified
  source 1..12: note = methanogen bacteria
SESSSSKRDYAL

SEQ ID NO: 55078 - protein, 10 aa, unidentified
  source 1..10: note = methanogen bacteria
ACLKAFTISK

SEQ ID NO: 55079 - protein, 24 aa, unidentified
  source 1..24: note = methanogen bacteria
TPIDFRAIILDEFGDLVNYGLFNI

SEQ ID NO: 55080 - protein, 27 aa, unidentified
  source 1..27: note = methanogen bacteria
DREYLIDASTNLTIAFNEKGTYRIFYT

SEQ ID NO: 55081 - protein, 17 aa, unidentified
  source 1..17: note = methanogen bacteria
IEIGKLNVVAFPTSFSF

SEQ ID NO: 55082 - protein, 14 aa, unidentified
  source 1..14: note = methanogen bacteria
CYGNPVPDGVVYFE

SEQ ID NO: 55083 - protein, 17 aa, unidentified
  source 1..17: note = methanogen bacteria
LDVGIYDVHVRFNGNED

SEQ ID NO: 55084 - protein, 38 aa, unidentified
  source 1..38: note = methanogen bacteria
DSVTGNALANKQVQYKFNNGKVATVKTDANGVVKIKIS

SEQ ID NO: 55085 - protein, 14 aa, unidentified
  source 1..14: note = methanogen bacteria
DALSGVKEQNIDLL

SEQ ID NO: 55086 - protein, 15 aa, unidentified
  source 1..15: note = methanogen bacteria
NSGFTIGFETDSVVD

SEQ ID NO: 55087 - protein, 18 aa, unidentified
  source 1..18: note = methanogen bacteria
NTVNLLSSNWNSSNDFAI

SEQ ID NO: 55088 - protein, 48 aa, unidentified
  source 1..48: note = methanogen bacteria
KYINNSAPDHCGAVMYLKDNVTGNIIEGYFENNTCTNTGGVMTAMSTA

SEQ ID NO: 55089 - protein, 21 aa, unidentified
  source 1..21: note = methanogen bacteria
NTFKGSFYKNSARIGGVLYFY

SEQ ID NO: 55090 - protein, 10 aa, unidentified
  source 1..10: note = methanogen bacteria
GLGVNGNELD

SEQ ID NO: 55091 - protein, 15 aa, unidentified
  source 1..15: note = methanogen bacteria
IILNIPSFALDEALT

SEQ ID NO: 55092 - protein, 10 aa, unidentified
  source 1..10: note = methanogen bacteria
LLHSPADLAA

SEQ ID NO: 55093 - protein, 21 aa, unidentified
  source 1..21: note = methanogen bacteria
PISHLFVINNDTLQISAMNSA

SEQ ID NO: 55094 - protein, 22 aa, unidentified
  source 1..22: note = methanogen bacteria
RALSAPSRFRVLKFPFWHVGGY

SEQ ID NO: 55095 - protein, 16 aa, unidentified
  source 1..16: note = methanogen bacteria
MIYSFGDTIYMRPSIS

SEQ ID NO: 55096 - protein, 44 aa, unidentified
  source 1..44: note = methanogen bacteria
KKYTIALKDNAGKAIKKATVYLKVGGKTYKATTNSKGKATFKIT

SEQ ID NO: 55097 - protein, 11 aa, unidentified
  source 1..11: note = methanogen bacteria
AKTVKAKLTIM

SEQ ID NO: 55098 - protein, 10 aa, unidentified
  source 1..10: note = methanogen bacteria
QYISFIPYAE

SEQ ID NO: 55099 - protein, 11 aa, unidentified
  source 1..11: note = methanogen bacteria
AIAIALGMSET

SEQ ID NO: 55100 - protein, 20 aa, unidentified
  source 1..20: note = methanogen bacteria
SIGGIPLLKPSIRYLLKPAL

SEQ ID NO: 55101 - protein, 88 aa, unidentified
  source 1..88: note = methanogen bacteria
FRSLGEMTITSSTSPIYSLQSRADFTLHVLNLLDFIGGNFGVTHGHMLASSIPGSDLGPRMMVGKLIAWRTEVTVTPTLIGQMVVDFG

SEQ ID NO: 55102 - protein, 12 aa, unidentified
  source 1..12: note = methanogen bacteria
DYFDLGFEGVSS

SEQ ID NO: 55103 - protein, 24 aa, unidentified
  source 1..24: note = methanogen bacteria
TGDFHLGTITDEMVPDGWKWDGND

SEQ ID NO: 55104 - protein, 28 aa, unidentified
  source 1..28: note = methanogen bacteria
YGALGYSEIHENGASTLIPVAKYGFGDT

SEQ ID NO: 55105 - protein, 37 aa, unidentified
  source 1..37: note = methanogen bacteria
ASWITFSGSDMLLHGYAHHLYSGTMLLTADGPDGAQA

SEQ ID NO: 55106 - protein, 11 aa, unidentified
  source 1..11: note = methanogen bacteria
WNPDGASAADG

SEQ ID NO: 55107 - protein, 48 aa, unidentified
  source 1..48: note = methanogen bacteria
VPLQDYFNQRGNASPERLKELINQIYLSAKEHDMFNDLNITEDPGAEG

SEQ ID NO: 55108 - protein, 13 aa, unidentified
  source 1..13: note = methanogen bacteria
VDMQDAIDDPSGT

SEQ ID NO: 55109 - protein, 13 aa, unidentified
  source 1..13: note = methanogen bacteria
WKTVQDLADVYID

SEQ ID NO: 55110 - protein, 11 aa, unidentified
  source 1..11: note = methanogen bacteria
ITGNYLLGDLW

SEQ ID NO: 55111 - protein, 14 aa, unidentified
  source 1..14: note = methanogen bacteria
TPYMKVVYPLTGNI

SEQ ID NO: 55112 - protein, 11 aa, unidentified
  source 1..11: note = methanogen bacteria
VSYVFPNLNYD

SEQ ID NO: 55113 - protein, 44 aa, unidentified
  source 1..44: note = methanogen bacteria
FDPGILSLDSYNQLHQIATSNFTNWHPFFHTFIEMICIRLYASP

SEQ ID NO: 55114 - protein, 12 aa, unidentified
  source 1..12: note = methanogen bacteria
AFFNNNAYEGGA

SEQ ID NO: 55115 - protein, 10 aa, unidentified
  source 1..10: note = methanogen bacteria
GDYGAVSNST

SEQ ID NO: 55116 - protein, 10 aa, unidentified
  source 1..10: note = methanogen bacteria
NNNAYDGGAI

SEQ ID NO: 55117 - protein, 15 aa, unidentified
  source 1..15: note = methanogen bacteria
NTAKYGGAINWNNKY

SEQ ID NO: 55118 - protein, 77 aa, unidentified
  source 1..77: note = methanogen bacteria
NVSSCLFINNTATVLSSVYYNDYNDTSYSNFTNNILLNNDPDEIYYRVFEGSNADYNWFGNNESNYDQKPYAKSSTW

SEQ ID NO: 55119 - protein, 16 aa, unidentified
  source 1..16: note = methanogen bacteria
LTIAGYFIVPDIGLGP

SEQ ID NO: 55120 - protein, 16 aa, unidentified
  source 1..16: note = methanogen bacteria
AYPPLSYLYPLTTEIN

SEQ ID NO: 55121 - protein, 17 aa, unidentified
  source 1..17: note = methanogen bacteria
TLLIQHLTERWVTDINF

SEQ ID NO: 55122 - protein, 17 aa, unidentified
  source 1..17: note = methanogen bacteria
YMSIAGRFVIPDIGLGP

SEQ ID NO: 55123 - protein, 15 aa, unidentified
  source 1..15: note = methanogen bacteria
YPPFSALYPLTTEIN

SEQ ID NO: 55124 - protein, 16 aa, unidentified
  source 1..16: note = methanogen bacteria
LLIKNITDKWVDDINF

SEQ ID NO: 55125 - protein, 92 aa, unidentified
  source 1..92: note = methanogen bacteria
EYNVTAYLDESYLFSSNVLNININVKSTSIVAQDMVTSDENITYAVRLIDEGGNPLKAKHIEFRLNNATYTDITDNNGTAKVNLSLKKGINA

SEQ ID NO: 55126 - protein, 73 aa, unidentified
  source 1..73: note = methanogen bacteria
STQIIFKPIITAGIDVVNLGSSKSIEVMFSMPINESAIIFVNDENTTVRVSNGQTFLMLSNLENGLYVVSVEL

SEQ ID NO: 55127 - protein, 53 aa, unidentified
  source 1..53: note = methanogen bacteria
SINFTVLLKDTQIMADDFITGDFSNQNYVITLLDEDLNPLSGQSIVFLIDNRT

SEQ ID NO: 55128 - protein, 28 aa, unidentified
  source 1..28: note = methanogen bacteria
KFTTTDENGHAEMSINLDYGNYTIASYY

SEQ ID NO: 55129 - protein, 76 aa, unidentified
  source 1..76: note = methanogen bacteria
ENSSKLVVKINATPVIRVSPNLKDVKIEFSFTRAINDTITISVADVKTSINITDGHGELNLTDLENGNYTVSINLN

SEQ ID NO: 55130 - protein, 86 aa, unidentified
  source 1..86: note = methanogen bacteria
SHFEQDFEVNVKDSQIIVNDFETYCQSGESYTIQLTDQNGIPIKSAIVDIAIESMGNYTHQTDANGVVLIPIKLDAGRYNVSVKFK

SEQ ID NO: 55131 - protein, 64 aa, unidentified
  source 1..64: note = methanogen bacteria
SSQANAGITVNSSIAFTNAQYALNSNYIVLLKGNVSGKPVSITIDGVLYEVIAEEGRAAMKINL

SEQ ID NO: 55132 - protein, 43 aa, unidentified
  source 1..43: note = methanogen bacteria
GTGGIYPIQLMGQFLQAVSPYMPMTHGITLLRETALGLVWSNY

SEQ ID NO: 55133 - protein, 14 aa, unidentified
  source 1..14: note = methanogen bacteria
EVQHIGGYYIYADI

SEQ ID NO: 55134 - protein, 14 aa, unidentified
  source 1..14: note = methanogen bacteria
HNLNYSYSISDVDF

SEQ ID NO: 55135 - protein, 12 aa, unidentified
  source 1..12: note = methanogen bacteria
ILSYVPKINPSY

SEQ ID NO: 55136 - protein, 14 aa, unidentified
  source 1..14: note = methanogen bacteria
EVQHIGGYYIYADI

SEQ ID NO: 55137 - protein, 14 aa, unidentified
  source 1..14: note = methanogen bacteria
HNLNYSYSISDVDF

SEQ ID NO: 55138 - protein, 12 aa, unidentified
  source 1..12: note = methanogen bacteria
ILSYVPKIDPSY

SEQ ID NO: 55139 - protein, 14 aa, unidentified
  source 1..14: note = methanogen bacteria
EVQHIGGYYIYADI

SEQ ID NO: 55140 - protein, 14 aa, unidentified
  source 1..14: note = methanogen bacteria
HNLNYSYSISDVDF

SEQ ID NO: 55141 - protein, 13 aa, unidentified
  source 1..13: note = methanogen bacteria
LILSYVPKIDPSY

SEQ ID NO: 55142 - protein, 11 aa, unidentified
  source 1..11: note = methanogen bacteria
KKYTLTQPLLP

SEQ ID NO: 55143 - protein, 14 aa, unidentified
  source 1..14: note = methanogen bacteria
HMNFGGRFFIPDMG

SEQ ID NO: 55144 - protein, 14 aa, unidentified
  source 1..14: note = methanogen bacteria
FPSIIGDLYSLTSF

SEQ ID NO: 55145 - protein, 18 aa, unidentified
  source 1..18: note = methanogen bacteria
LHDVIVGFSFVNVLNIRF

SEQ ID NO: 55146 - protein, 17 aa, unidentified
  source 1..17: note = methanogen bacteria
HMNFGGRFFIPDMGLAP

SEQ ID NO: 55147 - protein, 14 aa, unidentified
  source 1..14: note = methanogen bacteria
FPEIIGDLYSLTSF

SEQ ID NO: 55148 - protein, 12 aa, unidentified
  source 1..12: note = methanogen bacteria
LGFSFVNKFNLK

SEQ ID NO: 55149 - protein, 17 aa, unidentified
  source 1..17: note = methanogen bacteria
EHMPFGGEYIVADVGIA

SEQ ID NO: 55150 - protein, 12 aa, unidentified
  source 1..12: note = methanogen bacteria
YSKMYVIYPLSS

SEQ ID NO: 55151 - protein, 12 aa, unidentified
  source 1..12: note = methanogen bacteria
LIFTYNFNEDYI

SEQ ID NO: 55152 - protein, 16 aa, unidentified
  source 1..16: note = methanogen bacteria
EHMPFGGEYIIADVGI

SEQ ID NO: 55153 - protein, 14 aa, unidentified
  source 1..14: note = methanogen bacteria
EAYPKMYIIYPLSS

SEQ ID NO: 55154 - protein, 13 aa, unidentified
  source 1..13: note = methanogen bacteria
SMIFTYNFNEDYI

SEQ ID NO: 55155 - protein, 17 aa, unidentified
  source 1..17: note = methanogen bacteria
EHMPYGGEYIVADVGIA

SEQ ID NO: 55156 - protein, 12 aa, unidentified
  source 1..12: note = methanogen bacteria
YHHMYVIYPLST

SEQ ID NO: 55157 - protein, 12 aa, unidentified
  source 1..12: note = methanogen bacteria
SMIFTYHFNEDY

SEQ ID NO: 55158 - protein, 13 aa, unidentified
  source 1..13: note = methanogen bacteria
HLNIGGRYLNPDM

SEQ ID NO: 55159 - protein, 16 aa, unidentified
  source 1..16: note = methanogen bacteria
FPEVMSDLYSISNFRN

SEQ ID NO: 55160 - protein, 17 aa, unidentified
  source 1..17: note = methanogen bacteria
LVMNYFKYNLHVLDKSF

SEQ ID NO: 55161 - protein, 15 aa, unidentified
  source 1..15: note = methanogen bacteria
LNNHYDVNFNRLKHA

SEQ ID NO: 55162 - protein, 15 aa, unidentified
  source 1..15: note = methanogen bacteria
QNYDQELYNLADSFE

SEQ ID NO: 55163 - protein, 15 aa, unidentified
  source 1..15: note = methanogen bacteria
EVQHIGGYYIYADIA

SEQ ID NO: 55164 - protein, 14 aa, unidentified
  source 1..14: note = methanogen bacteria
HNLNYSYSISDVNF

SEQ ID NO: 55165 - protein, 13 aa, unidentified
  source 1..13: note = methanogen bacteria
LILSYVPKIDPSY

SEQ ID NO: 55166 - protein, 53 aa, unidentified
  source 1..53: note = methanogen bacteria
KASSTAASVYSSFNVCATNTKFEGNVADYSPSGIYSEKKVSVIRCLFDSNKER

SEQ ID NO: 55167 - protein, 15 aa, unidentified
  source 1..15: note = methanogen bacteria
GSGGAICAMDDVTVD

SEQ ID NO: 55168 - protein, 23 aa, unidentified
  source 1..23: note = methanogen bacteria
STFSNNYAQCVGGAICSEKGDVY

SEQ ID NO: 55169 - protein, 100 aa, unidentified
  source 1..100: note = methanogen bacteria
GNSVDTGHGGAIFTKAYFGKVYVKNTVFDSNQANVDGGAIFSGASIEATNCIFKSNKAVGSTLRTCYGGAIRTYYSAYINNCSFFDNYAENDGGAICTRD

SEQ ID NO: 55170 - protein, 17 aa, unidentified
  source 1..17: note = methanogen bacteria
YTYFTGEYLLVDIGFAP

SEQ ID NO: 55171 - protein, 17 aa, unidentified
  source 1..17: note = methanogen bacteria
YDTYANFASVYPYHSNL

SEQ ID NO: 55172 - protein, 14 aa, unidentified
  source 1..14: note = methanogen bacteria
LVPQMIWGNADASF

SEQ ID NO: 55173 - protein, 19 aa, unidentified
  source 1..19: note = methanogen bacteria
AAIGNMQVYAISSVKQPLT

SEQ ID NO: 55174 - protein, 43 aa, unidentified
  source 1..43: note = methanogen bacteria
ATGGIYPIQIMAPFFRVLYPYMPMTYGITLVREAQLGVVWSNY

SEQ ID NO: 55175 - protein, 15 aa, unidentified
  source 1..15: note = methanogen bacteria
LSPNSINGNGLNPHM

SEQ ID NO: 55176 - protein, 16 aa, unidentified
  source 1..16: note = methanogen bacteria
EPETILIFEPKSIAFI

SEQ ID NO: 55177 - protein, 16 aa, unidentified
  source 1..16: note = methanogen bacteria
HVDLMLDTDLSYDEIV

SEQ ID NO: 55178 - protein, 12 aa, unidentified
  source 1..12: note = methanogen bacteria
DYFGLNLDGFTA

SEQ ID NO: 55179 - protein, 24 aa, unidentified
  source 1..24: note = methanogen bacteria
NGTFHMATISDELVPTGWVWNGNN

SEQ ID NO: 55180 - protein, 28 aa, unidentified
  source 1..28: note = methanogen bacteria
YGALGIGQIEIAGAATLIPVAEADFGKA

SEQ ID NO: 55181 - protein, 25 aa, unidentified
  source 1..25: note = methanogen bacteria
CGWVDGMPFVRGFSLFSASWADGVF

SEQ ID NO: 55182 - protein, 13 aa, unidentified
  source 1..13: note = methanogen bacteria
TWNIFGGFVVLGL

SEQ ID NO: 55183 - protein, 12 aa, unidentified
  source 1..12: note = methanogen bacteria
DYFGLNLTGFTA

SEQ ID NO: 55184 - protein, 24 aa, unidentified
  source 1..24: note = methanogen bacteria
NGTFHMSTISNELVPTGWVWNGNN

SEQ ID NO: 55185 - protein, 28 aa, unidentified
  source 1..28: note = methanogen bacteria
YGALGIGEITSAGAATLIPVAEADFGKA

SEQ ID NO: 55186 - protein, 26 aa, unidentified
  source 1..26: note = methanogen bacteria
CGWVDGMPFVRGFSLFSASWADGIFQ

SEQ ID NO: 55187 - protein, 13 aa, unidentified
  source 1..13: note = methanogen bacteria
TWDIFGGFVVLGL

SEQ ID NO: 55188 - protein, 12 aa, unidentified
  source 1..12: note = methanogen bacteria
KYINNSAPDHCG

SEQ ID NO: 55189 - protein, 24 aa, unidentified
  source 1..24: note = methanogen bacteria
IIEGYFENNTCTNTGGVMTAMSTA

SEQ ID NO: 55190 - protein, 20 aa, unidentified
  source 1..20: note = methanogen bacteria
NTFKGSFYKNSARIGGVLYF

SEQ ID NO: 55191 - protein, 46 aa, unidentified
  source 1..46: note = methanogen bacteria
NTIIGEFINNSATRYGSTIYFRGTPFNKITNSSFINNQIPSKNLNV

SEQ ID NO: 55192 - protein, 11 aa, unidentified
  source 1..11: note = methanogen bacteria
DYFGLDLGGMT

SEQ ID NO: 55193 - protein, 25 aa, unidentified
  source 1..25: note = methanogen bacteria
FNGTFSMDYISNEIVPAGWEWNGNT

SEQ ID NO: 55194 - protein, 28 aa, unidentified
  source 1..28: note = methanogen bacteria
YGALGQAQIEAAGAATLIPVAESDFGKA

SEQ ID NO: 55195 - protein, 25 aa, unidentified
  source 1..25: note = methanogen bacteria
CDWVEGMPSVLGAVFFTADWADGIY

SEQ ID NO: 55196 - protein, 12 aa, unidentified
  source 1..12: note = methanogen bacteria
WDIFTGGVGFAF

SEQ ID NO: 55197 - protein, 15 aa, unidentified
  source 1..15: note = methanogen bacteria
EHLPIGGEYFIPDIG

SEQ ID NO: 55198 - protein, 14 aa, unidentified
  source 1..14: note = methanogen bacteria
SSKMYVIYPLYGNI

SEQ ID NO: 55199 - protein, 14 aa, unidentified
  source 1..14: note = methanogen bacteria
FLSSLFTNNLDTAY

SEQ ID NO: 55200 - protein, 13 aa, unidentified
  source 1..13: note = methanogen bacteria
TDVLDLGLYCPHI

SEQ ID NO: 55201 - protein, 14 aa, unidentified
  source 1..14: note = methanogen bacteria
YHIIDIDVNLTIYV

SEQ ID NO: 55202 - protein, 14 aa, unidentified
  source 1..14: note = methanogen bacteria
TDSFLIQPTSTITR

SEQ ID NO: 55203 - protein, 10 aa, unidentified
  source 1..10: note = methanogen bacteria
VLGIYIANEP

SEQ ID NO: 55204 - protein, 43 aa, unidentified
  source 1..43: note = methanogen bacteria
GTGGIYPVEIMAPFFNVANPYLPMTYAITLIRESQLGLIWSNY

SEQ ID NO: 55205 - protein, 13 aa, unidentified
  source 1..13: note = methanogen bacteria
FSNNFAQGLSPHE

SEQ ID NO: 55206 - protein, 11 aa, unidentified
  source 1..11: note = methanogen bacteria
FFYPETISINL

SEQ ID NO: 55207 - protein, 16 aa, unidentified
  source 1..16: note = methanogen bacteria
LVNAMTSLLPLNDVEV

SEQ ID NO: 55208 - protein, 15 aa, unidentified
  source 1..15: note = methanogen bacteria
LSPNSINGNGLNPHM

SEQ ID NO: 55209 - protein, 15 aa, unidentified
  source 1..15: note = methanogen bacteria
PETILIFEPKSVAFI

SEQ ID NO: 55210 - protein, 17 aa, unidentified
  source 1..17: note = methanogen bacteria
YVDVMPDTNLSYDESVW

SEQ ID NO: 55211 - protein, 13 aa, unidentified
  source 1..13: note = methanogen bacteria
GGSQNFGAGLNAY

SEQ ID NO: 55212 - protein, 19 aa, unidentified
  source 1..19: note = methanogen bacteria
TTFGYVLIEYLPVPNSDAF

SEQ ID NO: 55213 - protein, 14 aa, unidentified
  source 1..14: note = methanogen bacteria
HHGSNFGGGLSPHV

SEQ ID NO: 55214 - protein, 11 aa, unidentified
  source 1..11: note = methanogen bacteria
LYPDTISITTL

SEQ ID NO: 55215 - protein, 18 aa, unidentified
  source 1..18: note = methanogen bacteria
HTLITAIDNVLPINRTEV

SEQ ID NO: 55216 - protein, 15 aa, unidentified
  source 1..15: note = methanogen bacteria
VGGSENFGAGLNAYL

SEQ ID NO: 55217 - protein, 10 aa, unidentified
  source 1..10: note = methanogen bacteria
TYPRITANEF

SEQ ID NO: 55218 - protein, 20 aa, unidentified
  source 1..20: note = methanogen bacteria
ENSNFGYLLIQYIPVPNTDA

SEQ ID NO: 55219 - protein, 14 aa, unidentified
  source 1..14: note = methanogen bacteria
MLSDDFGYGFSPHV

SEQ ID NO: 55220 - protein, 12 aa, unidentified
  source 1..12: note = methanogen bacteria
ILYPETIETSFE

SEQ ID NO: 55221 - protein, 19 aa, unidentified
  source 1..19: note = methanogen bacteria
DILLEVIDIFSPVEMDDLV

SEQ ID NO: 55222 - protein, 14 aa, unidentified
  source 1..14: note = methanogen bacteria
AIGDNFAEGYSPHL

SEQ ID NO: 55223 - protein, 11 aa, unidentified
  source 1..11: note = methanogen bacteria
LFQPETMHITF

SEQ ID NO: 55224 - protein, 19 aa, unidentified
  source 1..19: note = methanogen bacteria
DDVLAFALDAYLPIDLGEV

SEQ ID NO: 55225 - protein, 14 aa, unidentified
  source 1..14: note = methanogen bacteria
KGGQNFGGGLSVHV

SEQ ID NO: 55226 - protein, 13 aa, unidentified
  source 1..13: note = methanogen bacteria
YLTLPETISLNST

SEQ ID NO: 55227 - protein, 18 aa, unidentified
  source 1..18: note = methanogen bacteria
HNIITAISNLLPLNVNEV

SEQ ID NO: 55228 - protein, 13 aa, unidentified
  source 1..13: note = methanogen bacteria
IGKNFAEGYSPHL

SEQ ID NO: 55229 - protein, 10 aa, unidentified
  source 1..10: note = methanogen bacteria
FYRPETRPIS

SEQ ID NO: 55230 - protein, 17 aa, unidentified
  source 1..17: note = methanogen bacteria
VLAYVLNLYLPIDIDEV

SEQ ID NO: 55231 - protein, 13 aa, unidentified
  source 1..13: note = methanogen bacteria
TPMWKLGLYSPHI

SEQ ID NO: 55232 - protein, 10 aa, unidentified
  source 1..10: note = methanogen bacteria
ILFQSEMEEY

SEQ ID NO: 55233 - protein, 21 aa, unidentified
  source 1..21: note = methanogen bacteria
NFIITNKIYFNEYSMAFYLME

SEQ ID NO: 55234 - protein, 43 aa, unidentified
  source 1..43: note = methanogen bacteria
GTGGIYPIQLMGPLLQTVSPYMPMTHGINLLRESALGLVWSNY

SEQ ID NO: 55235 - protein, 13 aa, unidentified
  source 1..13: note = methanogen bacteria
MGENFGEGFSPHV

SEQ ID NO: 55236 - protein, 12 aa, unidentified
  source 1..12: note = methanogen bacteria
YLMHPETVSINI

SEQ ID NO: 55237 - protein, 20 aa, unidentified
  source 1..20: note = methanogen bacteria
DHTFITAVDEILPIDFYEVK

SEQ ID NO: 55238 - protein, 42 aa, unidentified
  source 1..42: note = methanogen bacteria
TGGIYPVEVMPPLFKSINPFMPMTYAITMIREACLGLYLPNY

SEQ ID NO: 55239 - protein, 14 aa, unidentified
  source 1..14: note = methanogen bacteria
TDSFLMNPTSAVTR

SEQ ID NO: 55240 - protein, 14 aa, unidentified
  source 1..14: note = methanogen bacteria
TDSFLMNPTSAVTR

SEQ ID NO: 55241 - protein, 14 aa, unidentified
  source 1..14: note = methanogen bacteria
SSRNVSQGINAHIG

SEQ ID NO: 55242 - protein, 13 aa, unidentified
  source 1..13: note = methanogen bacteria
NLLYSSMGYENAT

SEQ ID NO: 55243 - protein, 17 aa, unidentified
  source 1..17: note = methanogen bacteria
VIIMAVDDFLPLSFMEI

SEQ ID NO: 55244 - protein, 12 aa, unidentified
  source 1..12: note = methanogen bacteria
KMNVSESFSPQI

SEQ ID NO: 55245 - protein, 18 aa, unidentified
  source 1..18: note = methanogen bacteria
DSSLIAIIQKIIPLTKSI

SEQ ID NO: 55246 - protein, 13 aa, unidentified
  source 1..13: note = methanogen bacteria
TDSFLMNPTSKVT

SEQ ID NO: 55247 - protein, 14 aa, unidentified
  source 1..14: note = methanogen bacteria
TYGHNYGEGLSPHV

SEQ ID NO: 55248 - protein, 13 aa, unidentified
  source 1..13: note = methanogen bacteria
CLINPETSPITSL

SEQ ID NO: 55249 - protein, 18 aa, unidentified
  source 1..18: note = methanogen bacteria
HLLITAIDSLLPINRTEI

SEQ ID NO: 55250 - protein, 15 aa, unidentified
  source 1..15: note = methanogen bacteria
NHGQNFGEGFAPHDG

SEQ ID NO: 55251 - protein, 11 aa, unidentified
  source 1..11: note = methanogen bacteria
LYPQIKVESYI

SEQ ID NO: 55252 - protein, 15 aa, unidentified
  source 1..15: note = methanogen bacteria
LTAVDYYLPISMNEI

SEQ ID NO: 55253 - protein, 13 aa, unidentified
  source 1..13: note = methanogen bacteria
DSFLMNPTSAVTR

SEQ ID NO: 55254 - protein, 16 aa, unidentified
  source 1..16: note = methanogen bacteria
HLYFIEYNLSFDPFVS

SEQ ID NO: 55255 - protein, 11 aa, unidentified
  source 1..11: note = methanogen bacteria
VKGQYDVKNLH

SEQ ID NO: 55256 - protein, 13 aa, unidentified
  source 1..13: note = methanogen bacteria
IPGIITPTDVLSN

SEQ ID NO: 55257 - protein, 19 aa, unidentified
  source 1..19: note = methanogen bacteria
SSYYRFKCDVDSIPLDTGD

SEQ ID NO: 55258 - protein, 92 aa, unidentified
  source 1..92: note = methanogen bacteria
ATIISGQGLELTLLNNSINVTTLPSRFDLRDWGWMSPVKDQGWMGACWTFGMTGTLESALLKAAGIKTDFSENNMRDTMLKYSIYGSDFLAE

SEQ ID NO: 55259 - protein, 51 aa, unidentified
  source 1..51: note = methanogen bacteria
TTNENGTARLNINLPPGEYILTAIDPLTGLMMSYNITVLSTLNATDLEMSY

SEQ ID NO: 55260 - protein, 44 aa, unidentified
  source 1..44: note = methanogen bacteria
FNVTVLDGQGKPAYKAAVKFNINGIFYTKHTDSKGIAKLNINLM

SEQ ID NO: 55261 - protein, 21 aa, unidentified
  source 1..21: note = methanogen bacteria
KYIITSEYDGLKISNTITIKD

SEQ ID NO: 55262 - protein, 13 aa, unidentified
  source 1..13: note = methanogen bacteria
NGENLGGGLSPHV

SEQ ID NO: 55263 - protein, 10 aa, unidentified
  source 1..10: note = methanogen bacteria
AYPDTIPIKN

SEQ ID NO: 55264 - protein, 16 aa, unidentified
  source 1..16: note = methanogen bacteria
MISAINKLIPLNINGI

SEQ ID NO: 55265 - protein, 14 aa, unidentified
  source 1..14: note = methanogen bacteria
TDSFLMQPTSAITR

SEQ ID NO: 55266 - protein, 13 aa, unidentified
  source 1..13: note = methanogen bacteria
TDSFLMEPTSAVT

SEQ ID NO: 55267 - protein, 13 aa, unidentified
  source 1..13: note = methanogen bacteria
DSFLMNPTSEVTR

SEQ ID NO: 55268 - protein, 14 aa, unidentified
  source 1..14: note = methanogen bacteria
TDSFFMEPTSAVTR

SEQ ID NO: 55269 - protein, 13 aa, unidentified
  source 1..13: note = methanogen bacteria
TDSFLMHPTSAVT

SEQ ID NO: 55270 - protein, 14 aa, unidentified
  source 1..14: note = methanogen bacteria
TDSFLMNPTSVVTR

SEQ ID NO: 55271 - protein, 12 aa, unidentified
  source 1..12: note = methanogen bacteria
DSFLMNPTSDVT

SEQ ID NO: 55272 - protein, 13 aa, unidentified
  source 1..13: note = methanogen bacteria
GLENGGLLKLHLQ

SEQ ID NO: 55273 - protein, 13 aa, unidentified
  source 1..13: note = methanogen bacteria
VLFNYSYETLLYN

SEQ ID NO: 55274 - protein, 13 aa, unidentified
  source 1..13: note = methanogen bacteria
QTNLQMFASATVS

SEQ ID NO: 55275 - protein, 10 aa, unidentified
  source 1..10: note = methanogen bacteria
MMGGIDLGLF

SEQ ID NO: 55276 - protein, 18 aa, unidentified
  source 1..18: note = methanogen bacteria
RDYSDVLFTLKKFGLYYL

SEQ ID NO: 55277 - protein, 10 aa, unidentified
  source 1..10: note = methanogen bacteria
IKGNSDARDL

SEQ ID NO: 55278 - protein, 13 aa, unidentified
  source 1..13: note = methanogen bacteria
FIPEEITPDSILG

SEQ ID NO: 55279 - protein, 43 aa, unidentified; identical to SEQ ID NO: 55174
  source 1..43: note = methanogen bacteria

SEQ ID NO: 55280 - protein, 13 aa, unidentified
  source 1..13: note = methanogen bacteria
EVLWDFGVFAPQI

SEQ ID NO: 55281 - protein, 17 aa, unidentified
  source 1..17: note = methanogen bacteria
YSNAFINIKNLEEYLPI

SEQ ID NO: 55282 - protein, 14 aa, unidentified
  source 1..14: note = methanogen bacteria
LPLTRYSEIIIPQI

SEQ ID NO: 55283 - protein, 17 aa, unidentified
  source 1..17: note = methanogen bacteria
NSYLSRYFGGNTYLIVM

SEQ ID NO: 55284 - protein, 19 aa, unidentified
  source 1..19: note = methanogen bacteria
GDYNDILATVDNFGLYYLI

SEQ ID NO: 55285 - protein, 29 aa, unidentified
  source 1..29: note = methanogen bacteria
ILTATDPLTDLQMSYDITVLPTLIADNLV

SEQ ID NO: 55286 - protein, 45 aa, unidentified
  source 1..45: note = methanogen bacteria
FHISLIDGDGSPVADKQIVMNINGVFYNRTTNENGTAKLNINLNP

SEQ ID NO: 55287 - protein, 15 aa, unidentified
  source 1..15: note = methanogen bacteria
YILTATDPLTDLQMS

SEQ ID NO: 55288 - protein, 92 aa, unidentified
  source 1..92: note = methanogen bacteria
NITVLPVLTAEDVKMTYLDGTQFKATLVDGEGEAQSDANITFNINGVFYNRTTDENGTASLNIRLMPGEYIITSQYGQAAISNKITIAAKGD

SEQ ID NO: 55289 - protein, 43 aa, unidentified
  source 1..43: note = methanogen bacteria
GTGGIYPVEIMAPIFDMANPYLPMTYAITLLREAQLGCIWSNY

SEQ ID NO: 55290 - protein, 62 aa, unidentified
  source 1..62: note = methanogen bacteria
SNSNSNSNSNSNSNSNSNSNSNTNTNTNAGNEIFYIDLPFQDDIKLTFSKGKYKVKVYEWRV

SEQ ID NO: 55291 - protein, 68 aa, unidentified
  source 1..68: note = methanogen bacteria
PYCELDIILFDSNDNQMSKFVYDTYYYYEGMWHDMPVNEWGSNYHKSRFGPDVHITKVAVSLKGASWY

SEQ ID NO: 55292 - protein, 43 aa, unidentified
  source 1..43: note = methanogen bacteria
GTGGIYPIEIMGDLFQVIYPYMPMTYAINMIRESLLGVVWHNY

SEQ ID NO: 55293 - protein, 15 aa, unidentified
  source 1..15: note = methanogen bacteria
SPEKLFEYGIYSSHI

SEQ ID NO: 55294 - protein, 10 aa, unidentified
  source 1..10: note = methanogen bacteria
GFDGYEGWDE

SEQ ID NO: 55295 - protein, 16 aa, unidentified
  source 1..16: note = methanogen bacteria
YDYVTNMKNVNPYLYL

SEQ ID NO: 55296 - protein, 43 aa, unidentified
  source 1..43: note = methanogen bacteria
GTGGIYPIQIMDNLFQWLYPFLPMTYAINLIREAQLGLVWSNY

SEQ ID NO: 55297 - protein, 14 aa, unidentified
  source 1..14: note = methanogen bacteria
NANQVYGNGLNPHT

SEQ ID NO: 55298 - protein, 12 aa, unidentified
  source 1..12: note = methanogen bacteria
FHPSILNIITHI

SEQ ID NO: 55299 - protein, 15 aa, unidentified
  source 1..15: note = methanogen bacteria
MDNSLNINVMTSEFV

SEQ ID NO: 55300 - protein, 12 aa, unidentified
  source 1..12: note = methanogen bacteria
ILMDFGIFTPHV

SEQ ID NO: 55301 - protein, 18 aa, unidentified
  source 1..18: note = methanogen bacteria
PEARHIVNIDYIDNFLPA

SEQ ID NO: 55302 - protein, 43 aa, unidentified
  source 1..43: note = methanogen bacteria
GTGGIYPIQLMHPFFQTLYPYLPMTYGIMMLRESLLGMIWSNY

SEQ ID NO: 55303 - protein, 14 aa, unidentified
  source 1..14: note = methanogen bacteria
LDIFIELGIYYPHV

SEQ ID NO: 55304 - protein, 11 aa, unidentified
  source 1..11: note = methanogen bacteria
GIFYNTKLDEY

SEQ ID NO: 55305 - protein, 15 aa, unidentified
  source 1..15: note = methanogen bacteria
YTYITHLNNINIYLY

SEQ ID NO: 55306 - protein, 22 aa, unidentified
  source 1..22: note = methanogen bacteria
PQLFYPSMSATYKLPSWNPAWS

SEQ ID NO: 55307 - protein, 16 aa, unidentified
  source 1..16: note = methanogen bacteria
MWESSGDSFYILPSIS

SEQ ID NO: 55308 - protein, 42 aa, unidentified
  source 1..42: note = methanogen bacteria
GTGGIYPIEIMHEFFQVLYPYLPMTYAINLIRESQLGLVWPN

SEQ ID NO: 55309 - protein, 17 aa, unidentified
  source 1..17: note = methanogen bacteria
SVGGIPLLKPSIRYLLK

SEQ ID NO: 55310 - protein, 87 aa, unidentified
  source 1..87: note = methanogen bacteria
RSLGELTITSSTSPIYSLQTRADFTLHVLNLLDFIGGNFGVTHGHMLASSIPGSDLGPRMMVGKLIAWRTEVTITPTLIGQMVVDFG

SEQ ID NO: 55311 - protein, 42 aa, unidentified
  source 1..42: note = methanogen bacteria
GTGGIYPIEIMHEFFQALYPYLPMTYAINLIRESQLGLVWSN

SEQ ID NO: 55312 - protein, 14 aa, unidentified
  source 1..14: note = methanogen bacteria
SEIFFDLGIFAPHV

SEQ ID NO: 55313 - protein, 10 aa, unidentified
  source 1..10: note = methanogen bacteria
SNILFNAMSN

SEQ ID NO: 55314 - protein, 15 aa, unidentified
  source 1..15: note = methanogen bacteria
YNFVESMENVNLYLY

SEQ ID NO: 55315 - protein, 10 aa, unidentified
  source 1..10: note = methanogen bacteria
AGVMNYEFKF

SEQ ID NO: 55316 - protein, 10 aa, unidentified
  source 1..10: note = methanogen bacteria
GLGNGENNFN

SEQ ID NO: 55317 - protein, 76 aa, unidentified
  source 1..76: note = methanogen bacteria
TFVLKQDDGKLMALYTRYNQDGTFFVGELNGSHVNNIGIETLNNSAMSSALQKSAFPDGNWFNIQSLTNAWANELQ

SEQ ID NO: 55318 - protein, 24 aa, unidentified
  source 1..24: note = methanogen bacteria
QPGFFMSEYILENYPLGENESYFY

SEQ ID NO: 55319 - protein, 96 aa, unidentified
  source 1..96: note = methanogen bacteria
NTNTNTNTHKNTNSNSNSNKKTNTRNTVLSTGSVSAGTSQSTVEAIGTVAAAEEPSTEPNTEEKSEDTPSEESSSDSGKAYEISESSPGNSDNSNV

SEQ ID NO: 55320 - protein, 14 aa, unidentified
  source 1..14: note = methanogen bacteria
SMQFFELGIHNPHV

SEQ ID NO: 55321 - protein, 10 aa, unidentified
  source 1..10: note = methanogen bacteria
GIFFSKDIDE

SEQ ID NO: 55322 - protein, 13 aa, unidentified
  source 1..13: note = methanogen bacteria
FLIDIGGINPYLL

SEQ ID NO: 55323 - protein, 11 aa, unidentified
  source 1..11: note = methanogen bacteria
FSGFGLENPHV

SEQ ID NO: 55324 - protein, 10 aa, unidentified
  source 1..10: note = methanogen bacteria
IFYTTAVDEY

SEQ ID NO: 55325 - protein, 16 aa, unidentified
  source 1..16: note = methanogen bacteria
YSYLESLPNINQYLVL

SEQ ID NO: 55326 - protein, 13 aa, unidentified
  source 1..13: note = methanogen bacteria
DFFLELGIESPYV

SEQ ID NO: 55327 - protein, 10 aa, unidentified
  source 1..10: note = methanogen bacteria
GLIISTDIID

SEQ ID NO: 55328 - protein, 13 aa, unidentified
  source 1..13: note = methanogen bacteria
KYVASLDANIFIT

SEQ ID NO: 55329 - protein, 20 aa, unidentified
  source 1..20: note = methanogen bacteria
MILSICSEPKILEIMKYVNI

SEQ ID NO: 55330 - protein, 13 aa, unidentified
  source 1..13: note = methanogen bacteria
SNFWDFGISSPHL

SEQ ID NO: 55331 - protein, 14 aa, unidentified
  source 1..14: note = methanogen bacteria
LMNINKIFKYFVFM

SEQ ID NO: 55332 - protein, 13 aa, unidentified
  source 1..13: note = methanogen bacteria
TYIYAYGISSPHI

SEQ ID NO: 55333 - protein, 15 aa, unidentified
  source 1..15: note = methanogen bacteria
NFLKDINHINQYIIL

SEQ ID NO: 55334 - protein, 12 aa, unidentified
  source 1..12: note = methanogen bacteria
YAGLGDGCTPYV

SEQ ID NO: 55335 - protein, 19 aa, unidentified
  source 1..19: note = methanogen bacteria
DNTLMVALASILPINSDEV

SEQ ID NO: 55336 - protein, 11 aa, unidentified
  source 1..11: note = methanogen bacteria
GIYEHEIASEF

SEQ ID NO: 55337 - protein, 14 aa, unidentified
  source 1..14: note = methanogen bacteria
LDILLDFGMVRPDI

SEQ ID NO: 55338 - protein, 10 aa, unidentified
  source 1..10: note = methanogen bacteria
ELSLNQRIAE

SEQ ID NO: 55339 - protein, 15 aa, unidentified
  source 1..15: note = methanogen bacteria
YNYVIDTDINLYLQI

SEQ ID NO: 55340 - protein, 15 aa, unidentified
  source 1..15: note = methanogen bacteria
TVQHNLYGDGLNPHM

SEQ ID NO: 55341 - protein, 17 aa, unidentified
  source 1..17: note = methanogen bacteria
PESIIILLDSVSGTYID

SEQ ID NO: 55342 - protein, 13 aa, unidentified
  source 1..13: note = methanogen bacteria
ILLENEILNNESE

SEQ ID NO: 55343 - protein, 11 aa, unidentified
  source 1..11: note = methanogen bacteria
FYGYGIENPHV

SEQ ID NO: 55344 - protein, 16 aa, unidentified
  source 1..16: note = methanogen bacteria
YNYLATIPDINLYLLL

SEQ ID NO: 55345 - protein, 13 aa, unidentified
  source 1..13: note = methanogen bacteria
SNAVLDLGLYCPH

SEQ ID NO: 55346 - protein, 13 aa, unidentified
  source 1..13: note = methanogen bacteria
HLIDIDVNLTIYV

SEQ ID NO: 55347 - protein, 10 aa, unidentified
  source 1..10: note = methanogen bacteria
IYEHGITSEF

SEQ ID NO: 55348 - protein, 51 aa, unidentified
  source 1..51: note = methanogen bacteria
NRTAPITEGWFSTYADMILSGKVPYRDFELVLPPLYTYLVAAVNLVFGNHL

SEQ ID NO: 55349 - protein, 30 aa, unidentified
  source 1..30: note = methanogen bacteria
AGAAENCLEMLFSSGVKGNLSDMATGFLRR

SEQ ID NO: 55350 - protein, 14 aa, unidentified
  source 1..14: note = methanogen bacteria
SDIRTLLMGQLPEQ

SEQ ID NO: 55351 - protein, 12 aa, unidentified
  source 1..12: note = methanogen bacteria
HQIYNEIFSLNL

SEQ ID NO: 55352 - protein, 11 aa, unidentified
  source 1..11: note = methanogen bacteria
GIYEDEITSEF

SEQ ID NO: 55353 - protein, 10 aa, unidentified
  source 1..10: note = methanogen bacteria
GLRDYGDYLN

SEQ ID NO: 55354 - protein, 11 aa, unidentified
  source 1..11: note = methanogen bacteria
IFNEIFGLSLE

SEQ ID NO: 55355 - protein, 10 aa, unidentified
  source 1..10: note = methanogen bacteria
IYEHGIASEF

SEQ ID NO: 55356 - protein, 14 aa, unidentified
  source 1..14: note = methanogen bacteria
MPSSSGGQTEFQTP

SEQ ID NO: 55357 - protein, 10 aa, unidentified
  source 1..10: note = methanogen bacteria
WSGLSSETNE

SEQ ID NO: 55358 - protein, 11 aa, unidentified
  source 1..11: note = methanogen bacteria
LMTGSEMDIMG

SEQ ID NO: 55359 - protein, 10 aa, unidentified
  source 1..10: note = methanogen bacteria
LITPESIINN

SEQ ID NO: 55360 - protein, 10 aa, unidentified
  source 1..10: note = methanogen bacteria
YVNGIISSDL

SEQ ID NO: 55361 - protein, 14 aa, unidentified
  source 1..14: note = methanogen bacteria
ADFINDHTPESVSL

SEQ ID NO: 55362 - protein, 15 aa, unidentified
  source 1..15: note = methanogen bacteria
MMGENFGEGFSPHVG

SEQ ID NO: 55363 - protein, 12 aa, unidentified
  source 1..12: note = methanogen bacteria
YLMHPETISFNM

SEQ ID NO: 55364 - protein, 21 aa, unidentified
  source 1..21: note = methanogen bacteria
DQTFIKAIDEMILPIDFYEIK

SEQ ID NO: 55365 - protein, 17 aa, unidentified
  source 1..17: note = methanogen bacteria
GYILTALKITPAHSHYR

SEQ ID NO: 55366 - protein, 61 aa, unidentified
  source 1..61: note = methanogen bacteria
MTDIPSSVCDGYFPYADAMMDGTFPYTHDVWVYDDWNTWEYPPLAYVFILLPRLLASSVAG

SEQ ID NO: 55367 - protein, 57 aa, unidentified
  source 1..57: note = methanogen bacteria
GSDPLSFAKYHTDRPLEIESVAASVIEILSLLGLTDVSYAYDFGSDNIYGSASSAVS

SEQ ID NO: 55368 - protein, 12 aa, unidentified
  source 1..12: note = methanogen bacteria
NFGFRGEGEAMS

SEQ ID NO: 55369 - protein, 43 aa, unidentified
  source 1..43: note = methanogen bacteria
GTGGIYPIQLMGNILQSVSPFMPMTHGITLLRESALGLVWSNY

SEQ ID NO: 55370 - protein, 76 aa, unidentified
  source 1..76: note = methanogen bacteria
KKFTLKATLKINGKKVKGKKITFKFNGKTYKVKTNKKGVAQKTLNKKIIKKLKKGKKYTVKVTYKKDTIKTTLKVK

SEQ ID NO: 55371 - protein, 41 aa, unidentified
  source 1..41: note = methanogen bacteria
TVNNADDYKKANGLKASTVISEYNALKKLELGNETYNFDTI

SEQ ID NO: 55372 - protein, 39 aa, unidentified
  source 1..39: note = methanogen bacteria
VDDGIVTIDGKNYKACDGNKLVYMKSMSSEWQTVVKVVC

SEQ ID NO: 55373 - protein, 13 aa, unidentified
  source 1..13: note = methanogen bacteria
CSNVYDINFCRWS

SEQ ID NO: 55374 - protein, 85 aa, unidentified
  source 1..85: note = methanogen bacteria
GALWSPTTHYTNPDPDDMYSLIPFNSNTYVLSSDLVSSIKSDNNIQKINDLFDKSNNEITFTADEVLAAISSINLNNGQVHSVLY

SEQ ID NO: 55375 - protein, 89 aa, unidentified
  source 1..89: note = methanogen bacteria
MANGNLNIEKSKFNSNNASVSGGAIYTSYTDLNLKNSEFINNSAFKNGGANYMELTNSTIDNVLFIANNVENSSTLNPSTIYAYDSSSY

SEQ ID NO: 55376 - protein, 12 aa, unidentified
  source 1..12: note = methanogen bacteria
NSKYSISSVFTI

SEQ ID NO: 55377 - protein, 13 aa, unidentified
  source 1..13: note = methanogen bacteria
IDNKDSIGKPNMK

SEQ ID NO: 55378 - protein, 11 aa, unidentified
  source 1..11: note = methanogen bacteria
DFSNVDNADLS

SEQ ID NO: 55379 - protein, 51 aa, unidentified
  source 1..51: note = methanogen bacteria
PFADNEILNLSSLNGKLSSKDNAKSFQEDYGTWAENVENESSSKRAEYFDG

SEQ ID NO: 55380 - protein, 13 aa, unidentified
  source 1..13: note = methanogen bacteria
HVPNVSDYDDGIF

SEQ ID NO: 55381 - protein, 36 aa, unidentified
  source 1..36: note = methanogen bacteria
FSQAFKTSESVANPSSDSGGFGGFGGGSGGGGGGAF

SEQ ID NO: 55382 - protein, 18 aa, unidentified
  source 1..18: note = methanogen bacteria
AIGNMQVYAISSVKQPLT

SEQ ID NO: 55383 - protein, 18 aa, unidentified
  source 1..18: note = methanogen bacteria
NSYLVLEFSGNDFINLFS

SEQ ID NO: 55384 - protein, 90 aa, unidentified
  source 1..90: note = methanogen bacteria
IHGSSIGQLNIFDIDHKPLLGVSRIIRSDEFIVNTPFAFSQYFNDFSYFSEIVRGTLTDMFIIYGQPVLDIGMIFRPFLIGYLFLNQGQG

SEQ ID NO: 55385 - protein, 52 aa, unidentified
  source 1..52: note = methanogen bacteria
SIDTIKIILNTVYPASEITNGGGILNSFAYYIPTIFFPIYDTNLLLNTCEYS

SEQ ID NO: 55386 - protein, 19 aa, unidentified
  source 1..19: note = methanogen bacteria
VHLPDFIIQLTLRSKMKNN

SEQ ID NO: 55387 - protein, 64 aa, unidentified
  source 1..64: note = methanogen bacteria
VNPIDYGTDMIYESPFLNEVENIVENDPDALWITKSLPTDYIISVGAKTVNSVNTYLIWKNGKN

SEQ ID NO: 55388 - protein, 10 aa, unidentified
  source 1..10: note = methanogen bacteria
FIDTSFLGPI

SEQ ID NO: 55389 - protein, 55 aa, unidentified
  source 1..55: note = methanogen bacteria
QYNIGIGNWDTYLYLENGRNFAKMGWGDVPSIAPVIPIILSKMFLLAGHTYHEAI

SEQ ID NO: 55390 - protein, 65 aa, unidentified
  source 1..65: note = methanogen bacteria
EFYIHLGTPFPFLGQFSGTVSNTVVMDSGFLPDSWYYIKHIPNYLISYVPNVNTFNAIVNPMGNI

SEQ ID NO: 55391 - protein, 17 aa, unidentified
  source 1..17: note = methanogen bacteria
IGNMNVYLIETTKVPMT

SEQ ID NO: 55392 - protein, 12 aa, unidentified
  source 1..12: note = methanogen bacteria
SSKKSKIDGKVS

SEQ ID NO: 55393 - protein, 68 aa, unidentified
  source 1..68: note = methanogen bacteria
AYNEEKAIEHVINTVKQVKDITEIIIVDDGSTDNTHNIVSRQDNVILLTHEKNKGKGSAMKTGLKRVT

SEQ ID NO: 55394 - protein, 33 aa, unidentified
  source 1..33: note = methanogen bacteria
LSEINKLQVESIIKPILNGDADITKTKFKREAG

SEQ ID NO: 55395 - protein, 46 aa, unidentified
  source 1..46: note = methanogen bacteria
QGMRIQEVDIGNIVHEMSTLKELNIMANEVVRTIVDRAIHYGRLTM

SEQ ID NO: 55396 - protein, 10 aa, unidentified
  source 1..10: note = methanogen bacteria
IKGNSDAMDL

SEQ ID NO: 55397 - protein, 13 aa, unidentified
  source 1..13: note = methanogen bacteria
FIPEEITPNEILG

SEQ ID NO: 55398 - protein, 20 aa, unidentified
  source 1..20: note = methanogen bacteria
EISDRIYDGIVADSLDMDTV

SEQ ID NO: 55399 - protein, 20 aa, unidentified
  source 1..20: note = methanogen bacteria
EISDLIYDGIVADSINTDSV

SEQ ID NO: 55400 - protein, 43 aa, unidentified
  source 1..43: note = methanogen bacteria
ATGGIYPIEIMAKFFHYIHPYMPMTYAINLLREAQLGVVWSNY

SEQ ID NO: 55401 - protein, 43 aa, unidentified
  source 1..43: note = methanogen bacteria
ATGGIYPIQIMHQFFQSIYPYMPMTYAIKLVREAQLGVVWSNY

SEQ ID NO: 55402 - protein, 43 aa, unidentified
  source 1..43: note = methanogen bacteria
GTGGIYPVEIMAHYFNVLNPYLPMTYAITLIREAQLGLVWSNY

SEQ ID NO: 55403 - protein, 43 aa, unidentified
  source 1..43: note = methanogen bacteria
ATGGIYPIEIMHKFFQTLYPYMPMTYAIKLIREAQLGVVWSNY

SEQ ID NO: 55404 - protein, 43 aa, unidentified
  source 1..43: note = methanogen bacteria
TTGGIYPIEIMHSSFKGLYYYFPMTYAIKLMREAQLSVVWSNY

SEQ ID NO: 55405 - protein, 42 aa, unidentified
  source 1..42: note = methanogen bacteria
ATGGIYPIEIMGKLFQFIHPYMPMTYAIRLIREAQLGVVWSN

SEQ ID NO: 55406 - protein, 43 aa, unidentified
  source 1..43: note = methanogen bacteria
ATGGIYPIEIMHKVFQTLYPFMPMTYAIKLIREAQLGVVWSNY

SEQ ID NO: 55407 - protein, 13 aa, unidentified
  source 1..13: note = methanogen bacteria
SVRWVYGIFAPHV

SEQ ID NO: 55408 - protein, 10 aa, unidentified
  source 1..10: note = methanogen bacteria
INSSQGSDKG

SEQ ID NO: 55409 - protein, 19 aa, unidentified
  source 1..19: note = methanogen bacteria
GYPNQFLNLKTIRKIFPTM

SEQ ID NO: 55410 - protein, 43 aa, unidentified
  source 1..43: note = methanogen bacteria
ATGGIYPIQIMHQFFQTLYPYMPMTYAIKLIREAQLGVVWSNY

SEQ ID NO: 55411 - protein, 43 aa, unidentified
  source 1..43: note = methanogen bacteria
GTGGVYPVQIMGDFFKLMNPYLPMTYAITLIREAQLGLVWSNY

SEQ ID NO: 55412 - protein, 10 aa, unidentified
  source 1..10: note = methanogen bacteria
SDAEILSIPL

SEQ ID NO: 55413 - protein, 43 aa, unidentified
  source 1..43: note = methanogen bacteria
GTGGIYPVEIMADFFQLMNPYLPMTYAITLIREAQLGLVWSNY

SEQ ID NO: 55414 - protein, 42 aa, unidentified
  source 1..42: note = methanogen bacteria
GTGGIYPVEIMSPIFNILNPYLPMTYAITLIREAQLGLIWSN

SEQ ID NO: 55415 - protein, 43 aa, unidentified
  source 1..43: note = methanogen bacteria
GTGGIYPIEIMGEFFRYLYPYMPMTYAITLLRESQLGVVWSNY

SEQ ID NO: 55416 - protein, 43 aa, unidentified
  source 1..43: note = methanogen bacteria
GTGGIYPIEIMGSFFQSIYPYMPMTYAINLLREAQIGVVWSNY

SEQ ID NO: 55417 - protein, 20 aa, unidentified
  source 1..20: note = methanogen bacteria
EISDEIFDGIGTGTTDTSAI

SEQ ID NO: 55418 - protein, 10 aa, unidentified
  source 1..10: note = methanogen bacteria
SLEFDILKFN

SEQ ID NO: 55419 - protein, 16 aa, unidentified
  source 1..16: note = methanogen bacteria
IYFSSSGHLDLYSALL

SEQ ID NO: 55420 - protein, 11 aa, unidentified
  source 1..11: note = methanogen bacteria
SSDPSVFSTPL

SEQ ID NO: 55421 - protein, 43 aa, unidentified
  source 1..43: note = methanogen bacteria
GTGGIYPVQIMGEVFQALNPYLPMTYAITLMREAQLGLVWSNY

SEQ ID NO: 55422 - protein, 10 aa, unidentified
  source 1..10: note = methanogen bacteria
SDPSVFTTPL

SEQ ID NO: 55423 - protein, 43 aa, unidentified
  source 1..43: note = methanogen bacteria
GTGGIYPVEIMAPIFDIANPYLPMTYGITLIREAQLGLIWSNY

SEQ ID NO: 55424 - protein, 10 aa, unidentified
  source 1..10: note = methanogen bacteria
SDPSVFSTPE

SEQ ID NO: 55425 - protein, 10 aa, unidentified
  source 1..10: note = methanogen bacteria
SDPSVFSTPV

SEQ ID NO: 55426 - protein, 44 aa, unidentified
  source 1..44: note = methanogen bacteria
GTGGMYPVQIMNNIFGVIYPYLPMTHGISIVREAQLGLIWANYI

SEQ ID NO: 55427 - protein, 58 aa, unidentified
  source 1..58: note = methanogen bacteria
FHQVRGAFNPDIYAYLAGAIELSGLNFHNLSGGQWIQNSPVIIFFTAILFRLGFININ

SEQ ID NO: 55428 - protein, 60 aa, unidentified
  source 1..60: note = methanogen bacteria
LGYYPYLSYFSMANGSISGYNLSVDVNQVNSKLFYLKNFIKMISCNLISFDENFVEIFNN

SEQ ID NO: 55429 - protein, 96 aa, unidentified
  source 1..96: note = methanogen bacteria
FTNTVEINEDGLDRIDFCDFIKEYDNDYQSKSFMGYRELRIFEWYLNKDILKWGEDVTEFNPDDYDYIITEVKTLDNVNYEEVYHKGKYHFYERIY

SEQ ID NO: 55430 - protein, 16 aa, unidentified
  source 1..16: note = methanogen bacteria
ALMSGFGKNVGDLDQK

SEQ ID NO: 55431 - protein, 30 aa, unidentified
  source 1..30: note = methanogen bacteria
DSEDDTEFTKTTFITVKSTDGLERYERELV

SEQ ID NO: 55432 - protein, 55 aa, unidentified
  source 1..55: note = methanogen bacteria
ILRTYELNGRISFSYMEDCLREENQARAYQDRYNNWCENFKNDYLPDEVFQEYFD

SEQ ID NO: 55433 - protein, 63 aa, unidentified
  source 1..63: note = methanogen bacteria
MHVYGGLNDSSYTTNDLFMFYYLGGHNHINSSFSTASSTISAANNDSIGGIGGGSGGGGGGAF

SEQ ID NO: 55434 - protein, 10 aa, unidentified
  source 1..10: note = methanogen bacteria
GIWHGTTTYG

SEQ ID NO: 55435 - protein, 10 aa, unidentified
  source 1..10: note = methanogen bacteria
FIDTSFIGPV

SEQ ID NO: 55436 - protein, 10 aa, unidentified
  source 1..10: note = methanogen bacteria
TIDTSFLGPA

SEQ ID NO: 55437 - protein, 10 aa, unidentified
  source 1..10: note = methanogen bacteria
FIDTSFMGPV

SEQ ID NO: 55438 - protein, 10 aa, unidentified
  source 1..10: note = methanogen bacteria
FIDTSFMGPV

SEQ ID NO: 55439 - protein, 10 aa, unidentified
  source 1..10: note = methanogen bacteria
FIDTSFMGSL

SEQ ID NO: 55440 - protein, 10 aa, unidentified
  source 1..10: note = methanogen bacteria
FIDTSFIGPI

SEQ ID NO: 55441 - protein, 10 aa, unidentified
  source 1..10: note = methanogen bacteria
FIDTSFMGPA

SEQ ID NO: 55442 - protein, 58 aa, unidentified
  source 1..58: note = methanogen bacteria
FHQTRGAFNPDIYAYLAGSIELAGLNSNHILGGFWIQNSPVIIFFTALLFRLGFVNIN

SEQ ID NO: 55443 - protein, 59 aa, unidentified
  source 1..59: note = methanogen bacteria
GFYPEISYFSMASGSIKGYSSAVDVNKINDKLFYIKNFFKLLSCNWISFDENFTEIFND

SEQ ID NO: 55444 - protein, 96 aa, unidentified
  source 1..96: note = methanogen bacteria
FTNTVEINEDGLDRIDFCDFIKEYDNDYQSKSFMGYRELRIFEWYLNKDILKWGDDVTEFNPDDHDYIITEVKTLDNVNYEEVYHKGKYHFYERIY

SEQ ID NO: 55445 - protein, 23 aa, unidentified
  source 1..23: note = methanogen bacteria
AITDEISGAVLGGRDIDSDFISG

SEQ ID NO: 55446 - protein, 10 aa, unidentified
  source 1..10: note = methanogen bacteria
LVVEGEIGYG

SEQ ID NO: 55447 - protein, 11 aa, unidentified
  source 1..11: note = methanogen bacteria
GPQMGIEPLFT

SEQ ID NO: 55448 - protein, 21 aa, unidentified
  source 1..21: note = methanogen bacteria
TEGEFVSIIGPSGSGKSTLLN

SEQ ID NO: 55449 - protein, 27 aa, unidentified
  source 1..27: note = methanogen bacteria
SNKKLNEFRAREIGFIFQLHNLIPNIS

SEQ ID NO: 55450 - protein, 63 aa, unidentified
  source 1..63: note = methanogen bacteria
LDSKTSTKILKQLIDLHDTKNVTLIIVTHDMDVAKLADRVIEVLDGEIISAGDDSLINSKIDV

SEQ ID NO: 55451 - protein, 11 aa, unidentified
  source 1..11: note = methanogen bacteria
GADTSFIGPVI

SEQ ID NO: 55452 - protein, 11 aa, unidentified
  source 1..11: note = methanogen bacteria
NDFVNVFELGI

SEQ ID NO: 55453 - protein, 11 aa, unidentified
  source 1..11: note = methanogen bacteria
NNIEDIFALGY

SEQ ID NO: 55454 - protein, 10 aa, unidentified
  source 1..10: note = methanogen bacteria
NDIEGMFELG

SEQ ID NO: 55455 - protein, 10 aa, unidentified
  source 1..10: note = methanogen bacteria
SNVENIFRLG

SEQ ID NO: 55456 - protein, 10 aa, unidentified
  source 1..10: note = methanogen bacteria
GADTSFIGPI

SEQ ID NO: 55457 - protein, 11 aa, unidentified
  source 1..11: note = methanogen bacteria
NDIEGMFELGL

SEQ ID NO: 55458 - protein, 11 aa, unidentified
  source 1..11: note = methanogen bacteria
GSDTSLFSTPL

SEQ ID NO: 55459 - protein, 43 aa, unidentified
  source 1..43: note = methanogen bacteria
GTGGIYPVEIMNEIFGVLYPYLPMTYGINMVREAQLGLIWANY

SEQ ID NO: 55460 - protein, 57 aa, unidentified
  source 1..57: note = methanogen bacteria
MSGGIFNPDTAVYLISAYKYAGMDFNNICDVTELFYTPVLSYLTALLLMLGIDGQFS

SEQ ID NO: 55461 - protein, 52 aa, unidentified
  source 1..52: note = methanogen bacteria
LDYGCSLTFLEQSHNSLNVATAYDSGSVSYNIDKSYYLEELVSVSLFGFYRS

SEQ ID NO: 55462 - protein, 22 aa, unidentified
  source 1..22: note = methanogen bacteria
ITIIFEGDEIYNPTNTTINVKL

SEQ ID NO: 55463 - protein, 30 aa, unidentified
  source 1..30: note = methanogen bacteria
ITVNITSNVEGTATITINKQTYPVTINNND

SEQ ID NO: 55464 - protein, 17 aa, unidentified
  source 1..17: note = methanogen bacteria
YIDFDVTYDNAIILNIT

SEQ ID NO: 55465 - protein, 28 aa, unidentified
  source 1..28: note = methanogen bacteria
NINDTVNINIGNKNYSFKIENNDTIIIP

SEQ ID NO: 55466 - protein, 71 aa, unidentified
  source 1..71: note = methanogen bacteria
VTLTWDAVRITKILTVNKIKTQINIKDIEMFYKDGSKAIITLTDENNNILANKNVSFNINGQDYVRTTNSD

SEQ ID NO: 55467 - protein, 17 aa, unidentified
  source 1..17: note = methanogen bacteria
NNCSIKIKPTLIANDLT

SEQ ID NO: 55468 - protein, 24 aa, unidentified
  source 1..24: note = methanogen bacteria
FVKVLDKAGNIKPNSNVNFNINGV

SEQ ID NO: 55469 - protein, 20 aa, unidentified
  source 1..20: note = methanogen bacteria
IITSINEETGEMISNTITVL

SEQ ID NO: 55470 - protein, 16 aa, unidentified
  source 1..16: note = methanogen bacteria
VKVFNKDGSIAAGVDV

SEQ ID NO: 55471 - protein, 24 aa, unidentified
  source 1..24: note = methanogen bacteria
IITAEYQDCKVSNNIKVKSVLYAE

SEQ ID NO: 55472 - protein, 15 aa, unidentified
  source 1..15: note = methanogen bacteria
KLVNGKGEAYSMQYI

SEQ ID NO: 55473 - protein, 20 aa, unidentified
  source 1..20: note = methanogen bacteria
EYIITSSYNSASISNKITIH

SEQ ID NO: 55474 - protein, 18 aa, unidentified
  source 1..18: note = methanogen bacteria
IGNMNVYLIESTKTPLTT

SEQ ID NO: 55475 - protein, 56 aa, unidentified
  source 1..56: note = methanogen bacteria
LSGGTLNPDISLYSITALKYAGIDYYGIVNPEEIFYTPIISFLTSLLFRMGLVDKA

SEQ ID NO: 55476 - protein, 50 aa, unidentified
  source 1..50: note = methanogen bacteria
ILDYGGSLTFFEQSVNSFNGNKDIIMSNIFNLDKSYYIDNFSDFLFEKQD

SEQ ID NO: 55477 - protein, 21 aa, unidentified
  source 1..21: note = methanogen bacteria
TTIFDGINNIIHGTGTIDITG

SEQ ID NO: 55478 - protein, 58 aa, unidentified
  source 1..58: note = methanogen bacteria
YHQTRGAFSSDLYVYLAAALDFAGLNVNNISTPIYLANSPVICFLTSILFRLGFVDVL

SEQ ID NO: 55479 - protein, 63 aa, unidentified
  source 1..63: note = methanogen bacteria
LSMGSDLTYFGMASGSFNHFTSNNPAGQVNYIEDKLFYITHYLHFLYCNKITFSGLIPKFTSP

SEQ ID NO: 55480 - protein, 44 aa, unidentified
  source 1..44: note = methanogen bacteria
LLNLQSASVVVGGFPNVLISVAEMQMPSMLGAGMASMFLANTSG

SEQ ID NO: 55481 - protein, 16 aa, unidentified
  source 1..16: note = methanogen bacteria
ADIVDIGIQNTDFNYI

SEQ ID NO: 55482 - protein, 12 aa, unidentified
  source 1..12: note = methanogen bacteria
YDAIIGNVLTGD

SEQ ID NO: 55483 - protein, 55 aa, unidentified
  source 1..55: note = methanogen bacteria
NLNENIGLYCSDVFIYLTNSLALAGYGATREYLYLSPLICFLTSILFRLGLLSEV

SEQ ID NO: 55484 - protein, 61 aa, unidentified
  source 1..61: note = methanogen bacteria
NSGSHLSFLTQGSTFASGSKGEVIDNAYTDDTFFYLHDFPNFLFADHVIFDNVIPVLIGST

SEQ ID NO: 55485 - protein, 96 aa, unidentified
  source 1..96: note = methanogen bacteria
TFPGTVHYDQDFNKNKVIADYLINYDSDYSSKEIAAYSQRSLNWYLKDNAIALRDDQLDYLEASNITYYISDGNFDLVNYTMIYDKDGLYLYERNN

SEQ ID NO: 55486 - protein, 22 aa, unidentified
  source 1..22: note = methanogen bacteria
TTLIFDGINKIIHNTGSIDLNA

SEQ ID NO: 55487 - protein, 22 aa, unidentified
  source 1..22: note = methanogen bacteria
TTTIFNGINNIIHNTGTIDFTT

SEQ ID NO: 55488 - protein, 21 aa, unidentified
  source 1..21: note = methanogen bacteria
TIIFYGINNIMNNTGSLDFDT

SEQ ID NO: 55489 - protein, 23 aa, unidentified
  source 1..23: note = methanogen bacteria
TTTIFNGINAMMNHTDTIDFDKL

SEQ ID NO: 55490 - protein, 23 aa, unidentified
  source 1..23: note = methanogen bacteria
TTIIYDGIQNMIHHTGSVDIAGL

SEQ ID NO: 55491 - protein, 23 aa, unidentified
  source 1..23: note = methanogen bacteria
TTIIFNGINNIIHHTGSIDLDAL

SEQ ID NO: 55492 - protein, 11 aa, unidentified
  source 1..11: note = methanogen bacteria
PNPSAHAMVFS

SEQ ID NO: 55493 - protein, 13 aa, unidentified
  source 1..13: note = methanogen bacteria
LGPNNSTELMTTI

SEQ ID NO: 55494 - protein, 44 aa, unidentified
  source 1..44: note = methanogen bacteria
GTGGIYPIEIMSQFFRTLYPYLPMTHSITLLRESALGLLWTSYT

SEQ ID NO: 55495 - protein, 22 aa, unidentified
  source 1..22: note = methanogen bacteria
TTIIFDGINNIIHNTGTIDIST

SEQ ID NO: 55496 - protein, 23 aa, unidentified
  source 1..23: note = methanogen bacteria
NILLNGYAGNVVATFGNFVGGGN

SEQ ID NO: 55497 - protein, 11 aa, unidentified
  source 1..11: note = methanogen bacteria
QGLDINEALQR

SEQ ID NO: 55498 - protein, 23 aa, unidentified
  source 1..23: note = methanogen bacteria
TTTIFNGINNIIHHTGSIDLDTL

SEQ ID NO: 55499 - protein, 21 aa, unidentified
  source 1..21: note = methanogen bacteria
TIIFDGINNILHNTGSIDFES

SEQ ID NO: 55500 - protein, 10 aa, unidentified
  source 1..10: note = methanogen bacteria
SESDDLNKYQ

SEQ ID NO: 55501 - protein, 56 aa, unidentified
  source 1..56: note = methanogen bacteria
LQYSIGIGNWDTYLYLENGRNFAKMGWGDVSSIAPVLPMILAKIFLITHHTFQEAI

SEQ ID NO: 55502 - protein, 66 aa, unidentified
  source 1..66: note = methanogen bacteria
QFNKVLGTPFPFLGQFSGTVSNTQVMDSGYLPDTWYYITHIPNYLSSTIPLRSTFNAVVNPMGNIP

SEQ ID NO: 55503 - protein, 21 aa, unidentified
  source 1..21: note = methanogen bacteria
TLIFDGINKLMQHTGTIDFNT

SEQ ID NO: 55504 - protein, 22 aa, unidentified
  source 1..22: note = methanogen bacteria
TTIIYDGINNLIHHTGSIDFVS

SEQ ID NO: 55505 - protein, 18 aa, unidentified
  source 1..18: note = methanogen bacteria
IGNMNVYLIESTKVPMTR

SEQ ID NO: 55506 - protein, 13 aa, unidentified
  source 1..13: note = methanogen bacteria
AMIDNSTFGEPNI

SEQ ID NO: 55507 - protein, 82 aa, unidentified
  source 1..82: note = methanogen bacteria
KENDNLLLTIEDTSINLDMGEKIVVNIIAHFANNDVLNLSNLKKRMKSKSNAEWFMNNFDDWKEAVENEYFTDDVKNRYFND

SEQ ID NO: 55508 - protein, 34 aa, unidentified
  source 1..34: note = methanogen bacteria
YHSYYSAYSTNSSSGSGGFGSFGGGSGGGGGGAF

SEQ ID NO: 55509 - protein, 58 aa, unidentified
  source 1..58: note = methanogen bacteria
FHQTRGALNSDIYVYLAGALDVANMNYNHISSPIWIQNSPVIIFLTSLLFRLGLVDIN

SEQ ID NO: 55510 - protein, 58 aa, unidentified
  source 1..58: note = methanogen bacteria
LQYGQLSYFSMAQGSIGRYTNPTDPQFITSRYFFLKNFLNLLSANSISFNPIEQFNEP

SEQ ID NO: 55511 - protein, 98 aa, unidentified
  source 1..98: note = methanogen bacteria
NFTNTVDHNEDDLDRVELCDFIKEYDPDYQSKEFLCMWDLRYFEWYLNKDIIKYREDVNEIDPDRYDYVITFNKTFDYDNYRLVHHEGNYYLNEKISY

SEQ ID NO: 55512 - protein, 22 aa, unidentified
  source 1..22: note = methanogen bacteria
TTVIFNGINDMMNGTGTINMET

SEQ ID NO: 55513 - protein, 27 aa, unidentified
  source 1..27: note = methanogen bacteria
RKYYKMITSTKEDTIIRRLNKDTGDLK

SEQ ID NO: 55514 - protein, 46 aa, unidentified
  source 1..46: note = methanogen bacteria
FEDEKQRISLTSISKESGALSQFMNAWKIDALRDVPVTRVRQLYDK

SEQ ID NO: 55515 - protein, 16 aa, unidentified
  source 1..16: note = methanogen bacteria
IKYSNISESVLYDNDV

SEQ ID NO: 55516 - protein, 49 aa, unidentified
  source 1..49: note = methanogen bacteria
WGFNHMRTAFLPIGISNPNLGDTGFDTGSFGDIGGPGSGGFGGGGGGVF

SEQ ID NO: 55517 - protein, 57 aa, unidentified
  source 1..57: note = methanogen bacteria
IKSDSKIGNFYIHDVYIYLNNSLNYAGLGGSSKNPGLPPVIPVITSIFFSLGFVSDK

SEQ ID NO: 55518 - protein, 76 aa, unidentified
  source 1..76: note = methanogen bacteria
YHISPFFLSQYKTISATSNPGASSAAATNTVALTTNNIFYYINNIPLYMGTYKWIPFSLKPGRFAFEKMVWLGNHP

SEQ ID NO: 55519 - protein, 43 aa, unidentified
  source 1..43: note = methanogen bacteria
ATGGIYPIQIMHPFFRALYPYMPMTYGITLVREAQLGTVWSNY

SEQ ID NO: 55520 - protein, 43 aa, unidentified
  source 1..43: note = methanogen bacteria
ATGGIYPIEIMHQFFQTLYPYMPMTYAITLIREAQLGVVWSNY

SEQ ID NO: 55521 - protein, 20 aa, unidentified
  source 1..20: note = methanogen bacteria
TANPSSSGGGGSDGGGSFGG

SEQ ID NO: 55522 - protein, 10 aa, unidentified
  source 1..10: note = methanogen bacteria
GKPIGTSDLN

SEQ ID NO: 55523 - protein, 16 aa, unidentified
  source 1..16: note = methanogen bacteria
IVGNDNDMIIKRKDKD

SEQ ID NO: 55524 - protein, 50 aa, unidentified
  source 1..50: note = methanogen bacteria
RYEDKKGNISLKSISEGDRGEFSQFMDAWEIDVNKEVTSARVKELFDDTG

SEQ ID NO: 55525 - protein, 39 aa, unidentified
  source 1..39: note = methanogen bacteria
MYSSFNTLNTPETDTDPGSFGDIGDIGSGGFGGGGGGVF

SEQ ID NO: 55526 - protein, 14 aa, unidentified
  source 1..14: note = methanogen bacteria
EYGLNMDPLSSTAT

SEQ ID NO: 55527 - protein, 32 aa, unidentified
  source 1..32: note = methanogen bacteria
GITAGEGGISAFSLENIKTNFTPPGWNWGVND

SEQ ID NO: 55528 - protein, 26 aa, unidentified
  source 1..26: note = methanogen bacteria
GMMSPDDIEAWGVSTLYPIAQFDFGS

SEQ ID NO: 55529 - protein, 70 aa, unidentified
  source 1..70: note = methanogen bacteria
VNALVDNKSDIGNPNMKGFEATILSLIDRKVLDLYSKENSETETHDLFLTFNYDSKNELSDSETIVFDTL

SEQ ID NO: 55530 - protein, 54 aa, unidentified
  source 1..54: note = methanogen bacteria
NFADDGTLNLSTLNDTLQNSFNAGWFADQIKNWQSHVIFELDDNGVESYFNDTG

SEQ ID NO: 55531 - protein, 65 aa, unidentified
  source 1..65: note = methanogen bacteria
LQMPDIYDYNDGIFLYHNYGGYYMMHNAYYIGDHMGDSSSSDSFDFGGFDDFGGGGFDGGGGGAF

SEQ ID NO: 55532 - protein, 65 aa, unidentified
  source 1..65: note = methanogen bacteria
LQMPDVYEYDDGIFLYHTYGGYYMMHNAYYIGDNMGDPSSSDSFDFGGFDDFGGGGFDGGGGGAF

SEQ ID NO: 55533 - protein, 12 aa, unidentified
  source 1..12: note = methanogen bacteria
IDNTHEIGTPNM

SEQ ID NO: 55534 - protein, 24 aa, unidentified
  source 1..24: note = methanogen bacteria
ERNSETDLNDLYLKINKDNLDGLA

SEQ ID NO: 55535 - protein, 39 aa, unidentified
  source 1..39: note = methanogen bacteria
DLSYEANAKIFMKEFNTWQKDVKYEYLDSENLKTYFNNK

SEQ ID NO: 55536 - protein, 59 aa, unidentified
  source 1..59: note = methanogen bacteria
KNIDSYYDDDVFLYHHYGGYYMMHNAFVTGQNTATPSSDSVGDFGSLGGGSGGGGGGAF

SEQ ID NO: 55537 - protein, 16 aa, unidentified
  source 1..16: note = methanogen bacteria
TAIFDGIKTGNMNMEY

SEQ ID NO: 55538 - protein, 15 aa, unidentified
  source 1..15: note = methanogen bacteria
LIDNSRDIGTPNMNG

SEQ ID NO: 55539 - protein, 24 aa, unidentified
  source 1..24: note = methanogen bacteria
LYLKLNRERTSSLSIHENTVFDIM

SEQ ID NO: 55540 - protein, 52 aa, unidentified
  source 1..52: note = methanogen bacteria
FSDSNDIVNLSNLNNDLSYESNAKMFMEEYNEWQQDVKHEYLDSDNLELYFN

SEQ ID NO: 55541 - protein, 59 aa, unidentified
  source 1..59: note = methanogen bacteria
KNISVYDDDVFLYHHYGGYYMMHNAFMTGQSSANPSTDSDFGDFGGLGGGSGGGGGGAF

SEQ ID NO: 55542 - protein, 18 aa, unidentified
  source 1..18: note = methanogen bacteria
VNALLAAAPDFSKAQNLE

SEQ ID NO: 55543 - protein, 21 aa, unidentified
  source 1..21: note = methanogen bacteria
ALTNVSITGAGNPSMDGFKAT

SEQ ID NO: 55544 - protein, 54 aa, unidentified
  source 1..54: note = methanogen bacteria
LFESYSIGGRFSLNDFSENMKNESDARDYRAKYSAWELSVENNIGDRASSMFIG

SEQ ID NO: 55545 - protein, 52 aa, unidentified
  source 1..52: note = methanogen bacteria
SDLYRFHYYGGYSVLGTSMTLGSTTGVATSSSVGGGFGGSGGGGGGGGGGAF

SEQ ID NO: 55546 - protein, 58 aa, unidentified
  source 1..58: note = methanogen bacteria
NSSSNILGHNYRDAYLYLIQAYHFAGTPIGGYDYVNYYSPLIPFLTSLLFRLGFVSEA

SEQ ID NO: 55547 - protein, 47 aa, unidentified
  source 1..47: note = methanogen bacteria
INGLPFGFINQAREVSTETISSNTAAAPANDLFFYISSLPRFIYSPQ

SEQ ID NO: 55548 - protein, 56 aa, unidentified
  source 1..56: note = methanogen bacteria
ILKGFMYNGVIDFKKMENDLRNEENAERFNNVYRAWKTSFISRNIPESIKREYFDD

SEQ ID NO: 55549 - protein, 15 aa, unidentified
  source 1..15: note = methanogen bacteria
YNNITDSYYYTNDVF

SEQ ID NO: 55550 - protein, 39 aa, unidentified
  source 1..39: note = methanogen bacteria
YFGGMNALESAITTGINTVNTSDIGDVGGGSGGGGGGAF

SEQ ID NO: 55551 - protein, 22 aa, unidentified
  source 1..22: note = methanogen bacteria
NALVDNKNDIGNPNMKGFEATI

SEQ ID NO: 55552 - protein, 45 aa, unidentified
  source 1..45: note = methanogen bacteria
SLIDRKVLDLHSQENSETNTRDLYLTFNYDSKDQLSDSETIVFDT

SEQ ID NO: 55553 - protein, 54 aa, unidentified
  source 1..54: note = methanogen bacteria
FAEEGTLNLSSFNDQLQNSFNAGWFADQIRNWQSHVIFEIDENGVESYFNDTGS

SEQ ID NO: 55554 - protein, 63 aa, unidentified
  source 1..63: note = methanogen bacteria
QMPDVYEYDDGIFLYHHYGGYYMMHNAYYIGDKMGDPSADSFDFGGFDDFGGGGFDGGGGGAF

SEQ ID NO: 55555 - protein, 22 aa, unidentified
  source 1..22: note = methanogen bacteria
NALMDNSHDIGTPNMDGFEATI

SEQ ID NO: 55556 - protein, 89 aa, unidentified
  source 1..89: note = methanogen bacteria
KDSKTEINELYLTLHKDTTSNLDIHEQTVVDILSMFADENNVVNMSGLNADLSDETNAKLFMEEYNTWQKDVKHEYLDSENLKSYFHKK

SEQ ID NO: 55557 - protein, 58 aa, unidentified
  source 1..58: note = methanogen bacteria
KNIDSILDDDVFLYHHYGGYYLMHDAFVTGQSAANPSSDSGGFGGLGGGSGGGGGGAF

SEQ ID NO: 55558 - protein, 17 aa, unidentified
  source 1..17: note = methanogen bacteria
TTAIFDGINSGNMNLEY

SEQ ID NO: 55559 - protein, 18 aa, unidentified
  source 1..18: note = methanogen bacteria
VNALLAVAPNFTQAQNLD

SEQ ID NO: 55560 - protein, 18 aa, unidentified
  source 1..18: note = methanogen bacteria
VNALLSVAPDFTKAQNLD

SEQ ID NO: 55561 - protein, 18 aa, unidentified
  source 1..18: note = methanogen bacteria
VNALLTVAPNFSQAQNLD

SEQ ID NO: 55562 - protein, 18 aa, unidentified
  source 1..18: note = methanogen bacteria
VNALLTVAPNFSQAQNLD

SEQ ID NO: 55563 - protein, 59 aa, unidentified
  source 1..59: note = methanogen bacteria
FQMSGGIYSPDESLYLISAFKYAGLDYYNICDVNDLFYTPVISYLTSLLLRLGIDGHFS

SEQ ID NO: 55564 - protein, 55 aa, unidentified
  source 1..55: note = methanogen bacteria
LFDYNAKLGFFDLSAVTLHVSNTNTNAIDYNGSKLFYIFGLLNDFSFGFVRDFNF

SEQ ID NO: 55565 - protein, 17 aa, unidentified
  source 1..17: note = methanogen bacteria
TTAIFEGINSGNMNLEY

SEQ ID NO: 55566 - protein, 28 aa, unidentified
  source 1..28: note = methanogen bacteria
NVLISVAEMQMPSMLGAGMNSAFLANTN

SEQ ID NO: 55567 - protein, 19 aa, unidentified
  source 1..19: note = methanogen bacteria
VNAILTVAPNFSQAQNLDT

SEQ ID NO: 55568 - protein, 12 aa, unidentified
  source 1..12: note = methanogen bacteria
IVKEENLGKNRV

SEQ ID NO: 55569 - protein, 37 aa, unidentified
  source 1..37: note = methanogen bacteria
MLNSAFNDGISAANPSSDGGGFGDIGGGSGGGGGGAF

SEQ ID NO: 55570 - protein, 17 aa, unidentified
  source 1..17: note = methanogen bacteria
SITHVIDTVKMISKITE

SEQ ID NO: 55571 - protein, 20 aa, unidentified
  source 1..20: note = methanogen bacteria
SSDNTYDLVSEYDDVILLRH

SEQ ID NO: 55572 - protein, 15 aa, unidentified
  source 1..15: note = methanogen bacteria
IIQPILDGEADITKT

SEQ ID NO: 55573 - protein, 26 aa, unidentified
  source 1..26: note = methanogen bacteria
NALVDSKNDIGTPNMKGFEATILSLI

SEQ ID NO: 55574 - protein, 28 aa, unidentified
  source 1..28: note = methanogen bacteria
RKVLDLYSRENSETDTRDLFLKFDYDSK

SEQ ID NO: 55575 - protein, 52 aa, unidentified
  source 1..52: note = methanogen bacteria
FADDGILNLSTLNNLLENEDNAIWFAGQIQNWQGYVIFESDESGIDAYFDDS

SEQ ID NO: 55576 - protein, 65 aa, unidentified
  source 1..65: note = methanogen bacteria
KLQMPDIYDYDDGIFLYHHYGGYYMMHNAYHVGDMGAPSSSDSHDFGGFDDFGGGGFDGGGGGAF

SEQ ID NO: 55577 - protein, 18 aa, unidentified
  source 1..18: note = methanogen bacteria
VNAILAVAPNFSQAQNLD

SEQ ID NO: 55578 - protein, 22 aa, unidentified
  source 1..22: note = methanogen bacteria
NALIENSRDIGTPNMNGFEATI

SEQ ID NO: 55579 - protein, 33 aa, unidentified
  source 1..33: note = methanogen bacteria
RDPNTDLTELYLKLNRQKTSSLSIHENTVFDIM

SEQ ID NO: 55580 - protein, 52 aa, unidentified
  source 1..52: note = methanogen bacteria
MFSDSHDIVNLSNLNNDLSYESNAKMFMEEYNEWQQDVKHEYLDNLELYFNN

SEQ ID NO: 55581 - protein, 62 aa, unidentified
  source 1..62: note = methanogen bacteria
LQEKNIPAYDDDIFLYHHYGGYYMMHNAFMTGQSSANPSTDSDFGDFGGLGGGSGGGGGGAF

SEQ ID NO: 55582 - protein, 13 aa, unidentified
  source 1..13: note = methanogen bacteria
TTFLTVKSMDGLE

SEQ ID NO: 55583 - protein, 52 aa, unidentified
  source 1..52: note = methanogen bacteria
TYELNGRISFSYMQDCLREENQARSYQDRYNNWCQNFKNDYLPEEVFEEYFD

SEQ ID NO: 55584 - protein, 59 aa, unidentified
  source 1..59: note = methanogen bacteria
GGLDNPNYTTNDLFMFYYLGGYNHVNSSFATASSTISAANNDSIGGIGGGSGGGGGGAF

SEQ ID NO: 55585 - protein, 16 aa, unidentified
  source 1..16: note = methanogen bacteria
TAIFDGINSGNMNLNH

SEQ ID NO: 55586 - protein, 16 aa, unidentified
  source 1..16: note = methanogen bacteria
TAIFDGINSGNMNIEH

SEQ ID NO: 55587 - protein, 58 aa, unidentified
  source 1..58: note = methanogen bacteria
HQSRGAFNSDIYVYLASALDYAGMNYGHISDLGYMSNSPLICYLTSLLFKLGFVSINS

SEQ ID NO: 55588 - protein, 58 aa, unidentified
  source 1..58: note = methanogen bacteria
LSYNAPISYFSGAMGSIGRFHNPKDPNYIVDKFFYIKNYLSLLFANKITSPMQIEKFR

SEQ ID NO: 55589 - protein, 92 aa, unidentified
  source 1..92: note = methanogen bacteria
INTVEIDDWSLNFDSASNFLLDYDSDYQSKEIGVDVGDRYYEWYFLKDVDLINPHSFNSSDYNYIFVNSNLDNDDYHKIYRDGRIRVYERNY

SEQ ID NO: 55590 - protein, 14 aa, unidentified
  source 1..14: note = methanogen bacteria
DALTGVKKQQIDLL

SEQ ID NO: 55591 - protein, 15 aa, unidentified
  source 1..15: note = methanogen bacteria
NSGYSIGFETDSIID

SEQ ID NO: 55592 - protein, 17 aa, unidentified
  source 1..17: note = methanogen bacteria
TLDLLISNLNSSNDIAI

SEQ ID NO: 55593 - protein, 12 aa, unidentified
  source 1..12: note = methanogen bacteria
IQNKRSIGKPNM

SEQ ID NO: 55594 - protein, 44 aa, unidentified
  source 1..44: note = methanogen bacteria
VNNILNMSELSSKLSNETNGKWFANNFDLWKKTVANEYLNKKEL

SEQ ID NO: 55595 - protein, 60 aa, unidentified
  source 1..60: note = methanogen bacteria
PHVSDDDYYYYDLYTFHRYSGLIMLSSAFNTGIHASNASNSGGSFGNVGGGSGGGGGGAF

SEQ ID NO: 55596 - protein, 17 aa, unidentified
  source 1..17: note = methanogen bacteria
TTAIFDGITSGNMNIEY

SEQ ID NO: 55597 - protein, 22 aa, unidentified
  source 1..22: note = methanogen bacteria
FDEWKDIVKDDCIGKDKVSSYF

SEQ ID NO: 55598 - protein, 42 aa, unidentified
  source 1..42: note = methanogen bacteria
SGLIMLNSAFNTGVSAANPSSSDMGDFGDIGGGSGGGGGGAF

SEQ ID NO: 55599 - protein, 16 aa, unidentified
  source 1..16: note = methanogen bacteria
TAIFDGINSGNMNIEY

SEQ ID NO: 55600 - protein, 51 aa, unidentified
  source 1..51: note = methanogen bacteria
YELNGRISFNYMQDCLRSEYHARAFQDRYNNWCENFKNEYLPDEVLKEYFD

SEQ ID NO: 55601 - protein, 13 aa, unidentified
  source 1..13: note = methanogen bacteria
GGLNDYSYTTNDL

SEQ ID NO: 55602 - protein, 43 aa, unidentified
  source 1..43: note = methanogen bacteria
YYLGGYNHVGSSFSTASSTISSANNDSIGGIGGGSGGGGGGAF

SEQ ID NO: 55603 - protein, 22 aa, unidentified
  source 1..22: note = methanogen bacteria
NTIVETSYSDSGDYGSSGSGGF

SEQ ID NO: 55604 - protein, 16 aa, unidentified
  source 1..16: note = methanogen bacteria
MSIAGRFVIPDIGLGP

SEQ ID NO: 55605 - protein, 14 aa, unidentified
  source 1..14: note = methanogen bacteria
YPPFSALYPLTTEI

SEQ ID NO: 55606 - protein, 16 aa, unidentified
  source 1..16: note = methanogen bacteria
LLIKNITDKWVDDINF

SEQ ID NO: 55607 - protein, 31 aa, unidentified
  source 1..31: note = methanogen bacteria
NGKLFVEKFDEWKYIVKNQSLGEERISRYFN

SEQ ID NO: 55608 - protein, 41 aa, unidentified
  source 1..41: note = methanogen bacteria
SGLIMLDSAFNNGVSAANPSSDGGGFGGVGGGSGGGGGGAF

SEQ ID NO: 55609 - protein, 15 aa, unidentified
  source 1..15: note = methanogen bacteria
NAMIDNSTFGEPNIR

SEQ ID NO: 55610 - protein, 85 aa, unidentified
  source 1..85: note = methanogen bacteria
SIKKENEDLLLTIEDTSINLDMGEKIVVNILSHFANNGVLNLSGLKQRMKSKDNAEWFINNFNDWKKAVENEYFKDEVKNRYFND

SEQ ID NO: 55611 - protein, 36 aa, unidentified
  source 1..36: note = methanogen bacteria
CFYHSYYRAYSTNSSSGSGGFGSFGGGSGGGGGGAF

SEQ ID NO: 55612 - protein, 54 aa, unidentified
  source 1..54: note = methanogen bacteria
FNKDLGIYCSDVFIYLYNSLVFARIAFFSNYLYLSPLICFLTSILFRLGYVSEV

SEQ ID NO: 55613 - protein, 61 aa, unidentified
  source 1..61: note = methanogen bacteria
SFGSQLTFLTQGSTISSGSKGAVNDSAYTTDTLFYLHDFLNFLFSQKVVFDGIIPNLIGAS

SEQ ID NO: 55614 - protein, 95 aa, unidentified
  source 1..95: note = methanogen bacteria
FTGTIEHDTDFNDYKVVSDYLMQYDDDYASKDIAVSKQRQFSWFLRGYTIAVTVEQTDFLESSNITYYVCDEDMEIKNYRKIYNYKDIFLYERVN

SEQ ID NO: 55615 - protein, 16 aa, unidentified
  source 1..16: note = methanogen bacteria
DEIIGSMPDYSEADGV

SEQ ID NO: 55616 - protein, 10 aa, unidentified
  source 1..10: note = methanogen bacteria
NGGTDWSSGF

SEQ ID NO: 55617 - protein, 27 aa, unidentified
  source 1..27: note = methanogen bacteria
WFMDQFSEWQYEVQCEIDNGVESYFNS

SEQ ID NO: 55618 - protein, 12 aa, unidentified
  source 1..12: note = methanogen bacteria
MDYEDDIFLYHN

SEQ ID NO: 55619 - protein, 39 aa, unidentified
  source 1..39: note = methanogen bacteria
FMSSAFHTMNNSMNSGDFGDFGDFGDFGGGSGGGGGGAF

SEQ ID NO: 55620 - protein, 15 aa, unidentified
  source 1..15: note = methanogen bacteria
LIDNKDSIGKPNMKG

SEQ ID NO: 55621 - protein, 51 aa, unidentified
  source 1..51: note = methanogen bacteria
FAENEILNLSSLNDKLSSQHNAKSFQEDYNTWADHVKKESSSKRSEYFDDR

SEQ ID NO: 55622 - protein, 13 aa, unidentified
  source 1..13: note = methanogen bacteria
VPDISDYDDGIFL

SEQ ID NO: 55623 - protein, 40 aa, unidentified
  source 1..40: note = methanogen bacteria
GYYVFSQAFKTSESAANPSSGSGGFGGFGGGSGGGGGGAF

SEQ ID NO: 55624 - protein, 21 aa, unidentified
  source 1..21: note = methanogen bacteria
NIILEGSIRIMNHTGTIDFPN

SEQ ID NO: 55625 - protein, 14 aa, unidentified
  source 1..14: note = methanogen bacteria
AMMKSHGLGDPDME

SEQ ID NO: 55626 - protein, 19 aa, unidentified
  source 1..19: note = methanogen bacteria
FSTKDLILKFERDDLKDLK

SEQ ID NO: 55627 - protein, 60 aa, unidentified
  source 1..60: note = methanogen bacteria
NLYNMLYSLSDGGVLNMSELDSKLSSESKGKWFMGELDNFYESAKSEYLSEETVNRYFNN

SEQ ID NO: 55628 - protein, 57 aa, unidentified
  source 1..57: note = methanogen bacteria
IPDYADYDDSVLVYHYYGGYHMMHTAYDTGYSAANPSDSSGFGGLGGGSGGGGGGAF

SEQ ID NO: 55629 - protein, 21 aa, unidentified
  source 1..21: note = methanogen bacteria
NILIEGANNIINHTGTFDFDR

SEQ ID NO: 55630 - protein, 100 aa, unidentified
  source 1..100: note = methanogen bacteria
APAADLNSLDADGKALYTDASGLPYFSEMDSYYNYRLTNDYVDHGYVGDEKVNGSEWDLHRNAPDGNKIQYELGIVYLTSWMHDMANNFLGWHMSVKEVA

SEQ ID NO: 55631 - protein, 59 aa, unidentified
  source 1..59: note = methanogen bacteria
QGIDGVTGIFSRVFGLLNLQSASVAVGGFPNVLISVAEMQMPSMLGAGMTSMFLASTDG

SEQ ID NO: 55632 - protein, 35 aa, unidentified
  source 1..35: note = methanogen bacteria
GAFQTSNGVIPGTQDYMWNAMEWIGDTQDNDTVRR

SEQ ID NO: 55633 - protein, 28 aa, unidentified
  source 1..28: note = methanogen bacteria
INPIVISLVVNNIPWVPIQELIVGPYGI

SEQ ID NO: 55634 - protein, 51 aa, unidentified
  source 1..51: note = methanogen bacteria
GIFEFIIAAVRPLVNAIGLPDQTSASFVLGFFRRDFGAAGLMSIHTMLTGV

SEQ ID NO: 55635 - protein, 37 aa, unidentified
  source 1..37: note = methanogen bacteria
LNSAFNTGVSAANPSSNGGGGIGDIGGGSGGGGGGAF

SEQ ID NO: 55636 - protein, 21 aa, unidentified
  source 1..21: note = methanogen bacteria
TIIFDGINAMNSHTGTIDLNT

SEQ ID NO: 55637 - protein, 21 aa, unidentified
  source 1..21: note = methanogen bacteria
TTIYNGINLILNHTGTIDINR

SEQ ID NO: 55638 - protein, 21 aa, unidentified
  source 1..21: note = methanogen bacteria
TTIFDGLNAIATNTGTMDLNR

SEQ ID NO: 55639 - protein, 14 aa, unidentified
  source 1..14: note = methanogen bacteria
IDNRASLGEPNMKG

SEQ ID NO: 55640 - protein, 52 aa, unidentified
  source 1..52: note = methanogen bacteria
LYPFADGDILNLSTLEDKLSSERNAKSFQEDYKSWVKHVEKETEGKKAEYFD

SEQ ID NO: 55641 - protein, 15 aa, unidentified
  source 1..15: note = methanogen bacteria
VPNVSDYDDGIFIYH

SEQ ID NO: 55642 - protein, 40 aa, unidentified
  source 1..40: note = methanogen bacteria
GYYLFAHAYDTSVSAANPSSGSGGFGGFGGGSGGGGGGAF

SEQ ID NO: 55643 - protein, 14 aa, unidentified
  source 1..14: note = methanogen bacteria
ALYSSGNIGTPNMD

SEQ ID NO: 55644 - protein, 31 aa, unidentified
  source 1..31: note = methanogen bacteria
TVTDKDTETKDLIINFSENTSGLKSNEKQVY

SEQ ID NO: 55645 - protein, 49 aa, unidentified
  source 1..49: note = methanogen bacteria
RFSNNDQLNLSSLNSKLSTESNAKWFMGRYKDWQENVCDSLEFRTDEEF

SEQ ID NO: 55646 - protein, 58 aa, unidentified
  source 1..58: note = methanogen bacteria
QDIYRYDADIFMYHRYGGSYMMHSAIMSGQSTMSNSSSDSGGFGGLGGGSGGGGGGAF

SEQ ID NO: 55647 - protein, 30 aa, unidentified
  source 1..30: note = methanogen bacteria
NFFFPEINYDQPLSGQFAAKRSVLNKLNFE

SEQ ID NO: 55648 - protein, 54 aa, unidentified
  source 1..54: note = methanogen bacteria
VLDADVRGIKIMEVDIGDIQHDMSPLGDLHEMANEVVRTIITRAMDYGRISMID

SEQ ID NO: 55649 - protein, 23 aa, unidentified
  source 1..23: note = methanogen bacteria
KQPNYLISQLLKLFKTSCNSNTS

SEQ ID NO: 55650 - protein, 21 aa, unidentified
  source 1..21: note = methanogen bacteria
NILLDGSLRIMNHTGTIDFPK

SEQ ID NO: 55651 - protein, 11 aa, unidentified
  source 1..11: note = methanogen bacteria
NLPFSKWLYFI

SEQ ID NO: 55652 - protein, 46 aa, unidentified
  source 1..46: note = methanogen bacteria
DGNMLNVSRLSSKLNNEYNGKLFKEKLDDWKESVKNQHIGQISEYF

SEQ ID NO: 55653 - protein, 40 aa, unidentified
  source 1..40: note = methanogen bacteria
GLIMLESAFNNGISAANPSSDGGGFGDIGGGSGGGGGGAF

SEQ ID NO: 55654 - protein, 16 aa, unidentified
  source 1..16: note = methanogen bacteria
ADIVNVGIQNTNFQFI

SEQ ID NO: 55655 - protein, 12 aa, unidentified
  source 1..12: note = methanogen bacteria
YDALNGGVLTGD

SEQ ID NO: 55656 - protein, 20 aa, unidentified
  source 1..20: note = methanogen bacteria
LVEDRTDLGTPTMKGFEASI

SEQ ID NO: 55657 - protein, 26 aa, unidentified
  source 1..26: note = methanogen bacteria
SPQENVDFDTRDLILTFDQDKKSELS

SEQ ID NO: 55658 - protein, 60 aa, unidentified
  source 1..60: note = methanogen bacteria
EKIVFNTLEHFANNNTLNLSMLNGQLSTEYEAKWFMSQLEMWEKNVENQINLEEYFDGTG

SEQ ID NO: 55659 - protein, 60 aa, unidentified
  source 1..60: note = methanogen bacteria
LQAPNYVDYDDDLFYYHYYGGYGLMYSAFRTGQTTANPSSDSGGFGGLGGGSGGGGGGAF

SEQ ID NO: 55660 - protein, 11 aa, unidentified
  source 1..11: note = methanogen bacteria
KGDLGKPNMKG

SEQ ID NO: 55661 - protein, 49 aa, unidentified
  source 1..49: note = methanogen bacteria
AHDNALNLSRLNGSLTSEYEAKWFMNQIQSWENSVKSSFDLSKYFNDTG

SEQ ID NO: 55662 - protein, 11 aa, unidentified
  source 1..11: note = methanogen bacteria
PNISDYDDGIF

SEQ ID NO: 55663 - protein, 40 aa, unidentified
  source 1..40: note = methanogen bacteria
GYGIMYSAYNKSYSTVYNSSDSGGFGGFGGGSGGGGGGAF

SEQ ID NO: 55664 - protein, 29 aa, unidentified
  source 1..29: note = methanogen bacteria
LFNTLTHFAKDNVLNLSQLNSKFSSETQA

SEQ ID NO: 55665 - protein, 25 aa, unidentified
  source 1..25: note = methanogen bacteria
FLNHVKSWEESVKNEINLPEYFDDA

SEQ ID NO: 55666 - protein, 42 aa, unidentified
  source 1..42: note = methanogen bacteria
YGGYGLFHGFYSSSYSTVHSSSDSGGFGGFGGGSGGGGGGAF

SEQ ID NO: 55667 - protein, 12 aa, unidentified
  source 1..12: note = methanogen bacteria
AKGSIGKPDMDG

SEQ ID NO: 55668 - protein, 47 aa, unidentified
  source 1..47: note = methanogen bacteria
GDTLNLSALNSSLSFERDAEWFMDEYHAWQESVEIEVKQKVEREFND

SEQ ID NO: 55669 - protein, 41 aa, unidentified
  source 1..41: note = methanogen bacteria
GGYYMMHHAIMSGEKTVSSSSDTGDFGGLGGGSGGGGGGAF

SEQ ID NO: 55670 - protein, 12 aa, unidentified
  source 1..12: note = methanogen bacteria
SQDNTLNLSQLS

SEQ ID NO: 55671 - protein, 21 aa, unidentified
  source 1..21: note = methanogen bacteria
DRIGDWEESVKNEINLEEYFD

SEQ ID NO: 55672 - protein, 11 aa, unidentified
  source 1..11: note = methanogen bacteria
PNIPDYDDGLF

SEQ ID NO: 55673 - protein, 41 aa, unidentified
  source 1..41: note = methanogen bacteria
GGYGIFLSAYNTSNSTINSSSDSGGFGGLGGGSGGGGGGAF

SEQ ID NO: 55674 - protein, 14 aa, unidentified
  source 1..14: note = methanogen bacteria
VYATGSIGKPDMDG

SEQ ID NO: 55675 - protein, 23 aa, unidentified
  source 1..23: note = methanogen bacteria
IANENTGTNDLYIRFHGDMSELE

SEQ ID NO: 55676 - protein, 49 aa, unidentified
  source 1..49: note = methanogen bacteria
ADGDTLNLSALNSTLSFESNAEWFMDEYHAWQESVESEVKQKVEKEFDD

SEQ ID NO: 55677 - protein, 55 aa, unidentified
  source 1..55: note = methanogen bacteria
FNFRDDDIFIYHYYGGYYMMHHAIMSGQETVSSSSDSGGFGGLGGGSGGGGGGAF

SEQ ID NO: 55678 - protein, 22 aa, unidentified
  source 1..22: note = methanogen bacteria
VNAIYAQGEIGTPNMDGFEACI

SEQ ID NO: 55679 - protein, 91 aa, unidentified
  source 1..91: note = methanogen bacteria
VLNIQTVTNPDTDTNDLYLKFSGDTSELKANEKQVYDILHNFANGDTLNMSSLNTRLSNESNAKWFMDQYNTWRDQVSNEVKGKVEEEFND

SEQ ID NO: 55680 - protein, 60 aa, unidentified
  source 1..60: note = methanogen bacteria
LQEIPTGYYDDDIFLYHSYGGYYMMHAAFMSGQSTVNSSSSSGGFGGLGGGSGGGGGGAF

SEQ ID NO: 55681 - protein, 21 aa, unidentified
  source 1..21: note = methanogen bacteria
VNALYSSGNVGTPNMDGFEAA

SEQ ID NO: 55682 - protein, 32 aa, unidentified
  source 1..32: note = methanogen bacteria
ETVTDEDTETKDLIIKFSGNTSGLKSNEKQVY

SEQ ID NO: 55683 - protein, 52 aa, unidentified
  source 1..52: note = methanogen bacteria
LHRFSNNDRLNLSILNSRLSTESNAKWFMGQFNDWQDNVSASLEFRADEEFN

SEQ ID NO: 55684 - protein, 54 aa, unidentified
  source 1..54: note = methanogen bacteria
YGYDEDIFMYHRYGGSYMMHSAIMSGQSTMSSSSDSGGFGGLGGGSGGGGGGAF

SEQ ID NO: 55685 - protein, 20 aa, unidentified
  source 1..20: note = methanogen bacteria
NALYSSGNVGTPNMDGFEAA

SEQ ID NO: 55686 - protein, 85 aa, unidentified
  source 1..85: note = methanogen bacteria
TVADEDTETKDLFINFSGNTSELKSNEKQVYDILHRFSNNDRLNLSSLNSRLSTESNAKWFMGQYNDWQENVSASLEFRTDKEFD

SEQ ID NO: 55687 - protein, 59 aa, unidentified
  source 1..59: note = methanogen bacteria
QEQDIDKYDADIFMYHRYGGSYMMHSAIMSGQSTMSSSSDSGGFGGLGGGSGGGGGGAF

SEQ ID NO: 55688 - protein, 12 aa, unidentified
  source 1..12: note = methanogen bacteria
SNLIGAVALSAI

SEQ ID NO: 55689 - protein, 20 aa, unidentified
  source 1..20: note = methanogen bacteria
GPIIGILCPSAQIQPIVFQY

SEQ ID NO: 55690 - protein, 16 aa, unidentified
  source 1..16: note = methanogen bacteria
LMLYQVNNPSDIPIVL

SEQ ID NO: 55691 - protein, 16 aa, unidentified
  source 1..16: note = methanogen bacteria
ITVPHNLYGDGLNPHM

SEQ ID NO: 55692 - protein, 16 aa, unidentified
  source 1..16: note = methanogen bacteria
PESIILLDSVSGTYID

SEQ ID NO: 55693 - protein, 12 aa, unidentified
  source 1..12: note = methanogen bacteria
LLENEILDNESE

SEQ ID NO: 55694 - protein, 10 aa, unidentified
  source 1..10: note = methanogen bacteria
FHNVTLIKME

SEQ ID NO: 55695 - protein, 10 aa, unidentified
  source 1..10: note = methanogen bacteria
VAGLGQTAIA

SEQ ID NO: 55696 - protein, 20 aa, unidentified
  source 1..20: note = methanogen bacteria
RPLLESYGASGQTLNEAIAY

SEQ ID NO: 55697 - protein, 11 aa, unidentified
  source 1..11: note = methanogen bacteria
SMVGGDYGVAT

SEQ ID NO: 55698 - protein, 20 aa, unidentified
  source 1..20: note = methanogen bacteria
LATIFAYTPETAQLVPGITT

SEQ ID NO: 55699 - protein, 43 aa, unidentified
  source 1..43: note = methanogen bacteria
GTGGIYPIEIMNPIFQALYPYLPMTYAINIVRETVLGLIWSNY

SEQ ID NO: 55700 - protein, 43 aa, unidentified
  source 1..43: note = methanogen bacteria
GTGGIYPIEIMNPIFQMLYPFLPMTYAINIIREVTLGLIWSNY

SEQ ID NO: 55701 - protein, 16 aa, unidentified
  source 1..16: note = methanogen bacteria
AIIDNKNSIGTPNMKG

SEQ ID NO: 55702 - protein, 50 aa, unidentified
  source 1..50: note = methanogen bacteria
AENEILNLSSLNDKLSSKTNAKSFQEDYGTWLDHVKNECGDKKSQYFDDR

SEQ ID NO: 55703 - protein, 14 aa, unidentified
  source 1..14: note = methanogen bacteria
HVSNISDYDDGIFL

SEQ ID NO: 55704 - protein, 40 aa, unidentified
  source 1..40: note = methanogen bacteria
GYYVFNQAFKTSESAANPSSDSGGFGGFGGGSGGGGGGAF

SEQ ID NO: 55705 - protein, 15 aa, unidentified
  source 1..15: note = methanogen bacteria
AFHWLEANVAGVPRY

SEQ ID NO: 55706 - protein, 23 aa, unidentified
  source 1..23: note = methanogen bacteria
YNEETSVAHVVKTALSCKYVNEV

SEQ ID NO: 55707 - protein, 29 aa, unidentified
  source 1..29: note = methanogen bacteria
GSSDKTYDIATSAGANVIRHETNIGKGSA

SEQ ID NO: 55708 - protein, 16 aa, unidentified
  source 1..16: note = methanogen bacteria
LNLTKKQIEVMIEPII

SEQ ID NO: 55709 - protein, 15 aa, unidentified
  source 1..15: note = methanogen bacteria
GKTDITKTKFKREAG

SEQ ID NO: 55710 - protein, 13 aa, unidentified
  source 1..13: note = methanogen bacteria
TIVDRAIEYGRIT

SEQ ID NO: 55711 - protein, 11 aa, unidentified
  source 1..11: note = methanogen bacteria
FLIGSLNLAAI

SEQ ID NO: 55712 - protein, 25 aa, unidentified
  source 1..25: note = methanogen bacteria
DPIVGLLCSANMEVSSQLFPLVKDF

SEQ ID NO: 55713 - protein, 17 aa, unidentified
  source 1..17: note = methanogen bacteria
LFLFSINDPAYVPVVTD

SEQ ID NO: 55714 - protein, 10 aa, unidentified
  source 1..10: note = methanogen bacteria
FHNVTVIRME

SEQ ID NO: 55715 - protein, 22 aa, unidentified
  source 1..22: note = methanogen bacteria
VTIIFDGANNILHGTGTMDFAS

SEQ ID NO: 55716 - protein, 10 aa, unidentified
  source 1..10: note = methanogen bacteria
SQINVHAFFA

SEQ ID NO: 55717 - protein, 18 aa, unidentified
  source 1..18: note = methanogen bacteria
GILYSVDQSDSYLLVWDY

SEQ ID NO: 55718 - protein, 10 aa, unidentified
  source 1..10: note = methanogen bacteria
IMTTGEIGPI

SEQ ID NO: 55719 - protein, 18 aa, unidentified
  source 1..18: note = methanogen bacteria
DYAFGFFSITGMGTKIYW

SEQ ID NO: 55720 - protein, 15 aa, unidentified
  source 1..15: note = methanogen bacteria
YIVVIKLYIQNIIYY

SEQ ID NO: 55721 - protein, 41 aa, unidentified
  source 1..41: note = methanogen bacteria
LLGGVNTANTALSDMVNLYPAEALKTGGTGWTSFPKLGTPF

SEQ ID NO: 55722 - protein, 35 aa, unidentified
  source 1..35: note = methanogen bacteria
SNVYFYDKLGKIAVDVVGGNIDKIIPTFITMALPE

SEQ ID NO: 55723 - protein, 28 aa, unidentified
  source 1..28: note = methanogen bacteria
AKTAKGLGICMALFGVETILPVAPWPFI

SEQ ID NO: 55724 - protein, 13 aa, unidentified
  source 1..13: note = methanogen bacteria
DVMGDNSYDFDIS

SEQ ID NO: 55725 - protein, 11 aa, unidentified
  source 1..11: note = methanogen bacteria
VLQGGEMEGQS

SEQ ID NO: 55726 - protein, 10 aa, unidentified
  source 1..10: note = methanogen bacteria
EVTISGITDN

SEQ ID NO: 55727 - protein, 16 aa, unidentified
  source 1..16: note = methanogen bacteria
PAAWWLQDRYGFYEDQ

SEQ ID NO: 55728 - protein, 11 aa, unidentified
  source 1..11: note = methanogen bacteria
NFFGKIGLAAF

SEQ ID NO: 55729 - protein, 18 aa, unidentified
  source 1..18: note = methanogen bacteria
NVAQMLGATGESFNATVS

SEQ ID NO: 55730 - protein, 10 aa, unidentified
  source 1..10: note = methanogen bacteria
VMVGGLIFLS

SEQ ID NO: 55731 - protein, 15 aa, unidentified
  source 1..15: note = methanogen bacteria
VYMFGKNPEVYDVTV

SEQ ID NO: 55732 - protein, 28 aa, unidentified
  source 1..28: note = methanogen bacteria
INVQYISYLLASILKPIIETIIQLAYKL

SEQ ID NO: 55733 - protein, 16 aa, unidentified
  source 1..16: note = methanogen bacteria
DNWDTISAILGKIGEW

SEQ ID NO: 55734 - protein, 11 aa, unidentified
  source 1..11: note = methanogen bacteria
FLLGSVQLSVV

SEQ ID NO: 55735 - protein, 19 aa, unidentified
  source 1..19: note = methanogen bacteria
DQILMFFNTPHEIFKLSKE

SEQ ID NO: 55736 - protein, 16 aa, unidentified
  source 1..16: note = methanogen bacteria
LKLFNVVNPYHAEVIS

SEQ ID NO: 55737 - protein, 43 aa, unidentified
  source 1..43: note = methanogen bacteria
GSGGIYPVEIMSKFFGVLFPYLPMTHAISCVREAQLGLIWSNY

SEQ ID NO: 55738 - protein, 10 aa, unidentified
  source 1..10: note = methanogen bacteria
LHDVTIIRME

SEQ ID NO: 55739 - protein, 18 aa, unidentified
  source 1..18: note = methanogen bacteria
SNEDDTVLRLTNTDTSNL

SEQ ID NO: 55740 - protein, 11 aa, unidentified
  source 1..11: note = methanogen bacteria
ERNGDISLKTI

SEQ ID NO: 55741 - protein, 33 aa, unidentified
  source 1..33: note = methanogen bacteria
DTGDPYEFKDFRETWKKNTSEAVPESLIERYFI

SEQ ID NO: 55742 - protein, 40 aa, unidentified
  source 1..40: note = methanogen bacteria
YGGFNNLDTTFAALTPSDSGSGGIGSVGGGGFGGGGGGTF

SEQ ID NO: 55743 - protein, 58 aa, unidentified
  source 1..58: note = methanogen bacteria
FHASGGVFSPDKAVYLINALMYSGMDYYHIANPGDIFFSPVISFLTSILFRMGLVDQL

SEQ ID NO: 55744 - protein, 53 aa, unidentified
  source 1..53: note = methanogen bacteria
ILDFGGSLTFISQSSNTINVQSFTGGTDYNPDKLFYIKNFSEFLISENRALDR

SEQ ID NO: 55745 - protein, 97 aa, unidentified
  source 1..97: note = methanogen bacteria
TFIEPMEIEGYSNSLIDASDYIISHDPNYHSKTFASNNHNYRLVKWDLNVNVSYIIGEHENPDSCNTTYIINWKKYNNLENYHKIYSNDKYHIYRHN

SEQ ID NO: 55746 - protein, 16 aa, unidentified
  source 1..16: note = methanogen bacteria
NAMIDNKNFGEPNIRG

SEQ ID NO: 55747 - protein, 88 aa, unidentified
  source 1..88: note = methanogen bacteria
KVFNIKKDNEDLLMTFNEGADNLDYGEKIVYNCLSGFASDGVLNLSELDDKMDSRVNSLRFVNQFDMWKEAVEMEYLNDDIKDRYFDD

SEQ ID NO: 55748 - protein, 11 aa, unidentified
  source 1..11: note = methanogen bacteria
VPSVDRYDGGV

SEQ ID NO: 55749 - protein, 41 aa, unidentified
  source 1..41: note = methanogen bacteria
GSNTFYHCYGTASSNTSSSSSGSDSFGSFGGGSGGGGGGAF

SEQ ID NO: 55750 - protein, 23 aa, unidentified
  source 1..23: note = methanogen bacteria
NDMTDAIQEQVVSGDTSDSAVTE

SEQ ID NO: 55751 - protein, 17 aa, unidentified
  source 1..17: note = methanogen bacteria
IIASSSGTAAKMSDFSD

SEQ ID NO: 55752 - protein, 42 aa, unidentified
  source 1..42: note = methanogen bacteria
TGGVYPIDIMHPFFKTLYPYLPMTYAIKMLREVMLGLLWSNY

SEQ ID NO: 55753 - protein, 23 aa, unidentified
  source 1..23: note = methanogen bacteria
NDMTDAIQEQVVSGDTTNSAVTE

SEQ ID NO: 55754 - protein, 17 aa, unidentified
  source 1..17: note = methanogen bacteria
IIASSSGTAAKMSEFSD

SEQ ID NO: 55755 - protein, 43 aa, unidentified
  source 1..43: note = methanogen bacteria
GTGGIYPIEIMPKLFQDLYNYLPMTYAIKLVREAQLGVIWSNY

SEQ ID NO: 55756 - protein, 43 aa, unidentified
  source 1..43: note = methanogen bacteria
GTGGIYPIEIMPKLFQELYSYLPMTYGIKLVREAQLGIIWPNY

SEQ ID NO: 55757 - protein, 56 aa, unidentified
  source 1..56: note = methanogen bacteria
DHNLNLGIYCSDVFVYLTNSLTFAGFKSSNVYLYLSPLICFLTSIFFRLGFLSETS

SEQ ID NO: 55758 - protein, 57 aa, unidentified
  source 1..57: note = methanogen bacteria
GSHLSFLTQSSTFASGSKGEVIDNAYTTDTLFYLHDFPNFLFSDYVSFDDVIPVLNG

SEQ ID NO: 55759 - protein, 96 aa, unidentified
  source 1..96: note = methanogen bacteria
SFPATVHYNEDFNKNKVIADYLIDYDPDYASKEVAVFHQRSLNWFLKTNTVAITDDQLDYLESSNITYYISDDNFKLENYTMIHQENGLYLFERIN

SEQ ID NO: 55760 - protein, 44 aa, unidentified
  source 1..44: note = methanogen bacteria
GTGGIYPIEIMDPIFKALYPYLPMTYAINIVREATLGLLWSNYM

SEQ ID NO: 55761 - protein, 11 aa, unidentified
  source 1..11: note = methanogen bacteria
NFFGKIGLAAF

SEQ ID NO: 55762 - protein, 17 aa, unidentified
  source 1..17: note = methanogen bacteria
VAQILGASGESFNATVS

SEQ ID NO: 55763 - protein, 15 aa, unidentified
  source 1..15: note = methanogen bacteria
VYMFGKNPEVYDVAV

SEQ ID NO: 55764 - protein, 11 aa, unidentified
  source 1..11: note = methanogen bacteria
NFFGNIGLAAF

SEQ ID NO: 55765 - protein, 18 aa, unidentified
  source 1..18: note = methanogen bacteria
DVAQILGASGESFNSTVS

SEQ ID NO: 55766 - protein, 15 aa, unidentified
  source 1..15: note = methanogen bacteria
VYMFGKNPEVYDVAV

SEQ ID NO: 55767 - protein, 10 aa, unidentified
  source 1..10: note = methanogen bacteria
FHNVTLIRME

SEQ ID NO: 55768 - protein, 11 aa, unidentified
  source 1..11: note = methanogen bacteria
SSFIGESAVAA

SEQ ID NO: 55769 - protein, 20 aa, unidentified
  source 1..20: note = methanogen bacteria
DILINILEPPADVLPYINQY

SEQ ID NO: 55770 - protein, 10 aa, unidentified
  source 1..10: note = methanogen bacteria
IYMGSVGLVS

SEQ ID NO: 55771 - protein, 16 aa, unidentified
  source 1..16: note = methanogen bacteria
LVLYNLHTSPNVETFR

SEQ ID NO: 55772 - protein, 10 aa, unidentified
  source 1..10: note = methanogen bacteria
FHGPTIIRME

SEQ ID NO: 55773 - protein, 12 aa, unidentified
  source 1..12: note = methanogen bacteria
GNFFGKLGLSAF

SEQ ID NO: 55774 - protein, 18 aa, unidentified
  source 1..18: note = methanogen bacteria
QVALMLGASKESIASVSD

SEQ ID NO: 55775 - protein, 15 aa, unidentified
  source 1..15: note = methanogen bacteria
VYAFGKNPEVYDTAI

SEQ ID NO: 55776 - protein, 58 aa, unidentified
  source 1..58: note = methanogen bacteria
NSNTNFLGRSYRDVYLYLSLALRFSGVQFAGYAYINNLPPLVPFLTSLLFRLGFVDVS

SEQ ID NO: 55777 - protein, 46 aa, unidentified
  source 1..46: note = methanogen bacteria
NHYAFGFLSQSGEVAGEVAKQSQLSHPVVNDLGFYLTHAVNCISNL

SEQ ID NO: 55778 - protein, 11 aa, unidentified
  source 1..11: note = methanogen bacteria
FLIGSQQLSII

SEQ ID NO: 55779 - protein, 19 aa, unidentified
  source 1..19: note = methanogen bacteria
DNILMMYNCPKEIFNISKE

SEQ ID NO: 55780 - protein, 15 aa, unidentified
  source 1..15: note = methanogen bacteria
LAIFNVSNPYYAEVV

SEQ ID NO: 55781 - protein, 10 aa, unidentified
  source 1..10: note = methanogen bacteria
FHQGTVIRME

SEQ ID NO: 55782 - protein, 80 aa, unidentified
  source 1..80: note = methanogen bacteria
EEIKNILNEPETSPKEESVKKEDVKKQDEPKEIQTQEKPKQQTQKEQTPQQQTQTQEKPKQQTQTQEKPKQQTQTQEKPK

SEQ ID NO: 55783 - protein, 59 aa, unidentified
  source 1..59: note = methanogen bacteria
DFCWSACISNPDIAVYLLSGLKYAGLDYYNVVYPSELFYTPILSFLSSLFFRLGYVDKN

SEQ ID NO: 55784 - protein, 53 aa, unidentified
  source 1..53: note = methanogen bacteria
ILDFGGSLTFFEQSVKTFNGTQTPSNIIDFNNDKSYYMDHFTDILFLAGYHSN

SEQ ID NO: 55785 - protein, 11 aa, unidentified
  source 1..11: note = methanogen bacteria
MFLGSTQLAVV

SEQ ID NO: 55786 - protein, 19 aa, unidentified
  source 1..19: note = methanogen bacteria
DNILMFFNTPADIFNLSKE

SEQ ID NO: 55787 - protein, 16 aa, unidentified
  source 1..16: note = methanogen bacteria
LSLFNISNPYHVKVVT

SEQ ID NO: 55788 - protein, 11 aa, unidentified
  source 1..11: note = methanogen bacteria
GSLIGSSQLPA

SEQ ID NO: 55789 - protein, 16 aa, unidentified
  source 1..16: note = methanogen bacteria
LLHLLNVPSYLFNSSK

SEQ ID NO: 55790 - protein, 17 aa, unidentified
  source 1..17: note = methanogen bacteria
LYTLFNITTYSEQQIIS

SEQ ID NO: 55791 - protein, 13 aa, unidentified
  source 1..13: note = methanogen bacteria
VEPLTGGEIIEPN

SEQ ID NO: 55792 - protein, 10 aa, unidentified
  source 1..10: note = methanogen bacteria
FHNTTLIRMD

SEQ ID NO: 55793 - protein, 13 aa, unidentified
  source 1..13: note = methanogen bacteria
IEPLMGGDVVEPN

SEQ ID NO: 55794 - protein, 10 aa, unidentified
  source 1..10: note = methanogen bacteria
FHGATIIRME

SEQ ID NO: 55795 - protein, 13 aa, unidentified
  source 1..13: note = methanogen bacteria
VGPLTGGEIMDPN

SEQ ID NO: 55796 - protein, 13 aa, unidentified
  source 1..13: note = methanogen bacteria
VEPLTGGEIIEPN

SEQ ID NO: 55797 - protein, 81 aa, unidentified
  source 1..81: note = methanogen bacteria
MNCDKNTISNNNFESNQKAAYALNDNEISFNKFKNNKNGLILKNNNKIYSNTFSGNDIGINSSNNNKIGSNDFSNNDNSLF

SEQ ID NO: 55798 - protein, 92 aa, unidentified
  source 1..92: note = methanogen bacteria
TFKNNKIGIVLNESNTISSNVFYNNSLALKCLKSNRILNNSFSYNENGARLAGSSNELFSNSFSYNTIGIHMIQSNNNIIKSNSFTNNYQNS

SEQ ID NO: 55799 - protein, 29 aa, unidentified
  source 1..29: note = methanogen bacteria
SGKYCNVYIKGNENKASGNIFKNNKYHAL

SEQ ID NO: 55800 - protein, 35 aa, unidentified
  source 1..35: note = methanogen bacteria
NNIFKDTGNISLRVNGNSIKIKNNKFTGNKNTQIQ

SEQ ID NO: 55801 - protein, 10 aa, unidentified
  source 1..10: note = methanogen bacteria
SKIGVEAFFA

SEQ ID NO: 55802 - protein, 17 aa, unidentified
  source 1..17: note = methanogen bacteria
ILFYVDKADKYILVFDY

SEQ ID NO: 55803 - protein, 16 aa, unidentified
  source 1..16: note = methanogen bacteria
AFSLFSITGMSDEIFW

SEQ ID NO: 55804 - protein, 15 aa, unidentified
  source 1..15: note = methanogen bacteria
YWAEPLTGGEIVDPN

SEQ ID NO: 55805 - protein, 78 aa, unidentified
  source 1..78: note = methanogen bacteria
DNYLNASLNGSFKVRNLTSISLSLKDIIYGEIENITSILNINGVNLTYVINGSNGYEGVFNSSDSLILSDLDVGIYDV

SEQ ID NO: 55806 - protein, 13 aa, unidentified
  source 1..13: note = methanogen bacteria
VGPLTGGEIIDPN

SEQ ID NO: 55807 - protein, 13 aa, unidentified
  source 1..13: note = methanogen bacteria
INPLMGGEYVSPD

SEQ ID NO: 55808 - protein, 10 aa, unidentified
  source 1..10: note = methanogen bacteria
FHGATIIRME

SEQ ID NO: 55809 - protein, 12 aa, unidentified
  source 1..12: note = methanogen bacteria
DPLLGGNYISPN

SEQ ID NO: 55810 - protein, 51 aa, unidentified
  source 1..51: note = methanogen bacteria
EGTTTSTTFKVTPQTTTITINHIPSVQYSESVTISGKYTDTNNLNLRYTPL

SEQ ID NO: 55811 - protein, 35 aa, unidentified
  source 1..35: note = methanogen bacteria
TATTFQVKTKDTILSLNPLKNAQYSDYINITGRYT

SEQ ID NO: 55812 - protein, 19 aa, unidentified
  source 1..19: note = methanogen bacteria
SNSTSFQVTSINTTITLNP

SEQ ID NO: 55813 - protein, 44 aa, unidentified
  source 1..44: note = methanogen bacteria
PETLVGDNVTITGKYIDANGNPLRKTSLTLVVNDEKTHVRTDDN

SEQ ID NO: 55814 - protein, 16 aa, unidentified
  source 1..16: note = methanogen bacteria
LHLLNIPPVIFNTSKT

SEQ ID NO: 55815 - protein, 14 aa, unidentified
  source 1..14: note = methanogen bacteria
TIFNITAAKDQIII

SEQ ID NO: 55816 - protein, 17 aa, unidentified
  source 1..17: note = methanogen bacteria
SLLHLLNISESIFETSK

SEQ ID NO: 55817 - protein, 16 aa, unidentified
  source 1..16: note = methanogen bacteria
CIMFNITGAYAQEIIS

SEQ ID NO: 55818 - protein, 10 aa, unidentified
  source 1..10: note = methanogen bacteria
SKISIEAFFA

SEQ ID NO: 55819 - protein, 17 aa, unidentified
  source 1..17: note = methanogen bacteria
ILFYINQAQTYILAFDY

SEQ ID NO: 55820 - protein, 15 aa, unidentified
  source 1..15: note = methanogen bacteria
AFSLFSINGMETEVF

SEQ ID NO: 55821 - protein, 15 aa, unidentified
  source 1..15: note = methanogen bacteria
ITSAPTGVDNSVRFG

SEQ ID NO: 55822 - protein, 29 aa, unidentified
  source 1..29: note = methanogen bacteria
VNDLNIVASAINAFLAMGAQIIGCMADPW

SEQ ID NO: 55823 - protein, 16 aa, unidentified
  source 1..16: note = methanogen bacteria
TQGFSSIGMKVSGFGI

SEQ ID NO: 55824 - protein, 35 aa, unidentified
  source 1..35: note = methanogen bacteria
YTTILGGEDQALITLMKTSPLSFSGIFEALSASDA

SEQ ID NO: 55825 - protein, 19 aa, unidentified
  source 1..19: note = methanogen bacteria
DLGTADYLVGVLKGAIPVF

SEQ ID NO: 55826 - protein, 11 aa, unidentified
  source 1..11: note = methanogen bacteria
AWAVNPEMGFV

SEQ ID NO: 55827 - protein, 11 aa, unidentified
  source 1..11: note = methanogen bacteria
FLIGAINLSAI

SEQ ID NO: 55828 - protein, 19 aa, unidentified
  source 1..19: note = methanogen bacteria
TLIPMLTTSKEIIPLVDEF

SEQ ID NO: 55829 - protein, 17 aa, unidentified
  source 1..17: note = methanogen bacteria
ALTLYSVHGQATPAVVN

SEQ ID NO: 55830 - protein, 55 aa, unidentified
  source 1..55: note = methanogen bacteria
NFNQALGIYCSDVFIYLSNSLVFAGYESSILYLYLSPVICILTAILFKLGFLSEA

SEQ ID NO: 55831 - protein, 60 aa, unidentified
  source 1..60: note = methanogen bacteria
YGSNLSFLTQSSTFASGSKGEVIDNAYTTDTFFYLHDFPNFLYSDYVSFDNVIPVLNGSN

SEQ ID NO: 55832 - protein, 95 aa, unidentified
  source 1..95: note = methanogen bacteria
FTSTVHYNEDFNKNKVIADYLTEYDSDYMSKDVAVFKQRPYNWFLRMYTIPITDDRLDYLESSNITYYISDGNFNLSNYTMIYQKEGLYLYERIN

SEQ ID NO: 55833 - protein, 11 aa, unidentified
  source 1..11: note = methanogen bacteria
LIGSLQLSALN

SEQ ID NO: 55834 - protein, 18 aa, unidentified
  source 1..18: note = methanogen bacteria
PLLHILNIPESIFDASKT

SEQ ID NO: 55835 - protein, 14 aa, unidentified
  source 1..14: note = methanogen bacteria
VLFNITGINEQMIV

SEQ ID NO: 55836 - protein, 21 aa, unidentified
  source 1..21: note = methanogen bacteria
AITDEISGAVLGGRDIDTDLI

SEQ ID NO: 55837 - protein, 10 aa, unidentified
  source 1..10: note = methanogen bacteria
LIVGGEIGYG

SEQ ID NO: 55838 - protein, 11 aa, unidentified
  source 1..11: note = methanogen bacteria
FLIGAINISAI

SEQ ID NO: 55839 - protein, 20 aa, unidentified
  source 1..20: note = methanogen bacteria
DIIISILCQTTNIIPLVKDY

SEQ ID NO: 55840 - protein, 11 aa, unidentified
  source 1..11: note = methanogen bacteria
GSLMGSSGFAA

SEQ ID NO: 55841 - protein, 18 aa, unidentified
  source 1..18: note = methanogen bacteria
AVVMYSVKQGVDVELVVT

SEQ ID NO: 55842 - protein, 14 aa, unidentified
  source 1..14: note = methanogen bacteria
FDWMNENLTGLPRY

SEQ ID NO: 55843 - protein, 40 aa, unidentified
  source 1..40: note = methanogen bacteria
NLTDITVDLPETAQGNLEVRINNYSIYNETITNKSVAIPI

SEQ ID NO: 55844 - protein, 68 aa, unidentified
  source 1..68: note = methanogen bacteria
VYVDYAPIKIKPISTKVSYCGEYKVKVTGKTGKAIKNAAVTFKINGKKVKSTKTNSKGIAKLKLPSNW

SEQ ID NO: 55845 - protein, 15 aa, unidentified
  source 1..15: note = methanogen bacteria
ITQMPADGNNSARFG

SEQ ID NO: 55846 - protein, 27 aa, unidentified
  source 1..27: note = methanogen bacteria
TDLNIVNSAVNAFLAIAKQIITSMSDP

SEQ ID NO: 55847 - protein, 16 aa, unidentified
  source 1..16: note = methanogen bacteria
AAGFKTIGMDVSGFGI

SEQ ID NO: 55848 - protein, 35 aa, unidentified
  source 1..35: note = methanogen bacteria
GYTSILSGNDQTLITLMKTSPLSFEGIFEALSASD

SEQ ID NO: 55849 - protein, 19 aa, unidentified
  source 1..19: note = methanogen bacteria
EVGTADYLVSVLKGTIPYW

SEQ ID NO: 55850 - protein, 12 aa, unidentified
  source 1..12: note = methanogen bacteria
AWAVSPDMGFVI

SEQ ID NO: 55851 - protein, 14 aa, unidentified
  source 1..14: note = methanogen bacteria
TSTPTGVDNSVRFG

SEQ ID NO: 55852 - protein, 29 aa, unidentified
  source 1..29: note = methanogen bacteria
VNDLNIVSTAVNAFLNLGSQVIACMADPW

SEQ ID NO: 55853 - protein, 16 aa, unidentified
  source 1..16: note = methanogen bacteria
AAGFQSVGATNVTGFG

SEQ ID NO: 55854 - protein, 36 aa, unidentified
  source 1..36: note = methanogen bacteria
GYTTILGGEDQALITLMKTAPLSFNGIFEALSASDA

SEQ ID NO: 55855 - protein, 20 aa, unidentified
  source 1..20: note = methanogen bacteria
GEVGTADYLVGVLSNTIPAF

SEQ ID NO: 55856 - protein, 12 aa, unidentified
  source 1..12: note = methanogen bacteria
GWAVSTGDMSFT

SEQ ID NO: 55857 - protein, 14 aa, unidentified
  source 1..14: note = methanogen bacteria
SQTPADADNSVRFG

SEQ ID NO: 55858 - protein, 29 aa, unidentified
  source 1..29: note = methanogen bacteria
ANDINIISTIVNAFLNLASQVITCMADPW

SEQ ID NO: 55859 - protein, 17 aa, unidentified
  source 1..17: note = methanogen bacteria
AAGFQSVGVSNATGFGI

SEQ ID NO: 55860 - protein, 36 aa, unidentified
  source 1..36: note = methanogen bacteria
GYTSILGGEDQALITLMKTSPLSFNGIFEALSASDA

SEQ ID NO: 55861 - protein, 20 aa, unidentified
  source 1..20: note = methanogen bacteria
GEVGTADYLVGILSGSIPAF

SEQ ID NO: 55862 - protein, 12 aa, unidentified
  source 1..12: note = methanogen bacteria
GWAVSSGDMSFT

SEQ ID NO: 55863 - protein, 12 aa, unidentified
  source 1..12: note = methanogen bacteria
GFLLDSTQLSVL

SEQ ID NO: 55864 - protein, 20 aa, unidentified
  source 1..20: note = methanogen bacteria
DEILISLNTPAEIFNISKEY

SEQ ID NO: 55865 - protein, 16 aa, unidentified
  source 1..16: note = methanogen bacteria
LIIFDITEAYYIEPVT

SEQ ID NO: 55866 - protein, 19 aa, unidentified
  source 1..19: note = methanogen bacteria
DPILKLLNIPETLFEISKT

SEQ ID NO: 55867 - protein, 18 aa, unidentified
  source 1..18: note = methanogen bacteria
IFNLLNINSAQQQAYITH

SEQ ID NO: 55868 - protein, 11 aa, unidentified
  source 1..11: note = methanogen bacteria
FLSNSTQLSVL

SEQ ID NO: 55869 - protein, 19 aa, unidentified
  source 1..19: note = methanogen bacteria
DNILTMLNTPAEIFNDSRG

SEQ ID NO: 55870 - protein, 16 aa, unidentified
  source 1..16: note = methanogen bacteria
LKIFNIVDPQYFEPVT

SEQ ID NO: 55871 - protein, 11 aa, unidentified
  source 1..11: note = methanogen bacteria
SKINIDAFYAM

SEQ ID NO: 55872 - protein, 18 aa, unidentified
  source 1..18: note = methanogen bacteria
GVLFYSDSEKSYVLIFDY

SEQ ID NO: 55873 - protein, 12 aa, unidentified
  source 1..12: note = methanogen bacteria
SLLVSMSSMGPI

SEQ ID NO: 55874 - protein, 16 aa, unidentified
  source 1..16: note = methanogen bacteria
IFSLFGITEMQTEIFW

SEQ ID NO: 55875 - protein, 12 aa, unidentified
  source 1..12: note = methanogen bacteria
FILGSEYLAVIQ

SEQ ID NO: 55876 - protein, 20 aa, unidentified
  source 1..20: note = methanogen bacteria
DAYTEILCQSAALQSLVKQY

SEQ ID NO: 55877 - protein, 10 aa, unidentified
  source 1..10: note = methanogen bacteria
ALVGVIGLEA

SEQ ID NO: 55878 - protein, 16 aa, unidentified
  source 1..16: note = methanogen bacteria
LYLFNVHDPDRIPFVI

SEQ ID NO: 55879 - protein, 12 aa, unidentified
  source 1..12: note = methanogen bacteria
GFLSSSTQLSIL

SEQ ID NO: 55880 - protein, 20 aa, unidentified
  source 1..20: note = methanogen bacteria
DSILNILNTPEEIFNDSKGF

SEQ ID NO: 55881 - protein, 16 aa, unidentified
  source 1..16: note = methanogen bacteria
INIFSIAEPQYYEPII

SEQ ID NO: 55882 - protein, 17 aa, unidentified
  source 1..17: note = methanogen bacteria
GEITDHIVLNHSDVVMQ

SEQ ID NO: 55883 - protein, 18 aa, unidentified
  source 1..18: note = methanogen bacteria
GLIMGITGQEARFLKYSD

SEQ ID NO: 55884 - protein, 13 aa, unidentified
  source 1..13: note = methanogen bacteria
TQMPEGDNSVRFG

SEQ ID NO: 55885 - protein, 28 aa, unidentified
  source 1..28: note = methanogen bacteria
TDLNIVSSAVNAFLGIGQQVISCMADPW

SEQ ID NO: 55886 - protein, 16 aa, unidentified
  source 1..16: note = methanogen bacteria
ASGFQSIGMTNVTGFG

SEQ ID NO: 55887 - protein, 35 aa, unidentified
  source 1..35: note = methanogen bacteria
YTAILGGEDQALIHLMHTAPLSFNGIFEALAASDA

SEQ ID NO: 55888 - protein, 19 aa, unidentified
  source 1..19: note = methanogen bacteria
EVGTADYLVGVLKGAIPAF

SEQ ID NO: 55889 - protein, 11 aa, unidentified
  source 1..11: note = methanogen bacteria
AWAVCPDMTFT

SEQ ID NO: 55890 - protein, 10 aa, unidentified
  source 1..10: note = methanogen bacteria
SRISDDAFFA

SEQ ID NO: 55891 - protein, 16 aa, unidentified
  source 1..16: note = methanogen bacteria
VLFYVDDQKSYVLIFD

SEQ ID NO: 55892 - protein, 12 aa, unidentified
  source 1..12: note = methanogen bacteria
LLVGMNSMGPIL

SEQ ID NO: 55893 - protein, 17 aa, unidentified
  source 1..17: note = methanogen bacteria
YIFGLFSITGMQTQIFW

SEQ ID NO: 55894 - protein, 88 aa, unidentified
  source 1..88: note = methanogen bacteria
HANEDGGAICSKNSVYINNCTFKDNCADNSGGAIYTYYTIINNSLFDSNKADNDGGAINAINNAQLKNDIFTRNTAKNGGASYAYVLN

SEQ ID NO: 55895 - protein, 17 aa, unidentified
  source 1..17: note = methanogen bacteria
TFKDNKADNGGAIYASS

SEQ ID NO: 55896 - protein, 45 aa, unidentified
  source 1..45: note = methanogen bacteria
IADNCGGAIFSKNKIEAINSEFYKNNACEDGGAIFSDNAYVSRCL

SEQ ID NO: 55897 - protein, 27 aa, unidentified
  source 1..27: note = methanogen bacteria
VENSTFKNNYADDYGGALYSKEDSYIK

SEQ ID NO: 55898 - protein, 20 aa, unidentified
  source 1..20: note = methanogen bacteria
NAYEDGGAIFCNNASIAHCL

SEQ ID NO: 55899 - protein, 10 aa, unidentified
  source 1..10: note = methanogen bacteria
TFKNNYADDY

SEQ ID NO: 55900 - protein, 14 aa, unidentified
  source 1..14: note = methanogen bacteria
SSAPADADNSVRFG

SEQ ID NO: 55901 - protein, 29 aa, unidentified
  source 1..29: note = methanogen bacteria
VNDMNIVSTLVNAFLNMGTQIIACMSDPW

SEQ ID NO: 55902 - protein, 16 aa, unidentified
  source 1..16: note = methanogen bacteria
ASGFQSVGVTNVTGFG

SEQ ID NO: 55903 - protein, 36 aa, unidentified
  source 1..36: note = methanogen bacteria
GYTTILGGEDQALIAIMKSSPLSFNGVYTAFSQADA

SEQ ID NO: 55904 - protein, 20 aa, unidentified
  source 1..20: note = methanogen bacteria
GEVGTADYLVGVLGNSIPAF

SEQ ID NO: 55905 - protein, 12 aa, unidentified
  source 1..12: note = methanogen bacteria
AWAISSGDMSFT

SEQ ID NO: 55906 - protein, 14 aa, unidentified
  source 1..14: note = methanogen bacteria
TQAPATDNPAAKFG

SEQ ID NO: 55907 - protein, 28 aa, unidentified
  source 1..28: note = methanogen bacteria
NDLNIVSSAVNAFLAIGNEVISCMADPW

SEQ ID NO: 55908 - protein, 15 aa, unidentified
  source 1..15: note = methanogen bacteria
ASGFKSIGMDVSGFG

SEQ ID NO: 55909 - protein, 35 aa, unidentified
  source 1..35: note = methanogen bacteria
YTTILSGENQALITLMKTAPLSFNGIFEALSASNA

SEQ ID NO: 55910 - protein, 19 aa, unidentified
  source 1..19: note = methanogen bacteria
NVGTADYLAIVLKGTIPYW

SEQ ID NO: 55911 - protein, 12 aa, unidentified
  source 1..12: note = methanogen bacteria
AWAISPDIGFVV

SEQ ID NO: 55912 - protein, 10 aa, unidentified
  source 1..10: note = methanogen bacteria
FIGSQQLSII

SEQ ID NO: 55913 - protein, 20 aa, unidentified
  source 1..20: note = methanogen bacteria
DNILIMYNCPAEIFNISKEY

SEQ ID NO: 55914 - protein, 16 aa, unidentified
  source 1..16: note = methanogen bacteria
LSIFNVVNPHDAEVVT

SEQ ID NO: 55915 - protein, 14 aa, unidentified
  source 1..14: note = methanogen bacteria
TSTPANADNSVRFG

SEQ ID NO: 55916 - protein, 27 aa, unidentified
  source 1..27: note = methanogen bacteria
NDLNIITSSVNAFLNLATQIIACMADP

SEQ ID NO: 55917 - protein, 16 aa, unidentified
  source 1..16: note = methanogen bacteria
AAGFKSVGVTNITGFG

SEQ ID NO: 55918 - protein, 36 aa, unidentified
  source 1..36: note = methanogen bacteria
GYTTIMGGQDQALIAIMKSSPLSFNGIYTALAQSDA

SEQ ID NO: 55919 - protein, 20 aa, unidentified
  source 1..20: note = methanogen bacteria
GEVGTADYLVGVLKSTIPAF

SEQ ID NO: 55920 - protein, 12 aa, unidentified
  source 1..12: note = methanogen bacteria
AWAISSGDLSFT

SEQ ID NO: 55921 - protein, 14 aa, unidentified
  source 1..14: note = methanogen bacteria
SSTPANADNSVRFG

SEQ ID NO: 55922 - protein, 29 aa, unidentified
  source 1..29: note = methanogen bacteria
CNDLNIISTAINAFLNLGSQVISCMADPW

SEQ ID NO: 55923 - protein, 17 aa, unidentified
  source 1..17: note = methanogen bacteria
AAGFQSVGVNNVTGFGI

SEQ ID NO: 55924 - protein, 36 aa, unidentified
  source 1..36: note = methanogen bacteria
GYTTILGGEDQALITLMKTSPLSFNGIFEALSQSDA

SEQ ID NO: 55925 - protein, 20 aa, unidentified
  source 1..20: note = methanogen bacteria
GEVGTADYLVGVLSSTIPAW

SEQ ID NO: 55926 - protein, 12 aa, unidentified
  source 1..12: note = methanogen bacteria
AWAVSSGDMNFT

SEQ ID NO: 55927 - protein, 14 aa, unidentified
  source 1..14: note = methanogen bacteria
STTPADADNSVRFG

SEQ ID NO: 55928 - protein, 29 aa, unidentified
  source 1..29: note = methanogen bacteria
SNDLNIISTIVNAFLNLGSQVISCMADPW

SEQ ID NO: 55929 - protein, 16 aa, unidentified
  source 1..16: note = methanogen bacteria
AAGFQSVGVTNVTGFG

SEQ ID NO: 55930 - protein, 36 aa, unidentified
  source 1..36: note = methanogen bacteria
GYTTILGGEDQALITLMQTAPLSFDGIFQALSQSDA

SEQ ID NO: 55931 - protein, 19 aa, unidentified
  source 1..19: note = methanogen bacteria
EVGTADYLVGILSSTIPAW

SEQ ID NO: 55932 - protein, 12 aa, unidentified
  source 1..12: note = methanogen bacteria
AWAVSTGDMSFT

SEQ ID NO: 55933 - protein, 10 aa, unidentified
  source 1..10: note = methanogen bacteria
WSGRSQDTDD

SEQ ID NO: 55934 - protein, 10 aa, unidentified
  source 1..10: note = methanogen bacteria
MMSGSDMEIS

SEQ ID NO: 55935 - protein, 10 aa, unidentified
  source 1..10: note = methanogen bacteria
EIKPSYLVDN

SEQ ID NO: 55936 - protein, 10 aa, unidentified
  source 1..10: note = methanogen bacteria
LDAGILSSDF

SEQ ID NO: 55937 - protein, 15 aa, unidentified
  source 1..15: note = methanogen bacteria
EFIADNTMMEMYSAT

SEQ ID NO: 55938 - protein, 13 aa, unidentified
  source 1..13: note = methanogen bacteria
SLPANSDNAIRFG

SEQ ID NO: 55939 - protein, 29 aa, unidentified
  source 1..29: note = methanogen bacteria
VNDVNIITTAINAFLALGGQVIACMADPW

SEQ ID NO: 55940 - protein, 17 aa, unidentified
  source 1..17: note = methanogen bacteria
AAGFQSVGATNVTGFGI

SEQ ID NO: 55941 - protein, 36 aa, unidentified
  source 1..36: note = methanogen bacteria
GYTGILGGEDQALITLMKTSPLSFNGIFEALAASDA

SEQ ID NO: 55942 - protein, 20 aa, unidentified
  source 1..20: note = methanogen bacteria
GEVGTADYLVGVLSGTIPAW

SEQ ID NO: 55943 - protein, 12 aa, unidentified
  source 1..12: note = methanogen bacteria
GWAVSSGDMNFT

SEQ ID NO: 55944 - protein, 13 aa, unidentified
  source 1..13: note = methanogen bacteria
SNLPEGDNAVRLG

SEQ ID NO: 55945 - protein, 27 aa, unidentified
  source 1..27: note = methanogen bacteria
NDTNIITTAINAFLKLGTEVISVISDP

SEQ ID NO: 55946 - protein, 15 aa, unidentified
  source 1..15: note = methanogen bacteria
ASGFQSIGMDVSGFG

SEQ ID NO: 55947 - protein, 33 aa, unidentified
  source 1..33: note = methanogen bacteria
LTILDGNDAALIALMKNSPLSFEAIFEALSNSD

SEQ ID NO: 55948 - protein, 20 aa, unidentified
  source 1..20: note = methanogen bacteria
GEIGTAQYLVSVLKGTIPAF

SEQ ID NO: 55949 - protein, 13 aa, unidentified
  source 1..13: note = methanogen bacteria
LSWAISPDMGFAV

SEQ ID NO: 55950 - protein, 14 aa, unidentified
  source 1..14: note = methanogen bacteria
STTPANADNSVRFG

SEQ ID NO: 55951 - protein, 29 aa, unidentified
  source 1..29: note = methanogen bacteria
CNDLNIISTIINAFLDLGSQIISCMADPW

SEQ ID NO: 55952 - protein, 16 aa, unidentified
  source 1..16: note = methanogen bacteria
AAGFQSVGVTNVTGFG

SEQ ID NO: 55953 - protein, 36 aa, unidentified; identical to SEQ ID NO: 55924
  source 1..36: note = methanogen bacteria

SEQ ID NO: 55954 - protein, 20 aa, unidentified
  source 1..20: note = methanogen bacteria
GEVGTADYLVGVLSSTIPAW

SEQ ID NO: 55955 - protein, 12 aa, unidentified
  source 1..12: note = methanogen bacteria
AWAVSTGDMNFT

SEQ ID NO: 55956 - protein, 14 aa, unidentified
  source 1..14: note = methanogen bacteria
SSTPAGADNSVRFG

SEQ ID NO: 55957 - protein, 28 aa, unidentified
  source 1..28: note = methanogen bacteria
VNDVNIISTAVNAFLKLCVQIIACMSDP

SEQ ID NO: 55958 - protein, 16 aa, unidentified
  source 1..16: note = methanogen bacteria
ASGFKSIGVTNITGFG

SEQ ID NO: 55959 - protein, 36 aa, unidentified
  source 1..36: note = methanogen bacteria
GYTTILGGEDQALIAIMKSSPLSFNGIYTALSQSDA

SEQ ID NO: 55960 - protein, 19 aa, unidentified
  source 1..19: note = methanogen bacteria
EIGTADYLVGVLSSTIPAF

SEQ ID NO: 55961 - protein, 12 aa, unidentified
  source 1..12: note = methanogen bacteria
AWAISSGDMSFT

SEQ ID NO: 55962 - protein, 12 aa, unidentified
  source 1..12: note = methanogen bacteria
FLLGAGNLSAIQ

SEQ ID NO: 55963 - protein, 20 aa, unidentified
  source 1..20: note = methanogen bacteria
SIAKFLCASQSALIPDVNSY

SEQ ID NO: 55964 - protein, 16 aa, unidentified
  source 1..16: note = methanogen bacteria
LMLYSVKNPADVPVVL

SEQ ID NO: 55965 - protein, 11 aa, unidentified
  source 1..11: note = methanogen bacteria
ITQINIHASFA

SEQ ID NO: 55966 - protein, 18 aa, unidentified
  source 1..18: note = methanogen bacteria
EMLYSVDSANSYLLAMDY

SEQ ID NO: 55967 - protein, 10 aa, unidentified
  source 1..10: note = methanogen bacteria
TITMGPIGPV

SEQ ID NO: 55968 - protein, 17 aa, unidentified
  source 1..17: note = methanogen bacteria
YAFSLFSITGMQTEIFW

SEQ ID NO: 55969 - protein, 18 aa, unidentified
  source 1..18: note = methanogen bacteria
IGNMNVYLIESTKVPMTR

SEQ ID NO: 55970 - protein, 16 aa, unidentified
  source 1..16: note = methanogen bacteria
ISDNDVSAALDDDVMD

SEQ ID NO: 55971 - protein, 14 aa, unidentified
  source 1..14: note = methanogen bacteria
DSFALTDMSATEVE

SEQ ID NO: 55972 - protein, 11 aa, unidentified
  source 1..11: note = methanogen bacteria
ITQINIHASFA

SEQ ID NO: 55973 - protein, 19 aa, unidentified
  source 1..19: note = methanogen bacteria
QEILYSVNPADSYLLAMDY

SEQ ID NO: 55974 - protein, 10 aa, unidentified
  source 1..10: note = methanogen bacteria
TATMGPVGPV

SEQ ID NO: 55975 - protein, 16 aa, unidentified
  source 1..16: note = methanogen bacteria
AFSLFSITGMQTEILW

SEQ ID NO: 55976 - protein, 11 aa, unidentified
  source 1..11: note = methanogen bacteria
VTQINIHASFA

SEQ ID NO: 55977 - protein, 18 aa, unidentified
  source 1..18: note = methanogen bacteria
EIIYSINPADSYLLAMDY

SEQ ID NO: 55978 - protein, 10 aa, unidentified
  source 1..10: note = methanogen bacteria
TVTMGPVGPV

SEQ ID NO: 55979 - protein, 15 aa, unidentified
  source 1..15: note = methanogen bacteria
AFSIFSIKGMQTEIL

SEQ ID NO: 55980 - protein, 14 aa, unidentified
  source 1..14: note = methanogen bacteria
SSIPANENNAIRFG

SEQ ID NO: 55981 - protein, 28 aa, unidentified
  source 1..28: note = methanogen bacteria
VNDLNIISTIINAFLQLGAQVISCMADP

SEQ ID NO: 55982 - protein, 16 aa, unidentified
  source 1..16: note = methanogen bacteria
AAGFKSVGATNITGFG

SEQ ID NO: 55983 - protein, 34 aa, unidentified
  source 1..34: note = methanogen bacteria
YTAILGGQDQTLITLMKTAPLSFKGVFEALSASD

SEQ ID NO: 55984 - protein, 19 aa, unidentified
  source 1..19: note = methanogen bacteria
EIGTADYLVGVLSGSIPQF

SEQ ID NO: 55985 - protein, 12 aa, unidentified
  source 1..12: note = methanogen bacteria
GWAVSTGDMNFT

SEQ ID NO: 55986 - protein, 28 aa, unidentified
  source 1..28: note = methanogen bacteria
GFFFPELKYEQPLSGQFAGKRSALSKIK

SEQ ID NO: 55987 - protein, 54 aa, unidentified
  source 1..54: note = methanogen bacteria
VLDADVHGMSILEVDIGDISHDMSPLSDLNKMANEVVRTIIDRAVDYGRVTMMD

SEQ ID NO: 55988 - protein, 10 aa, unidentified
  source 1..10: note = methanogen bacteria
LMNGQDMDVT

SEQ ID NO: 55989 - protein, 10 aa, unidentified
  source 1..10: note = methanogen bacteria
LIRPEDILNN

SEQ ID NO: 55990 - protein, 10 aa, unidentified
  source 1..10: note = methanogen bacteria
FSNGIITSDF

SEQ ID NO: 55991 - protein, 16 aa, unidentified
  source 1..16: note = methanogen bacteria
DLINNNTPEVISLYAT

SEQ ID NO: 55992 - protein, 12 aa, unidentified
  source 1..12: note = methanogen bacteria
SNLIGAVALSAI

SEQ ID NO: 55993 - protein, 20 aa, unidentified
  source 1..20: note = methanogen bacteria
GPIIAILCPSAQIQPIVFQY

SEQ ID NO: 55994 - protein, 17 aa, unidentified
  source 1..17: note = methanogen bacteria
LMLYHVNSPSDIPIVLN

SEQ ID NO: 55995 - protein, 12 aa, unidentified
  source 1..12: note = methanogen bacteria
FLIGAGNLSAIQ

SEQ ID NO: 55996 - protein, 19 aa, unidentified
  source 1..19: note = methanogen bacteria
PISQMLCASQPELVPDVNL

SEQ ID NO: 55997 - protein, 16 aa, unidentified
  source 1..16: note = methanogen bacteria
LLLYSVKDSAQVPVVL

SEQ ID NO: 55998 - protein, 11 aa, unidentified
  source 1..11: note = methanogen bacteria
FLIGASNLAPI

SEQ ID NO: 55999 - protein, 20 aa, unidentified
  source 1..20: note = methanogen bacteria
SIAQFLCASQPELVSDVSSY

SEQ ID NO: 56000 - protein, 16 aa, unidentified
  source 1..16: note = methanogen bacteria
LFLYSVKNPADVPVVL

SEQ ID NO: 56001 - protein, 10 aa, unidentified
  source 1..10: note = methanogen bacteria
AYNEEDTVAT

SEQ ID NO: 56002 - protein, 13 aa, unidentified
  source 1..13: note = methanogen bacteria
EVVKKVSFVDEII

SEQ ID NO: 56003 - protein, 30 aa, unidentified
  source 1..30: note = methanogen bacteria
NDGSSDNTQSEAVKAGAHVINHETNKGKGE

SEQ ID NO: 56004 - protein, 32 aa, unidentified
  source 1..32: note = methanogen bacteria
HNLTSKKVEAMIIPILEGKTDITKTKFARAHG

SEQ ID NO: 56005 - protein, 23 aa, unidentified
  source 1..23: note = methanogen bacteria
DIGAIEHDMSPLADLNLMANEVV

SEQ ID NO: 56006 - protein, 15 aa, unidentified
  source 1..15: note = methanogen bacteria
IMNRANKYGRVIMID

SEQ ID NO: 56007 - protein, 11 aa, unidentified
  source 1..11: note = methanogen bacteria
NNIEDIYALGY

SEQ ID NO: 56008 - protein, 12 aa, unidentified
  source 1..12: note = methanogen bacteria
SMLLGPMNLSVI

SEQ ID NO: 56009 - protein, 21 aa, unidentified
  source 1..21: note = methanogen bacteria
PDSLLQALCNSNQLKPLVYEY

SEQ ID NO: 56010 - protein, 10 aa, unidentified
  source 1..10: note = methanogen bacteria
GVLANVGLVA

SEQ ID NO: 56011 - protein, 15 aa, unidentified
  source 1..15: note = methanogen bacteria
YLFSVSDPSHLPIVM

SEQ ID NO: 56012 - protein, 27 aa, unidentified
  source 1..27: note = methanogen bacteria
PAYNEEDTVATVVGVVKEVSFVDEIIV

SEQ ID NO: 56013 - protein, 31 aa, unidentified
  source 1..31: note = methanogen bacteria
NDGSSDNTESEAIKAGARVINHETNKGKGEA

SEQ ID NO: 56014 - protein, 33 aa, unidentified
  source 1..33: note = methanogen bacteria
IHNLTSKKVEAMIMPILEGKTDITKTKFARAHG

SEQ ID NO: 56015 - protein, 46 aa, unidentified
  source 1..46: note = methanogen bacteria
ISIMEVDIGAIEHDMSPLADLNLMANEVVRTIMNRANKYGRVIMID

SEQ ID NO: 56016 - protein, 11 aa, unidentified
  source 1..11: note = methanogen bacteria
FLIGASNLAPI

SEQ ID NO: 56017 - protein, 20 aa, unidentified
  source 1..20: note = methanogen bacteria
SITQFLCSSQPELIPEVTSY

SEQ ID NO: 56018 - protein, 16 aa, unidentified
  source 1..16: note = methanogen bacteria
LFLYSVKNPADVPVVL

SEQ ID NO: 56019 - protein, 11 aa, unidentified
  source 1..11: note = methanogen bacteria
SALLGPMNLSV

SEQ ID NO: 56020 - protein, 21 aa, unidentified
  source 1..21: note = methanogen bacteria
PDSLLQILCNSCQLRPLVFEY

SEQ ID NO: 56021 - protein, 18 aa, unidentified
  source 1..18: note = methanogen bacteria
ILAMFSLSDSSQVPVVMN

SEQ ID NO: 56022 - protein, 14 aa, unidentified
  source 1..14: note = methanogen bacteria
TQAPASDNPATRFG

SEQ ID NO: 56023 - protein, 28 aa, unidentified
  source 1..28: note = methanogen bacteria
ANDLNIVGSAVNAFLAIGHEVISCMADP

SEQ ID NO: 56024 - protein, 15 aa, unidentified
  source 1..15: note = methanogen bacteria
AAGFKTIGMNVSGFG

SEQ ID NO: 56025 - protein, 36 aa, unidentified
  source 1..36: note = methanogen bacteria
GYTTILAGDNQTLITLMKTAPLSFNGIFEALSASDA

SEQ ID NO: 56026 - protein, 20 aa, unidentified
  source 1..20: note = methanogen bacteria
GNVGTANYLVGILKGTIPYW

SEQ ID NO: 56027 - protein, 12 aa, unidentified
  source 1..12: note = methanogen bacteria
AWAVSPDMGFVI

SEQ ID NO: 56028 - protein, 12 aa, unidentified
  source 1..12: note = methanogen bacteria
SNLIGAVALSAI

SEQ ID NO: 56029 - protein, 20 aa, unidentified
  source 1..20: note = methanogen bacteria
GPIIAILCPSAQIQPIVFQY

SEQ ID NO: 56030 - protein, 16 aa, unidentified
  source 1..16: note = methanogen bacteria
LMLYHVNNPSDIPIVL

SEQ ID NO: 56031 - protein, 12 aa, unidentified
  source 1..12: note = methanogen bacteria
SALLGPMNLSVI

SEQ ID NO: 56032 - protein, 21 aa, unidentified
  source 1..21: note = methanogen bacteria
PDAFLQILCNSSQLKPLVFEY

SEQ ID NO: 56033 - protein, 10 aa, unidentified
  source 1..10: note = methanogen bacteria
GVMANVGLVA

SEQ ID NO: 56034 - protein, 16 aa, unidentified
  source 1..16: note = methanogen bacteria
LTIFSVSDPSHIPSVM

SEQ ID NO: 56035 - protein, 12 aa, unidentified
  source 1..12: note = methanogen bacteria
FLLGAGNLSAIQ

SEQ ID NO: 56036 - protein, 20 aa, unidentified
  source 1..20: note = methanogen bacteria
QSISQFLCSSQPALTNDVRQ

SEQ ID NO: 56037 - protein, 16 aa, unidentified
  source 1..16: note = methanogen bacteria
LFLYSVKDPADIPVVL

SEQ ID NO: 56038 - protein, 12 aa, unidentified
  source 1..12: note = methanogen bacteria
SALLGPMNLSVI

SEQ ID NO: 56039 - protein, 21 aa, unidentified
  source 1..21: note = methanogen bacteria
PDSFLEILCNSSHLRPLVYEY

SEQ ID NO: 56040 - protein, 11 aa, unidentified
  source 1..11: note = methanogen bacteria
LGVIADVGLVA

SEQ ID NO: 56041 - protein, 16 aa, unidentified
  source 1..16: note = methanogen bacteria
LCVFSVSDPSHIPSVM

SEQ ID NO: 56042 - protein, 12 aa, unidentified
  source 1..12: note = methanogen bacteria
FLIGAGNLAPIQ

SEQ ID NO: 56043 - protein, 19 aa, unidentified
  source 1..19: note = methanogen bacteria
NISQLLCISQPGLAHDVNM

SEQ ID NO: 56044 - protein, 16 aa, unidentified
  source 1..16: note = methanogen bacteria
LLLYSVKNPSDIPVVL

SEQ ID NO: 56045 - protein, 12 aa, unidentified
  source 1..12: note = methanogen bacteria
FLIGASNLAPIQ

SEQ ID NO: 56046 - protein, 20 aa, unidentified
  source 1..20: note = methanogen bacteria
NNISQLLCISQPMLASSVKD

SEQ ID NO: 56047 - protein, 16 aa, unidentified
  source 1..16: note = methanogen bacteria
LLLYSVKNPSDIPVVL

SEQ ID NO: 56048 - protein, 57 aa, unidentified
  source 1..57: note = methanogen bacteria
GNSFPYWYLLTNQLDELLLINNAHLGQYFANWNIHSLSKTLGYSLFLKFVNVIGLPY

SEQ ID NO: 56049 - protein, 15 aa, unidentified
  source 1..15: note = methanogen bacteria
SSFLGYCEYTMAYSS

SEQ ID NO: 56050 - protein, 11 aa, unidentified
  source 1..11: note = methanogen bacteria
FLIGASNLAPI

SEQ ID NO: 56051 - protein, 19 aa, unidentified
  source 1..19: note = methanogen bacteria
NIAQFLCISQPELVPDVTS

SEQ ID NO: 56052 - protein, 16 aa, unidentified
  source 1..16: note = methanogen bacteria
LFLYSVKNPADVPVVL

SEQ ID NO: 56053 - protein, 13 aa, unidentified
  source 1..13: note = methanogen bacteria
SMFMGSTYLSVVQ

SEQ ID NO: 56054 - protein, 20 aa, unidentified
  source 1..20: note = methanogen bacteria
GQYVQLLCHSDQLKPFVTQY

SEQ ID NO: 56055 - protein, 15 aa, unidentified
  source 1..15: note = methanogen bacteria
FIFNVSNPSDIPTIM

SEQ ID NO: 56056 - protein, 12 aa, unidentified
  source 1..12: note = methanogen bacteria
SALLGPMNLSVI

SEQ ID NO: 56057 - protein, 21 aa, unidentified
  source 1..21: note = methanogen bacteria
PDGFLQILCNSTQLKPLVFEY

SEQ ID NO: 56058 - protein, 10 aa, unidentified
  source 1..10: note = methanogen bacteria
SVIANVGLVA

SEQ ID NO: 56059 - protein, 16 aa, unidentified
  source 1..16: note = methanogen bacteria
LVIFSVSDPSHIPSVM

SEQ ID NO: 56060 - protein, 12 aa, unidentified
  source 1..12: note = methanogen bacteria
SALLGPMNLSVI

SEQ ID NO: 56061 - protein, 21 aa, unidentified
  source 1..21: note = methanogen bacteria
PDAFLQILCNSTQLKPLVFEY

SEQ ID NO: 56062 - protein, 10 aa, unidentified
  source 1..10: note = methanogen bacteria
GVMANVGLVA

SEQ ID NO: 56063 - protein, 16 aa, unidentified
  source 1..16: note = methanogen bacteria
LVIFSVSNPSHIPSVM

SEQ ID NO: 56064 - protein, 12 aa, unidentified
  source 1..12: note = methanogen bacteria
SALLGPMNLSVI

SEQ ID NO: 56065 - protein, 20 aa, unidentified
  source 1..20: note = methanogen bacteria
NNFLEILCSSTELRPLVYEY

SEQ ID NO: 56066 - protein, 10 aa, unidentified
  source 1..10: note = methanogen bacteria
TVMANVGLVA

SEQ ID NO: 56067 - protein, 16 aa, unidentified
  source 1..16: note = methanogen bacteria
LCVFSLSNPSDVPAVM

SEQ ID NO: 56068 - protein, 10 aa, unidentified
  source 1..10: note = methanogen bacteria
FLIGASNLAP

SEQ ID NO: 56069 - protein, 19 aa, unidentified
  source 1..19: note = methanogen bacteria
NIAQFLCISQPGLASDVKS

SEQ ID NO: 56070 - protein, 16 aa, unidentified
  source 1..16: note = methanogen bacteria
LFLYSVKNPADVPVVL

SEQ ID NO: 56071 - protein, 11 aa, unidentified
  source 1..11: note = methanogen bacteria
FLLGAANLSAI

SEQ ID NO: 56072 - protein, 19 aa, unidentified
  source 1..19: note = methanogen bacteria
SIAQFLCASQPELIPDVTS

SEQ ID NO: 56073 - protein, 16 aa, unidentified
  source 1..16: note = methanogen bacteria
LMLYSVKDPAYVPVVL

SEQ ID NO: 56074 - protein, 12 aa, unidentified
  source 1..12: note = methanogen bacteria
FLIGAGNISVIQ

SEQ ID NO: 56075 - protein, 19 aa, unidentified
  source 1..19: note = methanogen bacteria
NIVQFLCISQPELIPDVSQ

SEQ ID NO: 56076 - protein, 16 aa, unidentified
  source 1..16: note = methanogen bacteria
LYMYSVKNPAYIPVVL

SEQ ID NO: 56077 - protein, 14 aa, unidentified
  source 1..14: note = methanogen bacteria
TTAIFDGINSGNMN

SEQ ID NO: 56078 - protein, 13 aa, unidentified
  source 1..13: note = methanogen bacteria
SAFLGPMNLSVIQ

SEQ ID NO: 56079 - protein, 21 aa, unidentified
  source 1..21: note = methanogen bacteria
PDSFLQILCNSSQLRPLVYEY

SEQ ID NO: 56080 - protein, 16 aa, unidentified
  source 1..16: note = methanogen bacteria
LCIFSVSNPSDVPTVL

SEQ ID NO: 56081 - protein, 59 aa, unidentified
  source 1..59: note = methanogen bacteria
PAYNEEDTVAKVVEVVREVSFVDEILVVNDGSSDNTEAEAINAGARVITHDINKGKGEA

SEQ ID NO: 56082 - protein, 33 aa, unidentified
  source 1..33: note = methanogen bacteria
IHNLTSKKVEAMIMPILEGKTDITKTKFARARG

SEQ ID NO: 56083 - protein, 39 aa, unidentified
  source 1..39: note = methanogen bacteria
GISITEVDIGAIEHDMSPLEDLNLMANEVVRTIMSRANK

SEQ ID NO: 56084 - protein, 11 aa, unidentified
  source 1..11: note = methanogen bacteria
FLIGAGNMSAI

SEQ ID NO: 56085 - protein, 20 aa, unidentified
  source 1..20: note = methanogen bacteria
PSVVQILCSTKPDLIPLASQ

SEQ ID NO: 56086 - protein, 16 aa, unidentified
  source 1..16: note = methanogen bacteria
LTLYTVKNPSDVPVVL

SEQ ID NO: 56087 - protein, 12 aa, unidentified
  source 1..12: note = methanogen bacteria
SAMLGPMNLSVI

SEQ ID NO: 56088 - protein, 21 aa, unidentified
  source 1..21: note = methanogen bacteria
PDSYLHILSNSPDLRPLIFEY

SEQ ID NO: 56089 - protein, 10 aa, unidentified
  source 1..10: note = methanogen bacteria
GVFTNVGLVA

SEQ ID NO: 56090 - protein, 16 aa, unidentified
  source 1..16: note = methanogen bacteria
LYVFSVSNPSHIPTVM

SEQ ID NO: 56091 - protein, 12 aa, unidentified
  source 1..12: note = methanogen bacteria
SALLGPMNLSVI

SEQ ID NO: 56092 - protein, 21 aa, unidentified
  source 1..21: note = methanogen bacteria
PNSFLEILCNSSQLRPLVYEY

SEQ ID NO: 56093 - protein, 10 aa, unidentified
  source 1..10: note = methanogen bacteria
LGVMANVGLV

SEQ ID NO: 56094 - protein, 16 aa, unidentified
  source 1..16: note = methanogen bacteria
LCVFSVSDPSQIPSVM

SEQ ID NO: 56095 - protein, 14 aa, unidentified
  source 1..14: note = methanogen bacteria
DQCPAGDDNAVRFG

SEQ ID NO: 56096 - protein, 30 aa, unidentified
  source 1..30: note = methanogen bacteria
CADGLNIFSTIVQAFLGIAGQVISSMADPW

SEQ ID NO: 56097 - protein, 16 aa, unidentified
  source 1..16: note = methanogen bacteria
KDGFASIGMNVGSFGI

SEQ ID NO: 56098 - protein, 35 aa, unidentified
  source 1..35: note = methanogen bacteria
GYTTILDGSDQALITLMKTSPLSFNGIFEALSQSD

SEQ ID NO: 56099 - protein, 20 aa, unidentified
  source 1..20: note = methanogen bacteria
GEVGTADYLVGVLKEAIPMF

SEQ ID NO: 56100 - protein, 11 aa, unidentified
  source 1..11: note = methanogen bacteria
AWAISPDMGFA

SEQ ID NO: 56101 - protein, 11 aa, unidentified
  source 1..11: note = methanogen bacteria
FLLGASNLAPI

SEQ ID NO: 56102 - protein, 19 aa, unidentified
  source 1..19: note = methanogen bacteria
NIAHFLCLSQPELVFDVSS

SEQ ID NO: 56103 - protein, 16 aa, unidentified
  source 1..16: note = methanogen bacteria
LFLYSVKNPADVPVVL

SEQ ID NO: 56104 - protein, 12 aa, unidentified
  source 1..12: note = methanogen bacteria
FLLGAGNLSAIQ

SEQ ID NO: 56105 - protein, 20 aa, unidentified
  source 1..20: note = methanogen bacteria
HPIAEFLCSSQPALIPDVTQ

SEQ ID NO: 56106 - protein, 19 aa, unidentified
  source 1..19: note = methanogen bacteria
QSLLMLYSVKNPEHVPVVL

SEQ ID NO: 56107 - protein, 11 aa, unidentified
  source 1..11: note = methanogen bacteria
SAKPKKYQKVS

SEQ ID NO: 56108 - protein, 25 aa, unidentified
  source 1..25: note = methanogen bacteria
PAYNEEETVAKVVEVIKKVSFVDEI

SEQ ID NO: 56109 - protein, 30 aa, unidentified
  source 1..30: note = methanogen bacteria
NDGSSDNTEGEALKAGAKVINHEVNKGKGE

SEQ ID NO: 56110 - protein, 33 aa, unidentified
  source 1..33: note = methanogen bacteria
IYNLTSNKVEAMIRPILEGKTDITKTKFARESG

SEQ ID NO: 56111 - protein, 30 aa, unidentified
  source 1..30: note = methanogen bacteria
GISIMEVDIGAIQHDMSPLADLHLMANEVV

SEQ ID NO: 56112 - protein, 16 aa, unidentified
  source 1..16: note = methanogen bacteria
TIINRANKYGRVTMID

SEQ ID NO: 56113 - protein, 15 aa, unidentified
  source 1..15: note = methanogen bacteria
SRITDAYLLEDHDTV

SEQ ID NO: 56114 - protein, 17 aa, unidentified
  source 1..17: note = methanogen bacteria
IIFNAPTAVEQKLLFSD

SEQ ID NO: 56115 - protein, 14 aa, unidentified
  source 1..14: note = methanogen bacteria
TNAPAGDDNAVRFG

SEQ ID NO: 56116 - protein, 28 aa, unidentified
  source 1..28: note = methanogen bacteria
VNDLNIISSAINAFLAMGTQIISCMADP

SEQ ID NO: 56117 - protein, 15 aa, unidentified
  source 1..15: note = methanogen bacteria
TQGFQSIGMNVSGFG

SEQ ID NO: 56118 - protein, 36 aa, unidentified
  source 1..36: note = methanogen bacteria
GYTTILGGEDQALITLMKTSPLSFNGIFEALAASDA

SEQ ID NO: 56119 - protein, 19 aa, unidentified
  source 1..19: note = methanogen bacteria
ELGTADYLVGVLAGAIPIF

SEQ ID NO: 56120 - protein, 11 aa, unidentified
  source 1..11: note = methanogen bacteria
AWAVNPEMGFV

SEQ ID NO: 56121 - protein, 14 aa, unidentified
  source 1..14: note = methanogen bacteria
TSAPNSKDNAVRFG

SEQ ID NO: 56122 - protein, 29 aa, unidentified
  source 1..29: note = methanogen bacteria
VNDLNIVNSAINAFLAMDSQIISSMADPW

SEQ ID NO: 56123 - protein, 14 aa, unidentified
  source 1..14: note = methanogen bacteria
QGFHSIGMNVSGFG

SEQ ID NO: 56124 - protein, 36 aa, unidentified
  source 1..36: note = methanogen bacteria
GYTTILGGEDKALITLMHTSPLSFNGIFEALSASDA

SEQ ID NO: 56125 - protein, 20 aa, unidentified
  source 1..20: note = methanogen bacteria
GDLGTADYLVGILAGSIPVF

SEQ ID NO: 56126 - protein, 11 aa, unidentified
  source 1..11: note = methanogen bacteria
AWAVNPEMGFV

SEQ ID NO: 56127 - protein, 11 aa, unidentified
  source 1..11: note = methanogen bacteria
FLIGASNLAPI

SEQ ID NO: 56128 - protein, 19 aa, unidentified
  source 1..19: note = methanogen bacteria
NIAHFLCMSQPELTADVSS

SEQ ID NO: 56129 - protein, 16 aa, unidentified
  source 1..16: note = methanogen bacteria
LFLYSVKNPADVPVVL

SEQ ID NO: 56130 - protein, 24 aa, unidentified
  source 1..24: note = methanogen bacteria
AYNEEPTVGQVVSTALKLSYVDEV

SEQ ID NO: 56131 - protein, 32 aa, unidentified
  source 1..32: note = methanogen bacteria
GSTDRTTEEAEKAGATVIGHITNQGKGSAIKT

SEQ ID NO: 56132 - protein, 31 aa, unidentified
  source 1..31: note = methanogen bacteria
SNLSTNKIDTMIRPILEGEADITKTKFARES

SEQ ID NO: 56133 - protein, 38 aa, unidentified
  source 1..38: note = methanogen bacteria
HGIKIVEVDIGEINHDMSPLANLNKMANEVVRTIIDRA

SEQ ID NO: 56134 - protein, 60 aa, unidentified
  source 1..60: note = methanogen bacteria
QNIIHQIGIGYPYIDIYLYLIEASRLFGIETGGYKYINFLPPFIPFLTSLLFRIGFVSEF

SEQ ID NO: 56135 - protein, 53 aa, unidentified
  source 1..53: note = methanogen bacteria
NKIPLGFINQAQEISSRASLKFATSEINLMGNDLFFYIKIIEKIISFPLWKIE

SEQ ID NO: 56136 - protein, 100 aa, unidentified
  source 1..100: note = methanogen bacteria
YINHLKYDKNAADEKLAVNYLKDKEGVIMSDRGPVYTFYLKKEVKLIRDMDQKNLDKELLDNHAEYVTTFHQVNLTHYSPIKEFGNITIYKKNNENEFVQ

SEQ ID NO: 56137 - protein, 13 aa, unidentified
  source 1..13: note = methanogen bacteria
SNLIGAMALSAIQ

SEQ ID NO: 56138 - protein, 20 aa, unidentified
  source 1..20: note = methanogen bacteria
PQIVPILCSSPQVQPLVYQY

SEQ ID NO: 56139 - protein, 17 aa, unidentified
  source 1..17: note = methanogen bacteria
LTFLFHVKNPADMPIVL

SEQ ID NO: 56140 - protein, 10 aa, unidentified
  source 1..10: note = methanogen bacteria
LFMGSTFLSV

SEQ ID NO: 56141 - protein, 18 aa, unidentified
  source 1..18: note = methanogen bacteria
MIIQFLCHSPNMKQYFAQ

SEQ ID NO: 56142 - protein, 15 aa, unidentified
  source 1..15: note = methanogen bacteria
FIFNMHNPEHVPIAM

SEQ ID NO: 56143 - protein, 11 aa, unidentified
  source 1..11: note = methanogen bacteria
FVLTSSALSIF

SEQ ID NO: 56144 - protein, 19 aa, unidentified
  source 1..19: note = methanogen bacteria
GPVLNNFLTADLIQPTQTF

SEQ ID NO: 56145 - protein, 19 aa, unidentified
  source 1..19: note = methanogen bacteria
EIILTLFSVKDPLQAEYIS

SEQ ID NO: 56146 - protein, 11 aa, unidentified
  source 1..11: note = methanogen bacteria
FILGSNYLAVV

SEQ ID NO: 56147 - protein, 20 aa, unidentified
  source 1..20: note = methanogen bacteria
DFFTQMLCQAPELQPLVNQY

SEQ ID NO: 56148 - protein, 17 aa, unidentified
  source 1..17: note = methanogen bacteria
SLFIFNVNDPNTIPVVL

SEQ ID NO: 56149 - protein, 10 aa, unidentified
  source 1..10: note = methanogen bacteria
SKINADAFYA

SEQ ID NO: 56150 - protein, 15 aa, unidentified
  source 1..15: note = methanogen bacteria
LFYSVSEKSYVLIFD

SEQ ID NO: 56151 - protein, 10 aa, unidentified
  source 1..10: note = methanogen bacteria
LLISMNTIGP

SEQ ID NO: 56152 - protein, 15 aa, unidentified
  source 1..15: note = methanogen bacteria
IFGLFGITEMQTEIF

SEQ ID NO: 56153 - protein, 11 aa, unidentified
  source 1..11: note = methanogen bacteria
SEKPKKYQKVS

SEQ ID NO: 56154 - protein, 25 aa, unidentified
  source 1..25: note = methanogen bacteria
AYNEEDTVAKVVEVVKKASFVDEII

SEQ ID NO: 56155 - protein, 30 aa, unidentified
  source 1..30: note = methanogen bacteria
DGSSDNTIEEAENAGAIVISHETNKGKGEA

SEQ ID NO: 56156 - protein, 32 aa, unidentified
  source 1..32: note = methanogen bacteria
YNLTSKKVEAMIRPILEGKAEITKTKFARESG

SEQ ID NO: 56157 - protein, 46 aa, unidentified
  source 1..46: note = methanogen bacteria
ISILEVDIGAIQHDMSPLADLNLMANEVVRTIINRANKYGRVTMID

SEQ ID NO: 56158 - protein, 35 aa, unidentified
  source 1..35: note = methanogen bacteria
FRYLDELIHSGVKEIVLDSDIVLDPDEESQYLNGI

SEQ ID NO: 56159 - protein, 50 aa, unidentified
  source 1..50: note = methanogen bacteria
GNGHAIDAQGLTRIFYCTGKNIIIKNIILKNGFTKENGGAIHNNEGELTI

SEQ ID NO: 56160 - protein, 10 aa, unidentified
  source 1..10: note = methanogen bacteria
SSEYRGYSVR

SEQ ID NO: 56161 - protein, 37 aa, unidentified
  source 1..37: note = methanogen bacteria
ARFLDKSGNNLSGVVDIVIGGIKHEVLVRDGVGCVDV

SEQ ID NO: 56162 - protein, 56 aa, unidentified
  source 1..56: note = methanogen bacteria
VEICNLDTGEVKNQTVSVLERISGNEDLTGYYGSPLVYKVRVLDDHGDIALKVPVT

SEQ ID NO: 56163 - protein, 15 aa, unidentified
  source 1..15: note = methanogen bacteria
DLIVYYGSQVVYKVR

SEQ ID NO: 56164 - protein, 16 aa, unidentified
  source 1..16: note = methanogen bacteria
AFETGGETYSRLTDDE

SEQ ID NO: 56165 - protein, 19 aa, unidentified
  source 1..19: note = methanogen bacteria
VYEISSEYRGYSVRNNLTV

SEQ ID NO: 56166 - protein, 52 aa, unidentified
  source 1..52: note = methanogen bacteria
FNAHFLDKSGNNLSGKALIRIGDNYYDVLVSEGIGRVNVLLNPGSYLVQVSN

SEQ ID NO: 56167 - protein, 13 aa, unidentified
  source 1..13: note = methanogen bacteria
FFIPDSTLLAAIN

SEQ ID NO: 56168 - protein, 20 aa, unidentified
  source 1..20: note = methanogen bacteria
DELIMALYGPAQTIYIVFLV

SEQ ID NO: 56169 - protein, 16 aa, unidentified
  source 1..16: note = methanogen bacteria
VFIFTIDDPSELEVIC

SEQ ID NO: 56170 - protein, 26 aa, unidentified
  source 1..26: note = methanogen bacteria
AYNEEDTVAQVVEVVKKVSFVDEIIV

SEQ ID NO: 56171 - protein, 31 aa, unidentified
  source 1..31: note = methanogen bacteria
NDGSSDNTVEEAEKAGAIVITHETNKGKGEA

SEQ ID NO: 56172 - protein, 33 aa, unidentified
  source 1..33: note = methanogen bacteria
YNLTSKKVESMIRPILEGKAEITKTKFARESGR

SEQ ID NO: 56173 - protein, 33 aa, unidentified
  source 1..33: note = methanogen bacteria
LEVDIGAIQHDMSPLADLNLMANEVVRTIINRA

SEQ ID NO: 56174 - protein, 11 aa, unidentified
  source 1..11: note = methanogen bacteria
MFMGSMYLSVV

SEQ ID NO: 56175 - protein, 20 aa, unidentified
  source 1..20: note = methanogen bacteria
GQYVQLLCHTDQLKPFVTQY

SEQ ID NO: 56176 - protein, 14 aa, unidentified
  source 1..14: note = methanogen bacteria
IFNVNNPADIPTVM

SEQ ID NO: 56177 - protein, 12 aa, unidentified
  source 1..12: note = methanogen bacteria
MFMGSMYLSVVQ

SEQ ID NO: 56178 - protein, 20 aa, unidentified
  source 1..20: note = methanogen bacteria
GPYVQLLCHTDQLKPFVTQY

SEQ ID NO: 56179 - protein, 15 aa, unidentified
  source 1..15: note = methanogen bacteria
FIFNVNNPADIPTII

SEQ ID NO: 56180 - protein, 36 aa, unidentified
  source 1..36: note = methanogen bacteria
LNVGSYTVRVIFAGNDNYNGNVNESAFEVTRSGTNF

SEQ ID NO: 56181 - protein, 12 aa, unidentified
  source 1..12: note = methanogen bacteria
MFMGSVYLSVVQ

SEQ ID NO: 56182 - protein, 20 aa, unidentified
  source 1..20: note = methanogen bacteria
NEYVNLLCHSPQFKQFVTQY

SEQ ID NO: 56183 - protein, 15 aa, unidentified
  source 1..15: note = methanogen bacteria
FMFNVNNPADIPMIM

SEQ ID NO: 56184 - protein, 32 aa, unidentified
  source 1..32: note = methanogen bacteria
KPLLNFFFPEISFEQPLSGQFAARKEILKKIH

SEQ ID NO: 56185 - protein, 56 aa, unidentified
  source 1..56: note = methanogen bacteria
IVIDADVLGISIMEVDIGAIEHDMSPLADLNNMANEVVRTIMNRANKYGRVTMIDD

SEQ ID NO: 56186 - protein, 80 aa, unidentified
  source 1..80: note = methanogen bacteria
KGSDKSVSIVIPAYNEEATVAKVVSVARKLSYVTEVIVVDDGSTDRTVEEAESAGATVISHIMNEGKGSAIKTGFKNSHG

SEQ ID NO: 56187 - protein, 33 aa, unidentified
  source 1..33: note = methanogen bacteria
SNFTSEKIDKIIRPILEDQTDITKTKFARESGR

SEQ ID NO: 56188 - protein, 40 aa, unidentified
  source 1..40: note = methanogen bacteria
VHGIKILEVDIGDISHDMSPLADLNKMANEVVRTIIDRAV

SEQ ID NO: 56189 - protein, 16 aa, unidentified
  source 1..16: note = methanogen bacteria
ASIVNIGIQNTDFAYI

SEQ ID NO: 56190 - protein, 12 aa, unidentified
  source 1..12: note = methanogen bacteria
YDALAGNILTGD

SEQ ID NO: 56191 - protein, 14 aa, unidentified
  source 1..14: note = methanogen bacteria
SQTPANSNNSIRFG

SEQ ID NO: 56192 - protein, 27 aa, unidentified
  source 1..27: note = methanogen bacteria
NDLNIFSTITNAFIKLSSQVISSMADP

SEQ ID NO: 56193 - protein, 15 aa, unidentified
  source 1..15: note = methanogen bacteria
AGFESIGITNISAFG

SEQ ID NO: 56194 - protein, 34 aa, unidentified
  source 1..34: note = methanogen bacteria
YTAILNGSDQALITLMKTSPLSFDGIFQALSASN

SEQ ID NO: 56195 - protein, 19 aa, unidentified
  source 1..19: note = methanogen bacteria
EVGTSDYLVGILSGTLPAF

SEQ ID NO: 56196 - protein, 12 aa, unidentified
  source 1..12: note = methanogen bacteria
AWAVSSGDMGFT

SEQ ID NO: 56197 - protein, 15 aa, unidentified
  source 1..15: note = methanogen bacteria
AQVVGVARKLDYVDE

SEQ ID NO: 56198 - protein, 26 aa, unidentified
  source 1..26: note = methanogen bacteria
SSDRTSEEAKGAGAIVIKHSVNEGKG

SEQ ID NO: 56199 - protein, 26 aa, unidentified
  source 1..26: note = methanogen bacteria
SDKIDKIIRPILEDKTDITKTKFARE

SEQ ID NO: 56200 - protein, 15 aa, unidentified
  source 1..15: note = methanogen bacteria
ISSAPAGDDNAVRFG

SEQ ID NO: 56201 - protein, 29 aa, unidentified
  source 1..29: note = methanogen bacteria
VNDLNIVSTAVNAFLQLGTDIIGCMADPW

SEQ ID NO: 56202 - protein, 16 aa, unidentified
  source 1..16: note = methanogen bacteria
AAGFESVGVTNVTGFG

SEQ ID NO: 56203 - protein, 36 aa, unidentified
  source 1..36: note = methanogen bacteria
GYTTILGGEDQALITLMKTAPLSFDGIFQALSQSDA

SEQ ID NO: 56204 - protein, 20 aa, unidentified
  source 1..20: note = methanogen bacteria
GNIGTADYLVGVLSNALPAF

SEQ ID NO: 56205 - protein, 12 aa, unidentified
  source 1..12: note = methanogen bacteria
GWAISSGDMSFT

SEQ ID NO: 56206 - protein, 25 aa, unidentified
  source 1..25: note = methanogen bacteria
AYNEEETVAKVIDVVKKVTFVDEII

SEQ ID NO: 56207 - protein, 31 aa, unidentified
  source 1..31: note = methanogen bacteria
NDGSSDNTESEALKAGARVITHEVNKGKGEA

SEQ ID NO: 56208 - protein, 31 aa, unidentified
  source 1..31: note = methanogen bacteria
NLTSRKVESIIRPILEGKTDITKTKFSRASG

SEQ ID NO: 56209 - protein, 35 aa, unidentified
  source 1..35: note = methanogen bacteria
SIMEVDIGAIEHDMSPLSDLNLMANEVVRTIIGRA

SEQ ID NO: 56210 - protein, 10 aa, unidentified
  source 1..10: note = methanogen bacteria
DIGPRLFDIP

SEQ ID NO: 56211 - protein, 43 aa, unidentified
  source 1..43: note = methanogen bacteria
GSGGIYPIQIMNNVSQIFYPFLPMTYAINIIREAQLGVVWGNY

SEQ ID NO: 56212 - protein, 19 aa, unidentified
  source 1..19: note = methanogen bacteria
SNFIEEDNPERLNMIRQLE

SEQ ID NO: 56213 - protein, 15 aa, unidentified
  source 1..15: note = methanogen bacteria
FDRNTKHISGILPLM

SEQ ID NO: 56214 - protein, 11 aa, unidentified
  source 1..11: note = methanogen bacteria
MKILYWLFVLL

SEQ ID NO: 56215 - protein, 86 aa, unidentified
  source 1..86: note = methanogen bacteria
KNSKPKYQKVTVIIPAFNEEDSVAKVVGVIRKVSFIDEVIVVNDGSTDNTESEASKAGAIVINHETNKGKGEALYTGYRQSDCDII

SEQ ID NO: 56216 - protein, 37 aa, unidentified
  source 1..37: note = methanogen bacteria
DADIHNLTSKKVEAIIKPILYGKTDITKTKFARESGR

SEQ ID NO: 56217 - protein, 10 aa, unidentified
  source 1..10: note = methanogen bacteria
PEISFEQPLS

SEQ ID NO: 56218 - protein, 48 aa, unidentified
  source 1..48: note = methanogen bacteria
LGISILEVDIGAIEHDMSPLSDLNMMANEVVRTIMNRANKYGRVTMID

SEQ ID NO: 56219 - protein, 18 aa, unidentified
  source 1..18: note = methanogen bacteria
ADIVNIGIQNTNFDIITS

SEQ ID NO: 56220 - protein, 12 aa, unidentified
  source 1..12: note = methanogen bacteria
FDALNGSLLTGD

SEQ ID NO: 56221 - protein, 12 aa, unidentified
  source 1..12: note = methanogen bacteria
KSSKPKYQKVSV

SEQ ID NO: 56222 - protein, 27 aa, unidentified
  source 1..27: note = methanogen bacteria
PAFNEESTVARVVEVIKQVSCVDEIIV

SEQ ID NO: 56223 - protein, 31 aa, unidentified
  source 1..31: note = methanogen bacteria
NDGSSDNTAQEATKAGAIVISHDVNKGKGEA

SEQ ID NO: 56224 - protein, 33 aa, unidentified
  source 1..33: note = methanogen bacteria
IHNLTSKKVSAMIKPILDGKTDITKTKFARESG

SEQ ID NO: 56225 - protein, 36 aa, unidentified
  source 1..36: note = methanogen bacteria
ISIMEVDIGAIEHDMSPLSDLHMMANEVVRTIMSRA

SEQ ID NO: 56226 - protein, 13 aa, unidentified
  source 1..13: note = methanogen bacteria
VATFIGSNGLAAL

SEQ ID NO: 56227 - protein, 20 aa, unidentified
  source 1..20: note = methanogen bacteria
DTLISILHPVADAVQYVKAY

SEQ ID NO: 56228 - protein, 21 aa, unidentified
  source 1..21: note = methanogen bacteria
DGILMFFNLANVHNDALVENA

SEQ ID NO: 56229 - protein, 18 aa, unidentified
  source 1..18: note = methanogen bacteria
ANIVDIGIQNADINYITD

SEQ ID NO: 56230 - protein, 12 aa, unidentified
  source 1..12: note = methanogen bacteria
YDAIAGNILTGD

SEQ ID NO: 56231 - protein, 18 aa, unidentified
  source 1..18: note = methanogen bacteria
ASIVNNGIQKTNINLIYH

SEQ ID NO: 56232 - protein, 12 aa, unidentified
  source 1..12: note = methanogen bacteria
YTALNGTLLTGD

SEQ ID NO: 56233 - protein, 18 aa, unidentified
  source 1..18: note = methanogen bacteria
ASIVDIGIQNADLNYITN

SEQ ID NO: 56234 - protein, 12 aa, unidentified
  source 1..12: note = methanogen bacteria
YDAISGNILTGD

SEQ ID NO: 56235 - protein, 11 aa, unidentified
  source 1..11: note = methanogen bacteria
LLIGGSQLSSL

SEQ ID NO: 56236 - protein, 19 aa, unidentified
  source 1..19: note = methanogen bacteria
DNILHLLHAPSEIFYQAKS

SEQ ID NO: 56237 - protein, 17 aa, unidentified
  source 1..17: note = methanogen bacteria
LIKLFNITNPQYIQIVT

SEQ ID NO: 56238 - protein, 16 aa, unidentified
  source 1..16: note = methanogen bacteria
AEIVNVGIQNTNFQFI

SEQ ID NO: 56239 - protein, 12 aa, unidentified
  source 1..12: note = methanogen bacteria
YDALSGGLLTGD

SEQ ID NO: 56240 - protein, 18 aa, unidentified
  source 1..18: note = methanogen bacteria
SKIVDIGIANGDIAYIYS

SEQ ID NO: 56241 - protein, 11 aa, unidentified
  source 1..11: note = methanogen bacteria
YQIESGTILTG

SEQ ID NO: 56242 - protein, 16 aa, unidentified
  source 1..16: note = methanogen bacteria
AAIVNIGIQNTDFQFI

SEQ ID NO: 56243 - protein, 13 aa, unidentified
  source 1..13: note = methanogen bacteria
AYDAINNGILTGD

SEQ ID NO: 56244 - protein, 16 aa, unidentified
  source 1..16: note = methanogen bacteria
ADIVNIGIQNTDFQFI

SEQ ID NO: 56245 - protein, 13 aa, unidentified
  source 1..13: note = methanogen bacteria
AYDALSGGVLTGD

SEQ ID NO: 56246 - protein, 16 aa, unidentified
  source 1..16: note = methanogen bacteria
AGIVDIGIQNADFQYI

SEQ ID NO: 56247 - protein, 13 aa, unidentified
  source 1..13: note = methanogen bacteria
AFGALDGSLLTGQ

SEQ ID NO: 56248 - protein, 17 aa, unidentified
  source 1..17: note = methanogen bacteria
ADIVNIGIQNTDFNFII

SEQ ID NO: 56249 - protein, 12 aa, unidentified
  source 1..12: note = methanogen bacteria
YDAMNGSILTGD

SEQ ID NO: 56250 - protein, 16 aa, unidentified
  source 1..16: note = methanogen bacteria
ADIVDIGIQNTNFQFI

SEQ ID NO: 56251 - protein, 13 aa, unidentified
  source 1..13: note = methanogen bacteria
AYDAMSGGILTGD

SEQ ID NO: 56252 - protein, 17 aa, unidentified
  source 1..17: note = methanogen bacteria
ANIVNTGIQNTDFNYIA

SEQ ID NO: 56253 - protein, 12 aa, unidentified
  source 1..12: note = methanogen bacteria
YDAISGSILTGD

SEQ ID NO: 56254 - protein, 60 aa, unidentified
  source 1..60: note = methanogen bacteria
ENIIHQRGIGTHYKDVYCYLIESLRLAGIQIGGYKFVNYFPPFIPFLTSLLFRIGFVSEY

SEQ ID NO: 56255 - protein, 48 aa, unidentified
  source 1..48: note = methanogen bacteria
NKIPLGFINQAQEISSRASLKFATSESNLMGNDLFFYFKIIPHIITYQ

SEQ ID NO: 56256 - protein, 99 aa, unidentified
  source 1..99: note = methanogen bacteria
YIDSLKDDKNVIDEKNAANWIKDKDGIIMSDRGPAYTFYLKKEIKHVKGIKQERHLDEKLLDNDADYFIGINPVNLTYYSPIKEFGNVTVYQRNDEIYT

SEQ ID NO: 56257 - protein, 16 aa, unidentified
  source 1..16: note = methanogen bacteria
ADIVNIGIQNTNFQFI

SEQ ID NO: 56258 - protein, 13 aa, unidentified
  source 1..13: note = methanogen bacteria
AYDAIHNGVLTGD

SEQ ID NO: 56259 - protein, 24 aa, unidentified
  source 1..24: note = methanogen bacteria
AYNEEATVAQVVSVARKLDYVDEV

SEQ ID NO: 56260 - protein, 33 aa, unidentified
  source 1..33: note = methanogen bacteria
DGSSDRTVEEAEGAGATVISHITNEGKGSAIKT

SEQ ID NO: 56261 - protein, 31 aa, unidentified
  source 1..31: note = methanogen bacteria
NFTSGKIDKIIRPILEGKTDITKTKFARESG

SEQ ID NO: 56262 - protein, 21 aa, unidentified
  source 1..21: note = methanogen bacteria
HGISILEVDIGDISHDMSPLA

SEQ ID NO: 56263 - protein, 16 aa, unidentified
  source 1..16: note = methanogen bacteria
ADIVNIGIQNTNFQFI

SEQ ID NO: 56264 - protein, 13 aa, unidentified
  source 1..13: note = methanogen bacteria
AYDAINNGVLTGD

SEQ ID NO: 56265 - protein, 16 aa, unidentified
  source 1..16: note = methanogen bacteria
AYIVNIGIQNTDFQFI

SEQ ID NO: 56266 - protein, 13 aa, unidentified
  source 1..13: note = methanogen bacteria
AYDAISGGLLTGD

SEQ ID NO: 56267 - protein, 18 aa, unidentified
  source 1..18: note = methanogen bacteria
SNIVDIGVANGDIAYIYS

SEQ ID NO: 56268 - protein, 12 aa, unidentified
  source 1..12: note = methanogen bacteria
FQIESGTILTGD

SEQ ID NO: 56269 - protein, 17 aa, unidentified
  source 1..17: note = methanogen bacteria
GKIINEGIQYGDMNAIY

SEQ ID NO: 56270 - protein, 13 aa, unidentified
  source 1..13: note = methanogen bacteria
SYEVSGGLIMTGN

SEQ ID NO: 56271 - protein, 10 aa, unidentified
  source 1..10: note = methanogen bacteria
NNVSFVDEII

SEQ ID NO: 56272 - protein, 27 aa, unidentified
  source 1..27: note = methanogen bacteria
SSDNTEEEAIKAGAIVINHESNKGKGE

SEQ ID NO: 56273 - protein, 28 aa, unidentified
  source 1..28: note = methanogen bacteria
TSKKVESMIKPILLGEAEITKTKFSRAS

SEQ ID NO: 56274 - protein, 27 aa, unidentified
  source 1..27: note = methanogen bacteria
SSDKTEEEAINAGAIVINHETNKGKGE

SEQ ID NO: 56275 - protein, 28 aa, unidentified
  source 1..28: note = methanogen bacteria
LTSKKVESMIMPILLGDAEITKTKFSRV

SEQ ID NO: 56276 - protein, 25 aa, unidentified
  source 1..25: note = methanogen bacteria
SSDKTEEEAIKAGAIVINHETNKGK

SEQ ID NO: 56277 - protein, 24 aa, unidentified
  source 1..24: note = methanogen bacteria
TSKKVESMIMPILLGNAEITKTKF

SEQ ID NO: 56278 - protein, 57 aa, unidentified
  source 1..57: note = methanogen bacteria
NIDGKAGVYYVRDVFFYLNNALFYAGYDTGFNATKGLSPFIPMLTSLFFRMGFIYDF

SEQ ID NO: 56279 - protein, 67 aa, unidentified
  source 1..67: note = methanogen bacteria
YLDISLFFVSQGQGITQAQNTSNMLHYFTYYVNNIPIYLGSAKFIPYSLKPGVFLISEMEWIGGKPS

SEQ ID NO: 56280 - protein, 13 aa, unidentified
  source 1..13: note = methanogen bacteria
KTQKPKKYQKVSV

SEQ ID NO: 56281 - protein, 60 aa, unidentified
  source 1..60: note = methanogen bacteria
PAYNEEETVAKVVKVIKKVSFVDEIIVVNDGSSDNTAEEAINAGARVITHEVNKGKGEAL

SEQ ID NO: 56282 - protein, 37 aa, unidentified
  source 1..37: note = methanogen bacteria
DADIYNLTSAKVEAMIRPILEGKTDITKTKFSRASGR

SEQ ID NO: 56283 - protein, 10 aa, unidentified
  source 1..10: note = methanogen bacteria
PEISFEQPLS

SEQ ID NO: 56284 - protein, 51 aa, unidentified
  source 1..51: note = methanogen bacteria
LGISIMEVDIGAIEHDMSPLLDLNLMANEVVRTIIGRANKYGRVVMIDDIG

SEQ ID NO: 56285 - protein, 11 aa, unidentified
  source 1..11: note = methanogen bacteria
LMTGTDMDITG

SEQ ID NO: 56286 - protein, 10 aa, unidentified
  source 1..10: note = methanogen bacteria
LIKPSDIINN

SEQ ID NO: 56287 - protein, 13 aa, unidentified
  source 1..13: note = methanogen bacteria
DFINAHTPERISL

SEQ ID NO: 56288 - protein, 12 aa, unidentified
  source 1..12: note = methanogen bacteria
VIKEVSFVDEII

SEQ ID NO: 56289 - protein, 28 aa, unidentified
  source 1..28: note = methanogen bacteria
GSTDNTENEAINAGAIVINHETNKGKGE

SEQ ID NO: 56290 - protein, 30 aa, unidentified
  source 1..30: note = methanogen bacteria
NLTSKKVESMIMPILLGKAEITKTKFSRAS

SEQ ID NO: 56291 - protein, 14 aa, unidentified
  source 1..14: note = methanogen bacteria
GPEIARSLDGLELY

SEQ ID NO: 56292 - protein, 11 aa, unidentified
  source 1..11: note = methanogen bacteria
AIYILGLSTLE

SEQ ID NO: 56293 - protein, 10 aa, unidentified
  source 1..10: note = methanogen bacteria
QLTIGSELTY

SEQ ID NO: 56294 - protein, 57 aa, unidentified
  source 1..57: note = methanogen bacteria
NKIDEELRDHVSNTVYGMISHDTGCLQDLFNAISSPTVENLPIINAANGILEAFANS

SEQ ID NO: 56295 - protein, 12 aa, unidentified
  source 1..12: note = methanogen bacteria
TQKPKKYQKVSV

SEQ ID NO: 56296 - protein, 60 aa, unidentified
  source 1..60: note = methanogen bacteria
PAYNEEDTVATVVEVVKQAAFVDEIIVVNDGSSDNTEAEAAKAGARVITHKTNKGKGEAL

SEQ ID NO: 56297 - protein, 33 aa, unidentified
  source 1..33: note = methanogen bacteria
IHNLTSKKVEAMIIPILEGKTDITKTKFARARG

SEQ ID NO: 56298 - protein, 10 aa, unidentified
  source 1..10: note = methanogen bacteria
PEITFEQPLS

SEQ ID NO: 56299 - protein, 45 aa, unidentified
  source 1..45: note = methanogen bacteria
LGISITEVDIGAIEHDMSTLEDLNLMANEVVRTIMSRANKYGRVI

SEQ ID NO: 56300 - protein, 25 aa, unidentified
  source 1..25: note = methanogen bacteria
AYNEEETVATVIEVVKKVSFVDEII

SEQ ID NO: 56301 - protein, 31 aa, unidentified
  source 1..31: note = methanogen bacteria
NDGSSDNTESEAIKAGARVINHAVNRGKGEA

SEQ ID NO: 56302 - protein, 32 aa, unidentified
  source 1..32: note = methanogen bacteria
YNLTSHKVESIIKPILDGETDITKTKFSRASG

SEQ ID NO: 56303 - protein, 30 aa, unidentified
  source 1..30: note = methanogen bacteria
GISIKEVDIGAIEHDMSPLSDLNLMANEVV

SEQ ID NO: 56304 - protein, 14 aa, unidentified
  source 1..14: note = methanogen bacteria
GPEIARSLDGLELY

SEQ ID NO: 56305 - protein, 10 aa, unidentified
  source 1..10: note = methanogen bacteria
AIYILGLTTL

SEQ ID NO: 56306 - protein, 57 aa, unidentified
  source 1..57: note = methanogen bacteria
NKINDELREHVSSEVYGMIEHDTGCLQDLFNAASNPTLENMPIINAANDILLSFANS

SEQ ID NO: 56307 - protein, 60 aa, unidentified
  source 1..60: note = methanogen bacteria
PAYNEEDTVATVVDVVKKVSFVDEIIVVNDGSSDNTEAEAMKAGARVITHVTNKGKGEAL

SEQ ID NO: 56308 - protein, 34 aa, unidentified
  source 1..34: note = methanogen bacteria
DIHNLTSKKVEAMIMPILMGKTDITKTKFARARG

SEQ ID NO: 56309 - protein, 39 aa, unidentified; identical to SEQ ID NO: 56083
  source 1..39: note = methanogen bacteria

SEQ ID NO: 56310 - protein, 87 aa, unidentified
  source 1..87: note = methanogen bacteria
IKTQKPKKYQKVSVIIPAYNEEDTVATVVGVVKEVSFVDEIIVVNDGSSDNTEAEAIKAGARVITHRVNKGKGEALFTGYRKAECDV

SEQ ID NO: 56311 - protein, 38 aa, unidentified
  source 1..38: note = methanogen bacteria
DADIHNLTSKKVEAMIMPILEGKTDITKTKFARARGRV

SEQ ID NO: 56312 - protein, 19 aa, unidentified
  source 1..19: note = methanogen bacteria
FFPEITFEQPLSGQFAARK

SEQ ID NO: 56313 - protein, 52 aa, unidentified
  source 1..52: note = methanogen bacteria
DADVLGISITEVDIGAIEHDMSPLGDLNLMANEVVRTIMSRANKYGRVIMID

SEQ ID NO: 56314 - protein, 24 aa, unidentified
  source 1..24: note = methanogen bacteria
AYNEENTVAIVVDVIKKVSCVDEI

SEQ ID NO: 56315 - protein, 29 aa, unidentified
  source 1..29: note = methanogen bacteria
GSSDNTAQEAMKAGAIVISHEVNKGKGEA

SEQ ID NO: 56316 - protein, 32 aa, unidentified
  source 1..32: note = methanogen bacteria
HNLTTNKVESMIKPILTGKAEITKTKFARESG

SEQ ID NO: 56317 - protein, 32 aa, unidentified
  source 1..32: note = methanogen bacteria
EIDIGAIEHDMSPLADLHLMANEVVRTIMNRA

SEQ ID NO: 56318 - protein, 13 aa, unidentified
  source 1..13: note = methanogen bacteria
VSTYIGHNAQAAL

SEQ ID NO: 56319 - protein, 19 aa, unidentified
  source 1..19: note = methanogen bacteria
ALINLLHPTAGALPYVNAY

SEQ ID NO: 56320 - protein, 10 aa, unidentified
  source 1..10: note = methanogen bacteria
SGVLGELGLD

SEQ ID NO: 56321 - protein, 21 aa, unidentified
  source 1..21: note = methanogen bacteria
DGLLIFFKLHQMPNDSLVENA

SEQ ID NO: 56322 - protein, 12 aa, unidentified
  source 1..12: note = methanogen bacteria
SALLGVEALSGL

SEQ ID NO: 56323 - protein, 19 aa, unidentified
  source 1..19: note = methanogen bacteria
NVIIGFLSNSPNINQYALD

SEQ ID NO: 56324 - protein, 10 aa, unidentified
  source 1..10: note = methanogen bacteria
YLMGNDGLIE

SEQ ID NO: 56325 - protein, 17 aa, unidentified
  source 1..17: note = methanogen bacteria
ILTLYSVDAHYHALVSH

SEQ ID NO: 56326 - protein, 15 aa, unidentified
  source 1..15: note = methanogen bacteria
SSSDRVVDNVLSGET

SEQ ID NO: 56327 - protein, 59 aa, unidentified
  source 1..59: note = methanogen bacteria
QNSTHYILGNSYRDVFLYLIEALRMSGVEIEGYAYVNYLPPFVPFLTSLLFRMGFVSLA

SEQ ID NO: 56328 - protein, 49 aa, unidentified
  source 1..49: note = methanogen bacteria
INNIPLGFLNQASEVSSESSLTTTHAGKLVVNDLFFYIKGIIYDISSTR

SEQ ID NO: 56329 - protein, 95 aa, unidentified
  source 1..95: note = methanogen bacteria
NYIVGVHDNPVAVNEHDASGWLDGKDGIMFSNRGPVYTWYLQKEVKYARNVGNDTLLSRELHDGNATYYISTGKVNLTGYRMVKEFGDVKIYESK

SEQ ID NO: 56330 - protein, 15 aa, unidentified
  source 1..15: note = methanogen bacteria
SSSDRVVDNVLSGET

SEQ ID NO: 56331 - protein, 19 aa, unidentified
  source 1..19: note = methanogen bacteria
MDNLVINLADFLKANYNSY

SEQ ID NO: 56332 - protein, 52 aa, unidentified
  source 1..52: note = methanogen bacteria
FIMLNPDEGFHFNVGLSLLQGSNLYVDTDTATTGLVNSFILLIWFKIFGPSI

SEQ ID NO: 56333 - protein, 41 aa, unidentified
  source 1..41: note = methanogen bacteria
AGSLEWFFRLYFYNAFSHISSSFQDYLLNMCALIKYMSKFM

SEQ ID NO: 56334 - protein, 10 aa, unidentified
  source 1..10: note = methanogen bacteria
VIKMVSFVDE

SEQ ID NO: 56335 - protein, 25 aa, unidentified
  source 1..25: note = methanogen bacteria
SSDNTEFEAIKAGAQVINHDTNKGK

SEQ ID NO: 56336 - protein, 28 aa, unidentified
  source 1..28: note = methanogen bacteria
LTSKKVEAMIKPILNGKTDITKTKFARE

SEQ ID NO: 56337 - protein, 11 aa, unidentified
  source 1..11: note = methanogen bacteria
TQKPKKYQKVS

SEQ ID NO: 56338 - protein, 68 aa, unidentified
  source 1..68: note = methanogen bacteria
PAYNEEDTVSKVVEVVKKVSFVDEIIVVNDGSTDNTEAEAIKAGAKVINHETNRGKGQALYTGYQKAE

SEQ ID NO: 56339 - protein, 36 aa, unidentified
  source 1..36: note = methanogen bacteria
ADIYNLTSKKVEAIIHPILIGKTDITKTKFARESGR

SEQ ID NO: 56340 - protein, 10 aa, unidentified
  source 1..10: note = methanogen bacteria
PEISFEQPLS

SEQ ID NO: 56341 - protein, 49 aa, unidentified
  source 1..49: note = methanogen bacteria
LGISIMEVDIGAIQHDMSPLSDLNMMANEVVRTIISRANKYGRVVMIDD

SEQ ID NO: 56342 - protein, 11 aa, unidentified
  source 1..11: note = methanogen bacteria
ANFIGHNGQAA

SEQ ID NO: 56343 - protein, 21 aa, unidentified
  source 1..21: note = methanogen bacteria
DALIAILHPPSPDLIPYVKSF

SEQ ID NO: 56344 - protein, 19 aa, unidentified
  source 1..19: note = methanogen bacteria
ILLIFFKLHQMPNDSLVET

SEQ ID NO: 56345 - protein, 18 aa, unidentified
  source 1..18: note = methanogen bacteria
SGLSEEPAVKDFLGGIEN

SEQ ID NO: 56346 - protein, 22 aa, unidentified
  source 1..22: note = methanogen bacteria
GMATGGDVTFSSIFSGAFSSAA

SEQ ID NO: 56347 - protein, 25 aa, unidentified
  source 1..25: note = methanogen bacteria
AYNEEETVAKVIEVVKKVSFVDEII

SEQ ID NO: 56348 - protein, 31 aa, unidentified
  source 1..31: note = methanogen bacteria
NDGSSDNTEKEATEAGAIVINHETNKGKGEA

SEQ ID NO: 56349 - protein, 32 aa, unidentified
  source 1..32: note = methanogen bacteria
FNLTSAKVEAMIKPILDGKTDITKTKFSRASG

SEQ ID NO: 56350 - protein, 44 aa, unidentified
  source 1..44: note = methanogen bacteria
GISITEVDIGAIEHDMSPLSDLNLMANEVVRTIIGRANKYGRVV

SEQ ID NO: 56351 - protein, 12 aa, unidentified
  source 1..12: note = methanogen bacteria
ATYVSADAQAAL

SEQ ID NO: 56352 - protein, 20 aa, unidentified
  source 1..20: note = methanogen bacteria
DYVMAILHCRADLAPLAKSY

SEQ ID NO: 56353 - protein, 10 aa, unidentified
  source 1..10: note = methanogen bacteria
EAVMGKPGLN

SEQ ID NO: 56354 - protein, 20 aa, unidentified
  source 1..20: note = methanogen bacteria
DTILMFFSLTDNAAADQIRN

SEQ ID NO: 56355 - protein, 11 aa, unidentified
  source 1..11: note = methanogen bacteria
ASFIGESAVAA

SEQ ID NO: 56356 - protein, 19 aa, unidentified
  source 1..19: note = methanogen bacteria
TIINFLNPPADALPYLNAY

SEQ ID NO: 56357 - protein, 11 aa, unidentified
  source 1..11: note = methanogen bacteria
TIYMGSVGLVS

SEQ ID NO: 56358 - protein, 19 aa, unidentified
  source 1..19: note = methanogen bacteria
DIFLMLYNLHTSPHVETFR

SEQ ID NO: 56359 - protein, 13 aa, unidentified
  source 1..13: note = methanogen bacteria
ILVKNETIPGFIP

SEQ ID NO: 56360 - protein, 13 aa, unidentified
  source 1..13: note = methanogen bacteria
ILVKNNALDEFVP

SEQ ID NO: 56361 - protein, 44 aa, unidentified; identical to SEQ ID NO: 55426
  source 1..44: note = methanogen bacteria

SEQ ID NO: 56362 - protein, 12 aa, unidentified
  source 1..12: note = methanogen bacteria
SSLIGESALAAI

SEQ ID NO: 56363 - protein, 18 aa, unidentified
  source 1..18: note = methanogen bacteria
LINILHPPAGVLPYVQQY

SEQ ID NO: 56364 - protein, 11 aa, unidentified
  source 1..11: note = methanogen bacteria
VYLGEIGLVSY

SEQ ID NO: 56365 - protein, 18 aa, unidentified
  source 1..18: note = methanogen bacteria
FLMLYKLNLSPNVETFRF

SEQ ID NO: 56366 - protein, 12 aa, unidentified
  source 1..12: note = methanogen bacteria
STFIGHNAQAAL

SEQ ID NO: 56367 - protein, 19 aa, unidentified
  source 1..19: note = methanogen bacteria
ALVSLLHPTAGSLPYVNAY

SEQ ID NO: 56368 - protein, 10 aa, unidentified
  source 1..10: note = methanogen bacteria
SGVLGELGLD

SEQ ID NO: 56369 - protein, 21 aa, unidentified
  source 1..21: note = methanogen bacteria
DGLLMFFKLHQMPNDGLVENA

SEQ ID NO: 56370 - protein, 12 aa, unidentified
  source 1..12: note = methanogen bacteria
VSTFIGHNAQAA

SEQ ID NO: 56371 - protein, 20 aa, unidentified
  source 1..20: note = methanogen bacteria
DSLINLLHPTAGALPYVNAY

SEQ ID NO: 56372 - protein, 10 aa, unidentified
  source 1..10: note = methanogen bacteria
SGVLGELGLD

SEQ ID NO: 56373 - protein, 21 aa, unidentified
  source 1..21: note = methanogen bacteria
DGLLIFFKLHQMPNDGLVENA

SEQ ID NO: 56374 - protein, 11 aa, unidentified
  source 1..11: note = methanogen bacteria
GAYIGKDAVAA

SEQ ID NO: 56375 - protein, 19 aa, unidentified
  source 1..19: note = methanogen bacteria
PLSNFLGASKATKPLVLEY

SEQ ID NO: 56376 - protein, 10 aa, unidentified
  source 1..10: note = methanogen bacteria
KATLGDTGLT

SEQ ID NO: 56377 - protein, 20 aa, unidentified
  source 1..20: note = methanogen bacteria
EGFLTLYGLQNVDITGFIVN

SEQ ID NO: 56378 - protein, 12 aa, unidentified
  source 1..12: note = methanogen bacteria
STFIGHNAQAAL

SEQ ID NO: 56379 - protein, 20 aa, unidentified
  source 1..20: note = methanogen bacteria
DALIGILHPTSGALPYVNAY

SEQ ID NO: 56380 - protein, 10 aa, unidentified
  source 1..10: note = methanogen bacteria
GGVLGELGLD

SEQ ID NO: 56381 - protein, 21 aa, unidentified
  source 1..21: note = methanogen bacteria
DGLLIFFKLHQMPNDGLVENA

SEQ ID NO: 56382 - protein, 11 aa, unidentified
  source 1..11: note = methanogen bacteria
ATFIGHNGQAA

SEQ ID NO: 56383 - protein, 20 aa, unidentified
  source 1..20: note = methanogen bacteria
DAVIGLLHPTADAVPYVKSY

SEQ ID NO: 56384 - protein, 10 aa, unidentified
  source 1..10: note = methanogen bacteria
GGVLGELGLD

SEQ ID NO: 56385 - protein, 20 aa, unidentified
  source 1..20: note = methanogen bacteria
DGLLIFFNLSQMPNDSLVEN

SEQ ID NO: 56386 - protein, 41 aa, unidentified
  source 1..41: note = methanogen bacteria
VLGGVTEANTALTQMAHLYPADAIAEGGTGWTSYPAFGTPF

SEQ ID NO: 56387 - protein, 34 aa, unidentified
  source 1..34: note = methanogen bacteria
NVYFYQNFGQIAIDYVGGNMDSIIPTFISTALPE

SEQ ID NO: 56388 - protein, 30 aa, unidentified
  source 1..30: note = methanogen bacteria
YKKTATGLGICQFLFGQPMLINTMPWYAMD

SEQ ID NO: 56389 - protein, 12 aa, unidentified
  source 1..12: note = methanogen bacteria
ALFIGSEAMAAL

SEQ ID NO: 56390 - protein, 20 aa, unidentified
  source 1..20: note = methanogen bacteria
DALISILYSPVSVIPYVKSY

SEQ ID NO: 56391 - protein, 20 aa, unidentified
  source 1..20: note = methanogen bacteria
DGILMFFNLANMPNDVFVEN

SEQ ID NO: 56392 - protein, 58 aa, unidentified
  source 1..58: note = methanogen bacteria
NSTHNILGHSYRDVFFYLIGALRFSGVEIGGYKHINYLPPLIPFLTSILFRLGFVSES

SEQ ID NO: 56393 - protein, 49 aa, unidentified
  source 1..49: note = methanogen bacteria
IYNIPLGFLNQAGEVSSKTSTAATHNGKLVGNDLFFYIKGLTSYISSER

SEQ ID NO: 56394 - protein, 95 aa, unidentified
  source 1..95: note = methanogen bacteria
VVHFDAISDDSLVSCEKNAGSWISDKEGVVLAERGCAYTWYLQKEMPSTRESNSVLLDEELLENNATWYIGLEDVNLTHYSKVKEFGKVSIYQRI

SEQ ID NO: 56395 - protein, 11 aa, unidentified
  source 1..11: note = methanogen bacteria
GSYIGELAVGA

SEQ ID NO: 56396 - protein, 19 aa, unidentified
  source 1..19: note = methanogen bacteria
PLATILHATPANKPLVLQY

SEQ ID NO: 56397 - protein, 10 aa, unidentified
  source 1..10: note = methanogen bacteria
ASTLGDTGLT

SEQ ID NO: 56398 - protein, 20 aa, unidentified
  source 1..20: note = methanogen bacteria
DAFLALYNFNHKDIGEFAKH

SEQ ID NO: 56399 - protein, 11 aa, unidentified
  source 1..11: note = methanogen bacteria
GTFIGENAVAA

SEQ ID NO: 56400 - protein, 20 aa, unidentified
  source 1..20: note = methanogen bacteria
DPLADLLHATPGTKPLILQY

SEQ ID NO: 56401 - protein, 10 aa, unidentified
  source 1..10: note = methanogen bacteria
AAELGDMGLT

SEQ ID NO: 56402 - protein, 20 aa, unidentified
  source 1..20: note = methanogen bacteria
DGFLALYNFGHKDIAGFATH

SEQ ID NO: 56403 - protein, 12 aa, unidentified
  source 1..12: note = methanogen bacteria
GSFIGPNAVAAI

SEQ ID NO: 56404 - protein, 20 aa, unidentified
  source 1..20: note = methanogen bacteria
DPIATLLGSDAVTKPLVMQY

SEQ ID NO: 56405 - protein, 20 aa, unidentified
  source 1..20: note = methanogen bacteria
QGFLALYNFNHLEMAGFAIH

SEQ ID NO: 56406 - protein, 11 aa, unidentified
  source 1..11: note = methanogen bacteria
GRFIGPNAVAA

SEQ ID NO: 56407 - protein, 18 aa, unidentified
  source 1..18: note = methanogen bacteria
LAPYLGASHATKPLLLQY

SEQ ID NO: 56408 - protein, 20 aa, unidentified
  source 1..20: note = methanogen bacteria
EGFLALYKFEHMEIAGFAIN

SEQ ID NO: 56409 - protein, 12 aa, unidentified
  source 1..12: note = methanogen bacteria
VSTFIGHNAQAA

SEQ ID NO: 56410 - protein, 20 aa, unidentified
  source 1..20: note = methanogen bacteria
DPLINILHPPEGALPYVNAY

SEQ ID NO: 56411 - protein, 21 aa, unidentified
  source 1..21: note = methanogen bacteria
DGLLMFFKLHQMPNDSLVENA

SEQ ID NO: 56412 - protein, 59 aa, unidentified
  source 1..59: note = methanogen bacteria
QNSAHYILGNSYRDVFLYLIEALRMSGVEIGGYAYVNYLPPFIPFLTSLLFRMGFVSLA

SEQ ID NO: 56413 - protein, 49 aa, unidentified
  source 1..49: note = methanogen bacteria
INNIPLGFLNQASEVSSESSLTTIHAGKLVVNDLFFYVKGIIYDISSTK

SEQ ID NO: 56414 - protein, 95 aa, unidentified
  source 1..95: note = methanogen bacteria
NYIANVHDNSVAVNEHDASGWLEGKDGIMFSNRGPVYTWYLQKEVKYARNVGNDTLLSQELHDGNATYYISTGKVNLTGYSMVKEFGDVKIYESK

SEQ ID NO: 56415 - protein, 12 aa, unidentified
  source 1..12: note = methanogen bacteria
GRFIGPNAVAAI

SEQ ID NO: 56416 - protein, 19 aa, unidentified
  source 1..19: note = methanogen bacteria
PLTPRLGASAALKPLVLQY

SEQ ID NO: 56417 - protein, 10 aa, unidentified
  source 1..10: note = methanogen bacteria
AATLGDKGLT

SEQ ID NO: 56418 - protein, 20 aa, unidentified
  source 1..20: note = methanogen bacteria
EGFLSLYKFDHMEIAGFAIH

SEQ ID NO: 56419 - protein, 15 aa, unidentified
  source 1..15: note = methanogen bacteria
GALDNVDSWINSVID

SEQ ID NO: 56420 - protein, 32 aa, unidentified
  source 1..32: note = methanogen bacteria
NYDQIWNAITLIVGDAFDPADWVSTTDSLFGG

SEQ ID NO: 56421 - protein, 31 aa, unidentified
  source 1..31: note = methanogen bacteria
LTYSDFDVLIQAGSTKAALVQDVMGESFLDD

SEQ ID NO: 56422 - protein, 11 aa, unidentified
  source 1..11: note = methanogen bacteria
STFIGDVALAA

SEQ ID NO: 56423 - protein, 20 aa, unidentified
  source 1..20: note = methanogen bacteria
NGLITFLHSKPEITPYVQQY

SEQ ID NO: 56424 - protein, 11 aa, unidentified
  source 1..11: note = methanogen bacteria
GGILGANGLVT

SEQ ID NO: 56425 - protein, 20 aa, unidentified
  source 1..20: note = methanogen bacteria
QTYLTLYNLQNVSYLPLITN

SEQ ID NO: 56426 - protein, 12 aa, unidentified
  source 1..12: note = methanogen bacteria
SSLIGESALAAI

SEQ ID NO: 56427 - protein, 18 aa, unidentified
  source 1..18: note = methanogen bacteria
LINILHPPAGVLPYVQQY

SEQ ID NO: 56428 - protein, 11 aa, unidentified
  source 1..11: note = methanogen bacteria
TVYLGEIGLVS

SEQ ID NO: 56429 - protein, 18 aa, unidentified
  source 1..18: note = methanogen bacteria
FLMLYKLNLSPNVETFRF

SEQ ID NO: 56430 - protein, 11 aa, unidentified
  source 1..11: note = methanogen bacteria
GRFIGEYAVAA

SEQ ID NO: 56431 - protein, 20 aa, unidentified
  source 1..20: note = methanogen bacteria
DPIATLLHATPATKPLILQY

SEQ ID NO: 56432 - protein, 10 aa, unidentified
  source 1..10: note = methanogen bacteria
ASTLGDIGLT

SEQ ID NO: 56433 - protein, 20 aa, unidentified
  source 1..20: note = methanogen bacteria
QGFLALYNFHHQDIVGFAEH

SEQ ID NO: 56434 - protein, 11 aa, unidentified
  source 1..11: note = methanogen bacteria
GSFIGELAVGA

SEQ ID NO: 56435 - protein, 20 aa, unidentified
  source 1..20: note = methanogen bacteria
DPLATLLHATPANKSLVLEY

SEQ ID NO: 56436 - protein, 10 aa, unidentified
  source 1..10: note = methanogen bacteria
ASTLGDTGLT

SEQ ID NO: 56437 - protein, 20 aa, unidentified
  source 1..20: note = methanogen bacteria
DAFLALYNFNHKDIGEFAKH

SEQ ID NO: 56438 - protein, 17 aa, unidentified
  source 1..17: note = methanogen bacteria
DGLSFTDDTLEAFEAVK

SEQ ID NO: 56439 - protein, 11 aa, unidentified
  source 1..11: note = methanogen bacteria
NKGNMNTLTYD

SEQ ID NO: 56440 - protein, 12 aa, unidentified
  source 1..12: note = methanogen bacteria
GSFIGPNAVSAI

SEQ ID NO: 56441 - protein, 19 aa, unidentified
  source 1..19: note = methanogen bacteria
ELATFLGSTAATKPLVMDY

SEQ ID NO: 56442 - protein, 10 aa, unidentified
  source 1..10: note = methanogen bacteria
VSTLGDMGLA

SEQ ID NO: 56443 - protein, 20 aa, unidentified
  source 1..20: note = methanogen bacteria
QGFLALYNFNRADIADFAIN

SEQ ID NO: 56444 - protein, 25 aa, unidentified
  source 1..25: note = methanogen bacteria
DPIVGLLCSANMEVSSQLFPLVKDF

SEQ ID NO: 56445 - protein, 17 aa, unidentified
  source 1..17: note = methanogen bacteria
LFLFSINDPAYIPVATD

SEQ ID NO: 56446 - protein, 11 aa, unidentified
  source 1..11: note = methanogen bacteria
ATYIGHNGQAA

SEQ ID NO: 56447 - protein, 21 aa, unidentified
  source 1..21: note = methanogen bacteria
NQMINLLHPPSAEVVPFVKNF

SEQ ID NO: 56448 - protein, 19 aa, unidentified
  source 1..19: note = methanogen bacteria
DAFLMFYNLHAVDDSIVEA

SEQ ID NO: 56449 - protein, 26 aa, unidentified
  source 1..26: note = methanogen bacteria
AYNEEDTVGSVVEVIKKVSFVDEIIV

SEQ ID NO: 56450 - protein, 31 aa, unidentified
  source 1..31: note = methanogen bacteria
NDGSSDNTAEEALKAGARVITHENNKGKGEA

SEQ ID NO: 56451 - protein, 34 aa, unidentified
  source 1..34: note = methanogen bacteria
IHNLTSKKVEAMIKPILLGNAEITKTKFSRESGR

SEQ ID NO: 56452 - protein, 49 aa, unidentified
  source 1..49: note = methanogen bacteria
LGISILEVDIGAIEHDMSPLDDLNLMANEVVRTIMGRANKYGRVIMIDD

SEQ ID NO: 56453 - protein, 13 aa, unidentified
  source 1..13: note = methanogen bacteria
LQPIKQHFGESEF

SEQ ID NO: 56454 - protein, 10 aa, unidentified
  source 1..10: note = methanogen bacteria
YYIAEMGQPY

SEQ ID NO: 56455 - protein, 14 aa, unidentified
  source 1..14: note = methanogen bacteria
LTCIKSGLYEDTFS

SEQ ID NO: 56456 - protein, 15 aa, unidentified
  source 1..15: note = methanogen bacteria
GNKDDRHRKDYDSLR

SEQ ID NO: 56457 - protein, 14 aa, unidentified
  source 1..14: note = methanogen bacteria
MFGVDVAAIITSAG

SEQ ID NO: 56458 - protein, 18 aa, unidentified
  source 1..18: note = methanogen bacteria
PFQKGDLIQVGTDTTVYR

SEQ ID NO: 56459 - protein, 12 aa, unidentified
  source 1..12: note = methanogen bacteria
STLETSRIKNIT

SEQ ID NO: 56460 - protein, 12 aa, unidentified
  source 1..12: note = methanogen bacteria
LQPIKQHFGESE

SEQ ID NO: 56461 - protein, 10 aa, unidentified
  source 1..10: note = methanogen bacteria
YYITEMDQPY

SEQ ID NO: 56462 - protein, 11 aa, unidentified
  source 1..11: note = methanogen bacteria
IILGSTQASVI

SEQ ID NO: 56463 - protein, 19 aa, unidentified
  source 1..19: note = methanogen bacteria
DNILMMLNVPAEIFNLGKE

SEQ ID NO: 56464 - protein, 16 aa, unidentified
  source 1..16: note = methanogen bacteria
LSIFNIVDPNHAKVVT

SEQ ID NO: 56465 - protein, 15 aa, unidentified
  source 1..15: note = methanogen bacteria
SSSDRVVDNVLSGET

SEQ ID NO: 56466 - protein, 11 aa, unidentified
  source 1..11: note = methanogen bacteria
NNIEDIFALGY

SEQ ID NO: 56467 - protein, 24 aa, unidentified
  source 1..24: note = methanogen bacteria
AYGSDIAGIIGSPSFFLSGFEGEY

SEQ ID NO: 56468 - protein, 14 aa, unidentified
  source 1..14: note = methanogen bacteria
WGSGGWLAEWGYHD

SEQ ID NO: 56469 - protein, 14 aa, unidentified
  source 1..14: note = methanogen bacteria
LAVSGYDGAASADF

SEQ ID NO: 56470 - protein, 17 aa, unidentified
  source 1..17: note = methanogen bacteria
FDTGSGLFYGGGADALT

SEQ ID NO: 56471 - protein, 55 aa, unidentified
  source 1..55: note = methanogen bacteria
LDSSAKAAFDVFMKTALEVSGLNSYWTINKDVNLVAKVKDQFGAYINEGSVNITV

SEQ ID NO: 56472 - protein, 44 aa, unidentified
  source 1..44: note = methanogen bacteria
YPSNVVSKLININPVKTALSLSLSKDVLFVGDSLSVKVSVNATQ

SEQ ID NO: 56473 - protein, 34 aa, unidentified
  source 1..34: note = methanogen bacteria
YLNDVLKGTVNVDSKGMASIVLKDLSYGTYNLNA

SEQ ID NO: 56474 - protein, 14 aa, unidentified
  source 1..14: note = methanogen bacteria
LTCIKSGLYEDTFS

SEQ ID NO: 56475 - protein, 14 aa, unidentified
  source 1..14: note = methanogen bacteria
LYHIKAGRYNATFL

SEQ ID NO: 56476 - protein, 59 aa, unidentified
  source 1..59: note = methanogen bacteria
QNSTHHILGNQYQDVFYYLIEALKMSGVEIDGYRFVGYLPPFIPFLTSILFRLGFVSST

SEQ ID NO: 56477 - protein, 51 aa, unidentified
  source 1..51: note = methanogen bacteria
MINEIPLGFINQAASVSSQSSRVITYAGRVVHNDLFFYINSITYNISSGQA

SEQ ID NO: 56478 - protein, 93 aa, unidentified
  source 1..93: note = methanogen bacteria
VIHIEDDPVPICEQNAANWLDGKEGIVFSNRGYAQTWYLQKNVFIPGNIGNATLLNKELLNGNATYYVSSGGTNLTDYSLVQEFNAIKIYKRN

SEQ ID NO: 56479 - protein, 18 aa, unidentified
  source 1..18: note = methanogen bacteria
ADFAEEPSVRDYLASIDN

SEQ ID NO: 56480 - protein, 20 aa, unidentified
  source 1..20: note = methanogen bacteria
YGFNTDYGALFSGMFPSEQI

SEQ ID NO: 56481 - protein, 14 aa, unidentified
  source 1..14: note = methanogen bacteria
FKEFFIPTLLTSIS

SEQ ID NO: 56482 - protein, 20 aa, unidentified
  source 1..20: note = methanogen bacteria
GPIIGILCPSAQIQPIVFQY

SEQ ID NO: 56483 - protein, 16 aa, unidentified
  source 1..16: note = methanogen bacteria
LMLYQVNNPSDIPIVL

SEQ ID NO: 56484 - protein, 52 aa, unidentified
  source 1..52: note = methanogen bacteria
KQINIGIYYWDIFLYLNNGLTFAGNRLGDTMYLSPFLSFLYSIFFRIGFINE

SEQ ID NO: 56485 - protein, 62 aa, unidentified
  source 1..62: note = methanogen bacteria
FYLNTGSLFPFIKQFDNSVSGSVSTVNPGFNLDLTYYLKFIPNYISSFSMPNYTDIITPNKS

SEQ ID NO: 56486 - protein, 10 aa, unidentified
  source 1..10: note = methanogen bacteria
MDNGIRFLGY

SEQ ID NO: 56487 - protein, 12 aa, unidentified
  source 1..12: note = methanogen bacteria
SNLIGAVALSAI

SEQ ID NO: 56488 - protein, 20 aa, unidentified
  source 1..20: note = methanogen bacteria
GPIIGILCPSAQIQPIVFQY

SEQ ID NO: 56489 - protein, 16 aa, unidentified
  source 1..16: note = methanogen bacteria
LMLYQVNNPSDIPIVL

SEQ ID NO: 56490 - protein, 41 aa, unidentified
  source 1..41: note = methanogen bacteria
VLGGVTEANTALTNMAHLYPADALAEGGTGWTSFPKFASPF

SEQ ID NO: 56491 - protein, 34 aa, unidentified
  source 1..34: note = methanogen bacteria
NVYFYQNFGQIAIDFVGGNMDSIIPTFISTALPE

SEQ ID NO: 56492 - protein, 30 aa, unidentified
  source 1..30: note = methanogen bacteria
FKKTATGLGICKFIFGVDMLINTMPWYTID

SEQ ID NO: 56493 - protein, 19 aa, unidentified
  source 1..19: note = methanogen bacteria
ILMLVIKEYTIELQSLLEM

SEQ ID NO: 56494 - protein, 11 aa, unidentified
  source 1..11: note = methanogen bacteria
TNFSLDSLKII

SEQ ID NO: 56495 - protein, 41 aa, unidentified
  source 1..41: note = methanogen bacteria
VLGGVTEANTALTNMAPLYPPDAIAEGGTGWTSFPTLGSPF

SEQ ID NO: 56496 - protein, 34 aa, unidentified; identical to SEQ ID NO: 56387
  source 1..34: note = methanogen bacteria

SEQ ID NO: 56497 - protein, 30 aa, unidentified
  source 1..30: note = methanogen bacteria
FKKTATGLGICKLIFGVDMLINTMPWYTID

SEQ ID NO: 56498 - protein, 68 aa, unidentified
  source 1..68: note = methanogen bacteria
RYSSPTLLHSWRGSRNLVNSTLQIQYLMDNPKHGINFFKIIFTRDLRHLANGVFSFFGARQVMDHYTD

SEQ ID NO: 56499 - protein, 16 aa, unidentified
  source 1..16: note = methanogen bacteria
TWAFIGQFNLGLSLRY

SEQ ID NO: 56500 - protein, 31 aa, unidentified
  source 1..31: note = methanogen bacteria
MFLIYGQPVLDIGMLFRPFLIGYLFLNQGQG

SEQ ID NO: 56501 - protein, 52 aa, unidentified
  source 1..52: note = methanogen bacteria
SIDAINITLNTIYPGSEIYNGGGTLNSFTNYIPTIFFPLDYANLLKNTCDYS

SEQ ID NO: 56502 - protein, 18 aa, unidentified
  source 1..18: note = methanogen bacteria
QLPDFIIQLTLRSKMKSF

SEQ ID NO: 56503 - protein, 12 aa, unidentified
  source 1..12: note = methanogen bacteria
IDALIGSNDFDE

SEQ ID NO: 56504 - protein, 27 aa, unidentified
  source 1..27: note = methanogen bacteria
PAYNEEATVAKVVSVARKLSYVTEVIV

SEQ ID NO: 56505 - protein, 41 aa, unidentified
  source 1..41: note = methanogen bacteria
DDGSTDRTVEEAESAGATVISHIMNEGKGSAIKTGFKNSHG

SEQ ID NO: 56506 - protein, 32 aa, unidentified
  source 1..32: note = methanogen bacteria
SNFTSEKIDKIIRPILEDQTDITKTKFARESG

SEQ ID NO: 56507 - protein, 40 aa, unidentified
  source 1..40: note = methanogen bacteria
VHGIKILEVDIGDICHDMSPLADLNKMANEVVRTIIDRAV

SEQ ID NO: 56508 - protein, 52 aa, unidentified
  source 1..52: note = methanogen bacteria
QSVIGVSYWDIFVYLQDALLFANINIGSQLSVPPVLSLLTSIPFRLGFISET

SEQ ID NO: 56509 - protein, 61 aa, unidentified
  source 1..61: note = methanogen bacteria
QGSIPFLSQFVEVSNSNQVSSVNVGYELNPFYYLQHLPEILTCWSASSQYSMMLTTAVNNP

SEQ ID NO: 56510 - protein, 12 aa, unidentified
  source 1..12: note = methanogen bacteria
TKIANELNGNGL

SEQ ID NO: 56511 - protein, 13 aa, unidentified
  source 1..13: note = methanogen bacteria
FGTFILFELDTLT

SEQ ID NO: 56512 - protein, 22 aa, unidentified
  source 1..22: note = methanogen bacteria
LQVDGVKFDGNKEFLYTITGKP

SEQ ID NO: 56513 - protein, 55 aa, unidentified
  source 1..55: note = methanogen bacteria
SQYVNNLGTYANYPAVTDKATEFIQPMLAYLIPGAPLYDATGTVPNAILQAFIKS

SEQ ID NO: 56514 - protein, 10 aa, unidentified
  source 1..10: note = methanogen bacteria
GFGGQAATHG

SEQ ID NO: 56515 - protein, 11 aa, unidentified
  source 1..11: note = methanogen bacteria
VAVITGLNDYY

SEQ ID NO: 56516 - protein, 41 aa, unidentified
  source 1..41: note = methanogen bacteria
AELDGVTAAFESLADLPASSASGVLPGFEGWDSVADFGSSE

SEQ ID NO: 56517 - protein, 44 aa, unidentified
  source 1..44: note = methanogen bacteria
SNVFFWNNGEGLAAAHVASIYGSGSTDFIIPQFILELFDGKTGG

SEQ ID NO: 56518 - protein, 30 aa, unidentified
  source 1..30: note = methanogen bacteria
NTSTSVFLPICKWITGNSVLFTEGSIQYCD

SEQ ID NO: 56519 - protein, 22 aa, unidentified
  source 1..22: note = methanogen bacteria
TQWDSVSDVWNDTSEMGQIWEA

SEQ ID NO: 56520 - protein, 18 aa, unidentified
  source 1..18: note = methanogen bacteria
WGCPDGVDIPGLGLHLSP

SEQ ID NO: 56521 - protein, 29 aa, unidentified
  source 1..29: note = methanogen bacteria
LMILGHQTDFFTGPTYIMTHKHGNEATPE

SEQ ID NO: 56522 - protein, 15 aa, unidentified
  source 1..15: note = methanogen bacteria
LTEPGDIDGGRLAGS

SEQ ID NO: 56523 - protein, 10 aa, unidentified
  source 1..10: note = methanogen bacteria
WTDIGDGVPE

SEQ ID NO: 56524 - protein, 32 aa, unidentified
  source 1..32: note = methanogen bacteria
AIAPDVDSVPIYIVNLVQKGVETGDPSCYADA

SEQ ID NO: 56525 - protein, 15 aa, unidentified
  source 1..15: note = methanogen bacteria
YEPNLKELNKGKITK

SEQ ID NO: 56526 - protein, 23 aa, unidentified
  source 1..23: note = methanogen bacteria
IILEDKINKCNSKVELEEIDVLR

SEQ ID NO: 56527 - protein, 22 aa, unidentified
  source 1..22: note = methanogen bacteria
SQSKSLNNDKRNKSYENDYTYS

SEQ ID NO: 56528 - protein, 18 aa, unidentified
  source 1..18: note = methanogen bacteria
EIKENNNVKNNTEEFKIL

SEQ ID NO: 56529 - protein, 10 aa, unidentified
  source 1..10: note = methanogen bacteria
GFGGQAATHG

SEQ ID NO: 56530 - protein, 10 aa, unidentified
  source 1..10: note = methanogen bacteria
VAVLTGLTDY

SEQ ID NO: 56531 - protein, 41 aa, unidentified
  source 1..41: note = methanogen bacteria
TLGGVTPAFESLADLSTSEASGVLPGFNGWTEVASFGSNEW

SEQ ID NO: 56532 - protein, 42 aa, unidentified
  source 1..42: note = methanogen bacteria
SNVFFMNEHSQAAAAYVSGLGLGTDFIVPQYILEVFDSVFGG

SEQ ID NO: 56533 - protein, 30 aa, unidentified
  source 1..30: note = methanogen bacteria
NSSMSVFMPICRWITGNAVLFPNTWLAFCD

SEQ ID NO: 56534 - protein, 41 aa, unidentified
  source 1..41: note = methanogen bacteria
TGGIYPIQIMHKFFQSLYPYMPMTYAIRLVREAQLGVVWGN

SEQ ID NO: 56535 - protein, 18 aa, unidentified
  source 1..18: note = methanogen bacteria
ADIVNIGIQNANFQYIID

SEQ ID NO: 56536 - protein, 13 aa, unidentified
  source 1..13: note = methanogen bacteria
AYDAINSGILTGD

SEQ ID NO: 56537 - protein, 23 aa, unidentified
  source 1..23: note = methanogen bacteria
GIINSVVNSFIFSTPFSIDDVND

SEQ ID NO: 56538 - protein, 20 aa, unidentified
  source 1..20: note = methanogen bacteria
FYPSMSATYKLPSWNPAWSM

SEQ ID NO: 56539 - protein, 52 aa, unidentified
  source 1..52: note = methanogen bacteria
QTIRSISYWDIFVYLQNAMLFSHINIGSQLSVPPVLSLLTSIPFRLGFISET

SEQ ID NO: 56540 - protein, 63 aa, unidentified
  source 1..63: note = methanogen bacteria
SYQGTIPFISQFMEVSSSSQVSSINVGYELNPWYYIQNLPEYLTSFGVSNSYFSTLSTSDNSP

SEQ ID NO: 56541 - protein, 67 aa, unidentified
  source 1..67: note = methanogen bacteria
YSTPTLLHSWRGSRNLVNSTLQIEYLKNNPKHTLDFFKIIFTRDLRHLANGVFSFFGARQVIDHYID

SEQ ID NO: 56542 - protein, 16 aa, unidentified
  source 1..16: note = methanogen bacteria
TWAFIGRFNLGLSIRY

SEQ ID NO: 56543 - protein, 68 aa, unidentified
  source 1..68: note = methanogen bacteria
RYSTPTLLHSWRASRNLVNSTLQIQYIKDNPSYLVQFFKTIFVRDLRHLANGVFSFFGARQVVDHYID

SEQ ID NO: 56544 - protein, 16 aa, unidentified
  source 1..16: note = methanogen bacteria
TWAFIGKFNLGLSLRY

SEQ ID NO: 56545 - protein, 10 aa, unidentified
  source 1..10: note = methanogen bacteria
GFGGQAATHG

SEQ ID NO: 56546 - protein, 10 aa, unidentified
  source 1..10: note = methanogen bacteria
AVLTGLTDYY

SEQ ID NO: 56547 - protein, 42 aa, unidentified
  source 1..42: note = methanogen bacteria
NAVGGVTEGFTALSEISTGEASGVLPGFNGWTEVADFGSNEW

SEQ ID NO: 56548 - protein, 43 aa, unidentified
  source 1..43: note = methanogen bacteria
LSNVFFMDEHHLAASRYVAGLGLGTDFIVPQYILEVFEDIFGG

SEQ ID NO: 56549 - protein, 30 aa, unidentified
  source 1..30: note = methanogen bacteria
NSSMSVFMPICKWITGDAVLFPDTWLAFCD

SEQ ID NO: 56550 - protein, 67 aa, unidentified
  source 1..67: note = methanogen bacteria
RYSAPTLLHSWRSSRNLINSTLQFNHFISHPALVPKFFYNIFFLDLPNMVTGVFSFFGARQFHHYDD

SEQ ID NO: 56551 - protein, 17 aa, unidentified
  source 1..17: note = methanogen bacteria
LTWASVGYYNLGISTRY

SEQ ID NO: 56552 - protein, 18 aa, unidentified
  source 1..18: note = methanogen bacteria
NTAPYGGAIYIKGTMSTV

SEQ ID NO: 56553 - protein, 15 aa, unidentified
  source 1..15: note = methanogen bacteria
TADYGGAISGYGANG

SEQ ID NO: 56554 - protein, 23 aa, unidentified
  source 1..23: note = methanogen bacteria
STFNNNTAEYGGAIFWDNKDGAV

SEQ ID NO: 56555 - protein, 18 aa, unidentified
  source 1..18: note = methanogen bacteria
TFNNNNAIMHGGAINWNN

SEQ ID NO: 56556 - protein, 18 aa, unidentified
  source 1..18: note = methanogen bacteria
SNLGETIYLYSSSANGIE

SEQ ID NO: 56557 - protein, 13 aa, unidentified
  source 1..13: note = methanogen bacteria
TVIKFRDVTIGKV

SEQ ID NO: 56558 - protein, 15 aa, unidentified
  source 1..15: note = methanogen bacteria
KYDKVIITAMINKDA

SEQ ID NO: 56559 - protein, 97 aa, unidentified
  source 1..97: note = methanogen bacteria
ITTNTKFWIASALDFSFGPSGIDVKVASFDNFVRGGISFAVPPNTELGERVQEGDIFKLYDSEKSSLLKEYKDYIEYILLFKSSVKGLAKGASVEYL

SEQ ID NO: 56560 - protein, 44 aa, unidentified
  source 1..44: note = methanogen bacteria
VLIRIQKERLTNGNDQPDEKIIAQIESAIKKGLRGTLESSNLLT

SEQ ID NO: 56561 - protein, 91 aa, unidentified
  source 1..91: note = methanogen bacteria
NLFVNLVMDTKNNSENEEIITTYKGYRVIPTKVAGVIEMAEKIELFIDNLNSLNIKAISDNLNNLLGEMIKTADNLKAITDNLKSTTKNEN

SEQ ID NO: 56562 - protein, 40 aa, unidentified
  source 1..40: note = methanogen bacteria
NVLDSYSGNANLYMELNKTLRELNLVLKDVNGLTKQANDK

SEQ ID NO: 56563 - protein, 10 aa, unidentified
  source 1..10: note = methanogen bacteria
DEQPTVNKKK

SEQ ID NO: 56564 - protein, 67 aa, unidentified
  source 1..67: note = methanogen bacteria
YSAPTLLHSWRSSHNLINSTMQFNHVIHHPSSISKFFYNIVFIEIPNMMTGVFSFFGAHQFHHYADR

SEQ ID NO: 56565 - protein, 16 aa, unidentified
  source 1..16: note = methanogen bacteria
TWASVGYFNLGISTRY

SEQ ID NO: 56566 - protein, 54 aa, unidentified
  source 1..54: note = methanogen bacteria
PFQSELNLEKNSKLNELNALYKGPLELNSNAYTLKNRIDQSYDIEEIKSIDVLR

SEQ ID NO: 56567 - protein, 68 aa, unidentified
  source 1..68: note = methanogen bacteria
YHSSKIVSSKDDFGRVMMSYGENKNIIMSVKDANDFVKDNDAKILSNVQFNKVNTVIVPISLTRLQAT

SEQ ID NO: 56568 - protein, 47 aa, unidentified
  source 1..47: note = methanogen bacteria
LRDNSSEHMDDYDSMDSNVSSVQSNETIANGTLEENEEDPIVSGATV

SEQ ID NO: 56569 - protein, 84 aa, unidentified
  source 1..84: note = methanogen bacteria
ILRSKDSGLVDSTVSKSRTIIKGNETKPFENTVSYSSDVEELLKSAVLNSNNVVDALDSYLMNYGVRLSNFERMSNLGDLDSEY

SEQ ID NO: 56570 - protein, 16 aa, unidentified
  source 1..16: note = methanogen bacteria
EVPHSDVNFIINNMDN

SEQ ID NO: 56571 - protein, 32 aa, unidentified
  source 1..32: note = methanogen bacteria
TIPTDFAPDWVVNELNETYYENLYQDNSLDLL

SEQ ID NO: 56572 - protein, 10 aa, unidentified
  source 1..10: note = methanogen bacteria
LGAGEEIIDI

SEQ ID NO: 56573 - protein, 24 aa, unidentified
  source 1..24: note = methanogen bacteria
IRRAVVKAGDYNLKEEEADFDSFR

SEQ ID NO: 56574 - protein, 14 aa, unidentified
  source 1..14: note = methanogen bacteria
LGFNLAAIITSAGL

SEQ ID NO: 56575 - protein, 22 aa, unidentified
  source 1..22: note = methanogen bacteria
LATRPFKKGDLVAVGADVQVYR

SEQ ID NO: 56576 - protein, 68 aa, unidentified
  source 1..68: note = methanogen bacteria
KYSTPTLLHSWRASRNLVNSSLQIEYFMSNSTFRIDFFKTIFLRDVKHLANGVFSFFGARQVIDHYTD

SEQ ID NO: 56577 - protein, 16 aa, unidentified
  source 1..16: note = methanogen bacteria
TWAFIGQFNLGLSLRY

SEQ ID NO: 56578 - protein, 18 aa, unidentified
  source 1..18: note = methanogen bacteria
NSILSDFFNNKTSLSFEA

SEQ ID NO: 56579 - protein, 19 aa, unidentified
  source 1..19: note = methanogen bacteria
NSVLDFYIFDKEVYIHESF

SEQ ID NO: 56580 - protein, 10 aa, unidentified
  source 1..10: note = methanogen bacteria
VVKGTLSLGE

SEQ ID NO: 56581 - protein, 18 aa, unidentified
  source 1..18: note = methanogen bacteria
NSVLNFFLENEPFYISDS

SEQ ID NO: 56582 - protein, 11 aa, unidentified
  source 1..11: note = methanogen bacteria
MVIEGTISLGE

SEQ ID NO: 56583 - protein, 67 aa, unidentified
  source 1..67: note = methanogen bacteria
RYSAPKLLHSWRSSRNLINSTMQLNYVLSHPASISKFFYNIFFLDLPVILVGVFNFFGALQFSHYID

SEQ ID NO: 56584 - protein, 16 aa, unidentified
  source 1..16: note = methanogen bacteria
TWASVGYNNLGISTRY

SEQ ID NO: 56585 - protein, 67 aa, unidentified
  source 1..67: note = methanogen bacteria
YSTPTLMHSWRSSYNYVDSAAQLNYLITNPNQILNFLAHIFTIDLGYVVNGVFNFFNGKLGLHYQDH

SEQ ID NO: 56586 - protein, 17 aa, unidentified
  source 1..17: note = methanogen bacteria
LTWSYVGQINLGVSIRY

SEQ ID NO: 56587 - protein, 68 aa, unidentified
  source 1..68: note = methanogen bacteria
YSAPTLMHSWRSSHNLINSTMQLDYVIKHARTSIPKFIYNIFIIEVPKMVGGVFSFFGARQFHHYTDE

SEQ ID NO: 56588 - protein, 16 aa, unidentified
  source 1..16: note = methanogen bacteria
TWASVGYYNLGISTRY

SEQ ID NO: 56589 - protein, 12 aa, unidentified
  source 1..12: note = methanogen bacteria
SQLILDLNTSLS

SEQ ID NO: 56590 - protein, 57 aa, unidentified
  source 1..57: note = methanogen bacteria
ATAGIADAVDIYVPDANQTQFEVGTGAYLEKLGNLNESSILSQDVKAKIVNIVLTDA

SEQ ID NO: 56591 - protein, 20 aa, unidentified
  source 1..20: note = methanogen bacteria
VNSQAIYLFTIFLFKSRATR

SEQ ID NO: 56592 - protein, 18 aa, unidentified
  source 1..18: note = methanogen bacteria
NSILYYYFYKTPFSIEEN

SEQ ID NO: 56593 - protein, 10 aa, unidentified
  source 1..10: note = methanogen bacteria
NKGPMFYDMP

SEQ ID NO: 56594 - protein, 14 aa, unidentified
  source 1..14: note = methanogen bacteria
PIITNYYHKPEALL

SEQ ID NO: 56595 - protein, 12 aa, unidentified
  source 1..12: note = methanogen bacteria
GGFLAASAIGYF

SEQ ID NO: 56596 - protein, 17 aa, unidentified
  source 1..17: note = methanogen bacteria
EIMGLVYFTNSAYMNGA

SEQ ID NO: 56597 - protein, 10 aa, unidentified
  source 1..10: note = methanogen bacteria
DAGPKFYDMP

SEQ ID NO: 56598 - protein, 10 aa, unidentified
  source 1..10: note = methanogen bacteria
DVGPRFYEMP

SEQ ID NO: 56599 - protein, 66 aa, unidentified
  source 1..66: note = methanogen bacteria
SAPALMHSWRSKLNYMDPKLQLNYLINHPFSILRFMRLIFTYTLGITVNGLFNFFGANSLNHYADH

SEQ ID NO: 56600 - protein, 17 aa, unidentified
  source 1..17: note = methanogen bacteria
LTWADVGSTNIGVSTRY

SEQ ID NO: 56601 - protein, 10 aa, unidentified
  source 1..10: note = methanogen bacteria
DRGPMLFDMP

SEQ ID NO: 56602 - protein, 11 aa, unidentified
  source 1..11: note = methanogen bacteria
ASFIGESAIAA

SEQ ID NO: 56603 - protein, 19 aa, unidentified
  source 1..19: note = methanogen bacteria
AILNFLHPPADAMPYLKAY

SEQ ID NO: 56604 - protein, 12 aa, unidentified
  source 1..12: note = methanogen bacteria
TIYMGSVGLVSY

SEQ ID NO: 56605 - protein, 16 aa, unidentified
  source 1..16: note = methanogen bacteria
LMLYNLHTSPHVETFR

SEQ ID NO: 56606 - protein, 11 aa, unidentified
  source 1..11: note = methanogen bacteria
FFDHVTVLRMD

SEQ ID NO: 56607 - protein, 13 aa, unidentified
  source 1..13: note = methanogen bacteria
IVGLDEEWIDLIN

SEQ ID NO: 56608 - protein, 23 aa, unidentified
  source 1..23: note = methanogen bacteria
RIFIQADDYTKGDSATDFESFRP

SEQ ID NO: 56609 - protein, 16 aa, unidentified
  source 1..16: note = methanogen bacteria
LGFNLAAVITSAGLVS

SEQ ID NO: 56610 - protein, 26 aa, unidentified
  source 1..26: note = methanogen bacteria
ILATRPFKRGDLISVGTDTLIYRVRR

SEQ ID NO: 56611 - protein, 41 aa, unidentified
  source 1..41: note = methanogen bacteria
LLGGVSNANMALTNMVNLYPADAIATGGTGWTSFPTMGTPF

SEQ ID NO: 56612 - protein, 34 aa, unidentified
  source 1..34: note = methanogen bacteria
NVYFHQNLGKIAVDVVGGNIDKIIPTFITSALPE

SEQ ID NO: 56613 - protein, 28 aa, unidentified
  source 1..28: note = methanogen bacteria
AKTAKGLGICMALLGVETIIPTAPWPFI

SEQ ID NO: 56614 - protein, 41 aa, unidentified
  source 1..41: note = methanogen bacteria
LLGGVSTANTALTNMVNLYPADALATGGTGWTAFPEFGTPF

SEQ ID NO: 56615 - protein, 34 aa, unidentified
  source 1..34: note = methanogen bacteria
NVYFFDKLGKIAVDVVGGNIDKVIPTFITMALPE

SEQ ID NO: 56616 - protein, 29 aa, unidentified
  source 1..29: note = methanogen bacteria
FKKTAVGLGICKFLLGVETLLPAAPWPFI

SEQ ID NO: 56617 - protein, 41 aa, unidentified
  source 1..41: note = methanogen bacteria
LLGGVDTANTALTNMGNLYPADAMATGGTGWTSFPKFGTPF

SEQ ID NO: 56618 - protein, 34 aa, unidentified
  source 1..34: note = methanogen bacteria
NVYFMDKLGKIAVDVVGGNIDKIIPTFITMALPE

SEQ ID NO: 56619 - protein, 30 aa, unidentified
  source 1..30: note = methanogen bacteria
FKKTAVGLGICKFIFGVETILPAAPWPFID

SEQ ID NO: 56620 - protein, 41 aa, unidentified
  source 1..41: note = methanogen bacteria
LLGGIDTANTALTNMGNLYPADALATGGTGWTSFPEFGTPF

SEQ ID NO: 56621 - protein, 34 aa, unidentified; identical to SEQ ID NO: 56618
  source 1..34: note = methanogen bacteria

SEQ ID NO: 56622 - protein, 30 aa, unidentified
  source 1..30: note = methanogen bacteria
FKKTAVGLGICKFIFGIDTLLPAAPWPFID

SEQ ID NO: 56623 - protein, 41 aa, unidentified
  source 1..41: note = methanogen bacteria
LLGGVDTANTALTNMSHLYPADALSTGGTGWTSFPEFGTPF

SEQ ID NO: 56624 - protein, 34 aa, unidentified
  source 1..34: note = methanogen bacteria
NVYFFDKLGQIAVDVVGGNIDKIIPTFITMALPE

SEQ ID NO: 56625 - protein, 28 aa, unidentified
  source 1..28: note = methanogen bacteria
AKTATGLGICKFILGVETILPAAPWPFI

SEQ ID NO: 56626 - protein, 41 aa, unidentified
  source 1..41: note = methanogen bacteria
LLGGVTHANTALTNMVNLYPAEATATGGTGWTSFPTFGTTF

SEQ ID NO: 56627 - protein, 34 aa, unidentified
  source 1..34: note = methanogen bacteria
NVYFYQNLGKIAVDVVQGNIDKIIPTFITSALPE

SEQ ID NO: 56628 - protein, 28 aa, unidentified
  source 1..28: note = methanogen bacteria
KKTAVGLGICKFIFGVETLLPNAPWPFI

SEQ ID NO: 56629 - protein, 41 aa, unidentified
  source 1..41: note = methanogen bacteria
LLGGIDTANTALTNMVNLYPAEALKTGGTGWTAFPKFGTPF

SEQ ID NO: 56630 - protein, 34 aa, unidentified
  source 1..34: note = methanogen bacteria
NVYFYDKLGKIAVDVVGGNIDKVIPTFITMALPE

SEQ ID NO: 56631 - protein, 28 aa, unidentified
  source 1..28: note = methanogen bacteria
KKTAVGLGICKFICGVDTLLPNAPWPFI

SEQ ID NO: 56632 - protein, 41 aa, unidentified
  source 1..41: note = methanogen bacteria
LLGGVDTANTALTSMVNLYPAEATATGGTGWTSFPTFGTPF

SEQ ID NO: 56633 - protein, 34 aa, unidentified
  source 1..34: note = methanogen bacteria
NVYFFDKVGKIAVDVVGGNIDKIIPTFITMALPE

SEQ ID NO: 56634 - protein, 29 aa, unidentified
  source 1..29: note = methanogen bacteria
KKTAVGLGLCKFIFGAETLLAAAPWPSID

SEQ ID NO: 56635 - protein, 19 aa, unidentified
  source 1..19: note = methanogen bacteria
VLMLLIKEYTIELDTLLET

SEQ ID NO: 56636 - protein, 11 aa, unidentified
  source 1..11: note = methanogen bacteria
ATFDLSSMKII

SEQ ID NO: 56637 - protein, 41 aa, unidentified
  source 1..41: note = methanogen bacteria
LLGGVSTANTALTNMVNLYPADAIATGGTGWTAFPQFGSPF

SEQ ID NO: 56638 - protein, 35 aa, unidentified
  source 1..35: note = methanogen bacteria
SNVYFYDKLGKIAVDVVGGNIDKVIPTFITMALPE

SEQ ID NO: 56639 - protein, 28 aa, unidentified
  source 1..28: note = methanogen bacteria
KKTAVGLGICKFIFGVETLLPAAPWPFI

SEQ ID NO: 56640 - protein, 88 aa, unidentified
  source 1..88: note = methanogen bacteria
YISHTIKLPRIENILGLENSNNTNISMNNENTISLNNSNTSDNPLNATKKKPFLSFETMKIILKSAFLQLYDQYERLFTFGWLTYQSK

SEQ ID NO: 56641 - protein, 20 aa, unidentified
  source 1..20: note = methanogen bacteria
GFTIYLDPNATVVSGVQGRY

SEQ ID NO: 56642 - protein, 41 aa, unidentified
  source 1..41: note = methanogen bacteria
ILGGVDTANTALTSMGNLYPADAMATGGTGWTSFPEFGTPF

SEQ ID NO: 56643 - protein, 34 aa, unidentified
  source 1..34: note = methanogen bacteria
NVYFFDKLGKIAVDVVGGNIDKIIPTFITMALPE

SEQ ID NO: 56644 - protein, 28 aa, unidentified
  source 1..28: note = methanogen bacteria
KKTAVGLGLCKFILGVETILPAAPWPFI

SEQ ID NO: 56645 - protein, 41 aa, unidentified
  source 1..41: note = methanogen bacteria
LLGGVDSSNTALSNMVNLYPAEAIKTGGTGWTSFPTFGTPF

SEQ ID NO: 56646 - protein, 34 aa, unidentified
  source 1..34: note = methanogen bacteria
NVYFFQKLGKIAVDVVGGNIDKIIPTFITMALPE

SEQ ID NO: 56647 - protein, 28 aa, unidentified
  source 1..28: note = methanogen bacteria
AKTAKGLGICMALFGVETILPAAPWPFI

SEQ ID NO: 56648 - protein, 41 aa, unidentified
  source 1..41: note = methanogen bacteria
LLGGVTHANTALTNMVNLYPADAIATGGTGWTSFPTLGTPF

SEQ ID NO: 56649 - protein, 34 aa, unidentified; identical to SEQ ID NO: 56612
  source 1..34: note = methanogen bacteria

SEQ ID NO: 56650 - protein, 28 aa, unidentified
  source 1..28: note = methanogen bacteria
AKTAKGLGICMALFGVETLLPTAPWPFI

SEQ ID NO: 56651 - protein, 41 aa, unidentified
  source 1..41: note = methanogen bacteria
LLGGVDHANTALSNMVGLYPSSAVSTGGTGWTTFPEFGTPF

SEQ ID NO: 56652 - protein, 35 aa, unidentified; identical to SEQ ID NO: 55722
  source 1..35: note = methanogen bacteria

SEQ ID NO: 56653 - protein, 28 aa, unidentified
  source 1..28: note = methanogen bacteria
AKTAKGIGICMSLFGVESLIQAAPWPFI

SEQ ID NO: 56654 - protein, 68 aa, unidentified
  source 1..68: note = methanogen bacteria
NYSTPTLLHSWRSYLFDVNSTAQAQYFLSNPPKILEFIQHIFTVDLWTVITGVFNFYSGGTPNHHYED

SEQ ID NO: 56655 - protein, 18 aa, unidentified
  source 1..18: note = methanogen bacteria
LLTWSPVGKIRPGVSIRY

SEQ ID NO: 56656 - protein, 67 aa, unidentified
  source 1..67: note = methanogen bacteria
YSEPALMHSWRSKLNYMNPSLQLQFLMDHPFNILRFIRMIFTYTLGITLNGFFNFFGAYSANHYADH

SEQ ID NO: 56657 - protein, 17 aa, unidentified
  source 1..17: note = methanogen bacteria
LTWADVGGTNIGVSTRY

SEQ ID NO: 56658 - protein, 38 aa, unidentified
  source 1..38: note = methanogen bacteria
VNELGGWDSTADILDDMMSTGRAPDHFTSLLYSGGTGI

SEQ ID NO: 56659 - protein, 28 aa, unidentified
  source 1..28: note = methanogen bacteria
RAYISDSGTALDNPENIFIVLADSMFPA

SEQ ID NO: 56660 - protein, 17 aa, unidentified
  source 1..17: note = methanogen bacteria
GGIIAGGDWLIWDSQLY

SEQ ID NO: 56661 - protein, 66 aa, unidentified
  source 1..66: note = methanogen bacteria
FSTNTLAHSWRSKYNLINSTQQLSLLYNQPSFILEFFNKIFGEEVVTMVFGFFNFYGSDKASYTDH

SEQ ID NO: 56662 - protein, 18 aa, unidentified
  source 1..18: note = methanogen bacteria
LLTWARVGRTNLGTSLRY

SEQ ID NO: 56663 - protein, 65 aa, unidentified
  source 1..65: note = methanogen bacteria
STPALMHSWRSKLNYMNPSMQLQFLIGHPLHILYFLKQIFTFNLGSVVNGLFNFFGANNPNHYSD

SEQ ID NO: 56664 - protein, 17 aa, unidentified
  source 1..17: note = methanogen bacteria
LTWSDVGHRYLGVSTRY

SEQ ID NO: 56665 - protein, 63 aa, unidentified
  source 1..63: note = methanogen bacteria
MSYKAFPMDNVPYNVLNVKFEGNAADYDSLLSDKLAGDYNSFVEKAEHSSVSQFSEEMDQHKM

SEQ ID NO: 56666 - protein, 22 aa, unidentified
  source 1..22: note = methanogen bacteria
PQLFYPSMSATYKLPSWQPVWS

SEQ ID NO: 56667 - protein, 24 aa, unidentified
  source 1..24: note = methanogen bacteria
CGNLQGIHFTYCLQYPLQISYWLQ

SEQ ID NO: 56668 - protein, 67 aa, unidentified
  source 1..67: note = methanogen bacteria
YSTPALMHSWRSKLNYMNPSLQLEFLINHPIKILYFLKQIFTFNLGSILSGFFNFFGANNPNHYSDH

SEQ ID NO: 56669 - protein, 17 aa, unidentified
  source 1..17: note = methanogen bacteria
LTWADVGGSALGISTRY

SEQ ID NO: 56670 - protein, 41 aa, unidentified
  source 1..41: note = methanogen bacteria
MLGGVDNAHTALTNMVNLYPAEAIKTGGTGWTSFPTVGSPF

SEQ ID NO: 56671 - protein, 34 aa, unidentified
  source 1..34: note = methanogen bacteria
NVYFYDKLGKIAVDVVEGNIDKIIPTFITMALPE

SEQ ID NO: 56672 - protein, 29 aa, unidentified
  source 1..29: note = methanogen bacteria
AKTATGLGICKFIFGVDTLLSAAPWPYID

SEQ ID NO: 56673 - protein, 14 aa, unidentified
  source 1..14: note = methanogen bacteria
EGVLRDYLGIIHGN

SEQ ID NO: 56674 - protein, 16 aa, unidentified
  source 1..16: note = methanogen bacteria
FGQSTILTFPVLDIPL

SEQ ID NO: 56675 - protein, 20 aa, unidentified
  source 1..20: note = methanogen bacteria
PEISDGGHFMMDMLDIAIPS

SEQ ID NO: 56676 - protein, 11 aa, unidentified
  source 1..11: note = methanogen bacteria
VPAFGLQHDLI

SEQ ID NO: 56677 - protein, 41 aa, unidentified
  source 1..41: note = methanogen bacteria
LLGGVNSANTALTNMVNLYPAEALATGGTGWTAFPEFGTPF

SEQ ID NO: 56678 - protein, 35 aa, unidentified; identical to SEQ ID NO: 56638
  source 1..35: note = methanogen bacteria

SEQ ID NO: 56679 - protein, 29 aa, unidentified
  source 1..29: note = methanogen bacteria
FKKTAVGLGICKFVFGVETLLPAAPWPFI

SEQ ID NO: 56680 - protein, 67 aa, unidentified
  source 1..67: note = methanogen bacteria
RYSTPTLLHSWRSSLRFIDSTAQLHYIADHPVFTLKFISQLFTYNFSHIVYGAFNFFGAAQKVHYCD

SEQ ID NO: 56681 - protein, 16 aa, unidentified
  source 1..16: note = methanogen bacteria
TWASVGFLNLGITTRY

SEQ ID NO: 56682 - protein, 16 aa, unidentified
  source 1..16: note = methanogen bacteria
NSSSDRVVDNVLSGET

SEQ ID NO: 56683 - protein, 17 aa, unidentified
  source 1..17: note = methanogen bacteria
NSLMRYALDLNGNPTKT

SEQ ID NO: 56684 - protein, 67 aa, unidentified
  source 1..67: note = methanogen bacteria
YSEPALMHSWRSKLNYMNPALQAEYLINNPLAILNFLRLIFTQTLGITVNGLFNFFAAGSAYHYSDH

SEQ ID NO: 56685 - protein, 17 aa, unidentified
  source 1..17: note = methanogen bacteria
LTWADVGNTNIGVSTRY

SEQ ID NO: 56686 - protein, 66 aa, unidentified
  source 1..66: note = methanogen bacteria
YSTPALMHSWRSSYNYVNSTQQLQYLTNNPSDIFKFLYHTVTGGLSNILPELFNYDYRNAASFETY

SEQ ID NO: 56687 - protein, 16 aa, unidentified
  source 1..16: note = methanogen bacteria
TWANVGDMNVGVHMRY

SEQ ID NO: 56688 - protein, 11 aa, unidentified
  source 1..11: note = methanogen bacteria
SRMLGPEGYGL

SEQ ID NO: 56689 - protein, 14 aa, unidentified
  source 1..14: note = methanogen bacteria
DFIANEIFHKPLVV

SEQ ID NO: 56690 - protein, 12 aa, unidentified
  source 1..12: note = methanogen bacteria
GVFMLSTDVGFY

SEQ ID NO: 56691 - protein, 14 aa, unidentified
  source 1..14: note = methanogen bacteria
IIQLLFGEVYTPGS

SEQ ID NO: 56692 - protein, 18 aa, unidentified
  source 1..18: note = methanogen bacteria
NSLMRYALDLSDAPSKTL

SEQ ID NO: 56693 - protein, 11 aa, unidentified
  source 1..11: note = methanogen bacteria
LVYTGSIDMGT

SEQ ID NO: 56694 - protein, 10 aa, unidentified
  source 1..10: note = methanogen bacteria
FGGLAGTNGM

SEQ ID NO: 56695 - protein, 41 aa, unidentified
  source 1..41: note = methanogen bacteria
ILGGVTEAHTLLANMAPLFPESAKATGATGWTTFPQVGTVF

SEQ ID NO: 56696 - protein, 35 aa, unidentified
  source 1..35: note = methanogen bacteria
SNAYFYQTTGQIAIQAAGGNVDKIIPTFISSAMPQ

SEQ ID NO: 56697 - protein, 30 aa, unidentified
  source 1..30: note = methanogen bacteria
HQKEAAGIGLCKLLTGQTVLFTAMPWPYVD

SEQ ID NO: 56698 - protein, 66 aa, unidentified
  source 1..66: note = methanogen bacteria
YSTPTLLHSWRSSLRFIDSTAQINYITENPAFSLKFLSQLFTYNLSHILYGTFNFFGAAQKVHYSD

SEQ ID NO: 56699 - protein, 16 aa, unidentified
  source 1..16: note = methanogen bacteria
TWASVGFINLGITTRY

SEQ ID NO: 56700 - protein, 69 aa, unidentified
  source 1..69: note = methanogen bacteria
YSMPNMRRSHRGPRAQELNIDTVLQLKFMFSSVKYFTAVMGDILSKTWYVFKDLFRFCDWQGKYGVYQS

SEQ ID NO: 56701 - protein, 18 aa, unidentified
  source 1..18: note = methanogen bacteria
LTWTPVGSLRIQGVQGRY

SEQ ID NO: 56702 - protein, 67 aa, unidentified
  source 1..67: note = methanogen bacteria
YSEPALMHSWRSKLNYMDPALQAKYLINNPMFILEFLRMIFTYTLGITVNGLFNFFSAANPYHYSDH

SEQ ID NO: 56703 - protein, 17 aa, unidentified
  source 1..17: note = methanogen bacteria
LTWADVGNTNIGVSARY

SEQ ID NO: 56704 - protein, 67 aa, unidentified
  source 1..67: note = methanogen bacteria
RYSEPALMHSWRARLKYLDPTGQMHYFMTHPIFIGRFFSQIFTYNIAKILYGTFNFFGAAQKTHYSD

SEQ ID NO: 56705 - protein, 18 aa, unidentified
  source 1..18: note = methanogen bacteria
LLTWASVGKLNLGLSTRY

SEQ ID NO: 56706 - protein, 10 aa, unidentified
  source 1..10: note = methanogen bacteria
SKIGVEAFYA

SEQ ID NO: 56707 - protein, 19 aa, unidentified
  source 1..19: note = methanogen bacteria
EGILYTLDAGDSYALIFDY

SEQ ID NO: 56708 - protein, 10 aa, unidentified
  source 1..10: note = methanogen bacteria
IGTMGAIGPI

SEQ ID NO: 56709 - protein, 16 aa, unidentified
  source 1..16: note = methanogen bacteria
YAFSLFSITGMDNAIF

SEQ ID NO: 56710 - protein, 68 aa, unidentified
  source 1..68: note = methanogen bacteria
HQVTPTLAHSWRSKYQPVNSTLQINYLMNHPGHALNVFSRFLNEEILKLSGQFFNFFNSAKLPHYSDR

SEQ ID NO: 56711 - protein, 18 aa, unidentified
  source 1..18: note = methanogen bacteria
LLSFAKVGGHGLGISLRY

SEQ ID NO: 56712 - protein, 66 aa, unidentified
  source 1..66: note = methanogen bacteria
RYATPALMHSWRSKLNYVNSGDQIAYLLHNHGFAVKFITQIFTTDLGAMFYGVFNFFSSASKYHYA

SEQ ID NO: 56713 - protein, 17 aa, unidentified
  source 1..17: note = methanogen bacteria
LTWAGVGYTGLGINTRY

SEQ ID NO: 56714 - protein, 33 aa, unidentified
  source 1..33: note = methanogen bacteria
SDMSIADSVFESVSAFTTTGATILNDPESVDGS

SEQ ID NO: 56715 - protein, 32 aa, unidentified
  source 1..32: note = methanogen bacteria
GVSPFESVCISLSDIPTGGLLPRADSMASYDF

SEQ ID NO: 56716 - protein, 44 aa, unidentified
  source 1..44: note = methanogen bacteria
VSSETEYSFDTLGKIGESLWHAAYTVVAAGTTSGFAITDYTQWP

SEQ ID NO: 56717 - protein, 39 aa, unidentified
  source 1..39: note = methanogen bacteria
IEPGYDVHTAFGTVLAAITNTGVGSGHFNPFTSYEELGA

SEQ ID NO: 56718 - protein, 23 aa, unidentified
  source 1..23: note = methanogen bacteria
SDETSIDSTENVEPVQQTENISD

SEQ ID NO: 56719 - protein, 24 aa, unidentified
  source 1..24: note = methanogen bacteria
ILGASAQSADSKNVNKVSSNSTKE

SEQ ID NO: 56720 - protein, 43 aa, unidentified
  source 1..43: note = methanogen bacteria
VKKGNTYYVKLTTSNGKAVANKKLSVSFNGKTYTKTTDSNGKI

SEQ ID NO: 56721 - protein, 93 aa, unidentified
  source 1..93: note = methanogen bacteria
FSKSYKLYLVNTFSINIANAKLLTNGYLRIYFTGSKKFIADNTAKISIGGKIFNKKANSEGFIVIKPQLSAKKYTVTVDIGKHFKSKKVKCIK

SEQ ID NO: 56722 - protein, 39 aa, unidentified
  source 1..39: note = methanogen bacteria
EVLKRDSYALYLYGKLSKYVCFKTKTAPKTYHILHRSKW

SEQ ID NO: 56723 - protein, 72 aa, unidentified
  source 1..72: note = methanogen bacteria
YGDYNVGGDSRIPTGWVSLSKFKAKFAGVGLVVKLNYKLSKNVKTQIKNYYQSMGPNWARQNTNERIPNVPI

SEQ ID NO: 56724 - protein, 44 aa, unidentified
  source 1..44: note = methanogen bacteria
YDPGILSVDSYNQLHQIATGHFSNWHPFFHTFIEMICIKIYANP

SEQ ID NO: 56725 - protein, 67 aa, unidentified
  source 1..67: note = methanogen bacteria
RYSTPTLMHSWRSKLNWVNSADQISLLIHDPMFAWKFISQIFTTDLAWMIYGIFNFFSAGSKYHYAN

SEQ ID NO: 56726 - protein, 17 aa, unidentified
  source 1..17: note = methanogen bacteria
LTWSSVGYIQLGINTRY

SEQ ID NO: 56727 - protein, 10 aa, unidentified
  source 1..10: note = methanogen bacteria
FGGLAGTNGL

SEQ ID NO: 56728 - protein, 41 aa, unidentified
  source 1..41: note = methanogen bacteria
MLGGVTHAHQLLTNMAPLFPESSKITGATGWTTFPVTGSVF

SEQ ID NO: 56729 - protein, 34 aa, unidentified
  source 1..34: note = methanogen bacteria
NVYFYQTSGQLAIQAAGGNVDKIIPTFINSAMPT

SEQ ID NO: 56730 - protein, 30 aa, unidentified
  source 1..30: note = methanogen bacteria
HKKEAAGLGICKLLTGQTVLFSSMPWPYVD

SEQ ID NO: 56731 - protein, 65 aa, unidentified
  source 1..65: note = methanogen bacteria
TNEWPLSWDVYTHINYAMTYMNYGINTVDPYLNAPSGKTIGYAPLFHFLLIFVAFITNSSLLSAA

SEQ ID NO: 56732 - protein, 35 aa, unidentified
  source 1..35: note = methanogen bacteria
ISPSHISQIFSGFNSILSDPMSLFMGQKAMGLERY

SEQ ID NO: 56733 - protein, 11 aa, unidentified
  source 1..11: note = methanogen bacteria
HWFGIPVYTFR

SEQ ID NO: 56734 - protein, 67 aa, unidentified
  source 1..67: note = methanogen bacteria
RYSTPTLMHSWRSKLNYVNSAEQVSYFIHHPMFAWKFISQIFTTDLAWMVYGIFNFFSAGSANHYAN

SEQ ID NO: 56735 - protein, 17 aa, unidentified
  source 1..17: note = methanogen bacteria
LTWAGVGYTGLGINTRY

SEQ ID NO: 56736 - protein, 17 aa, unidentified
  source 1..17: note = methanogen bacteria
TTASDRVVDNVLSGETA

SEQ ID NO: 56737 - protein, 67 aa, unidentified
  source 1..67: note = methanogen bacteria
YSEPSLMHSWRSKLNYMNPALQVEYLLNHPFAILNFLRMIFTFTLGITLNGLFNFFSAGSAYHYSDH

SEQ ID NO: 56738 - protein, 17 aa, unidentified
  source 1..17: note = methanogen bacteria
LTWADVGKTNIGVSARY

SEQ ID NO: 56739 - protein, 67 aa, unidentified; identical to SEQ ID NO: 56704
  source 1..67: note = methanogen bacteria

SEQ ID NO: 56740 - protein, 17 aa, unidentified
  source 1..17: note = methanogen bacteria
LTWASVGKLNLGLSTRY

SEQ ID NO: 56741 - protein, 41 aa, unidentified
  source 1..41: note = methanogen bacteria
KLGGIQNANMALTNMAPLYSKEAIAQGGLGWTAFPKFGSPF

SEQ ID NO: 56742 - protein, 34 aa, unidentified
  source 1..34: note = methanogen bacteria
NVYFYQKLGKTAVEVVGGNIDKIIPTFINMALPE

SEQ ID NO: 56743 - protein, 30 aa, unidentified
  source 1..30: note = methanogen bacteria
YKKTAAALGICQFLTGNPVLITTMPWPVVD

SEQ ID NO: 56744 - protein, 10 aa, unidentified
  source 1..10: note = methanogen bacteria
YRTIAHPTYE

SEQ ID NO: 56745 - protein, 67 aa, unidentified
  source 1..67: note = methanogen bacteria
RYSEPALMHSWRARLRYINPTGQMNYIMSHPAFIGKFFGQIFTYNLAKILYGTFNFFGAAQRSHYSD

SEQ ID NO: 56746 - protein, 17 aa, unidentified
  source 1..17: note = methanogen bacteria
LTWASVGQLNLGLSARY

SEQ ID NO: 56747 - protein, 67 aa, unidentified
  source 1..67: note = methanogen bacteria
RYSEPTLMHSWRARLRYLDPAGQRKYIMSNPGFLGNFFGQIFTYNIAKILYGTFNFFGGAQRTHYAD

SEQ ID NO: 56748 - protein, 16 aa, unidentified
  source 1..16: note = methanogen bacteria
TWASVGNLNLGLSARY

SEQ ID NO: 56749 - protein, 67 aa, unidentified
  source 1..67: note = methanogen bacteria
RYSAPALMHSWRSRLKYLDPPGQMNYIISHPSFMGNFFAQIFTHNIAKILYGTFNFFGAAQKIHYAD

SEQ ID NO: 56750 - protein, 17 aa, unidentified
  source 1..17: note = methanogen bacteria
LTWASVGKLNLGLSTRY

SEQ ID NO: 56751 - protein, 67 aa, unidentified
  source 1..67: note = methanogen bacteria
RYSAPTLMHSWRSRLRFTNSTAQMAYVSSHPAFSLDFVSQLFTYNLSHIAYGAFNFFGAAKKVHYTD

SEQ ID NO: 56752 - protein, 17 aa, unidentified
  source 1..17: note = methanogen bacteria
LTWASVGYLNLGISTRY

SEQ ID NO: 56753 - protein, 67 aa, unidentified
  source 1..67: note = methanogen bacteria
RYSQPALMHSWRSRLKYLDPTGQMNYVMTHPIFIGRFFTQIFTYNIAKILYGTFNFFGAAQKTHYSD

SEQ ID NO: 56754 - protein, 17 aa, unidentified
  source 1..17: note = methanogen bacteria
LTWASVGKLNLGLSTRY

SEQ ID NO: 56755 - protein, 67 aa, unidentified
  source 1..67: note = methanogen bacteria
KYSTPTLMHSWRSRLRFINSTAQMDYITSHPMFSLKFIYQLFTNSLSHVIYGVFNFFGAAQKVHYSD

SEQ ID NO: 56756 - protein, 17 aa, unidentified
  source 1..17: note = methanogen bacteria
LTWASVGYLNLGLSTRY

SEQ ID NO: 56757 - protein, 67 aa, unidentified
  source 1..67: note = methanogen bacteria
YSEPALMHSWRSKLNYMNPELQAKYLINNPMEILRFLRLIFTYTVSITLNGLFNFFGAGSANHYSDH

SEQ ID NO: 56758 - protein, 17 aa, unidentified
  source 1..17: note = methanogen bacteria
LTWADVGGTNIGVSARY

SEQ ID NO: 56759 - protein, 68 aa, unidentified
  source 1..68: note = methanogen bacteria
RYSEPTLMHSWRARLKYIDPTGQMNYIMSHPTFIGKFFGQIFTYNLAKTMYGTFNFFGAAKIPHYADS

SEQ ID NO: 56760 - protein, 17 aa, unidentified
  source 1..17: note = methanogen bacteria
LTWASVGKLNLGLSTRY

SEQ ID NO: 56761 - protein, 67 aa, unidentified
  source 1..67: note = methanogen bacteria
YSEPALMHSWRSKLNYMDPGMQVQYLLNHPFAILRFLRLIFTYTVGITLNGLFNFFAAGSANHYSDH

SEQ ID NO: 56762 - protein, 16 aa, unidentified
  source 1..16: note = methanogen bacteria
TWASVGDTNIGVSARY

SEQ ID NO: 56763 - protein, 67 aa, unidentified
  source 1..67: note = methanogen bacteria
RYSQPALMHSWRARLKYLDPTGQMNYVLSHPMFMVDFFSQIFTYNIAKIFYGTFNFFGAAQKTHYSD

SEQ ID NO: 56764 - protein, 17 aa, unidentified
  source 1..17: note = methanogen bacteria
LTWASVGKLNLGLSTRY

SEQ ID NO: 56765 - protein, 16 aa, unidentified
  source 1..16: note = methanogen bacteria
DSSFVSTFLGSYAQAA

SEQ ID NO: 56766 - protein, 20 aa, unidentified
  source 1..20: note = methanogen bacteria
DTLIGLLYPPQGALPYVNAY

SEQ ID NO: 56767 - protein, 21 aa, unidentified
  source 1..21: note = methanogen bacteria
DGLLIFFKLHQMPNDAMVENA

SEQ ID NO: 56768 - protein, 68 aa, unidentified
  source 1..68: note = methanogen bacteria
RYSQPALMHSWRSRLKYLDPAGQMNYILSHPNFIGNFFSQIFTYNIAKILYGTFNFFGAAQKTHYSDD

SEQ ID NO: 56769 - protein, 17 aa, unidentified
  source 1..17: note = methanogen bacteria
LTWASVGRLNLGLSTRY

SEQ ID NO: 56770 - protein, 67 aa, unidentified
  source 1..67: note = methanogen bacteria
YSEPALMHSWRSKLNYMNPSLQAQYLINNPMAILHFLRMIFTHTLGITLNGLFNFFAAGSANHYSDQ

SEQ ID NO: 56771 - protein, 17 aa, unidentified
  source 1..17: note = methanogen bacteria
LTWADVGKTNIGVSARY

SEQ ID NO: 56772 - protein, 63 aa, unidentified
  source 1..63: note = methanogen bacteria
YSTPTLMHSWRSNLNYINSTQQIAFLKNNPLQILEFLKHTVTGGLSFIISQLFNFDYRNAESI

SEQ ID NO: 56773 - protein, 17 aa, unidentified
  source 1..17: note = methanogen bacteria
LTWAYVGNMYVDVHMRY

SEQ ID NO: 56774 - protein, 12 aa, unidentified
  source 1..12: note = methanogen bacteria
TIFEDNKADDYA

SEQ ID NO: 56775 - protein, 64 aa, unidentified
  source 1..64: note = methanogen bacteria
NKYSQFKNCVFKYNVAGDDNGGAINSKAKLYLKNCTFDSNKAKVDGGAICCDEDVQAYGCLFKN

SEQ ID NO: 56776 - protein, 29 aa, unidentified
  source 1..29: note = methanogen bacteria
KKDVYVEACDFIENSAEDYGGAIYAKNIY

SEQ ID NO: 56777 - protein, 45 aa, unidentified
  source 1..45: note = methanogen bacteria
ALYAEGDVDADNVTLEKNKAYEDGGAIFCKNAKLRNADLAYNRAE

SEQ ID NO: 56778 - protein, 22 aa, unidentified
  source 1..22: note = methanogen bacteria
IYENFAHDIGGAITCDNINFYH

SEQ ID NO: 56779 - protein, 39 aa, unidentified
  source 1..39: note = methanogen bacteria
FWESTTDRDGGMYSCPVYIGDIKYDGEFEVNASHANCYF

SEQ ID NO: 56780 - protein, 67 aa, unidentified
  source 1..67: note = methanogen bacteria
RYSTPALMHSWRSKLNYMNSSAQIDYMMHHPVFVKNFLTQIFTIDLGSMMYGVFNFFYAASAYHYSD

SEQ ID NO: 56781 - protein, 17 aa, unidentified
  source 1..17: note = methanogen bacteria
LTWASVGYTNLGINTRY

SEQ ID NO: 56782 - protein, 39 aa, unidentified
  source 1..39: note = methanogen bacteria
FPVGVKYGSGDSYLGMIGNAIAPIFTPLGFGTWQADGRN

SEQ ID NO: 56783 - protein, 67 aa, unidentified
  source 1..67: note = methanogen bacteria
SYSTPTLMHSWRSMYNYVNSTQQLNFLLTNHFFIFDFLHQIFTSELSFLANGLFNFYNGTPGIHYDD

SEQ ID NO: 56784 - protein, 17 aa, unidentified
  source 1..17: note = methanogen bacteria
LTWAYVGEINLGISIRY

SEQ ID NO: 56785 - protein, 32 aa, unidentified
  source 1..32: note = methanogen bacteria
LNIHFVDALFENMSAWTGSGMTFFVNVEVLPY

SEQ ID NO: 56786 - protein, 33 aa, unidentified
  source 1..33: note = methanogen bacteria
GLPVFDAVNLAFTSISTGGMSIKNLNVGFYQNN

SEQ ID NO: 56787 - protein, 35 aa, unidentified
  source 1..35: note = methanogen bacteria
NSGIVPMDILFHVVSAVTTTGSNISTAQTISTWHG

SEQ ID NO: 56788 - protein, 31 aa, unidentified
  source 1..31: note = methanogen bacteria
GLDPLNALFDVVSILSNNGLSTGIVWGGLPL

SEQ ID NO: 56789 - protein, 19 aa, unidentified
  source 1..19: note = methanogen bacteria
MQSISTDGNGIANLGVDLP

SEQ ID NO: 56790 - protein, 28 aa, unidentified
  source 1..28: note = methanogen bacteria
DDDYGASESSFNIHVHKIGTTITVRNTT

SEQ ID NO: 56791 - protein, 42 aa, unidentified
  source 1..42: note = methanogen bacteria
VYGGTFYAYLKDAYGNSMIGSDVFYTVNGVTYSITTKIYGVA

SEQ ID NO: 56792 - protein, 23 aa, unidentified
  source 1..23: note = methanogen bacteria
KTIDLKVLASTSIVIGNDILLTN

SEQ ID NO: 56793 - protein, 35 aa, unidentified
  source 1..35: note = methanogen bacteria
CLRIYLKSNQQNLISNKTVKITINNVTFIKQTNSE

SEQ ID NO: 56794 - protein, 21 aa, unidentified
  source 1..21: note = methanogen bacteria
TASKEVTGISGSPKNPLISSI

SEQ ID NO: 56795 - protein, 60 aa, unidentified
  source 1..60: note = methanogen bacteria
TKWLTVNYMYARFNNYDTSGLIVKLKYSLNAATKAKVNNFYNSMGTKWTRQNVNERIPQI

SEQ ID NO: 56796 - protein, 54 aa, unidentified
  source 1..54: note = methanogen bacteria
FYVDPGVFASCRSVHYDNSANAIEQLKFILSHKKDTLIELCHIFANINNDLSFT

SEQ ID NO: 56797 - protein, 18 aa, unidentified
  source 1..18: note = methanogen bacteria
LSWTPVGQLTPIGVQPRY

SEQ ID NO: 56798 - protein, 57 aa, unidentified
  source 1..57: note = methanogen bacteria
NFNQNLGIYCSDVYVYLLNAVYYTGHNIYSTTTIYLSPVICFLTSILMTLGIKDATS

SEQ ID NO: 56799 - protein, 63 aa, unidentified
  source 1..63: note = methanogen bacteria
VTSMGDGNFEPTTQISEGIGGEHGRTNDPAYSTDVGYYLSNFLNFISSSKVTFEGNTPALKDP

SEQ ID NO: 56800 - protein, 96 aa, unidentified
  source 1..96: note = methanogen bacteria
FCLAFEETNQYIAPQEISEYIIHEIPNYEKYEIGVYNIRPFYWYLGENVTGIENHNTAKIDASNVSYYISKAPLNGLNNYSEIKNIHNMYLYKKNV

SEQ ID NO: 56801 - protein, 67 aa, unidentified
  source 1..67: note = methanogen bacteria
YSEPALMHSWRSKLNYMDADRQLEYIMGHPWFIVHFFRLIFTFTLGLTVNGLFNFFAAGSPNHYMDH

SEQ ID NO: 56802 - protein, 17 aa, unidentified
  source 1..17: note = methanogen bacteria
LTWADVGKYNIGVSTRY

SEQ ID NO: 56803 - protein, 42 aa, unidentified
  source 1..42: note = methanogen bacteria
YSLGGVTTAHQSLTNIAYLVPESARAFGCNGWTEFPTFGSQL

SEQ ID NO: 56804 - protein, 35 aa, unidentified
  source 1..35: note = methanogen bacteria
SNVYFLRETGQIAVQVAQNNIDSIIPIFINMALPE

SEQ ID NO: 56805 - protein, 28 aa, unidentified
  source 1..28: note = methanogen bacteria
AKTAGGLGLVTLLTGQTSILTQPWSIMD

SEQ ID NO: 56806 - protein, 14 aa, unidentified
  source 1..14: note = methanogen bacteria
DYIAINIFKKPLAA

SEQ ID NO: 56807 - protein, 11 aa, unidentified
  source 1..11: note = methanogen bacteria
KLMATEFTGYY

SEQ ID NO: 56808 - protein, 13 aa, unidentified
  source 1..13: note = methanogen bacteria
LELLFSTEYVAAA

SEQ ID NO: 56809 - protein, 30 aa, unidentified
  source 1..30: note = methanogen bacteria
FTKGWGANPDVFFSSNVLQASDSIAGIFTF

SEQ ID NO: 56810 - protein, 24 aa, unidentified
  source 1..24: note = methanogen bacteria
LTLPGASIGYTQIYTPDWSALLNF

SEQ ID NO: 56811 - protein, 36 aa, unidentified
  source 1..36: note = methanogen bacteria
GFMTFTTGIPFNDLVTEGTGLAFVVFPQVFNQMGAV

SEQ ID NO: 56812 - protein, 41 aa, unidentified
  source 1..41: note = methanogen bacteria
ILGGVDHANTALTNMSSLYPKEALAQGGTGFTSFPTLFSPF

SEQ ID NO: 56813 - protein, 35 aa, unidentified
  source 1..35: note = methanogen bacteria
SNVYFYQKLGKTAVEVVGGNIDKIIPTFIDMALPE

SEQ ID NO: 56814 - protein, 30 aa, unidentified
  source 1..30: note = methanogen bacteria
YDKSATTLGICKFIFAKPVLIQTMPWPYID

SEQ ID NO: 56815 - protein, 67 aa, unidentified
  source 1..67: note = methanogen bacteria
YSEPALMHSWRSKLNYMDSHRQLEYVLNHPWFIVRFFRSIFTYTIGITINGVFNFFSAANGQHYADS

SEQ ID NO: 56816 - protein, 18 aa, unidentified
  source 1..18: note = methanogen bacteria
LLTWADVGQLNLGISTRY

SEQ ID NO: 56817 - protein, 31 aa, unidentified
  source 1..31: note = methanogen bacteria
SFTKGWGANPDVFFSSNVLQASDSIAGIFTF

SEQ ID NO: 56818 - protein, 25 aa, unidentified
  source 1..25: note = methanogen bacteria
LTLPGASIGYTQIYTPDWSALLNFN

SEQ ID NO: 56819 - protein, 36 aa, unidentified
  source 1..36: note = methanogen bacteria
GFMTFTTGIPFNDLVTEGTGLAFVVFPQVFNQMGDA

SEQ ID NO: 56820 - protein, 14 aa, unidentified
  source 1..14: note = methanogen bacteria
PWLAYGYLNKPLAL

SEQ ID NO: 56821 - protein, 11 aa, unidentified
  source 1..11: note = methanogen bacteria
KFLTLDAVGFF

SEQ ID NO: 56822 - protein, 17 aa, unidentified
  source 1..17: note = methanogen bacteria
PTLRVLYFAKPEYVAGA

SEQ ID NO: 56823 - protein, 54 aa, unidentified
  source 1..54: note = methanogen bacteria
FNLNFGIYCSDVYVYLLNALYYTGTNIRATGTIYLSPMICYLTSIFFRFGFVDK

SEQ ID NO: 56824 - protein, 62 aa, unidentified
  source 1..62: note = methanogen bacteria
LIMGSGTFGAGDQISDGINGVQGTEIDPAYNTNVTYYVSNLLNFISNSHTVIDGNPVLENST

SEQ ID NO: 56825 - protein, 98 aa, unidentified
  source 1..98: note = methanogen bacteria
FTFTFDETAEYTTIEDVSDYIINTNPDYKNLSIGTYNVRAYNWWLGEDLLAIKSNDEPTIDASNATYYISDKVLENVTNYTEIKNINNVYIYKKKCLK

SEQ ID NO: 56826 - protein, 67 aa, unidentified
  source 1..67: note = methanogen bacteria
YSEPALMHSWRSKLNYMDASGQMEYLMSHPFAILTFFRLIFTYTLGITLTGVFNFFAAGSANHYADT

SEQ ID NO: 56827 - protein, 17 aa, unidentified
  source 1..17: note = methanogen bacteria
LTWADVGAFNLGISTRY

SEQ ID NO: 56828 - protein, 67 aa, unidentified
  source 1..67: note = methanogen bacteria
YSEPALMHSWRSKLNYMDPALQVKYLIDHPLAILKFLRMIFTYTLGITLNGLFNFFSAGSAYHYSDH

SEQ ID NO: 56829 - protein, 17 aa, unidentified
  source 1..17: note = methanogen bacteria
LTWADVGKTNIGVSARY

SEQ ID NO: 56830 - protein, 64 aa, unidentified
  source 1..64: note = methanogen bacteria
SNEFPLGWDIYTHINYALAYMNNGITSVDYLLNAPNGKVIGYPPLFHALLIIVSSITGSNLMNG

SEQ ID NO: 56831 - protein, 30 aa, unidentified
  source 1..30: note = methanogen bacteria
SPSHLSQLLNGIVSIINNPFDLFMGQVAMG

SEQ ID NO: 56832 - protein, 10 aa, unidentified
  source 1..10: note = methanogen bacteria
WFGIPVYTFR

SEQ ID NO: 56833 - protein, 56 aa, unidentified
  source 1..56: note = methanogen bacteria
NFNLEVGISCSDVYVYLLNALYYTGINHHSTNNIYLSPIICFLTSILFRFGLVDKL

SEQ ID NO: 56834 - protein, 60 aa, unidentified
  source 1..60: note = methanogen bacteria
GMGNGQFEAASQISNGIAGKGGAETDPAFNTEVGYYLFNMANFISNSHTVFEGNPVLENP

SEQ ID NO: 56835 - protein, 97 aa, unidentified
  source 1..97: note = methanogen bacteria
FTYTFEPTDKYNTTEEMSQYLKSVDPNYENVKIGVYNIRPFLWWIGDNVEGIPIVDQAAIDKSNMTYYISNAKMKNLTNYTEIKNINNLYLYNRTSY

SEQ ID NO: 56836 - protein, 33 aa, unidentified
  source 1..33: note = methanogen bacteria
YGFHPVDAFFEAISGYTTTGATIVPDLDELPSS

SEQ ID NO: 56837 - protein, 33 aa, unidentified
  source 1..33: note = methanogen bacteria
CSVELFDSVCISFSNVPTGGLLPRDDSMASYGM

SEQ ID NO: 56838 - protein, 39 aa, unidentified
  source 1..39: note = methanogen bacteria
EHSGDFTGEYLADTFWTSLYSVISSGTGTGFAIQDFVYP

SEQ ID NO: 56839 - protein, 43 aa, unidentified
  source 1..43: note = methanogen bacteria
LEPDVGRFTPDGVDELQTYFGIILAAIANAGIGPLASYDVLSI

SEQ ID NO: 56840 - protein, 55 aa, unidentified
  source 1..55: note = methanogen bacteria
NFNYSLGIDCSDVYVYLLNSLYYAGYDVNVTYNIFLSPVICILTSILFRFGLVDK

SEQ ID NO: 56841 - protein, 59 aa, unidentified
  source 1..59: note = methanogen bacteria
IGHGSFEAGAQMARGIQGTLGSQNDPAYNPDFSYYLMNMLNFVSNSHTYFDGNPVLDSA

SEQ ID NO: 56842 - protein, 97 aa, unidentified
  source 1..97: note = methanogen bacteria
FTFTFEPTTQYITTEEVSNYIIENNPDYENIKIGVYNIRPFSWWLGANATGIPVNNQTAIDSSNVTYYISNMKLDNLTNYSEIKNINEIHLYEKINV

SEQ ID NO: 56843 - protein, 40 aa, unidentified
  source 1..40: note = methanogen bacteria
PGVQYFGGHNPSLIGSMLPASLNGTLASMYNTGIVYVFSD

SEQ ID NO: 56844 - protein, 24 aa, unidentified
  source 1..24: note = methanogen bacteria
TIGSLNITDIVYVLNHNLVDPLSP

SEQ ID NO: 56845 - protein, 55 aa, unidentified
  source 1..55: note = methanogen bacteria
FNYNFGIYCSDVYVYLLNAIYYSTGENIRSTGTIYLSPLVCFLTSILFRLGLVDK

SEQ ID NO: 56846 - protein, 59 aa, unidentified
  source 1..59: note = methanogen bacteria
MGSGQFGASGEISGGISGTLGSQKDPAYNPDVAYYVSNFANFISNTNTTMEGNPTLENA

SEQ ID NO: 56847 - protein, 96 aa, unidentified
  source 1..96: note = methanogen bacteria
FTMTFEKTHEFMAIEDVSDYIKDNNPDYENMSIGVFNVRAFNWWLGENLLPISSTDEALIDSCNATYYISNRVLDNVTNYTEIKEIDNIHIYEKIV

SEQ ID NO: 56848 - protein, 59 aa, unidentified
  source 1..59: note = methanogen bacteria
YSNKVIANSTNRRYYLANEATHKSYILHHFTSYLQALFDPSLYSYLIKDIFFFSNPGYF

SEQ ID NO: 56849 - protein, 18 aa, unidentified
  source 1..18: note = methanogen bacteria
YLSYTKRFDIILGVQGRY

SEQ ID NO: 56850 - protein, 13 aa, unidentified
  source 1..13: note = methanogen bacteria
ILHHLFPSMKILI

SEQ ID NO: 56851 - protein, 57 aa, unidentified
  source 1..57: note = methanogen bacteria
NFNNNIGIYCSDVYVYLLNALYYTGTNIRSTATIHLSPLICFLTSIFFDLGFVDKQA

SEQ ID NO: 56852 - protein, 60 aa, unidentified
  source 1..60: note = methanogen bacteria
MGNGHFGAGSQISDGISGAQGAEIDPAYNTDVSYYAANFLNFISNSHTVIDGNPILENST

SEQ ID NO: 56853 - protein, 96 aa, unidentified
  source 1..96: note = methanogen bacteria
FTFTFEPTDEFKTIEEVSDYIITTHPDYENISIGVYNVRAYNWWLGGNLIPIASDDEDLIDSSNVTYYISNEILNDVTNYSDIKNINNVYIYEKSV

SEQ ID NO: 56854 - protein, 57 aa, unidentified
  source 1..57: note = methanogen bacteria
NFNDNLGTYCSDVYVYLLNALYYTGTNIRATGTIYLSPLICRLTSIFFYFGFVDKQA

SEQ ID NO: 56855 - protein, 62 aa, unidentified
  source 1..62: note = methanogen bacteria
MGMGNGNFAAGNQISSGVSGAQGSQTDPAYNTDVSYYLTNFINFISNSHTTIDGNPVLSNPT

SEQ ID NO: 56856 - protein, 96 aa, unidentified
  source 1..96: note = methanogen bacteria
FTYTFEETDKFKTIEDVSDYIISNNPDYENISIGVYNVRAYNWWLGGNLVPIKSHEAGLIDSSNVTYYISDRTLSNITNYTEIKNINDVHIYEKSV

SEQ ID NO: 56857 - protein, 14 aa, unidentified
  source 1..14: note = methanogen bacteria
ENILFSTLKYIQGD

SEQ ID NO: 56858 - protein, 16 aa, unidentified
  source 1..16: note = methanogen bacteria
FGQSPIFPFTSLNLPL

SEQ ID NO: 56859 - protein, 20 aa, unidentified
  source 1..20: note = methanogen bacteria
PNVLGGGYSMMHLIEYALPP

SEQ ID NO: 56860 - protein, 56 aa, unidentified
  source 1..56: note = methanogen bacteria
IFNSNFGIYCSDVYVYLLNALYYTGVNIRSTGTIYLSPLICFLTSIFFYAGFIDKL

SEQ ID NO: 56861 - protein, 60 aa, unidentified
  source 1..60: note = methanogen bacteria
MGSGHFAASGQISNGISGAQGSNVDPAYNTDVSYYVSNFLNFISNSHTVVNGNPILENPT

SEQ ID NO: 56862 - protein, 96 aa, unidentified
  source 1..96: note = methanogen bacteria
FTFTFEPTNEFKAIEEVSDYIIDNNPDYENLPIGVYNVRAYNWWLGSHLLPISSSDQDIIDSSNATYYISDRVLNNVTNYTEIKNIDHIYIYEKSV

SEQ ID NO: 56863 - protein, 14 aa, unidentified
  source 1..14: note = methanogen bacteria
ENILFSTLKYIQGD

SEQ ID NO: 56864 - protein, 16 aa, unidentified
  source 1..16: note = methanogen bacteria
FGQSPIFPFTSLNLPL

SEQ ID NO: 56865 - protein, 20 aa, unidentified
  source 1..20: note = methanogen bacteria
PNVLGGGHSMMHLIEYTLPP

SEQ ID NO: 56866 - protein, 15 aa, unidentified
  source 1..15: note = methanogen bacteria
APIITAYFQKPEALL

SEQ ID NO: 56867 - protein, 12 aa, unidentified
  source 1..12: note = methanogen bacteria
GGFLAASAIGYF

SEQ ID NO: 56868 - protein, 17 aa, unidentified
  source 1..17: note = methanogen bacteria
EIMGLVYFTNSAYMNGA

SEQ ID NO: 56869 - protein, 56 aa, unidentified
  source 1..56: note = methanogen bacteria
MFNLNLGIYCSDVYVYLLNALYYTGTNIRATGTIYLSPLICYLTSIFFRFGFVDKL

SEQ ID NO: 56870 - protein, 63 aa, unidentified
  source 1..63: note = methanogen bacteria
ILIMGSGTFGAGDQISNGISGVQGAEIDPAYNTDTSYYVSNFLNFISNSHTVIDGNPILENST

SEQ ID NO: 56871 - protein, 96 aa, unidentified
  source 1..96: note = methanogen bacteria
FTFTFDETSEYNTIEDVSDYIIDTNPDYKNLSIGAYNVRAYNWWLGENLLAIKSSDEATIDASNATYYISDKVLENVTNYTEIKNINNVYIYEKSV

SEQ ID NO: 56872 - protein, 56 aa, unidentified
  source 1..56: note = methanogen bacteria
FNNNLGIYCSDVYVYLLNALYYTGTNIRSTGTIYLSPLICYLTSIFFRLGFVDLQA

SEQ ID NO: 56873 - protein, 61 aa, unidentified
  source 1..61: note = methanogen bacteria
TLGEGTFGAGDQISSGVSGTQGAQTDPAYNTDVSYYVTNFINFISNSHTVIDGNPVLDNPT

SEQ ID NO: 56874 - protein, 97 aa, unidentified
  source 1..97: note = methanogen bacteria
TFTYTFEETGEFRAIKDVSDYIIANNPDYKNISIGTYNVRAYNWWLGENALPIKSYDTETIDASNVTYYISNRIQNNLTNYTEVKNINNLYIYKKSV

SEQ ID NO: 56875 - protein, 10 aa, unidentified
  source 1..10: note = methanogen bacteria
GNLLHEGVMW

SEQ ID NO: 56876 - protein, 57 aa, unidentified
  source 1..57: note = methanogen bacteria
NFNNSIGVYCSDVYVYLLNALYYTGINLRSTSTIYLSPVICRLTSIFFYFGFVNKQA

SEQ ID NO: 56877 - protein, 60 aa, unidentified
  source 1..60: note = methanogen bacteria
MGNGQFDAGSQISSGMIGAQGTQSDPAYTEDTGYYIANLPNFISNSHTVIDGNPTLDNPT

SEQ ID NO: 56878 - protein, 96 aa, unidentified
  source 1..96: note = methanogen bacteria
AFTYTFEETNKFKAIEEIADYIIVNHPDYENIKIGVYNVRAYNWWLGENLLPIKSSDTGIIDSSNATYYISNKDINLTNYTMIKNIDTIYLYEKSV

SEQ ID NO: 56879 - protein, 14 aa, unidentified
  source 1..14: note = methanogen bacteria
ESIVFNVIFIVKTN

SEQ ID NO: 56880 - protein, 16 aa, unidentified
  source 1..16: note = methanogen bacteria
FGQSTVFKIASPNIPL

SEQ ID NO: 56881 - protein, 20 aa, unidentified
  source 1..20: note = methanogen bacteria
PQILEGGYSMVNSLNYLIPG

SEQ ID NO: 56882 - protein, 10 aa, unidentified
  source 1..10: note = methanogen bacteria
IPVFGLNPTI

SEQ ID NO: 56883 - protein, 14 aa, unidentified
  source 1..14: note = methanogen bacteria
ENILFSTIEYVKGD

SEQ ID NO: 56884 - protein, 16 aa, unidentified
  source 1..16: note = methanogen bacteria
FGQSPIFPFTSLNLPL

SEQ ID NO: 56885 - protein, 20 aa, unidentified
  source 1..20: note = methanogen bacteria
PNVLGGGYSMMSLIEISLPP

SEQ ID NO: 56886 - protein, 10 aa, unidentified
  source 1..10: note = methanogen bacteria
PIFGFDPLIA

SEQ ID NO: 56887 - protein, 14 aa, unidentified
  source 1..14: note = methanogen bacteria
EDILRHYLTIINGN

SEQ ID NO: 56888 - protein, 16 aa, unidentified
  source 1..16: note = methanogen bacteria
FGQSTALTFPISNIPL

SEQ ID NO: 56889 - protein, 20 aa, unidentified
  source 1..20: note = methanogen bacteria
PEISCGGHYMLGLFDVAVPS

SEQ ID NO: 56890 - protein, 11 aa, unidentified
  source 1..11: note = methanogen bacteria
IPICGLDNVLI

SEQ ID NO: 56891 - protein, 80 aa, unidentified
  source 1..80: note = methanogen bacteria
MTNVDSWGWYRSGENIISGDGFYARSGYSYGPAFGYLITFSLIPLTYLLPIGTFSQQSDAMIALQPYFDFSPALQTIEFL

SEQ ID NO: 56892 - protein, 27 aa, unidentified
  source 1..27: note = methanogen bacteria
QLMDGTFMDTWQVVFGRVDHAGNLVGR

SEQ ID NO: 56893 - protein, 14 aa, unidentified
  source 1..14: note = methanogen bacteria
SGGITNMFSDLFHV

SEQ ID NO: 56894 - protein, 37 aa, unidentified
  source 1..37: note = methanogen bacteria
AALLVSIAQYTDLISMDLVIDLTKMYVTGGVVIGDYS

SEQ ID NO: 56895 - protein, 10 aa, unidentified
  source 1..10: note = methanogen bacteria
IILGLEESDK

SEQ ID NO: 56896 - protein, 35 aa, unidentified
  source 1..35: note = methanogen bacteria
FTMGGWGEVTSNWDEVSIEVAHFTDLFYDGGAPLT

SEQ ID NO: 56897 - protein, 32 aa, unidentified
  source 1..32: note = methanogen bacteria
RAWAHSQGIETDFTGTAKETIFIAMAGAMFAT

SEQ ID NO: 56898 - protein, 18 aa, unidentified
  source 1..18: note = methanogen bacteria
SGGIIGAGEYCLYNTQLY

SEQ ID NO: 56899 - protein, 15 aa, unidentified
  source 1..15: note = methanogen bacteria
SEDVLRSYLAIINSN

SEQ ID NO: 56900 - protein, 16 aa, unidentified
  source 1..16: note = methanogen bacteria
FGQSTALTFPISNIPL

SEQ ID NO: 56901 - protein, 20 aa, unidentified
  source 1..20: note = methanogen bacteria
PKISCGGHYMMGLFDVAIPS

SEQ ID NO: 56902 - protein, 10 aa, unidentified
  source 1..10: note = methanogen bacteria
IPICGLDNAL

SEQ ID NO: 56903 - protein, 15 aa, unidentified
  source 1..15: note = methanogen bacteria
PWLANDIFHNPNALL

SEQ ID NO: 56904 - protein, 12 aa, unidentified
  source 1..12: note = methanogen bacteria
GVFLSDSLIGYY

SEQ ID NO: 56905 - protein, 16 aa, unidentified
  source 1..16: note = methanogen bacteria
IMRIVYFTNPAYTSGA

SEQ ID NO: 56906 - protein, 11 aa, unidentified
  source 1..11: note = methanogen bacteria
TIILGLSENDK

SEQ ID NO: 56907 - protein, 36 aa, unidentified
  source 1..36: note = methanogen bacteria
VTLGGWGEVTAIWNSPLSGLPAHFTDIMYDGGEKIT

SEQ ID NO: 56908 - protein, 31 aa, unidentified
  source 1..31: note = methanogen bacteria
RAWAIHSGSVASLIGNEETIFIAMAGALFTT

SEQ ID NO: 56909 - protein, 18 aa, unidentified
  source 1..18: note = methanogen bacteria
GGGIIGGGSYCIYDTGLY

SEQ ID NO: 56910 - protein, 15 aa, unidentified
  source 1..15: note = methanogen bacteria
SEDILRGYLSIINSN

SEQ ID NO: 56911 - protein, 16 aa, unidentified
  source 1..16: note = methanogen bacteria
FGQSTILSFPVANIPL

SEQ ID NO: 56912 - protein, 20 aa, unidentified
  source 1..20: note = methanogen bacteria
PEISDGGHFMMGMLDVAVPS

SEQ ID NO: 56913 - protein, 11 aa, unidentified
  source 1..11: note = methanogen bacteria
IPICGLESVLV

SEQ ID NO: 56914 - protein, 14 aa, unidentified
  source 1..14: note = methanogen bacteria
PWLAYSYLGKPVAL

SEQ ID NO: 56915 - protein, 12 aa, unidentified
  source 1..12: note = methanogen bacteria
GKFLALDAIGFY

SEQ ID NO: 56916 - protein, 18 aa, unidentified
  source 1..18: note = methanogen bacteria
PILRVFYFTDPAYVAGAS

SEQ ID NO: 56917 - protein, 57 aa, unidentified
  source 1..57: note = methanogen bacteria
NFNNSIGIYCSDVYVYLLNALYYTGINLRSTSTIYLSPIICRLTSIFFYFGFVDKQA

SEQ ID NO: 56918 - protein, 60 aa, unidentified
  source 1..60: note = methanogen bacteria
MGHGQFGAGTQISSGMIGAQGSQADPAFNEDVSYYVANFINFISNSHTVIDGNPILDNPT

SEQ ID NO: 56919 - protein, 95 aa, unidentified
  source 1..95: note = methanogen bacteria
FTYTFEETNKFNAIKDMADYVIDNNPDYENITIGVFNVRAYNWWLGENLLPIRSTDISTIDSSNVTYYISDNALNLTNYTEIKQIDSIHLYEKSV

SEQ ID NO: 56920 - protein, 13 aa, unidentified
  source 1..13: note = methanogen bacteria
LMANVFLKKPETL

SEQ ID NO: 56921 - protein, 11 aa, unidentified
  source 1..11: note = methanogen bacteria
KFLTLESVGFF

SEQ ID NO: 56922 - protein, 17 aa, unidentified
  source 1..17: note = methanogen bacteria
PTLQVFYFKNPSYVNGA

SEQ ID NO: 56923 - protein, 98 aa, unidentified
  source 1..98: note = methanogen bacteria
NPICNVSDEIEHLTRADITSHGILMPDYVNGSFKVSSFVPDFFEKSRALTVLQVSGDTAKINNSMSTYHSAFQQNPFYPYIPQTMGILIAKFLDLNVI

SEQ ID NO: 56924 - protein, 72 aa, unidentified
  source 1..72: note = methanogen bacteria
IAMPSYTHSWRAEYYKNHIINPPQQTNYILHHPVDFAISVLHIPNTLLNSSILSEFNTVHSVIPLQTKVYTS

SEQ ID NO: 56925 - protein, 18 aa, unidentified
  source 1..18: note = methanogen bacteria
ISWGMVGHLEDMALHARY

SEQ ID NO: 56926 - protein, 56 aa, unidentified
  source 1..56: note = methanogen bacteria
FNLNLGIQCSDVYLYLVNALYYNGITIPHIENIVLSPTICYLTSLLFKLGLTDTSS

SEQ ID NO: 56927 - protein, 63 aa, unidentified
  source 1..63: note = methanogen bacteria
ITNLSGGDFLPGSQINSGISGSQGKETDPAFNQDIGYYLNNLPNFISNSHTYFGANPVLDNPT

SEQ ID NO: 56928 - protein, 95 aa, unidentified
  source 1..95: note = methanogen bacteria
FTLTIDETYTFKQTEDMSNYIIENNPDYKNIPIATYNMRPYMWWLGPQISGIAHTETQRIDESNFTYYISSNPLNLTNYTEVKNIGTLYLYKKNV

SEQ ID NO: 56929 - protein, 14 aa, unidentified
  source 1..14: note = methanogen bacteria
PVLAYKYLGKPLAL

SEQ ID NO: 56930 - protein, 12 aa, unidentified
  source 1..12: note = methanogen bacteria
GKFLTFADVGFF

SEQ ID NO: 56931 - protein, 17 aa, unidentified
  source 1..17: note = methanogen bacteria
PTLSLLYFKNPAYVAGA

SEQ ID NO: 56932 - protein, 13 aa, unidentified
  source 1..13: note = methanogen bacteria
LLANNFLHKPLAL

SEQ ID NO: 56933 - protein, 11 aa, unidentified
  source 1..11: note = methanogen bacteria
KFLTLDAVGFF

SEQ ID NO: 56934 - protein, 17 aa, unidentified
  source 1..17: note = methanogen bacteria
PTLRVLYFAKPEYVAGA

SEQ ID NO: 56935 - protein, 13 aa, unidentified
  source 1..13: note = methanogen bacteria
LLANNFMGKPEVM

SEQ ID NO: 56936 - protein, 12 aa, unidentified
  source 1..12: note = methanogen bacteria
GRFLTLESIGFF

SEQ ID NO: 56937 - protein, 16 aa, unidentified
  source 1..16: note = methanogen bacteria
ILRLLYFKIPAYAAGA

SEQ ID NO: 56938 - protein, 14 aa, unidentified
  source 1..14: note = methanogen bacteria
DHSLGIPLTDGTTI

SEQ ID NO: 56939 - protein, 31 aa, unidentified
  source 1..31: note = methanogen bacteria
LTVGGGELSGFSIDNIVDHLTPDGWDWGVSD

SEQ ID NO: 56940 - protein, 27 aa, unidentified
  source 1..27: note = methanogen bacteria
YGMMSPEQIDAWGVSTLYPIAEYDFGS

SEQ ID NO: 56941 - protein, 56 aa, unidentified
  source 1..56: note = methanogen bacteria
FNDHLGIYCSDVYVYLLNALYYAGTNIYSTKSIYLSPVVCFLTSLIFDLGYVDKTA

SEQ ID NO: 56942 - protein, 62 aa, unidentified
  source 1..62: note = methanogen bacteria
TSMGDGQLVFDGLLTSGVEGNLGSTHDNAYNPDLGYYLINMGNFISSSNTTFVANTPSLNQP

SEQ ID NO: 56943 - protein, 97 aa, unidentified
  source 1..97: note = methanogen bacteria
FTYTFDDTNEFNAPEKMTDYIKENIDNWSEIKIGNYNIRPYYWYLGMNSPGIESYNTQKIIDSNVTYYISDIEQKNLTNYTEIKQIENLYLYKKIRE

SEQ ID NO: 56944 - protein, 14 aa, unidentified
  source 1..14: note = methanogen bacteria
LLANNFMGKPEVQV

SEQ ID NO: 56945 - protein, 12 aa, unidentified
  source 1..12: note = methanogen bacteria
GRFLSLESIGFF

SEQ ID NO: 56946 - protein, 16 aa, unidentified
  source 1..16: note = methanogen bacteria
ILRLLYFQIPAYAAGA

SEQ ID NO: 56947 - protein, 14 aa, unidentified
  source 1..14: note = methanogen bacteria
PIITNYYHKPEALL

SEQ ID NO: 56948 - protein, 17 aa, unidentified
  source 1..17: note = methanogen bacteria
GVMGLVYFTNAAYMNGA

SEQ ID NO: 56949 - protein, 55 aa, unidentified
  source 1..55: note = methanogen bacteria
FNNNLGIYCSDVYVYLLNALYYAGTNIHSTKSIYLSPVVCFLTSLIFELGYVDKV

SEQ ID NO: 56950 - protein, 64 aa, unidentified
  source 1..64: note = methanogen bacteria
VSSMGESYLGFDGMLVGGAEGNLGSTHDNSYNPDIGYYLLNMGNFISSSNTTFVVKTPALNNPT

SEQ ID NO: 56951 - protein, 96 aa, unidentified
  source 1..96: note = methanogen bacteria
FTLTFEETNEFNAPEKMTDYIKANIENWSDIHIGNYNIRPYYWYLGLNTPGIESSNAQKIIDSDVTYYISDQKEKNLTGFAEIKEIDGLYLYKRNA

SEQ ID NO: 56952 - protein, 15 aa, unidentified
  source 1..15: note = methanogen bacteria
PWLVDNYLHKPIALI

SEQ ID NO: 56953 - protein, 12 aa, unidentified
  source 1..12: note = methanogen bacteria
GKFLSLDSIGFF

SEQ ID NO: 56954 - protein, 17 aa, unidentified
  source 1..17: note = methanogen bacteria
PTLRVFYFTNSAYVAGA

SEQ ID NO: 56955 - protein, 15 aa, unidentified
  source 1..15: note = methanogen bacteria
PWLTYSYLGKPEALV

SEQ ID NO: 56956 - protein, 11 aa, unidentified
  source 1..11: note = methanogen bacteria
KFLTLDAVGFF

SEQ ID NO: 56957 - protein, 17 aa, unidentified
  source 1..17: note = methanogen bacteria
PTLRVLYFAKPEYVAGA

SEQ ID NO: 56958 - protein, 13 aa, unidentified
  source 1..13: note = methanogen bacteria
LQPIKQHFGESEF

SEQ ID NO: 56959 - protein, 10 aa, unidentified
  source 1..10: note = methanogen bacteria
YYIAEMDQPY

SEQ ID NO: 56960 - protein, 11 aa, unidentified
  source 1..11: note = methanogen bacteria
SRMLGPEGYGL

SEQ ID NO: 56961 - protein, 14 aa, unidentified
  source 1..14: note = methanogen bacteria
DFIANAIFHKPLVV

SEQ ID NO: 56962 - protein, 12 aa, unidentified
  source 1..12: note = methanogen bacteria
GVFMLSRDVGFY

SEQ ID NO: 56963 - protein, 13 aa, unidentified
  source 1..13: note = methanogen bacteria
IQLLFGEVYTPGS

SEQ ID NO: 56964 - protein, 14 aa, unidentified
  source 1..14: note = methanogen bacteria
EDILRGYLLIINGN

SEQ ID NO: 56965 - protein, 16 aa, unidentified
  source 1..16: note = methanogen bacteria
FGQSTVLSFPVSNIPL

SEQ ID NO: 56966 - protein, 20 aa, unidentified
  source 1..20: note = methanogen bacteria
PEISCGGHYMMGMLDVAVPS

SEQ ID NO: 56967 - protein, 10 aa, unidentified
  source 1..10: note = methanogen bacteria
IPICGLENAL

SEQ ID NO: 56968 - protein, 15 aa, unidentified
  source 1..15: note = methanogen bacteria
SESVLRDYLGIIHGN

SEQ ID NO: 56969 - protein, 17 aa, unidentified
  source 1..17: note = methanogen bacteria
FGQSTILNFPVLTIPLP

SEQ ID NO: 56970 - protein, 20 aa, unidentified
  source 1..20: note = methanogen bacteria
PEISDGGHFMMDILDIAVPS

SEQ ID NO: 56971 - protein, 11 aa, unidentified
  source 1..11: note = methanogen bacteria
VPAFGWQHDVI

SEQ ID NO: 56972 - protein, 14 aa, unidentified
  source 1..14: note = methanogen bacteria
EHILRNYLNIIHGN

SEQ ID NO: 56973 - protein, 16 aa, unidentified
  source 1..16: note = methanogen bacteria
FGQSTILNFPVLNIPL

SEQ ID NO: 56974 - protein, 20 aa, unidentified
  source 1..20: note = methanogen bacteria
PEISDGGHFMMDMLGVAIPS

SEQ ID NO: 56975 - protein, 10 aa, unidentified
  source 1..10: note = methanogen bacteria
VPAFGWQHEL

SEQ ID NO: 56976 - protein, 13 aa, unidentified
  source 1..13: note = methanogen bacteria
LMANVFLKKPETL

SEQ ID NO: 56977 - protein, 11 aa, unidentified
  source 1..11: note = methanogen bacteria
KFLTLESVGFF

SEQ ID NO: 56978 - protein, 17 aa, unidentified
  source 1..17: note = methanogen bacteria
PTLQVFYFKNPSYVNGA

SEQ ID NO: 56979 - protein, 14 aa, unidentified
  source 1..14: note = methanogen bacteria
EHILRNYLNVIHGN

SEQ ID NO: 56980 - protein, 16 aa, unidentified
  source 1..16: note = methanogen bacteria
FGQSTILNFPVLNIPL

SEQ ID NO: 56981 - protein, 20 aa, unidentified
  source 1..20: note = methanogen bacteria
PEISDGGHFMMDMLGVAIPS

SEQ ID NO: 56982 - protein, 15 aa, unidentified
  source 1..15: note = methanogen bacteria
SEHVLRDYLSIINGN

SEQ ID NO: 56983 - protein, 16 aa, unidentified
  source 1..16: note = methanogen bacteria
FGQSTILNFPVLNIPL

SEQ ID NO: 56984 - protein, 20 aa, unidentified
  source 1..20: note = methanogen bacteria
PEISDGGHFMMDMLDIAIPS

SEQ ID NO: 56985 - protein, 10 aa, unidentified
  source 1..10: note = methanogen bacteria
VPTFGWQHDL

SEQ ID NO: 56986 - protein, 55 aa, unidentified
  source 1..55: note = methanogen bacteria
FNANLGIYCSDVYVYLLNALYYSGTNIHSTRSIYLSPVVCYLTSLLFDLGYVDKV

SEQ ID NO: 56987 - protein, 62 aa, unidentified
  source 1..62: note = methanogen bacteria
TYSMGEGNLVFDKLIEGGVEGNLGSSNDNAYNPDFGYYLVNMGNFISSSNTTFMGKTPYLGN

SEQ ID NO: 56988 - protein, 96 aa, unidentified
  source 1..96: note = methanogen bacteria
FTLTFEDTNEFSAPEEMSDYIKANIENWSEIKIGNYNIRPYYWYLGLNSPGIESSHPEKIIENNVSYYISNVKQNNLTNYTEIKQIDNLYLYKKNV

SEQ ID NO: 56989 - protein, 14 aa, unidentified
  source 1..14: note = methanogen bacteria
EMKVGRLEELEPYK

SEQ ID NO: 56990 - protein, 16 aa, unidentified
  source 1..16: note = methanogen bacteria
APYWLTVEGSDEFLSN

SEQ ID NO: 56991 - protein, 34 aa, unidentified
  source 1..34: note = methanogen bacteria
ECEISTLFPLTYYPIFNGDVELVEGIRALDQKEI

SEQ ID NO: 56992 - protein, 11 aa, unidentified
  source 1..11: note = methanogen bacteria
TNNSGLTHIFD

SEQ ID NO: 56993 - protein, 14 aa, unidentified
  source 1..14: note = methanogen bacteria
PYLAYDYLEKPVTL

SEQ ID NO: 56994 - protein, 12 aa, unidentified
  source 1..12: note = methanogen bacteria
GRFLTLDEIGFF

SEQ ID NO: 56995 - protein, 17 aa, unidentified
  source 1..17: note = methanogen bacteria
PTLRVLYFKNPAYVAGA

SEQ ID NO: 56996 - protein, 11 aa, unidentified
  source 1..11: note = methanogen bacteria
SRMLGPEGYGL

SEQ ID NO: 56997 - protein, 14 aa, unidentified
  source 1..14: note = methanogen bacteria
DFIANEIFHKPLVV

SEQ ID NO: 56998 - protein, 12 aa, unidentified
  source 1..12: note = methanogen bacteria
GVFMLSSDVGFY

SEQ ID NO: 56999 - protein, 13 aa, unidentified
  source 1..13: note = methanogen bacteria
IQLLFGEVYTPGS

SEQ ID NO: 57000 - protein, 14 aa, unidentified
  source 1..14: note = methanogen bacteria
PYLAYDYLGKPAAL

SEQ ID NO: 57001 - protein, 12 aa, unidentified
  source 1..12: note = methanogen bacteria
GKFLTFADIGFF

SEQ ID NO: 57002 - protein, 17 aa, unidentified
  source 1..17: note = methanogen bacteria
PTLRILYFKNPAYVAGA

SEQ ID NO: 57003 - protein, 15 aa, unidentified
  source 1..15: note = methanogen bacteria
PWLTYHYLNKPLALV

SEQ ID NO: 57004 - protein, 12 aa, unidentified
  source 1..12: note = methanogen bacteria
GRFLTLDDVGFF

SEQ ID NO: 57005 - protein, 18 aa, unidentified
  source 1..18: note = methanogen bacteria
PTLRILYFENPAYVAGAS

SEQ ID NO: 57006 - protein, 14 aa, unidentified
  source 1..14: note = methanogen bacteria
PYLAYHYLGKPAAL

SEQ ID NO: 57007 - protein, 12 aa, unidentified
  source 1..12: note = methanogen bacteria
GRFLTFDEIGFF

SEQ ID NO: 57008 - protein, 17 aa, unidentified
  source 1..17: note = methanogen bacteria
PTLRILYFKNPAYVAGA

SEQ ID NO: 57009 - protein, 34 aa, unidentified
  source 1..34: note = methanogen bacteria
YGMNVTDSFFEGISGYTTTGATIVDDLGAMPDSL

SEQ ID NO: 57010 - protein, 32 aa, unidentified
  source 1..32: note = methanogen bacteria
SVTAFDSLCIALSNVPTGGLLPRNESMACYSI

SEQ ID NO: 57011 - protein, 45 aa, unidentified
  source 1..45: note = methanogen bacteria
PHLDGLTAGELGDSAWKSVYSVISSGTGTGFAIFSYSQLYGAGNL

SEQ ID NO: 57012 - protein, 34 aa, unidentified
  source 1..34: note = methanogen bacteria
CEPDLNLQEQFGVTLAAITNAGIGPLDSYGSLSI

SEQ ID NO: 57013 - protein, 13 aa, unidentified
  source 1..13: note = methanogen bacteria
LLAINFMGKPEVM

SEQ ID NO: 57014 - protein, 12 aa, unidentified
  source 1..12: note = methanogen bacteria
GRFLTMADIGFF

SEQ ID NO: 57015 - protein, 16 aa, unidentified
  source 1..16: note = methanogen bacteria
ILRLLYFQIPAYVAGA

SEQ ID NO: 57016 - protein, 56 aa, unidentified
  source 1..56: note = methanogen bacteria
FNNNLGIYCSDVYVYLLNALYFAGTNIHSTKSIYLSPVVCFLTSLIFDLGYVDKVA

SEQ ID NO: 57017 - protein, 62 aa, unidentified
  source 1..62: note = methanogen bacteria
NYMGNGFIAFDGLLSSGVSGNLGSTHDNSYNPDLGYYLVNMGNFISSSNTTFVAKTPSLANP

SEQ ID NO: 57018 - protein, 96 aa, unidentified
  source 1..96: note = methanogen bacteria
FTYTFEQTDEFNSPELMTNYIKENIDNWSEIQIGNYNIRPYYWYLGLNSPGIESGNTQKIIDSNVSYYISNHPQKNLTNYTEIKNINDLYLYKRNG

SEQ ID NO: 57019 - protein, 14 aa, unidentified
  source 1..14: note = methanogen bacteria
PFIANNFMHKPEVM

SEQ ID NO: 57020 - protein, 12 aa, unidentified
  source 1..12: note = methanogen bacteria
GKFLTLADIGFF

SEQ ID NO: 57021 - protein, 17 aa, unidentified
  source 1..17: note = methanogen bacteria
PTLQLLYFKNPDYVAGA

SEQ ID NO: 57022 - protein, 14 aa, unidentified
  source 1..14: note = methanogen bacteria
PYLAYNYLQKPAAL

SEQ ID NO: 57023 - protein, 12 aa, unidentified
  source 1..12: note = methanogen bacteria
GKFLTFNDIGFF

SEQ ID NO: 57024 - protein, 17 aa, unidentified
  source 1..17: note = methanogen bacteria
PTLALLYFKNPAYIAGA

SEQ ID NO: 57025 - protein, 33 aa, unidentified
  source 1..33: note = methanogen bacteria
YGMGITDSFFEGISGYTTTGATIVDDLRAMPDS

SEQ ID NO: 57026 - protein, 32 aa, unidentified
  source 1..32: note = methanogen bacteria
EVTAFDSLCIALSNIPTGGLLPRNESIACYSI

SEQ ID NO: 57027 - protein, 45 aa, unidentified
  source 1..45: note = methanogen bacteria
PNLNGLTADQLGDSAWKSVYSVISSGTGTGFAIFSYSQLYGAGNL

SEQ ID NO: 57028 - protein, 34 aa, unidentified
  source 1..34: note = methanogen bacteria
CEPHLNLQEQFGVTLAAITNAGIGPLDSYGSLSI

SEQ ID NO: 57029 - protein, 57 aa, unidentified
  source 1..57: note = methanogen bacteria
FNNNLGIYCSDVYVYLLNALYFAGTNIHSTKSIYLSPVVCFLTSLIFDLGYVDKVAI

SEQ ID NO: 57030 - protein, 62 aa, unidentified
  source 1..62: note = methanogen bacteria
YTMGNGFIAFDGLISGGVSGHLGSTHDNSYNPDFGYYLTNMGNFISSSNTTFVAKTPSLANP

SEQ ID NO: 57031 - protein, 97 aa, unidentified
  source 1..97: note = methanogen bacteria
AFTSTFEQTNEFNGPELMTDYIKENIDNWSEIQIGNYNIRPYYWYLGMNSPGIESGATQKIIESNVSYYISNHPQKNLTNYTEIKNIDGLYLYQRNA

SEQ ID NO: 57032 - protein, 11 aa, unidentified
  source 1..11: note = methanogen bacteria
SRMLGPEGYGL

SEQ ID NO: 57033 - protein, 14 aa, unidentified
  source 1..14: note = methanogen bacteria
DFIANNIFHKPLVV

SEQ ID NO: 57034 - protein, 11 aa, unidentified
  source 1..11: note = methanogen bacteria
ILMLSTDVGYY

SEQ ID NO: 57035 - protein, 15 aa, unidentified
  source 1..15: note = methanogen bacteria
PIIELLFGSAYISGS

SEQ ID NO: 57036 - protein, 14 aa, unidentified
  source 1..14: note = methanogen bacteria
ENVLRSYLKIIHGN

SEQ ID NO: 57037 - protein, 16 aa, unidentified
  source 1..16: note = methanogen bacteria
FGQSTILNFPVLNIPL

SEQ ID NO: 57038 - protein, 20 aa, unidentified
  source 1..20: note = methanogen bacteria
PEISDGGHFMMDMLDLTIPS

SEQ ID NO: 57039 - protein, 14 aa, unidentified
  source 1..14: note = methanogen bacteria
PIMANVFLKKPETL

SEQ ID NO: 57040 - protein, 11 aa, unidentified
  source 1..11: note = methanogen bacteria
KFLSLASVGFF

SEQ ID NO: 57041 - protein, 17 aa, unidentified
  source 1..17: note = methanogen bacteria
PTLQVFYFKNPSYVNGA

SEQ ID NO: 57042 - protein, 14 aa, unidentified
  source 1..14: note = methanogen bacteria
PWLAYGYLNKPLAL

SEQ ID NO: 57043 - protein, 12 aa, unidentified
  source 1..12: note = methanogen bacteria
GKFLTLDAVGFF

SEQ ID NO: 57044 - protein, 17 aa, unidentified
  source 1..17: note = methanogen bacteria
PTLRVLYFAKPEYVAGA

SEQ ID NO: 57045 - protein, 57 aa, unidentified
  source 1..57: note = methanogen bacteria
AHSLIHIDEYFTLEVVKLPLLDAWRVIIGDYHPPLYYILLKIVKKLLLTTNIPLDLI

SEQ ID NO: 57046 - protein, 34 aa, unidentified
  source 1..34: note = methanogen bacteria
FRQTGKVSEDYWIATPDINEIFHYFYICGTNSGD

SEQ ID NO: 57047 - protein, 15 aa, unidentified
  source 1..15: note = methanogen bacteria
PYLAYNFLHKPITLV

SEQ ID NO: 57048 - protein, 12 aa, unidentified
  source 1..12: note = methanogen bacteria
GKFLTLADIGFF

SEQ ID NO: 57049 - protein, 17 aa, unidentified
  source 1..17: note = methanogen bacteria
PTLQVLYFKNPAYVAGA

SEQ ID NO: 57050 - protein, 15 aa, unidentified
  source 1..15: note = methanogen bacteria
SEHVLRDYLSIIHGN

SEQ ID NO: 57051 - protein, 16 aa, unidentified
  source 1..16: note = methanogen bacteria
FGQTTILNFPVLNIPL

SEQ ID NO: 57052 - protein, 20 aa, unidentified
  source 1..20: note = methanogen bacteria
PEISDGGHFMMDMLGLTIPS

SEQ ID NO: 57053 - protein, 15 aa, unidentified
  source 1..15: note = methanogen bacteria
PYIANEVWRNPDALL

SEQ ID NO: 57054 - protein, 10 aa, unidentified
  source 1..10: note = methanogen bacteria
VFITNNLIGY

SEQ ID NO: 57055 - protein, 18 aa, unidentified
  source 1..18: note = methanogen bacteria
PIMRLVYFTNSAYSCGAP

SEQ ID NO: 57056 - protein, 15 aa, unidentified
  source 1..15: note = methanogen bacteria
SEHVLRDYLTIIRGN

SEQ ID NO: 57057 - protein, 16 aa, unidentified
  source 1..16: note = methanogen bacteria
FGQSTALTFVIPNIPL

SEQ ID NO: 57058 - protein, 20 aa, unidentified
  source 1..20: note = methanogen bacteria
PEISDGGHFMMDMLDIAMPS

SEQ ID NO: 57059 - protein, 11 aa, unidentified
  source 1..11: note = methanogen bacteria
VPIFGFEQDLI

SEQ ID NO: 57060 - protein, 15 aa, unidentified
  source 1..15: note = methanogen bacteria
SESVLRGYLNIIHGN

SEQ ID NO: 57061 - protein, 16 aa, unidentified
  source 1..16: note = methanogen bacteria
FGPATILSFPINSIPL

SEQ ID NO: 57062 - protein, 20 aa, unidentified
  source 1..20: note = methanogen bacteria
PEISDGGHFMMDMLDLAIPS

SEQ ID NO: 57063 - protein, 11 aa, unidentified
  source 1..11: note = methanogen bacteria
VPTFGWQHDLI

SEQ ID NO: 57064 - protein, 13 aa, unidentified
  source 1..13: note = methanogen bacteria
PLMAVFLKKPETM

SEQ ID NO: 57065 - protein, 11 aa, unidentified
  source 1..11: note = methanogen bacteria
KFLTLAEVGFF

SEQ ID NO: 57066 - protein, 16 aa, unidentified
  source 1..16: note = methanogen bacteria
ILQLFYFKNPSYVNGA

SEQ ID NO: 57067 - protein, 15 aa, unidentified
  source 1..15: note = methanogen bacteria
SESVLRNYLSIIHGN

SEQ ID NO: 57068 - protein, 16 aa, unidentified
  source 1..16: note = methanogen bacteria
FGQSTILHFPVLNIPL

SEQ ID NO: 57069 - protein, 20 aa, unidentified
  source 1..20: note = methanogen bacteria
PEISDGGHFMMDMLDVAIPS

SEQ ID NO: 57070 - protein, 14 aa, unidentified
  source 1..14: note = methanogen bacteria
PWLAYNFLHKPLTM

SEQ ID NO: 57071 - protein, 12 aa, unidentified
  source 1..12: note = methanogen bacteria
GRFLTLADIGFF

SEQ ID NO: 57072 - protein, 17 aa, unidentified
  source 1..17: note = methanogen bacteria
PTLKVLYFKNTAYVAGA

SEQ ID NO: 57073 - protein, 12 aa, unidentified
  source 1..12: note = methanogen bacteria
LEQLAPNAPHIS

SEQ ID NO: 57074 - protein, 16 aa, unidentified
  source 1..16: note = methanogen bacteria
IYGPDAAIVKTFSRIF

SEQ ID NO: 57075 - protein, 22 aa, unidentified
  source 1..22: note = methanogen bacteria
TTGLSNWMGSCLSGMIGSNPSE

SEQ ID NO: 57076 - protein, 11 aa, unidentified
  source 1..11: note = methanogen bacteria
TTAMSMGFSPI

SEQ ID NO: 57077 - protein, 67 aa, unidentified
  source 1..67: note = methanogen bacteria
LYSVPTYYNSFRIDHALKSNINMTNQISFMTTHLPETMFTLIQIPKSIGIHFNSLFIYSFHPYEYTS

SEQ ID NO: 57078 - protein, 20 aa, unidentified
  source 1..20: note = methanogen bacteria
FLTWTPVGDFKEILGVSVRY

SEQ ID NO: 57079 - protein, 55 aa, unidentified
  source 1..55: note = methanogen bacteria
FNANLGIYCSDVYVYLLNALYYVGTNIHSTKSIYLSPIICFLTSLIFDLGYVDKV

SEQ ID NO: 57080 - protein, 62 aa, unidentified
  source 1..62: note = methanogen bacteria
MSMGGGNLVFDGMLSNGIQGNLGSTHDNAYNPDFGYYLLNIGNFISSSNTTFVGKTPALNNP

SEQ ID NO: 57081 - protein, 95 aa, unidentified
  source 1..95: note = methanogen bacteria
FTYTFEDTNEFNAPEQMCDYIKANIDNWSDIQIGNYNIRPYYWYLGLNSPGIESKSPQKIIDSNVSYYISNIEQTNLTGYVEIKKIENLYLYQKI

SEQ ID NO: 57082 - protein, 14 aa, unidentified
  source 1..14: note = methanogen bacteria
PWLADHYLHKPAAL

SEQ ID NO: 57083 - protein, 12 aa, unidentified
  source 1..12: note = methanogen bacteria
GRFLTFDDIGFF

SEQ ID NO: 57084 - protein, 17 aa, unidentified
  source 1..17: note = methanogen bacteria
PTLRVLYFKNPAYVAGA

SEQ ID NO: 57085 - protein, 15 aa, unidentified
  source 1..15: note = methanogen bacteria
SETVLRDYLSIIHGN

SEQ ID NO: 57086 - protein, 16 aa, unidentified
  source 1..16: note = methanogen bacteria
FGQATILSFPIYDIPL

SEQ ID NO: 57087 - protein, 20 aa, unidentified
  source 1..20: note = methanogen bacteria
PEISDGGHFMMDMLDVAIPS

SEQ ID NO: 57088 - protein, 11 aa, unidentified
  source 1..11: note = methanogen bacteria
VPSLGLQHDLI

SEQ ID NO: 57089 - protein, 15 aa, unidentified
  source 1..15: note = methanogen bacteria
SEHILRDYLGMIHGN

SEQ ID NO: 57090 - protein, 16 aa, unidentified
  source 1..16: note = methanogen bacteria
FGQSTILSFPIYNIPL

SEQ ID NO: 57091 - protein, 20 aa, unidentified
  source 1..20: note = methanogen bacteria
PEISDGGHFMMDMLDLAMPS

SEQ ID NO: 57092 - protein, 11 aa, unidentified
  source 1..11: note = methanogen bacteria
VPAFGLEHDLI

SEQ ID NO: 57093 - protein, 15 aa, unidentified
  source 1..15: note = methanogen bacteria
SESVLRDYLSIIHGN

SEQ ID NO: 57094 - protein, 16 aa, unidentified
  source 1..16: note = methanogen bacteria
FGQATILSFPIIDVPL

SEQ ID NO: 57095 - protein, 20 aa, unidentified
  source 1..20: note = methanogen bacteria
PEISDGGHFMMDMLDMAIPS

SEQ ID NO: 57096 - protein, 11 aa, unidentified
  source 1..11: note = methanogen bacteria
VPALGLHNDLI

SEQ ID NO: 57097 - protein, 15 aa, unidentified
  source 1..15: note = methanogen bacteria
APIFTDFFGKPEALL

SEQ ID NO: 57098 - protein, 11 aa, unidentified
  source 1..11: note = methanogen bacteria
AFLTAAAVGYF

SEQ ID NO: 57099 - protein, 17 aa, unidentified
  source 1..17: note = methanogen bacteria
EILGLVYFTNGAYMNGG

SEQ ID NO: 57100 - protein, 14 aa, unidentified
  source 1..14: note = methanogen bacteria
EPIAIGWWHKPAAL

SEQ ID NO: 57101 - protein, 11 aa, unidentified
  source 1..11: note = methanogen bacteria
AYLTSNYAGYY

SEQ ID NO: 57102 - protein, 14 aa, unidentified
  source 1..14: note = methanogen bacteria
ILGLLFGHEYTLGT

SEQ ID NO: 57103 - protein, 11 aa, unidentified
  source 1..11: note = methanogen bacteria
SRMLGPEGYGL

SEQ ID NO: 57104 - protein, 14 aa, unidentified
  source 1..14: note = methanogen bacteria
DFIANAIFHKPAVV

SEQ ID NO: 57105 - protein, 11 aa, unidentified
  source 1..11: note = methanogen bacteria
IFMLSSDVGYY

SEQ ID NO: 57106 - protein, 16 aa, unidentified
  source 1..16: note = methanogen bacteria
EPVITILFGSNYIKGA

SEQ ID NO: 57107 - protein, 13 aa, unidentified
  source 1..13: note = methanogen bacteria
VDIGDDFGRGSHD

SEQ ID NO: 57108 - protein, 10 aa, unidentified
  source 1..10: note = methanogen bacteria
YLQSIGALTA

SEQ ID NO: 57109 - protein, 21 aa, unidentified
  source 1..21: note = methanogen bacteria
SMIMGSADGLEPERYGVFADT

SEQ ID NO: 57110 - protein, 11 aa, unidentified
  source 1..11: note = methanogen bacteria
RGAGTATVSVT

SEQ ID NO: 57111 - protein, 20 aa, unidentified
  source 1..20: note = methanogen bacteria
TNVTVTVNKVPTEITAEGCE

SEQ ID NO: 57112 - protein, 13 aa, unidentified
  source 1..13: note = methanogen bacteria
TATVSVSYFGNDM

SEQ ID NO: 57113 - protein, 10 aa, unidentified
  source 1..10: note = methanogen bacteria
RLLSTTGYGI

SEQ ID NO: 57114 - protein, 14 aa, unidentified
  source 1..14: note = methanogen bacteria
EPIAVGIWNKPEAL

SEQ ID NO: 57115 - protein, 14 aa, unidentified
  source 1..14: note = methanogen bacteria
MVLLFGNEYAQGSE

SEQ ID NO: 57116 - protein, 10 aa, unidentified
  source 1..10: note = methanogen bacteria
RILSAADYGI

SEQ ID NO: 57117 - protein, 14 aa, unidentified
  source 1..14: note = methanogen bacteria
EPIAVGWWAKPNAV

SEQ ID NO: 57118 - protein, 12 aa, unidentified
  source 1..12: note = methanogen bacteria
GANLPSKFAGYY

SEQ ID NO: 57119 - protein, 13 aa, unidentified
  source 1..13: note = methanogen bacteria
LGLLFGAEYTLGA

SEQ ID NO: 57120 - protein, 10 aa, unidentified
  source 1..10: note = methanogen bacteria
FRITLPIIDK

SEQ ID NO: 57121 - protein, 44 aa, unidentified
  source 1..44: note = methanogen bacteria
QEYAYYHLINLEQMNKLQVLLQELFRIGINISDLTAIKAWLSLI

SEQ ID NO: 57122 - protein, 47 aa, unidentified
  source 1..47: note = methanogen bacteria
GYLCGNQFCAELLKTINPYLYEPQQNVGWWPPLLWPDRLRSLFVEPS

SEQ ID NO: 57123 - protein, 23 aa, unidentified
  source 1..23: note = methanogen bacteria
VVNAIYANGDIGTPNMDGFEAAI

SEQ ID NO: 57124 - protein, 89 aa, unidentified
  source 1..89: note = methanogen bacteria
LTKQFDENTETNDLYIEFSGNTQNLKSNEKQVYDILHNFAYGDTLNLSSLNTSLSSEANAKWFMEQYADWCANVEDELEPRVSEEFNDT

SEQ ID NO: 57125 - protein, 11 aa, unidentified
  source 1..11: note = methanogen bacteria
DDIFGQWTSKG

SEQ ID NO: 57126 - protein, 10 aa, unidentified
  source 1..10: note = methanogen bacteria
RLLTTTGYGI

SEQ ID NO: 57127 - protein, 14 aa, unidentified
  source 1..14: note = methanogen bacteria
EPVAIGMWHKPEAL

SEQ ID NO: 57128 - protein, 10 aa, unidentified
  source 1..10: note = methanogen bacteria
VFLPAAFAGL

SEQ ID NO: 57129 - protein, 14 aa, unidentified
  source 1..14: note = methanogen bacteria
IMSLLFGNAYAQGA

SEQ ID NO: 57130 - protein, 38 aa, unidentified
  source 1..38: note = methanogen bacteria
VNELGGWDSTMDILDNMMSTGEAPDHFTSLLYSGGAGI

SEQ ID NO: 57131 - protein, 29 aa, unidentified
  source 1..29: note = methanogen bacteria
GRAYISDSGTALDNSENIFIVLADSMFPA

SEQ ID NO: 57132 - protein, 18 aa, unidentified
  source 1..18: note = methanogen bacteria
AGGIIAGGDWCLYNTKLY

SEQ ID NO: 57133 - protein, 29 aa, unidentified
  source 1..29: note = methanogen bacteria
VYIWGLDQTESLDIFAQYRTIMAGASGTI

SEQ ID NO: 57134 - protein, 16 aa, unidentified
  source 1..16: note = methanogen bacteria
GYLVPSDTFVDMFGSA

SEQ ID NO: 57135 - protein, 56 aa, unidentified
  source 1..56: note = methanogen bacteria
TLNWYAVDDSAATSLSNPPAGTIPKAIYVLMNTNSSDMMNGGYEMIFLGHLGQPNP

SEQ ID NO: 57136 - protein, 62 aa, unidentified
  source 1..62: note = methanogen bacteria
FYTNGFLSSIPFLGANDSIGYYESGSTTASAGMAWYLSTPQGLTDWLLPILNPSSYGNGHSV

SEQ ID NO: 57137 - protein, 14 aa, unidentified
  source 1..14: note = methanogen bacteria
PWLALEFYKKPIAL

SEQ ID NO: 57138 - protein, 16 aa, unidentified
  source 1..16: note = methanogen bacteria
EILGFIFFTNPEYMNG

SEQ ID NO: 57139 - protein, 12 aa, unidentified
  source 1..12: note = methanogen bacteria
TQLVDDLHTNVN

SEQ ID NO: 57140 - protein, 56 aa, unidentified
  source 1..56: note = methanogen bacteria
IMGGVSDAVDMYIPEHSGDEAFESDVYDYFQNMDSVDTVKENSTVENILDTITQES

SEQ ID NO: 57141 - protein, 64 aa, unidentified
  source 1..64: note = methanogen bacteria
KYAYPISWDVYYHMHMIELYMQNGLVFWDYATVAPKGRLIMYPPLFHLVFAELSKLLNISSAEL

SEQ ID NO: 57142 - protein, 22 aa, unidentified
  source 1..22: note = methanogen bacteria
IAINYTLVFNSLPGANLLITDF

SEQ ID NO: 57143 - protein, 10 aa, unidentified
  source 1..10: note = methanogen bacteria
LLGFNIVSIR

SEQ ID NO: 57144 - protein, 56 aa, unidentified
  source 1..56: note = methanogen bacteria
YADPGFYMSFRTKHYALRGINPGAQINYMLSNLGLTFVTILGLPANIGSWDGFLHS

SEQ ID NO: 57145 - protein, 19 aa, unidentified
  source 1..19: note = methanogen bacteria
LSWTPVGQLSPILGVQTRY

SEQ ID NO: 57146 - protein, 14 aa, unidentified
  source 1..14: note = methanogen bacteria
ISSVVADLNTDVST

SEQ ID NO: 57147 - protein, 57 aa, unidentified
  source 1..57: note = methanogen bacteria
VIGGISDGVNTYAPDHSGDQMYEKGVYNYFQSISSINEVNQENSTVQNVVNVIIKDS

SEQ ID NO: 57148 - protein, 10 aa, unidentified
  source 1..10: note = methanogen bacteria
RGPMLWDMPL

SEQ ID NO: 57149 - protein, 15 aa, unidentified
  source 1..15: note = methanogen bacteria
APIITGYYHKPEALL

SEQ ID NO: 57150 - protein, 10 aa, unidentified
  source 1..10: note = methanogen bacteria
TFLPAVAIGY

SEQ ID NO: 57151 - protein, 17 aa, unidentified
  source 1..17: note = methanogen bacteria
GIMGLVYFTNASYMNGA

SEQ ID NO: 57152 - protein, 28 aa, unidentified
  source 1..28: note = methanogen bacteria
NLPNRLSSGTSIGIEYVLAIPGINPLLP

SEQ ID NO: 57153 - protein, 58 aa, unidentified
  source 1..58: note = methanogen bacteria
LNHLILHVDEYFTLTLINFNVNEMVRLTAADVHPPLYYLILKFAMSVFGFFGISSHNL

SEQ ID NO: 57154 - protein, 32 aa, unidentified
  source 1..32: note = methanogen bacteria
FAQLGTIHHGFWVPRITVKSLIEDFGYYAYSN

SEQ ID NO: 57155 - protein, 13 aa, unidentified
  source 1..13: note = methanogen bacteria
ISQISANLNTDVS

SEQ ID NO: 57156 - protein, 57 aa, unidentified
  source 1..57: note = methanogen bacteria
VMGGINTAVDTYAPEHSGDEQFHQDVYDYFQKVGNIDDVKAQDSIIVNTADIIIQNA

SEQ ID NO: 57157 - protein, 13 aa, unidentified
  source 1..13: note = methanogen bacteria
ISSVVADLNTDVS

SEQ ID NO: 57158 - protein, 57 aa, unidentified
  source 1..57: note = methanogen bacteria
IIGGISDGVNTYAPEHSSDQTYEKSVYDYFQSIGSINEVNAENSTVQSIVNIIIKDS

SEQ ID NO: 57159 - protein, 34 aa, unidentified
  source 1..34: note = methanogen bacteria
YLTITNALVEDGAAGMGLFATGQAMVLGVQVTDL

SEQ ID NO: 57160 - protein, 15 aa, unidentified
  source 1..15: note = methanogen bacteria
ASAIRNASTFINESG

SEQ ID NO: 57161 - protein, 48 aa, unidentified
  source 1..48: note = methanogen bacteria
PFDFTAIGGTAVVGGETVYGAANIFYAEMPLIANGTLTTVDSSLRFAS

SEQ ID NO: 57162 - protein, 27 aa, unidentified
  source 1..27: note = methanogen bacteria
SGCKTYNIYGLIELLTVNLALPMSVTK

SEQ ID NO: 57163 - protein, 66 aa, unidentified
  source 1..66: note = methanogen bacteria
SQTTPIYDFSRQGYYAINNINSSQQINFMIHHPTDSIISLLYIIPNVFEMLYNTFTFYNGIELFSS

SEQ ID NO: 57164 - protein, 20 aa, unidentified
  source 1..20: note = methanogen bacteria
LFKWTPVGQLYPILGVQSRY

SEQ ID NO: 57165 - protein, 65 aa, unidentified
  source 1..65: note = methanogen bacteria
SNTTPIYDFSRQGYYMIHNINSTNQISYMLSHPNDSIVSFLYIIPSVFENLFYTYTFYVSTDLFS

SEQ ID NO: 57166 - protein, 20 aa, unidentified
  source 1..20: note = methanogen bacteria
LLKWTPVGQLFPILGVQPRY

SEQ ID NO: 57167 - protein, 16 aa, unidentified
  source 1..16: note = methanogen bacteria
FGDALTGVKSQNIDLL

SEQ ID NO: 57168 - protein, 14 aa, unidentified
  source 1..14: note = methanogen bacteria
SGYSIGFETDSVID

SEQ ID NO: 57169 - protein, 17 aa, unidentified
  source 1..17: note = methanogen bacteria
VDLLIANLNSSNDIAIY

SEQ ID NO: 57170 - protein, 32 aa, unidentified
  source 1..32: note = methanogen bacteria
VWGMNDFLDPDCIAGLGGAILEKKDVSTDTAY

SEQ ID NO: 57171 - protein, 15 aa, unidentified
  source 1..15: note = methanogen bacteria
AGFPMMDTIGEIADP

SEQ ID NO: 57172 - protein, 17 aa, unidentified
  source 1..17: note = methanogen bacteria
GPASALGYTDSTSSGDK

SEQ ID NO: 57173 - protein, 59 aa, unidentified
  source 1..59: note = methanogen bacteria
YSTPGFLQSYRMDLWITNHVNSTEQINYLIANKKDGLIMLLQTPKYIVKNLNLNYDMSG

SEQ ID NO: 57174 - protein, 19 aa, unidentified
  source 1..19: note = methanogen bacteria
LTWTPIGQLNDILGVQPRY

SEQ ID NO: 57175 - protein, 63 aa, unidentified
  source 1..63: note = methanogen bacteria
YATKHLLNSWRGTYFIKNNVNILGQLTYMAHHPLNSLYLLFTPDNLINVISGYFSFGNLPPYT

SEQ ID NO: 57176 - protein, 19 aa, unidentified
  source 1..19: note = methanogen bacteria
YLTWCNVGMSRIEGVFGRY

SEQ ID NO: 57177 - protein, 10 aa, unidentified
  source 1..10: note = methanogen bacteria
ITQINIHASF

SEQ ID NO: 57178 - protein, 15 aa, unidentified
  source 1..15: note = methanogen bacteria
SLISRYIGFGDYEMM

SEQ ID NO: 57179 - protein, 10 aa, unidentified
  source 1..10: note = methanogen bacteria
TATMGPVGPV

SEQ ID NO: 57180 - protein, 17 aa, unidentified
  source 1..17: note = methanogen bacteria
YAFSLFSITGMQTEILW

SEQ ID NO: 57181 - protein, 68 aa, unidentified
  source 1..68: note = methanogen bacteria
IITHCDKTADQNIITEVIDGIKESTIGELIRDLSGSDEDIDINSLYPNEVHTEGLKVMSMIYSDKLTI

SEQ ID NO: 57182 - protein, 98 aa, unidentified
  source 1..98: note = methanogen bacteria
IPIDSVSDEGEHFTRAELTSRGILFPEYVNGSFKTIDSIPGFFVHSIDKTVFEVNGDTGKINNTLVEVSSAFEQNPFFGYLFSGLGIFIAKLLDLNVI

SEQ ID NO: 57183 - protein, 71 aa, unidentified
  source 1..71: note = methanogen bacteria
KSYATPALVHSWRATYITQNNVSIANQMNFLLSDPLNIFNAFINILYSFSYIFNGFFSFYAYTIEGGVYNA

SEQ ID NO: 57184 - protein, 19 aa, unidentified
  source 1..19: note = methanogen bacteria
LLSWSPAGSLTITGVHTRY

SEQ ID NO: 57185 - protein, 29 aa, unidentified
  source 1..29: note = methanogen bacteria
VYIWGLDQSGSLDMFAQYRTIMAGASGTI

SEQ ID NO: 57186 - protein, 15 aa, unidentified
  source 1..15: note = methanogen bacteria
YLVPSDAFVSQFGSW

SEQ ID NO: 57187 - protein, 54 aa, unidentified
  source 1..54: note = methanogen bacteria
ALNWYPLQGFGTEYALSNPPAGTIPKAIYILTHTSSAEMASGGYEMILLGAPNP

SEQ ID NO: 57188 - protein, 62 aa, unidentified
  source 1..62: note = methanogen bacteria
LYTNDFLSSIPLIGGNGAIGTYETGSTTASGGIAWYLSTPQGLTDWLLPILNPASYGNGHSV

SEQ ID NO: 57189 - protein, 12 aa, unidentified
  source 1..12: note = methanogen bacteria
PGIAIELNFSAE

SEQ ID NO: 57190 - protein, 11 aa, unidentified
  source 1..11: note = methanogen bacteria
LHLQYVLNVEE

SEQ ID NO: 57191 - protein, 18 aa, unidentified
  source 1..18: note = methanogen bacteria
IGNQQLGPNHINHLFVQS

SEQ ID NO: 57192 - protein, 29 aa, unidentified
  source 1..29: note = methanogen bacteria
VYIWGLDQSDSLDIFAQYRTIMAGASGTI

SEQ ID NO: 57193 - protein, 15 aa, unidentified
  source 1..15: note = methanogen bacteria
YLIPSSAFTSQFGDG

SEQ ID NO: 57194 - protein, 53 aa, unidentified
  source 1..53: note = methanogen bacteria
ALNWYPVSSAADYSLSNPPAGTIPKAIYILMNTDSADMASGGYEMILLGQPNP

SEQ ID NO: 57195 - protein, 62 aa, unidentified
  source 1..62: note = methanogen bacteria
FYTSDFLSSIPLLGHNDALGVYETGSTTASGGLAWFLSTPQGLTDWLMPMLNPDSYGNGHGV

SEQ ID NO: 57196 - protein, 11 aa, unidentified
  source 1..11: note = methanogen bacteria
LQIIFKTTAIG

SEQ ID NO: 57197 - protein, 70 aa, unidentified
  source 1..70: note = methanogen bacteria
VSHAMSLPALEMFFSQSANTGNSSINTGNSNSLTSKFSIKNLNFLIKSEIFGFYEQCVRLFTFGWLTYTS

SEQ ID NO: 57198 - protein, 21 aa, unidentified
  source 1..21: note = methanogen bacteria
IDYSLYHCPDATLIQGVQGRY

SEQ ID NO: 57199 - protein, 11 aa, unidentified
  source 1..11: note = methanogen bacteria
FKTPSGTWLSG

SEQ ID NO: 57200 - protein, 30 aa, unidentified
  source 1..30: note = methanogen bacteria
NLKTKTIGDIASIASGLPKFHIPMVPITFQ

SEQ ID NO: 57201 - protein, 11 aa, unidentified
  source 1..11: note = methanogen bacteria
FKTPSGAWLTG

SEQ ID NO: 57202 - protein, 31 aa, unidentified
  source 1..31: note = methanogen bacteria
GLNTQTIGDIASISPQLPSFHIPMVPITYES

SEQ ID NO: 57203 - protein, 12 aa, unidentified
  source 1..12: note = methanogen bacteria
VSGLGTASASAV

SEQ ID NO: 57204 - protein, 18 aa, unidentified
  source 1..18: note = methanogen bacteria
QAVRFMGAEDVMDEAVLY

SEQ ID NO: 57205 - protein, 22 aa, unidentified
  source 1..22: note = methanogen bacteria
EPLMSVMTVEESMREVRPDFVK

SEQ ID NO: 57206 - protein, 61 aa, unidentified
  source 1..61: note = methanogen bacteria
NNTADWGGANYFKNTISHLIITGDFINNVAQISGGANYFNDEVTNVSITGDFSDNVAANGS

SEQ ID NO: 57207 - protein, 11 aa, unidentified
  source 1..11: note = methanogen bacteria
FKTPSGDWLTG

SEQ ID NO: 57208 - protein, 31 aa, unidentified
  source 1..31: note = methanogen bacteria
ALHTKTIGDIASISLGLPSFHIPMVPITVES

SEQ ID NO: 57209 - protein, 12 aa, unidentified
  source 1..12: note = methanogen bacteria
FKTGTGAWLTGT

SEQ ID NO: 57210 - protein, 30 aa, unidentified
  source 1..30: note = methanogen bacteria
GLNTKTIGDIANIASGLPTFHIPMVPVTIE

SEQ ID NO: 57211 - protein, 55 aa, unidentified
  source 1..55: note = methanogen bacteria
YANPGFFESWRSNKWLLENINTTEQINYVFNNNKETLISLLNTLGLLKDDISWNI

SEQ ID NO: 57212 - protein, 19 aa, unidentified
  source 1..19: note = methanogen bacteria
LSWTPVGQLSPIMGVQVRY

SEQ ID NO: 57213 - protein, 71 aa, unidentified
  source 1..71: note = methanogen bacteria
FYSINSLNNSIRTYMFELHGTNPNEQIKYMSTHIKETILLFSTLIYEVPKLMLKMFNLSYNYYYVDYSKGI

SEQ ID NO: 57214 - protein, 19 aa, unidentified
  source 1..19: note = methanogen bacteria
WVGVGNFEKGVVWGVHLRY

SEQ ID NO: 57215 - protein, 13 aa, unidentified
  source 1..13: note = methanogen bacteria
MDATIFTDIFGYY

SEQ ID NO: 57216 - protein, 27 aa, unidentified
  source 1..27: note = methanogen bacteria
HYIDSLGDYIYFGSEDAPYCGIFMYTS

SEQ ID NO: 57217 - protein, 23 aa, unidentified
  source 1..23: note = methanogen bacteria
GALGTIDLAVIGAKTHDPDFTYS

SEQ ID NO: 57218 - protein, 11 aa, unidentified
  source 1..11: note = methanogen bacteria
FVGVTAVKVEP

SEQ ID NO: 57219 - protein, 11 aa, unidentified
  source 1..11: note = methanogen bacteria
GAIYNDGVMSQ

SEQ ID NO: 57220 - protein, 19 aa, unidentified
  source 1..19: note = methanogen bacteria
DIILDPCATAANDLLHWWM

SEQ ID NO: 57221 - protein, 24 aa, unidentified
  source 1..24: note = methanogen bacteria
MVIENCSFDSFNANFGGAICALDT

SEQ ID NO: 57222 - protein, 11 aa, unidentified
  source 1..11: note = methanogen bacteria
GTGGIYPIQIM

SEQ ID NO: 57223 - protein, 28 aa, unidentified
  source 1..28: note = methanogen bacteria
YRMPQTLTNGGLGLEYVLAIPGLNPLLP

SEQ ID NO: 57224 - protein, 27 aa, unidentified
  source 1..27: note = methanogen bacteria
RLPSTFGRAGMGVEYVLAIPGLNPLLP

SEQ ID NO: 57225 - protein, 61 aa, unidentified
  source 1..61: note = methanogen bacteria
MFDSNKIDGYGDSSQCYGGAIRAKNDVTVDNSTFKDNYAHDYGGAIYGNNIYVNNNQGSNG

SEQ ID NO: 57226 - protein, 12 aa, unidentified
  source 1..12: note = methanogen bacteria
SKIVADLNTDVS

SEQ ID NO: 57227 - protein, 57 aa, unidentified
  source 1..57: note = methanogen bacteria
VMGGISTAIDTYAPNHSGDEQFHQDVYDYFQKLGNIDDVKAQDNIIVNTADIIIQNA

SEQ ID NO: 57228 - protein, 12 aa, unidentified
  source 1..12: note = methanogen bacteria
SQVVVDLNTDVS

SEQ ID NO: 57229 - protein, 57 aa, unidentified
  source 1..57: note = methanogen bacteria
IGGISNAVDVYAPQYSADEQFHQDVYDAFQKVNNIDEIKAQDNTVVVNVVDIIIHSA

SEQ ID NO: 57230 - protein, 12 aa, unidentified
  source 1..12: note = methanogen bacteria
MDATFITDIFQH

SEQ ID NO: 57231 - protein, 27 aa, unidentified
  source 1..27: note = methanogen bacteria
TADNGLAGFNEFGQAGDAFFGLFVYNK

SEQ ID NO: 57232 - protein, 20 aa, unidentified
  source 1..20: note = methanogen bacteria
SLGTLKLAALGPALAASGYT

SEQ ID NO: 57233 - protein, 10 aa, unidentified
  source 1..10: note = methanogen bacteria
VAAQATVSIE

SEQ ID NO: 57234 - protein, 13 aa, unidentified
  source 1..13: note = methanogen bacteria
GAIYDGGAGAVSG

SEQ ID NO: 57235 - protein, 16 aa, unidentified
  source 1..16: note = methanogen bacteria
DLILGPCADAAAVLFA

SEQ ID NO: 57236 - protein, 14 aa, unidentified
  source 1..14: note = methanogen bacteria
DQCPAGDDNAVRFG

SEQ ID NO: 57237 - protein, 31 aa, unidentified
  source 1..31: note = methanogen bacteria
CADGLNIFSTIVQAFLGIAGQVISSMADPWN

SEQ ID NO: 57238 - protein, 19 aa, unidentified
  source 1..19: note = methanogen bacteria
KDGFASIGMNVGSFGIFLQ

SEQ ID NO: 57239 - protein, 33 aa, unidentified
  source 1..33: note = methanogen bacteria
TILDGSDQALITLMKTSPLSFNGIFEALSQSDA

SEQ ID NO: 57240 - protein, 20 aa, unidentified
  source 1..20: note = methanogen bacteria
GEVGTADYLVGVLKEAIPMF

SEQ ID NO: 57241 - protein, 11 aa, unidentified
  source 1..11: note = methanogen bacteria
AWAISPDMGFA

SEQ ID NO: 57242 - protein, 12 aa, unidentified
  source 1..12: note = methanogen bacteria
SQVVADLNTTVS

SEQ ID NO: 57243 - protein, 56 aa, unidentified
  source 1..56: note = methanogen bacteria
MGGIANGVDTYAPEYSGNEQVHQDIFDYFEKVGNVDDIKSENSTVINIADTVIQDS

SEQ ID NO: 57244 - protein, 12 aa, unidentified
  source 1..12: note = methanogen bacteria
SQVVVDLHTDVS

SEQ ID NO: 57245 - protein, 56 aa, unidentified
  source 1..56: note = methanogen bacteria
VMGGISNAVDVHAPDHSGDEQFQLEVANYFQKVGNIDNLKDNSTVVDIVNIIVQST

SEQ ID NO: 57246 - protein, 12 aa, unidentified
  source 1..12: note = methanogen bacteria
SQVVADLNTDVS

SEQ ID NO: 57247 - protein, 55 aa, unidentified
  source 1..55: note = methanogen bacteria
MGGVSHAVDVYAPQHSGDEHFQQVVIEQFQKVGNINDIKSDQTVVQIVDTVIQET

SEQ ID NO: 57248 - protein, 58 aa, unidentified
  source 1..58: note = methanogen bacteria
LDHLILHVDEYFTLTLINFDVGEMISLTAADVHPPLYYLILKFAMTVFGFFGVSAHSI

SEQ ID NO: 57249 - protein, 32 aa, unidentified
  source 1..32: note = methanogen bacteria
FAQLGAVHHGFWVPRVTVKSLIEDFGYYAYCN

SEQ ID NO: 57250 - protein, 11 aa, unidentified
  source 1..11: note = methanogen bacteria
FLDCLGAEFIG

SEQ ID NO: 57251 - protein, 13 aa, unidentified
  source 1..13: note = methanogen bacteria
PLIFEKAEMPWSI

SEQ ID NO: 57252 - protein, 13 aa, unidentified
  source 1..13: note = methanogen bacteria
INWWLGPQYILED

SEQ ID NO: 57253 - protein, 61 aa, unidentified
  source 1..61: note = methanogen bacteria
FYANPGFLNSWRGNKWVLENFNSTRQMDYIMHHKKEAIFELTKMPLYLPDALSFSMNYVDF

SEQ ID NO: 57254 - protein, 21 aa, unidentified
  source 1..21: note = methanogen bacteria
MISWCEVGKLYHYYPGVQIRY

SEQ ID NO: 57255 - protein, 12 aa, unidentified
  source 1..12: note = methanogen bacteria
AQVVADLHTDVS

SEQ ID NO: 57256 - protein, 56 aa, unidentified
  source 1..56: note = methanogen bacteria
VMGGVSHAVDIYAPDYSGNETFQLEVLNHFQKVGNLNDVKADSTIVNVVDIILQDS

SEQ ID NO: 57257 - protein, 13 aa, unidentified
  source 1..13: note = methanogen bacteria
SQVVVDLKTDVST

SEQ ID NO: 57258 - protein, 56 aa, unidentified
  source 1..56: note = methanogen bacteria
VMGAIGTAVDTYAPEHSGDAQFHQDVANYLQKVGNVDNLQDNSTFVDAVNLIIQNT

SEQ ID NO: 57259 - protein, 20 aa, unidentified
  source 1..20: note = methanogen bacteria
DFFTQMLCQAPELQPLVNQY

SEQ ID NO: 57260 - protein, 17 aa, unidentified
  source 1..17: note = methanogen bacteria
SLLIFNVNDPNTIPVVL

SEQ ID NO: 57261 - protein, 12 aa, unidentified
  source 1..12: note = methanogen bacteria
SQVVADLNTDVS

SEQ ID NO: 57262 - protein, 57 aa, unidentified
  source 1..57: note = methanogen bacteria
IMGGISNAVDHYAPEHSGDEQFHQDIYDYFQKVGNMNEIRLQGSTVVTIVDEIFQDA

SEQ ID NO: 57263 - protein, 13 aa, unidentified
  source 1..13: note = methanogen bacteria
ISHIVVDLNTDVS

SEQ ID NO: 57264 - protein, 54 aa, unidentified
  source 1..54: note = methanogen bacteria
VMGGISTAVDTYAPDYSGDEQFHQEVYDHFQKLDTIDGHDSVVVNTADIIIQNA

SEQ ID NO: 57265 - protein, 58 aa, unidentified
  source 1..58: note = methanogen bacteria
LDHLILHVDEYFTLTLINFDVGEMISLTAADVHPPLYYLILKFAMTVFGFFGISPHSI

SEQ ID NO: 57266 - protein, 31 aa, unidentified
  source 1..31: note = methanogen bacteria
AQLNAIHQGFWVPRITIQSLIEDFGYYAYCN

SEQ ID NO: 57267 - protein, 29 aa, unidentified
  source 1..29: note = methanogen bacteria
NVNDLSKFDVNYGWINAAGLKMSIILTVD

SEQ ID NO: 57268 - protein, 29 aa, unidentified
  source 1..29: note = methanogen bacteria
FESAYLAGSGTIDFSFAFVKQWMPGADSV

SEQ ID NO: 57269 - protein, 10 aa, unidentified
  source 1..10: note = methanogen bacteria
IEALPGALGS

SEQ ID NO: 57270 - protein, 13 aa, unidentified
  source 1..13: note = methanogen bacteria
MGGVASGDANLVK

SEQ ID NO: 57271 - protein, 15 aa, unidentified
  source 1..15: note = methanogen bacteria
DLAISYISGYAGGLI

SEQ ID NO: 57272 - protein, 12 aa, unidentified
  source 1..12: note = methanogen bacteria
MDASFITNIFQY

SEQ ID NO: 57273 - protein, 26 aa, unidentified
  source 1..26: note = methanogen bacteria
TADNGLGSYNMLGQPGDAFYGLFVYN

SEQ ID NO: 57274 - protein, 22 aa, unidentified
  source 1..22: note = methanogen bacteria
GSLGTLELGALGSALATKGYSW

SEQ ID NO: 57275 - protein, 12 aa, unidentified
  source 1..12: note = methanogen bacteria
FVAAQATVSIEP

SEQ ID NO: 57276 - protein, 12 aa, unidentified
  source 1..12: note = methanogen bacteria
GAIFGTEGAVSG

SEQ ID NO: 57277 - protein, 16 aa, unidentified
  source 1..16: note = methanogen bacteria
DLILNPCADAAAALFA

SEQ ID NO: 57278 - protein, 12 aa, unidentified
  source 1..12: note = methanogen bacteria
SQVVADLNTDVS

SEQ ID NO: 57279 - protein, 56 aa, unidentified
  source 1..56: note = methanogen bacteria
VMGGVSHAVDVYAPDHSGDDAFKLQVLEQFQKVGNINDVKSDHTVVQIVDMIIQDA

SEQ ID NO: 57280 - protein, 12 aa, unidentified
  source 1..12: note = methanogen bacteria
SQVVADLNTDVS

SEQ ID NO: 57281 - protein, 56 aa, unidentified
  source 1..56: note = methanogen bacteria
IGGIANGVDTYAPEYSGNEQVHQDIFDYFQKVGNVDDIKSENSTVINIADTVIQDS

SEQ ID NO: 57282 - protein, 74 aa, unidentified
  source 1..74: note = methanogen bacteria
SAQSADSKNVNKVASNSTKEDLKIVKSSNFVKKGNTYYMKLTTSNGKAVANKKLSVSFNGKTYAKTTDSNGKFG

SEQ ID NO: 57283 - protein, 40 aa, unidentified
  source 1..40: note = methanogen bacteria
NAFSKSYKLYTVNMLSINIANAKLLTNGYLKIYITASKKF

SEQ ID NO: 57284 - protein, 52 aa, unidentified
  source 1..52: note = methanogen bacteria
TVKISIGGKVFKKKANVEGFVVIKPQLSAKKYTVTVDINKYSKTKKVKCIKG

SEQ ID NO: 57285 - protein, 72 aa, unidentified
  source 1..72: note = methanogen bacteria
YGAYNVGGNSRIPTGWVSLSKFKAKFAGVGLVVKLNYKLSKKVKTEIKNYYKSMGPNWARQNTNERIPNVPI

SEQ ID NO: 57286 - protein, 22 aa, unidentified
  source 1..22: note = methanogen bacteria
PQLFYPSMSATYKLPSWNPAWS

SEQ ID NO: 57287 - protein, 16 aa, unidentified
  source 1..16: note = methanogen bacteria
MWESSGDSFYILPSIS

SEQ ID NO: 57288 - protein, 13 aa, unidentified
  source 1..13: note = methanogen bacteria
SQVVVDLNTDVST

SEQ ID NO: 57289 - protein, 55 aa, unidentified
  source 1..55: note = methanogen bacteria
VMGGISTAVDTYAPDHSGDEQFHQDVYNYFQKVGNIDNITQDSFLVDVTNIIIQE

SEQ ID NO: 57290 - protein, 12 aa, unidentified
  source 1..12: note = methanogen bacteria
AQVVADLNTDVS

SEQ ID NO: 57291 - protein, 56 aa, unidentified
  source 1..56: note = methanogen bacteria
VFGGISNAVDIYAPEYSGNETFHIDVFNHFEKMGNMNEINADSTVMAIANVIIQDA

SEQ ID NO: 57292 - protein, 12 aa, unidentified
  source 1..12: note = methanogen bacteria
SQVVVDLNTDVS

SEQ ID NO: 57293 - protein, 55 aa, unidentified
  source 1..55: note = methanogen bacteria
VMGGISTAVDTYAPDHSGDEQFQLEVANYFQKVATIDDLKQDSTLVDVANIIIQN

SEQ ID NO: 57294 - protein, 57 aa, unidentified
  source 1..57: note = methanogen bacteria
QKPFLHIDEWFTRGLLNISFKEMVSVTAGDVHPPLYYAIALVPVYLLEWLHIPYDMI

SEQ ID NO: 57295 - protein, 35 aa, unidentified
  source 1..35: note = methanogen bacteria
YRQMKTVKGSYWIEGITIEKFLEFFATTFVTENQD

SEQ ID NO: 57296 - protein, 12 aa, unidentified
  source 1..12: note = methanogen bacteria
AQVVADLHTDVS

SEQ ID NO: 57297 - protein, 56 aa, unidentified
  source 1..56: note = methanogen bacteria
VIGGVSHAVDIYAPDQSGNETFQLEVLDHFQKVGNLNDAKADHTVVEIVDTILQDA

SEQ ID NO: 57298 - protein, 98 aa, unidentified
  source 1..98: note = methanogen bacteria
TPSFIVCDEIEHYARSDLTAQGILFPEYINNEGYNVSSNFNHLLAIRGSSILDPAIFNDNVAENHSLFNGCFPQNPFYPYLLSGLGILLAKLLNLSDI

SEQ ID NO: 57299 - protein, 65 aa, unidentified
  source 1..65: note = methanogen bacteria
NASKLLKYTIRNDHFIEHHVNPGNQFVNMINHPHHTFVLFSSIFAFTQDMIWDLFRFSYEKWTCA

SEQ ID NO: 57300 - protein, 21 aa, unidentified
  source 1..21: note = methanogen bacteria
LSWAPFAYPRLDMNIGVYSRY

SEQ ID NO: 57301 - protein, 13 aa, unidentified
  source 1..13: note = methanogen bacteria
AQVVADLHTDVST

SEQ ID NO: 57302 - protein, 56 aa, unidentified
  source 1..56: note = methanogen bacteria
VFGGISHAVDVYAPEYSGNETFELEAYESFQTVSSINDIQSDPTVVGIVDIILQDT

SEQ ID NO: 57303 - protein, 16 aa, unidentified
  source 1..16: note = methanogen bacteria
SFDLMFELNAFPSTLY

SEQ ID NO: 57304 - protein, 12 aa, unidentified
  source 1..12: note = methanogen bacteria
IALFTYQMSVLE

SEQ ID NO: 57305 - protein, 58 aa, unidentified
  source 1..58: note = methanogen bacteria
NVYMKDKIGATIDYWNSVLPVSLPSDTGLANLLVTPLRDVIMMIPGLDLDIANIFADG

SEQ ID NO: 57306 - protein, 12 aa, unidentified
  source 1..12: note = methanogen bacteria
SRIVVDLNTDVS

SEQ ID NO: 57307 - protein, 54 aa, unidentified
  source 1..54: note = methanogen bacteria
VMGGISTAVDTYAPDYSGDEQFHQEVYDYFQKLDTIEGQDSIVVDTADIIIQNA

SEQ ID NO: 57308 - protein, 62 aa, unidentified
  source 1..62: note = methanogen bacteria
YASFAFQNSFRHNYWILKHINNKSQLSYVLSHKFASLIAVLQMFTKYLGSDLYFKSSNLFVN

SEQ ID NO: 57309 - protein, 20 aa, unidentified
  source 1..20: note = methanogen bacteria
LFTWTPVGQLNKIIGVQSRY

SEQ ID NO: 57310 - protein, 12 aa, unidentified
  source 1..12: note = methanogen bacteria
SRIVVDLNTDVS

SEQ ID NO: 57311 - protein, 54 aa, unidentified
  source 1..54: note = methanogen bacteria
VMGGISTAVDTYAPDYSGNEQFHQEIYDYFQKLDTIEGQDSVVVNTADIIIQNA

SEQ ID NO: 57312 - protein, 13 aa, unidentified
  source 1..13: note = methanogen bacteria
SQVVADLNTDVSA

SEQ ID NO: 57313 - protein, 56 aa, unidentified
  source 1..56: note = methanogen bacteria
VIGGISTAVDTYAPEHSGDEEYQQGVYDYFQKIGSINEVKSQDAFIVNIVDAIIQN

SEQ ID NO: 57314 - protein, 12 aa, unidentified
  source 1..12: note = methanogen bacteria
SKIVVDLNTDVS

SEQ ID NO: 57315 - protein, 54 aa, unidentified
  source 1..54: note = methanogen bacteria
VMGGISTAVDTYAPAYSGDEQFHQEVYDYFQKLDTINGQDSIIVNTADIIIQNA

SEQ ID NO: 57316 - protein, 13 aa, unidentified
  source 1..13: note = methanogen bacteria
ISHIVVDLNTDVS

SEQ ID NO: 57317 - protein, 54 aa, unidentified
  source 1..54: note = methanogen bacteria
VMGGISTAVDTYAPSHSGDDQFHLEVYNHFQKLDNLDGQDKIIVNTANIIIQNA

SEQ ID NO: 57318 - protein, 65 aa, unidentified
  source 1..65: note = methanogen bacteria
TSVLANSWRGDHFISNHVNAKEQMNLLLSNPIFSIERFSNVFNEFPVIIDRFFYFSNAGGAYSSR

SEQ ID NO: 57319 - protein, 19 aa, unidentified
  source 1..19: note = methanogen bacteria
LTWASVGAETVMNGVFSRY

SEQ ID NO: 57320 - protein, 44 aa, unidentified
  source 1..44: note = methanogen bacteria
YNPGILTTESFNQLHQIATGEFNNGQPFFHTFIEMIFLKIFGSP

SEQ ID NO: 57321 - protein, 95 aa, unidentified
  source 1..95: note = methanogen bacteria
VIYDVDDMQKSGTHDLKTKAMVFGITRNANWDGQVYYIFEDGAHLKEARDKYFKDINQTPKESYESLTSPKLGQHNYNAVNSYALAFKNNTVLDT

SEQ ID NO: 57322 - protein, 12 aa, unidentified
  source 1..12: note = methanogen bacteria
SQVVVDLNTDVS

SEQ ID NO: 57323 - protein, 56 aa, unidentified
  source 1..56: note = methanogen bacteria
VMGGISTAVDVYAPDHSGDEQFQQDVLDYFQKVGTIDDLKGNSTVVDIVNIIVQNT

SEQ ID NO: 57324 - protein, 12 aa, unidentified
  source 1..12: note = methanogen bacteria
SQLVADLNTEVS

SEQ ID NO: 57325 - protein, 50 aa, unidentified
  source 1..50: note = methanogen bacteria
VFGGISNAVDIYAPEYSDNETFQIEVFDSFEKMDTVNGVEVDILNTIIQE

SEQ ID NO: 57326 - protein, 13 aa, unidentified
  source 1..13: note = methanogen bacteria
VRLGQLTRLEDFK

SEQ ID NO: 57327 - protein, 30 aa, unidentified
  source 1..30: note = methanogen bacteria
AFIRFIPEGYVNDVEVYIFRDSNIPILRDL

SEQ ID NO: 57328 - protein, 22 aa, unidentified
  source 1..22: note = methanogen bacteria
EICNDFDRYAYITFGNILNAPI

SEQ ID NO: 57329 - protein, 10 aa, unidentified
  source 1..10: note = methanogen bacteria
PATGISNLFS

SEQ ID NO: 57330 - protein, 12 aa, unidentified
  source 1..12: note = methanogen bacteria
SRIVVDLNTDVS

SEQ ID NO: 57331 - protein, 54 aa, unidentified
  source 1..54: note = methanogen bacteria
VMGGISTAIDTYAPDYSGDEQFHQEVYDHFQKLDTIDGQDSIVVNTADIVIQNA

SEQ ID NO: 57332 - protein, 58 aa, unidentified
  source 1..58: note = methanogen bacteria
INHLILHIDEYFTLTLINFNVSDIISITAADVHPPLYYLILKFAMNVFGFFGISSHNL

SEQ ID NO: 57333 - protein, 31 aa, unidentified
  source 1..31: note = methanogen bacteria
NQLNAVHKAFWVPRLRIETLIQAVGYYAYLN

SEQ ID NO: 57334 - protein, 30 aa, unidentified
  source 1..30: note = methanogen bacteria
LFKGWGSNPDAFFMNNIVVGSNNLNNVTGF

SEQ ID NO: 57335 - protein, 24 aa, unidentified
  source 1..24: note = methanogen bacteria
TLPGMFIGLTNLLNPDWALLWDIN

SEQ ID NO: 57336 - protein, 36 aa, unidentified
  source 1..36: note = methanogen bacteria
GFMSFTSGLPINEIATSGTGLLFIVFPEIFNVMGDM

SEQ ID NO: 57337 - protein, 12 aa, unidentified
  source 1..12: note = methanogen bacteria
SQVVADLNTDVS

SEQ ID NO: 57338 - protein, 56 aa, unidentified
  source 1..56: note = methanogen bacteria
VFGGISHAVDIYAPEYSGNETFHQEAYDYFQKVGSINEIKENATIEDIVNIIIQDT

SEQ ID NO: 57339 - protein, 12 aa, unidentified
  source 1..12: note = methanogen bacteria
SQLVIDLKTDVS

SEQ ID NO: 57340 - protein, 56 aa, unidentified
  source 1..56: note = methanogen bacteria
VFGGISHAVDIYAPEYSGNETFQLEAFNQFEQMENINNTETDITVRGILDTIIQDT

SEQ ID NO: 57341 - protein, 12 aa, unidentified
  source 1..12: note = methanogen bacteria
SQVVADLNTDVS

SEQ ID NO: 57342 - protein, 56 aa, unidentified
  source 1..56: note = methanogen bacteria
VFGGISHAVDIYAPQYSGNETYHQEVYDYFQTVGNINDFKDDGTVEDIVNIIIQDT

SEQ ID NO: 57343 - protein, 42 aa, unidentified
  source 1..42: note = methanogen bacteria
TIITVNVTLNNANITAKDIELTVGENSTIEYTTTPADLNVSF

SEQ ID NO: 57344 - protein, 30 aa, unidentified
  source 1..30: note = methanogen bacteria
PDDSGIVKVSDNGTVTALKEGTANITITVG

SEQ ID NO: 57345 - protein, 86 aa, unidentified
  source 1..86: note = methanogen bacteria
TINSTVITVTVSKIPTKIIIQNKTLDMKVGDEANPVVSLMPSNAGNLSFVVSDESIILVNGYGIVTAVGQGNATVTISFRGNDKYL

SEQ ID NO: 57346 - protein, 14 aa, unidentified
  source 1..14: note = methanogen bacteria
MDATVITDIFGEYS

SEQ ID NO: 57347 - protein, 19 aa, unidentified
  source 1..19: note = methanogen bacteria
GDNYPSEYATYANLFTYND

SEQ ID NO: 57348 - protein, 21 aa, unidentified
  source 1..21: note = methanogen bacteria
GALGTLSISEMGAALGDAGYS

SEQ ID NO: 57349 - protein, 13 aa, unidentified
  source 1..13: note = methanogen bacteria
VFANAAAGLEIEE

SEQ ID NO: 57350 - protein, 14 aa, unidentified
  source 1..14: note = methanogen bacteria
GAIYAEDGSGVITQ

SEQ ID NO: 57351 - protein, 15 aa, unidentified
  source 1..15: note = methanogen bacteria
IILDLCSDAASALLG

SEQ ID NO: 57352 - protein, 28 aa, unidentified
  source 1..28: note = methanogen bacteria
VYDLPDLLNSLSANLTENHPSLSTDANT

SEQ ID NO: 57353 - protein, 11 aa, unidentified
  source 1..11: note = methanogen bacteria
LIAGNTESSNP

SEQ ID NO: 57354 - protein, 16 aa, unidentified
  source 1..16: note = methanogen bacteria
CGYNLFYAIGDVLCDP

SEQ ID NO: 57355 - protein, 14 aa, unidentified
  source 1..14: note = methanogen bacteria
FGPEDALGYDDDSM

SEQ ID NO: 57356 - protein, 97 aa, unidentified
  source 1..97: note = methanogen bacteria
TPVLIVCDESEHFARSDLTAQGILNPEYVNGGYGVTHLCNQLFSHSGETFFDNNLINEKIDSSISFYDSCFAHNPFYAYLISAFGIFLAKLLDLNVI

SEQ ID NO: 57357 - protein, 64 aa, unidentified
  source 1..64: note = methanogen bacteria
SALLLNSARRDYFIGNNVNSSLQLNNLLDYPFKTMLLVSSIFSFTIGMITDLFRFSHAYWSYES

SEQ ID NO: 57358 - protein, 21 aa, unidentified
  source 1..21: note = methanogen bacteria
LSWAPVGYGKLDMIIGVYSRY

SEQ ID NO: 57359 - protein, 43 aa, unidentified
  source 1..43: note = methanogen bacteria
DGTDSSYLQDDSLVVDCDGSSLDGGDSLVVDCDDSSLNDEDSA

SEQ ID NO: 57360 - protein, 98 aa, unidentified
  source 1..98: note = methanogen bacteria
TPAFVVCDEIEHYARSDLTSQGILFPEYINNEGYSVSSGFNYLFPFVGETIHNFDFFSPNANNNHSLFNGCFPQNPFYPYLLSGLGIFITSLLNLNPA

SEQ ID NO: 57361 - protein, 66 aa, unidentified
  source 1..66: note = methanogen bacteria
NASKMLKNTIRNEHFIANKVNPKNQLNNMINHPMDTLILFSSIFSLTLDLCVDLFRFSYQMWTYTS

SEQ ID NO: 57362 - protein, 21 aa, unidentified
  source 1..21: note = methanogen bacteria
LSWAPFAYPKLDMIVGVYARY

SEQ ID NO: 57363 - protein, 57 aa, unidentified
  source 1..57: note = methanogen bacteria
AHSLIHIDEYFTLEIVKLPLSDAWKIIIGDYHPPLYYILLKIVKKLSLMTSLNLDLI

SEQ ID NO: 57364 - protein, 34 aa, unidentified
  source 1..34: note = methanogen bacteria
FNQTGKVSDEYWIATPDINEIFHYFYISGTNSGD

SEQ ID NO: 57365 - protein, 47 aa, unidentified
  source 1..47: note = methanogen bacteria
GNHYFGGYQPLINGGLTAQLPAYANAIISGSVLEYFHPAITYAFGPG

SEQ ID NO: 57366 - protein, 25 aa, unidentified
  source 1..25: note = methanogen bacteria
LTGNVNISDMVMMIHSGAVDPTNPV

SEQ ID NO: 57367 - protein, 13 aa, unidentified
  source 1..13: note = methanogen bacteria
KYMLCQAAMTAGI

SEQ ID NO: 57368 - protein, 18 aa, unidentified
  source 1..18: note = methanogen bacteria
PDIVTSRLGVLALSALTL

SEQ ID NO: 57369 - protein, 64 aa, unidentified
  source 1..64: note = methanogen bacteria
TNELLHSWRGLHMSEKHVNSTEQLSYLFSNPIVFGDKIIRLFTELPIIIDRYFFFPDAGRVQFS

SEQ ID NO: 57370 - protein, 19 aa, unidentified
  source 1..19: note = methanogen bacteria
LTWSSVGAAKITAGVYGRY

SEQ ID NO: 57371 - protein, 12 aa, unidentified
  source 1..12: note = methanogen bacteria
SQVVADLNTNVS

SEQ ID NO: 57372 - protein, 56 aa, unidentified
  source 1..56: note = methanogen bacteria
VIGGIIDAIDTYAPEHIDDVQLYDDIYEDFQKVGNVDDLKAYNSTVVHAADLIVQN

SEQ ID NO: 57373 - protein, 13 aa, unidentified
  source 1..13: note = methanogen bacteria
SQVVADLHTDVST

SEQ ID NO: 57374 - protein, 56 aa, unidentified
  source 1..56: note = methanogen bacteria
VFGGISHAVDIYAPQYSGNETFQLEVYNHFQEVGNINDVNVDNNVVNIVNTVVQDA

SEQ ID NO: 57375 - protein, 11 aa, unidentified
  source 1..11: note = methanogen bacteria
FKLANGQWISG

SEQ ID NO: 57376 - protein, 31 aa, unidentified
  source 1..31: note = methanogen bacteria
GLKTKSIGDIASVSAGLPAFHIPMVPITLES

SEQ ID NO: 57377 - protein, 45 aa, unidentified
  source 1..45: note = methanogen bacteria
MSSFAFKLLSLVSIYDLYIVNASNAITITPPNNKMYSAAPCPEFS

SEQ ID NO: 57378 - protein, 18 aa, unidentified
  source 1..18: note = methanogen bacteria
EYGAIYDDRKSISDIRSD

SEQ ID NO: 57379 - protein, 58 aa, unidentified
  source 1..58: note = methanogen bacteria
INHLILHVDEYFTLSIINFNVNDLISVTAADVHPPLYYLILKFAMNVFGLFGISSHNL

SEQ ID NO: 57380 - protein, 32 aa, unidentified
  source 1..32: note = methanogen bacteria
FNQLDAVHHGFWVPRVKFDSLVQSLGYYAYCK

SEQ ID NO: 57381 - protein, 66 aa, unidentified
  source 1..66: note = methanogen bacteria
YATSVLANSWRGEYFINSHVNSTQQANNLINHPKFAFERFLNVFTQFPIIADRFFYFSNDVRQYSS

SEQ ID NO: 57382 - protein, 20 aa, unidentified
  source 1..20: note = methanogen bacteria
YLTWAKVGAESVVNGVFARY

SEQ ID NO: 57383 - protein, 65 aa, unidentified
  source 1..65: note = methanogen bacteria
ATSVLTNSWRGEFFANKHVNATEQLNYLVSNPGFAVERFINLFTQFPTVVERFFYFSNDVRDYSS

SEQ ID NO: 57384 - protein, 20 aa, unidentified
  source 1..20: note = methanogen bacteria
YLTWASVGAKSVMNGVFSRY

SEQ ID NO: 57385 - protein, 17 aa, unidentified
  source 1..17: note = methanogen bacteria
SEVVKISLQKYNVTLTP

SEQ ID NO: 57386 - protein, 12 aa, unidentified
  source 1..12: note = methanogen bacteria
QFGKSYANLPVF

SEQ ID NO: 57387 - protein, 22 aa, unidentified
  source 1..22: note = methanogen bacteria
DGRNFKDFTDNEGYAYINADVN

SEQ ID NO: 57388 - protein, 23 aa, unidentified
  source 1..23: note = methanogen bacteria
KKCQVTIIKKTSITIYNDKLLKG

SEQ ID NO: 57389 - protein, 39 aa, unidentified
  source 1..39: note = methanogen bacteria
KQTLTIKIGAKTFVEKTNSEGIVIIKPNMTKKTYTVDVT

SEQ ID NO: 57390 - protein, 35 aa, unidentified
  source 1..35: note = methanogen bacteria
KSKSVEGIYGYAINPLYKDVPSKGGVPDIDYMTED

SEQ ID NO: 57391 - protein, 14 aa, unidentified
  source 1..14: note = methanogen bacteria
GDMTYTVLKSQYKE

SEQ ID NO: 57392 - protein, 99 aa, unidentified
  source 1..99: note = methanogen bacteria
KWNVLERELFKSLILKNQHDYWPSEITASLKGKAYTYSEVRDVQNTDYTCGPTSCSMCSQVLRNYCCESYLARLSGSEPDVGTSVPAMDSALEKNNFKC

SEQ ID NO: 57393 - protein, 22 aa, unidentified
  source 1..22: note = methanogen bacteria
SYDYALSELKKGGCAVVFHAKN

SEQ ID NO: 57394 - protein, 13 aa, unidentified
  source 1..13: note = methanogen bacteria
VAILDISKDGNYV

SEQ ID NO: 57395 - protein, 26 aa, unidentified
  source 1..26: note = methanogen bacteria
YDNIETGWQSTNYMKTRYYKNYDDGL

SEQ ID NO: 57396 - protein, 30 aa, unidentified
  source 1..30: note = methanogen bacteria
PSTKNEINQFYHNMGSWTRQNTNENILVDY

SEQ ID NO: 57397 - protein, 57 aa, unidentified
  source 1..57: note = methanogen bacteria
PLNQLIIHIDEYFSLTLVTLPIHDILTVTTWDVHPPLYYLLGKMAAKFASMTGMDLL

SEQ ID NO: 57398 - protein, 32 aa, unidentified
  source 1..32: note = methanogen bacteria
IIQVTQVHQSYWIPEVSAPTLMNSFGYYAYTS

SEQ ID NO: 57399 - protein, 18 aa, unidentified
  source 1..18: note = methanogen bacteria
QSEYFDEYIGFMADIDPT

SEQ ID NO: 57400 - protein, 25 aa, unidentified
  source 1..25: note = methanogen bacteria
IDGSFSLDTVSRDWTSPDWEWDANG

SEQ ID NO: 57401 - protein, 29 aa, unidentified
  source 1..29: note = methanogen bacteria
FGTLGYDGVDVAGYATLAPLCVSDFGDEG

SEQ ID NO: 57402 - protein, 12 aa, unidentified
  source 1..12: note = methanogen bacteria
FYIFFPNFRTIL

SEQ ID NO: 57403 - protein, 15 aa, unidentified
  source 1..15: note = methanogen bacteria
VIEIDLTDNIQVVLL

SEQ ID NO: 57404 - protein, 10 aa, unidentified
  source 1..10: note = methanogen bacteria
GQSMDDIFNV

SEQ ID NO: 57405 - protein, 42 aa, unidentified
  source 1..42: note = methanogen bacteria
ISVLPIHPYAFSMASGIGSASMNAASLASISHVHPSMATEFE

SEQ ID NO: 57406 - protein, 16 aa, unidentified
  source 1..16: note = methanogen bacteria
GVPTSSFVMHYVSQIN

SEQ ID NO: 57407 - protein, 10 aa, unidentified
  source 1..10: note = methanogen bacteria
LAILLNLVVL

SEQ ID NO: 57408 - protein, 12 aa, unidentified
  source 1..12: note = methanogen bacteria
SKVVVDLHTDVS

SEQ ID NO: 57409 - protein, 55 aa, unidentified
  source 1..55: note = methanogen bacteria
VMGGLSTAIDMYAPDHANDPQFFDDAANYLQAAGTENITQDSTVMNAVDVIIQEA

SEQ ID NO: 57410 - protein, 12 aa, unidentified
  source 1..12: note = methanogen bacteria
MSTLSAKNFEKP

SEQ ID NO: 57411 - protein, 68 aa, unidentified
  source 1..68: note = methanogen bacteria
SYSEPALMHSWRSKLNYMDPALQAKYLINNPFEILRFLRLIFTYTLGITVNGLFNFFSAGSANHYSDQ

SEQ ID NO: 57412 - protein, 17 aa, unidentified
  source 1..17: note = methanogen bacteria
LTWADVGSTNIGVSARY

SEQ ID NO: 57413 - protein, 29 aa, unidentified
  source 1..29: note = methanogen bacteria
ITFSWGTDAALYFVNNVGGSSNLSNASFL

SEQ ID NO: 57414 - protein, 23 aa, unidentified
  source 1..23: note = methanogen bacteria
TLPGADIGINTLLNPTWSKLYDV

SEQ ID NO: 57415 - protein, 35 aa, unidentified
  source 1..35: note = methanogen bacteria
GFMSYTTGTPMVQLITEGTGLIFIVFPMIFNIMGA

SEQ ID NO: 57416 - protein, 30 aa, unidentified
  source 1..30: note = methanogen bacteria
TPVGELDKFNFTADWISAGGLKMSFIFVVD

SEQ ID NO: 57417 - protein, 27 aa, unidentified
  source 1..27: note = methanogen bacteria
QAASINGVADFSFEAVKTALNGSPDSL

SEQ ID NO: 57418 - protein, 18 aa, unidentified
  source 1..18: note = methanogen bacteria
DLALSYLADYSAYVGGLI

SEQ ID NO: 57419 - protein, 56 aa, unidentified
  source 1..56: note = methanogen bacteria
NRSIWSDEALTLDIINQSYFGMIQLTASDVHPPLYYIIIKTTLIIINFFKIPFDEI

SEQ ID NO: 57420 - protein, 39 aa, unidentified
  source 1..39: note = methanogen bacteria
LRIKNNYWIQAINFKSIISYFYFITSPSSYYDLIYLTSF

SEQ ID NO: 57421 - protein, 57 aa, unidentified
  source 1..57: note = methanogen bacteria
LNHYIMHIDEYFSMSLTTLPLWDIINVTSWDVHPPLYYILGKIAVKIGGAIGMEPIH

SEQ ID NO: 57422 - protein, 31 aa, unidentified
  source 1..31: note = methanogen bacteria
RQLTQVHGSYWIPQVNSNVFINALGYYAYAN

SEQ ID NO: 57423 - protein, 57 aa, unidentified
  source 1..57: note = methanogen bacteria
PLNNYIMHVDEYFTISVLTLPIGDILNITSWDVHPPLYYFLGKIAINVADTFGLDYL

SEQ ID NO: 57424 - protein, 33 aa, unidentified
  source 1..33: note = methanogen bacteria
MRQMTQVKAAYWIRQLNPETFIKTLSYFAYTND

SEQ ID NO: 57425 - protein, 98 aa, unidentified
  source 1..98: note = methanogen bacteria
SPIFVVPDEVEHFARSDLTSEGVLFPQYTPNQGYYMNNYFWDMLYNAGLTIFNANLTHWDIWDAQAFFESAFSQNLFYGYIAQAIGILLAKILDLSVI

SEQ ID NO: 57426 - protein, 65 aa, unidentified
  source 1..65: note = methanogen bacteria
KYASPELLKSGRALIMAQNNVSVSGQINYMLNNPLNATLTLIKSVGGSIYTIFIYELKLYSEKYV

SEQ ID NO: 57427 - protein, 18 aa, unidentified
  source 1..18: note = methanogen bacteria
LSWSPVGGNEILGIQARY

SEQ ID NO: 57428 - protein, 21 aa, unidentified
  source 1..21: note = methanogen bacteria
ISWYVGQHNYDPDYQAWKTYA

SEQ ID NO: 57429 - protein, 30 aa, unidentified
  source 1..30: note = methanogen bacteria
NLLYAEILSDTASVAPNNQMPASAYLYTVL

SEQ ID NO: 57430 - protein, 13 aa, unidentified
  source 1..13: note = methanogen bacteria
YIDNLGLATYGII

SEQ ID NO: 57431 - protein, 15 aa, unidentified
  source 1..15: note = methanogen bacteria
PYIFGVAGNSYGEVQ

SEQ ID NO: 57432 - protein, 10 aa, unidentified
  source 1..10: note = methanogen bacteria
NIYIGAEAEG

SEQ ID NO: 57433 - protein, 16 aa, unidentified
  source 1..16: note = methanogen bacteria
QVIEAWVGADYVYLAD

SEQ ID NO: 57434 - protein, 12 aa, unidentified
  source 1..12: note = methanogen bacteria
MLSPSDSFERVE

SEQ ID NO: 57435 - protein, 32 aa, unidentified
  source 1..32: note = methanogen bacteria
SGDLGFIDSIFQGMSGITTTGFSLIPAEETSF

SEQ ID NO: 57436 - protein, 33 aa, unidentified
  source 1..33: note = methanogen bacteria
GLDLFDAICYCFCGIATGGFSVDANHVEHFSQP

SEQ ID NO: 57437 - protein, 39 aa, unidentified
  source 1..39: note = methanogen bacteria
FGGYYHQDIVKIFSHSLFQVVSVMSSTGFTTTDITPWPS

SEQ ID NO: 57438 - protein, 31 aa, unidentified
  source 1..31: note = methanogen bacteria
CNNLEIAYSLAASSLGNTGVGPDYFSITMPL

SEQ ID NO: 57439 - protein, 56 aa, unidentified
  source 1..56: note = methanogen bacteria
YALNGLIQSPRYNFNLNTHYQLLFIKSHFTSYLITITKPSLYYSLIFIKVGFFRYV

SEQ ID NO: 57440 - protein, 19 aa, unidentified
  source 1..19: note = methanogen bacteria
YLTNNKIGANNVSGVQFRY

SEQ ID NO: 57441 - protein, 58 aa, unidentified
  source 1..58: note = methanogen bacteria
PLNHYIMHIDEYFTMSITTLPLGDIVNVASWYVHPPLYYILGKVAVTIGATIGMDSLH

SEQ ID NO: 57442 - protein, 32 aa, unidentified
  source 1..32: note = methanogen bacteria
NQMSQAHAISGIAQINLNTFINALGYIAYAND

SEQ ID NO: 57443 - protein, 57 aa, unidentified
  source 1..57: note = methanogen bacteria
LNNYIMHVDEYFTISVLSLPVQDIIHITSWDVHPPLYYLLGKIAVNIGTAIGMDELH

SEQ ID NO: 57444 - protein, 32 aa, unidentified
  source 1..32: note = methanogen bacteria
MVQMTKVKAAYWIRQLNLETFPKTLSYFAYTN

SEQ ID NO: 57445 - protein, 30 aa, unidentified
  source 1..30: note = methanogen bacteria
FFKGWGSDPNTFLSHNILHSTNSLGGIFHF

SEQ ID NO: 57446 - protein, 24 aa, unidentified
  source 1..24: note = methanogen bacteria
TLPGANIGLNELFKPNFEALWNFD

SEQ ID NO: 57447 - protein, 34 aa, unidentified
  source 1..34: note = methanogen bacteria
GYMSLQSGIPIEKIVSEGASLIFVTYPQIFNILG

SEQ ID NO: 57448 - protein, 59 aa, unidentified
  source 1..59: note = methanogen bacteria
VKYPFLSVDEGYTRGLLNLNLADMVSVTANDVHPPLYYFINYLFAQLVNAIGLKMSVMH

SEQ ID NO: 57449 - protein, 34 aa, unidentified
  source 1..34: note = methanogen bacteria
YHQLHYVQGNFFITKVTFNNLVYYLSYGFTISGN

SEQ ID NO: 57450 - protein, 58 aa, unidentified
  source 1..58: note = methanogen bacteria
TKPFLHIDERFTMGLLDISFKEMVHLTAIDVHPPLYYAFNLIPVYILKGIFHLQFDKI

SEQ ID NO: 57451 - protein, 34 aa, unidentified
  source 1..34: note = methanogen bacteria
YKQMKSVHGSYWIEKITIVEFVEFFSSIFTVNTE

SEQ ID NO: 57452 - protein, 58 aa, unidentified
  source 1..58: note = methanogen bacteria
LNQLILHVDEYFTLTIVNFNVGDLINTTAADVHPPLYYLILKFAMYLFGLFGISSHNL

SEQ ID NO: 57453 - protein, 31 aa, unidentified
  source 1..31: note = methanogen bacteria
NQLTAIHKGFWVPRVRFDTLIQSVGYYAHCS

SEQ ID NO: 57454 - protein, 32 aa, unidentified
  source 1..32: note = methanogen bacteria
LNFPLINGLFENMSTWTGTGLTMFTNVEVLPK

SEQ ID NO: 57455 - protein, 33 aa, unidentified
  source 1..33: note = methanogen bacteria
GLPPFDAINLCFAMICTGGMSIKNANIGFYNNE

SEQ ID NO: 57456 - protein, 33 aa, unidentified
  source 1..33: note = methanogen bacteria
CKILPTDALFMVISATTSTGANCISSNQMMGWN

SEQ ID NO: 57457 - protein, 32 aa, unidentified
  source 1..32: note = methanogen bacteria
NGYNGLDSLFDVISACGNSGLSSGVTGPDMPI

SEQ ID NO: 57458 - protein, 31 aa, unidentified
  source 1..31: note = methanogen bacteria
SFTKAWGSNPDLFFSNNVLQASDSISGMFTI

SEQ ID NO: 57459 - protein, 25 aa, unidentified
  source 1..25: note = methanogen bacteria
LTLPGASIGYTQIFTPDWSALTNLN

SEQ ID NO: 57460 - protein, 35 aa, unidentified
  source 1..35: note = methanogen bacteria
FMALSTGIPFNELVTEGTGLAFVVFPQVFNIMGPW

SEQ ID NO: 57461 - protein, 29 aa, unidentified
  source 1..29: note = methanogen bacteria
EADDLGQFDFSANWIDSAGLTMNLMFTVD

SEQ ID NO: 57462 - protein, 29 aa, unidentified
  source 1..29: note = methanogen bacteria
FEAASINGEGINFSFEYISQACGNFGETF

SEQ ID NO: 57463 - protein, 10 aa, unidentified
  source 1..10: note = methanogen bacteria
IENLQLGAEN

SEQ ID NO: 57464 - protein, 15 aa, unidentified
  source 1..15: note = methanogen bacteria
LALDMIGYFAYPAWM

SEQ ID NO: 57465 - protein, 20 aa, unidentified
  source 1..20: note = methanogen bacteria
DGVINLLHPTAGALPYVHAY

SEQ ID NO: 57466 - protein, 20 aa, unidentified
  source 1..20: note = methanogen bacteria
DGLLMFFKLHNMPNDGLVEN

SEQ ID NO: 57467 - protein, 10 aa, unidentified
  source 1..10: note = methanogen bacteria
LILGPNYLSV

SEQ ID NO: 57468 - protein, 20 aa, unidentified
  source 1..20: note = methanogen bacteria
DSIAQILCNSVQLRPLVNQY

SEQ ID NO: 57469 - protein, 20 aa, unidentified
  source 1..20: note = methanogen bacteria
ETILTIFILNSPAEIPMVVE

SEQ ID NO: 57470 - protein, 13 aa, unidentified
  source 1..13: note = methanogen bacteria
NSGYTIGFETNSV

SEQ ID NO: 57471 - protein, 17 aa, unidentified
  source 1..17: note = methanogen bacteria
TLDLLISNLNSSNDIAI

SEQ ID NO: 57472 - protein, 10 aa, unidentified
  source 1..10: note = methanogen bacteria
LAGNEIQLGT

SEQ ID NO: 57473 - protein, 31 aa, unidentified
  source 1..31: note = methanogen bacteria
SFTKAWGSNPDLYFTNSVLHSTDSISGFFTI

SEQ ID NO: 57474 - protein, 25 aa, unidentified
  source 1..25: note = methanogen bacteria
LTLPGASAGYTQIFTPDWSALGNLD

SEQ ID NO: 57475 - protein, 36 aa, unidentified
  source 1..36: note = methanogen bacteria
GFMTVTSGIPFNELVTSGTGLAFVVFPQVFNTMGPA

SEQ ID NO: 57476 - protein, 57 aa, unidentified
  source 1..57: note = methanogen bacteria
QKPFLDIDEWYTMGILNTSFKNIIHLTAIDVHPPVYYLIARIPIYILNHLNVAYDMI

SEQ ID NO: 57477 - protein, 34 aa, unidentified
  source 1..34: note = methanogen bacteria
YKQMTGVNQGYWIESITFNDFLGFFSSVFTFNPD

SEQ ID NO: 57478 - protein, 57 aa, unidentified
  source 1..57: note = methanogen bacteria
QKPFLHIDEWFTRGLLNVSFKEMVSVTAGDVHPPLYYAIALVPVYLLEWLHIPYDMI

SEQ ID NO: 57479 - protein, 35 aa, unidentified; identical to SEQ ID NO: 57295
  source 1..35: note = methanogen bacteria

SEQ ID NO: 57480 - protein, 100 aa, unidentified
  source 1..100: note = methanogen bacteria
SPINSVSDEGEHFMRSEITSHGDFFPKYITQNNKNGFMSIDSLAHMPMDKTFFETTSWNTQPINTTPQLVNSAFEQNPFYVYIAQAMGIDLAKLLNLNQI

SEQ ID NO: 57481 - protein, 63 aa, unidentified
  source 1..63: note = methanogen bacteria
YAVGSISHSWRASLFAQKNVNANGQIKYLLSDAHGLITFLQIENQIPVQIDALSKLYTNYNNF

SEQ ID NO: 57482 - protein, 21 aa, unidentified
  source 1..21: note = methanogen bacteria
YLTWAPVGAKDLIESGVVPRY

SEQ ID NO: 57483 - protein, 86 aa, unidentified
  source 1..86: note = methanogen bacteria
LTMPYIFEKGILQPGEFLIIPNDPNYLRKGNVSDLNVSDYVFASRYIAALDGYGVARTNEFTYNFVTDEFNEKYVDIYVANDDGSL

SEQ ID NO: 57484 - protein, 79 aa, unidentified
  source 1..79: note = methanogen bacteria
QYVITAINLVTGEKTANNITVIPRIIENNDIIKYYRNGTQYTVKILGGDGNPVGAGENVTFNINGVFYTRQTDENGIAK

SEQ ID NO: 57485 - protein, 72 aa, unidentified
  source 1..72: note = methanogen bacteria
IVTAECKGCVVSNNIKVLSVLNANDITMKYGDGTQFKVNLVDGRGNPYADQSVAFNINGMFYNRMTDSNGQA

SEQ ID NO: 57486 - protein, 21 aa, unidentified
  source 1..21: note = methanogen bacteria
EYIITSSYYGSSIANKITIES

SEQ ID NO: 57487 - protein, 58 aa, unidentified
  source 1..58: note = methanogen bacteria
ISNVLIHIDEWWTVALIKTSFLECLKITIKDVHPPLYYMIVQTVCYVLNALHIQYDLI

SEQ ID NO: 57488 - protein, 36 aa, unidentified
  source 1..36: note = methanogen bacteria
KQVSKTMEYQKNFPHLYDLFSYVSWFAVNSTTDFSY

SEQ ID NO: 57489 - protein, 30 aa, unidentified
  source 1..30: note = methanogen bacteria
FFKGWGSNPNAFLTNNVLHASSNLGDVTTF

SEQ ID NO: 57490 - protein, 25 aa, unidentified
  source 1..25: note = methanogen bacteria
LTLPGANLGLNELFKPDWSLLSNFS

SEQ ID NO: 57491 - protein, 36 aa, unidentified
  source 1..36: note = methanogen bacteria
LGYMSLQSGVPVSEIVSQGTGLIFVVYPTVFNILGP

SEQ ID NO: 57492 - protein, 57 aa, unidentified
  source 1..57: note = methanogen bacteria
QKPFLHIDEWFTRGLMYISFKEMVHVTAIDVHPPLYYAIALIPVYLFNWLHIPYDMT

SEQ ID NO: 57493 - protein, 33 aa, unidentified
  source 1..33: note = methanogen bacteria
RQMKSVKGDYWIEPISLNDFLQFFASIFTDTGE

SEQ ID NO: 57494 - protein, 30 aa, unidentified
  source 1..30: note = methanogen bacteria
FVKGWGSDPNTFLSNTVLQSSDSINGIFNF

SEQ ID NO: 57495 - protein, 24 aa, unidentified
  source 1..24: note = methanogen bacteria
TLPGASIGLAELFAPDLSLLWHFD

SEQ ID NO: 57496 - protein, 36 aa, unidentified
  source 1..36: note = methanogen bacteria
LGYMSLQSGTPVADLVSGGTTLIFVVYPQIFNVLGV

SEQ ID NO: 57497 - protein, 22 aa, unidentified
  source 1..22: note = methanogen bacteria
LSPNYTIPEFTTPGLYLTDKPL

SEQ ID NO: 57498 - protein, 31 aa, unidentified
  source 1..31: note = methanogen bacteria
AFFHSQPQLAASFAGTPSIGVYEMSSKLLNP

SEQ ID NO: 57499 - protein, 44 aa, unidentified
  source 1..44: note = methanogen bacteria
YGNHFFGGYSPLFLNSSWATNLPSTITNSILFNFHPAITYVFGG

SEQ ID NO: 57500 - protein, 24 aa, unidentified
  source 1..24: note = methanogen bacteria
LTGNVNISDIIIAIKTGVVTPDNP

SEQ ID NO: 57501 - protein, 15 aa, unidentified
  source 1..15: note = methanogen bacteria
NIVTNAFSQFAMGLL

SEQ ID NO: 57502 - protein, 100 aa, unidentified
  source 1..100: note = methanogen bacteria
SPLNSVSDEGEHFMRSEITSHGDFFPQYITNGSRTGFMSIESLAHMPMDKTFFKTTDWNNQPINKTPRVVNSAFEQNPFYAYLAQAIGIDIAKLLNLNQI

SEQ ID NO: 57503 - protein, 62 aa, unidentified
  source 1..62: note = methanogen bacteria
YAVDCISHSWRANLFREKHVNSTEQLHYILSSPQSIVTFLHIGNQIPVQIDALSKLYTNYDN

SEQ ID NO: 57504 - protein, 21 aa, unidentified
  source 1..21: note = methanogen bacteria
FLTWAPVGSKNLVDAGVVPRY

SEQ ID NO: 57505 - protein, 30 aa, unidentified
  source 1..30: note = methanogen bacteria
FFKGWGTDPNTFLNVNLLQATDSLSGVSNF

SEQ ID NO: 57506 - protein, 23 aa, unidentified
  source 1..23: note = methanogen bacteria
TLPGAYIGLAELFDPDWSLLWHF

SEQ ID NO: 57507 - protein, 36 aa, unidentified
  source 1..36: note = methanogen bacteria
LGYMSLQSGAPISEIVSQGTTLIFVAYPQVFNILGT

SEQ ID NO: 57508 - protein, 51 aa, unidentified
  source 1..51: note = methanogen bacteria
THTFINVDEYWTYSLVNLPFMQGMIVAVHDVHPPLYYMILYLLTPLGLQNL

SEQ ID NO: 57509 - protein, 35 aa, unidentified
  source 1..35: note = methanogen bacteria
HQMQTQAGEPREGFELANAIHYLTAFAIKGQNFEF

SEQ ID NO: 57510 - protein, 43 aa, unidentified
  source 1..43: note = methanogen bacteria
SYGLHYFGGHQPLALSNIANLSTYITNSSLYNLHPAITYAYTP

SEQ ID NO: 57511 - protein, 25 aa, unidentified
  source 1..25: note = methanogen bacteria
ICGSVNITDISLAISNLVHTPEASG

SEQ ID NO: 57512 - protein, 15 aa, unidentified
  source 1..15: note = methanogen bacteria
ELVTNPISQSIGGLL

SEQ ID NO: 57513 - protein, 16 aa, unidentified
  source 1..16: note = methanogen bacteria
SLYQPSNIIYDNYVFT

SEQ ID NO: 57514 - protein, 15 aa, unidentified
  source 1..15: note = methanogen bacteria
LDLSVDRKFLSFELP

SEQ ID NO: 57515 - protein, 12 aa, unidentified
  source 1..12: note = methanogen bacteria
LDMNALPLDKIS

SEQ ID NO: 57516 - protein, 21 aa, unidentified
  source 1..21: note = methanogen bacteria
FPAERKMLSDLSFSFNIPTNG

SEQ ID NO: 57517 - protein, 10 aa, unidentified
  source 1..10: note = methanogen bacteria
FGGVAGKYGM

SEQ ID NO: 57518 - protein, 41 aa, unidentified
  source 1..41: note = methanogen bacteria
VLGGVTEANTALTNMAHLYPPDALAEGGTGWTSFPKFGSPF

SEQ ID NO: 57519 - protein, 34 aa, unidentified; identical to SEQ ID NO: 56387
  source 1..34: note = methanogen bacteria

SEQ ID NO: 57520 - protein, 30 aa, unidentified
  source 1..30: note = methanogen bacteria
FKKTATGLGICKMLFGVDMLINTMPWYTID

SEQ ID NO: 57521 - protein, 31 aa, unidentified
  source 1..31: note = methanogen bacteria
SFFKGWGANPNAFLANNVLHASSNLSDITTF

SEQ ID NO: 57522 - protein, 25 aa, unidentified
  source 1..25: note = methanogen bacteria
LMLPGASIGLNELFNPDWSLLGHFD

SEQ ID NO: 57523 - protein, 36 aa, unidentified
  source 1..36: note = methanogen bacteria
LGYMSLQSATPVSQIVTQGTGLIFVVYPTVFNILGD

SEQ ID NO: 57524 - protein, 56 aa, unidentified
  source 1..56: note = methanogen bacteria
QKPFLHIDEWFTQGLMYISFKEMVHLTAIDVHPPLYYAIALIPVYLLNWLHIPYDM

SEQ ID NO: 57525 - protein, 34 aa, unidentified
  source 1..34: note = methanogen bacteria
YRQIKDVKGDYWIQSITVDKFVQFFASIFTDVND

SEQ ID NO: 57526 - protein, 31 aa, unidentified
  source 1..31: note = methanogen bacteria
SFTKAWGPNTDLYFTQNVLHATDSINGIFTI

SEQ ID NO: 57527 - protein, 24 aa, unidentified
  source 1..24: note = methanogen bacteria
TLPGAYIGYSQLFHPDWSALTNLD

SEQ ID NO: 57528 - protein, 35 aa, unidentified
  source 1..35: note = methanogen bacteria
FMSMSSGIAFNELVTEGTGLAFVVFPQAFNIMKTG

SEQ ID NO: 57529 - protein, 56 aa, unidentified
  source 1..56: note = methanogen bacteria
FYVTPGLLNSFRHGLVSNRAIPIEQLKYILSHKKDAFVHLLQLPLTISGNLTFAWN

SEQ ID NO: 57530 - protein, 19 aa, unidentified
  source 1..19: note = methanogen bacteria
LFSWTPAGQLDIIGVQPRY

SEQ ID NO: 57531 - protein, 30 aa, unidentified
  source 1..30: note = methanogen bacteria
FFQGWGANPDVFFTTSVLNASDSLSGIFTI

SEQ ID NO: 57532 - protein, 25 aa, unidentified
  source 1..25: note = methanogen bacteria
VTLPGASIGYTQIFTPDWSALTDLN

SEQ ID NO: 57533 - protein, 36 aa, unidentified
  source 1..36: note = methanogen bacteria
GFMTFTSGIPFNQLVTEGTGLAFVVFPNVFNVMHPW

SEQ ID NO: 57534 - protein, 31 aa, unidentified
  source 1..31: note = methanogen bacteria
SFTKGWGADPNAFFSTTLLQSSESVSSLLNF

SEQ ID NO: 57535 - protein, 24 aa, unidentified
  source 1..24: note = methanogen bacteria
LTLPGASIGLAELFNPDWSLLFNF

SEQ ID NO: 57536 - protein, 37 aa, unidentified
  source 1..37: note = methanogen bacteria
LGYMSMQSGTAVADLVTQGTGLVFVVYPTVFNVLGDW

SEQ ID NO: 57537 - protein, 30 aa, unidentified
  source 1..30: note = methanogen bacteria
FFKGWGADPNTFLNVNLLQSTNSLSGVFNF

SEQ ID NO: 57538 - protein, 24 aa, unidentified
  source 1..24: note = methanogen bacteria
TLPGANIGLAELFHPDWSLLGHFD

SEQ ID NO: 57539 - protein, 36 aa, unidentified
  source 1..36: note = methanogen bacteria
LGYMSLQSGTPVSEIISQGTTLIFVAYPQVFNILGT

SEQ ID NO: 57540 - protein, 32 aa, unidentified
  source 1..32: note = methanogen bacteria
LSFVQGWGANPDVFFTVDVLHASDSLSGIFTI

SEQ ID NO: 57541 - protein, 24 aa, unidentified
  source 1..24: note = methanogen bacteria
LTLPGASIGYKQIFTPNWSALTDL

SEQ ID NO: 57542 - protein, 35 aa, unidentified
  source 1..35: note = methanogen bacteria
FMTFTSGIPFNELVTEGTGLAFVVFPNVFNLMQPW

SEQ ID NO: 57543 - protein, 30 aa, unidentified
  source 1..30: note = methanogen bacteria
FFKGWGADPNTFFNTSLLQVSSSPTGLLTF

SEQ ID NO: 57544 - protein, 23 aa, unidentified
  source 1..23: note = methanogen bacteria
MLPGASIGLSELYQPDWSSLFDF

SEQ ID NO: 57545 - protein, 37 aa, unidentified
  source 1..37: note = methanogen bacteria
LGYMSLQTGTAVEQLVTQGAGLIFIVYPTAFNAIGTW

SEQ ID NO: 57546 - protein, 43 aa, unidentified
  source 1..43: note = methanogen bacteria
YPGIGTYDTFNQIHQIASNHFTNWHPFFHTFIEMLCLKVYPST

SEQ ID NO: 57547 - protein, 30 aa, unidentified
  source 1..30: note = methanogen bacteria
FFKGWGADPNVYFTTTLLQSSDSYMGLLQF

SEQ ID NO: 57548 - protein, 25 aa, unidentified
  source 1..25: note = methanogen bacteria
LTLPGASIGLAELFNPDWSLLGNFE

SEQ ID NO: 57549 - protein, 36 aa, unidentified
  source 1..36: note = methanogen bacteria
LGYMSLQSGTPVAELVTQGTGLVFIVYPTVFNVLGQ

SEQ ID NO: 57550 - protein, 19 aa, unidentified
  source 1..19: note = methanogen bacteria
ILNPIIRPVTHLFLMGSSK

SEQ ID NO: 57551 - protein, 63 aa, unidentified
  source 1..63: note = methanogen bacteria
FRQQMGIKLNTVFCSMSNTMSSTSILHTHLLKSIIGALISQIMGPFVQSNINTGVGLYSYVPS

SEQ ID NO: 57552 - protein, 80 aa, unidentified
  source 1..80: note = methanogen bacteria
RMSVGVAGAETDHYTVDVINPTDNIDLGDINLKVIEQKNYTDSNKTTYYIDHNYNEMELINDLKHPLKITLKLIDIVLYY

SEQ ID NO: 57553 - protein, 10 aa, unidentified
  source 1..10: note = methanogen bacteria
RTLTQNGIDS

SEQ ID NO: 57554 - protein, 11 aa, unidentified
  source 1..11: note = methanogen bacteria
ESMNTVPLSLA

SEQ ID NO: 57555 - protein, 10 aa, unidentified
  source 1..10: note = methanogen bacteria
LDVLNFSIPL

SEQ ID NO: 57556 - protein, 16 aa, unidentified
  source 1..16: note = methanogen bacteria
FYHPSTITYDTPVFNT

SEQ ID NO: 57557 - protein, 16 aa, unidentified
  source 1..16: note = methanogen bacteria
FITDYVERDVSFYSIP

SEQ ID NO: 57558 - protein, 11 aa, unidentified
  source 1..11: note = methanogen bacteria
FIDTGAIDEIN

SEQ ID NO: 57559 - protein, 17 aa, unidentified
  source 1..17: note = methanogen bacteria
FPIDVEVKFIHNVPVNG

SEQ ID NO: 57560 - protein, 65 aa, unidentified
  source 1..65: note = methanogen bacteria
ATSVMNNSWRGHYSIVNNVNPQKQVNYLLSHPAFFLERIGNLFSEFSIMVERMFCFSNGDGKYQS

SEQ ID NO: 57561 - protein, 19 aa, unidentified
  source 1..19: note = methanogen bacteria
LTWASVGEKTLISGVYGRY

SEQ ID NO: 57562 - protein, 30 aa, unidentified
  source 1..30: note = methanogen bacteria
FFKGWGTDPNTYLNVNLLQATNSLSGLSNF

SEQ ID NO: 57563 - protein, 23 aa, unidentified
  source 1..23: note = methanogen bacteria
TLPGAYIGLAELFNPNWSLLWNF

SEQ ID NO: 57564 - protein, 36 aa, unidentified
  source 1..36: note = methanogen bacteria
LGYMSLQSGIPVSEIVSQGTTLIFVAYPQVFNILGT

SEQ ID NO: 57565 - protein, 31 aa, unidentified
  source 1..31: note = methanogen bacteria
SFTKGWGANPDTFFATTLLQSSDSMSGLAHF

SEQ ID NO: 57566 - protein, 25 aa, unidentified
  source 1..25: note = methanogen bacteria
LTLPGASIGLAELFNPDWSLLTHFE

SEQ ID NO: 57567 - protein, 37 aa, unidentified
  source 1..37: note = methanogen bacteria
LGYMSLQSGTAVADLVTQGTGLVFVVYPTVFNVLGQW

SEQ ID NO: 57568 - protein, 30 aa, unidentified
  source 1..30: note = methanogen bacteria
FFKGWGANPDAFFATTLLQSSESYLGLLNF

SEQ ID NO: 57569 - protein, 24 aa, unidentified
  source 1..24: note = methanogen bacteria
TLPGASIGLAELFNPDWSLLGHFE

SEQ ID NO: 57570 - protein, 36 aa, unidentified
  source 1..36: note = methanogen bacteria
LGYMSLQSGTAVSELVTQGTGLVFVVYPTVFNVLGQ

SEQ ID NO: 57571 - protein, 31 aa, unidentified
  source 1..31: note = methanogen bacteria
SFFKGWGADPNTYFTTTLLQASSSYTGLLNF

SEQ ID NO: 57572 - protein, 25 aa, unidentified
  source 1..25: note = methanogen bacteria
LTLPGASVGLAELFHPDWSLLGNFE

SEQ ID NO: 57573 - protein, 37 aa, unidentified
  source 1..37: note = methanogen bacteria
LGYMSMQSGTAVADLVTQGTGLVFIVYPTVFNVLGQW

SEQ ID NO: 57574 - protein, 44 aa, unidentified
  source 1..44: note = methanogen bacteria
YNPGVLTASSYSQLHQIVTGQFTNAHPIFHTLFEKACIKIFKSP

SEQ ID NO: 57575 - protein, 77 aa, unidentified
  source 1..77: note = methanogen bacteria
IYDVDNDTSNIKTNDAFEEGINLENAKNQFFSSINDNPSNDIENTASINIKNSNYHMVDSFVNLFRENFIIDGLLNN

SEQ ID NO: 57576 - protein, 14 aa, unidentified
  source 1..14: note = methanogen bacteria
HQNGGIELDSIVFN

SEQ ID NO: 57577 - protein, 15 aa, unidentified
  source 1..15: note = methanogen bacteria
IDSFVQRDFGSFVIP

SEQ ID NO: 57578 - protein, 11 aa, unidentified
  source 1..11: note = methanogen bacteria
YIDIGTLDKVN

SEQ ID NO: 57579 - protein, 16 aa, unidentified
  source 1..16: note = methanogen bacteria
FPENPPIFIYNIPFNG

SEQ ID NO: 57580 - protein, 30 aa, unidentified
  source 1..30: note = methanogen bacteria
FFKSWGANPGFYFEHTLMQSSDSFMGILNF

SEQ ID NO: 57581 - protein, 23 aa, unidentified
  source 1..23: note = methanogen bacteria
TLPGASIGLSELYNPDWSLLFNF

SEQ ID NO: 57582 - protein, 36 aa, unidentified
  source 1..36: note = methanogen bacteria
LGYMSLQTSTPVPNLIDQGTGLIFVTYPTILNILGQ

SEQ ID NO: 57583 - protein, 31 aa, unidentified
  source 1..31: note = methanogen bacteria
SFTKGWGANPDTFFATTLLQSSDSISGLLHF

SEQ ID NO: 57584 - protein, 25 aa, unidentified
  source 1..25: note = methanogen bacteria
LTLPGASIGLAELFNPDWSLLSHFE

SEQ ID NO: 57585 - protein, 37 aa, unidentified
  source 1..37: note = methanogen bacteria
LGYMSMQSGTAVSELVTQGTGLVFVAYPTVFNVLGQW

SEQ ID NO: 57586 - protein, 30 aa, unidentified
  source 1..30: note = methanogen bacteria
FFKGWGADPNTYFATTLLQSSESVSGITSF

SEQ ID NO: 57587 - protein, 24 aa, unidentified
  source 1..24: note = methanogen bacteria
TLPGAMIGLNELFSPDWSLLLDFN

SEQ ID NO: 57588 - protein, 37 aa, unidentified
  source 1..37: note = methanogen bacteria
LGYMSLQSGTAVADLVTQGTGLVFIAYPTVLNVLGQY

SEQ ID NO: 57589 - protein, 33 aa, unidentified
  source 1..33: note = methanogen bacteria
TIDISFLDAFFENLSAWTGSGLTLISDVEALPM

SEQ ID NO: 57590 - protein, 33 aa, unidentified
  source 1..33: note = methanogen bacteria
GLSIFDSINLTFTTISTGGMSIKNANVGFYQNN

SEQ ID NO: 57591 - protein, 34 aa, unidentified
  source 1..34: note = methanogen bacteria
ANIAPMNVIFHVVSAITTTGANIVPSSELASIAP

SEQ ID NO: 57592 - protein, 32 aa, unidentified
  source 1..32: note = methanogen bacteria
FTNDPFNALFDTASTIGNVGLSTGVINEGLNP

SEQ ID NO: 57593 - protein, 30 aa, unidentified
  source 1..30: note = methanogen bacteria
FFKGWGADPNTFLNVNLLQATDSLSGVFNF

SEQ ID NO: 57594 - protein, 23 aa, unidentified
  source 1..23: note = methanogen bacteria
TLPGALIGLTVLFNPNWSLLWHF

SEQ ID NO: 57595 - protein, 35 aa, unidentified
  source 1..35: note = methanogen bacteria
GYMSLQSGTPVSEIVSQGTTLIFVAYPQVFNILGT

SEQ ID NO: 57596 - protein, 31 aa, unidentified
  source 1..31: note = methanogen bacteria
SFTKGWGADPNTFFTTTLLQSSGNYLHLTHF

SEQ ID NO: 57597 - protein, 25 aa, unidentified
  source 1..25: note = methanogen bacteria
LTLPGASIGLAELFNPDWAVLSDFG

SEQ ID NO: 57598 - protein, 37 aa, unidentified
  source 1..37: note = methanogen bacteria
LGYMSMQSGTAVADLVTQGTGLVFIVYPTVFNVLGDW

SEQ ID NO: 57599 - protein, 56 aa, unidentified
  source 1..56: note = methanogen bacteria
LNHYIMHVDEYFTLSVLTLPIGDVINITSWDVHPPLYYILGKIAVDIAAAIGMDSL

SEQ ID NO: 57600 - protein, 32 aa, unidentified
  source 1..32: note = methanogen bacteria
IRQMTQVHAAYWIRQVNPDLLIKALGYIAYSD

SEQ ID NO: 57601 - protein, 15 aa, unidentified
  source 1..15: note = methanogen bacteria
LYDPNLPVRDTIVFN

SEQ ID NO: 57602 - protein, 15 aa, unidentified
  source 1..15: note = methanogen bacteria
INDYVQRDLGFFTVP

SEQ ID NO: 57603 - protein, 10 aa, unidentified
  source 1..10: note = methanogen bacteria
IDIGSVDKIG

SEQ ID NO: 57604 - protein, 17 aa, unidentified
  source 1..17: note = methanogen bacteria
FPTEESSSFIFSMPING

SEQ ID NO: 57605 - protein, 30 aa, unidentified
  source 1..30: note = methanogen bacteria
FFKGWGADPSTFFTASLIQDSENYMGLFHF

SEQ ID NO: 57606 - protein, 24 aa, unidentified
  source 1..24: note = methanogen bacteria
LTLPGASIGLSELFNPNWTLLWDF

SEQ ID NO: 57607 - protein, 35 aa, unidentified
  source 1..35: note = methanogen bacteria
GYMSLQSGTPVAELVTQGTGLVFNVYPIVFNVLGQ

SEQ ID NO: 57608 - protein, 31 aa, unidentified
  source 1..31: note = methanogen bacteria
SFTKGWGANPDAFFATTLLQSSESISGLFHF

SEQ ID NO: 57609 - protein, 25 aa, unidentified
  source 1..25: note = methanogen bacteria
LTLPGASIGLAELFNPDWSLLGHFE

SEQ ID NO: 57610 - protein, 37 aa, unidentified; identical to SEQ ID NO: 57567
  source 1..37: note = methanogen bacteria

SEQ ID NO: 57611 - protein, 31 aa, unidentified
  source 1..31: note = methanogen bacteria
SLTKAWGANPDLFFTVNVLHASDSLSGIFTI

SEQ ID NO: 57612 - protein, 25 aa, unidentified
  source 1..25: note = methanogen bacteria
LTLPGASIGYTQIFTPDWSALTNLN

SEQ ID NO: 57613 - protein, 36 aa, unidentified
  source 1..36: note = methanogen bacteria
GFMTLTSGIPFNELVTEGTGLAFVVFPKVFNVMGPW

SEQ ID NO: 57614 - protein, 11 aa, unidentified
  source 1..11: note = methanogen bacteria
IHVLHFSIPLS

SEQ ID NO: 57615 - protein, 15 aa, unidentified
  source 1..15: note = methanogen bacteria
LYAPSSVQLTTITFN

SEQ ID NO: 57616 - protein, 18 aa, unidentified
  source 1..18: note = methanogen bacteria
ILFEENYVLRDYGFLVLP

SEQ ID NO: 57617 - protein, 13 aa, unidentified
  source 1..13: note = methanogen bacteria
SYQIDIGATDKVN

SEQ ID NO: 57618 - protein, 19 aa, unidentified
  source 1..19: note = methanogen bacteria
FPGPESTVNYIGHMPINGL

SEQ ID NO: 57619 - protein, 14 aa, unidentified
  source 1..14: note = methanogen bacteria
ITSCQYNLAHDRLK

SEQ ID NO: 57620 - protein, 56 aa, unidentified
  source 1..56: note = methanogen bacteria
LNHYIMHVDEYFTLSVLTLPIGDVINITSWDVHPPLYYILGKIAVDMAAAIGMDSL

SEQ ID NO: 57621 - protein, 32 aa, unidentified
  source 1..32: note = methanogen bacteria
IRQMTQVHAAYWIRQVNPDMFIKSLGYLAYAH

SEQ ID NO: 57622 - protein, 10 aa, unidentified
  source 1..10: note = methanogen bacteria
LDVLNFSIPL

SEQ ID NO: 57623 - protein, 15 aa, unidentified
  source 1..15: note = methanogen bacteria
LYTPNNPVRDTIIFN

SEQ ID NO: 57624 - protein, 14 aa, unidentified
  source 1..14: note = methanogen bacteria
DMYVQRDLSFFTIP

SEQ ID NO: 57625 - protein, 11 aa, unidentified
  source 1..11: note = methanogen bacteria
YIDIDAVNKIS

SEQ ID NO: 57626 - protein, 17 aa, unidentified
  source 1..17: note = methanogen bacteria
FPEEGSVSFIFGLPING

SEQ ID NO: 57627 - protein, 31 aa, unidentified
  source 1..31: note = methanogen bacteria
SFFKGWGADPNTYFTATLLQSSESMNGMFHF

SEQ ID NO: 57628 - protein, 25 aa, unidentified
  source 1..25: note = methanogen bacteria
LTLPGASIGLAELFHPDWSLLGKFE

SEQ ID NO: 57629 - protein, 36 aa, unidentified
  source 1..36: note = methanogen bacteria
LGYMSLQSGTAVSDLVTQGTGLVFIVYPTVFNVLGQ
